United States Patent Application Publication US 2015/0052636 A1 - sequence listing, part 30

SEQ ID NO: 105316 - DNA, 923 bp, Mimulus guttatus
  Intron number 2 from transcript mgv1a010790m (locus mgv1a0 10790m.g) derived from phytozome v7.0 (chr-ID scaffold_68; pos 685678 to 686600)
ttccatcgctacgtaagttttcgatgttttgtaaaatcatagttatctctgtttgaatgtgtgtgtgtgtgtgtgtgtgtgtgtgtgtgtgtgtgtgtggatataattataatgtatgtatgtatgaatgttggaacagtcttttgctgcatgttttaatgtatgtatacggatgagctgttcttgttctatggagtttgtaatcttgaatatttagtaattggaaaagcaatgtttgccgaagaatacacatcatgtggtgtcgtcgtggatataggataaggttgatgaggtgtcttaacgtagttggtttgttcattagaatcttgtattctagttcacgagttacgttcttttatctgattgaacgatcacagttaactgtgattgtcatctttatctgaacagaagtatgtaggttttttagcagtcttatgcatggcttgggattaaagtctcgagcaattttccgactctgcccttcttttctgacttcacaacacgatttaagctatgctggggacacatttctcgaattggttcatgaaaattctttgaagctttctctcctcgacttcctattcattattttccagcacctatatagtaatttcaagcatattcccatttgatactgtagtcgtacatttcgttgtattacctgttgtagccactatgccatgtcacttcttgatattgtttctccaaaacttcataaaagcctgcctgttgtttatattaacataatgagaaatacttgactcatgtttgccaaatttacctttctaccctttgagtttatatgactgtcttcccgtttcatcaacaactatgattttggattattctttatcatcattcctttctttcttttttcgtttaaaacaggatatagggggcagactcttaactgtaaacaaagc

SEQ ID NO: 105317 - DNA, 768 bp, Mimulus guttatus
  Intron number 2 from transcript mgv1a017486m (locus mgv1a0 17486m.g) derived from phytozome v7.0 (chr-ID scaffold_429 ; pos 36735 to 37502 reverse strand)
ctattgcagagctcaataatatttcttcttctcgggtagggtttctctctctctctctctctctctctctctctctctctctctctctctctctctctctctctctctctctctccattttaatcgattcttgttaaaaaaaaaaaaaactaatctttataaaagttatttgtattgttttatgaaattgagtggtaagtaaaatcaaccatgagggaaagtatagttcatgattttgaacttgtaacttgttaaacaatctacatgatacgagcaatttccctgccttgttgttctttaaagtacgataccggtattcgacctcgttttttttccagtaatcgacgaggatccaaagcattttgcgcccttagattagttatcgacactcctgcccttcaattccttagtattattcgattcgagtatgaaagaggtcctgctgcattgagaaaaaatctagagattattagatgaaaattgtatttttcagattatactgtgtgtgtgtgtgtgtttgtgcctctttatatgataagttttgagtgttaaatagttatacatgtgctgttgtacacaaccgataagagggaggtctctacgaaagtgaaactcaaacactcgaactttttattttttttcgaatttcttggaagatgattgtaatataaccggtctgtgatattttcgtatcatagtttaatttaagatgtgatgccgtttaataatgcaggctgtctaccagagaaaagggaacatattttttca

SEQ ID NO: 105318 - DNA, 609 bp, Mimulus guttatus
  Intron number 1 from transcript mgv1a016060m (locus mgv1a0 16060m.g) derived from phytozome v7.0 (chr-ID scaffold_117 ; pos 835606 to 836214)
aaatcgaaggctgattccaggaaagctgacagcaagtaagctatgttaaaatgttttgaaattcatctctgtagatcgagttttagttaatttttttttaaatgctgtgctcagtaacctaattgttgtgattttgcaattagtttaaatctggaatgctcttaatttttttcaaatttgcatttgttgtttcatgtgtttttccgtgaagaatctgattaaaaggatttacagtagattaagcacttatactttttcctcgagttttcgaaccgatttagattcgtatagaatttgacctaagctgtaatttgagttactgagatgaatagtagtccagtttgttttgtcaaatcaatgttaaaattttcgtatttcatatttgttgtcgttcatcgtttttcaaaaaacggagaagaaaaaaagtaactatgcaaatctgttagtcatgactcatgtgcattctgtttttttttttcttttttctatttcatttgtccgtaattcatttttccgattttcgatttacgacaagttcaattttgactaaaatttgtcacgagagggaaatcaggcttgctgtgaagaagacgactaaggaaaagcaat

SEQ ID NO: 105319 - DNA, 447 bp, Mimulus guttatus; identical to SEQ ID NO: 101438
  Intron number 1 from transcript mgv1a002894m (locus mgv1a0 02880m.g) derived from phytozome v7.0 (chr-ID scaffold_349 ; pos 95670 to 96116 reverse strand)

SEQ ID NO: 105320 - DNA, 830 bp, Mimulus guttatus
  Intron number 1 from transcript mgv1a006350m (locus mgv1a0 06350m.g) derived from phytozome v7.0 (chr-ID scaffold_58; pos 397915 to 398744)
tcttcttcgaatctctccatctcattcgaattaaggtattttccaactttttttttctccccgatttatggtgttatcacttttgttttagatcgatttgttttgattgtattttattgattgaatctccgtttactgatatctcgattttgctgataccgtacgatattttttccgattggatttagatcttatgggatatgttgttttctattttgttcttcggttttttgattgagatgaagaagctggcgtatgcgatttgacttttattatgctgtttgttgggattccgcctcttatatgttttttttctttttcgtatgatctagatttggttatgggttttcctgtaggatcttaatacttttactcgaagtggaaattttctagttttggatttgtgtggctgaaaacatgtggggtttgatgatgactggattgctattgtgtactgtttgtagactacatcctggaatttgtgattgtaggttatgtatcttttgaaggttgttctttgccctagaatgactttaatgatttatatttattttgcctctggtttcgtaatttcgattatggaaagatgtagatatttttagttttatatactgcatcaacttaacttatttgttaatcgcaaggcgtacccttgttttttatgatttttgatataattttgctggtggagtacaacctgtgatgcaaattatgcccttaattgatttataatgatgcaatttttcttttcgttgatattcattctatcttattaatgatttgtctcttttccagggccttggctagtatacttgcagtcagcaaaagtg

SEQ ID NO: 105321 - DNA, 621 bp, Mimulus guttatus
  Intron number 2 from transcript mgv1a008984m (locus mgv1a0 08984m.g) derived from phytozome v7.0 (chr-ID scaffold_109 ; pos 594024 to 594644 reverse strand)
ggcttgtgctactgcccccaaaggacccgacccaggtccattttttttgttatccgggttctggcaaataaattttcaacatggtttcctgtttatgctttttttcgtaaatggttgcatctctgttaattgaacaaaagctaacactgtgtgtaagattataatttgttttttgctgttacacttagcttgagtctggattttaattccaatccaggctgtatatcgaattggtttcgatggatttttgttgttttgcactgtgtaaataatgtttgaattctatatgttaagcatgctatgcttctacttatgtgtcaatatgcagtatgggatacgtaagttatgagtgtaaaagtcttgagctttgacggttaaattaattgatgatgtctatggtgaactgtttctttacttgaatattgctagtggctcaaatctcaatgttaatcttgaacctggactctgtgtttttattttgttacttgtataaatatttatgttaaacgagactttgtatcaattctttgagatcactgtggtctgtggttacccttatatttgactatcttctctttttatttttggttgattttagatttggtctccatcgtcgaaaga

SEQ ID NO: 105322 - DNA, 1029 bp, Mimulus guttatus
  Intron number 1 from transcript mgv1a009421m (locus mgv1a0 09383m.g) derived from phytozome v7.0 (chr-ID scaffold_11; pos 2899211 to 2900239)
ttcgttccacctcagttgctcttttttcagaccaggtcagtccctctttctctctcttctttctctctctagtttttttctgacccaatttttcaagattcaatgagggatttatcattttttggattgattgatttaaatttggtaatccaattttgcactctattggatgtttatttataagcttgtggtggattgattaacatggaccttgttaaatatggatggatatatatacatatgtttattattaaataatatatatgtattagttcagttatcaagaaaaaaacactaaaagcatctgatttgtattcttgtggtgttttattacagaatgtaactgcagaatcttttacccatcagatttgctgttatgttggaaaaatgctctgataaaatatcaagatttgttttttcttgtttcttgtaataatgagaagtgagtttagtgatgggtttttttcgggtagaaccgaaacctcttagtgcatataaagttttaaactttactgcatcttggtcgagcgctgtaccactttcgcgttttacagcacactgattatctagtgactaggtcaaaagaaaattgcgatcatctcaaagagataatcaatatggaaatacgaaaagggaaagttacactgatatcgttttctatgttggccttttgatatatagttgacgaatacagcttaactttcgttcccttttattctttgaaatgtgactaatcttatatataaacatctcaccgatttagttacctagaagcaactgagtgggggaattgggttatctgtataacgtatataaccgacttcctattttatctaccttttggacagtcgttcatagggcttaagatattgaccgcggactctgtgattaaatccttttttaattagaacccgatcatagcttcctcgtatatttttcatctttttttaaggcgcttaatatagatatccattacaatcttgtacttcattagatttttcaagaatacaaagatcttgtctcgatctt

SEQ ID NO: 105323 - DNA, 363 bp, Mimulus guttatus
  Intron number 1 from transcript mgv1a026984m (locus mgv1a0 26984m.g) derived from phytozome v7.0 (chr-ID scaffold_4; pos 1059315 to 1059677 reverse strand)
aaccacaacaacccactccccaagttttccataaggtacaacaaaaaaaaaaataaaaaaaaaatcaaaggttgagttttattttcatggttttctctgtcttggttggtcagatccaagcagcatgatgaatccttgtttatgaccatggggtttccttaacctcatcgaaatttccatttattatcctttgttatttattattttcttgatcctttgtgtttattttatttgctgctgaatcctctgccaggagctcttctttgtgtgaaggcctgttgacagcctttgattatcttgaatttcagtttttattggttttcacacactgcacttgcaattttttttgttaatgcagggact

SEQ ID NO: 105324 - DNA, 446 bp, Mimulus guttatus
  Intron number 2 from transcript mgv1a017475m (locus mgv1a0 17475m.g) derived from phytozome v7.0 (chr-ID scaffold_7; pos 1486713 to 1487158 reverse strand)
gagaagtaagtgcgtttcgatttttcgctgttgtgccttttgcactttcaatgtaatgttttatgatatataatgcatagttgtttgtgattcattgttattgttatttatgatcatcattaacccatcgatccgaaagagggaggatttttttcgatttcttgttattactcaaaaaaaaaacacaaaaagctgaattgtagtacaacatttgacatgtcattgatgattaaggattaaaggtctcccagttgatcagatttaggatctaatcacatattttgataattcgaaactgaacttagaaaattatgtgaaatcgttaagttgtttagggaagggtataaactgattatcaaggcttggttttagatcttcagtatctatctttaaagaaactaaagatttagaaactaatgtgtgatgaacttttgtgcaggaatttg

SEQ ID NO: 105325 - DNA, 917 bp, Mimulus guttatus
  Intron number 1 from transcript mgv11b016768m (locus mgv11 b016768m.g) derived from phytozome v7.0 (chr-ID scaffold_1 7; pos 1159088 to 1160004)
ccaaggttttgaggaagtcagtgctgcactaagtacgaaaatttgctactctctactattttaattgcctgtcagagtaatgatagttatttgatgttgaatttgttactaagtccttcaggcaatacttctttaattgcagtccatttttgtgagatcagttggtttttctatacaccctttctccatcagattttgtgtatgtgtgtgtgtttgctgattccgaccattttgataaactactagcctttgattttcacgtagataattagtttgtccactgaaaccgtggttggtagttgatacatgaattactagtatgaatgacttttataaatattttgtcctcccgtgatgaatagagcagaagagtggtggcaataggaagcagattccgttccaattttttcgattttggaacaatatttttcattccgaattccaaatttccgatttttccaatttttttggattggaattgaaatatatttgagattttgatttccggtccgatttcaatttcagatatttcgaaaattccaatttttttctgaacttataatacccatattatgatgtattttgtatttaaatgactaatcatttggaagttttcgatttccgccaattgcgatccgattttggaacaagtttttttgttcaattttccgaaattacgattttttttaatgaaattggatctagttttcacttccggaaaaaatcgggatttctccgaaagtgctaataccgatctgattcgtctgatttccacccctaatagagctacatgtagatttatgttttgagaaaaagcagccgacaaatgtacgttcattttatttcgtcataaatacttaaaacaattatttgaccgcagaatttccaattttcctttttcttttgtagagctccga

SEQ ID NO: 105326 - DNA, 689 bp, Mimulus guttatus
  Intron number 1 from transcript mgv1a008080m (locus mgv1a0 08080m.g) derived from phytozome v7.0 (chr-ID scaffold_126 ; pos 616310 to 616998 reverse strand)
agctaggtcacggcggctttggccctgtctacaaggtaaacctccatatatcatatatatatatatgttcgccaatttgctttcagtaattctattaaataaatagagatgatgatttaaatggaaaattttgtgtgtgtattatgaagccaataatatgttttgaattcagtcctttccaaatatatatatatatgataaattacggtcaaccctctgagataaggttaaattacgaaaaaacgtttgagtaattaattacaaccacccctcaactatgaattttcttacacatttaccgttacagtgtcaaatttagtagaatattcatgcttatgtggaatattctccagtttgtacccgttttacccccttcaaccttcatattttgaaacaagatgatcataagatgtgtctcttggcttgtaaatattatattgtcgtgcaatcagaaacagtatttttgcgcaaaccgagttcaaaatagagtacatttcacggaatttagaagattatgttgaatttgacttcataaaggtagacgtgtaagaaaattcatagtagatgggttaaacaggggggttttcgtaatttgacattacctcaagggtgcggccgtaatttaccctgtatatatattggttctttgcacgcaaataatggtgtacgtatatatgattcagggattg

SEQ ID NO: 105327 - DNA, 730 bp, Mimulus guttatus
  Intron number 1 from transcript mgv1a012810m (locus mgv1a0 12810m.g) derived from phytozome v7.0 (chr-ID scaffold_16; pos 1087793 to 1088522 reverse strand)
agaagacccaattcttcagctggataaaaacatatgtaagctctttcaattcttctatcaaaccctaattttatgtcttgatttgctttttgattgagctaaagattgcgtttttacaagtgggtttcctctgtttttttcacgggtatgattgcgttgatttttttcgagccataattgttgtaccttgttcttgatttcgttgtttgtactggaattgaattttttaattttcttttatctgattttggaattaatttgtctctcaagaattaggattctgtttttgaattatgaaacctaatttgactcatcaatcacaatgctaattgatgactttcttgattgattgattaattctgcaggttttttgatttgtgttagattggatgtaggtttgcaaattaagcaacaacatagtacatgaactgtgttcgagtcgagtaagatataattcgaactatgttgttacccgaaaagaaaaaaagtcgtcttttattttattagatcatcgccaaacaaggatcaaagtttcctgcttaattgatatcaagattcggtttttaaatattatgaattttctagttcgtaattagagcgtactttggtatgattttgttgataattacgtatatggtcttattatttagtttcgtttgtttctatttcaccttgtaaacgcaattttttttaattttgtagtgatgacgagcaaattgccgtaaaaaag

SEQ ID NO: 105328 - DNA, 947 bp, Mimulus guttatus
  Intron number 2 from transcript mgv1a005099m (locus mgv1a0 05099m.g) derived from phytozome v7.0 (chr-ID scaffold_1; pos 3381564 to 3382510 reverse strand)
ttgttaaggtaatttcatttcattaccataatcttccttttttctttttatttaaaaaaaatcaagaatgttggaagattattgattaccaatcattattagtcaatgattatggggtgggattatgttaattagaagaagaagaagtaaaaggccgtaattaggattaattagacacaaagacagccattatttcaaataatttagcagataaagtgagagttaacaaagaatgcttttttaacttttagtttctttattacaacaaaacactttagccgtctgtaatactctctttttggactttccttaaagctccctaatactttgccatttacatgcaaatctatgactttattaattaccagtaccaccatacccactgtaaaaattagatctttaacaacagtaatattaattgataaagataaagttattgggattacttgggagcaacatgaaaacctggtttttgctttttttttttttttttttatataatttgagtaaagtagtttcttagattttcaagaaacagctggttgagtgcataaataaatggtccaaattgaatttgaagtagttgtctgaattaagaagctattgacacagattggccagactttggttttacctctttcatgttaactgacttttcccacttaccctttggattcttgtttaaccattttcatcttacttcccatattctctcactctaaacatttattacaccaaacaccattttttcactgtaccctagttcttgaaatgtgttctctagcagtatatggacccatgcccctctgtaaatatgacaagttactttttaccataatcaatacttttaatccatgtttattcaagatttaattaccattaactaaataagactgccaaaaaaaattccagtacctacgtgcaaacaacactctacaacccttatt

SEQ ID NO: 105329 - DNA, 923 bp, Mimulus guttatus
  Intron number 2 from transcript mgv1a011252m (locus mgv1a0 11252m.g) derived from phytozome v7.0 (chr-ID scaffold_18; pos 1159770 to 1160692 reverse strand)
cgacaagttttgtgtttcagaatcctgatcatcaggttggtttacttaccaagtgcaaattacagtctctgcaattgtctattctttacctatgtatgataactgtttgagattgttgtctttgaacactttctgtttggaaatgtgttatatagttgtttatgactgaatctgtgatagctaggttcgactaatgatgaagttacaaggaaccatactagtaatcggtgggtattaaatgctggaaattaaaactctcaagcggattcatatagcttttgtttatggattttgaaacaggtagaattcgaaaaaggcatgcattatcttgggggataaattagcccggcaagtgagatatgtcaaaaaatttgttggctattggtgttatcatttaaaagccaaacgattttgtataactgtttaaaagaatttgagaggaaaaaacttgatgcattgacaataatgtaaataaatgttgtaaaatgaagttccaaacgagtaatgaggagcttttataggctcaaggaaagatattctgctagctagttacatcaattgccatcagtatgagtgacagaaaatggagagaggaaagacatatgagggtgaggtaatggttttggaatataaataataagtctgtgcttcaaatgctggtgtgtgagttcggtttttgagaagattctcttttagttccaataatattttttcaggtaattctagtttctggggaatttggtgcttcgagatgggaatacaaatctattatcaaaaatcttctgtaggctgacctctttttagtttattatcagactttgttttcttatataggaatcgtattccaaatcctcatttagtgatagaaaattgtcttgtaggatgaaacattcggttacatgactttttctttgcaggtagtt

SEQ ID NO: 105330 - DNA, 530 bp, Mimulus guttatus
  Intron number 1 from transcript mgv1a010766m (locus mgv1a0 10766m.g) derived from phytozome v7.0 (chr-ID scaffold_55; pos 1511903 to 1512432 reverse strand)
acgccgccggccggccaacgttgagcgtaagcgaggttagatctccggtcatctcctttttgctttagtaatttcccccaatttatttgtcaattgaaaattgcttttttttggtttgactctctgatttctgtaattgaagttctgatcatggagttttttgttctttctctctctctctctctctctctctctctctctctctctctctctctctctctctctctctctctctctctctgacatctggtttacaaaaatcaaacatacgaattttactgtttggataattttgattttgcttgtgtgaaaatctttccatctttgaagaatttatgtcatatacagtgttgctttgatttttataaacaaaatagtgaatatgctcaatggaagaaatataatcggatttattaatatcatcatactcaataaaaattcctgaataatttttttattattgtttttgattggttaattaaattctgatccagtttcaaattgtttttcgattaattatcaggagttcc

SEQ ID NO: 105331 - DNA, 454 bp, Mimulus guttatus
  Intron number 4 from transcript mgv1a005067m (locus mgv1a0 05067m.g) derived from phytozome v7.0 (chr-ID scaffold_12; pos 2364912 to 2365365 reverse strand)
tcgccgatctttccagtctttccgtcttgtatgttttctgacccaaactccgactatttatatttgaaatacgagatatagcaaattgttatcgagtaaaagaaaaccaacaacttttcagggacttatcattcaataatctaagcggcccgattcctaagatacttgctaaagattacaggtgagtttatttttaatttttattttcaatttcacattattacgggactccttactaaggatttttgttacagtgttgcagggaacatatttctctgttcttcaccgtcggaaatttgtacgactgctcccatatcagttaatggtattattaaatcactccttttttaaataacatgttataaatgctaaatatcaaaataaatgttatctttaacactctcgtttatttctttcagaaacaagttcgtacgcaaaagtcacccgtaatcat

SEQ ID NO: 105332 - DNA, 1025 bp, Mimulus guttatus
  Intron number 1 from transcript mgv1a013107m (locus mgv1a0 13107m.g) derived from phytozome v7.0 (chr-ID scaffold_42; pos 287140 to 288164 reverse strand)
gagcgattccgattcttggaagattttcagccgaggtacgtacagttaaacttctataaattaatagagtttgaacttatataaatttatacagtccggaccgacaaaattctactactttagcgaaatattaaattatctagctaataatttaatacgtttttaccaagtcgggaccgtaagaaattattatttaagcgagattattaatttatcgagtttctagtgtatttatttacgttcatatactatttgtctgttgatattttgaggctttgaaacacaagtaaataaatctgggtcttttctatatacttttctttattatgctttatagatttaaattaatctatataaaaaatcttctagattttatcgatatatatattccaatatattaattaaattatggcattcaaatacttttctttacactctttttaatcaaaagcagttagtgagaaatattatttattatatatgaaatttgtagaaattgagaggaaactgatccatttatgtatggaatgggagatagtattattcttataatacttttattaaaatataattatgtttattaaataatgaaaattaccaaaatatccctaacattttttttttcttcaaattttggccatctcctaagatagtgttttaccagctttaattttgaactttgaacttgcataagaaaaatgagatgaaacttagattaatgatggcctattcgaaatatgaatccaaacatgccacctcattattaattccgagcatcggagagtatgacatgttaacctaaggcttctagcgtcgagttttagaggacaaatactataaaataaagttttccattgcaaatactttgaagtatacacgacgtatattttctcgccgaactgaaagtgtgttttcatgtagtgatacatgaaatttcaatattaattgatatatgcaacttttttattaactattaaattcgacgtgtaggagacgatcctcaacaagtgaagacaaagttgagg

SEQ ID NO: 105333 - DNA, 741 bp, Mimulus guttatus
  Intron number 1 from transcript mgv1a011276m (locus mgv1a0 11276m.g) derived from phytozome v7.0 (chr-ID scaffold_75; pos 775446 to 776186)
aaatctgaatttacacccaaaaaaatctttctacggtgagttttatgtttcgccaattttgtactctcctttttggggtttcttttttgtcttatttgcatgaattgtcgaagaaacttgtcgaattttgctttgtgtttgtgtattccttctaggtttccgttatagtgttagaattagggttaaattcatgatttgtagttgaaggctgaattttcatttaattttattcataaccggttgtgtaggaaattcatttgggaaaagaaaacccttgtccttactgcttttggattttaataataaagtttgttctgcttccttaacattcatgatttactgatttttttttcgatttttgtgtttgggtgaaatttatttccgggtgaattcacgagccagccgcctcatttcgagaccctattaattgcataactcgactgtaaagagaaaaatcggttgaactaatttggtgtgtaatgtcaaatttattgcagtatgtggtagatttatacgtttctttgttttcggttccttggtcgtgtaacgaagttcacgatctcatcatttatatgaaaaaaaacaagaaacccaatatttcctatgtagtcccatcttcttgttttatgaatacagagacatatttattttgacatctataagcttttacagtctcgtgtagcatccaaccgatttttttttttttttttttcaggttagaggtatttatcgggaaagaaa

SEQ ID NO: 105334 - DNA, 640 bp, Mimulus guttatus
  Intron number 1 from transcript mgv1a025013m (locus mgv1a0 25013m.g) derived from phytozome v7.0 (chr-ID scaffold_161 ; pos 430920 to 431559)
ggcttaagaggtataagataaaatacaattaacatattaattgttttatttcaggaattttatgatatctgctgtaaagctttgtataatcatttcattgcatcttcataacatagggtaattaattgaggcatttgggaatgtagcatcctgttgttttgttgctcgtagaaactttgtagtatttatcttttattttttatatggatttgggataattcgaggcagctgccattctctatctctgaattatcagttttccgaaccccgacctctcgttctctaaatttttctttatagtagaagttctcaatttcataatgttggaaacagatttcgtttacaactccaattgcatcggaacctgctctatatcattttacgacttctgtgaaatttctctcgtagagtagagttttcctttagacattgctgcattttgattcggttggttttctcgttaatttgtggcatacaggactatttcgttgaacatggtggcatattgattctcttttaaatgtttattttattcccaaacccaacagattaatcggccaaaacacgcatccaaaagcagaacactctgaaaatcggtcgtataggaagtcacgccagaagcaaaacacgaaagaaagat

SEQ ID NO: 105335 - DNA, 890 bp, Mimulus guttatus
  Intron number 1 from transcript mgv1a004393m (locus mgv1a0 04393m.g) derived from phytozome v7.0 (chr-ID scaffold_79; pos 475140 to 476029 reverse strand)
aaaagcattcaggaaagaaaagaaaggtatgattgcttcgagatatacatatttgtcgcaacttttaacttcgagatttcgttaagtagattatttaattacttttgagttcttaattaagtccgtgtccgagatctggtgttttgctttaattttatttgtattttgtaagtatttcctgggtaaactctaactgtggatttaggttatgaaaattcattaaactcatggtcgattaacgataattgagtagtctattgcatatatacatatggtgaattttatgcgctttcttttgggggtagggttttatctaattggatttcatttgtaatgatttactaatatagtgagattagaagatgatgatgttcagtgggttaatttgagaataaaactgctgtgttttgtgagagctgaatcttcacaagttttctagggttggtgttttcctggttaggaaaataggtctgaactgtttgtttgctgcaaaggaaataaatgtggtcacggttatttagtatgatgtgaattgtgaagcgtctcgctaaacggattaaaatgtctgggacatatttttttcgcgtaacaatcaaatgctgttacacagttcagtctggttaccgattaaaaaggtttacattcattttctgatttgtaagcattggatattacttaaatcggatttgctcacaaaacaaaatttagacagcagaccttgggtcaaataaagttacaattgatgtacttcatgttgggtgtattcgaacaaagacttacttctacttgtttagatcactgttacagatttttgagctaaatttgaaacctatgtatttcttctttttacttcaggaggtgggtactagaaaggaagttggcatcttcag

SEQ ID NO: 105336 - DNA, 726 bp, Mimulus guttatus
  Intron number 2 from transcript mgv1a002695m (locus mgv1a0 02695m.g) derived from phytozome v7.0 (chr-ID scaffold_37; pos 541288 to 542013)
cgtgttccggtaacaattgttgatacttcgtccaggtatttgaacagtttatttatgtttgttcataggctctgattgtaacttctatagaaaaaaaatcagatttttggttgcgcttatctttttataggattttgaaagaggtatttgagtttggttcttcaataagcttgtgtttgtgtatggttgtgcctgcattgtgcttggatattgtcggatttgtttcttgtctgtttatgtggtcgtcgaactttgcatttgctcacactctatacattgtgtctggatgtttaagtgtaggcagaagtatcaatagaagtaactgaatatgcatatatctttgtacagacttcaaaattcaccatgtatacctacattttattttcacattgtgtgtgtgtatatatatgtatattttatatcgagccttatgaacatctccatcaaattaatgtaatcttgtgcgtggttatgtatttacaatttcgtttggatattctttcttgctggctaccttattcatcgtgttcaactatgatatgcaagaaaatttgtatcacattttagtagactgcattgcggtactgtctatgcacttttggcttttcttgtgtctgttacataatattttccattgttatctttcgaagttgtaatccaatatttttttgtaaattaaaatgacatgcagtcctgagaatagagggaggcttgttgaagacctaa

SEQ ID NO: 105337 - DNA, 318 bp, Mimulus guttatus
  Intron number 1 from transcript mgv1a006848m (locus mgv1a0 06848m.g) derived from phytozome v7.0 (chr-ID scaffold_90; pos 69470 to 69787 reverse strand)
caggttcatcttaattttcccatgcttcataaattgaaattaattagggtttttgttttttttttttcttctatttaatcgactttaatttttgaattcagttcttagttgctttcctgatttactctgtggcttcaatttttaattttaggagatttaatcgactaattttttgttttgtttgttttttgcacatgaatttcttaatgacgatatatttaattaattagcagtaatgattagattatcccaaagactagcaaaaagaaccagtgtatgatttcattactctaatttcaatttgcaggaactagtgga

SEQ ID NO: 105338 - DNA, 1063 bp, Mimulus guttatus
  Intron number 1 from transcript mgv1a012248m (locus mgv1a0 12248m.g) derived from phytozome v7.0 (chr-ID scaffold_22; pos 1303408 to 1304470 reverse strand)
ctggtaacatagaaagagaactcctcgccaaacaggtatgtatgtataactctctcctttactcgcaacaacacagtatgtataatgtatgattagattcatatttctagttttcgtgattgtcttagcttttgggatgcgattggagtggggtgagcctgtcactgatttagttgagtgtgactttttacatatcttcttttcaaattcggatgcactttgtttcattagactggcgtttgatttagttgagactgattcatcatacatatttcagctgagtactattcttcttctgctgctgcctgctaatttctggaacagcaacataattttgtattttcagaattagagattaactacacatagttgatcaattttgggaagacatagattgaaattaatcgggagagtataagggagttgaaaatacgaggaattaagaaaataatgatttatactctattctgttattacttgagaacttctagtataggtataaatatctaaatcatttgcttcttctaaaccgtctgtttgaattattaaccagacatggttgatttgttacaatgaaatgtagaatgaaaactcaacacacagttgtattcaacaccttagtttgtggaaacaataagatgtatatgttatgtattttcaagagtaatcaatcagtactggaccaagggaagtaataatgtttgtaaagttggttttgttttgcttacggcttttaattaacgacctttgaaagttaaaaataaaatatgacagtattgacagccttatgcagatccaagtcttggagtgaactaagattagaaattgtgttgccatccctatgtctgttatgtcttctcgtgaaagtttgttgagaatgacttttatattgtgttttccttcgatggcatcttcatatcatgtttaattcaatggcattcacccaatgatgccaacttccttccctttgttcttcttttatttatatcatatttccaagaaaaaaccacttactctatatgatataggttgctgtggacttaactcaagaagaaaagcagct

SEQ ID NO: 105339 - DNA, 889 bp, Mimulus guttatus
  Intron number 1 from transcript mgv1a026303m (locus mgv1a0 26303m.g) derived from phytozome v7.0 (chr-ID scaffold_22; pos 978130 to 979018 reverse strand)
ggcgaattgtctttaattgattatcaaagcctattaaaatccagattataaattactaccattattttcccctttttttctgattttttttttttatagaaaacccttgttgattgatcttcttttttcttctgaatatcgtcggacttcgatgttgatcttgattggatcggatcatcatatttgcaaattaatttgatagatctacaacaggaggtaagaatattcttgattcctttctactttaatttcatatgtatatatacatagatccatccatccatagttattatttatatactgattattctgtgtgtgtatatatatgttcaaaaaaaaaaaaaaaaatttatgtggctgtgaattttgtcaacaaattgtaaggcttttgttttttgaatttaattttgagtacacgaattcaggacttacatcgatgaagatttaatacatatataatacacgtcaaaaacctcataattaattaatttccttatggtaattttgtttaattaattacgtcttcaacccaaattcctaattcaataacaatttatgattttccaataactcaaaagatcaagaaaatatttaaactttttctaatattaaataatttattttccttgatatatatatagcacatatatatatagatatatgcatgttggtatatatgtttcttgtttcatcctcaatcacaacatattattatacgtgtaattgtgcttataaatatagattgatttaataattccacataataattaattgatgaaatgaaataatttaatttgcaggtggaatatattatatatatatatggcttcttcttcttcttcttcttcgtcaagtagctactcaaaccctccgtgcgcagcgtgtaaat

SEQ ID NO: 105340 - DNA, 984 bp, Mimulus guttatus
  Intron number 1 from transcript mgv1a019448m (locus mgv1a0 19448m.g) derived from phytozome v7.0 (chr-ID scaffold_5; pos 2675507 to 2676490)
gggtggtgaagtttgtgcctgttgggaagaaaccggttttcagttacttgaagctcttacgttgtggttcgaagacgcctggattagttggtgctgtcgactgtcaaggaatgcagcggcgggggctggtcgccgcctctgttgtggcggctcggcctcgtttgccggtgaccgatactcggcatccgcggtactacaaacattggtgtagggaagtttctttctgaagtatacaaccaatttgtgatgatggatgaataatcttcacagaattacagtttgaaaaaattacattaaaaacgtggtttgaacacgactcaaggtttggtcaactgttgactcctatttttggaccatcatgggccatgggccatgggcctggtcttggtggctcacttgtgatgatttattgcttttataaatttatttattactttgtaatttgtattgataatttgatattataaattttttattttttttatttatatattttaattgattttatttattcagaggagtattcatacggatttatgcttttagcttgaatgatggttgtatttctcaaattgtaaaatatttaattttatatatataaacaataattaaattttgaaatcacatccattaatttttttaatccaataaaaatacattgtacattcataatgattgattatatttgggtttaatttaagaaaaataagtattttgcagacactaatatatttcatgaagagtacatatttatgacccctcattaagtaaaatgcttacaattaccccctaagggtaatttcgtgtacaagggcaaaattggtattatcggaggaatattcgggagaatcaaaaagattctatcgagtttaacaccgttagagcgatttgtaagatgtctgcatacctcacgggagttttcgtaattacgagaacgtggggggaatttccgttattcagacttacctcagggggttttggtaa

SEQ ID NO: 105341 - DNA, 715 bp, Mimulus guttatus
  Intron number 2 from transcript mgv1a006326m (locus mgv1a0 06326m.g) derived from phytozome v7.0 (chr-ID scaffold_7; pos 1806915 to 1807629)
gccgggtataatttcttcccttgattttttatttttaattttttatgcccctgaattttaatttgtatatttgagaataatatatatttttttaattgatttttattcttgaaattaaaaaattcctggcctaaaatctgtggttttatcattcgtcgtcctctgtatttgtcgtatttgattgaattgtaaggatttgtccggtgaagaacaacctgtaagaatttgaagggatgtctgttattgtcgatctacacacaccaacatggatgtgtgtgtgtgtgtgtgtgtgtgtgtgtgtgtgtgtgtgtgtgtgtgtgtatgaacgaacggtaaagatccacccggtgtagcgttgaataaaccgaaccggtagctccctcttcgaggtttttaggatttcgattgcaagttttgttttaggggcatataataattgtcataggaggttgatgaaagagttaaaatagactaattctttaactcttataatttcggctatttgttttatccaccttttatgttgattgtttgtccttttctcatatatctactcatatactgtttattggaaagaggaaaaagaaaaatcatttcgtaactggctcgggtttcttgataatattaataaattttcatcgatcaatcattttggggctgtgacttatagaattggtttcaaatgttgaaacaggctgaagggcttgtggctgag

SEQ ID NO: 105342 - DNA, 894 bp, Mimulus guttatus
  Intron number 3 from transcript mgv1a012918m (locus mgv1a0 12918m.g) derived from phytozome v7.0 (chr-ID scaffold_87; pos 431947 to 432840)
aaggtattttaattaattatttattatttattatttatttaacttttgaattattattctgtatttatttaattattttgccatttctgattagtgaaaaataatttttacattttatttcaaattaattgttatttttggtattatccttcatttaaaattttacaagttgcattaattattttcttcttctaaatcatcttattacttagtaaattctggttattgagatactacactcggtgaaatatatcggatgatttttaacatttgatacggcgaaataacttcccactaattacacatacagatcggtgtgtgagattatgtgcagatcaacggttaataatcactgagtttagtatcaaataaaccgtaaattctcaccaatccagagagtagttaatgaaagtaaaacaattggaaatgtactctagttctattctattttccgcatatatatatttttaaataaattcttagcaatcaagagagtaatatatgaaaataatatagtactattacatttttctaaacctatatatatatatatatatatatatatatatatatatatatatatatatatatatgatttgacgtggcatgacaagattgggtccttttcttggcattgaattgaagatgaataagaatctttgcacaatcttttaaaaatctttcctcccccacctaatctatgttatttattgatgggacatttactaattccacatgcttttttattcattatttccaattaataataaatatgtggggtaaataaatttctttatttatattatttaatgaaattgtaataataataaatatgtgggcttccttatttatttggcaggaatcttcattcctgagaaacataccagtggtaat

SEQ ID NO: 105343 - DNA, 517 bp, Mimulus guttatus
  Intron number 1 from transcript mgv1a002249m (locus mgv1a0 02249m.g) derived from phytozome v7.0 (chr-ID scaffold_4; pos 2488732 to 2489248)
gccgccgccgccgtcaccaccttctccaccggcaggtaacgtatatatatcatgatacgtaatcctttgatcctgtttgatttttttagtaacgattaaatattgcattagatcaatttattttaaaattaaataaatgaagcatataaaatatgttattgatgttgtcacgaatttacttacgtcgatcgctactatattaggactagtgcatatgcaattagggtttatttataattggaagtatgtggatttttcttccaacgacctttcttatatttcggcgtacacgaaaaatgccaaagtgatgatgatacaaatgtcaaaaataattattttccgaaaaatatattttcggaaattagaaataataacagaaaagaaagaattgtgtttgtggtcgttatagttaagaaaattaatatttatatccataaaatgctaatgaatatttattgcaggaacgaataacgataccacaggaggaaacggaacgaataacgacagtacaagagga

SEQ ID NO: 105344 - DNA, 580 bp, Mimulus guttatus
  Intron number 1 from transcript mgv1a015595m (locus mgv1a0 15595m.g) derived from phytozome v7.0 (chr-ID scaffold_334 ; pos 103997 to 104576)
caggtaatatataagaagggttttttttgcaagaatcacttttgtgtaatctctaattgctgaaacagccttcatgttcaaattattagaaaaaaatcccctaaaagagttagtctaagccaattaggtctccacgagatgaatgtgtgttgcacgcgcggatatcgcggctcgggttatgttttttaacatcaaaagatcaaaataccctttagaatataaatttagaaaattatgaattcaccccataattttcttttatatttaatataaaaaaaattcattttgtttatttaatttgaaatattttttaataattattaggggtaattttgtcatttcatttaagtcaaaaaccaatttattgtaaggagctgtgtgctttggaaaacgtaatatatggggattattgctagttttttttaacataggcgtttttcttcgataattagagaccacaatgggggtctgtgctaataactctatatgaaaataaaaattctggctccgtagcctgagctacattgtgatcaatgatgatgcaggttcgacggaaataacgagttcgaaagagaagata

SEQ ID NO: 105345 - DNA, 1069 bp, Mimulus guttatus
  Intron number 1 from transcript mgv1a013998m (locus mgv1a0 13998m.g) derived from phytozome v7.0 (chr-ID scaffold_14; pos 839696 to 840764)
tgtcgcctttcattgttactataaagactggagaggttgcttcctttattaattttctgactccttttcgtttattttgtgtgtgttttttttacaacaaaaaatctctgctaaagttggttgattgctcgaaaatgaatgtgaccaagacataattcatgtttatcaccgttttctactaaagtataaaaatgattggcttttattaaaattatagaattctattttattcaactatttgcatgtttatctgtgtcttgttatctccccattcgtgtgcttattggtttcatttgtccacatattctgattttttatttttgattttttatttttgatttttgatttttgtttttttgatttttgatttttgatttttgatttttgatttttgaatttttgtatacaaggtagggtacttttgcttctctgtgtggatttaattatctgtattattgtgagaccttatgattttattagcttttatagtaagtgaataaataggagtccttttggatacggctgcatttatttgactctaccatattttgtgtgaatagatctatcttatcataattaaatcgactaggcgtcacaaattagggcacaaaaccaataaaaggtaacactcgtatacaactatgtgacagaccggaagttggaattttgtcaaaaccaataaaagaaattgattttgtcaaattatatgttaatgtggtgttacttttatccgtttttgcacaacatcgtgatagattaatttcaaccttaaatttcagcgtcttaacttcacagaagatttataatatagtaagttataattgaactccgagagaagaaaaattgtgataaaagaaataaaaataagactaattacgtggatggaagtacgggaaaaagaagaaatcgaacaccactatgatcgttcagttgacgtataagtagttaacttgttacagtaatctgatgttcgatttgcttttacaactcttctttttgtgtataaatttcttttatttcttttctgcttttaggacattggaaaaaggatacgagatttctttcaaga

SEQ ID NO: 105346 - DNA, 520 bp, Mimulus guttatus
  Intron number 1 from transcript mgv1a023929m (locus mgv1a0 23929m.g) derived from phytozome v7.0 (chr-ID scaffold_80; pos 1040399 to 1040918)
tggcctcaaaacctcgttcaggtgtctctcttcaggtgtgattccattcagcctctctctacttgtatgtaattgtcaacatttatttatggaaagcattcaatagtaattttgggcaaattcaatcttcgaaagatggtttaactgttctctcattaatggcaatgtcgacatctcggcaatttgcttttcgacttttcgttgttacttgagcatttgtatcctataaaaaagcacaattggtttccataaactgtagaacttatatacatcttgaaatcgttaatgcaaagtttattgcactagtcggagatcaggttcgattcgtttaattaaagaagtggttaggccttagaaacagaaacctcaactgaattcgtaacagataaaattaagtgaaataaattcagttttgaaggcagagttatattccgaaatttgattgtttttagtctcattaacaatctcgtttttcaaaattgcagggcacttcacgagaaagaagtaagagcaaagggtg

SEQ ID NO: 105347 - DNA, 1010 bp, Mimulus guttatus
  Intron number 1 from transcript mgv1a009274m (locus mgv1a0 09274m.g) derived from phytozome v7.0 (chr-ID scaffold_4; pos 671311 to 672320 reverse strand)
tgctacttctgcaaaccctgatctcgagcttcaaggtatgatttttgtagaaaatacttaatagaactaaatcaccctgccaattaattaattaattatcttatgaattaattaatctctccagttggctgatttgaatgttgattgttttaattttctggtgagatttgatattaatttggacgaagcttatgcttgaaggagaagaatataaacataagcataagcaatcttgtatttcaattttcaactgcaaagcatgttaggtttagcttctctgccgtctgtcaattttaccttttttcatggcttaatttcccgactagggaagttactacaccgggtgaattttaaccgtagatctgattaaataactagccactaagcacacatatggcaacccgaataaatccatttttttgtatataaagtaagattctccaactttatgctgatggattcttgttggatagaacgacatacgttagtgagtttttcgattgttggattgtgctagtttagtgataacttggtatagtgctctccacttttataatttttttttcatgggcctaatttcttgtacgaaactcagggttgtaatatgaggaattacatgataatgacgtataaagagaaatcggatatgtatgaacaagagaggtatgttttcacggttttgtaccaagaaccagatgatagcgtccatagtacgaacaaaaagggcatctttttttaatgatgtatatcttctagattgttatctgccagcaataatcccgattttctccttagtgtctcgtctgaaaactatttttgtgtccatctgtttctttggttttaacgggtttgttgattcttcctagtagcttgtagcagaatttggtcgcagtcgaataaattaattgatgtgtgcctcctaattaataggacatggtcaacactcaaaagtacataattttttggttctatgccttgattgacttgttcaaattttttcgtaacagaaa

SEQ ID NO: 105348 - DNA, 935 bp, Mimulus guttatus
  Intron number 1 from transcript mgv1a004019m (locus mgv1a0 04007m.g) derived from phytozome v7.0 (chr-ID scaffold_92; pos 68016 to 68950)
cttacagtgccagagaggagagcttgaagagagaagtaagcttagtatattactttatttatttatttttttcaaatttcaaatcgaagtaaacttagtaaattacttacaagttcatctctttgatttattcacattcactcagaaaaatgctgtagagtggtacatacatgcatgtttcagctgaataaatatctttgaatttacatgtttgatgtattatccttcttttgaaaaatgctgcagattaacactcactttttttttttcagtttttctatggaaaataattgtagcgaaagttatggaatcggatacattattaaccatcatttgcactattgtcagatttgttgtagccgtggaaaaaaaatgttgagtgtagtcaacacctggataagtttgagtagaaaagttagggatgggcttgattatatttttgctggtgttggtttaccagaaaaatctcggtgactcaagaaatcattctttcagattataatcgccgtctcttaatcgtattttagattatgctttcacatttgcattttctaccattatgtgtgcgagcctacatgttagttggagttacgtacaagttagttgtaattaccgaagctattcagctaagaaaaggaaaattgactgtcctggtgttgataagtaacacataaagcattatcacatcgataataattgagcaatacttacattcaattttagtttgcatgaatatgttggggtgactggtaatttacttaataaattggatcctgatgcctatttttaattcctgtgctgcttaaatggcagcatcaattttattcattacttcatctttaatttatttttccacccataactatttataagcagtttatattgatcaaattttatcaatcattgcaggaagaagcaggaagactgagatttgt

SEQ ID NO: 105349 - DNA, 795 bp, Mimulus guttatus
  Intron number 1 from transcript mgv1a014722m (locus mgv1a0 14722m.g) derived from phytozome v7.0 (chr-ID scaffold_85; pos 565522 to 566316)
agttcgattgttatatcattaacgaagaccttgtaagttccttttaagtcttatgtttctgtgattaatggaaataatacgtgattgatttttgatttttgttttgggagcaaattgttttaattaagcagaccgattttttcgattggtgaacttgattcgggggcagaatttccggaactatatactttggattagttgaagctctagtttttttttttttttttttcattagtaagagattgcttgatttggataatctgagatgataatgaatgcattccgagtgaaatagttttagaattacgtgccgaagctaagataattcccgtgggccccgaaattgcattttgccgaatggaaatgaaccttgcagttggaactcagaaagtaaaaaaaacatagatatacacaattaagagtggaatgtatgttttctgttttcggattagagaccttcattgagagcatttgcgggactacatagtgctccgaatgtcgcaatgtaggatttttttaggaactctccctaccacatgtttccgaacttaagtacatcagatatggataatggaacttttttcatacttcgtttatgatcgtctccgcggaattgctattacatgaatggaacttggtaactaacttattcagtgtgtcaaatctacaaataattttgacaaaaataaacttctgtcagatgatgtggataatatttaaaaaacttcctttctactttctcttcgtttctatatattgtcacatgaatgatgagtttcgtcctatttcgcaggt

SEQ ID NO: 105350 - DNA, 676 bp, Mimulus guttatus
  Intron number 1 from transcript mgv1a017586m (locus mgv1a0 17586m.g) derived from phytozome v7.0 (chr-ID scaffold_115 ; pos 77646 to 78321)
gcctgccgctccaactctgtgttctttcgtttcaggttcgttcatcttcgataatatgtttatatcgtcagtatatttagatcattatgccgttatttcgttcgttcgttcgttcgttcgttcgttctaatagatgctgaattattttattttgatttcagtttatgttccctttatgtttgttttttttgattttactgtcttacactgtgcagtcttatggttaatttcatgaatgtaatgttttatagggcagaattatgttgattttaattattgaaaatattattttcggtatttgtgaggttaataatcaagaatcaaactctgtgttgtagtatgtggatcagtggatgtataaactcaattgtttacaactgatttttcatcatcgaatatactgctacttactctgtctatgtttccgagtctttgtctgcatagtttgttagtatatatgttatctgctaatgctgaggtagtttattgtgctttctagacaagcttttcttagctgtttcattagtctcttggttaattttgttttttgttgggtgttctctaataattttgagcttaagtctcaatgtgctttctccatagacattgcacaatattgctaccagttaagcttgatttcctgagagttttttttttttgttttggttggtgcaga

SEQ ID NO: 105351 - DNA, 860 bp, Mimulus guttatus
  Intron number 1 from transcript mgv1a006353m (locus mgv1a0 06353m.g) derived from phytozome v7.0 (chr-ID scaffold_8; pos 424105 to 424964)
caggaaagaggcggagaattgtgattgcttgcagggtaagctgctcgaattatgcatttttggaactgctatttggtttttttgttcggattatgttgttatttgaagcttttaggtttatatctcgaagttatgtatttggttaaatttatttgctagtgtcatgttgttagatctatgatttctgataaaccctaatctaattgataattgagctctggtgtaggaatttcatgaatgattagctggttttaatctgggaattgtaatagatcatttggattttatcttggctgaccgttttgttttcacttagactgtataatcgggaaatgatcgaatgaattaaggcatgtacgggaaggtatttcagtacctgagtttgctgatgagttgtgagttttggggttggttttggttctttactttttatttatttatatcatgtgggaaggtttcaagaagattctgccattttcgtgatccattgatggttcgagaatgtgaatttgcagcaaagcatgagtcccgtaagattttgctgtaacgtcatattttagttgccacttattttcatgcgtgacttgtttaattaccttaggttttaaatacctagaagtccatgttttccctttttaaaataagaaagtttaattgtcactggtatgttgtacttgtttattctcgtcatttgatttgatttttaaatgttttatgtgatagaactatctaaattgtttctgtgattgaatgtgttcaacatggtcattcttaagctcttttcaactgactaaaccatcacttttcgttgttataacttttcaggatttcaagtttgccattcattgggaggtggaact

SEQ ID NO: 105352 - DNA, 620 bp, Mimulus guttatus
  Intron number 1 from transcript mgv1a006779m (locus mgv1a0 06779m.g) derived from phytozome v7.0 (chr-ID scaffold_2; pos 1663688 to 1664307)
tcatcatcatcatcataatatacagtcgcctccaggtatattatatatatatatatatatatatatatatatatatatctctaaaatattgaatttatttcaatttatttatttaatttttttccgattatgggttctcctaaaaaatcgatcttttgttattttgttttcaaatatatttttcttaataaccatcaaggatttgattatttatttccagtttgtttattttttttatttttatatttaaatttatttgcatgtttggctgtgcaattctcatggggagataatgtagtttgaatgaactgcatgtatcttttgctatgttgattttttttttaccctttgttatttgatatgatctcatattcatatgcatgtatgtatatgaatttgtatgtatacattgttgatatggaagctgaaatcgaatgattcataaatgttttattacaagtgtcttcttttttgtttgtattaggatgatctaatttccaatttctttttaagagatttaattttcaatgtattacaaaaaaaaaaaaaattgttgtttattgtattaatggtgtgttgttttagatttttccaaggtgaccccacataggtttgtgaag

SEQ ID NO: 105353 - DNA, 418 bp, Mimulus guttatus
  Intron number 5 from transcript mgv1a015506m (locus mgv1a0 15506m.g) derived from phytozome v7.0 (chr-ID scaffold_66; pos 124957 to 125374)
gtccactagaggctcttcttcgccctaaattgcaggtatggttgaacctcgataaattaataacctcgcttaaataatattttttctcggtcccgactcgttgaaaacatattaaattattagttcgataatttaatgttttgctaaattaatagaattttgctgatcgcgactgtattaatttatagaagtttaactgtatttgattttctaaaacctcttcgatttttacatcaatgatgtttataactagggtaatgttttcactaaataaaccggattatcgatgtttatcgtgtttgattaaaccttatagtgggacaagatggcaagaatatttgcttataacaatacgtatgtatgtatcgtgaaaattttgacagccaacgcaaaatcagcacctacggtcccgatcagc

SEQ ID NO: 105354 - DNA, 764 bp, Mimulus guttatus
  Intron number 4 from transcript mgv1a014025m (locus mgv1a0 14025m.g) derived from phytozome v7.0 (chr-ID scaffold_26; pos 500538 to 501301)
gttaattttttttttttacaggaccatacatgtaagtattgtgcttattcttccatcgaggtgaagtgtcttttcaaatttctgtgtaggaaatacgaaattcaaatacactggtaaaacttatttatggtgaactaaaatatacgaactccgtgctcgtgaatcgtctctggtgagtgtaatgagacaatgctaacgatgtaaactaatataggatcttgtatgtgaagaacgatgactctatcagctactttgatattcttttattttctgtatgttgtgcccctttcttgtctgaattatgttcatctgcttactagacaacacccacttctgagaaaataagtaaaataaagcttgtgtttcttctttcatctttgtattgggctttaatgattgtgcttgtacttcatggtggttgtccagctgtgctcgatatgttattaagcgggaaaaactggcataattcttaattcactcttcaacctccttggcataattctgactatgtgattgcatgcaaattattaaaatgatattaagcgggaaaactgaaccagttacataacggttttgtctcttcttagttctatattgatatttacgttgtacacttatttatcagaatagaggcttgattggataattcagccttccttattatttacttatctttagctgcttttatgtttttatagctcttactaactggattaactgaaattgcagcaagtggtttctggagaagttaggccatcaaggta

SEQ ID NO: 105355 - DNA, 667 bp, Mimulus guttatus
  Intron number 2 from transcript mgv1a012778m (locus mgv1a0 12027m.g) derived from phytozome v7.0 (chr-ID scaffold_50; pos 1387690 to 1388356 reverse strand)
gtgaactaggcgaatcggagccacttctgcagaatgtgagatctaattatttctgattgcatttaaaaaaaaaaattaatgaaatttatgtgtgatttttgcttcttggacttgttaaaaatgctagctttatttaattgattgctgagtttaaggtagttgaaatcggacaacattttttcgacttttcgatataggtagttagttatgctgcctttttttttttgttctttcttgattactgctattttattctattgaactactgcttatgaaaaaggttactgatgctgtcttaaacttattttgacttaataatgttggatgactgtctgattatttagtcggttatttaatttaaaacaccataaactaatgttctttataatttacttgaattgatcgacagtgatttttcgacttttcgatataggtagttatgttgcctttttttttcttcttcttaattagtgtttattttattctattgaactattgcttatgaaaaaggttattgatactgtcttaacttatgttgtcttaataatgttggatgactgtctgattgtttagttgggtatttaatttaaaacaccataaattaatgttttttaattcactcgaatcgatcggcaccatgattttttttatttgttaacaggcgaca

SEQ ID NO: 105356 - DNA, 663 bp, Mimulus guttatus
  Intron number 1 from transcript mgv1a006356m (locus mgv1a0 06356m.g) derived from phytozome v7.0 (chr-ID scaffold_75; pos 661018 to 661680 reverse strand)
ccattttccctgttcttcatctgcaaaatttaacggtatacttcttcttcttctccctccttgttttttttatttaatgaaaatttagatcaatttgtgataatctgcattttcttaattgttctgtttttatggaattttatatttcgtggaatttgaggttgcatttttctgtaaatgctggtggatcgtgttgaattcgtagatcgagatatttatcgcatatttctggaggtttttcatggtttctgaagtgatttagtgtcgtatttccgattaatgaatgaggattaatatgctaagtcgactgttgcagaaatcttcagatccaattgagatctgtcaagtaattaatatttgatgtgattattagcaattttctggcagaaatctatgagtgaactcagtttttgactcagctattgtagtttaatgctagtttttacactcttctggttatcgacttgtcgtacgtgttggttttaactttcataccacagatttggctgcttattaatgactgtgtgttataaatatttacgatgtaagaattcaagttagtacgggtgtaattgcgaatttacgagacaaagtctcaatttcattgatagttgaacgaaatgctgtaattgatttctgatatttttctggaattacaggaaa

SEQ ID NO: 105357 - DNA, 805 bp, Mimulus guttatus
  Intron number 1 from transcript mgv1a000698m (locus mgv1a0 00698m.g) derived from phytozome v7.0 (chr-ID scaffold_4; pos 3255707 to 3256511 reverse strand)
atttcgaagcatatcaggtatgaatacggctctaagatagttttcttatatatttatgaataattgttggatgttttggttgattgcctcaaggttagtctcgtattgctgatatgtgattttcaattttggaatgtttccccttctagtgtatggttgactgtaagggaaaaggtagacaaggaggtagagacttcccttgagttacaattcaaattgatgtatatgtacttggaaaaaagagaatccatcatggttgaatatattagctcattacccatcaaacttagccacatagtttgctgcgacatgacttttatatgaggaatgctcgatgggccatggcaatgagttttgctctgttgaaatgtggatgtgttttgctggaggatgaaatatgtatgtcttctgtttagttttccttttgttctgtaatttctagtaactgtatgagcagacttagaagctatttttgtctgaacgttagatgcattatgtagccgtattgcgcgcatgaagcttgggcaggggtgtagtgcacttatctcaagggcttgaacttttatcttatagacatttggaagcaatccactagaaacgcatgtttgaaccctggtattatttcctcgggttgatttggggggttgttagatgtacttcacattgtagtccatgacttttagctgacatcacattttttaaagctttttgagattgtctcacgaatattgaacattggtgattgatgtatattgtggatttttgtgcaggcattatcacatagtgtaagagatcgccttattga

SEQ ID NO: 105358 - DNA, 971 bp, Mimulus guttatus
  Intron number 4 from transcript mgv1a008722m (locus mgv1a0 08722m.g) derived from phytozome v7.0 (chr-ID scaffold_13; pos 828295 to 829265 reverse strand)
gcaaggagtacaacaagaacaagcctactgaaatagtaagcatttagttgtcgagttggctgtcttatcatatggtcgcagtgagatcttggcaatactacttagtgacattgttcagcttgtatatttgcttagattattttttcttttgttttcgcttttaaaaaatatcttaacagtgcaggaataaagataaattactagcataaagttactggtgatcgtaaaaattctatttcaccagaagaaaatatgggcatgaagaacttttatagggaaaattatacgtttttcattctatgatcatatatgcacacgtttatcatgttggctcgcataaaatgctttattttgtttgtgacgtcattagaaatttgggtcttggtacactagttagaagtgcaatgtacatcaacgatgtcaacagctatgggataataaaacgaggtacagttttaaggctgcactgagtacaggaaacgttaggattcttttattgatctattaataattggaaagcagtttggtttggtgagttagagcaggagcctgagtttgtgactatgtaattcccctttttgttgtcttgttccaagagattgtagattactctgaaatcgaggtatttctatgttccatgataccatgtattccagatcaatcatggcacgagatgtggctggaatttttatgatacgactgtaatctgaagtaactaagttgtccatatgcatgctaatcggaagcttttccactcattcaaaatctagtctttcttactttagcttgttaaaaaaatgctgaatgtattcttatttaggttgtatcctgattatgttttgttatgctatgacatgcctacttcgtgattttattgttattgttattgctgttgttgttattgttattattattattagaatatttacttcctggtctaattttgttgcaggtgtgtaagcattttttgg

SEQ ID NO: 105359 - DNA, 697 bp, Mimulus guttatus
  Intron number 1 from transcript mgv1a019803m (locus mgv1a0 19803m.g) derived from phytozome v7.0 (chr-ID scaffold_5; pos 177289 to 177985)
tcgattttcagactagggttagttcctaaaccctaattctctaatttcactttggtggttacatatatattgtaggataaattacagctacctctgaggtatggttaaattatgaaaaatctcctcttgttaggataattacatctgttccttaactatcaatcttcttacaccttcagtcttatgttgtcaaaattcaacataatcatctatattcgtaggaatgtgctctagtttgtactcattttgtgtacaaatacagtttctgaagcatcacaatttgatatatacaagccaaaaaacacatcatatgatcaccttgcttcaaaatatggagaccgaatgggataaaacgggtacaaagagttataatattccataaaatcaagaaaattccactaaatttgaaaccacaagggtggacgcgtaaaaaaatttatagttgcgagcagttgttgtaattatccaaacaaaagggggattttcgtaattttatcatacctcagacgtgattgtaatttaccttatatatgtagtcgtactgttctatcaagagcttatatatattccattaagaaatcttgatattttagttgctattaatatccaacaaacaatttatatgctaatcaattattacattatttctcttacattgatcgattttcgaaggctgaggaagtaagagaagaagcga

SEQ ID NO: 105360 - DNA, 1027 bp, Mimulus guttatus
  Intron number 1 from transcript mgv1a024505m (locus mgv1a0 24505m.g) derived from phytozome v7.0 (chr-ID scaffold_112 ; pos 735787 to 736813 reverse strand)
taaggataccacaagagcatctgcatccgcatcaggtaaaagttgcacaaaacaaatttgctatcatttttatttttgaattagataaaatcattatgaaaaattttaatttgatttttagttgtactaacataacaatctaacattcatgcacttaacgtaactttttagatctgttgttttataattattttatataagtatgatttaagttcactgatcttttagacacctcatatagagattgttgtttgaattaagtaaaaattatatttttgtcggctttcttatatatttctattttgattacttttatatttgtcaagtaacattcttgattaactcatgttttgacggcgcacgacacgcgttaatttactttatttgattctgagtttatatacttgacttactatttttccttttatttttacctttttgcacgatatgtcttaagtagaaacgtcacgaaaaataatcgtgtttttttccgtaaatcttaaatcaagatggcgttcgtgatgcagacaaaagggttgtgaatgaaaaagggggacaagacaatcataaaaaacatcttttaagtaaaattggatactaggttgcatcttatggattttaattatacatgtcgcgtatataaatatccatgaggtgtattgataaaaaaaaaaatgtgagatgatatatacttgaagtgtaatagaagaataaagtttgaaagattaattgtataaataaatgcaaaaaaggagagtaaataagcatggttgtcattatttttttgttgttgaaacgaattaaatgcaataaattaggggttatatttgctttttccatagttggcatacaattacttggtttttttataaatatatgaagaaaataaaaattggtccgaaaatgtaaccaaacatttcgtcaattttaaacattatgttgcctttacttcatatgcttttaaataaaaatatacaattcattcatttcaggcacaatcaacgcaaagtcagtagcccccaacctc

SEQ ID NO: 105361 - DNA, 1047 bp, Mimulus guttatus
  Intron number 1 from transcript mgv1a012748m (locus mgv1a0 12748m.g) derived from phytozome v7.0 (chr-ID scaffold_123 ; pos 715772 to 716818 reverse strand)
aagatttggatttgccttctcttcccgttgttctggttagtccataatttggctttatttacagtttagtaaaccactaaaccagacatttttctaatatatatatatagggtaaattacaaacatcccatgaggtatagtcaaattacaaaactcccctcttgtttgggtaattacaaccacccctcgactatgattttttcttacacctccacccttatggtgccaaattcaacataatcatctagattccgtggaatgtgctctagtttgtactcgttttaagcaaaaatgcaatttccaatgcaccacaaactgatatatacaagctaaaaatcacatattatgatcatcttgcttcataatgtagcgtttgaatgggataaaacgggtacaaaagtgataatattccatataatctcgaagattccactaaatttgaggagttgatgggtggttgtaattatccaaacaagagggtttttttttgtaatttgaccatacctcaagggggtgttatatatatatatatatattaaactaggaaaatcggaaaaatcgaaatttcggaaattcgaaagaaaaaaattgctccaaggtaggaaattttcacattgaaaaaaaaaatataatataaaatttataataatattgaaaaaaaaataaaattggaattccacgaaattgaaatcgaatcataattcaaaatgtaatatgtaatctaattccgttctaaacaaaaaaaaaaaaaaatcgaatcgcaatcaacaaaaatacaaaaatctcccgtccaaaattccacccctaaatttaaacacacaaaagtaggaattccaacgcgccgatcacaactaaaagaaaccaacaccacttaaatagtttccgcaaaaactctagtaaaagtgttttaaaaagaataaaaaacctcaatttattatttgttttaaattctataattctgatccgatccgctcgatttacatttctgattgtagtaacgttgaaattgcaggtagcccttccgtcgggaagagcatacctcgaaaa

SEQ ID NO: 105362 - DNA, 495 bp, Mimulus guttatus
  Intron number 3 from transcript mgv1a018915m (locus mgv1a0 18915m.g) derived from phytozome v7.0 (chr-ID scaffold_2; pos 232103 to 232597)
ctccaatcggtataattaatatgcttccgtttcttcgtaattctgattcagttgaaatgctgattctttttggcttcttcgattgaataaaagttgaatgtagtagcttaaaaacaattattgtgagatagagttatcatttccggtttgttcgttcgtcacccaccccaccaaaaacagagtcgaaaaacataaaataattgaaaaaacaaattatttaaatggctcgcttcgaatctgttacgatacaataaccactactatgaattctttatgagatgctcaaaacgtacacctgacagacggtaagtacaaccctttattcgtaccatcgtaaataatcatctttttttctcgattttgccctttttttttccatttgattttgtttacgacaactcaatgtttagcatttagacatttttttcactgtgatttcatctttcgtttttccttacaggaacgactgcatatatagagcaatcgattccatac

SEQ ID NO: 105363 - DNA, 695 bp, Mimulus guttatus
  Intron number 3 from transcript mgv1a021999m (locus mgv1a0 21999m.g) derived from phytozome v7.0 (chr-ID scaffold_155 ; pos 523996 to 524690)
gaacatagaaagagaagaagaggcaagaattcaaggtaactttaacttttgttaggaggttttgcttagaaaattattttgatatctcttatcttcttgttactgatatggattttgatgcctccaaacgaaaccgaagtgtcttaaaatggtatttaatggcactatgcatcattgaagtttcaggatgattttttctaataatattaatttatgccgtgtagaagtgttgaacatatttaatgtttatcgtacactacttgtttcctgaagatctatgagtttaaaagtgagattcttattttaggcgtgcctttgtttgtgttactaaacaccctggaaaacagcacaaaaatctaaatctaattttcttgtctgtatcaattctactacgacgatccatcaccactgcctcgaccattatcccgccaaaaatgtatattcactgtttattcgaaagatagaataaatatgaaaaatattttatatgttaatagtttccgttaattgtatgtgctactccatttcagtgatttatgattttgaggtattagtgagacgtacctggagataaacactattgatagaactcttaattttccctagcagatgtagtttcgttgtttgattaattataatatatatattttggttgggcaggtgtttcagttgcgggactacagcttccgaaagcc

SEQ ID NO: 105364 - DNA, 619 bp, Mimulus guttatus
  Intron number 3 from transcript mgv1a012902m (locus mgv1a0 12902m.g) derived from phytozome v7.0 (chr-ID scaffold_54; pos 160897 to 161515)
tggccttagttccgaacatagcatctggtactcagatttctccactcagttcttcaaatcatgtgtgtttattttgataattcttttgtctctagttattgttcatttcaatttattaatttgtttcggtttgttgtcaaatttctgtcacatactgttatttgaacgtcgacttgagctggaaatttccagtttttagtttcaaacggaaaatgttgcaccagttctggtttccctttgagcctacaatatcttattcccgtttttcagtgtgattgcacaatttgaaatttagaatggtcttgttggattagtatgtacatatgttcattgttgcgaatcgacatcaaatggatcaaaataggatcgggttatgaatatttcatgattcttgggatagcaaatatttcgattccatataaatttatacgagttattctacatttttcgtttccttttatgcgaccaacttgcaatttcccctgtggtatgaggaggtatccctcaactgtttttgaaacttagtaattcaagaaaattttgttaacttgccgaattatatatatgtatgctaattatttattcggacaggggaagatagatacagagttgataacca

SEQ ID NO: 105365 - DNA, 906 bp, Mimulus guttatus
  Intron number 3 from transcript mgv1a002020m (locus mgv1a0 02020m.g) derived from phytozome v7.0 (chr-ID scaffold_49; pos 1250173 to 1251078)
gaagtttaggcatatctttcgtggtaactttcagtctttcgaattcagaaacctcttaatgtttacgctatgctattatatttcggattttatgttaaccctatttccgagtcctttatgcaattttgctcgtttacatttacattacaagtacatccatcacctcttattatctggtagtttgccgagtcctttatgtaactttcctgttgcaatttacattatattagctgtattttggtataaaactactacttggtaaaaactatttcgatgtatttatttctaggagataagaaaataaacataaaatcaaaaataatatagtttttagttaattatcagatttttcactgttatataacaattttgctattttggaactcattggtaaagcaaaatcatttacgtttgatgctcacttgccaagtttactgagtgcgtacagacttatggggcatattaactcgattaggtgctcttaaaataagctttctaatgcagtatatctatcacctacgacggatacgcatagcaatgtcaattaatgctgttaaatcatcattttgaaaggaaaaataaattacatgaataaaagggaaatattttatgccaaaacgtaaaacggtgtcattttgttgtgtggttttgttttgcaagaaaatggttatgtctaattagaaagagggggcaagattcggggttcgaagagaataatgtatatatagtattcttgaattccacaatcactctacaaacagaaactttgtgagtaaattgatacaactctcgagttttaaacaaggaaagaagtaaacttgcatattttgtatctccttttttttctgataccgtgggtgcttctttttgctcaggtcagccaaagcgtcacttgctaactactgg

SEQ ID NO: 105366 - DNA, 488 bp, Mimulus guttatus
  Intron number 2 from transcript mgv1a009347m (locus mgv1a0 09347m.g) derived from phytozome v7.0 (chr-ID scaffold_83; pos 453223 to 453710)
aggtatattgcgtgtctgtctaatttcttaatttgtttcccctttgagtgaaaagagattctggttcttcgtctccttccttacaatatggctttgagacgtgtatttatagatgattaacacactggcaagttgatatctagaaaatacatgcgggaaactgtgactgtcaactattcagatttttttcttaaattctttgcttgaactgaaacagaaactgggtaggaaaataagacccctgactgaaaaccaataaaaggctaagtctaattgatggaatgtaatgggattgtgtaacttggatataatagtcattctggtgttgactgaaaacaaatttagtaaagtcaaaatttggttaaaacttcttgttgtaatactctgatacatatgattccatacatgtgccgattaatcatattctcaatcttcaaaactggttactcattgtgtgtgatagtgttataggaacatatttccgagta

SEQ ID NO: 105367 - DNA, 654 bp, Mimulus guttatus
  Intron number 2 from transcript mgv1a004359m (locus mgv1a0 04359m.g) derived from phytozome v7.0 (chr-ID scaffold_4; pos 1635627 to 1636280 reverse strand)
ctcttggatcccatttcacttcttcttcctgtaatgttacttcctcttgcttttctttctttaatctttcttgattgcgttcctttattttattaatttgtctgcttttgcagctaggaatgaatttctcgaagatgtttccacctttgtaagtccttactaaattttttatttgtttatttttaattttcttttacttggagtaattctgtgtgtgtgtgtgttttgtagacatttgctggtgacgtcatgccattaaatgtgctgcctcaggtgtgtgtgtgtgtgtgtatgtgtgtgtgtgtgtgtgtgtgtgtgtatgtctttcttgaatttcaatttccttgtctgttttttattgaaagtttcgatcttttgttgattcattagctgtaatgactgttgttttttgttactgcaataggagtcatccaccacactgaaagaaccaccgggcgtggttttttctgaaaatttgaccgaatcgacctcagacgacactagttctcgaatcactagacaactcactgaaggtttcatcttcttctgcgttgaattatagtttctgttctcggggttacggttttatttaacaaacgacatatctaacagaatcaaattcaatcggtagtggcggcaaaaaccagtctttag

SEQ ID NO: 105368 - DNA, 594 bp, Mimulus guttatus
  Intron number 1 from transcript mgv1a004359m (locus mgv1a0 04359m.g) derived from phytozome v7.0 (chr-ID scaffold_4; pos 1636324 to 1636917 reverse strand)
agtgaattgttttttcacagggggttatttggcaattagagatttcacaagggtggaatttgcaattaaccccaaacaaaatagttttttttttctttttccgtaacttacaacgttcacttgtgatatgtattaatatgggatgtgggccaagaataagatgacacaaatatatggttggttggatgaataaatatgaatatgaagggacttgtgctcacacaactaactctactcgaaaatggtggatctttaatccttacattctttaataatatatactatactatattcatccgtggtgggttcttagcagaattcatgttttttttcatttaaacagagaaaaacaaacctaggttaaaaaaagattgtttttttaatccttttcttgattagaattacaattagccgttgttgcttgtttctactttattagactcactgtataactgctgtagcttctgtttcttgcaactatgattttctgtctgggtttttttcattaatgtttattttcaagtaaagatttgatttttatattaaaaaaagacaatgaaaataaaactgagaaaatcagtggtgttcttactg

SEQ ID NO: 105369 - DNA, 712 bp, Mimulus guttatus
  Intron number 2 from transcript mgv1a024245m (locus mgv1a0 24245m.g) derived from phytozome v7.0 (chr-ID scaffold_24; pos 661860 to 662571 reverse strand)
aggtggtgtcgagccgattcccaaaataacactaggtaaattcaatttatttttgaaattacttttttaatttgtcgtgtttgataattatatttcgattccgattgtagttgtttgaacactaaattgaattacagtgttgtactggattttgattgttgatgattggtagcattaaaagttcaattgaaccactttttatgtgtatacactatccagttaattctcttcataagaatcgaccatagttttaatttcaatttctccagttaattctcttcacaagttttaatttgtagctgtttaagatgttggtttgctgctgtttttgttgctgtcattttttctctatatccataaataaactatatgatggttaataaaatagaagtgacaactagtcgaattgttgaatgaggtattatatatatatatatgagattttcaatatacttttgaggctccttcatgttttcgatcactatttgagtatttgttattacacttttgttgtaattttttagtggattaacttatttcgtagtggcttatgttaatattctagtggatttcgagaatttttgtatgggttttgacgagattatagtggattttaaattcttgctttggagaccgatttttagtgaatgaattaaattgacacgttgttgtcttatttttctttgatttaggttcttgcacaagcgggtga

SEQ ID NO: 105370 - DNA, 518 bp, Mimulus guttatus
  Intron number 2 from transcript mgv1a004491m (locus mgv1a0 04491m.g) derived from phytozome v7.0 (chr-ID scaffold_4; pos 2723484 to 2724001 reverse strand)
ttctcctcggttttggtattgggttcgccaatcaggtacttgctcaatcattactactatgcatgaaaattgaaatacaaatatttatttattttaattattttctctgttttttctttatttattaaaattaactaagtgcccctttttccaattttcttggagaaatattgacttatgtgatttaaatgatttttttattggattttttcttttgataaaaataattatttttatttgatttaaatgatgaataatatttgaagtaaatgttttgttttttgaggctgattatagaagatatccattattgtaaaatcatgatttaaatgattttactctcatcaattttagtcctgggaatcaaaatcttttttttttttggtactgaatcaaattcatttatgattaattttaatttttttaattaccaaagtcgagaaattaaattgaacatgaaaaaaaactaataaaaataatatccacgtgtacagtcagtgccactgtacctgtcggaa

SEQ ID NO: 105371 - DNA, 903 bp, Mimulus guttatus
  Intron number 2 from transcript mgv1a013120m (locus mgv1a0 13120m.g) derived from phytozome v7.0 (chr-ID scaffold_66; pos 1039662 to 1040564 reverse strand)
actgagcaacgccgccggagcaagatcaacgagaggtgattatttcaatttcgacaaaaaaaattaaattgagagggatttttttttttaattaatttgatgaatacttgtggcaagactgataatatgtagtatttgaaagtataaatgtgattagtcaaaagtagtgaccttcttagtgcaattcttgaaaatttataacagtgtccaattctgtttgttcatctgctaattttgaaatatttgtgttagatttaatctactaattttttagggcaaattgtatcagatattaagaactacaatgtggttaatgatgataatacttttctgataaataggttttagggtaaattacggccaccttttaagataaggttaaattacgaaaaaattcctgatgtttgggtaattactaccacccctcaactatgaattttcttatacgttcgctcctatggtgtcaaattcaatacaatcttctagattatgtggaatgttctctagtttgtactcgttttgggcaaatatgcagtttacgatgcaccgcattctgatatttacaagccaaaaaatacatcttatgagcattttgtttcaaaacgtggatctcaaatgggttaaaacgggtacaaactggagaatattcaacataatcttcaagattccactaaatttgacaccgtaaggttgaacgtgtaacaaaactcatagttgaagagggtggttgtaattacccaaacatgaagggtttttttgataatttgaccttacctcagggctggtcttaattttaccctaggttttattgttattgatagtctttggagcatgtcttttgcactaacagttttttttaatacctcagatttcaagtattaagaaaactaataccacacagtg

SEQ ID NO: 105372 - DNA, 688 bp, Mimulus guttatus
  Intron number 1 from transcript mgv1a011124m (locus mgv1a0 11128m.g) derived from phytozome v7.0 (chr-ID scaffold_205 ; pos 410979 to 411666 reverse strand)
gccttttctcggatcttcctctggattctgcaaaggtcccctttttttctttttctttctctttttcttttttaatttatttattatcaagtactttttgtcatctacttctgttcgcatgcgtgaatttttatttttgattttttcttttgcttaagatctaattttatgaggtcgaattttccagcaatttgtgggttattgaattgatctagtttgggttcgggttcgggttcgggttcgggctgggttcagtttttccttttgcgcggttttttggttttgttttgaattgaattggtttgaactgtttcgattctactctttcaacgtgttcttctgcatatatacaaattatttgctgctgcaaagtaatatagtgttgtgttaggtggttttggttaggtttctgtagaatattcccagtaatttagtggtgcaatttctgattaatttatctccgtttaatttggttcgagtgtttgagtacgagttggatgatgatttgtaactgtctattgaattcttttactatctgatttcattatctcgggtaatttgcctgtttttactcatgatgcaatgtagtcgaattctcgaaaagcttgattcttgttcatcgatcaatcaacttattccgatgccaatttccagatattgatcggaatctgtttcacaatatcaacag

SEQ ID NO: 105373 - DNA, 481 bp, Mimulus guttatus
  Intron number 2 from transcript mgv1a006454m (locus mgv1a0 06454m.g) derived from phytozome v7.0 (chr-ID scaffold_63; pos 75733 to 76213 reverse strand)
gatttggtttcaacgattcacattgcagataaggagtaagtttttctctgatttttttttttttttgtaattttttaatttgcttttttggaattgcagatgatagatttttcttttgattgctgtattttcatggataaaaaaaatacacgaattgcctatggaatgtggtttcagtgcataaattatgtttaaatttgaactgcatcatgatgatagtgtgttttatctggttcagcaaatgaaaagtatacaatcatttatcaattgaatgttgcaccatagtgtaggaaacaatgttgtattgattgggcttttttattatgtttgatattgattatgatgagttttgatttagagttaatcaactatgaagatggattcattttcgtccgagtgtttctctaatacttctcttaattggaatcgattttgtatatgttcaggtacttcgatacattgcaggaagttctagagccat

SEQ ID NO: 105374 - DNA, 915 bp, Mimulus guttatus
  Intron number 1 from transcript mgv1a001220m (locus mgv1a0 01220m.g) derived from phytozome v7.0 (chr-ID scaffold_16; pos 45341 to 46255)
caattccggatcgccgatctctactctttttttcggtaacgttcttgccttctcatcttttcatttaattttctctttccgatttttttgttgcgtttgatgtagatctgaattgccttgtgcctatcttctctttctgatgtattcacgcatctcataatttctctgttaattcttaggtgaacactgatttgtcgagtttaatttcaaatatttgaaatgtcgattttaattacaattagttggtcggatttatctttcctatgagcttaaattaatggatctggtgtgattactgattaggacgattattttgtttttgcactgttgttgttcatcagtttaatgggtgaagggtgtgggaagatgctggtaatacatttaggttgctatgggttgtgcatctctctggattctgttaatttaacattgttaacctaatcatttctgatctgctttggtgtccttacagaatgaatacatgagttaaccatagctcgcgaattgtttgagttgttagtttgttctcacttatttcatgtgttaataaatatatttgagaaactcacttatgggtttcttcgtctcttagatctttactgtactgaacaggagggatacaattaaaatttatactcataccagaaatatttgtatgccatgcgtaaatcagataccaagatttatttaaacattggataatcacaagagaaacaaccgttctaattttgtaccttgtttcaatattgttagtcttatgtagcatagtattatgtagattgatatggctgaataaataagtggctgatttgtattgatttccaaaagttatgtgttatgttaaatcttgtttaaagttattgttctgtatttgtaaattatttgagtccaatatgaccagataacaggtggaaa

SEQ ID NO: 105375 - DNA, 497 bp, Mimulus guttatus
  Intron number 1 from transcript mgv1a016856m (locus mgv1a0 16856m.g) derived from phytozome v7.0 (chr-ID scaffold_271 0; pos 1444 to 1940 reverse strand)
cgactccaaaaagcgatctgctcttggccccgaaggtataatttaattccaattttgtttttttaatttaattagctgaatctgtttgtggaaacagatcgagatttttcggaattggggattttcgtgtaatcgagatcttatgataaattatgatttaggttttgttttatcatacagttcaattatactgaaattagtataatttgatatttgtctcatccaatcgcaattagtggtgttgtaatcatacttctcaactaacaggaatttcaaagcaattatgtacattggctaatttgatatttagctaatcgacctcgtcgacatcttacactgattcaatagaagatctacaattgactgtcacttctgtaatctcgaatcgaggattatttgatgcttttcttgtgtggtcaatagtgtctaaaaaatgtttcttcttttagtatatgaattgttcgattgacttttccctactcgttgattgatgtaga

SEQ ID NO: 105376 - DNA, 328 bp, Mimulus guttatus
  Intron number 2 from transcript mgv1a011970m (locus mgv1a0 11970m.g) derived from phytozome v7.0 (chr-ID scaffold_49; pos 655716 to 656043 reverse strand)
tttacaccatcacctacggcggaggcatcgtctctgtatgttggcctttttattttcttccagttaattgaattgggggattgattgaattgaatttgatttcatttcattttttgtttttagggggactccattgcttttgacgttacggtgggtgatggctgtactgctgttttcaccactcaatcttctaccaaggcaacaattaattcccactctctctctcctctgcctgcctaaaatcaccttttttttttttttttaatgttggacttggaaataataatatgcaggtttacaaatctctaggatcaaaatcttctcaaca

SEQ ID NO: 105377 - DNA, 613 bp, Mimulus guttatus
  Intron number 1 from transcript mgv1a016371m (locus mgv1a0 16371m.g) derived from phytozome v7.0 (chr-ID scaffold_55; pos 868289 to 868901)
gaggtcagttgttattgtggcttttacatatactgaattcaccgtagtgaattcgcctctactattagagtcgatgtctagtgttcgaattaggcttaatcccactttgcacccttgaaatataccattttggtactttgcatcatcgaaacaaattaatagcactttgcaccctcgaaactcaatatatcatgcataatgcaccccacatgagtttttaaagttaataaaggtaatttcatatttttagcggtatttttaaaaattatatttttatcacgaaaaaaagaattatacgaaaaaaaattcttgagctattttgtgtgaagaaaatatcaagttaatttgttattttgcaacccggaaaaaaaaccaataaaaaatgaattatcctttattattccttaacaattaagggtgcactgtgatttattattgatttattgtgttttgagagtgcagagtgctattattatttttcaagggtgaaagtgtcagtcgttcgaatcatgtccctctcgtattttcctaatttataatacagtttgaattcaatgcctatacttcgattgtgacaggttcgttcaaattgaccctggagttcacagaacga

SEQ ID NO: 105378 - DNA, 803 bp, Mimulus guttatus
  Intron number 1 from transcript mgv1a010463m (locus mgv1a0 10471m.g) derived from phytozome v7.0 (chr-ID scaffold_82; pos 236202 to 237004)
ctcaacgattggtccaattctaaaggatattgcttgtatgaatttctttttctttttcttttttttttttattattgttaagaattgtttgaatagtgtgtggggaaattttgggttttcttcatatctgtattttgggtttgtctgaaagattgtttggtaagaaacttaccgatttcgtctttttatttagttttatttaagtaagaagagaaaaaacagagatgaaaaatgtagtgtggttatgaatagttgtttgtatcaatctgatttttcgatatttgtaatgttttattacatcgcatttctaaaaatgttttaagggtggatcaatgttaggtgcatttttcaattcctttattacactcgaaacttgtaacttctcgaacgacacgttgttaggtttttgcttcgggatatggtataaatctttcttaaatttgggtttaattcaaatccttgattttgatactattatagtattcggaacagtgtttggcagaattcttgaaaatcgattgattataagtaataactttcgtattcggatagaaattatttgatcttgaaaatactaaatgatcattgtattgtaagatatgagcaattatgcaactcaatacttacttgagcaattatccgtgtaaccttcttatacattactttcacaatttcgagattttttttttttgtttcttttctaagtacactgaaatttatgtggccacggttttataagtatgaatttacgatgtaaaaaatgatgtttatttatgttttcaaaccgtttagagaagttggag

SEQ ID NO: 105379 - DNA, 1011 bp, Mimulus guttatus
  Intron number 1 from transcript mgv1a013495m (locus mgv1a0 13495m.g) derived from phytozome v7.0 (chr-ID scaffold_5; pos 617993 to 619003)
atccaaaaacattttttgctgatcgcacgaaacatgtaagaaaaatctttctcttaaaacccttctctcccaacatttttgcagttctatgattacttcctaagttaatccctcgttcaattctctgcatttttgtgtttaatttcttgatgatatgttaattttcatggggtttaatttatgtttattaattgataaaaaatcgtgtctttaatttggctgctgatatgctgagtgctgtgtcaatcttgttcatgctttcattttgtttcttttttgtttgtaatttcatagagatgtgtgaatttgagtgaatttcatagcatctaaaatataagttaaaggactggataatttgggacttgggattttatttttattttttttatatatatatttataagagatctgttggacttgtttttggatacccgtttgagtcgacgtggatttcggattcatcggtgactagttataggtcttgtttgaatgattctgtgtgatttcgaataaagttaaacctcagtcgggactagcaaaatcctattaatttagcgagatattaattatcgaactaataacttaatgcgttttcaccgagtcgggaccgggataaattattattcaagtgaaattattaatttatagaggttctactgtaactatgtatcatttgtaatccttagtaccaaactcttctctcgaatctgaatccttcgattccaaacgtagaattcagggcttaagcattaaaacgagaaataaaaaataaaactcgccaatatattgaagtgtgacatctttaggaaggaacaggcagttgcttaagaaaaatcggggagtccgaagatgaactagcaaaaggcaattttctcttgcaagaaatatccgcagttgattcttttaaaaaacgttaaattgttaattatcacgatttctacttatgcgcacgccgtataaacgaatgagcttttgattttcttttaacagattacttattgaaagcttgga

SEQ ID NO: 105380 - DNA, 742 bp, Mimulus guttatus
  Intron number 3 from transcript mgv1a013495m (locus mgv1a0 13495m.g) derived from phytozome v7.0 (chr-ID scaffold_5; pos 619724 to 620465)
aacagtccgaggttgccgaacgcctccgaattaaggtaatgttcgttactcacttcactctattatcgagttccgagagttttgagtttatagaacaagaaatattattttgtggataaattacaaccacctctgaggtatagtcaatttagaaaaaacccttcttgtttggataattacatcgacccctcaactatgattttttcttacacctccacctttgtagtgtcaaattcaacataatcatctaaatttcgtgaaatgttctctagtttgtactcagtttgtgtaaaaatactatttctgatgcaccacaatctgatatatagaagtcaaaaaacacatattatgatcatcttgcttcaaaatgtggagttcgaatgggataaaacgggtacaaaagtgataatattccatataatctcgaaaattccactaaatttgaaaccgcaagagtggaagtgtaagaagatttatagttgaggggtggttgtaattacccaaacagaagggatgttttcgtaatttgaccatacctcaggggtgattgtaatttacccttttttcttctccattttgaaagcctagtctgagtaatgaatcgaatgcatgatccaacgactctaaaaaaaattctcgattttgaaagtttttaccgagatttcttatcaatacgataccactaaaagcaaagtgttgtaatgcagactgttccgttattccacttctacaaaaacggagt

SEQ ID NO: 105381 - DNA, 453 bp, Mimulus guttatus
  Intron number 1 from transcript mgv1a005684m (locus mgv1a0 05684m.g) derived from phytozome v7.0 (chr-ID scaffold_87; pos 900460 to 900912 reverse strand)
gttctggtcgcattctccggcggttcttcctctaggtattgtttttttttttttttttttttggtgtacttttaaatctctctgcatatatttgctcaagtttgattttccttgtttaatttgtgaaatatgaggttgagtttgaattcatttgatgtttagcaacatctgaattggtttagctcatttaattttctgcaagcttcggccatttttattgctcgtttcgtattgttaccaattaaggaacaaggtcgagtgtgaaatgcgtttgagatttcgattggttaactgatttacacttttagggcttttgttactttcttctagattgacaaatgtgagtgagaaataatccgaaaatcattccatcctttgaaattttagttcccgtgatgtttttttccaacacgttcggttatattcagggtggctcttcaatttgttcacgag

SEQ ID NO: 105382 - DNA, 645 bp, Mimulus guttatus
  Intron number 1 from transcript mgv1a019471m (locus mgv1a0 19471m.g) derived from phytozome v7.0 (chr-ID scaffold_50; pos 914928 to 915572 reverse strand)
aagctgaggtgcgtcattgcattgaattatatctaacaatgatctatgtagttgctgaattgtctgagtaattaattttacatctacgaataacttttcgccttctcatttgcgtttccattctttccataatctcggaaaatttacacacaagtccctgaaagatgtaaaaaaaacatttagatcctcaacataaatgttgtttttgccttgtcaattctatacatttagaatccaacatgactgacacggagtgacaacatttgggaaaattacaaccacctccctgagctaacgtgtaattacaaaaaaaacccttttttgagaaattatatccagtcccttgcagtttgtaaatttcttacatcccccacagaagagtgttaatgtaagtaatctacaaatttgcagggatgatggatgtaattatggaaaactgagggttttttttcgtaaatagacattacctcaggggggcggttgtaatttacccttgtttcaaaacatagttgatatttgataacatagtacactcatggaactatatatgtagatatgacattgctctatggattcatagtacttatcggagaatctgaatttcaatttccttttgatttctatctgcaggcggagttgaaacag

SEQ ID NO: 105383 - DNA, 838 bp, Mimulus guttatus
  Intron number 1 from transcript mgv1a000525m (locus mgv1a0 00525m.g) derived from phytozome v7.0 (chr-ID scaffold_6; pos 3904521 to 3905358)
ttgactaggctctccgtttgtcatttctcgataaggtattatatatcctgtccgtatgtttgtgttttatgtatgaaagtgttggtttgacttgtgctcaaagctgtttggttggatttggtgattggtgtggatttcttactcgtacggaaaaaaagaagtaaatagtgttctattatgaatgtgtgatgaaattagacgattaggttcaactgttttcgtattaagtagatgatatctttgcatataggttaaacagtggtaagagtggctttcctacctagttacagctctggatatctttgccatgatcacaccatgtcaatcagactctactttgtgtctggtgctggtttcgatattccaggttcatggctatgcaatttccaaattctgttcgccgtagttgggtgggaaagttccaaaaggtttcataagggtatggtgacacgacgaatgattatcttcgatatttgttataatacggactaaatgtatttgatttgtaatttgagtaatcttagaatcctttactcttacaaatcttggatattttgtagatagacaggtaaacaaaagcattgctcacaagtttcgtatatatctattttctagaagtaatctatttgcaatctttaaaacattatatagtgatctttgtgaagctcttgatgtatgtgggttatcaatgttaattccttaatatccattattagttatttaattttcagtgtgaattgtgcttgtgttggtgtatcagtttggaggaagttacaagtttaagaatgttttctttcctgcagattccttcctccagaaattggctaccttagcagtt

SEQ ID NO: 105384 - DNA, 700 bp, Mimulus guttatus
  Intron number 1 from transcript mgv1a015315m (locus mgv1a0 13721m.g) derived from phytozome v7.0 (chr-ID scaffold_246 ; pos 228665 to 229364)
gaagctcctcctcccgctttcgacgagggtcagcagtaaggaattcgcccctctttctctctctataattttgcatgttttcttcgtattaagtattgttgttatatgtgataattgcaattgtgtttaattttttcaatttctgagctcgttttttggtggattcagtgtgatgtttgcgattttatgtacaatggtatgtttttcgacttgatattttcgtgtacatatgaagagtaggtgcctgtgcttcttttgaaagatgtcgttcgatttacactgcggtatgtatttacgtgtggttcggatgcgtgcattgctgttttattcgttgtgattttccaaagttttactcgagctactgcaatggattgggaatgttctgcaacctgttgtttcctaataataccatatttctgaaattacataaatttgggattggaaataacttaagaagtatttgtaatgaagatgtcatcacatattcgtctggaaaaaaaatacacaatctatcaggattggatatcgtacgttattattttaaaatttctcatcttttatgacttgatcgttctctcttttttggtttcgattttttgaaatgatctgctctatacctataataactgcatgaggatgaccagagttattttgatgtattgtttcagcccgttgtttgtgacttggaagaaggccgtca

SEQ ID NO: 105385 - DNA, 200 bp, Mimulus guttatus
  Intron number 1 from transcript mgv1a020450m (locus mgv1a0 20450m.g) derived from phytozome v7.0 (chr-ID scaffold_57; pos 903977 to 904176)
gccgatcaggtttcgtgttcctacttttgatggttatttttgttcattaatgttattttcaccctcttcataatattcttatagatataaaaggataacaaatttgcattaaatattttgtcgtccgaattttcaaaaacaaatttgcaatttagtacaaatctttatgatgcagagtgtggagactcgtgttgtgagaa

SEQ ID NO: 105386 - DNA, 595 bp, Mimulus guttatus
  Intron number 1 from transcript mgv1a005575m (locus mgv1a0 05575m.g) derived from phytozome v7.0 (chr-ID scaffold_228 ; pos 18233 to 18827)
gctgacagagcatctaaaaaatccaatctttatctgtaagctcccttctcactgttcttttgactgttaatcccaaaaatacaatctttatatatacctaattttctagctattgttggtctgcgattcaactgtcagtgagtgtttcttgattttttttttttttttgcaatatctatgattaagaaatagtaataaataaaataaatcaaaacccactcgtatttgattgatgcccgaaataaaaattgattcttgattgtcgatttcacctaatctaggtcaaatgaatgccacaattttagcaattttttgtttacttaaaaaaaagaagatagtgtgtgtgtgtgtgtgtgtgtgtgtgtgtgtgtgtgtgcgtgtgtgtgtgtgtgtgtgtgtgtgtgtgtgtgtgtgtgtccgtgattattctgaggatgatgtaatatgtattgatttgtaatttgaaatgtatcatttaatatttatatctccaatagtgtgtgtgcgcgagcgcgtgtgtgtgtgtgtgtgtttattctgaggacgatgtaatatgtatcgatttgtaatttgtgattgcagaaattctatttgt

SEQ ID NO: 105387 - DNA, 799 bp, Mimulus guttatus
  Intron number 2 from transcript mgv1a003008m (locus mgv1a0 03008m.g) derived from phytozome v7.0 (chr-ID scaffold_169 ; pos 152344 to 153142 reverse strand)
agctctcggctcaagccaaaaccgcagctaacaaggtagaaaactgaattcatctgatatttgtaattgtacatttgtgatttttgggtattttttttgtatttgctgtattgggtaaattgagtgatttcgatgatcgatggtgaaaaaatgattccgattgtattcgtgagttgtgaagatcttcacgaagaggcggcggatttgactttggtttggcgattttttctttagcagcagttttgatgaacatgatacaatatttagataatagacctttgtgttggtgaaatgattttaaattgcagtgcagcaatcatgttcgtcgttttgactattggatgataattattggtagtgccggaaatgtcatcaccgaagaatctggtttggatctattctttgctcaacttgcagattagactgcatttctcttcgactgtgtctgtatgagctaaattttagatgtagaacgagcttcggcagtaattttcgcgggatttattgctcagttctgattggaccgtcgattatttgcaaatacatccatattcgtgggaactgtttttgttccatgcttcgatggaggaagcatatgattgcagaaaaaaacgtttttctgttgtgtttattaaaaacgttactagtaaaatactccattctattcaaacagaatggaaacacttcctttagtttatttgcttctttaaaaagaatcaagaaaaactcagttgacactaatgctatttctttcattatgatagggaccacaaacgacgtcatttttcggtaaagccgg

SEQ ID NO: 105388 - DNA, 744 bp, Mimulus guttatus
  Intron number 2 from transcript mgv1a012816m (locus mgv1a0 12816m.g) derived from phytozome v7.0 (chr-ID scaffold_44; pos 1265456 to 1266199)
aattttacgggctctgtgatccaggtaaatctttttagttcagattcagtttagttgacttttttgtacttaattttatggtgttttcaatctcttatttatatggaagtttgactcccttctcttgtgtaaattggttaaaaaggaaggggattttgatgaattttggcacacttgttttctttgacgagatcggatttttattagttgggtagattagctcgtaatggtattggtaatgaaaagaagaacaaatagccgaacggaaacccatttgtgtttttaattgttacaagaaggggttcttttttcttttatttttgtactgaggaatctttctgttatgctatctgtaacgaataaccttgtttgcgtctctttttttttttgcttccctttatgggtaattcgtatatggtataaaactatttgatttgaatttaagttgaacttagtttattgacaattagaatatgaaaaatacaagttcaactgcttttttccgcctttagctccgtgttcgaacaaaataaccatacaaccgacacatgtcctgttttattggtgaagaacctttgggcagagcaaagtacttgcattatgctttctgaatgtcagttcattatcatttcctatgtttatgatttatcgttttaacatatttgtaatctttcatttctctatttgatcaattttttggtttctcaactttacttatactagagaaggaaaatttgtgtttgt

SEQ ID NO: 105389 - DNA, 893 bp, Mimulus guttatus
  Intron number 2 from transcript mgv1a025255m (locus mgv1a0 25255m.g) derived from phytozome v7.0 (chr-ID scaffold_85; pos 794211 to 795103)
aaactataaggtatcaatttctatataaatatatatatatttatatatatatatatatatatatatataaatatatatatatatatatttatatatatatatatagactcattttcttggatttagatttcttctttgtttcttggaaacttgcactagatttctttatatggaaaattatagtcttcatctcttaagtttgcattaatttcatatttggttcttcgtgataaaaaaacaacacatttggtcctccatatatgcatatatgcttaaaaaattcaacacttttagtcatttccgtcaattttccgttagtactaacggaatcaagggtgtgccctgcattaactgataggctatcagtaaattgatggaaatgatcaaaattgttcaattattgaaacatgagggaccaaatatgttttttatgaatgtggaggactaaatatgaaattgatgcaaacttgaggtttgaaaattctaattttccccttacatgaacttagttgagggcaaaactggaaatttcgctaggtacaattaacatcgtcaaatattgacggagaagggcatgccgcatgtcggcatgtgtgagatatttttagtacatttatattatactgaattgcgaaaaaactcatcgtgatataaatattagcaaaaaacccctataatgcagttattatagcaaacgaccccctatatgatggttataggggggtagtttgctagaacaattgcatcacggcgcggttttcgcttatatttataacacgagcagtccttcagcaattagattcatgaataagttcggtttcggtttcggtttcgatactaattaatttgctgctacatataattaggtacatagacgacccttacgacagatt

SEQ ID NO: 105390 - DNA, 709 bp, Mimulus guttatus
  Intron number 2 from transcript mgv1a000070m (locus mgv1a0 00070m.g) derived from phytozome v7.0 (chr-ID scaffold_1; pos 2363726 to 2364434)
aatttaaaacagcgcttctgcaacgtcttgaaagggtaagtatgaaattttgtgtttttggcttcgatgaatttcttggtgcagtggtaatgtaatggtgacttatcctctagttgtttacaagtgtgaatcctctattaagttggtgctctgcgaataaagccaacagttggtacttgatatattggacttcttcattttatttcgaagtgcatctacaagacacgtgaaaatagagcgcaaaagtggttatgctgatttctgcaatcctttatttagagaactttcaaatgttcctggaaaggatatttagattaaccttgagttgattaagctgttatgccagataacctcttcaatttgaattagtgtaattaagactcttcagttagaacgtcataagtttaggtaatttgttattggacttgcttggacaacacattctggaactgttaatggttttaggaaatgactgactgctactctgctcatagctccttggtttctgcactattgaaggtctttatatatgcagtagtttggctgagttttatgcataacagtttatctcataactgaactggttttatttatgacacaaggagattacgcacaaacctcatgttctgttggcattcttggaactatttcttgcatgtagtatattccaattatttctatttgtttattcctgatctttttcaggaaa

SEQ ID NO: 105391 - DNA, 560 bp, Mimulus guttatus
  Intron number 1 from transcript mgv1a014310m (locus mgv1a0 14310m.g) derived from phytozome v7.0 (chr-ID scaffold_26; pos 372782 to 373341 reverse strand)
atttctttttcggcgcgaacgataaattgaagaaggtgagttaccgctgtttattgttttctcgattcttttgtcgttttcttctgaatttttttgggggtttggttgaagataatgaaagatctgtgctttgatgcgttatattatgtattttcatccgatcctcgtgtattattattatctgaatttcttttttctttttttttttgataaatttctgaattttgttgttattgtgcttcgaatttggttgaagataaggaaagatgcgttggtgttttaatttaattcgtcaatttatattataatcttaatttctttggtcttaaatttgaatttgatgctctttaatgaaacagtacatatatattttagttatttttttagttctaaattgtacctatctgagcaatatatctgttgtttgatagatctttcggtttcggtttcggtttcgggttacatgtatacttacatattaaaatactaaaaaaagttatgaggttttgtttgattaatctaatgtttgaattgcaggactgaagaacagaagaagaaat

SEQ ID NO: 105392 - DNA, 570 bp, Mimulus guttatus
  Intron number 2 from transcript mgv1a019083m (locus mgv1a0 19083m.g) derived from phytozome v7.0 (chr-ID scaffold_108 ; pos 299276 to 299845 reverse strand)
aaggcgtggttcctgtgctctacagaaggtgaccatgcctgaatcctttttatttattcaaaatatcttaggtttttcttttcctatcttctaattttttcaaaaacaaaatctgaaaaacaatttcgggggcgtgcccacaaacccccgaaaatttaaattcaccgtataaccttatcatagactattgaaacaataaccgttgtcattaatttctttacgctattttttaatgaatattcagtcacagtaaaaaaatcctggcttctccactgaacacatacatgtttgatttggccagcgatgagtatatatatatatatatatatatatatatatatatatatatatatatatatataaaatactaacacaaattgcaatcacgttgtagcattattttgtgccccctttttcaccaacaaaaaaaaaaaatgaatatcaagatatatttgtatttccatttctaattaagtgtttggttaaatgtacaatgattaattaattgtgaagaaaaatatataacaattaacagggtgggaggcagaataagtgggggagtccgattca

SEQ ID NO: 105393 - DNA, 661 bp, Mimulus guttatus
  Intron number 1 from transcript mgv1a019083m (locus mgv1a0 19083m.g) derived from phytozome v7.0 (chr-ID scaffold_108 ; pos 300101 to 300761 reverse strand)
gcgggaatcaaaatcccagcacccttggtaagaactaatttattggtttttttttttttttttttttattttgtatatatatatatattttattttatgaaaagaatactgtttttattcaactctattatggttattatgtgcaagaagaaagttaattatttgaaattcataaaatagacaattatatttccataaataggacaaatatttacattttctaaaagtaagcatatatattaaattgttaattaattaagatcaatatagtaaccttcttaattttttttttaataatttgtgttccaatgaaccaagctcttcttgaattgaaggtattataaagtttaaacataagaatatataacgaactattaaaactttttggatgagttgctttaattaatttcaattattgtagtggatttttttaaaatatatttaattagttgatacatgaaattcttcccccaaacaattttctctaattcaaaaaataccatgcatcaattcatcaaatacaagtgcatgcacaatcaatttataaaataaaattgatcttgactttctcatgcaacaatacatacatacatagttaattttgactgtctaaaatgttgatttgtgatctcaggtggagcttgtgggtacgagaacagct

SEQ ID NO: 105394 - DNA, 203 bp, Mimulus guttatus
  Intron number 4 from transcript mgv1a023877m (locus mgv1a0 23877m.g) derived from phytozome v7.0 (chr-ID scaffold_382 2; pos 2983 to 3185 reverse strand)
atccttgggcttggtgaacatttttctcactctttggttatattttatatatgacctcgttaaatagtttcttttgattcttcatgcacagattaaacaaaaccgtaggccaattttttgcagcttcagtgtgcaatcctaacctaattctctaaaacttctaatttctaaaatgtcgttttaatgctgcaggtttgttttga

SEQ ID NO: 105395 - DNA, 686 bp, Mimulus guttatus
  Intron number 1 from transcript mgv1a009400m (locus mgv1a0 09400m.g) derived from phytozome v7.0 (chr-ID scaffold_201 ; pos 283768 to 284453 reverse strand)
agcttgtggcggcgctcataccctttttctcaccggtgaattttctttcccctctctctaaaattgaatttcctttcttttttgtggtggtgatcggagtttatgaatgtttgattggacttcaatttgattattatattgacttgtgtataatctaacgtcgcgtgaggttcacgcgctccgatgaattttagttgatgaatttcgtagacattttgcgtaggcaacgacattcgtttctccgtgttcgtattgattgtagacggctgatattgaaaatctataactgtactgtgtttattttcgactttgatgagaagctgcaatcttctattagatcaagttattgccgaggatcataattcgtaaactaaggatgttctaaatttattgtgttccgcctttgtttcgtgtaattgctcgtgataatcgaaccatcactaccattttgctcttgctttttaacataagaaagtttcctacaagtgttgtgcgtctctgtttcccggagtttcctcgtcgatagttcactctatcgggaaattcggaatttatgtggtctctctattttcatttttcagccttaaaatagttgcttcagtttaacgaaaaaattagatatcgtcgaaaactatttctatttccaagctcgttaattagctatgctgatctggcagatagtggtg

SEQ ID NO: 105396 - DNA, 668 bp, Mimulus guttatus
  Intron number 2 from transcript mgv1a010715m (locus mgv1a0 10715m.g) derived from phytozome v7.0 (chr-ID scaffold_57; pos 362469 to 363136)
gcttcttaagttcgacaaagtcacagactttgcaggtttattttgtatctattttttccccttcatttctacccattatgtttatatttgtaatgattcaatctagtggcgtagccagcatagagccaagggggccatggccccccgacaatttttaaatccctactattttatataaaaatattaaaacaaatcgtgtatgataacattaatgccccccttcagattttttttaatgaattcggccccttcgaagttaaaatcctggctccgttagtgattgaatcataattcaattgattggaaaagttgctgctactatagtaaggtctgagtttaagaagaattgaagggataactctgttttaattgccttaaaatttgtgaaatgaacgtgagtgtacttttaggccttttgtaattagtgaaatcacgagaactacgtttagaagtttgtatccgaggagttgcaacgttgttgtgtacgagtttgttatgatgtcgaacgaaaatgaatgataatgacaattttgttttaagatgacctattgtaatactgtttaatatcattgtttggtgatttttttgattttttttttcttttcgtaattatgtcttctacttgccttgtaggtagcaccaattttattatacttgctgtgttgacc

SEQ ID NO: 105397 - DNA, 1009 bp, Mimulus guttatus
  Intron number 2 from transcript mgv1a015338m (locus mgv1a0 15338m.g) derived from phytozome v7.0 (chr-ID scaffold_8; pos 1344017 to 1345025 reverse strand)
agcaccggcaaattgtctattcgtgctcaatacgagtatatatttttccctcgccaatatatgtagatgttgcttgttttaaaattataataggtaaaaggttcaagagctttaagtgatggaaagaaaatatagatttgggtgtgggtaggggaaactatatcaaattgtgactgaaattttgaaataagtgtgctgtaaaaagatgatgctgttgtgcagattgggtatgatttggctgaattgagtgtattatctatctccttggattagataacgacagccacgatgaatccattagttctctcttgttacttgcttctctgatttttcgttgtctattctgtatgatattatcttaaacagagacaacctcattatggttatcaggttagactaatgcagatttttcctttgcctggagttgctcccttatgagatagatccttgtcagtttggatacaaagatatttttctgcatcatgataaaatggcacttcatggaaagttcaacggaaatagtatccagtgaacaccattctccctgtctttttctttttatgtttcctctgtggttgcttgtcctgaagggatgtttttatggttcacctatttgtattctggagttcatcgtcttcaaaggataagatggcttttcgatctatgtccatatgctgctggaaatatgttttcatgattctgtcaagcgttgtgtggttaaaaatgttaattgcatttggcacgaaatgatttaaaacactaatcatgtaatcatatctgttcaaagtagtggatgcagggggggttccttttgaggtaaactatttggtggattcaggttgtctattaaactagcgttgtgtgcttgttctttgtgatcattgcattaacctaaaaagtatgtgatcagcattttatgtcttgattgggtaaaccgttgttactgttaatgactttttcccttctacatgtagtgatcgtagcagtggaagtggtgctgattttgcag

SEQ ID NO: 105398 - DNA, 969 bp, Mimulus guttatus
  Intron number 1 from transcript mgv1a016165m (locus mgv1a0 16165m.g) derived from phytozome v7.0 (chr-ID scaffold_129 ; pos 235768 to 236736 reverse strand)
ccgccgaggattgttgggtcgtcatcgacgggaaggtatttccactgattctatacttaactctccttaggttaaaaattgaccactagtttattaatttattgttgattttttttgggggtttttggatttatgctattgtagttgaatattgaattgaaaggttgaatttttagggggttttaaaaaacgtggctttctgctctttgaactgtgtttaatctttgtttattatgcttatatgctccatacagaaactaatcgtattaatgggttcaatttgttcggagatttaagtttgactttcgtgatttaattttttgggtactttttgattacatacaagctttgtaggtattgttgttcttgaaattgctgcagttatcattctcatctgttgcgttgaggatttgctaggttgcaaaatgtgacagtggttgtaagtagtgtggattttctaaataatttttcgtatatattcggggatgaagaagagtcgggttttagtatcttttttctttgacgttgtgctgtataaatgtcactccggtaacgtatttgttgctataactcaaacattccgaataagtgtttattgcgtaactaatcaaccacgttcttgactacggcattcattcttgttattatgcatcacaattctagtttcttggtttgatgatgttggataaagaaaaagtagttgggactttgtacttgtggagcacgttatagattagcactcgtctctatagttttcagcttcacgtgtcaacaatctcgtaagttgcatttcgataatttgtgaaagggatttcggaagtaggatttgaaatgattccatcaaagatggatttgaagttcaccacaacgattaagaaattaacttaaaataggaactcaaaaggatttagaatccatcttattgttcaaactaagaatatcgactcttactgttgaattaccaggtgt

SEQ ID NO: 105399 - DNA, 545 bp, Mimulus guttatus
  Intron number 2 from transcript mgv1a009215m (locus mgv1a0 09215m.g) derived from phytozome v7.0 (chr-ID scaffold_16; pos 1051231 to 1051775)
ggaataaagaggcttgtggggacaaattcggtgaggtaaagaaaattcgttcatttttcttaatatcgtcgatttacgttttatttgatgttcttgaatgtgtaaaacgtgttcgattgttggattggatcatgtggtttgcgatgatcacatggattgtattggttcttcactacaagagaaaaatggcggttgtcacacttttatggtgaccgcgttttgtacgttgtactaatagcttcttgttctcgtcactaaattccttgtttttgtcgtcgctaaaataggtgtcgtgactcgaaagattatgattttgtagtgatttgagagtattgaatttgattaaatcatgcaactcattcgtcgcctagattacacttgatggaaaataagtggcgtgtatactatagagcatatgtttcttgtgacgaggaatttgactgtcttaagatttaacaatgtgattaaacaatatatctacttcggtattttttttaattaattattttttttcgggttttagtgctggttgaagaaacagaagg

SEQ ID NO: 105400 - DNA, 865 bp, Mimulus guttatus
  Intron number 1 from transcript mgv1a012744m (locus mgv1a0 12744m.g) derived from phytozome v7.0 (chr-ID scaffold_68; pos 498508 to 499372 reverse strand)
ctcaccgttctaattttgcctcggaattgcttctggtatgtaatttttaatttttaatttttttttttggtatagggtttgaaaatgttcgtcgtgttctactattgggtgaattagtttctagagtttgcatatggggatttgatgatctggataaatttattggtgttgcacatataatttttaatgctgcaaacatataacgaagacgattgcccaactcgaagctagttattctagcttgaggaatcatactagaagttattaaattcaaattgacgaaagaaagaaagggaaatcacgatttgagatgatgaagtgagtcgattctcatatttcttaatttgttggattttggagctttgcattttccgtgaaaaaattaaggtgaagaaatgtacaagcaagattaggtttattacgctagagctagaagctaacgatcggcctcgtttttttttcttccttcgttatacccttttaccgctgaatatgagttgttgatgtagtacaagattaaaggttgaacggacatactaatgttgcgggtggcaagaacccaccggagaaaattgacgatcttgaattttgacttttatggttttggtcaatggtggaatttgtatctttgattgtttggatgaggaatggaacactctaaatattagttgatgcaaaatgtttgacgtcttcttgcttgttactatatatattcgtattctatgttctcattgtggtatgaacatccacatataacatgttttgtctcgttttcctctggtcattttttgtgtgtttaattctgattaaatcataattctcatgctcagagcaagaatttcggaactacgagttgcggtatacc

SEQ ID NO: 105401 - DNA, 663 bp, Mimulus guttatus
  Intron number 1 from transcript mgv1a011689m (locus mgv1a0 10070m.g) derived from phytozome v7.0 (chr-ID scaffold_122 ; pos 542718 to 543380 reverse strand)
acgctcgatccctcgagcaagccaaaaaatcgtacgtttcatgatctgtttttcggatttttttttttcatttttttttaattttaattcgtgctcgttttctgttttttttccctgctatgaaatacggcgtgcaattgaaaatttgttgtttacgaggtgtttgattttatgtccgtgtggtgttatccctctttctgaatcgaattttgggagaatatgtatcgaattgtttttcgttttgcttgtcttttctgtccttgagatcacccttgatacgggagctgggagctgaatttcggtttttattttgattcttctgaatttattccgtcttgtttccacttttccagtgtaataattccattcaccgggtgttttgtatattcattgtttagattgttatgggagtctcaaatatcatgtttcagttgggcctttgattaacaatgtcaatcaatttgattttcccatacgaaattatgcgttgatctgcaccggtttgcaaatatctctggatcatgggttattttttttttcttcggaatttggaatcgtttttgttctcggtgttctaatagtaaatatttgctgatgttgtgatacccgatgccgaatatctatgtaggttccccaatacgtacttgctcgtcggctgctgca

SEQ ID NO: 105402 - DNA, 696 bp, Mimulus guttatus
  Intron number 1 from transcript mgv1a001801m (locus mgv1a0 01668m.g) derived from phytozome v7.0 (chr-ID scaffold_32; pos 47289 to 47984)
acaatcgtctccgattacctcgacaaaatcatacggtactactcaccacacactatttcacccactaatgcgtgcggttgtgtttgtatcaacggttgagcgtatttctactttcactagaattttcttaatttggaaaatgggatcatttcacatatagtttgaattactgtttcgaattgtgtgccgtacgacctctcttttctcatcgattagagtgtgattttatgattgatttaatttgatacttatcggcattttgagttgttaattccccccttaattacatctcgtttggtataatattatactaaaaaaattttggattcgttttgatggattttcttcgtgtttgttattctagagaggtaaagagactaacatcagtagttgtttaaacaccggacaatgaaatcgacaaaaaaagtagttttgtgatggaaatatttcaagacttgttgttgtagaaattgtttttgattatttgctccgctgtcgattaatttcttctaagtgaatttacaattttacaataagctcaggataatgcaattggtcgaaatgcgttatttttcggtatagattatttacttctatacttatttatgttctgtattctgctattgtaacttatcttttctgttctgttatatctctgcagatccttttgtggaaacgagccgacgggtcaggtac

SEQ ID NO: 105403 - DNA, 587 bp, Mimulus guttatus
  Intron number 1 from transcript mgv11b013820m (locus mgv11 b013820m.g) derived from phytozome v7.0 (chr-ID scaffold_2 ; pos 3301368 to 3301954 reverse strand)
cagagcccccgctaatcacctctctaaacacgcaggtttctctctctctctctctctctctctctctctctctctctctctctctctctctctctctctctctctctctctctctctctctctctctgaaatagattctccgtttcaaattcgattgatgagtattttaattgtaacggcgaaatctatgttttagaataattttgattgtaagttaaggatttatgttaggtttctcaattagcttcacagtattactctaattaatgttctcgggtaaacgatgattcgactatgagtccgcatttttgtttatgttaatatatccataagcttaattgaacatcaataattagatcggttcagtcaatatcatgaaattttactctttatatagagtatgagtgtaatataatcgtgatttgaccctggaaatgtagtttttcgttatattttacctttatcgaacatgcgaatcttcgttcctaggttcgtgtttactgttcattgatttatttaaactattgaagcggagttactgaaaatgttgaaattcttatatttgtcagattatattgacagtatcc

SEQ ID NO: 105404 - DNA, 674 bp, Mimulus guttatus
  Intron number 2 from transcript mgv1a000844m (locus mgv1a0 00844m.g) derived from phytozome v7.0 (chr-ID scaffold_45; pos 1005573 to 1006246)
ttcaggatttgcacggagaggatctcagggaaacggtatgcattctcgattttttttttttgaatttggggattttttatatgtttctggcttcctttgaatcgagtgtttgatttgattgtgatgttaaaaaagtttgatcgcgacatttgaacgaacgatttcgttagttttttttttattttatcgagatcatgctgtggcaaaccttcctgaatgggactgttgttgaaaagattggatatttgtgttagttctatagaggaagtagcgattagccttataaacttttggctccatctcttgttctgatttgtaaatgtagtgtttcgactttcgagatggctacggttaaagaaaagtagaagatcggtacattgtgttgttacatgttggttggtagtagcagtcgtcactgatttaactccaccctttttggctcgatttcactaacgtcgtgactggatcaatgatttcgaaacgaggaaaaaatgaaaatgcagagcaaaacgagacttattccccagtaaaactgttgtctcgtaaaaaatttgtgaactgatttacctaccattttcgctttcttactccatgttttcttgatccaatcacagcctaatcgatttcggctggaattgattctttttttctgtactaatgttgtaggtgcaaga

SEQ ID NO: 105405 - DNA, 938 bp, Mimulus guttatus
  Intron number 1 from transcript mgv1a017394m (locus mgv1a0 17394m.g) derived from phytozome v7.0 (chr-ID scaffold_6; pos 3965240 to 3966177 reverse strand)
ggcaatgtaagctttatttatatataccttcaatttttctcccccctttttttagggttcttatttcagctaatctgaaaatgaaactctcaactggatagttaatttgcctagataccctttgaattttatgaaatcaattttcagcagtcagattacctgcgtagttaatttgagcttcatttctgatcactgcacgtgtttctatgggggtgtactctgtgtgtgtgtgtgtgtgtgtgtgtgtgtgtgtgtgtgtgtgtgtgtgtgtgtgtgtgtgtgtgtgtgtgtgtgtgtgtgtgtgtgtgtgtggaatgaagctggaaattgtgaaattgaaatagcagaacaactaaattttgatatgggaataagagaggaaattgaaatatttagtaccctacaattttagtttagaaagatacaatataagtagaataaaatataaaaatgaatctacattatatactctggcttctttctttcgtaaaataaccgagcctcgtttctctctttattttccccccttggtttaagccttagtcattcttaagaatgttttgtttactcttgatgatcgttgaagcatcgaacatggtaatgcccatttcgtctcgtaaggaatcacactatttgaaacaataacgccgtccgaacgcatcactaccaagtgggattgttatgatcgatttttatttcatatatgttttaattatttttgttgatttatttctatattgaaaccctattaagtagtagaagtttcttgcatgtgggatggtttttgcctatattcttctgcataaataagcgtgcgcgcgtttgtgtgttatacatgcttaattgcttacccttgatagtgatatggattctaaatcgaaaattttgtgttgtatcatgaagcgtcaatacgttgtgtacccaccggaggggccaag

SEQ ID NO: 105406 - DNA, 681 bp, Mimulus guttatus
  Intron number 1 from transcript mgv1a004358m (locus mgv1a0 04358m.g) derived from phytozome v7.0 (chr-ID scaffold_26; pos 1041466 to 1042146)
gcgaaatcgccaactgcaccaacgatttccgattggtaatgtttcaagtgattcacacaaaaaaaatatatatatcttctttctgttttactttttgtttatcggatattttgttgatgaaatgggcattatttccattgtgttcttatttatgtgtttaagttacaatgtgttgggtatattgggttaggttagagaaagtaacatttatgccataatgcttgatgggggaaaataggttgttacattcagttgagtgcatgtagtatgcctgcttgtgtgtttctccgtgtcaacacatgtacgaggtgattattctgtggggtcaaagtatgtgctataagtttcgcaattttacctttgttggtatgaattcttagttctaaggtactgagttatttccaacgaagaaaaatgacgagtttgccgatgggtggattatgagattaagttctgaggtggagcaatatgatactgatggcagtattctgattttattgtggggggagagacaacatatgtatttaagtttttcttttggtgaccttaccgtaatttaaactcttcttaggcgtttctatgcaaaaaaattcccaagactaaaagagaaaaaaaatcaatttttttctggaactatgctaattttgcttgtgctttgtttttccaggttaagatcaacag

SEQ ID NO: 105407 - DNA, 719 bp, Mimulus guttatus
  Intron number 2 from transcript mgv1a001973m (locus mgv1a0 01973m.g) derived from phytozome v7.0 (chr-ID scaffold_60; pos 28061 to 28779)
gacatgtaagctacgattgactagtttatattccagttgttcaattgtatctcattgatatggttgatcaattcaactgaaatatgaagtattgtttatcatcaatcttattttgatccttgctaattactaatatgcgaggagataactcaataaaaatagttgatcttttaatgccttaatcaaagcagcattacttcaatagttttacataatcagttatagatgtaaggctttagtcatgttatatcattttgtgtggaaaccgatatgaaaaggtggttcattgtaattcggcacaaaaaagttgaggatgtagtgatatattttgaactaaagcacttaactcaacagatcacatcatgtccagttggagttggggtattactcaaagttacgtgtacatgtttccctggctgttaggcctacaagtttgaatgttgtttctgttggcatcatcgttcaaattggttaaatcagtgttttttcccttaccctgaactaattgttacagcttctttgggacatttaggatcttggttttctttttggtatgaatgtaccaagtttatgtattgggttgaacattattttgaagaactggagcaaagttgatgatatatttctgtaatagtcttgctgtttctaatgacaaaaacatttgaagaaatgttttctccttgtacctgttactttaatgagctccaattttttggcag

SEQ ID NO: 105408 - DNA, 395 bp, Mimulus guttatus
  Intron number 3 from transcript mgv1a015540m (locus mgv1a0 15540m.g) derived from phytozome v7.0 (chr-ID scaffold_123 ; pos 692994 to 693388)
tgagaggtgcagttgccaaaaaaactatttctaaggtatgatttttgtcgatgctcctttttgccctcgtctttcagttatgtttttgttttcgttctttttttgtccctaatcttttatttctttgatttttcttcgtgaaactgaatgtatttcgtttccatagattctagtacttaattcgttcttattgaaaagattatattcttgtgatgataatttggacaatataagaaattttgagaatatttcatatccatggttattcaaacggtttatcatagtggctgatatgttgtttgtgtatatgaaatttattcggtaacgccataaattgaataattcaattatttaaaacaggaaaatcagcaaaagaaacgaagacgccaaaagag

SEQ ID NO: 105409 - DNA, 872 bp, Mimulus guttatus
  Intron number 3 from transcript mgv1a012541m (locus mgv1a0 12541m.g) derived from phytozome v7.0 (chr-ID scaffold_67; pos 140336 to 141207 reverse strand)
ttcgtattatcggtaaattttcttcttcttcttttttctttttttttttttttttttttttatggtttttttttttttttttttttatgggtgatgtatacagacgtactgtaattatgtaataattgaaataaattgcaaattgatattaaatataaataattttgacgttaatttagaaattctaaatttaagtagactagtaattaatctccttctttccacatatgatttgaccaattggaacttcttgatttgaatatttgaagaattgaacagaaactcagaaagaaataaaaattcaaaaatgatatttaagttagtgcatatcctcattttattttattgacttctttcaaaagagctaatgtccagtgaatcagaaacaattaatattaattaagaatgatttcacgtttttggagaattgtctattgagttgttggtattctcaactacaaggtaggtgtagttgctatatgttggacatgtagtaaattggaagctgtcagtttgcgttctttatttacttagattgattgaccttatgatccctaaacttcactaacaatttggactgatctcgaatgctactgaccttaatttcttcatgtcccaaaaatgtccccttcttaaaattgtaatttatctcaaattggattcttattatttttttttaaattattttatcataaatataagttgtattttatcttttataaaatttattcaattctgtggacatactatatattcgattattggaatgtagtgtatgaagtacatgatgtcctttgtgtttctgttaacaaaatatatgttccagaagcgttttcagcacctgtgtttttcttccatttgcaggtgattca

SEQ ID NO: 105410 - DNA, 395 bp, Mimulus guttatus
  Intron number 2 from transcript mgv1a026623m (locus mgv1a0 26623m.g) derived from phytozome v7.0 (chr-ID scaffold_36; pos 440687 to 441081)
gatccaacgggaccgtctcgtctagtatccactgtgtaagcgaagtttatgtttttttttaattgtttttcgttgcggttgataaatttcacatgttatatttttgtatgtagatggggtgattattggtttgaatgggatttaattatattccagatcatctatgaattttgaatttaggattattgtgtcaagatttaagctttgtctcgttacatgttaactgtcatcctcgatcaaagcagtcttctctgtttctttctcctttctgatcaagaaaccggtcctcggtttacagtgtaatggattggtactaaataaactacatgtgatcgggctttttttttaaattggttgtagtgcagagcaagtcgggattaaagtagatccaactg

SEQ ID NO: 105411 - DNA, 525 bp, Mimulus guttatus
  Intron number 1 from transcript mgv1a010395m (locus mgv1a0 10395m.g) derived from phytozome v7.0 (chr-ID scaffold_4; pos 2889287 to 2889811 reverse strand)
ctcttactctatccaaggtgcgcaaccgctttccgtcgattcgagtaaataagaaattgcattttatcccaatttttgcctttgatgattattcaggattactgttttgttttgatttgtaaatgttgttgaaattcatattttttcatgttatttgattagttgattcgtgatacacgcattgcatgtatctgtataggaaagcagagaaacataaatctgggtgtattacataccgtagtttaagcagttgtgaaaaattcaatgaagaagataagtttaacctaattaagtaattactactttttttgcccctttctgaagtttgacattttggatttttgctcaaattaggttagtatttcgaaatatttagcattcagcacaatgatctgtgagcttctttgtatttctgccattcacgcttctccgagcactgatgaaatttgattgcgataaatgtgtaatgagagtgtctgtacacatacaggtctttctaatcggtaaggatttcggatctcgtat

SEQ ID NO: 105412 - DNA, 794 bp, Mimulus guttatus
  Intron number 2 from transcript mgv1a006028m (locus mgv1a0 06028m.g) derived from phytozome v7.0 (chr-ID scaffold_258 ; pos 257560 to 258353 reverse strand)
tggttcttgcctattgtggaagctctcctcgttttgtaaattctcgttctctgtttccttaatgattttgtcctagactttgaaattattttaagattgtttctttgagataagatttctttttggctgcagagcagaaatattcataaccgacacaactacacaaaaacaattattttttggttttccttgcttagatttacacagctaagtttaagggtcattttgtgagattttttttttttacatcagtgttagggatatagtaattgagactgaaaaatgaattttgatagtattgcaaattagccatccatttggtttttattgcttcatttatttagttagaaagaaaattgacaaagtcgctataaataattttttgccattttgcatttcttcagaaaattggttctgaacctaggttggcatgtggttttattggatttgcctctttgtagatgaccgtcgtgcatcgttcaatattttttgtgagaaaaaataaagtgaagatagttgatacatgtttcaagtaatcaatgtattaatttcgaaagttgattgatgaaccaagtgcgtgaaaaacggacaactaagattttttggaactacttaatatgtccaagagtgactatttttcagtgttgaaaatagtaaatttggtatttcaagattgaagagtgccttgaatttgtccactaattgtacaactggataaatatatttaacgaatttcttaaatttctctattgcatctaggttggaaaggtgttacggatacaaaaagtatcaaa

SEQ ID NO: 105413 - DNA, 775 bp, Mimulus guttatus
  Intron number 1 from transcript mgv1a006028m (locus mgv1a0 06028m.g) derived from phytozome v7.0 (chr-ID scaffold_258 ; pos 258421 to 259195 reverse strand)
atcagactctgacggaggcgctttctcgaatctccgttgagtaactttcctcttccttttttttcagcatttcactggttattttaccgtattccgtgggggattaatttattagctgaagcctgaatttaatctgttgtgtgaaattctgatcatagcgaaaattcaccgccacatcatgtgacaatcatgctgagatttcactaaaggaaggggatttgaagcgactagatgtgaaatattgcttattagttctatttttttttttttccgattcaaaattcttattcctcagaaaacagttcatataattggtcccttataaattaccccctgccataaatctttcaggtctttttgtttttggaatttttttagtgttttatttgtttttattttttggtatgggtaatgatctagttgtatttgatgaactttttgtattacagtatggtgaatgtgtcttggaaacttatttagccctagtgacctaaccgatggaggtcggttgtgtagtattagttctataggtgattgctgaacatgtgttttgtttttgtgagttgggtgcatgtgtgaatttgtggaatcgaggctatggctggacagtttggtctggacaatcaatttggttgtaacacaccagatggcaatatgatgaattttttgagtggaacggcccaaaggtgcaccaaggtgttaaggtgccctgaagctacaaaactacatatatatattctgtatatttaagtgttcttttgtttgtgtgcagcgg

SEQ ID NO: 105414 - DNA, 822 bp, Mimulus guttatus
  Intron number 1 from transcript mgv1a004036m (locus mgv1a0 04036m.g) derived from phytozome v7.0 (chr-ID scaffold_9; pos 3220658 to 3221479 reverse strand)
tgcgctgtgttaggttttctggattgaatttgcaggtgcgtgtttgattgtttttttttttttttttttttttgagttcacgattccggcgaaactttggttgttggatccgttttgatgcggttttttttttttttttttttttttagtgatttgagttttgctgaaacggcggtttattggaattctgaacggtattttgattgattatgcttagtatttagcttttgaacgcgtggttgtttgtgaggtttttgatttttgattttatttttgattttttttgggaggtatgcggagtaatgggaggagtgagtttttgtgttgattgccttttgagttattgatcaatgtataatagaactttttccctctcatttcaatttgatttgagttatattagtcaatttgtctttgattttcattttttccctatttattagttggattgtactctactgttatagtctggagattttcacagagaggttaaatggaggtgtttgatgggcaatgattatatgtagtgagtgaaatttattacgtaaatcttaaattgaatttgaaattatggagagaatataaaaatcaggaacaagctgttaccgaatcatggaagtttttaatttatttttattttagccatccgaaaagagatttgttgactatcgaagaagatttctaaactttcttgattgagtatgtttgtttgtttctctatgcagcattaaagattcatgtttttattcccgtgatctggggatttgacggtatgacttatgtataggtagcttgctgctgaagaaagagaactatataagg

SEQ ID NO: 105415 - DNA, 746 bp, Mimulus guttatus
  Intron number 1 from transcript mgv1a008647m (locus mgv1a0 08647m.g) derived from phytozome v7.0 (chr-ID scaffold_1; pos 1112388 to 1113133 reverse strand)
gctgtgacttaccgcggtacgttttatttatttatttattatttaccgaacataatctgcattttgaattttgttaaatttcgaataaatgaaaaaccctcccgtgtatttatgcatttcgaagtgctgaaattttatctatgttaatttcattagcataaaacgttcgggctattcgtttttaagtacagtctgcgcgcgcacaactaaatatttacacaaaaacccctaggtttctttttagttttcatatttgtgatgataaaatttcaataattttattacaacattcatgatttttttttaaatgagttttttttttatcaataaatataaaagtgtcgatcgaatgcaactactacaaatataccttgttgaaatttgtttttgtttttactgaaaaaagaaaaatgaaaaatcagaagccctaatgtaattatacggtaaaaaaaaactatttgaaattcgcaaaatcgagactattacttgtattttgtttatataatcgatacttaatcaataaactatgaaggtaaaatttaaattgtatattcttctccaatgaaggcacctattaagtattataagaatgaaataatatctaattacagtgtgactagattttctaattaatccaaccaaatctctacaataagaaacataattatacactaacatattcaatgtttctttaatttaattattcttttaatttgtaataattgaaattaatgtttgcagatttg

SEQ ID NO: 105416 - DNA, 437 bp, Mimulus guttatus
  Intron number 1 from transcript mgv1a005004m (locus mgv1a0 05004m.g) derived from phytozome v7.0 (chr-ID scaffold_11; pos 1906697 to 1907133 reverse strand)
ctcctcccagagaacagcgtctagtttcttcctaggtaaattaattcatccttaattcatttttttttcttcctctttgcttcgtaattctatcacattctttgatacggaatctgggatatatcaatctcgtgtttatttatcttatttcattttaattttggaaatttgaattcaagtcggtttaattttctttatgttgaagaaatccaattatctcaatttggttcgtggatatttataaaggtgtttctttttgttgctttcttgaataattgacgtgaaaaacaagatttacaccgtttcccttttcttccccccctatatatatatgtatgtatatgtatgtaaatcttgcattgcatttatgaattttgtttataatatatgtttttgttgcagtttgataatcctctgaaattaaagaaattagtggt

SEQ ID NO: 105417 - DNA, 712 bp, Mimulus guttatus
  Intron number 1 from transcript mgv1a018317m (locus mgv1a0 18317m.g) derived from phytozome v7.0 (chr-ID scaffold_164 ; pos 229299 to 230010)
gccgagtaaaaaggaccggtaaatatcctctctctattttattttattataatatgtgttttgattatttttagggttcttgtacataaattttgagatataatgtaattatttttagggtttcaaataatttagtttttttgtaaaaaaaatttctctttctttttagggtttcttgtacatggagtttacataatttttatagcatattttaatataacttagcaatttgaatatagcgtttgagatctattattatttgagttagagacggtttcttttaattttccgtcactacaatcataattttgttagttaaaagttcatcgtcttttcaaaaagctacaattgaagaactaacttgtccgtattctccatctcccgtatttaccgggtaaccctcgggttttacatgggagcaggattaataaaatcaaatccgaaataagtacatgacaaattttgctagctgcgcggatacgagtttatgtcagataaaagtctaaagccacaatttaaaatgataattgaaaccaatctcaatataataaatcaaagatacaacaatcaattaactataaaaattagaattatatgcctctatgattttttcaaatttttttttatatatcaaacggtgacgttcttttttatgttttccgttattaaaaaaccaggtacggcgttgacggcaagtgcacatataataacg

SEQ ID NO: 105418 - DNA, 1028 bp, Mimulus guttatus
  Intron number 2 from transcript mgv1a001425m (locus mgv1a0 01425m.g) derived from phytozome v7.0 (chr-ID scaffold_16; pos 709002 to 710029 reverse strand)
ctgagattttgacagccgttcgtcagcaggttagtatttctatttaattggttctgtatgcgttgaaacagcaaaattgaggacttctatttttttgatttatttgattgtcgatgtattggttgaattacattcttgtaacctataattggatagctctcataaaacatttgtatcagaagaacgttaatgcactggctggtttgcagtattttgatttgtttgggttctatagacgaatcatgagatcgtatgttactagctcaatgggataagatcatgtaagctcactcgatgtccgtttttagttcatagttgttaaatctcaaagtcggtcaaactcgtaatatttgggactggtttgaactttgagtttaactcatttagcaaatgtcagttaactgagtgtttaaagtcaggtaactctatcccaattcaaaagtttaatatgatcttttcccaagattggaatgaatgttagagaaccctagtttgggtgtcatggaggcttgtcttatgatttctgagcctgacgaaaccaaatcatcattgtatttattgcattcatatgacattaactgatccaattaaattagatctcacggctaaaatgaaaatctgcaattactgcccggtggtagatgtggtagttgacacactcttgctcatatccaatatatattacaaatttgaactccaggggtagtcttattggctcaatgtaaaaaaaaaggatgtgcaacttctttttgttgaattatccatagatgataatatattacttgacttgaggcaatgaattgtatttttttgttattgatccatgcatagaccttaatcacgttgatttatgcatacaagttaatcacgttggtggttgtcattgacttctttcttacacaagaaatacattttttgttctcaataatgtttcctcttgttgacacttgttcgatgttgtaacacttgttcaatgtctatttcactttatagagtaactcagggagcaaggcccgtgaggatcttgc

SEQ ID NO: 105419 - DNA, 432 bp, Mimulus guttatus
  Intron number 2 from transcript mgv1a002113m (locus mgv1a0 02113m.g) derived from phytozome v7.0 (chr-ID scaffold_220 ; pos 98552 to 98983 reverse strand)
tcgattttcgtgctttggcagtcttatattagctggtgagttgttttttttttttttttcttatctcaatgctcattcttcacgtttgctgaattcgaataaatgaactgtttgttcttaaatttcattattgattggtgttttgaattagttgggttcaaattgattgagtttttttgccagatttgaattttttttgtctgagatattaaaccctagttaatcattctcgacgtttgttgaatttgaattgatgaattgttctttcttaaatctcacaactgattggtggttcggttttgttttaatcaggttctaagagattgaatttcttttattagtcccgattcaattttttaaaatctgatgtatatgaaagtttatgattttatattgattggtttcgttgtattcattgattagttaatctcg

SEQ ID NO: 105420 - DNA, 231 bp, Mimulus guttatus
  Intron number 1 from transcript mgv1a010795m (locus mgv1a0 10795m.g) derived from phytozome v7.0 (chr-ID scaffold_16; pos 1446292 to 1446522)
tttgaagacgagtttgttctcttttccttttttctttaatcgatgcgattgtgatgatctgggattttttattaattttttttttaattgaaacttgatttgttagtttgttgtcggtttattgaatttgtgcctttaaggaagagttttctgtgattttgatgttgtcattcttatggtgttcttatttatttatttgaatttttttttattttttttaaaactctgcag

SEQ ID NO: 105421 - DNA, 263 bp, Mimulus guttatus
  Intron number 1 from transcript mgv1a009092m (locus mgv1a0 09092m.g) derived from phytozome v7.0 (chr-ID scaffold_75; pos 193009 to 193271 reverse strand)
ttcggaatctcatttcccacccttccctgtggctggtaatttcttcctcatttctatgttaatttgaaatcttctctcgtctttaatcgtactctatacttgctatttctagaatgggtgttgagttttccgctcaaagataggtgctgaagatatttgcctgtgtgtttttcttcatgttgggaattaaagattgtattttgagtagatattgtaatatattggataatgggtttgatattttggtcaggttcttgattttc

SEQ ID NO: 105422 - DNA, 1039 bp, Mimulus guttatus
  Intron number 1 from transcript mgv1a001746m (locus mgv1a0 01746m.g) derived from phytozome v7.0 (chr-ID scaffold_17; pos 2207140 to 2208178 reverse strand)
aaaaccggtctctgcaccacctgtttatcctaaaggtacggtttcccagtcagtacctagtggcgttctccgccgttcgttttgtgttcgttgtttgctaaaatcctgcatctattctgatacttctgtcgctttatctgtcagttcctttgttctgctgcttcatccttttcagtttcggaattgttgattttaagtttttttaacttgcgtcaattcgcttagatctataggtaattgtctgtttctaacgtagttgcatgattagtggagttttatgctgcctaatcttactccgatttgctctgttttcctagttagtgaacttttttttttgctgttctgttctacgctcgacaaattatgcttacgtggctttgtaaatgtattattattggtggcgcgtggggtggaggcggtttgggttgattttgtgtggataagctttaaatgctattagatctgaatttgaaactttgcgatctgagataatggggctattgagtatctttagttcaggcacatcggtctgcattgtgtcacagtatcctgttatgaacatgtactgtgttcctgtgcttggatctggaattatttatttttaaagttgtggatctgagtgcttgggtagtctaggatttgcattgattcgattgttacacttgctttttttaaattttcttacttgtcagcttcaactcatctggtttatcaattgatctggaataagctaaatctggaatttaatctatgtgattttgatatgaattgattaataacttgtattgccgacaaactatctgcacgtgtgactaagtgagtattctgacagaagaaagttgagaccttttgttgaatttcatgtagttacatcaaataggaagttttcaaactgaatacattgaaggatctagttttgttatcctcccctgcctgtttttctgagcatgtttgcatgttaggatgtaattttttttttttttttttttttaatcatcttgtggttgatttcatcgactgaatttgttatgacagaaaa

SEQ ID NO: 105423 - DNA, 766 bp, Mimulus guttatus
  Intron number 1 from transcript mgv1a022758m (locus mgv1a0 22758m.g) derived from phytozome v7.0 (chr-ID scaffold_6; pos 3302085 to 3302850 reverse strand)
ttttactgttttttccacctctggtattttctctatttctcaagtttatggaatattattggcatgtctctcgttatttttgctttgtgttcacgtccagaagcattatggcatgtatatagctctgtatgtcctctcctctgaaatttgttcatttaggcatccgtcgcttgttggtatgcaataaatgcatatctgaagagttgctaggtagtttggtgatctaggaaagagttctgacatatattggatttatatttttactgcagcacgcgaaatgccaaatacattcgattgtaaatatggaaaatacaattacaaatgatatttaaaattcaatttatctgcacatttagctgaatctgcaccaccaggtaatttatatgaattatagaagttttccaaggataactgggtgaataaattgattttcatctcagattgagtttcatgcacacatttttttggttatgtccaacaatatcaaaagaactaatgcagaagcctgaaactcacattcctgattgcctatggattaaagaaacaatcctgattgccttagggcagagcttattcttgccttcttaatataggtttttcttgcatgatgccagtataattgaccaaaaaaaaacttcaattttggagcatctctatgaaaaggcaactaggttttcaacttaattttttcgtccttttgattgtctcgctgattatacttacatgcagttctgtgatataggctaaatatacttgctgaacttct

SEQ ID NO: 105424 - DNA, 488 bp, Mimulus guttatus
  Intron number 2 from transcript mgv1a022492m (locus mgv1a0 22492m.g) derived from phytozome v7.0 (chr-ID scaffold_119 ; pos 149516 to 150003 reverse strand)
ttatatcttgggggtaacaacttaagtggtatttattatacttcacattactcctttaaattcaacctggataaatctcaatagtcatgaaagtatttgtctaacagttgttttgtgtgtttccatatataggtgttatcccgtccgagattggcaatcttcaaaacctagctcaattagccattgaacgaaaccagattagtggcacaattcccctcactatcttcaatatttcttctctccaaggtttaaacttacatcaaaataaactgtctggaagcctcccaaaagatatcggaaatcttacaaatctcaaccaattggccatctcgtacaacaacttaacaggtgtgactgagaaaatatattggaatactttgagtttctccatattcgcagtgtttaatattttaatattaattttttttttttttttttttgtaatcttgacaggtagtttaccgcgacaaattggcaaattgtaccaa

SEQ ID NO: 105425 - DNA, 740 bp, Mimulus guttatus
  Intron number 2 from transcript mgv1a015364m (locus mgv1a0 15364m.g) derived from phytozome v7.0 (chr-ID scaffold_155 ; pos 40545 to 41284 reverse strand)
gttacttgccatctctgaattctcccttctccttggtcagtttccccccctccttttgtgattattgcttttaaatacattgcaattgtctggacattattgaaccaataactgtagatctttgctcatatatttacactcatcttcttatttggttgagaattgatactcttgaatataactacatacttcaatcgaccataacctcgtattcgtgtttcgtttttctgtttgcactgttttttttttttagtaattggaggtagagtatgtggttgttaactttggtgacataagattgatagctttgcgaaattaatatagaattgtatcgagatcattgcatttgtagtattctaaaatggtaatcgatcaactgctcgttacaagttccttcagattcagaactcttagttagttgctcctcgtcgaagttgcttgaattatgatctgggatatatgatttggatagtctttgagtcttaccctctaacactgtcccatgatcgaagcctagtagttacaatcaaataaccggttccaactcaccgagttgtgctcaaaccctctgtcgtaacaccaattttagtgcaccaccatctgctttaataacagaagcgaaggtgagtaagaacttagttcggctataaagaagattattcggctgggaaagatttcagtgatgcactttgtccggatggattcttagatggtttgttatttctgtattattgcaggag

SEQ ID NO: 105426 - DNA, 580 bp, Mimulus guttatus; identical to SEQ ID NO: 103627
  Intron number 2 from transcript mgv1a019920m (locus mgv1a0 19920m.g) derived from phytozome v7.0 (chr-ID scaffold_153 ; pos 141680 to 142259 reverse strand)

SEQ ID NO: 105427 - DNA, 919 bp, Mimulus guttatus
  Intron number 4 from transcript mgv1a013183m (locus mgv1a0 13183m.g) derived from phytozome v7.0 (chr-ID scaffold_16; pos 2217863 to 2218781 reverse strand)
tgagcaaatgtaagtattttttttgacaatatttttaaaattaaggcagttatgtcgtatgtgctctcatatagtcaataaatagcaacaaatcgtaatatgttattaacattttaagatttcgattgctttattcattagttatgttgtttcgtgtggttaggcgtgttaaaagctctcggttctgtccagcttttattttaccttcaaatgaagtaactttctcacaccttagtccatgcagcctgttcgattaagttttttgttattttaaaaatgaaaactaaggaaaatggtttgaagatactggatctatgtaatgtgtatgtttctagcttcgcgtgtaagaatcatgtgaaatctgtatattgagcatgttcggttctgatatttatatttaaataagaagcgtagaattcatccaatcacgctctatgtttgctgcgagtaagtggttgcattcttattatatttttccttttactgcgtggattgtattcaaaaacgtatttcgaactgttgattgcgtatagtacatgatatatatagcaaggcatgaattaccttcagaagtttccaaatattaatgattcatatttcacaaattttctcgtacgactactatgtattttaatataatttaggagacctagaaatcgaactgaacaatcggtcgaggggcataccgcagttaagagagtggctcaaaatggcatttaaaaccattcgtgcaatatagttctagaagaaataaatcaagaatttggatacatgcgctaaggcagcatgtcaaatataatgcgatttgaatgtcaactttttttttttttttttttctctttttggtaatgcaatttgatattattagttcaaactattttgcctaaataatttgcggatgccatgcagaagtgcgtac

SEQ ID NO: 105428 - DNA, 408 bp, Mimulus guttatus
  Intron number 5 from transcript mgv1a024822m (locus mgv1a0 24822m.g) derived from phytozome v7.0 (chr-ID scaffold_100 ; pos 986048 to 986455)
gactgagattgcaaaggtggtttcgggcaggtaaaaaaattcaaacattgcccaaaaatatatgtttgttaaataaagttttaaggttgtttgtaataaaccaatccgtttcttgtctttgccagaaccgataatgcagtgaagaatcgtttcaccactctgtgcaagaagagagcgaaaaaagaagcattagcaaaagaaaacaccaccgcttctttcatcaacttaaacaacaaaagggtaattttccgtaataatgcgctgacctccgaaaatgctccgactcttaaaaagacaaggtacattaaaatttaatttagttttgtcatataatttttttttctgtttaatgatataatatatattgatttaatcaggacaacgtttcttgggaaagacgatccgaag

SEQ ID NO: 105429 - DNA, 966 bp, Mimulus guttatus
  Intron number 2 from transcript mgv1a015831m (locus mgv1a0 14866m.g) derived from phytozome v7.0 (chr-ID scaffold_193 ; pos 394837 to 395802 reverse strand)
ccgtacccgaattcgccgtcaaccccctttctcaggttatatataaaaacccctcttttttttatttatttatttatcattctttagttcatatccgagtgtggcgttcgtgcacaaaatcaaactttttagtcttgtaactgatattacacagctgcattttaatactgctcggtgctcgggaatgtttagtctttgtggcacgagtgataagtcggctaaaatcagcatcgttggtccggtattacattggtatataatcgacaaacaaaaataaatccttgcactcgtgttctattttttaagttctagtccatttcgttagttctttaaatcttcttaaattatactcacatcaccttttcttatctcgatattttttaatagactatagatcagtttagtttattacattttcatttctaagaattctaaagttcaatttttttgagacgccaagacaaaaatcagataatggacaaacaaagataaatcgggtgttgaaggagcaaagtgaaccttgatattattttgttacacttctagtgatagtaatattacgttttgatttgatttgttttagtattttaattaaaaaatgtctgttctggtcgcgaaatggtaatggcaccaactagttcttgtgtttgctatctacgaacaaaggcttgggaattttcttgaattctcgagttcgataatataaaagattatgctggtaattacttgtatttggttgaggaaaaatcgtaatggcttgcgtatgaagcatcaacatgaacgcgtctaagatcttgtcgctattcatgtgcggtttagtataaactgtataatctaggaaacaatttaaagttgtgaattaatgcattaccttttgttttagtaaaaacaaatgtggttgtcttatgttgtctattattattattattgttttcttttttttgttttttttagagattgtttagg

SEQ ID NO: 105430 - DNA, 507 bp, Mimulus guttatus
  Intron number 2 from transcript mgv1a025413m (locus mgv1a0 25413m.g) derived from phytozome v7.0 (chr-ID scaffold_257 ; pos 249055 to 249561)
gtgttgtatgattaattttattttttttcttaattaattaagttaattattaatcaagaaaaaaataattagatcgaggggcgttgactgatgaaattaaggttgcaagaattttaattttaaaagagtgaagattcagttttttgtgatgcttgtattaataattatgtagtaataatttttctgatccgtacagattttttctaggcatgcatgtttttttgatcctatatgtaaaccctagcttcatcatactcagaatgttttttgaaaaaatgtatatttatattttttttattttaatttatatcaaaatatgatgctaattaacctgttttatgggatttattttattacaacatctgttggataaattgaaaagaaaggctacaacatctgttgatttcatgtgcttaattagttgctcatttatttgttcgattaatctgaaaaaactgcgatatactaactgtcgtaaacgtgttcgttttttttttcgtattacag

SEQ ID NO: 105431 - DNA, 488 bp, Mimulus guttatus
  Intron number 1 from transcript mgv1a000484m (locus mgv1a0 00484m.g) derived from phytozome v7.0 (chr-ID scaffold_121 ; pos 9373 to 9860 reverse strand)
cgattacgagaacaatccggtgattcattctaaagttcccttttttttgtttttgtaattgttctcaatgtgtttgattaaatgcgcgtgcgtgtttctttatttactacttatattctgaattatttggtttacttatgatttagaaaagtttgtgaaattgttatagttggaagacaattctatactaccattgtgaaaagggaattatcgattatgctattggggaaaaacatataacaatttttcatagaagattggaatggatggttgtttgtgtaaatgagaaagatatacattttcatatatgcacctatttccgagtatttcgtcagttttgcgataggcactgacatatttagatgtatgcacctatttatcaatgtcttttacgcttcgtcatcttctacttggatagtaatcaaaatagagaagcagttgtgctgaacgtgttctcatgtaggcctcatcatctgttgcgaatatcg

SEQ ID NO: 105432 - DNA, 756 bp, Mimulus guttatus
  Intron number 1 from transcript mgv11b017228m (locus mgv11 b017228m.g) derived from phytozome v7.0 (chr-ID scaffold_8 77; pos 14130 to 14885)
ccgtcgcctccctccgcgttttcggtgtccgatcggtaagatttattttatccttagatatgcataattacatatgaattgagtgatgttgatgattactacttgttagctcacatgatcctagggttttgtggcatcaccaattttataggtgttaaatttgagatttttacataatcacagcaattaaaattagggttagctcataagaaagtaatataagcatattcattatttaaaaaaaaaaaattatttttagttgtcgatcggatttgaataagagtattgatagtttcttcgaagtgagatcattcatcgagatggttcaagaacaaccgatgtagcttgaattctcgtacattaagataaccatatttatactcgaaaagggaaaacaaatagtaagtatatgaatttagaaaacctcgaaaatcttatagaattaagacttgaaacaacggaaacggaaaagatgatttaaagctgccctgtattttctctttgttatgaattacaattttttcttttgagattttcgtatgccgttttccaagaagctattttgatcctttttttcgtcattaaatccggctattatcagtattgttatctttaatccaagcgaaatgttgtcgattacataaattcgcattgttccttgttgtgcataatcagcatctaatcgttccttatttgttccgctctcgaataatttgatgatcgtgtttgctcgatactaatacgtgcaggtggaag

SEQ ID NO: 105433 - DNA, 311 bp, Mimulus guttatus
  Intron number 1 from transcript mgv1a003406m (locus mgv1a0 03406m.g) derived from phytozome v7.0 (chr-ID scaffold_92; pos 962106 to 962416 reverse strand)
atttatctgcccaggattaccctgttttcacccctgtaagtattcccccctttccctattttttttttaaattaaacaattgattaatcaagtaattaggtttgattttcagctccattctgagattaatctgtacctcttcacattaattaatttaagctatagaataatataattcagtttctgtggctgaattaggcgattttcatttattattgtaccattaactgcaagttttcttcaatgctgaactgacatatccggaatgttctacagagttacgacgacgaaccgttgccgggataccaaca

SEQ ID NO: 105434 - DNA, 607 bp, Mimulus guttatus
  Intron number 2 from transcript mgv1a001672m (locus mgv1a0 01672m.g) derived from phytozome v7.0 (chr-ID scaffold_168 ; pos 197093 to 197699 reverse strand)
tggtaatgctcctggaaatttgtttgcatctcgttcacttggattgcctaatcatagaggctgtttagcatgtaaaattatctcatccatgttcatcagttttccatcttcctacatttattgcatcattgttgagtaactgttgcttcaataatttgattctttggcaagtgaagctgaaccggttaaagcaaatacatattatttgattttctttctattttcagtttatttgcaattgttgtcatgctttcagtttaactgttcatgttttatccattcctaaatggaggtcgacatatgaagtgtcaaatttttgaatgatctcaatgcaagttctattatctatatatttttgtccactaaagtagttgtcaggagtcgatggctgaaaatgtttgggtacttttggatattaaattgcccctttagattatggaacatcatatgttggtgttccagagaaaaaactagagcattttattgattcttacttaagacattgaattgcatagtgtaatctattattccgccttccaaatacgtttaatagtttttgaaatatgttataggtcagcgagctggagaatcaaattgatagctttga

SEQ ID NO: 105435 - DNA, 847 bp, Mimulus guttatus
  Intron number 2 from transcript mgv1a005551m (locus mgv1a0 05551m.g) derived from phytozome v7.0 (chr-ID scaffold_11; pos 788688 to 789534 reverse strand)
agagcattgcgctttcgaagcggccgcacattgttgtgagtttgtgttttattgcattattaagtagcttctttatgtttatcttgaagaaaacctaatagcgaaatccatctacttgtagttagtgatgtaaatataagggcaaattacagccaatcctctgagttatggtcaaattacgaaaaccccctcctgattgggtagttaaatttagcaatgttaaatcggtaaaatcggaccgaaatttcgatacgccaatatttcatgccaatatttcataccgtttaccgtattgaatatacaatttggttcggtaaattaccgaattacataaattttatttaaaaatatttaaaaggaggggtggctctaattacccaaacaagaggggtttttttgtaatttggcaggggtggccgtaatttactctaaatataatcaacatttgtagagaagttgcacttcaagtatatcatgtgttggatcagttagcatttttaagttgtggtcaaaatatactgcgactaagttttagcatttgcttatgtgttggatacatatttgactatttacaaaacatcagcttggagaaaataaaaaaacgataataaactaaagttttttcgaatgtctaaataaacatacttgtaaaatttaaattcgtgtaccaagacttctttaaaattgatgtatgataaaattcaactgatattggatggtggtgtttttgtattataacaaatcttagatggtgaaccagtatttattgcgactctcaagaaataattttgttgttctgctatatcttgtaggttgctacgcctggccgtcttcttgatcatcttac

SEQ ID NO: 105436 - DNA, 757 bp, Mimulus guttatus
  Intron number 1 from transcript mgv1a018241m (locus mgv1a0 18241m.g) derived from phytozome v7.0 (chr-ID scaffold_2; pos 499169 to 499925)
aaggaagcgttcctaaatattgacctcattgacaggtttgcttattacttttaggtcctccatgtagtttataacttcttatttgaccccgaaggaaaacaaattttgttttcaaggacactatttagggtgaaaatcagatgaaacggatcagaactaaccatttcggaaaattatctaaccttttttggaagtgtgaagcctaaaccaattccaaaaaaattggaacctaaaatttcattcggggtccaaaagttacggaaattttgaaatttaggaaatcacatcagttttaaaatttcaaaaagtttcgaaattttcacgaatttccaaagaaaagaacactcaatttgacaaaaataataggtactaagttttaatttactagaaggaataaaaaaaaccctttaattaaaaatttaatttattttggactaagtaaaattttgaattatttatgccgaaattttaggaattaattttgaaaattgaaaataaaaaatgccaatattttattatttttatacaactccaattccaattttaaaaaatgaaaaattcataaatcgaaatttcaaaaaggaatgaaagaagttgctccatgatgaaatgctttcggatcagaaccagcgaaaattgaaaattcataataataaatgtatttaattaattttaatgatgcactaagtagtagtaatttgacaattttgccctttataaaggttttggaggttgtccatacccattggagaaacaa

SEQ ID NO: 105437 - DNA, 860 bp, Mimulus guttatus
  Intron number 3 from transcript mgv1a015997m (locus mgv1a0 16000m.g) derived from phytozome v7.0 (chr-ID scaffold_79; pos 58644 to 59503)
ttaacaggtccctatatacaactgttctttgcttacaatggttaaaaaatatataactttttggcatttgttgcttatgtggatcttcacagcataggtcaaaagcttttagtttttttgaaacgaacatgcagttaattgaagctttctcccaagcctaggaaatcatttagatgtttcatatatgtagagttgtgaatgtctcaggattactcctttaccgccaactgcttttgatggtagccttttccttttcgggatgagcagaaagaacggtagtatgaagaatacgaaaaatgagaagagactgttttagtttatatgtgtttcaaaagcttaaaaaagcatccagagataatgcatattgaattggaacatttactaatttgcctcaaactgccttttggattgtgatcgtcattccaggaagaacaaaactatataatcatctatcacacagtcggcagacatcagatgttcaaatcaaaatcttgagctttcaaatggttatgttagtaattagtgtatagcaactctgaagtgtaaaaatataatacatgcggattatcttgcttgtgtcttctaagtaactggcaattggatgacaatgcttctgttatttgttcaatatgaggcatataccgttccataacttcctcgtttgtttgcatcctaccatgtatggatgaaattacaaaatgttgatagtaacagtttatcatgaccgttgttgtacattaaaacactgtcatgactgtatgtttaacagaggcttattgttctcgcctttaagacactagaaagttggagattctgatttattttataacatttcattgtttatttttttgacagtatta

SEQ ID NO: 105438 - DNA, 536 bp, Mimulus guttatus
  Intron number 2 from transcript mgv1a009324m (locus mgv1a0 09324m.g) derived from phytozome v7.0 (chr-ID scaffold_211 ; pos 373900 to 374435)
ggccaaaaaccaatcaagggctctccttatcctaggtttgtttcttcttcttttatttaatttctctcattaattatttgataattaattcattaatgatgttaattggggggcttgaaattaataaaatcaaactactgaatactcgattcaagattgttcgttaatagctcgtttgagcttcgtttattcatatatatgtaatgaacaagtttagaacatatattttcgtccgatgagttagaaagatcgacatgaaactggagtagcttgaagttaagctactcaagtttaattcgtgttcggcttgactcgagtcgatttttacattacttgatttattcaagtgaggtacataaataggaataaagggtttatttatttttattttgttcaacataattcgtgctcggctcgacttgatttgtttacatttttaagtactataataataatgattcttgaataaagggtgtatttatttattcaacataactaatgattaattatatttgtggaaacaggggttattacaa

SEQ ID NO: 105439 - DNA, 727 bp, Mimulus guttatus
  Intron number 2 from transcript mgv1a015194m (locus mgv1a0 15194m.g) derived from phytozome v7.0 (chr-ID scaffold_41; pos 263596 to 264322)
aaggcattgttggatttccagctgctagttcgactgtaagtttatcacttcttctcctaattgcaattttttaaaattttctttttccagaatttatgcttttaccagtggtcgtttgtcaatttgttttttgtttatataacattacctagtgtagattgttgtagatacgttgtccccttttgtaaccggttttgatcgtacatctgatcacgagacctcactcctccgagaaaatcaattacataattgcctcatttgaattgttgatgaaaataagagcttaactaattatccaatcaatacacgatttatatgtgaatgatgagaaagaggagccagaagtgattgtcatcagactttttgggcttctaagtcttccgttgtatattttcttgtgaaaagctatcttttcctgatcatccataaattgatgcttacactagtgcttagcaattgatggcttttgatgagatattaaataaacttgttaacacagcttataagaaagtgattttttctcacgataatcaataagaggttgcttatactacctgcaattaacaattagacctggaatttgtgtgtcgatatataaaatattgtgctgcctgatatatgtttgctagtggaaatgcattgttagaatcaactctaatattaattttcattgttgccttatgcctgtgcaggcatctggatctctctaccagggcatacgtcgttt

SEQ ID NO: 105440 - DNA, 860 bp, Mimulus guttatus
  Intron number 1 from transcript mgv1a021210m (locus mgv1a0 21210m.g) derived from phytozome v7.0 (chr-ID scaffold_89; pos 204840 to 205699)
tgtgaaaaccaagctccgtcaagggaatcttacaggtctgaccttccctccttcatttcatttttttctgaatcctgtatgttctttttttttattgtaaaagtttcaaaagtttcataaaaatcgtgcactctcaaataatcaaaatctatgataatttgcaatttatcataaagtttaagacttgttctctgttttaagcctacctctcgtatttatagttgtatacaaccttcagattagttgaaagatatatctgagattttcatttcttgaagcattttttgataatagcttaaggagatcacatggccaagataatggattgcggcaaacttctctcagttctcacacaataccatatagaggtgaacaggaaaagaagctacctttaaaaaatcttatcatgcaaacaattaatattggcacgtttgttcttattctgcaaacaattaatattgccaatcttgcatccaaatttgcccagataatagctgtcacagactcagagcaaatcattataattttaccaattgtggcatttcataattaccaaaatcttgtttgataaaatcaattaaaatccggaaggacgtttggtctccataaaaagcaaacagtcatggatttaatgaatttacggtacaagaaaaagtgtgaaaaacctttttctgcaatccgtatactaacataaatgccctaggtttaacgaccttcagggttacaacttttgtatcaagtcaaaaaacttgatttgcacagacatcaaagactatcttttttttgttcacctgtgtattgccttctctatgtcttttgctgcagtgaggagattgaaaactttgagacttccttcaact

SEQ ID NO: 105441 - DNA, 626 bp, Mimulus guttatus
  Intron number 1 from transcript mgv1a012982m (locus mgv1a0 12982m.g) derived from phytozome v7.0 (chr-ID scaffold_123 ; pos 759572 to 760197 reverse strand)
cgagtaataatcagatccacgtcagcgccaggtaccgtcccctgattctattacattaaatgttggttgtgtaaaaagaattcttttgatatgatatattaattgtttgcttatggatcacacaaatcacatacagtagaacctcgataaattaatactctataaattaataacctcgattaaaataatagtttctcttggtcctgactcggtgaaaacgtattaaattattaactcgataatttaataattcactaaattaatagaatttccctagtccccactatattaatttatagaggtttaactgtacgtggtttctatatgtaattcgtaaatgtaatatatgatgactcaccatttgaaatagaggatccaaaagtttagttcatgattatatcgatgaaccagagatgaggttccacatgacaaagttgaaggttgtgaactaaagaaaatcatcgtatatgatttttgctaacatttataacacgggacttttgcagaatttcgatacaacacaggggtactaatgcaacaaactcattcttttcaactaaaacatctcattttcaaaacaccctaatgcaggtacatccagagttactcaggcgacgtaaagaaag

SEQ ID NO: 105442 - DNA, 955 bp, Mimulus guttatus
  Intron number 1 from transcript mgv1a011577m (locus mgv1a0 11577m.g) derived from phytozome v7.0 (chr-ID scaffold_185 ; pos 192904 to 193858)
gcataactgtaagatcataattattcatcaaaacccccacttttctttttcttttcttttttttatggttcaggaattgagttttttattttcttgttaaactatttgaatttcatcctgtatctgctatttattgcatttaacctaatactgatttttaaagtatgaagtattggattcataaagagaaactagggctatgtttgataagcttttggatttctgtttccattttattccagagaaaaaatgattttaggacaagaattttgaaaataaaataaagtttgtttgtgttttgagatgagacaatttgtactatagcaagtcaaatcgagatgttggaaaaatgtatttttgttgaagaatttgaaagataaaagtgattttaatttatattttagtgaagaccattttcacgaatcagggacagtcaaatgagagaaatatttgaactttttttgcggaaagttcttgaaaatatttttaaaagataattttattttgaggaaggagtgaaaagaattccaaaaccataacaaacacagcctaatgttacacctggttatttatgctgggtagttatttaatcaaacatgtatttaggtagaactacacataatcacatacacttacgtgtatctgtgcttattgggtagttatttaatcaaatctacgattcaaatccgtccggtgtaaataaccaggtagcatgtaactccccgttaagaaaatacaaagggcaaataggaagttactaattaatggattataagcaatcggccgattatataattaatgtatgtatcttttgttttgcattctccactgtctatgtacaattgttcgataagccaagataagagctaaaaacaaaatcaaatttctccactatctaatttatttgttaatgcttatttgcagtaaaaacagggccgtcggtatctggagcagc

SEQ ID NO: 105443 - DNA, 539 bp, Mimulus guttatus
  Intron number 4 from transcript mgv1a014502m (locus mgv1a0 14502m.g) derived from phytozome v7.0 (chr-ID scaffold_32; pos 463933 to 464471)
tatttttatacactagggtgtaagattgcaccactgtaagtttcctccactccttttgtcattttcttaaaatcccggtttcctgcacattcttccttatttgccatacttgtgtaggagaaaataaatcagaaaaaataactcttcaaacttgttgtctgcgtgtgcagtaagaatctcaatacttttttatccatctacctaaaaaccttaaattgtaattagtttttatgacttcaaattgaaatggtgtttgaggaatatatgcattttccttggttatagataaagaaaaagctatggacaacgagtatttagccactcagttattcgatatcattaccctgttcatttcattatgaagtatacttacgtttaatagacgcatcttctaccctaagaatgctttgattttcaaatgatgtaaccgaacaaagacttaaaacgacagctcatcatataaagttatcaccgagctcacctgcttatcttaacaacgaacagcataggtgacaaaaccatagggccgtttcttcttg

SEQ ID NO: 105444 - DNA, 491 bp, Mimulus guttatus
  Intron number 3 from transcript mgv1a017138m (locus mgv1a0 17138m.g) derived from phytozome v7.0 (chr-ID scaffold_82; pos 203195 to 203685)
caggtgaactcatagtgcagctttaattgtcttcatatgcagctttaattggatgtattgagcgagttaatgtaattgttgatagaaagtacatcttatcgtgaactcgtctgcttttctgtgttgaatttagttactaaatgttgtatgcatttcatttcccatgctttctagcttttcggggtaattcttgcatagttctcatgttttggtctttgggtatagctttattcttatttaataaaacatttttgtgtcaattttggtacgtacttctctatgaaacctggttctggaaaattaggttgggtcaagttcacctaatccataagtcttgtacctcaccggttaagggtgagtatggtacaaacacacccaataagggtactcaatgagctttgtcaatttacggtaaatgcttaacttgtctcaaaattaatttggatttgttttttcttttaatcagggctttttaggttattccttgctgg

SEQ ID NO: 105445 - DNA, 918 bp, Mimulus guttatus
  Intron number 3 from transcript mgv1a016898m (locus mgv1a0 16898m.g) derived from phytozome v7.0 (chr-ID scaffold_132 ; pos 536190 to 537107)
gggtaagtttcttatgatctttcgtgggttttttttcttgtttcgaaatatgtgatgatgtgcttgtttcaaattatttgatgttgcacggatttgtaagaccttctatgtggttatttatcgtatttgtataattgaatgtgtgtatgatgattgacctttattctacttgtgtgatgattattggttatgatttgttggggattactttttgctggtcatgttggattctgataaatctcgatctaaatatttcaagatccgaatttttcataacatggaccaaataatatggtggtgattggtgattttgagctcaacagataggagactcataagcatttgaattgatttaactaacttttgcatgaaatttagttcatacagaataaatgggttaatacacgagttggcatcaattgttgggtatagcaataactatgtatagtgaaaattcaggtaattgatttcgggaacttaaatttgtagtttcttgaggttgattctttagcttcttgattgcttctcttaaaattgcaatatattattaagcatctcaatttagaaagccctaataaatattcttgcgttatcttcgcattttcataatccgacaaataataatttggcacctgagagggcagcttagtgtttctatcttattgagtgttctcttgaattttatttgtttcttagccgaatatttatcatgagcttttatgttatcttcttgcaaacccaagtggttaagaataatgtaattgtgtacgcaagaaagttgaaactgatctactagaaagaatcggttgtaattgttgttccgagttttcattttcttggctaacaagtttttgttttacactattgtttctttcggttctcgtttactaaccttcgtttttatgggtgcaggtccag

SEQ ID NO: 105446 - DNA, 780 bp, Mimulus guttatus
  Intron number 3 from transcript mgv1a016178m (locus mgv1a0 16178m.g) derived from phytozome v7.0 (chr-ID scaffold_270 ; pos 123335 to 124114)
ggtggctctggttgttcctcctttttccgaggctggtatgctattctgctcctccctttgctaaattgttgcctgtgctcttaattgtaattatgctgtcggctgtaccaagtattgtcatcagaacacaagatttgctgcagatgtaggattggatcaattgcattcaagacataattgacacacactctttattcttgtaatgtgacacagccatctgatctgatgtatgcaaaacagatgagtattaaatggcagaaaatgtgaaggagctcttctgctttggttggaaggcgtaaatgattttagtcatcaaatatttacggttaccttgtttgcttaatgtgcctttgaaactaagttcaaacagccaagtttgtgagtctcaaatagcttatcaattatttgactcttggtagatcaataagctgaatctctattgaccttcatagttcaatcatgtgtcgaactattatgagtagcttccaacatagcatacgtgacgagtcattataacttatgagtcacgttttggtaaattaatctatacttgaaatgatcaggcaactattccaccactattcgtgttcttgttaaataatgtggccctttatttgtacaaaggtttttagttaatcctctctttcaatgtttattcaattgtgcaaaacactaaatcctctttacctgttaaatttctgcatgtaaatgtatttcattctgagaatgtgtttgtcatttgcagtttagctgccctttgttgctgttgtgtattggagg

SEQ ID NO: 105447 - DNA, 974 bp, Mimulus guttatus
  Intron number 1 from transcript mgv1a005810m (locus mgv1a0 05810m.g) derived from phytozome v7.0 (chr-ID scaffold_124 ; pos 659329 to 660302)
atccaattacaaccttaatcttctcagcttcccaggtatattttagtctatttatttattattatttacattctataatttgtatattattattattgttattgttgttgttgttgttgtcgtcgtcgttgtttcttgaggattgtgatgcaataagtttgttgtatgagacgtgaaaaattccaatttggaatgagttatttcattttcaatttttgaaatttcgattgccgattctcttgatattttttgacgaaattgaaatttattttcactttcgaattttttttctgaaactttttattctgatacgtctgatttccacccctaatgggatcgacgtctttgatttttatttttacgctttctagataactattcacatattttcgaattgaacctaaatctgcttattttcttcatttcaatacccgttgctagacaaatataggtgtaaaaatcgaaactatcataattatcattttcgaaagaaaaaaaatccagtttctttcgaaattgaaattaattccaacactactaaaaagaaatcggaaaataagaaatttgaatgaaacaaaattgttccaaaacagtttttttatttggatcgggatcgtcaaaattcacaaattccattttcggtcaccaaaatacaaactacagaataaaattgatatcataagtgcaattttcaggaaaaagaaaaaacttcggaaatatttactaaaattaaaattggatcgcaaattagaatcttatatattctcccaaaagaaatggtgggaacttttagaattcgaaattaataaaatattattcataagaagtttgatggcccatgggtccaatctgctggcccggcccgtagtataaacttacttaagatgccgagttattaaatattcatttatttaaataattaaatgtgttaatattattatatccaggtgtattttctttgaagaggaaggaaa

SEQ ID NO: 105448 - DNA, 203 bp, Mimulus guttatus
  Intron number 1 from transcript mgv1a007201m (locus mgv1a0 07201m.g) derived from phytozome v7.0 (chr-ID scaffold_4; pos 485801 to 486003)
gttgcagaaacacgaacccctcgtttcctattactgtaatctctctctctctctctctcgttttcttctactaaattattcaattatactgcaaaattggaaaagaggggatttcgatagaatttcatgattttcacagctccttttattttgatttttgttttttaattcaataatttttgtgatcaggtcggctttacgcg

SEQ ID NO: 105449 - DNA, 966 bp, Mimulus guttatus
  Intron number 3 from transcript mgv1a007201m (locus mgv1a0 07201m.g) derived from phytozome v7.0 (chr-ID scaffold_4; pos 486347 to 487312)
gcagacaagcaagatagagcagggcgagccgatttgtacgaatacttccctgcacctttctagttagtcatagcacccggcaatttttttccgtttcttgtcatggaaattaatgggattcatcttatttccttgctcaatcgggtttacgtatagtgtctaatcaaccattctatgatatgagacatatataaaatttcagctacattaggagtatctagtaacagttatagaaatttagtaagtcttagatctataaaatttcaggagatatcaatctttaaatgaacgactataaataacgaggcctttacatatgaactagattagatataggttttccttccttcataatatttgggtactatggtgtttttgagagaatccatcctatattgaagtatttttgctgggcaaaaagtgactcatgttggtggcataaagcagatgctttttttctcgtttactgattcttcacagagctagcccttcactaatacctgaatatttcgactgcttgtcgtttgagtcatatatgtgtcaatagttatgcgatttactggctggagttatatatggatatacgatatatatatatatgggaagttgcatcaacataggacagtatgatgtagtttgtttttgagttttctgactctcttttcttttggagaattcaagtctctaaattttcaacttgatttatgttttctatttgagctaatgtgtgcacacctgtctctcctgaagatggttttcgaaactcacaatcattttggtagtgtattacattccacgagcgtagtctttatttttccaatcctacaattcagtaccacattagtcatacttcgtcgggtgcttgcaaattgatggtagttctaataagtatattgcttggctcttaatcattgaggtgctaattattatcctttgcttgttgcagaaataccgcaaaaactttct

SEQ ID NO: 105450 - DNA, 339 bp, Mimulus guttatus
  Intron number 1 from transcript mgv1a005641m (locus mgv1a0 05641m.g) derived from phytozome v7.0 (chr-ID scaffold_26; pos 1246734 to 1247072)
tgttctgttggtctctcacgaactttctctctccggtactttttttttttttttttttttaagttttttgtgatagaaaagtatgatcgattaattggtcagaactgttgctgcatttcactgtatatttgcttcagttaacaaaagtgaatatgaggcagtaaatgtatagtttgatttattagacatattattatcttccagaactgtattatacactatacatcgccgatcattgtcgggaattgcttagagaaaatcaaaagctaaaatctctatacaagatagaatgatagtttcatttttgaacaaattttcataggtggacctttactctta

SEQ ID NO: 105451 - DNA, 1010 bp, Mimulus guttatus
  Intron number 2 from transcript mgv1a005372m (locus mgv1a0 05372m.g) derived from phytozome v7.0 (chr-ID scaffold_7; pos 2051830 to 2052839)
ctggaaagaacaccgctggaaaagcagattctgttgtaagttttaacgcttagaatattcggttgttattttggttgtttaattaatttaagtgatcgactaattgcagtaatagttcccttttcttcttttgtgtgcaactggtgtatacttgctactgatttgagtgttattgtggttgctaaatgggtaactaaattgaataatttgtggttcgattgaaaaggaaatatatcactgctattataaacagaggtttgagcgttttagtttacgatggcaattgttacatgttttccttttctatgcactttcagtaagtgatatgagtataatgttagaagaaagcaagagaccataatcacgcgcgcgtactctgtttcgataatttcttttgtggacactaaattagtttattgactgttgtacacttatgtcagggaatatcatttgttctgtttaattatatgcttctatttgtacgccctaagacgatgatagctcaggtctatatctttgaagttctatgcctttagtagttgatggcagttctgttaatctacatgccaagggttgtcatagcaatttttgtcaaatgacaaccttgaagactctctaggactttggtttctgacctcgcggtttcttgtcattcacattttatgaaacatattttgtctgttccataaatctttgcggtaatttatgtaactttgtgtgatggaacaagttctccgttgtctaatttaaagcttccagttgactacatagataatagatatacgcttcagttctaactggaacattttattgtgacagccacatagtttgacgggagttgaatattgtttaatccatattacttgtagagggcattataaacctttcttgcttcacaattttgacttcttgtggagtatatccgattgttatggttttactattgttcctattttcatatctatttatatattttgagtttcttaatgaatttgttgcaacatttcaga

SEQ ID NO: 105452 - DNA, 1004 bp, Mimulus guttatus
  Intron number 2 from transcript mgv1a001361m (locus mgv1a0 01361m.g) derived from phytozome v7.0 (chr-ID scaffold_129 ; pos 730507 to 731510 reverse strand)
aggtgtgttatcagttttagtaattctaaaatcgtaaagtgacgcttgatttaatttgtcggaaacgtaactacagattctttttagctctaggttttcggtcggatgtgtatttgcattgagaaaatagttgtaatttttgaagtgtttactggatgcataatgtattgattttaaaatacatgtccaaatgctgttttcgggaaaatagttacattgttgtactgaaagaaaactctttcccgagcacatataggaactaatttagtaactacaatatgttgtatgctaatccaatattactaattgctatagtatgcacttcatatagtatatactagaaatatcgtgggacttgagaaagatggctgctgaaatttgatatcaaagatgagttagcaagacccttaaattaccataagcgcaatccctttgagttttgacccaaaatatgcctcaccttccaagtataaagattttgttggactgactgatagtgtcttcatcataaaaaagcactagtttatttgtgtaatcaagctgaagtggaccacatccctaacactgataattggtgctatctgttgcttttgtttgctttatttgatgtagaattgatgcaagatcatcattccttgagaatgaaagtaatcaaaatcatgtagtaattaacatattttgtggggaggggggttataatagaagagcgtttgtaatatatgttgttcaaatctagttacattagtattttgccatctttttgttatgtttgttttttctgaaattatacttcaatcttgattgctatatcaagtgatctcgactttattctctgtgcatttgtcatgctatacaaaaggctcttcaaatttgtagcattctacttggctcaacaactttccaagttttgttacagttctttgttttttacaaataaagaaacaagctatgttaggtacttattgttttttcttttggtttacttctttaggcaagaaattcgt

SEQ ID NO: 105453 - DNA, 928 bp, Mimulus guttatus
  Intron number 1 from transcript mgv1a008101m (locus mgv1a0 07846m.g) derived from phytozome v7.0 (chr-ID scaffold_89; pos 506496 to 507423 reverse strand)
gcgtcaccaaactcaacaggcaagttattacacattttcttgatattcttatttttattattattattattattactttattttatttattttcttacaggcattgtttgatttgtttctgtcctttaattcttccacatgtgtatctatccttatctgataatgttggtcttacattgctctgtatatgtgtatttttattaggtaaacaaattactgtcacccctgaattaatattaaatgatgaagaaaaaatggttcatgtttgtgtaattacaaccacctatcaactatgaatcttcttacacgtacacccttattgcgtcaaattcaatagaattttttagattccgtggaatattctgtagtttgtactcgttttgttaaaaaaaatgcaggttctgatgcaccacaatctgatatttacaagccaatagacaaatcttatgatcatgttgtttcaaaatgtcgagctcgaatgaggtaaaacgggtacaaactggagaatattccatataatttagaagattctactaaatttgacaccgcaatgatggacgtgtaagaagattcatggttgagggttggttgtaattacccaaacatgaggggagttttcgtaatttgaccttacccgtggggtggccgtaatttatcctttgaaatattcaacaatataacacaagaggtaaatctctttactaataattttgttactaattgttaagtcttatgacttagttacaataattcaatcaactgaggttcatttgattataaaatcactcaaccggtggccgatttcgatcatttttatgcatataaagcgtgtgataggattacattaaatcaaaatatgctgctacacagttcagtttcaggatttgtatctattccagatatcaatcgagggccattacacacgaaa

SEQ ID NO: 105454 - DNA, 695 bp, Mimulus guttatus
  Intron number 1 from transcript mgv1a005602m (locus mgv1a0 05602m.g) derived from phytozome v7.0 (chr-ID scaffold_84; pos 548453 to 549147)
ctcaagcttgatcacatcgtttcctactcttggtggtatggtttcccttttatttcccccccaatttttatttagcttgatatgattataaatcatgatgtatgatttaatatttttttgttggattatgtaatttgaggaattgagtgtggcgaaatcgccttttttttttgctgttctacgaaatattctgggaaaaactgggaatgagaaaaagaaaaagctgacacttttgtcttatggttgatcagaattttcatttgcttaccaggtttcatctgttgattgaattttgatgaaaatatttatgaagatcttatgaattctcattagcttactagtttctgtgatttccttgtgatttgattgatggaagatatatatttgcaaaaaggtcttcatatataaggtgctgaaagttatatcgaggattttccttttcggtggtggattgagtgcaagtacaaataattgaattctgaactttaaaaggagtaaaacagatttattcgatgcgtttcacatgtttttttctcttaacaattggaaaagaatattgacactggacatgtatgtgtatgcctaatttaaggcttatttggtatttgtgataagagtagcttacgttcttattcgcactggtcatgtatctggttttacgtgcagggttattttctttccgctgtggctgtttc

SEQ ID NO: 105455 - DNA, 1027 bp, Mimulus guttatus
  Intron number 1 from transcript mgv1a010077m (locus mgv1a0 10077m.g) derived from phytozome v7.0 (chr-ID scaffold_130 ; pos 185757 to 186783 reverse strand)
tagcatctcacggattcatcgttgttgcgccgcaggtcagttgttcttctgttcgaaattagggtttttgtttttaattttttgtttatcaaatgtgtagtttttatggtcctgattgcgatgtaatggcatctttgattctttgaaggtagttgaattgtagtatattgttctaatgtgtgacgtttttgttgataatcatgaaactggggtgggtgaattgttcaagcaatcagattcttgaagcactgcaagtgtttgtttaattgccccaatgagattaaccaagatactatttggcctcgtttggttgggtagattagccatgatttactaaacaattagattttatttgatgtttggtatccccaataacttaccgggtcgtcccgcaaatattatgttatcatgacttcttttgacttctactaggcatggcttttattggtgcatcgaaggtccaataatataattgtgtttcatcagattatttaatcttatcttggcagccaaacgaggccagagtattgtaatcatattgagggtccaattgcgtagttggacttcctactggtaaggtctaatacaaaattttcagtaagacgaagctaatataagcaaaactttgcggctgacacgaacgatgttgggctgtataaaacgctaaataacgttcggttattgaattagttatgaattatcaaactagtctttgttttggaattaaagatgctgaaaacttgaacatgattttcgagctttgaatatgaagtgcgtccgtcatcgcgggattctagattgtttcttaaatattcaagaacaagaacacatacttccggcttgcactctgtaacaaatgcatgattctttccctctgtttcttgtttcagctacagataaacatagttttacgccacgcaataacagatcttgattcatttacgatattgaaagattgtaagattactaactgtttcttgttaatgcaccagttatactccataacaggaccagacgcgaaagaaga

SEQ ID NO: 105456 - DNA, 472 bp, Mimulus guttatus
  Intron number 2 from transcript mgv1a014171m (locus mgv1a0 14171m.g) derived from phytozome v7.0 (chr-ID scaffold_136 ; pos 413741 to 414212 reverse strand)
tcggttgcatcggattatatccttttcgtggcgttgttccattaattttaatatttttttttaattttgaaaatagtaatcgaatctgtttgtagcaattttctgttttctggccgcttgcctttctcttaaatgtgtatacaaaattaataaggtttaaattttggagaaggcattagcaatagatagtggatcaaaaagtttgttaggaattttattccgggggtgaaataattggaaaagtggctgaaaatatatggatggatctcgaagaacttatcttttgctttaatggtggttttagataattaaaacattaaatatcaataaaaaaaatagattttgtggttgttcttgctttagggatcacggagaatgtcatttcaagcggtttatcgatttatgttttcaggattcctttatgtctccattacaaattgtattatttgtttgatctttgacgcgaacaagt

SEQ ID NO: 105457 - DNA, 457 bp, Mimulus guttatus
  Intron number 1 from transcript mgv1a006960m (locus mgv1a0 06960m.g) derived from phytozome v7.0 (chr-ID scaffold_106 ; pos 485733 to 486189 reverse strand)
ctcaaaatcgcctccgctccaagtctaattttgaggtgccttattttttttttcttttgattttttcgcattgtacgtttatttggatgtaatgtggtttcttaaaattgagggatgtaatgtggtttcttaaaaataaggaaattgatttttttttttttgctcccgagctctgttttacttcaaattaatgaaataattgaataccagttgatacatgcctgagttattatgttcttccttaactgctgttttgcttgattttcagaagatgctcttagaatcaaacaaagctataaaatgttttagtatcaaatttagtatacatgcatgtggaagctgattttatggtactagattttgttcgtaacttttccataaattccattcaatactatgattctgtagaattttacttaattattcagtggattggtgcataggttggttcgtcatc

SEQ ID NO: 105458 - DNA, 920 bp, Mimulus guttatus
  Intron number 1 from transcript mgv1a007145m (locus mgv1a0 07145m.g) derived from phytozome v7.0 (chr-ID scaffold_18; pos 64651 to 65570 reverse strand)
gctgggagctttattgccttgagcacggcattcaggtaaactccgtttcaatttcattcagcctattcaccggatatgtatgtgtttgcattttccatgtgtatcgatcgatataagcgtataagttttgatgtttgggaatttcggaggcaattgattagatctgttaatttgattgtggaaatgcatattttgtatggtatatccatttctggatcggtgctttgaacatatgcatgttgaattagaagatcatttcattagtgtttcgattatgtcgttgatcgatgaatgtttgaagtgatgattttaagtattcatttattgcatttttttgttctgtgataaggtgtatctattttgatcgaggatacttgtgtcttgatttactgaatttatcgattttaagtcagtcgaagaaaagaatgtggaaacatagatctgtgtgatctgattaataggatagtatatcactgctttatcttttttcatgccagccttgtggttcatttagattcatggctgaatgtcctgatctaaaaaatttcagcatttgttattggaacaaagatttaaggcataatgaaaaattgtaggttgtgaacaatctgttagttcggattcgattggcttgtgttattgctttgaagttatgcttcgtcattctcaaatatagcactaatatcctttttgatcatacatcactatatcatttgttttctccagaattgaagtttataatggaaatttgtaattattctgactgctgttagtcatcttggattgttcaagaagtgtcgtgtttcagaaagtcatcactatatcattttgctgtttatttcgttatttcaatgttagccaaaaaggaaagttggactgacattttcctttttctttctttcgttttccactcaagcccg

SEQ ID NO: 105459 - DNA, 639 bp, Mimulus guttatus
  Intron number 1 from transcript mgv1a020468m (locus mgv1a0 20468m.g) derived from phytozome v7.0 (chr-ID scaffold_12; pos 980363 to 981001 reverse strand)
caccacaaactggtatatacaatctaaaaatcacatattatgatcatcttgcttcataatgtagagtttgaatgggataaaacgggtacaaaagtgataatattccatataatctcgaagattccactaaatttgatgagttgaggggggtggttgtaattattcaaacaagaggggtgtttttgtaatttgaccatacctcaggggggtgtttgtaatttacccataaataattgaaatactttttgtgaagtcaaacctctatggtttatttcactatctaaaacaacatatcatttcaaatactgagtctagaattttctagacatgaaccattcatatatcattttgtcaatgcttgtaactaagaaggcacaactttctactataaaacatcattaagttgtggattacatgcataacaaattatagaaatattttgtattactatggaagaggaaaacgagacgtttcttccattacaacatcttcgtttagaggacgaaaataacgatcaagatcaagaagacggctcttcttcgccagatattcgaaacgaagaggacgaattgaatgatgaacacgaagaagaaaactctaaaataagccgggtcaaagaaatacacgagataaccgggt

SEQ ID NO: 105460 - DNA, 883 bp, Mimulus guttatus
  Intron number 3 from transcript mgv1a008524m (locus mgv1a0 08524m.g) derived from phytozome v7.0 (chr-ID scaffold_2; pos 749113 to 749995 reverse strand)
aatcgtcgcaatactggttagtcgctccatttctttgcgtctctttgaattatattagaattagggtatcgatattgtttacgatttggagaaagaattgatgattcggcaaatgatggttcttaggtgaaacaattcttagaacactgacaattgaagaaggatgcatatatataattttaattacattcataatgatcgagagacgtttttcttctgtttggcatgggatggaagaaatattagtcttatttttattatgatgccaacatccaacaaatatatgtatatacacgaactggttgcgtttgtggtttataaacaagcaaagtttggcaagctacttgctatacaagagtgaattaaagggtcagtacatttttgaggattggtcttaagatcttatgcactcgtttggtctatagtattggtttcctctaggctcttgttgaaaggtaacccatattcaaatgttctgtttcaatcaccttactgaacggattttctgtggtggtaaacttatttcattaaatcctgcagaagttgatagattgcagtgatgttgtttccggtgaaacccttttggggagaaaaataagtactctgttgattgaataattgaaaaatagaaaagttttaatcaatggtttccatagtggtacggcttttccaaacaaagaatcttgccatcatggtagatttatcttcctaagggttgaatagcctcgtcgccgacatgaaatcatattttttttctaatagactacatatcattcagattaagcgatgatttgcattaatatttactgtcctcctgtagtcgaaggtctgattggtactgtaaacagataatctggtggagaatctattgggagatttcgag

SEQ ID NO: 105461 - DNA, 474 bp, Mimulus guttatus
  Intron number 2 from transcript mgv1a012251m (locus mgv1a0 12251m.g) derived from phytozome v7.0 (chr-ID scaffold_64; pos 352478 to 352951 reverse strand)
aacggcaaaaccccttgcggcttctgcttcataatgtgtgtccgtatgcccgtttgtttacgcttattcgtagatgcttttgaatgattgcgagtgcctgaaaattgtttcccctttccatcgtttttgtttggtctcaccggtaaagaagtcgtattagtgacacctaacaacagttaatgctggttccggtaaactatatgaattaccctacgcgttttaagagtgcttgacttgaatcactcttcccatttaagactatgataaataattttgaagtttctgccctagttctgatttctgtatgctatgagaaacttatattcagcttgtatttttcctgttagatgggagccttaaattgcttatgcgcatttagtttttgaaagaaaagaaaaggaaaaaggtagttatttattatcactcttaactaatgatggagcttggcacctatcaggtactactccagagaag

SEQ ID NO: 105462 - DNA, 462 bp, Mimulus guttatus
  Intron number 1 from transcript mgv1a011122m (locus mgv1a0 11122m.g) derived from phytozome v7.0 (chr-ID scaffold_1; pos 1162719 to 1163180 reverse strand)
tcaagctcactgtttggaaccgcactctctcacgggtacactaattttccccccttgtgaatttgatgtattacttgttgttttttgtacatctgtttatactgtcattaacgtattttaattttgttaaatacttcagtgttcagtgagatattcgattagggcattgaacatagctgcctaattatgttcataagttgtttttaattgtttgtctcaattgcccaacagtagtttagtttgggtttatcttgtaatttataattcatctcagccatgcataagctggaaaattcttggctcaattggaaaatttgatataattttgcgggttcgtgatcgtctgcttgttaccgaggttccctcgtcattgatgaagggaggatcttgaatttagagagaaaaaaacttggttaatttttcgagtttattaactcgaaaagttgcttttcttgcagtgtg

SEQ ID NO: 105463 - DNA, 915 bp, Mimulus guttatus
  Intron number 1 from transcript mgv1a006205m (locus mgv1a0 05942m.g) derived from phytozome v7.0 (chr-ID scaffold_76; pos 408801 to 409715 reverse strand)
tttcgctgcttttttgctgctggttttttacccaggtgggttttttaattttcttgattattgatttcattgctatgtgtttagtttcagttttgtgttggattgtccgatgtcgttttgtttaggttgcattgcgttttttgtctcaagaattttgtgagtttcttcgagatctgaagttaaatgggctgtaacatgtaaagaagagtttttttttttttttttttttttttttttttaattttaaattttggggaatgattggctatgaagaaagagataaacccatttcatttttattttattttttgaatttgagaaaattattaggaaaaatgaatatgagtaaagatagctgattatggtgttcttgaatttgtagttgcttgagaattgaaaaaaaaggtatggagcacaattgagcctatctgtgtgtgtgtgtgtgtgtgtgtgtaaacatgtgtattatgtttgattggctgtgatcttgctgattttgagcctatcaaagttcgtttactcaatcggtgagagtcgacaagaatcgagtggcgggcacgtgttttttaatttcggtagaattttttttgggggtaccgacttaaaacggttgaattgcaactagttcgaaacctctctttcatcggacaaaaaaaagttgaaaagaaaaaaggcttatgctgctcaaattagttaacttgtcgcttaattttgcaataatcgggaattcgattgaccaatgttgagagaatatatcacgtggtgaatacggaatataaatgttgactcgattgaccggcaagttctcgattgaatgataggcctttattagttttgttgctttctgtcaaagtaataaacttttcatacatgttgattgctttgtaattcgtccttacagaaggtattgtaaat

SEQ ID NO: 105464 - DNA, 798 bp, Mimulus guttatus
  Intron number 2 from transcript mgv1a007266m (locus mgv1a0 07266m.g) derived from phytozome v7.0 (chr-ID scaffold_11; pos 2850059 to 2850856 reverse strand)
aggttggtcacattttttttcattcaatttttctgattattctcctctcagatgtcatttcattttcttattgaagatgaatcctattttaagaaattgaggctttgggattgaaatgttgccttccagtgtaaaatttctttcggaaaaattgcaattttttgtgaatatagtaaatgctgtgaggtttagatatagataatctgtacgcgcgctcccaagttcatgaggggaaacttcacaagattggttttttcttgtgaccagtttattgttcgaagaccaatcaatactcaatagttcataatctgttttgtttttctactttttaatggcagcattccatttgttatgcggtaaatttggttacttattactcttttgaagctgtactttttcgtggaatgaatgatttgttctctctgttgccataatcggcaagtggcaacaaacagagtcagacggcacagaaacaacactgttaaattgctcaattaaaaaaatgtctgtatgtttataagtggatatatatatatatatatatatatatatatatatatatatatatatatatatatatatatatatatatatatatatatatatatatatatatatatctccttctagagccagtgtaaaataacaaaagctctgtaattgactcctcgtagttataaaaaattccttcatagatttctttgatagttatccagttttgatgccctatcttttggcacttgctttttccattaatatatgttgacgacgttttctgttttgcaggatacctctgca

SEQ ID NO: 105465 - DNA, 1011 bp, Mimulus guttatus
  Intron number 4 from transcript mgv1a014284m (locus mgv1a0 14291m.g) derived from phytozome v7.0 (chr-ID scaffold_8; pos 991826 to 992836)
ctttacaaggtaacgtttacccttaatttgatcttatttccgatgcgattactttttctttttttgactcagaactctcctctttgtttcatataatatatgagttggcaactattctagattcatgaatgggtaaatctaagaaatattttttttctggatccgatcttatgaacacacgggatttattttgtattttgcgggaggtcattttataggataactggttttctttgacaacttggcgtagtgattggtgacctatttgtcagcaaaacgttcaactttattcaaaaaaactgaaagcagaatggttttaatttttggctacatgtaacatttcttgcatgagtgcctcaaaatgtttctttaaagaatgatttttgtggtttcttctccccacgactaagaatagatcatcttggactcgactcacatgaaacttttagcgaattgaaaattattggaatactttctgcttggctctttgatctttggaactagagataaatagagggataggaatttctggattttttttttgattattgtgactatgtttcttgtagaattatgaacgaaacatgattcttttatgtgcaaaaaatctaactctgaagttccatatcattgccgtagtgtcatgattttgtaagagtaagcttataatttgacgggagttcatgtctgtaattagacagcttaggtgttcatgtccaacgcctctaattcctagtttatttcttcatttatgttggtatgtggtacctaattgagttcataaagactggtttccttctcttagcttgatcgttaattcacactagttttgagaaaaaaaatcacattattcaagcatatttaatgaactggagtacattcgtcgatgcattatgtatttaattgcttagatggacatgatcatgaattaatgtataataatacaccgataatgcgacgccagttggcaccataaaatagccgagctgaatattgcaggttatagagtcg

SEQ ID NO: 105466 - DNA, 498 bp, Mimulus guttatus
  Intron number 2 from transcript mgv1a008408m (locus mgv1a0 08408m.g) derived from phytozome v7.0 (chr-ID scaffold_92; pos 877292 to 877789 reverse strand)
aaggaagtagaaaacatacatcaacgtattattattactcttctcccatactctgtttctgtgtgtgtgtgtgtgtgtgtgtgtgtgtgtgtgtgtgtgtgttggagtggaaattcttttattttcattatgataatgggggatttattaaacttgctactgcattttatttgcatttgatttggcttattttcgagggtaattaacattttgccacccgtacttcggcccgttttgcgctttgccaccttaacaatttttttttttcacgaccgcaccaaaattcgctttttgttaccgattgcattgctcatcactcctatgaaggcaaaattgtcttttcaaattaagctgttttgatattcttattgacatgtagaagatttctgcgaagacaatacatcataagtttgtacagttttacgttagctgtattaacgcataatagtgtttattgtttcagttcaaaagccgagggaacaggtggcagacgcagag

SEQ ID NO: 105467 - DNA, 612 bp, Mimulus guttatus
  Intron number 2 from transcript mgv1a010382m (locus mgv1a0 10224m.g) derived from phytozome v7.0 (chr-ID scaffold_54; pos 1225037 to 1225648)
tcactcgccaaggtgttgcagcctctgatttcaaggtattttattgcatttcaatttttattttatttcattgattatttggggtaaaatgaattgcaatattggggtgcggtaatttatttcactaatcccgacagtaattttattgagtgatttaaccgtgtttaattaaaggcgaaccttgtataatttaattatttttttgttgttgtttcgtgttgtgtttttggcagagcaatataatctgttaatttatttagcatactgaaacgaaaaactgttcgaatgatagtaaagaagaatgtctgcacaatagctttaaaaaaaaatcaagcttgaatcgttaccaattatggttataagttaacagtcattccacagatgaaatgcagtttctttctaaaaattagtctaattcgacatatctcggtttcagttttagtcgaacaatattcggtactcaattttcgagaaattcaattttagccgaacagtatgcgaactttgtttcttttcaaatttgattggtggaagcttgacttcgtgtaaatttattgatttttagcgtaatttccaggctgctcctttattgccgaaccttcttcaaaaaca

SEQ ID NO: 105468 - DNA, 325 bp, Mimulus guttatus
  Intron number 1 from transcript mgv1a002922m (locus mgv1a0 02922m.g) derived from phytozome v7.0 (chr-ID scaffold_103 ; pos 320323 to 320647 reverse strand)
gtgcttgatctcaagcctctcggcgtcaaacacacgtacgtgttcattttctctctcttcttttgtttttctaatttcagaaacaagtttacgaaataatataattctagttgtaattgtgttttcttttcaaaatttataatctatagatttgattaattgggtttatttttgcttaattacaagcaagatctgagctttgttaaaagtgattgtgtatttttacttaaagccgagatctgtttcagccagaaacatgattaattgtgttcatcgatatttaattttacataaaaaaatagtttacatctgtaattacaggttt

SEQ ID NO: 105469 - DNA, 697 bp, Mimulus guttatus
  Intron number 3 from transcript mgv1a019594m (locus mgv1a0 19594m.g) derived from phytozome v7.0 (chr-ID scaffold_155 ; pos 545320 to 546016)
gaacatagaaagagaagaagaggcaagaattcaaggtaactttaacttttgttaggaggttttaacgttcacctgtattacactttttgtttagaaaattattttgatatctcttatcttcttcttactgatatggattttgatgcctccaaacgaaatcaaagagtcctaaaatggtatttaatggcactatgcattattgaagtttcaggatgatgttttctaataatattaatttctgccgtgtagaagtgttgaacatatttacagtttatcgtacactacttgtttcctgaagatccatgagtttagaagggagattcttgttttaggtgtgcctttgtttgtgttactaaacactctggaaacagtaagcatatctaaatcttatgttcttatccatcaccactgctcacggccattatcctgccaaacatgtatattgaattgtttattcaacaaatataataaatagaaaaggattttatgttaacagtttccgtcaattgtatgtgctactccatttcagtgatttatgattttgaggtattagtgagacgtacctggagataaacataattgataggacttttgattttccctagcagatgtagtttcgttgtttgattaattataatatatatatatttttggttgggcaggtgtttcagttgcgggacttcagcttccgaaagcc

SEQ ID NO: 105470 - DNA, 915 bp, Mimulus guttatus
  Intron number 2 from transcript mgv1a000232m (locus mgv1a0 00232m.g) derived from phytozome v7.0 (chr-ID scaffold_165 ; pos 504392 to 505306)
agcctatagacaacggtctgttagaccagcgcgtaatgtttcccttttccctttccttattgtttttatggtattattgggattgatgaatgataactccttggtccataaactgaatatatgaaactggcaagagtcatgtcgtatatttccttctgtcaggcctaaatttgtaagcaaaacaaaactttttttatatatatatatatttgattatactttggctattgtttgaccggcagattcagaatagaaacagttgagaaaggtataacaaattttagcattgtaagaaatctttttgcagagggaaatatagctttaatgtttgtcctcatgaagttgcagttccacttagggaggatgattatgcgactagctgaaacaggacgacagtttggcaggataagctagaatacgtgtctctgtcaaatgagccctctggtctcttatgcatccgttaaagagcaagtaacaatttagtaagttgaggaagataacaaaaactagaagtaatagaacacagcaacaactagagttctaccttacttggccatttccttaaaatattacaattcaataaataacatctttagatatagatgtatttagtacttgaatctccacatacccactgctttggatgggaaggggcgatcagaggttgcacagtaaaaaaatgggcgtaaagaaattgtatttagtattattgtattttaactgaactctgtttattcttaaccagttctatataatgaaattcatctggtactgaacggggtctaaattaaacattaagatcatataatcgtttttggggcgttttgcttagttcatggtccagtactatagtttgttatatgtcaattattgttttcaggggccagcaaacaagagcatcctttgtaaaacttg

SEQ ID NO: 105471 - DNA, 697 bp, Mimulus guttatus
  Intron number 1 from transcript mgv1a007603m (locus mgv1a0 07603m.g) derived from phytozome v7.0 (chr-ID scaffold_55; pos 200875 to 201571 reverse strand)
tagattattttcagttcaggtacgtactgccatttctctttagcttttttgtacttttttctttgatgggtcttcttatttttcagttttctttaatgggttccttttcaattttattttttagttgtaagaaagaaatttcagtgtgtgtgtgtgtgtgtgtgtgtgtttgtgttgttccctttgttgatgtaatttggataatgatgtgggcaagatttttgttgttgaggggtttggtgcgggcagcatattaaataatttttttttaattttttttaaaatttatttatttagtggggtcattttcatgtatattagttagaaattgagtccaaaaatggaatagatttattccaaaatcaacggcatgaaattccaaattcttgatgggctacaattggaagtatctgaaattcttgattcagacctatttgttgtgaataaataattattcgtattttttaaatcatgtcaaatgattgtaggaaaataaaacctttgtttgtccatgattcatgcttctctctctccccgattttcatggaatgcgtttacggaaagtcaaaagtcctttttctgcaaaatgtgtatgctcgtttggcttcgattgactaaatgtgtaatcggtacttaacagttgaaatattcaattatgacaggcaggaaatcgaagagttataaaagttgcccttgt

SEQ ID NO: 105472 - DNA, 923 bp, Mimulus guttatus
  Intron number 1 from transcript mgv1a010735m (locus mgv1a0 10735m.g) derived from phytozome v7.0 (chr-ID scaffold_8; pos 853636 to 854558 reverse strand)
ggcgtcgaggtaaccccgaagaattgttcttttccaatttttgttcattactttcctctatgccaagtttcgtgcattgttgtgtttcgttttatttaattctagagatagcatttctatgcgatgtgttttaccgtgtatgatgtttatgtaatatgtgcatacatttgtttttgtgtgatatggaatcattgaagttatattagcttatcgttgtagttcattcgcgcatacgattcacttgaaataattccatctgtagctgcactgaattgtaaatgttggtattcagtctcccaatcccctcccagttgaggttatatgaattttgttatcgtgctaattcagtgtctgggtagctgaaggaactgaaggtagactatacgaagttcggtatctggagttatgtattgtttctaggacaaaaactggaacataacttattgtttatgagttacgacagattgaagattgttttcattttaaggttgtaaaaaggtttattaagagttgaaaattggtataggtcttcttttgaagctttgtttctccagagctgtgcagttatggttttcattatgaggtgtgcagttagcgttgccatttcgaagttgaactgaaattttagctattcgacactgtgattttttaaattacccgaaggaaaatggatttttaaatttttttgggttccatatcaattagattctttttctttttaatcattttcagaacatgcggaattattgcaattttatttttacatgatacaaagagtatttactattttgtgagaatgtataatattaacataattttgacattaggattgttcagttcttttcagctctctctcgacattattgatttagttgctaataaattgatgcttatttttctctgaacagctccaaacaaaggca

SEQ ID NO: 105473 - DNA, 590 bp, Mimulus guttatus
  Intron number 1 from transcript mgv1a000118m (locus mgv1a0 00118m.g) derived from phytozome v7.0 (chr-ID scaffold_16; pos 2158507 to 2159096)
ttcggattttcgctcgtctcgccctattcctcctggtgagttgtcaattgagtttttcaatctattttttttcaattgagcgctggaattttttttctcattagaattaaaaaagtttttggtaatggagattgcgttctcgttcttgttgagacgattctgaaagtttctttttttttttttactttttatttatttatttcatgtgattcaaagtgggccgaagattttgtatgtatttgagggtaaacagttttctttcagtgagtaggttataagtgaaaagcttttcacgttgttattgcccgtctaatttcttgaaagtaggcatggggaccatgtttttcggccataatttgtgcagatctgttatttttttgtaaaatctacagtgttgatgttgctgtacagatccgtgtctgttcagcctttcttggcccttagaatatgtgaacctgtaactactgaaattattctaaaattgcaagattactgtgtgagaatgctttttttgattgctctccaaccctattattgggtttggaattttttttttgggtgaaggtcaacataagcagggtggttggcac

SEQ ID NO: 105474 - DNA, 796 bp, Mimulus guttatus
  Intron number 1 from transcript mgv1a013349m (locus mgv1a0 13047m.g) derived from phytozome v7.0 (chr-ID scaffold_64; pos 311174 to 311969)
cgccggaaaatagcaatattttccgaagaagccaggtttgtgtgtcattttacacagatgacgatcatatatcttaccggaaatatatcaatacttacacacatacatatatacataaatatgctatcttccctttacatcatgtttatttatttctctccatgcatttgggcacagttccatatgttttcttcagctaattaaattagtgtgtgtgtgtgtttgtgtgtgtgtgtttgtgtgagtcttggagtggatgatatagatctgctcctacacttcacaaaaacaatattttcttgcattaattattagtcccttgtttaatttcccccttttatttcatgtttttctctctcttgcaagagtcaaatcctgggaagaaacccttgaaagttcttacatgttcaagaaaatccataaacctaccagcttgatggggtttcttgcatctttttgtgttcttgtttaccactttttcagcttcaaagatccaaagttagagtcttttctccaattttatttttcaaaattagtcttctttccagtaatcaaattaaaacacagaaatctaacaactttctaaagagaattttacaaaagtttgaatcttttaggttagtcttgtacaagtttttgtctttccagtgattaaggaaaaatgaaaaaaattaatcttgcatatgctaaagagttacaatctctttgattaaaagatcacaagatctagtaaaaatcagttttataaatacttccaaaaaaatttgattttttttccgatgattagggttccgaa

SEQ ID NO: 105475 - DNA, 864 bp, Mimulus guttatus
  Intron number 1 from transcript mgv1a000226m (locus mgv1a0 00226m.g) derived from phytozome v7.0 (chr-ID scaffold_63; pos 153965 to 154828)
aagttcttcaaccgcgtacgacgccgctttgacaggttagtgtttgccgcttccatttttttgcccaagggtcaatttatgtttctagaatcttcgaatcattctacttggctcatcaattatcataactattttgagtaatattttttcattctttgattcaattaattgttctggctactaaattaatgaatatatgggatgagactaattatggttaattgactaaggtctggtttggttcgggagattagctatgattaattaaataattgaactaaatccaataaattttcgggtcgacccgaaaatattattttatatggcatatctagccttttagaaagattatttaatataattgggatttcattaagttatttaattttattttgactaatcttatcatgtaaaccaaacgaggcctaaatgaattaagaatttatgatatgatcatataggcctatgggcacaaaacaagcacttagctaataagatattacacgaattcaagaagaagctcaaaacgactccgattatggttgaaataattactcgtcgaaaaatcttcatgaagaaatattttcacgagcataacatcaattgccaaatcacaaactcaaggactggcttaccatgtagtgttaatatggtggtagtgaatctttcagatattttacgctatcactttctgtatggaagccatcatcttaacactattatgtattgattacttatcttccatcttctaagctcagttgtattgttaaaaacaaagatgcattgttcaagtttatgaatttttaagcaccatgctttaacaacgcagggttgatctggaattcccgaaggttgaagttagat

SEQ ID NO: 105476 - DNA, 563 bp, Mimulus guttatus
  Intron number 3 from transcript mgv1a021189m (locus mgv1a0 21189m.g) derived from phytozome v7.0 (chr-ID scaffold_323 ; pos 125540 to 126102)
gtcgtatcataaggtaagtgttgttattcaagtttatttgaaattgtttttatcgagctttttattaaacaatacataatttgaatgcgtgtgccccttaattattgttagctagcagattaggtagtttatgaattagacaattaccaagcttttcgttcgtttcttttttcattttcaagattctcacatcgtaataatttagaaattgtgtttgattatctgttgaatcgagctcgaacgactactaactagtcgaacatgaatcgagctcgaacgagagtactaactagccgaacatgaatcgagctcgaatagtttgatttgtcaatataaaacatcgatttacccaatttttgcctacgtaacatgtgtttcaccgaattttcttgtcgtacaccaatttcacagattttttttaaaatcagtttaatcaatttccaattgaactcgtttttggcatgcatcacatattgtttgtccgattataaatattttgaatgatttataactttttttatttttcagtgggcagggaacgatatcgctagagcttttggagc

SEQ ID NO: 105477 - DNA, 972 bp, Mimulus guttatus
  Intron number 2 from transcript mgv1a005201m (locus mgv1a0 05201m.g) derived from phytozome v7.0 (chr-ID scaffold_52; pos 277904 to 278875)
acctccctctctttcagggtcgaaccgctgttgaggtatatgtatatttacttatttaatacgagttttttttttattttttgtttttttttttccttttttcctagatggttctaaaaaaaatcgggggcgatgataatagaatactttgagatataacaaatatctatataaaatagggatatgcatggttagggtgaagtggggtgcattgagtttcttctttctgcctatactggctccgccactagtgtactgccctgtcaactacaatcttttataatgtgtgtgtaaaatgtgtgcgagatgcaaattagtggttaactagcatatctatggatggaaatcggacgcatctgatcggaattagcacttacagaaaatttcaaaaaaactttcagaagttgataattagattctattttgttacaaaaaaaaattgaaaatcgacatgtcagtaattggaatgaaaaacttgttccaaaattgaaaattcttttattggaattgatggaattcgaaaattccatttttttagtagcctatagtacaaaacacataagaatattgatagtacaagtgtactttttggaaaataataggaatttttgaaaatatttctagaaattaaaaccggattgaaaatcggaatcttaactctattaaaaaacaaaggaaattttggaatcgggactttcgaaattcagaatgaaagatattcttccaaaataagaaaaattctgatcggaatcgacggaattcagaattttcattttaatttccatccctaaccataactatttcaagaaatggttgatttattgtttgactctagtgtgtgtgtgtgtgtgtgtgtgtgtgtgtgtgtgtgtgtgtgtgtgtgtgtgtgcgcgcgcgtgtgttgtgtgtgtgtgtgtgtgtatacattctaatttaattgtgattttgattcaaattaatgattgtgtgcag

SEQ ID NO: 105478 - DNA, 725 bp, Mimulus guttatus
  Intron number 1 from transcript mgv1a010821m (locus mgv1a0 10821m.g) derived from phytozome v7.0 (chr-ID scaffold_36; pos 599450 to 600174)
gcagggccgagccactgagttctttctagaaactggtaattgtattttttttttttttaattagggctaagaatttcattttcatttgcattctctttacataaaaatgcttgagattaatacattgtctatagtgattagtttgctttccttcgaaaattagaataattcgtggataaaaattcttgagtatgtttgattcttggaagttcccaagatagttctaaaaacaagtgttcttaagttttatcatgttggaaacaatatgaacttggataatagttgaccttatcttgacgaaggcgtatttcgattatcaaacctcaaatcaatgaaatttgtattcttgctagttaagtgatgaaatttttttgctccactttttcggttcgcatttggcgacttggaccaacttctgaagaaacgtaaacgttttggtaaaaaatgaaactttctgatgtttcaaaaatcatttagctcgtcgaagtcttttgaagaatcccgatttatgttttctataggtaatatgaatagaatttggcttatgtagttgcagtggtggagacaacataggggcacagaggggccatgccccctccacttcggaaaaaattagatagagatatatatattattttcctaattttgtgtataattttagatatttttccctaaagacaagggtattttcgtaattattaggtacgaagaagcaacgacccaga

SEQ ID NO: 105479 - DNA, 725 bp, Mimulus guttatus
  Intron number 1 from transcript mgv1a017275m (locus mgv1a0 17275m.g) derived from phytozome v7.0 (chr-ID scaffold_8; pos 827766 to 828490 reverse strand)
cttttgaggttcgaccagtcagcttctttgagctggtattttcgtttttctattgctgtttctatgtgtatatgtgtgtgtgtgtgtgtgtgtgtgtgtgtgtgtgtgtgtgtgtgtgtgtgtgtgtgtgtgtaatctaagctgttgtttcaggattttggtgattaaagatgtatttatgaaaaaaatgtgttcaactttgaatgaagctcgtgtatgaagttaattgatagtgtaagagaaatgtcaagagatgatcgatcgagtgaaatttgattacctaaattactgtgcactaaaatttcaaaactttccctaattgaatttatttatcaaaaaaagtaaatgagtaaaggttttctaatttttttgatcccatgaaaggaggttaattgtttcttactatataagagaaaagcacccttttacctgcaaaaagtaattagtagtttacaatagcagtgaatccttgtcattttctatattctacaccaggagtaggaaaagaagttgaatatttattgtatagcgaattcaatttggtttcacattactttccgtttatttgtacctttttttaataaccacttagctgtagatgcatttgtacccatcgcatgaagattgattgagatgctataaagctgattttcgttttcatattttggtgcttgcttttgttttgtcaattttattcagttttcatatcaaggcatctggtttag

SEQ ID NO: 105480 - DNA, 630 bp, Mimulus guttatus
  Intron number 2 from transcript mgv1a014513m (locus mgv1a0 14468m.g) derived from phytozome v7.0 (chr-ID scaffold_39; pos 612463 to 613092)
taatcagcttcagtccacttcaatttcctccagtggtacgaataaatcattaattcgtttatttatttatttttttgtgggtggggggtgaattatttctgttgtggtgtggtttgcagttgtttcagtatgctgcctttgataaatgatatgctacacactctctgttaaactctgtgagcaactaagagataattgtattgtttactggcttgatttagaattttgaaatctgaaatcgtagtagttctgttgccgctttctgtatcgttgatttgatgtaacagtaattttgttaatcgatcgagcaatatgaagtatatatgttatgaaaccgtagtgattacgaactgagatttttttcattcaaaatttgagtacaatgtttattttagagatgaattagagcattcggttcttctgttttcaacttgttctatttttgttcctctgtttcgaatagtgaaaagtattttaccttggaaaatcatgaaaagtagaaaaatgatatagcgaagatttctgttcttagttcttggatgaaaaagtagttatgctatgtctagtatgtcaaaccttgttttgtttgcagcaggttcttcgaaacctaaggaagaagtgaaacgtcta

SEQ ID NO: 105481 - DNA, 535 bp, Mimulus guttatus
  Intron number 1 from transcript mgv1a017679m (locus mgv1a0 17679m.g) derived from phytozome v7.0 (chr-ID scaffold_57; pos 668556 to 669090)
tttggtaagtttttgggcttcggttttcattttattttggagaaagatgttttagaagaaaaaattaaaaataaaataaagatgtttgtttattttggataatttgtactgtagccagtaaaatcatgtctaaaagatgttggaaaaatatattttataagaataatttgaaatataaattgattttattttgtatttcagtcaaatcatgtttgttagagagaaatatttgaattgcttttgaataaaagtttgaaattattttagaaagaaaatcttattttggcaaaataatgaaaacaatttgaaaatggtaacaacatagcctaattcttccattatattatactaatattattatttagcctactcaaaatttaacatatgcaaaaaattcctaatttttttctcgtcctaattatatatgctcatcttataataaatttttgaactcgccaatgcgaaggttgtattgtatacatgaattatgcatattgcagggagtagttgaaaaggaaaagttagagtcattcaa

SEQ ID NO: 105482 - DNA, 584 bp, Mimulus guttatus
  Intron number 1 from transcript mgv1a002609m (locus mgv1a0 02609m.g) derived from phytozome v7.0 (chr-ID scaffold_126 ; pos 583801 to 584384)
tttttcaattctgcagaggtatgtattcttttgaatttttacttgccgcttctgatttttcggtgccttctgtttgttttttgttttgttttgttttgggtgtttgtttatgtttctaattttttttttttttatttatttatttatttattataataataataatgttcttgtctaatgtgtgtttctttctgtaattttgtccattgtataagatagtacattttttgaatggtgtgaagagaaagtgatattggattaattgcactttttgtaacactattgaagatggggaggatttaatgtaagcttttgtttttgaggagggagttcacaaatcacaattgagtagttgcctttttcgagttacgaatgattttttttccggtgatcgtcgtacgttaatttgtggtgatatttgctgaatttgttggtttcttggtttgttgtttgaatattagtgaaatgctttattattttcttgaattagtgtcgagagagagaggaaaaaaacccgattctaaaaccgtatttcgtgtcgttcctttgcaggataacctcgtaaaagagaagatacttgtgta

SEQ ID NO: 105483 - DNA, 681 bp, Mimulus guttatus
  Intron number 2 from transcript mgv1a024497m (locus mgv1a0 24497m.g) derived from phytozome v7.0 (chr-ID scaffold_1; pos 3245480 to 3246160 reverse strand)
acttactcgattttagcgagaaaattgataagacagctaccgtttgaaggagaagatggttccggtcagaagattgagtggaatgaggaccttgataatcatattttggatctcggaaggtactttccctttacggcgcctttaaataagaattgtttcattaaatattcatcactgtacaacttaggtggacatttttttcacttaagtaatcaagctacatcgggaggattcacctcactaaatttggagggtttagtaaatcataaacaaccaactggctctgtcttacttgcaaatcaagaaaaacaaaattgtatgaaggtcatcagtgatattatgtccaggaaattgcggttttctataaaatggtagtatgtgatccttttctatgtcttcgttttcctggactgcgttagtggtttaaattcttgaatgtattgaggatttcattgttcttcgttggacaagatatcttgacttttctctgatatgtggccattggcacattagttttgatttagttggacattttccttctacgcttgaaatatgtccggtttgatgggtgcatttcaagttttggtttaaagtaatcctgtttttgtccttttgcttgcaatttctgaaataaagctaaattcttatgtaggttcaaggtttcattgtcatctatcttag

SEQ ID NO: 105484 - DNA, 1021 bp, Mimulus guttatus
  Intron number 2 from transcript mgv1a020388m (locus mgv1a0 20388m.g) derived from phytozome v7.0 (chr-ID scaffold_113 ; pos 461739 to 462759 reverse strand)
cagtatgatttctattctcttatgtgacatgaaagatgagttttatggtcgatgtttgccgttcttttgggtgttttgttgtttcagttagcaaaattttatggtttcaatgactttggtgatgtgttttgttttggcaaaatcaagtatttgtttggaacttcgccgatgaaatgtctttcctatgaacatcttggtaaatggtaatgcttacagaaacttctccttgtttagggtattcagaaggattgtagtttatctattcaatgtagacttttattaattggatgaaactgttggtcaaagccatccataagacttgcccgtgtctgaatttcttttattgggttctttagtaaatctataattctgtctgatcatattttgctacgaatgcacaagaagagggaagaaggcgcgtttcagaagaagcgcggcgtttttaaatcaagcaaacgacactgtttcattgtagtctttgaataagtagggcgacgtcttgtcaatgccacgtgttgttttagctgagattagttgttgaattcgtttagcatttaattggtttagcatatttgttctgctcatttgttttcttcgtttcaaatcgtattgttttgtgcttttctttctcacgagcacctctcattgagcttaccctttgggttgatctatagtgtttctagctacgtcgccagcgaggtttggcaccgcagtggtgacagataggcttgcatgtaacatattcccatagacatgatcaatatttcaaaagataccttactcgtgttttctttttgcaactcatttcaccttattgccgaccaactatacagttataaatgggactttatggatagcatctatagtttgtattcaattctttgttttgtaactttttgtttcttgttgagggtttgcgttcaaacacggttccgatcattgcttattaagacattgaatttattcatccttatgtaattattcaggtggaacttcgacatcaggaagaattattcatcat

SEQ ID NO: 105485 - DNA, 785 bp, Mimulus guttatus
  Intron number 1 from transcript mgv1a020388m (locus mgv1a0 20388m.g) derived from phytozome v7.0 (chr-ID scaffold_113 ; pos 462891 to 463675 reverse strand)
tgcacccaatcaaatccgatcgctatcaaggttcgtaaacctatatatacactacctatgtatgcatacatttcaaaattaaaaagaaaaatgagttcatcagcctaatattcgtttcgttgtacaccccgttcttaggttttcttcgtgaaattcattaatggggtgtcaattttgtgattagggtttgttattcatagatgtaattcagttgcgccgcgctctatcagcctatacaagttgatttcccaccacttgtgtagatataatattcaaaatgagacagttgtgttgtatttttcgtaaaacatatgggcgtcgtttgggaagattgataggattgattgaattggaaatgattgcttacattgtccatgattgtataacatgtgattatcttgtgttttgagatttatgatagaacaatccttgtgttgggtgatgtccttcataggattgtgtaataacatggtttgaggtcggactcaatgtcagacttgataatttccgtacccattttccgagcttcaaaccacaaccctgaattatcaagtcctgtccttattcccagacgatgccgcaggacggtgtttggtaccaaatgcgatatagtgtaaatgtgcagatgtaaacatacgcgaataaattgagaaaaaaatagattgccgtagttgataaacgtgtaaatttagcttgttagtggaagcgttgatgggatgattttattacgaatatgtggtaactagggtttggttatgtgtaggcaggcacaccctggagggccg

SEQ ID NO: 105486 - DNA, 546 bp, Mimulus guttatus
  Intron number 4 from transcript mgv1a007910m (locus mgv1a0 07910m.g) derived from phytozome v7.0 (chr-ID scaffold_143 ; pos 226865 to 227410)
ataacagagattatctcaaacaacgggattttgcggtatttactttgcacgttaaaatattatttatcctaattttgtcgttcatatatatgtcttctgtttcgtggtttttgagtgcatttttctccttatactgtacacacacgcatatataggtatgtttttcacttcatgttcacatagtttattttcataatttagttatacgagtccttgaaaagttatgtcgagttcgggaatatgacaagtagagatgcagttcagatgccacgtcatgttaataatttcaatcgatatgttacattgaggataagaaaattgtataacaatataagaatgtaatacttgtatttaaacgggtgattcatattgaggctggggtatcccttaccatactaatttatttggttttacaatgttagagaatgaaatttgattatttgttgcattttacgatcaggtgaacttgaacgctagctaatagttgtctcttttgtctgcctggtcgaaggcagtttgctacttaaacagttacgaggtggattt

SEQ ID NO: 105487 - DNA, 728 bp, Mimulus guttatus
  Intron number 3 from transcript mgv1a010466m (locus mgv1a0 10466m.g) derived from phytozome v7.0 (chr-ID scaffold_219 ; pos 123917 to 124644 reverse strand)
gagggtgaagaacttgcgtttggtaagacatataggtaaatcttctctctctaataaggtctcgtttgtttggggagattaactgtgattaactaaatagtgggactttgtttggtgtttggtatcccaaaataacttgcctggtcggtcgacccgcaaatattacgttatcatgctttttaggcatgtttttttttatggtacaataatgaaattgagtttcgttagattatttaattttatcttgactaatcttatcttggcaaccaaacgaggcctaagaatattattctgggtgttcgttttttgttcattggttaaagcaatattttttgcaaaattgtctttacactacaatacctacaagttacttcacagcaaacttttgattcgtacattagaccagtcgctcgagaaaaaaaatcataaaaaatcgtgttatctatggttattttgatgttggcgaataaattccagactgacatacttataaattgcatgtctcttttgtatcgactgttcgctaagatcccctaattattgctggtctgcggatttagtgaatttattctaaaactaaagcaaaaatagtaacatcactatgatcttcttcaatcacatgggattaatttatgggaaatcgaaggatataacacgttgatttgttttgagaaaacaagttgactatgtatatattttgtatgcagtgacgggtgcctcgcgtggtt

SEQ ID NO: 105488 - DNA, 795 bp, Mimulus guttatus
  Intron number 1 from transcript mgv1a006616m (locus mgv1a0 06616m.g) derived from phytozome v7.0 (chr-ID scaffold_101 ; pos 46017 to 46811 reverse strand)
cacgtttttaaattatctggtttcccgtagagaacccccttcaatttcaaaattgcatcttcttcctcaaattacagaaaggccctcataaattatagaatttaaaaacagtcccctctactctgttttagtgcgtcgcagcaaccccgcgcaaacaaaacaaaaactatcaccaccgctcccgcaaacgacgtcgttttgcctcacacactgttcggtgtcagagcccatgagtgccgcactcaaatccttcactaaaactacttccccactatctctgcatttttacccactgcaactttgctccagacgacgtcgtattgaaccacactcttcttccttcaattcgaaaccctacttttttcaatttctccattttctctcacctttaatcgattccttcaatgccggaaacggcgccgtcactttcaatactgtctcctctgtttttgagccttccgcagtaagacatttttcaactttcctctttaattgattactgaatccgcaaaaatctcgtgcgtgtaattgattttttttcttttgatttgaattgattgatcccttcaattgcggagtttaaaccgcgaatattgcttctggttccccactttaaaccccctttttctttgcctttgattaaagcctacatgtgagttacatttgatttgtgttgatctaaaaaaaaccgatcttggactcagttaggttttttggtgaatgggttttgagtcgaataagcaggggatggaatttgcagctagttcaaaacccctaaaaccctcttcgattatt

SEQ ID NO: 105489 - DNA, 491 bp, Mimulus guttatus
  Intron number 1 from transcript mgv1a013947m (locus mgv1a0 13947m.g) derived from phytozome v7.0 (chr-ID scaffold_170 ; pos 10170 to 10660 reverse strand)
caatttttgtttgaatttctctcttccaatcaacggtcagcttcagctctaaatgcaaatgcttactgaatttcgaattttgctggcaatagctcgtctaatttttattttgggcatattatttcttacttggtgatgagattcatcggtttttttttttttttttttagttcagtttgaacacaatttactgttcttctgtatgcgctaaattataagaatttcgttgcctgtattatttttttaattttttttttcggttgctgtttgggcttgcttgcttttctgcaactatgtgaatctgtttcaatccttcgttaattttgtgtttgtgtgtgtgtgtgtgtgtgttgcattttatagatatagtgccaatccttctgaattgcacattaaattagggttttttttttcaatttgtaaatcaaatttttattttctcattcacaattattctattaatctttttttctccccttcaaattatgcag

SEQ ID NO: 105490 - DNA, 904 bp, Mimulus guttatus
  Intron number 1 from transcript mgv1a011190m (locus mgv1a0 11190m.g) derived from phytozome v7.0 (chr-ID scaffold_163 ; pos 574918 to 575821)
gcccgctcttcatcccctgttcttcgcctatccaggtgattttaattttttttttttttaatttccttcctgttttgttcttgttatttatgtgagttatcaattatgttgacgtctgtgtttcatttaccctggttttctgctgcttctgcttatgttcttttacctttttttttttttttttttttttagaattattattatttatggtgatagttatatttctatcactggattgttttgttttggatgtgttatggaatatcacttgttgaaatattgaggatggtgtcggtttttcttctctcagctcgtaaataatctgaagctaatttaaaggcttattcttgatatgggaattgagtacaaaaatgttaaccgtgtctacagagactggagtgagttttaaaattaaagttaattgtattggaatggaatagactctttctctaagagccttttgggaggactgttcttgattcttcattagtgcagatgacctatgaaggatatatttgatgcttacttagagctacgtatcgctatttaaattttcaagttatgattttcgactactaggataaaggtacaatgtaaacaatatgaaaactgaacaagagtgatgcagaaagagccaagtcatttggttaataagtaatgtcagacattaagcggaaactagatggggggaggaatcttttattcttaccgaactatcaattgctaagacacacagaaaagagcacgagttattatagttttctgtgttttgtcttgtgaaatatataactcctcagactctgtctttatttttcgtgatttgcagagttcttaaagatacatttttttttttttttttttttttgaatcagtcattgatgcaatttaatgtgattgaaggtgg

SEQ ID NO: 105491 - DNA, 660 bp, Mimulus guttatus
  Intron number 1 from transcript mgv1a008630m (locus mgv1a0 08630m.g) derived from phytozome v7.0 (chr-ID scaffold_2; pos 2835288 to 2835947)
ggaggagtggaaagaaaggcagaaaggaacatgtgaagatctgtattcgaaattcagaaacttaaagtttgtacccctcgaggtacacttattatacatgctgctatgccaaggttacacatgcaaagtgtaaatttatttaaaaactgtttgactcttctaaagccttgatatagtccgagtactcaggaccaacttagtgaaaaatattgcttgtctgactccctatggtgccccatagaagcacgtagggccttattttccctgttattgttttgagtttatgggacaacattgcagaccagcattgacatcatgttctattttataaatatgctatattttctttcaggtgtacttagaaatcagcgtaatcgtcactgttgactttatgctcataaatcttgtgttagccttcaaaaactcaattaacttgtacaaggctagttttctatgttttgtttgaccccttgcctgtcccaagtccacatattggaaccagtaattctgatgaccttatgatgtattgacttagcaaatttctgactttggcaattattcgtgcgctctccatatattctgggcaagttatacgatgttttacttatgttattgaattttgcagctacctcagcagcaaaactcatacgattgtggcct

SEQ ID NO: 105492 - DNA, 853 bp, Mimulus guttatus
  Intron number 2 from transcript mgv1a008630m (locus mgv1a0 08630m.g) derived from phytozome v7.0 (chr-ID scaffold_2; pos 2835998 to 2836850)
ttagtatttacaagattacatcatccgccaagttcgtaagtgcattccctagtcttgaatctagcttacaagctgccttttttttgcctttatgttccgttgactcgtgatccttctgtttatgttcattgaattgctaaatcagaccgttaccatccatagtatttttgatgtattatctgcaaaaaaatatggggataaagcgcagtgctatctcacaatgcaataagatggctgagaatggaggagtgattattttttaatatgctttacctaaatgctagggtgttggggttgtaacttgacgtagcgtgcaagactgcaagttgtgaattaattttgctttttgtgtcatattgtgcttaacacactaactattgattccttatccagccaattcgtcgcattgtgttcaagacttaaaaaatgtgtacatacttggcttgttgaaaagcaaaagaaataatgagtttatctgaacttcaattatagctccaaagcgtgtatattggtcctgctaaagctcaaacatgcaactgtcttcttaaagcttaatccttcagacttgtaatattggtctgcattgcaatttatcttatgctgtacttctcaaccatcagcaatccacccttctgtataacctattcacattagtaataaaaagaaacccgaaagtctctttctgtttcctgtacttcttaaccaccagcattttgtttattaaaaaagaaaaaaaaatccatgtcttttggttctcctgtgagttacggcatttcattagttttaaatgataaatttattgaatacgtgttttccagcttcaagcagattggtttccacctggcgaagcttc

SEQ ID NO: 105493 - DNA, 950 bp, Mimulus guttatus
  Intron number 1 from transcript mgv1a002009m (locus mgv1a0 02009m.g) derived from phytozome v7.0 (chr-ID scaffold_13; pos 2386794 to 2387743 reverse strand)
ttcagagattaatcaggaattttcttggcgctgaggtgataatcctctgctttcatgtctttttttttttttaatcagatttactctccttgattaattaattatatctgcagattctatgtgtacagtgggttgatgatttatttgagattggagactgtgtctcttagtttatctgtagcacagatcagtgtttttttgtcatttttagtctgcaagtagctagttttttatgttttcattgcatgcatggatatcatttgcttcgaatgcaatgatatctttatggtaaattattttttgatcaattaaatgtgtttgattaaatgacggacatcgtccaaatggaagaatgtccgtacaacgagatgaaaggttgtttttttcgacgcgtgtaaaagatgcgagtaatgtgggatgtttgatatttaggaagtaaatcgattttcaagttgcatttaatattttttttaaatgctccgtcgaatttgtccacgcgtctttgatctggatacgtgaatttgttatcgaggtaatcggggaaaggtgtcattaatatgatatggtacatccttgtctgttttaaggctcttctaaattcgtatctttggcgtatgtttatttattgtttatctatcttctttgatttgtctctgctgctattgcgagttacacggctgatctattaaagagatgtggtctaattgaaacaatgtatagaacatattgccttgtgatctttgtactttcgttatttatgatgttcgtttgtgtcatgttttttaatgtttcttgtcccacagttaaattcttgatccatgagcatatgtatattcatgtaagaacctaagaagtatccgatgcttgttgtatctgcctttctttatccgattaaggtaccttaatatttgttgaagtaaatgtttaaaactttttgcaggtaatcccgt

SEQ ID NO: 105494 - DNA, 381 bp, Mimulus guttatus
  Intron number 1 from transcript mgv1a011705m (locus mgv1a0 11705m.g) derived from phytozome v7.0 (chr-ID scaffold_119 ; pos 548953 to 549333)
cacttggaggactgctttcgcttactctcatcgttttctttcttccattccttcttcttcttcttcttttttaattaattaattaatgtttattattctcaattttaacatctgattatgataatgatgattctgtcacggatttttagcattcctaatcaaatagccctaaattaaatcaactgatgaattggaattgtatgccaattacaaccaatttctggacaatgcagcatcatttgctgtgttttttcataattactataagtttggtattgtatttgtatctgctaataagctttgatatgagtttttcacttgacaattgttcttattattcaactaggcatttacgtgggtggaaacaaagtggtgcatttc

SEQ ID NO: 105495 - DNA, 566 bp, Mimulus guttatus
  Intron number 2 from transcript mgv1a013155m (locus mgv1a0 13155m.g) derived from phytozome v7.0 (chr-ID scaffold_32; pos 65188 to 65753 reverse strand)
cggagatcggcgacaagacttttttcgcagctgctgtaagatatataaatctatgtgtgtatgtaattttacatatgttttttttttcagtaaaaaaaataaataatccagcctgttttattgtcttttgattccacaattgtatttctacgttgcttaattggaaataattgttggttgaatttccggtgggggtgctctgagctgctctgaattgtctactgtaatagtagtagttgataattacactcgttaattttatttaatttgaaagtgattttagtagttaatttgcatgttacaaaatacattggcagctggaatcaatgttgttggtggagaattgcgattgtaggattatggatcctgaaccaaagtgatttattattattgttaatttttttttggttgttgttgttgttgttgttgttgttgttgttgttgttgtgtgtgtgtgtgtgtgtgtgtgtgtgtgtgtgtttctcatatagcacttgattaagctcttcaatggttaatcattagtgttgttgttctgacgttggtgttcgtttcagattttggca

SEQ ID NO: 105496 - DNA, 891 bp, Mimulus guttatus
  Intron number 1 from transcript mgv1a008146m (locus mgv1a0 08146m.g) derived from phytozome v7.0 (chr-ID scaffold_139 ; pos 6498 to 7388 reverse strand)
aaaggttcgttatttgatcttaattaatttctagatctgtattaattgatcctagcaaatgttttctttctggattaaatccatattgattgtttttggtaaaattacgggcctccctgagctaaggcaaattaggtaaaaaaaaaaaaaaaaaaaaaacgccttctctttggctaattataatcacgcttaattatgaattttattacacgtccactcttgtggtggaatcttttagattatgtgaaatattatctaatttgaaataagatgatcacaagatgtaaatatgagattgtggtcagtggcggagccaggaattcgggttaatatttacgggggttcggggcagtgaccccgagtttttttttttttttttttttgattcattcatataaagtagcacaaaataactaaaaatttataaactttaactaataacacataatttttttggtgggtgggctaaattaaattattttgatgggctgattagatatagctatagtatttagtagaaatttctaaaaatccacattgggctgaagcctacccttgccaaagggtggctctaccactaattgtggtgcatcagaaactgcacatttgcacaaattgagtataaattggttggagaacatttcacgaaatctagaagattttgttgaatttaactccataaggatgaacgtgtaagaatactcatagttgaggtgattgtaactaccttacctaaacaatagggtattttttttttattttttttagaatttaatcttaactcagggatgtccgtaatgtacgctaattaattgtctttgtatttctgatctgtttaacaattttatttttgcagaaaagcagaaaatcaaacagccttacaaaagcgtt

SEQ ID NO: 105497 - DNA, 802 bp, Mimulus guttatus
  Intron number 1 from transcript mgv1a026125m (locus mgv1a0 26125m.g) derived from phytozome v7.0 (chr-ID scaffold_14; pos 2218212 to 2219013 reverse strand)
agacgatccatcgaacctccttccaattaacaacggtaatacactgccctaattttcacatatttcttcatggttgtacgattccaccgcggagcagttgtactcttcggatagtcagttgtaccttggcgatttcatctgaattattttgctttgaattatataattttagggtaaattgaacatcacccctgtaaatttctaatttttgcactttaccctcacaaaatgtttaaaagtgaatgcttgtcccttcaaaatgctattcttgttgcacattgccccgatagcaaaactccgatcgattatttatctgaattgagtacttttgttgcacgttgccccctttaaaatgttatttttgttgcacaatgccctccaaaattagtttttggggcaaagtgcaagtgtgcaaccaaaataatattttcaagggggagtatccttttttgaatatttaggggggaaagtgcgaaaatgggaaatttataggggtgaagtgcattttgtcctaattttatgttcattgttccgatttatggtaattgcgtgttccttcgttaacataaaaaaaaattaataataataattattataaaatcctgctaattgacatgatatggatgtgttcgaacttttttttttaatatgaatacgatcaatgttttttcttcgattctctgctgaactttatttttcactacgccatggtttaaatattatcggagccgttcatttactaatagattagtgcctaattcttgcagaaacttgtaaaggagttccatcgtatccattatat

SEQ ID NO: 105498 - DNA, 447 bp, Mimulus guttatus
  Intron number 1 from transcript mgv1a015574m (locus mgv1a0 15574m.g) derived from phytozome v7.0 (chr-ID scaffold_22; pos 545735 to 546181 reverse strand)
gagagaagagcagctctcgccgttctcgttctcaggtagataaatatctcttttaattttaaatttttttttttatgattaaattgcgtgcaattgatatgaaccctagttttttgttacgttgacttatttgtatctgtctgattgtgcgaagaattcgtggatctaggatttttttttggttgtttagatgattaatttgtgtgccctaggtagggttttcgtacgtaattatgtttgggctatgttttcttgttgtgaatttgtttgttttttttttcgccgtaatttttgctggaattaattagtgcaaattgaaattagaaatgcccgtaatcaaatttgaattgttgatttgtatgagctcatgtgattaataaggttaaaaaacatgaaatatttttttttttttttttttttttttttttgcgattgtaggtcttgaag

SEQ ID NO: 105499 - DNA, 657 bp, Mimulus guttatus
  Intron number 1 from transcript mgv1a019274m (locus mgv1a0 19274m.g) derived from phytozome v7.0 (chr-ID scaffold_45; pos 521762 to 522418)
tttcgcatattaccatcaaatcgtcaccaagtacggtaagaacgattattccccgttgatcttaacacggacacttaaatgtaaggcaattatattcaagcaagtttccatttcatttttattttttcccgatacgaatttgtgtttgttaagtttttaaaaaaattccctcaacaatttcaaaagcttatctctccttcatacatgatttgactgttacagtaaaaaaaaatgattattatactgaaaaacaaacaaacaaacaaacaaacatcactttatttttcaaattcttcttataaaataccattttcaaacacatttaaacattatttgaccgctacactgtatttagttacctttcaaattataaacaaacattatttttattctcaaattattccctcgctcaaaacatatttcccaaaataaaatgaaaataactcccaaaacgattccaaacattgccttagtgtcccactgaataacaaggccccacaatttttatagttcaacaggggtattatagtaatttcactattttttgaattttttttttaaaagtcacccatttattattcgttttagaccccaaaatagctacttcataacatgattgcacttaatatgtgtactatcaggtgagaattctttcat

SEQ ID NO: 105500 - DNA, 374 bp, Mimulus guttatus
  Intron number 1 from transcript mgv1a012085m (locus mgv1a0 12085m.g) derived from phytozome v7.0 (chr-ID scaffold_32; pos 1700893 to 1701266 reverse strand)
gtataggaaactcgcaaagaaatttccaaggaaaggtaccatttccccctttctcttggtataagaactattgaaaatttgaaattgttttctggatgcatcaaaatattgcagtaattaagttgaatcttgaattcttctctataattcgttacttattcttccaaacacgtttcatctataaaataaataattagttatttcccacctttagtttcttgatttccattttcagattacttctaggtccgagtctggcctcttatctctttgaaaataaaataaataatatgctattaatattcttgcaaatatctaacattgatgttctacttgtaggttcttgcgtgtataagaggagggagctagctact

SEQ ID NO: 105501 - DNA, 964 bp, Mimulus guttatus
  Intron number 3 from transcript mgv1a010145m (locus mgv1a0 10145m.g) derived from phytozome v7.0 (chr-ID scaffold_5; pos 1147723 to 1148686 reverse strand)
gggtcttcggacgaggtgattatctctagtctttgcaattatcgagtgttttggtgttatgaattcgtctttgtgtgttaactgaaataatctatgaggttaagctataatcaactctagatcttcgttacggctgtattataatatccaatatctgctgtcgggagaaagtttgcgactgcttcatttgagtctagtgagattatgtagaaatttggattaaacgttcgtgtgaaatgaggctgcgtgtgaaagtcattgacccttaggttcctgcttgtggggtcaaaccccctcggatttggtttgtgctactctgtgttgatgagttgactaatattgcgtcttgtccttgtactcgccatacaagtgttgactcgccttaatcgaacccgcacaacttcggtcaaatgaatccactaactattggtcacgtgggagtttaaaaatctgcaaccatatacgaaggcgccattgttcacatgcatgctgtgtcaagaccctatttgaattaataatgcataagttcggtcaaattacatctattgatatgtttgttcgtaggtaggtaacaagacgtctgcattggcatataagttcatctctttgagctgttaacaacatacctccatttgttcgataattggctattttcaacctattgtgcatcacgtcgtgtcatatatttgcttgatctaaaaaattgcaaataaaaagaacatttctgatgtttttgtgccactgatattttgtttttcaatttccgagtttctttaattcagcattttgaggatatatattcaccgtgttcaatgacctttttccacaagtgtccgtctataaagatcttgatgttgtcatattgctccttttaactttttttttttctgcaatcgcttctcaactatgtaataacttatattgattaggacgttggagtagaggctggacctaatcgaaagcg

SEQ ID NO: 105502 - DNA, 775 bp, Mimulus guttatus
  Intron number 1 from transcript mgv1a024719m (locus mgv1a0 24719m.g) derived from phytozome v7.0 (chr-ID scaffold_29; pos 1062567 to 1063341)
ccctccgcgccttcttagccagagactttattccggtttccctccgcgccttcttagccgatcctcgttttgtggggtcggcatcaaagattgtgatatattaaagttattttttgttttctttacagtaggtttttcaagaattttctagagtagaattaaactttattttattgttaaaatttcaaggtcattaattaaggtaattaattaggatgctagagccttctaaagttgtatatattagtgtgttatccagcttttgtaatcaatcgagaaatagaaaagatttccaacaaattatctcttcaatttttagctttcttctttactcatatttgaggtttaattctttttagttgtaatctttctacaacgtggttggtgatcttgggccagcagtaatatatttaatctgctgttattttatattcacatggtatcagagccatagggctggtgtttaacaagatcccttggtagaagattcaactggtgcctcaaatggatgtgagtggtcgtgttagtgggcttggtatggagctgttgaacccatccaactaccgaatatggcggacttgtatggagtcgtatcttgttggagaagatctgtgggaggttgttaacggaagcaatacagaggctcccgcaaatacgacggagaacgccgctgcccttaagaagtggaagcagctgaatgcgaaggctgagtttctattgaagagatcgatttctcacggcttgttcgaccatattatgcgctgtgaatcagccc

SEQ ID NO: 105503 - DNA, 917 bp, Mimulus guttatus
  Intron number 5 from transcript mgv1a009970m (locus mgv1a0 09970m.g) derived from phytozome v7.0 (chr-ID scaffold_122 ; pos 45719 to 46635 reverse strand)
atactcttggtcagttccttcttttaagattgacttcttaccgctttcagcactggcactttattgacatttttgtatatcaactttacatgttggaccacatttagtcatacattattttagtgaaattaatatatattaattatgtccccgtactattacatctttgcttagttgttctgggttacgctaagaatttgggcaacatgaatgactgcagtcactctgatgcttcactattagttatctactaataatcattttcttgtaggtgaaaatttgttctaggatatgtgtgggattaagagggtgaggggggcttggaggggaaggaaggggcttaaatcaaaatatcaaatccttcctctagactagaggcacatgggattctctattttactttcgatttttatggaaggaaactaaaggagttatattctgtttgttttctatactaaagaaccatcaatgtttaaacattgtaatagcaaaaatattgccaagttatttagacgattaggtatgtgttcatgcttaatttgctcatcaagtaataagtacgagctcccatcgatgggagatttgtcacttctaatatggtataagaggttctggagttggtataactctaatgtactattatcaaatcactgcttggaaatctactctgttacttgaaataatccttcataggcatttccgaactaataacttagtactctgattggtaactagtcctttgtgaaatagctgatcaacattaatgctggcagtatttgagtttgaccaggcaacctccaaagccttttctatcgtaacttaataatttagttctatcttatatatgtatgtgtgtgtgtatatctgaaaagtccatttcagatcgtatcaggaaaatatataagaagtttcctcgg

SEQ ID NO: 105504 - DNA, 317 bp, Mimulus guttatus
  Intron number 1 from transcript mgv1a001965m (locus mgv1a0 01965m.g) derived from phytozome v7.0 (chr-ID scaffold_83; pos 634215 to 634531 reverse strand)
tgattctgccgtctacttcgttttcctctccaccggtaattcttcttctcaattaaattaattatttattttccttttttgaggtatagatctgttaagtttttcccttttttatttgagttcatttgtgattttttgcatatgttttttttgtaatcacataatttggtagctaattacagagtgggggttactgcaaattattgcaagatgcataatatattgtttcttgatttttatttccatgtctaatagttgttccattaaaccctaattttacagttctggggatactggttatctccggcgtaatcctt

SEQ ID NO: 105505 - DNA, 750 bp, Mimulus guttatus
  Intron number 1 from transcript mgv1a016040m (locus mgv1a0 16040m.g) derived from phytozome v7.0 (chr-ID scaffold_26; pos 946572 to 947321)
ttctctctctcttcttagaactttctctcacccaggtatttcgttttccttcaattttttgaattaaaattcgttttttgtaagtagttttgttgaatctaatctattctcaacgctctgatcttcatgtttgcatttttccccaatttaatttttatgttcttctgatgcgcgatttcatattcgtcgttttatttttcatgtttagtttctgtaatagtattgtgttgatctttcgatttactggatctattgtgtgtttcgatttacttgatatatatatatatatatatatatatatatatatatatatatatatatatatatatatatatatatatatatatatatatatatatatatatatatatatatatatatatatatatatatatatatatatatatatatatatatatatatgtgtgtgtgtgtgtgtgtgtgtgtgtgtgtgtggagttatgaagaagtgtttttcacagtctaatgcttgggttggatatgaaatttaaatcaagtgttgtttgttgaaactagaatcttgtgggcaaaaaactctgtattgatttttggaattttgtttttagtgggatttgtatttcgttggcaatatttcgattacgattgtttcttgattaccaaaccaaccaagagtttcattttggcctctatatgttaatctgaattacgaaacttttggatgtcgagacattcgattatctgactttttttttcgtctttcttacagaa

SEQ ID NO: 105506 - DNA, 743 bp, Mimulus guttatus
  Intron number 1 from transcript mgv1a023399m (locus mgv1a0 23399m.g) derived from phytozome v7.0 (chr-ID scaffold_90; pos 853860 to 854602)
atcaaaagagaccacatcgatccgctttgggtaaattttcattactttttgtggaaatttctcgatttttcgctttctggtaaattttcgtgattcgttgtaattgtgtttgattgcttacaataacagcgcattcacttgattctgattttgattttaattttgattttgattttaattttcactctacttaattaaccgacttccttgttttgatctccgtttatttttcatcttaatattagtttgtgtttcaagcgatttgtttcgacggtatcgaaagagtaaagtagaaattaaaaatccgcatatgataagatttttctttaaccgattaataaatttatgtcgtttttatcaagatttttcaaaattttagctaagtatgccggccgctataaagggtatgattttaattatcacgattttatgtgagtactcgtgtcatacgtagattccgattacatttgcaagtgttacaaaaacatatcgattgtatcgaaatggtaataatgtcgttggagtgaaatcagaaagacgataaaaacgccgatacttaattactaaatgataattaaagagtacaaaaattcatgaaattcttgaatgaatttggtggtcctagccaacataaaaccatatatattcttcataataagtttgatttttcttttaattatttattattattatttttagattttttatttttttttaattaggaacctgaacccgaaacaacc

SEQ ID NO: 105507 - DNA, 743 bp, Mimulus guttatus
  Intron number 1 from transcript mgv1a006874m (locus mgv1a0 06874m.g) derived from phytozome v7.0 (chr-ID scaffold_15; pos 981540 to 982282 reverse strand)
atctgccaaagtgttcttcgaggagcgttttggtacggtttttcatttctctttgtttgattagatcgtttctacatggattttttttttctgtggtcgtcgatggatttcattatttgttttgaatgattggtgtttggattgtgttttatctcgatctgagtgttggtgatggaagaaatgtcaccttgatttaattttggtcgaactgatatcaatgaaaacagatctcagatctgagagcaatttgttttgatcatgaaatttctgatttaatccgatacgagattagcatcaattttataatgtgagcccaatttcaatttgtcatcatcattgtatcagttacacatgattcatatagagacagctggttttatgaaccctttatgcaatgtagtccagatcaatcaaatttgaatgacagaaaataatgatccgtatgatgtagaaatattaagaatgcttgcatttgcagaaatgtacatgcttatgaaggctgaaattttttgttttaaatgaggttagctgttttttgaaatttgataatgattggaggtgaggagtggaaaatattgatacaaagagctcttcctatttgataattcttgcagtgtagatgtaaatataattgtctcaagataataaataatgacagctgagttattttactttattttatgtaattctcgtttccattgatggttttgtactgataatttgttactttgcaaactctaaag

SEQ ID NO: 105508 - DNA, 863 bp, Mimulus guttatus
  Intron number 1 from transcript mgv1a004516m (locus mgv1a0 04516m.g) derived from phytozome v7.0 (chr-ID scaffold_55; pos 1032712 to 1033574 reverse strand)
aaggtatttctttttcgcccaattttttactatcaaaattaattttttactatcaaaattaattttaccattttagggctctgttttttaatccaaattcacaatcttaaataagtcaaaaaataaaaaaaaaaaaattgaggcttacatttttaattagtacatgtgtactagaataagacttggcagtttataagcttctctttccttaaaattcaatcaaatgtcaagttaatcattagaatattagcaatgacaataaaataattttcaaaaaataaaataaaaaaatgagcagtgtggaggatggaacttgcccggcaagattagccgtatcaatcgtattcatgaataaatggcatataataaatatcgaccgctacaactcacccaatttttaggcccgcccgtgaatttattaaataaaacttaagtggttgctatactcttaaaaaaaaggtatgacgatggtactccgtgattttgctttagatttgagccacgtcacgcgtcacttcgaatcttatgtttcgtagtattttatttttatgactattttaatttgaaaaatgtatgggaaactcgatttgttttaggtgttcccgaaatatggccatgttaatgtcttttcttaacgtgtgttggattatgaatggcattgatcggaaagtttcccggggaagattgttttacgaatttatagtaatatccaattggtagataaaaatgaaaccacaatcgacaaaatcttcaactagtaggcaccaaggtaaatcttcaatactacatttctgaagtttccgatttctcatgttgtttccttgacagggttttctcggacttagtggcgcagtactcataca

SEQ ID NO: 105509 - DNA, 625 bp, Mimulus guttatus
  Intron number 1 from transcript mgv1a013824m (locus mgv1a0 13824m.g) derived from phytozome v7.0 (chr-ID scaffold_266 ; pos 253285 to 253909)
gcttggcctcggcatctatcactccggtgttcaaggttacttttcgatttcaccatattccatacataacatattcatccctgcttttatttttattttctaatggtgtttctgtttgttttacttccattttctgggttttttctttaaataaatacttgtgtgcttttgtgaattgatcttcgttgaccccaggagttcgtctccgtttgcttggctaagaaaaatcaaatctttcacaattcaagcactttttacaaggtcatttcctagaaaataataaaaagaaatattaaagtaagagaagagccttgagcagttgtgagatatttgtgtctcgtatgttcgccacaacgggactaaattagtaagtgtaagtgataatacagtttgatgtaatacttggtcaataaaaatcaaaccgaaatagagcatacatctaatgtgcatatgactagagaatcgaacattcttaggtggtacgacttgcaaagctctccttcaagttttatccttgtaatgaacttttaagtaattcctggacagtagttttgattattttttgtgtttgggtaggagatttatctgatgtgatctggttttccttattttattatggtagttc

SEQ ID NO: 105510 - DNA, 881 bp, Mimulus guttatus
  Intron number 1 from transcript mgv1a006331m (locus mgv1a0 06331m.g) derived from phytozome v7.0 (chr-ID scaffold_270 ; pos 67498 to 68378)
agctacgggtttaccagacttggaaaggcagcaatgtgagctttatccttttttttcagttttcaatttctgatttaagtgtttgtagtgtaattttgctctttttaagtttaatttcttatatctgtttactcctgtcaactcgaactttagtgatagtgcttatgcttgcttaattgaagtttcggagggagaaaaaattacacaagaagagattgggttaaggctaagcgtatttcgttctatttgaaacattgaactgggttgttctttttccatctccattatttgttggttgcattgagttaattgagctcataaagttgtttcgtcgatacttttggtttcctggagcagttatgtttcccttgtgaaatcatgagacgaaacaatgaaggaccatgtagttttcagtgttgatcattagatcgtaatatataattaatttatcgcttccattcgtgaaatctgaatgcagctttctaaaatctaatttgtctttacaaatcaatgctactcctaatggtgaatccaaatgcagaactttgggttcaaaaatcggaacttccatttcttgatcttatgctaattcgggtgcacaccgtgtttggatttctattgagcccttagtgtcttgggttacgcttacgtcttccaactcatttaattctcctttggttttgttttcccgacacttctttttacagttgttcattgtaagctgctatgcacatccatacttttggatctgatctaatgaaaactcgttcagttattgtgtagattgtgcaaatgcttatctttctggtttagtttttgactgtttgcttgtttttgttgttgcagaaattttttcttcaaggaaggtttatttttgggcc

SEQ ID NO: 105511 - DNA, 873 bp, Mimulus guttatus
  Intron number 1 from transcript mgv1a003950m (locus mgv1a0 03950m.g) derived from phytozome v7.0 (chr-ID scaffold_142 ; pos 373874 to 374746 reverse strand)
gccagcgcgttctcaacacgggctctcccatcactgtaagtctgatgaaagtccttgcctttattttttggttatttatatatttttttttctgactcggattttgtgttcttgaaattcgattttgggatgattcttgactgcatttaagcaaatgtgtttgattttttttccttcttagatagattggatctgaagtcttagttggattcatgtgttttgggttggtttttatgcggttgttttgatacctaaatctccggacattctgttcattttcctggatttgattctgaattgggctttttgaatcctctggtttggtatgttaagacttcctttttatttattcttttgaattttcgtttggagttataggtttaccatgcctgggatcaaagcttatgaattattcaaattttattatcaatgtttttaacttatctatcgaaatcatgttatatttgtttaataatggagtagttcttctgtctaatggttttagcatttctaaaatacttcattttggttgagatttttaattgtcaatttaagtatgttgcttgagtttgtttgacaattatcaatgagttttcttctacttgaaatactttgaatctacattcaatcctcagttcttttttatggtctctgtttctctttgggcttaaaggatctggatactcatctgatcgtagggcataattttccacaaatctctgtttgtcatggatgttaaccttataaggtgttcttgtatgtatagtggatatccttaatgatttatatgacacggaggagtttgttcgtatttgataacaattctgctactccttaggtacctgttggtagagcaacactaggtcgcatcat

SEQ ID NO: 105512 - DNA, 726 bp, Mimulus guttatus
  Intron number 1 from transcript mgv1a015500m (locus mgv1a0 15500m.g) derived from phytozome v7.0 (chr-ID scaffold_8; pos 1542510 to 1543235 reverse strand)
aagaagaagccaagcgattgacacaagtttgggaagtaagttgctaattacccttctttaaaatgattagaaactacgacggttatattaactgtttttgcgatgatgatagtatgcatggttctagaattttcgaggtttaaacaatcgagatttggattaggattaggatcgaatccacgagaactgaaaaaataatcccaacttagagtcagtggtttaagatctaagatctgtttgttatgaattatgatacaaacaggctcaatggatttgttattatgaatttaaacaaacgtacactttggaagaaacaacgagaaatactaatttaattacatttgagttcgaatttgaataatcactttatcgctgttacagcgaggcatctcaaagtgagatattttcttcagaattattattaaaaaaaaaaacataatttaagccaaatattatactctctatcgtttgattatttaattatttcaacctcataatccattaaaccatatttgtgaaaatgtatgtacagtcgagcctctataaactctataaagtaatacagttatgactagcaaaaccctattaacttagcgaaacattaaattattgagcgaataatttagtatatttctactgatttgaaaccgaaagaaattattatttaaataagattattaatttatcgatgttttactataggaacttgaagtgttcacagatccg

SEQ ID NO: 105513 - DNA, 967 bp, Mimulus guttatus
  Intron number 2 from transcript mgv1a012359m (locus mgv1a0 12359m.g) derived from phytozome v7.0 (chr-ID scaffold_37; pos 45402 to 46368 reverse strand)
ttccagggctgaaggtaattacggcttttccttcattatttacatgtcttatatcttttgcttcaaactgatggcgtgctttatgggacacattgtacatggggatggactataggatagagttaacgcataaatgatttatgtctatgctccaaggctacttccgtattgtcttctcttcaaggctaaatttgtatatttatgcatgtttaaatttaaggaatctgataaaccaatcaaacttctaacactttgataatcctgttgggttagtcattttaaactaatgtgtagatattcataaacacaaggatttgatacagtgaatgctataagcaggtcgcaagttgttggagtcacttctgacttctgagttgcgatattttacttgtgtttattatgtgactttctatatcgttagaattaagctacctctcttcattcatattcagttataaggtatgcaagtaattgtgatgctgcagttgacctctatatggaaaatgtattcttcctattcagtgtcgattaaagattgcatgattaagtgaggatcctcctatcagatagtgttggtcactgctatttgaagaggattatctatcttacgatgataaatggaaaacttatattaaatgtaaagttgtcaactgatgtctgcctgtgaaattaacttctcatatatctagtttttgtatctgagttagattcgtgtatatttatctcttcagtgaaggcaatgttgaccatcatacttcctaataatgtctgacatgtcttttgatgaaatgaatgggaaaacaagattacctctgccttaggctggatgaactccgaatgttgattcttgaaaaaaacaatttgtggagttgacatgatgaagaacgttgatcttattcttagtatatagttttctgttttcttaacatatgtgatatgcgtggcatttttgtattgtgataggtgg

SEQ ID NO: 105514 - DNA, 792 bp, Mimulus guttatus
  Intron number 2 from transcript mgv1a008446m (locus mgv1a0 08446m.g) derived from phytozome v7.0 (chr-ID scaffold_83; pos 465538 to 466329 reverse strand)
acagtgacacctctctaccaagatccgtgtttaaggttctgaattctaccctttaattgttcttaaagttaatcgtaattaccatgaattagtttctttgaaaccttactcgtctactttgactttagttttataccttaccttttcaagatcattcaagtatttggttagattattgtactggctcaaattcattgggtataattgaattcccatatgttttttggtggcaaattccggtatggtacttctcgcgttttcgagtacagtgtactatgctgatgtggtacctttcgttacaaaacaacacatggccattgtttgattagttccaaatacttgttggctctgcatttctacttgtagagttttctgaaattaaacttgttaagacgtcatttcaaaaaaatatatatataagaattaccgtcgttgcttaatcttgctggtttctcgcgctatttccaattgggattaatttacagtgattgtatgatttgatgatttctttacgcccaacattcgatgtcacagttcgttctgattaaaactctttctttggattcttccagtttttacccgtttttaccccttagttatattttctttaaacatatggtacattgcatgtgctccatgtttctttgatccttctgcccgtgaagctgcatgtctctctatttggttacgttgtaaaacagatcattataatttttgcaagctacgatgcttaaagaattataaatttcttaatacaaaaattgcatctcattgtactgctgcagacaaaca

SEQ ID NO: 105515 - DNA, 482 bp, Mimulus guttatus
  Intron number 2 from transcript mgv1a013936m (locus mgv1a0 11115m.g) derived from phytozome v7.0 (chr-ID scaffold_83; pos 301699 to 302180 reverse strand)
tgctagctttgtatctctccggccctgaaaacaaggtgaatttctgttttttggtcatttattgaattgatctgtattgtatgggtatcgtttctgaatttacttatacttcatcaaatttgattatatcatacttgaattttagacgtggtgatttgagctctagatgtggatcccgtattaccgaaattagtgatgattttcgttagggcttttccctttagttacaagtgataatatactcaatattgaagaacaaaaatgcagtcatcgttaccattgaattgggtgttatattctcaccaccattaaattcacaatttggacaatataacaataacatggtttcctcttcctctttagaatatatgaagagtttgaattccctttgtttttctatttgatgaagtggacgcaaatctctgcttgccgtgactaaattcagtcgttgtatttgtaggaagcggctatttcgagtctca

SEQ ID NO: 105516 - DNA, 678 bp, Mimulus guttatus
  Intron number 1 from transcript mgv1a015833m (locus mgv1a0 15833m.g) derived from phytozome v7.0 (chr-ID scaffold_11; pos 191522 to 192199 reverse strand)
aagcctacgccgctcacctcaagcgctccggcaaggtgacttcaaattttctggctttttttcttatgtttacagatttctatttcattttcgttcggattttttatagaaaaatgctctttagattttcgtttgagaaaaatgctctttagattttcgtttgaggttgtgtgtgtgaaaaggttaggttaggactagtttgaaccaagcctcaacctttttgttgcaatttgtatgtatgttggattgatttatgatattcttcattttcgtagtgagtgattttggatggtaattgtaacccggttgggggaagaagatggttaaatgtcaatttgtatgttgaatgaaaattatcgttatcatttactggtgatttgattaattattaacagctcagaagacctaaaaaaaggacagagtcgtaattggccggttcataaccgtgtcgtgtgcatagttgattttcgcatgggtcgatctttaagtagctcaaagtgtattgatatttgtgtttttctcttgtaaattagaagcccactgtttgtacctttgatgtcatgtgtttcttttcacgttgcgttattcaatcttaattatgtttagttttaccatttcttaattatgcattttttccatggatatttatttattttcctgttctatcccaatcaatag

SEQ ID NO: 105517 - DNA, 1010 bp, Mimulus guttatus
  Intron number 2 from transcript mgv1a007513m (locus mgv1a0 07513m.g) derived from phytozome v7.0 (chr-ID scaffold_7; pos 3058185 to 3059194 reverse strand)
ccctaccaaggtttgtttttcttttttaatcaattatttattttaattttatattttgtccaattttataaatatttaatatctatttttaaatatacaaaatgagataaaaaggtagatttgaaaagtatatatatagtctttgcaatttgtcttgtatttcatgtacttgttatggtggtgtaaatcggaccgatcgaattggaattagtcatttccgatatttttaaactagttccaatttcgttccaaaaaaatgggaaaatttggaaatcggaatttcggaaattggaacgaaaaaacttttttacaaaattggaaaattttggactggagtcggcggaattcggaaattttcaatttttgcgcacattaaatataaaattaataataatattagtattttaattatgataattggaaaaggttcgaaatttttgaatttattttcggaactctaatcgaatcggaaatcggaatatcatatatattccaattttaatccaaataattttagaaaaatcgaaaattcgaatttcagaattcggattgaaaaatacccttccaaaattaaaaaaaattggatcgggatcggtgaaaatcgggaattcgttccaatttccaccctcaagtcttgttaagtgtcaagaaaatgatatatagaacactccattattttaccaaaacaataaattaaaaaaaataatacactttgttcattttcatgacacgtggatgaaaaattccgtacaaaccggagctgaattgggctcagaaaaagccccagcgaggtgtcaacatgggagcgtgacaactcacgtacgattttctgggcctatctgcaaaaaactttaaaaaaataggcccaaaagaatcaccacgcaccactcctcactcgacacgtgtaaacttcaagaaaacaatttattcttaaactgatattaccatattgcccttctttcttctgttttgcaggtgacgaatcaagttttcaggtacgcgaagaaggc

SEQ ID NO: 105518 - DNA, 1011 bp, Mimulus guttatus
  Intron number 1 from transcript mgv1a003788m (locus mgv1a0 03788m.g) derived from phytozome v7.0 (chr-ID scaffold_161 ; pos 114589 to 115599 reverse strand)
cgattcaatcggccactcactcgccaacttcacccgtaagtttaaaatttctcgatattccaaaaatactaaactaatttcgaatatcgtattgatgcattcgatcacgtatggtggatcataagaaaatcttgaaataattgcttccgtgtgtcccaaaatatttgtcactttggaattcttttcaaattatctgacaccgtagaactccaaagacgcattaatttttttttttaaatcagttatgtgctttatcagtttttttaattaattgaaagataattaggtggtgtttgaaaaaaaaattataaatagattatgagttttttttcttcttatatataacctatttttaagtgtttcaaaaatgaatttttatttttgattatgttaaaataagtaactttaagctataatttgttatgcacccataacctagttttttttttaatttaagtttatttttcagtaaattcgcagatacccccaatttttagaaataaacaattaaaatcaacttaactcacaatccattacttctgtttttaagtaagattttacaaacaccatcttactagatgatcaattaataacaagggcgttttagtaatcttggatattaatccatccatgcatattcatttgtttccttcatttgtgcataccaacccaaaacgacaaatattgctggacaggggagtaatttaaatgtactgtttgcaaataagttataattttcaacttatttttggaaagtactcaaaaatattttaataaagtagttttagataataaaaataataatacgaccagttgcaatgttcattgattaataaaagtgcttttaaactagaaaagttgatgctttagaaattttatagcttaaaccagtttattttaagtgagattacaacaatttttcgtcgtgccaaacgaggcctaaaggtatatatatgtatttcctatatatgtgcaggttagctttgtagtggtgaagattacagcaatttg

SEQ ID NO: 105519 - DNA, 461 bp, Mimulus guttatus
  Intron number 2 from transcript mgv1a017993m (locus mgv1a0 17993m.g) derived from phytozome v7.0 (chr-ID scaffold_5; pos 3938019 to 3938479)
taatcagatttttggccattacctttattcgccaggtatatattattttttatgggaaaagtacagtttgcaccgattttgtattttggtccctcgtgcacaaaaatacacatttgattcctcatatttaaaaaaataaacacttttagtcatttccgtcaattttccgttagtactaacggaatcaagtgtgttccactaaaagtgtttagctattgaaacttgatggaccaaatgtgttttttatgaacatgatggaccaaatgtgaaatcggtgcaaacaagagggttgaaaattgtaatttccccttatctttatctttctttttgtttcttctttttttattgttcgtgttaattagtttgttttagtcctatagagtagtttctttaaattgtcaaggactacttgtttttatttataatattatttggcaggagtaacaagacgtttccgaaca

SEQ ID NO: 105520 - DNA, 401 bp, Mimulus guttatus
  Intron number 1 from transcript mgv1a004272m (locus mgv1a0 04272m.g) derived from phytozome v7.0 (chr-ID scaffold_66; pos 884223 to 884623)
cttcagagccctgacggtgaagtcaccataagtaagcttagcgtttctcctgttattattgtgtttatgttggtgtggttttgcttgaatccttgattttctgtttttctcggaaaaattaggttttggtttggatttttgacttcgtaatactgatttgttgcttaggggttttaattttacttaacctagtattctggaattaaaaggctgaatgagaacttgtctacattttgtgaatttcagtttcatgtagggtatggtattaaaggcactaaggctaatttttggtcttcgaaactagtcagatctatctatatcaatgaactatcgagaaaatcgacatcagcttgatctattagagataaaattacttattcgtgttcttttgctgtcagcaa

SEQ ID NO: 105521 - DNA, 579 bp, Mimulus guttatus
  Intron number 1 from transcript mgv1a009312m (locus mgv1a0 09312m.g) derived from phytozome v7.0 (chr-ID scaffold_68; pos 931001 to 931579 reverse strand)
ccgctggcaggatcggaaaaagtctgattttcaaggtgaaatttctgtgtatttatatgtgtgtgtgtgtgtgtgtgtgtgtgtgtgtgtgtgtgtgtgtgtgtgtgtgtgtgtgtgtgtgtgtgtgtgtgtttcatttttcctgtttcttgtttgtgattaaaaattgtggtgttggagggaaacgtcgatgaagaaaaactgctgctggatggttctagatctcgaatcacgatacaaatgagatcaaactacttgattctttatttattttttatttaattcttgaagtacatgagtgtagaatccacaatttgcttcactggcttcgattttatctccttagtctaataaggaagaaaattcgatgcggtggagaatatagtgcagagtagatactgatcgataataccgataatatgaaaagtagaaggaactggtttcaattatattgccattcaatgaattatttcttaattctagctatttcgactggtcgaacctttattaactggatacggactggttttccacgattcaattaaaacgatccttttgtggttttaggtgaaggatctt

SEQ ID NO: 105522 - DNA, 399 bp, Mimulus guttatus
  Intron number 1 from transcript mgv1a005793m (locus mgv1a0 05793m.g) derived from phytozome v7.0 (chr-ID scaffold_16; pos 791946 to 792344 reverse strand)
tgaacttcttctccattcgctttcgaaaaaataatgtaattttcttgattttttaatctattaagttcttaattttaacactcttttcgagtgtaaaactgttgttggagtgtttcttcttctttttcgttttttgtttttttgaatgaaggtaattctgcatcactcagtcattgtatatcacctgttcgacaaaattccccacagaagagaagaaagacttctaatacttgtttgtcattccgattatggaaaatcgtttagccgtgtagaatgtattgatcgaaaatgatcctgctaaaatttaaggaagattctggtaattttaattcttgaaagaactgctattaatcgttgttttttttttttttttttttgtattcagagtttcttaagcaa

SEQ ID NO: 105523 - DNA, 717 bp, Mimulus guttatus
  Intron number 1 from transcript mgv1a005166m (locus mgv1a0 05166m.g) derived from phytozome v7.0 (chr-ID scaffold_122 ; pos 160913 to 161629 reverse strand)
aacctgtgattcttcaacttttaaggtttactttctctctttcatcttgattattactatttcttgtttttttttttttaacttcttgtcaattattaatgtgtgggttttcttagagtttcagtaaataaattcaaaagcaaaaaagaattaaagggtggatgttaataagttaaattatcgtaaagattaaatctttgtatcttttttttgtaccctttttctttaagtctgtaaattacttgctagagctactactaaaaagttgtctaattctagttttaggactacattttggatgatttttgtttttcttggttttgtccgaatatcaaaggataattcgtgttttatatgcatttagttgtgtttcatttgctattattttagagttcttgcgttatgggacaaggagacttggagaaatctttgagctttttgtgttatattcctgcaaagaatggactaagaacgtccaatttcgtgctttgacccgagtcaactcgtctgatttcgtgttcgttggcaagacaattcaagtcatttgaccctattgtgtttgactttctaatctaacttttcgatgtttcgatgaaattatgacccttttcgtagtagaagagttgttatgatattctatattcatacactctcttaatctgattttttttcttgattttccagctgtaaaagggattccaaaactcctgtttttcg

SEQ ID NO: 105524 - DNA, 1032 bp, Mimulus guttatus
  Intron number 2 from transcript mgv1a009590m (locus mgv1a0 09590m.g) derived from phytozome v7.0 (chr-ID scaffold_26; pos 1091395 to 1092426)
cgccgcctctcagagttgttcagattgaaggattggtatgttttattgccgagaaaagaccaattgtttcggaaaattgtttgccttagtttcaactctctgatcttcgatatagggcttatatctcaggcgattttttctcttcaaaacttttgttattaggtgggtagtccagatgtaatgtgtggggtgtgatggcatcgaaattgaactttttttcgttaattaggaaaaaaaatcctttaattacaggggagaacaacatagtacttaggattttcaggggcaattttggttttgggtgaaactgtaaaccgtagattttcttaggattttttttcactaataaacagtggtttatcggccgccatatcggtggcgggcataaacctttacgatatttgtgtggtgtggttttgaaaattggttttttgacggtgaggcggtccgaggcgcggtctgtggcgggcaggtgtttatttttttattttttttttttcaactccaacccattatctctttcaatcaaacccaaactcaccgcccaagtaagaagaacctgacctaaaaaaaagcccatttagaacgacgaggagagaatcaagttctaaatgttaaacttttgatatttgattagaatatataaacgatgaggagagaatgaagttcaattttttttaaacctttgaagtatttataaataatatttagaaatatattacactaaatctaaaaaccaatttattttcgatatatctccgattaatcaccgccgcaccgatttatcgtgtggcggtccctaacctcctcgaacccgataaccgatatttagaaccttgctaataaatacattttgcatgtctaatggaaaccatttactggattgctaattttttaatagccaatttgttttctttgtttttgagcccaatgtcgtgggtactatagtaacaactcattaactaagtaaaaattccaatttatatttttgttgcaggttattttgaagataattaagcactgcaaggagtt

SEQ ID NO: 105525 - DNA, 801 bp, Mimulus guttatus
  Intron number 1 from transcript mgv1a011402m (locus mgv1a0 11402m.g) derived from phytozome v7.0 (chr-ID scaffold_55; pos 788999 to 789799 reverse strand)
ccaggcttcagcttaatctctcccgcgttgaagaggtataccaattcctaaattcaataaatactgataaaaacccatttctcccctttgggaaattggataatttttttttttttttttttttttttttttttacagtcttggttattattgattcggaggaaattcgggcaatttttacaattttcggaaatggggttcttgatttattttatgattttagcctaatttttctgggaataatttggttgtgggtgaccgagggctgcttcggttgttgttatggcttatggggggatgtttatattctttattaatcatttactgttagcctgagtttgacagcaattgtccgcgtggggcaggtctggcccgggtagggtatgggaggcctacaatcaaatgccataggcgcttgttgtgttgattgcactataatgctagattagtttttagaacaactacatctacttttataaaagaagtgaaatttgtgtgtattattattgtgaatttcaaataaataatcatttcttcacaaaaaaaagaaaaaaagaaaaaaaaaaaagggtgcatgtggaagctaagttcatataaattagtgttacagtttgctcgtgttacattagattcttcggcgtttttgtccgtcatgcaagtatagttgagattctgcaaatatagagaatggcgtataataataagatgtttgtttttagcaatggcgctttgtaaatgctactaaattttattaaattttatttatttatttatttattaggctgcatccggagctataca

SEQ ID NO: 105526 - DNA, 466 bp, Mimulus guttatus
  Intron number 3 from transcript mgv1a014283m (locus mgv1a0 12240m.g) derived from phytozome v7.0 (chr-ID scaffold_54; pos 481309 to 481774 reverse strand)
ttcgaggtatgtttttttactctgtttttttgtgccatttctttaacttgtattttcttgaagaaatatttgaaaacttaatcttgcagaaaatgagaaaattagaaatcgaaacagaatttctgaatttcagtgattttttattttattttttagattgggatcgaaatttatatattaaattattgaaaactctatttatggacccgattttggtttacaaaaattatgagttacataacttctatagttttcaatcgggatgaagttttggatttcaaaatattgggatatcatttacttccgaaaaaaatcatttttttaattactaattttgatccgatccgtccgatttcaaatctaattgcaatttgatgttacattacatctcttattgcactcaatatattggttgatgcataataaatcaggatccccgacggagaggaaaagttcacgattattg

SEQ ID NO: 105527 - DNA, 841 bp, Mimulus guttatus
  Intron number 2 from transcript mgv1a013303m (locus mgv1a0 13303m.g) derived from phytozome v7.0 (chr-ID scaffold_7; pos 2307981 to 2308821 reverse strand)
cgaccagtgaacctgggcagctcagcactttcaatgtaagatacaagatcttctattttttttcgatcgattggaaccctaaaagttttcttgcattttccactgatcttttgttttcattgacagtcgtgtttcaggttcattatttgtataagctatataatgggcttgttcgatttgttgttcgagctgatttctagagagttacaaatatgtaattgataaaaaaaatgtttcaaaatacaatcttttttttttttgtttaattattgaggctggaaaattaaaatttcttagcagtgaagttgttttaccatggcctgtaacatttaccttagatgctatgctccgatttgatatgattatttggcttatgcccatatcgaaacggttttgctactgcatcgagttttgaatggtgaatggaatttgcatagggaaggtggacagttgttatacaaaaaaactgtttttttttcccaagatttttcaccttcgctccgtatttttttgccaagctggcaagaagtatgccattggtctattttttcattctgtatcgatcaagtattctgtaaacacataacaagtattcgaactttgaagaagaaagattattttgtagttgcaattctatttaattttcacatttcgtcctttatagttaatagttttctctgcacaagcagagatttaaagttagttgtagaaagaaaaagcaagagaaataaagctcacttattctttttttctttttagttatgctgtttagctaattatgtttcgttactgcgatcggtcttagtaatttgattcacatcggtttgtgtacacgcacaga

SEQ ID NO: 105528 - DNA, 649 bp, Mimulus guttatus
  Intron number 1 from transcript mgv1a013683m (locus mgv1a0 13683m.g) derived from phytozome v7.0 (chr-ID scaffold_159 ; pos 523965 to 524613 reverse strand)
ccctcgatctcaaggccggtctccatcctctcagagtgagtctctctccatctctctctcgctttctctctctatgatgctcctgtcatgtcaatcaatctatgcttcctttccagtttcctttgtttcgtatcaattttacatgttcctggcttttgtcgtattcaagcattaggagaatgaatataccacctcattaaaaatagggcttctctctttatgtcttttgttctgcattcgtaatcaaatattatttcgaggataggacttcaagctaatttaagataataacaacccccaaatgatgtcctccacgtgctttttgttatctagttgatccttttgctactgaatcgatttactatgcaatttcttaagaggctgtaattcctctttattatctcatacatttgggctgctgttctcctttaggttaagaggctctaatttcaaatacaggatttcctaaaacaatatcaaatgattgtattggaactacttagatggacttttattttgggttgagttattgttaaaattttcttcatgatgtgcattgcaaattctgtaatgctatcccccctacttatcatattctatatacgtgatcgtagcaaaaatttgtattttggtacactcgtcgaactcc

SEQ ID NO: 105529 - DNA, 371 bp, Mimulus guttatus
  Intron number 1 from transcript mgv1a011133m (locus mgv1a0 11133m.g) derived from phytozome v7.0 (chr-ID scaffold_165 ; pos 282494 to 282864 reverse strand)
ctcagcatcaaaggcaagaactcgacgatttcttggtatgaaatcaaaccctactcatcatcataattgtttttaaatttaatttaatttttttttttggggttttgatttgtgatattttgtgggtttttcttgatctatcaatttctagtttataaaaaaaaaatcttgttttttattttgttaataaattaatacagccgccgagattaacaaaattctattaatttagtgaattattaaattatcgagtgaagaatttaacaatattagggagaaactattatttaagggagaatattaatttatcgagattctactatttaatgcgtgtgtgatgaaaaaaaaaaaaaaaaaaacaggcgcagtac

SEQ ID NO: 105530 - DNA, 961 bp, Mimulus guttatus
  Intron number 2 from transcript mgv1a006739m (locus mgv1a0 06729m.g) derived from phytozome v7.0 (chr-ID scaffold_41; pos 1535602 to 1536562)
gtagaacaagacttttcttttttcccacatcaaaggtgggttctttggtaatttctctctctctctctctctctctctctctctctctctctctctctctctctctctctcttgttgcatgattgtttaaatgcttatagttttctgggttttctgtgaatttgacttttgttttgtgttccccaattgcttatatgaaattttgtgtgtgtgtttatttttatttttaatttttaatttttttgatttaatttttttggggtgtttggataatggaggaaattatgagttaaagatttgatttttatgagtgacagactttttaacaattgaattagtcaacagggttgatctgtatgttttaatctcagatgaggggaaaaattgagttaagaatttagaataaagattttttttttgttacaaaggaaagataacaatttgcaatggagggctttcacaattcataatccaattctattagggttagtaatgattatagaaaaaaaataaaaaataaaaagaagaagctttctagaattactgcccggagtgtttcgacgaaacgtggcttctgtgaggattaatgcccagctattacaggctttatgtgggcgtttatggtggtcaatttactcgattttacggactttggtgtcaacttataccgaaaattgctttgaaatatattatagcttccttttcattacaacggcgaattcaagaaaataagaagcaagggtaaataattattcatatctacaagaatgtagtttagttgcaatcttgaagtgttatataagtttattacaaggattctcagcttacttttcctagtctttataatcatttcggtacaagattcaagattcttgctttacgttctatttgattaaacttttattcgtaaatgatgttattctaattatcggtttacttacgtgacaatttattccagcaa

SEQ ID NO: 105531 - DNA, 551 bp, Mimulus guttatus
  Intron number 1 from transcript mgv1a023136m (locus mgv1a0 23136m.g) derived from phytozome v7.0 (chr-ID scaffold_9; pos 19243 to 19793)
aacctccatcaagtagtaggcttgttacctcatcggtatttccaaaccgctgtccgaaaaacacggcctactcatgcttcttcacttcggccgcgtcccggtacttatcgtctcttcggcagaaaaggcccgagaaatcatgaaaactcacgacctcaactcgatgaagtcaaacataggtggaaacacaaaagagagggaccaaattgattcgaaccttgaggacaagattcatttcaagcggggtggaatgttgggatatattatttaatttattatttaattattggtttagttaatatttaattattaattaattagaatagtataattagatatagatattgccgtgagttagtagtagttaggagattatttagtattttattagtataggtaattatcttcctagttatattaggattctagggttttattctctttaaatagtcgtattgtgctagggttttataaggcagagagaaatattaaagaatagatcttacgtttcgtaggaaatatttatgatattcaagagatcgcatcagcag

SEQ ID NO: 105532 - DNA, 512 bp, Mimulus guttatus
  Intron number 2 from transcript mgv1a017581m (locus mgv1a0 17581m.g) derived from phytozome v7.0 (chr-ID scaffold_92; pos 324468 to 324979 reverse strand)
tcaacgataacggcgacaaagtttacaccacaaaggttttttcttgctcgatttttatttttattttttaaattaaatttttaatcagtgtagatataaaatttatgtttctgtagtgctattcaatatcaaattattagctaaattctgagaattgctcgatagctcctccggttttgaacccgattgtcttcgaaacctgacatgagatttaattgttccttcctgctgggattcacaaatctctctttttatttttatttagttgttgagtgtatgccatttagtgttttttcaagcttctctcacctttaatcgagattaatgtggtagtttttgtaaattttgagttgaataaactctatcctaaattcgttatctttattttcttgggcatttctctgatatgggatttccaaattttagccaccgctttattatgaactttctttaacaattttgcctttgtctctgcagaaggaatcaccagttggttcggccacacagtcggc

SEQ ID NO: 105533 - DNA, 528 bp, Mimulus guttatus
  Intron number 3 from transcript mgv1a015288m (locus mgv1a0 14799m.g) derived from phytozome v7.0 (chr-ID scaffold_8; pos 577759 to 578286 reverse strand)
ggtgggccacctggcgatcgcccacggtaaatgcattaacttttttcctagttgatatgtgtgtgttttattaacaagtctttcattttttttttcttttgaagattctggtaattcagcattgtcgattatgttgtttgtgtgttctttagtacgtataaaatttgtatagatgttggttaggagcttctttttagtattatcacttgttgcgaatttgtggtgttctatttcagttattgtgtagattggcaggaatctttggtatgtatctttctacaaactatgtatatttttactctgtagagtttggcaatggattttaatttggttagttattctatgaatgtcatagatttgtgtactcttgcataatgtaaatagtgttttatgtatttgttgatgagttaagtggattcttgaatcaagttgcctattttatgaaatatttctacggtttccaaattttgttttgattcatctatggtaacagtggacccccaagattcgagggtgagaggccacgct

SEQ ID NO: 105534 - DNA, 442 bp, Mimulus guttatus
  Intron number 1 from transcript mgv1a000021m (locus mgv1a0 00021m.g) derived from phytozome v7.0 (chr-ID scaffold_54; pos 570516 to 570957)
acaatctgtaccagtaccaggtttttattccattcattacaagcttatgatatatctctgtatgcagttcatttgacttgttgcttacaaaaatacaaaattagggttttacatggtcattgttgtttttgcttctttttggtttatacattataattatttctaatcatcaaaatggtcacatttcactgtctgaaagttttaaagtatttgtttttgtttcagaagttatgtcataatttctttttttaattgattaaatcaaatcagctaaaaatataacatatttgcttgcgccatggttaaaagatgttataacttataataagcgaaatgaatacgaaaagatggaagaagttagtttacgtacgctcttttttctttttctgttagttgtaatttccttttgaatgtaggtggagaagattcccgattcatttgg

SEQ ID NO: 105535 - DNA, 871 bp, Mimulus guttatus
  Intron number 2 from transcript mgv1a000050m (locus mgv1a0 00050m.g) derived from phytozome v7.0 (chr-ID scaffold_141 ; pos 344267 to 345137 reverse strand)
gtgctgaagagtatgtcggaggggtggtttctgttttgccagacattataaattgacaaatgtagggaaaaaaactaaacgaaatgaagaattcaagaacaaaagaaaaaatgggtgaaaagagtgaaaaaaaaactgctgaaaagagtaaaaaagaaggctgaataagtgggaaaatctggtcaaaaaatgtctaaaactagacaatctatatctagagattattaggggtaatttcgtcaaaaaaacagccaacggatttttataacggtcggtcaaaggatttgactaacggattcaagaaaaaagttgacggcaggggttatttgacacgggtgcaaaatgaattttaccctttatagaatgtagtatttaactcaactttcagtatagaaactactgatttgatctccgaaatcatgattttgctataaaaatatcatatgattgtttttaaacaatgtttagtttgtcaattgacgtcaaccctttttcatgcgcattcatcccggaatgttgcatggctagtctgttaaaatgtctcatttgttctctgcattatttggctgatcattcatcatagggatcttatttgagctatgcatgtggtttgaagcactctatgcatcatatttacttttttgccaatgttgactaagtcatttttataaagcgtgtgcggccttttccttattttgtacgtatactgattgacgctgcattagggttatagcattcactacattcatttattacgagtctgtatatgatctcatttattattagtagcctttctatatataaggttacctcctgaatagagtgtatccattgccaattataacttaaacattttggttgcagtgaataa

SEQ ID NO: 105536 - DNA, 667 bp, Mimulus guttatus
  Intron number 1 from transcript mgv1a000050m (locus mgv1a0 00050m.g) derived from phytozome v7.0 (chr-ID scaffold_141 ; pos 345193 to 345859 reverse strand)
gcagcatattcgaaggttgcttaccctagaagaaggtacgagttttggttttaggtattttttccttttctttcccaattaggggattaacatttgggtgaactgatgttttttgggggttctctaacccggtgaacttcgaggattaaggacatgattttaactagaaataaggtgtattttgtggattattgacatttttcataattcgttcaaagtagagaattttgtcgattttagtgttgtttgattttagggtttatgtttaatttcaaatagcagaagtaatttattgcattgctatataaatagcagacgtaatatcttgtcttgtttgaattctcaactttattgatttttttagtttttgccatagtaatagatttctcaacctgtatgacattttatgcttggactttaatgaatttttctttttcttttcttttgcagagtgtatattttctccaactcagattaaaaaaaaaatcttatgcaaagtctgtaattctttgtttttagtttgcggttcattagagttttattttgatttagcattttttttagattttaggggttttcactttttttttttgggtgggtcttgcaatcataatctgcaaagctttattttttgtcgatttgaattttctttttttatgcaggaata

SEQ ID NO: 105537 - DNA, 883 bp, Mimulus guttatus
  Intron number 1 from transcript mgv1a013501m (locus mgv1a0 13501m.g) derived from phytozome v7.0 (chr-ID scaffold_52; pos 550666 to 551548 reverse strand)
ccggctgcaccaagtgccttggtgctctgcaaaaggttagtttcgttattttttatttttaatttttattttcaattaatacaagtatatatttaatttattgctccccactttgacatttatttctcaatgattgatcatgtgttcaataaatacttccccaccattactgctggaattttttgtttgttttttttttttttttttgatttgttttttgttgattgcttctattataaattatctttgtttgaaatcgaacttgatataaataaatatatacagagatagagagaaagaattgtgattataatttattactatttaaaaaaaattgtgatcaataattgctaatgaatttgtggattctcgaaagtgctttcgctctcaatcgactctcaatcgactatgtagatgcactgaataaacattcgttcgcgtaatcgactatgtagatgcactgaatgacattcgttattttgcccgttgattcggtatctcaatgttattgtaaaatgtgttagtatagctacactattacaatttaattacaacatataagtttcaaataatatttttattcatttgagaatgatttagatctctagttcatggcctattaggagtagatctaagaatatattttggacattcttttattaaaaaacataaaaacagatgaatttaatattaatttctccttcaatagataaataaatagattaacatttttctaggtataaattctttatattatctgtaggatcaccaaaacaatgatcccactacatcttcacaatttcctgtttttttccttttattttatggtacgtgaaaagtctaaattaccctcgtctctgaaactatttgcagctgaaagtgg

SEQ ID NO: 105538 - DNA, 466 bp, Mimulus guttatus
  Intron number 2 from transcript mgv1a007512m (locus mgv1a0 07512m.g) derived from phytozome v7.0 (chr-ID scaffold_8; pos 1185093 to 1185558)
taatctctattgctccgcctagcccacctccaattgtacgtattcatatattcctcttcgcttttcgtttgtgctgctgattttaatttctggattccaattttctctagttagattatttcggtgttctattttggtaacggcctttttaatcaattttgccctaattttaaaatctctgcagcagttttgaagtgacatattccctgtgagtcaatgtctatatatatatatatatatatatatatatatatatatatatatatatatataaagatgaacaacatgatcacacaattaagtcgagtaaagtattttgcagttttgtataaatttgatgtcaatttgtcggaaactttccgtaaatactccgatattttgcatgcttcagttattggtggtatctccgatattggtaatttacgtacggaataatattttatatgcaggctgaaaattcattgaa

SEQ ID NO: 105539 - DNA, 715 bp, Mimulus guttatus
  Intron number 4 from transcript mgv1a018425m (locus mgv1a0 18425m.g) derived from phytozome v7.0 (chr-ID scaffold_53; pos 187970 to 188684)
gaaaggagtgatatcccaaacattgacaagaaaaagtaagtatttgccacaatattaatttttaccaaattgagtacttgccgtaacgtgtctcattacaaatagtgctaattgatgtcaaaatagtgaatttattttgtttttaacataattgatttgataagattattcaacagatgtgataaaccaattttgatattttacgactatgtttcggccgtaccttatgttatgataaaattctctacttgcaaataaaactgagtaacacctctgattaatgtatttgatggttcttgtgtctacagtttggcagagtgttatttcttttaagtttcttcctcactaatataattcgtttatagctaaactaatgttaaatgaaatacatcaagattgataccatctttgattgtaagattccgaaaaatataggtaaacaatgcgtcagagtgccaaatgttttgatgttcgtactgttattctctgatcatttgtcactttgtctatttttgtatttttcttttccggtttataatattatttattttgtatttggaaaagacttttctttcccgaagccttgtaattgttttttttccaaacgaaatcggtaaaccatttgaaatttgaaagtcgagattttgttttagttatcttactgagataatcattcataggtatcttgtcccggcggacttgactgttggacagt

SEQ ID NO: 105540 - DNA, 473 bp, Mimulus guttatus
  Intron number 1 from transcript mgv1a009501m (locus mgv1a0 09501m.g) derived from phytozome v7.0 (chr-ID scaffold_672 ; pos 21545 to 22017 reverse strand)
acgccaccgtctacgtcggcaatctcgaaaccaaagtactcttctcttgttatcgctctgtcagtgtttactacctattttttcttcaaatggcctagggtttaagtcaaatatcgtttctatttgccatatgtgcatctgcttaagttaattggggcaatgatttctttttaaatgatgaactctagagatttagaagaatgcttcgtctttttcctccatctgtgtgtttttgtattttgagtttatttccattggaattggtttctcaattcagttatctgttcggaatcggagtaattttatttttttaaccttttatatacctcgaattcaaatgggaagagcgaaaaatgtattgtcgtttattatgtgtaactcccactttatttgttccccttttgaaatgtatggggtcatgcgataatttaaaactttttttatgtgcgttcgcaggcgagtgaagagttatt

SEQ ID NO: 105541 - DNA, 614 bp, Mimulus guttatus
  Intron number 1 from transcript mgv1a009294m (locus mgv1a0 09294m.g) derived from phytozome v7.0 (chr-ID scaffold_2; pos 3552970 to 3553583 reverse strand)
ctttcactttcggtgagtcctctctcagtttgatcaatctcttcttagatctcagctatctccttttttttttttttctccaccttagttttgcgtttttgatttcaattgcaataaatgaattcggaagttttgttgcactgatgatgtatttgttgggaaatgaactcaattcacgaatgcagtggatctggatttcacgatagggcccattctgccatgttcactttattccaatttgcaacccccaaatcttattaatcattattttgcagtagctttattaccgattcaggtctcagttattcgtttggcttttgtgcagtgtcacttcactaaaactgaattacgtaataacgaagcgttgcttgttcttggggtttacttgttcagcacatatggttattttagcttcaaaatgtgatttttttaatttccgtgttgtctggttattttttctatttttccttttcaagaattcgacagtatcgaactccacgatctattttaactgactgcattttctcagttatagttaataaccgttgcattgatttcatatttttggtctccctgcagccacaacattgactggtttccattttgctgtcact

SEQ ID NO: 105542 - DNA, 475 bp, Mimulus guttatus
  Intron number 1 from transcript mgv1a014267m (locus mgv1a0 14267m.g) derived from phytozome v7.0 (chr-ID scaffold_257 ; pos 89067 to 89541)
aggcggcaccttcaaaatcgacatcactcttcccggtgattgttttcccccttttttcttaattcaattttgcttattttttcgtgaattgtgtttctgaggtttggttgggaattgtgccgtgaaaatttgggattagggtttttactttttttttttttttttttctgaaggctgtgaatttgaatagtgttgtgattactgattaagggttcttcgtttttgttttatgctctgccaaattgagggctttggatcagtttaattgtggtggtgtgcagttgttttaggcgcattggatataatcatggtaatgtgtgtgtacgattcaagtacgtcggatcgttctgcagacgaaacgatgaacaaatgtcgttcttaatatatggaattcggaaacttgaagaaatatagagagaggtttagtccttgcatagttcttagttcttgattttgcgttttcttctcggtgcag

SEQ ID NO: 105543 - DNA, 506 bp, Mimulus guttatus
  Intron number 2 from transcript mgv1a014267m (locus mgv1a0 14267m.g) derived from phytozome v7.0 (chr-ID scaffold_257 ; pos 89574 to 90079)
aagtttgccaccaaagtgtatggtgaaacaactctatctgtacttcctccttttttcgttttttttaagtatgattgcacggagcacactttgaattgctggcatgaagaacaaggtctcggagttttttagggatcatttaaatacgtgtgtgtctatgtgtattatattatttgtatataaaagttttatgaaacatattattcgtatgtacgaaacaatatcttataaagactgcgtgtattatattctgatagcagcatacgacgaacaaacagaacgaagcatgttacatgaactaaagttccatcatttaaattagacttttgtgttagaaagtagaaactccagattgaagtttgattaccaaatgtgaccagacggaaaaaaaagaagcaacagccattctattttcctcgtttctctgtgtcgtggtatcggaaattatttatgcttttaagttctttaatttaaatgtcgtctatatttgaatggaaggcatccga

SEQ ID NO: 105544 - DNA, 955 bp, Mimulus guttatus
  Intron number 1 from transcript mgv1a009767m (locus mgv1a0 09767m.g) derived from phytozome v7.0 (chr-ID scaffold_1; pos 1614459 to 1615413 reverse strand)
caggagcacagtgaacaattccggtaccactaccatcagtcacatagttatctgcaacaactctaaatgccacatcagagaattctttgaagtaatcaaacaaagggacatacttcattccaacaagtgaagctccagtgcacttggacaaaatctcgtatgtttcaacgttcttagctttagcaccagaagacttcgattttgaattaccaacagctccatcggcttctttcttagccttctcaacgggaagctccgccaaacgtgtttcaccgaccacataaactttcccattaaacttgttacggaccttcaaatatacaatgttcgcattgacgcaaagcgcaagattgctgggtaatgtccaaggcgttgtggtccatgcaacaaaacatgcaccatcagggtcgtcaaccacaggaaaagctacaatcacctcagggtcaggaacgtccttatagttggaattggcttcgaaattagataatggtgttttgcagcctgtactataaggcataacctgcaaaagtaacacgtttaaaagccattaaaaccaccaaaataagaaagaacatctatatatgtacacctatctatactataacaaaaatacatatcgcacataatgttttttaaccatgaaatataaggaaaaccataggccatgcgcaaacatctgtgtcaaatcatctaatgtgtaattttgcgagcgtataaagcttaaatttaactaattcatttcagttaacatcctcaaatagtatgcatgtatatgagaacatcaaattccattaagatttgaataattaaaaagtctgtgacacaattccagtaggtcccgaattcataaaatacatacgtgatcgagattatataataagagcacattcactgaacttcataccttgaaacctctgtagacaaggccctttttatacaactgcgcaaacaccca

SEQ ID NO: 105545 - DNA, 320 bp, Mimulus guttatus
  Intron number 1 from transcript mgv1a017564m (locus mgv1a0 17564m.g) derived from phytozome v7.0 (chr-ID scaffold_26; pos 759212 to 759531 reverse strand)
actcatatccttgcgttactattttattttttatttttttgtttctgcgtaattagtttgaatatttattttttatttttcagatcttcaattttttgttgattatgtagaaaacccatgtttgattttatcttttctttgtgaaattaattgcttcccgttgaacccaattgaaaatttagtgcgtgtatgtgtgttttttcttgctctgtgttgtgctgtgtgtgtatatatgtatgtatgtatgtatgtatgtattgtatgtatttcttaacgggaagaaacgtggaagtcaaagagaccgtgacagagaaagggct

SEQ ID NO: 105546 - DNA, 761 bp, Mimulus guttatus
  Intron number 1 from transcript mgv1a011937m (locus mgv1a0 11937m.g) derived from phytozome v7.0 (chr-ID scaffold_4; pos 2718881 to 2719641)
gaagcttgatccctctaataagctttattttccatgtacggacggtttattcctctaacttgacttcctgttgacttttgattgcgtgtttttaacttctattgtgctcctcttttatccaaattagttaaacttgatcttgttattagtactttttgttgacggatgattttgaaattgagatcttattttcttttcctttttcctttttcgtttttatttcctttttaagttctctatttcttatgatgtgatatatatttggtacaaacagatgctctagaaaatccaaaaaattatagtaattctggcttaaagtgctgcttctcctatattttccttgcttccgatggtgttaatagttggttgaattggatcgaaagatgagtgtcgaaaaatatgcgaacctgcttgagttaggagttggatataggtgttagtgtttagtggcataggaaggtatactgcataacagatctcgtgttcttgttttcggtatattgtctttaaatagaaggagctaaatcgggggtaatctctttcgttaactacaaatattttcgtgcaacaattttcatgttccagtgaggagatcgatcgttgctatatagttgtgaataaactaggtcagatactgctttatagtcatgagaagtagctttccatatgatgcacattatataacagaattgataggctgaatccagatttcttctatatgcatgcagtagcttacttttttcttgtttaactacttgcag

SEQ ID NO: 105547 - DNA, 952 bp, Mimulus guttatus
  Intron number 2 from transcript mgv1a020540m (locus mgv1a0 20540m.g) derived from phytozome v7.0 (chr-ID scaffold_26; pos 872686 to 873637)
caggtaacaaaaatcgaagatcgttttctgagtctcaatttcagtaccctaggcgatgtggctttggcctttgggcttatacacatattcattagtttcaaacctatgcaattctaccgataatcaattaattgtaagattttcagctgattgtgatgtgtatttgttcaaaatccatgccgatatgcttaatgagattgtggtaatgatgtggaatttttgggtcagagaatttcaataactctagtggtagatgcaaattaaatgatgacattttctgcactttactctttgggcatatttatgtgaattactaaaatgaagaattagactgtcttttgaatcgatttatgttgagtcagttaagtgacacaatgtacttctcatatttatgtgaattcttcgatgacattatacgagtcaatgggggcagggcttggtttaatgggtaagtaatgggggattgttagcctggtcacaaggttaagatgtaaaacagaatcttaattaataaaacatagcatttgaattgacagtttacttatgatacattgtttacacttagacaaattctgttggactgagggttacatatcttcttaataaagacctcaccatccctggaccgagtatgctttcaataagacgagttcatttagatgtactaatcaccaagtaagtgcccatgtaagtgcagttacagtctacaatgtgaatgtgatgtacggtgaatgagttggaaattttagtgctccaagtgtttgttttattggctatctgtgctaaactggagttacactatcaattgagcacgaataatttactggcatctagctgctagtcgtcaacaactgttctcagcatcatgaactcattccgtattcaacttttttttaactcccttctctatctatttccttttgtaatgatttgtaattgattcagtttgaaa

SEQ ID NO: 105548 - DNA, 477 bp, Mimulus guttatus
  Intron number 2 from transcript mgv1a010216m (locus mgv1a0 10216m.g) derived from phytozome v7.0 (chr-ID scaffold_104 ; pos 799865 to 800341)
ctttcgagcttccttccgacaaccccacctacgatgtaagttcttttttattaccaaaaaaccatttcaattaaaaaaaataataataataataataggggcctaattttttagccttttgaatttcgttgcagttatatctcataaatgaattttaatactacaatcattaccaacttttccggcggtgcctaatttttctaaaattgattgctttcttgatttatgttgtctgtaataagtagtgacgtcactttccggtaaaccaaattcagagaagacaaaaatcattaactaaattcgctgaatttaaaaaaaaaaacaaaaaaagaaaaaacagagagaatctagaaagttaaattaatatttatccgacaagttgagctgtaaacatgtctgaatgcagcatgtgatattgtctttaaatcgggttttgcatctaattaaagaaaacacgatttattaatacaggaatac

SEQ ID NO: 105549 - DNA, 818 bp, Mimulus guttatus
  Intron number 2 from transcript mgv1a026627m (locus mgv1a0 26627m.g) derived from phytozome v7.0 (chr-ID scaffold_84; pos 234884 to 235701)
catcacaaagtgagatattgtggcttatttttttactttttttggttcccgtctttcagctctgtattatgctactaacatattttcttatgacaaaaatcattggttggaatcatcttatgcacaagagattatactggaaactttcctcttttatgctgacaacacgtagagaataaatgtggaagataaacaattacatgatgacattcttttttgttcgccaactattgcatatttttttctctttgtgtgctgataacatgaaataattatttgctttgtgttttctgcaataataattggttaagtttcatctgcactataacagtattcaggttcactgtctgaacaatattgtatgcataagattgtgcagatcttatcctgtatttatttccttcatgtcaatcatatcagttctttttttgcttttgttgcttatatgttggtataccttaaatctttgttttatctttactcttcaatgtcaaattatttggttaactgcttgatgtgttttgaggctgaagtatacttataattttccgagttgttcttcagcaaacttgattttgattttactgcctaaacggtatagttattatcttctctttggaagatggcagtctatgccctttccgtttgaggcatatcttatactcatttttaaagaactttgcttaaacatgttttgaagtaaatgaatcaattgtttccacactacaattatttcctgcatcctcatgcttatatttatgtcttttcgtcagtgttcttgcatatatatttactatatctctgtggtaattacaggt

SEQ ID NO: 105550 - DNA, 630 bp, Mimulus guttatus
  Intron number 1 from transcript mgv1a007522m (locus mgv1a0 07522m.g) derived from phytozome v7.0 (chr-ID scaffold_98; pos 1011197 to 1011826 reverse strand)
cccgggtcaaggtaatttcatctcgattttgatttttcagatgttaatttgatacattgatgaggttgatttcgtgtggtggagttaagaagggagtgcggtctttgtgtttgttgaaatgcttcagtgagattctggggaatattttttttagttgattccctaatattgcagtcttgattttttcagcttaaaagggatctaattggaagatcatctcttcttcttttgttaacctcctcgtactagttacgatcgtgggtttctgattttccggcaaattattgctagtagattagggtttttgtatgtggattatctgaatattagttcttgcatctaaattatccaattaggattaacgtagggcacacaaataatttgcgaacttttgggttatttaagcaatgtttggaagtgttttggggcgtatttccattttcgttttgggaaaagatattttcggaatataattcgagaatgaaaatagtgtttgttcatattcagtctttatttgggagatgtatggttagatgagtaattcctaccgataaatctttcaactaaagtatacatatacaatatgtatatacaggaaaggcttgacgagatagagagggaccagcgaga

SEQ ID NO: 105551 - DNA, 483 bp, Mimulus guttatus
  Intron number 1 from transcript mgv1a000566m (locus mgv1a0 00566m.g) derived from phytozome v7.0 (chr-ID scaffold_113 ; pos 378448 to 378930)
aggtgtgcttttgtggaattactactttgtttttgtgtcgtagttcgttcgtttagtgtagcttcacagatctgagtttggtttggtatcctgcatatttttttgaaaattggaatctggtgtttgttcgtgcaataaaagggtttgctgctgtttaagttgagcgttgaatttgaatggaactaaatcgaacttaatttgcagcccagtatgtaagattgttaggttcttaataacgggcaacgatggcagagtaatttggagtttttttttctcagtgtagttgtcgagattcagaatattctttattaactgcaaattatagttctgagcagtcctattaaagaactaattaacttgaagagtagtttggtttttcgagttttgctatatggagactcgcggctacactatcagttacattacgtgcctggaatgattgagtagttaataattatatgttttttaattgctttcaggaaa

SEQ ID NO: 105552 - DNA, 399 bp, Mimulus guttatus
  Intron number 1 from transcript mgv1a004274m (locus mgv1a0 04274m.g) derived from phytozome v7.0 (chr-ID scaffold_148 ; pos 583637 to 584035)
gggcgaagagtatcaagggtgccaaacgaattcaggcaagaatcactcgttttttctttttctttttttgtccggattttctgcatctaacataaaattcagtacaaaagattccttcataatccataataacaaatccattgagattgttttgattgagtcatttcacgaggaatttcaaatggggttgtgataaatgccgtttcagttttaataaccgttttgactttaaacgtgatcatttcaaatcatttccattcggactctttcaactttgtaaaaacggtaaaattagtttcttttgtgcatgcatttgtttttccgacaagggatgttaacaaattgagttgtgtatcttccgtttttcagctctcgatatttgagaaatcggtttccaaa

SEQ ID NO: 105553 - DNA, 625 bp, Mimulus guttatus
  Intron number 1 from transcript mgv1a013860m (locus mgv1a0 13860m.g) derived from phytozome v7.0 (chr-ID scaffold_151 ; pos 319037 to 319661 reverse strand)
tacgacaaattcgacaacacttatcaggtgagcgatcaattcgttttctggagttgcagtttaatatttttaatttttttttgaattttacattgttttgaaaagaataatgcaatgagtacggatctggttcctgattgttgttatttggtgtgatttttcgaaaaggaacatttcgagttgactttttgtagtttgatttttcaaataggatcgataaaccttcaattgaatgtgataattatgatttgtttattgaaattaaaatgtgttaattttgaaccttgaatttaagttgagcctagaattcacgatcgttgtaatccgctgttcggaggctgaacttgcaaagtatgcagttgcaagcgtttatgtgttcgattcagaagttgcttaaaataatggaatatctatgatatgttatgtgcaacattttgtttgtttggtttctgatctattattgcttggtctggctcttagtatttcgatccaccctctcatgaactaaaacaaaggcattgaaaataattaaatttaatggaaaatgcgttcggatttctatttatgtttgacattgatgttgttttcaggctactattggtattgatttcctatccaagacgat

SEQ ID NO: 105554 - DNA, 804 bp, Mimulus guttatus
  Intron number 1 from transcript mgv1a025799m (locus mgv1a0 25799m.g) derived from phytozome v7.0 (chr-ID scaffold_150 ; pos 10411 to 11214)
gccaattcgagtatgttttattctctattttatctatctctttcaatcactacttctactatatctttacatattcatctcctcttattaatgaaattatgcttgtaaagcttgtgaaaatttgatatgatgcttaagtggtagtactaagaattgagaaaatacagtttgcactccgttcgcatttgatccctgtattcacaaaaaaacacatttggtccctcgtgtttcaaaaattcaacattttttgtcattttttgtcaattttccgttaaaactagcggaattaagtgtgtggccatcattttattaactgacgggctaatgataaattgacgaaaaagaccgaaattgttcaattaaattattgaaatatgagggaccaaatgtgtgtttttgtgaacattttgaatcaaatgtgaaatcggtgcaaacttgagggatgaaaactataaatttctcattacgaattactctagtcgagtttgggtttagtaatctgagttaattattgaagttgctagtaagttaacgcttgtttgggtcacaatgatggagtcacgaatcgattccgataaaaaaaaatttgaaaaagtccaaatttgtaattttggactttggaatgaatttttatttttttctaaatttggaaattttcgtatttaatccgcataattcgaaaattttccattccaatttccacccgtaatcgttcgcatttagcaaggagacattgtgtaagaaaagaaaaggtacctttaaaagaatatatataattaatgtattaatctatctatggaaggg

SEQ ID NO: 105555 - DNA, 872 bp, Mimulus guttatus
  Intron number 1 from transcript mgv1a006221m (locus mgv1a0 06221m.g) derived from phytozome v7.0 (chr-ID scaffold_12; pos 2700511 to 2701382)
attctcctgtcacgattgctggtaatttatgatttaatttttttttttaaattttctttctccttgaaatggatttttcttcatttttttttattctgttggtttgattaaattttctgaaatggatttttcttctgttttttttttcttttctggaattgcttggtgctgttcgctttagagtcgatcgtgtttcttatctttgacgcacaatatatttttatatttattgtgcagtttgagtcaaaagtgtattttaattttattattattattatattattactcaccttttaatatgtggtagaattggacgaacgtgttttctctgatgagtaatattcaattctgccgactctttgatcattatataatgttacactagtattttattcataagatcaagaaaaagggattattcataagatatttgttctcttatattaactgtaaattaattcataatcacgttcgacagaccttcgttgattcacttaaatgattgagtttgacataattttatacttatcagaagactaaaaaacgacagaaggaaacggaaatgacataactatcctctgctttttcttctttcctatcaaattacaacatagttggtctggttcatatttagttcaaacgtttacatgtctcaatccccagaataattaatgccatgcttccataaaacccccggttcttgattgttatcgaaccaacaaaacgtaaaataaatttcgagtatgtttaccttctgatttatttatctagccctaaaagctgcatgtgacctaggtttggattgggctaatgctccaaaatgcttcatgtaagcagattggagtgtccaagcaactgtgagctgggtactc

SEQ ID NO: 105556 - DNA, 199 bp, Mimulus guttatus
  Intron number 2 from transcript mgv1a000638m (locus mgv1a0 00638m.g) derived from phytozome v7.0 (chr-ID scaffold_209 ; pos 393611 to 393809)
caaaacccgattcaagcgcctcaaaggtattatacttcattcacactagtctatcttgcaatttaataactaagtatttattgaaagatcaaaattccatttttaatgttttttttttcgtttttcatttttcttttcgtacttttaatcgtgttaataatatatggatgatttgaagggagtccacgagttgagggag

SEQ ID NO: 105557 - DNA, 423 bp, Mimulus guttatus
  Intron number 1 from transcript mgv1a012692m (locus mgv1a0 12692m.g) derived from phytozome v7.0 (chr-ID scaffold_80; pos 62867 to 63289)
ttaacgaaaattcaaagacgcccatcaaatttcaggtccgaatccgatcaacttttttttttttaattattcgctgtcgaagaattatttgctctagccttagcttgattgacaattggaaggtctccaattgatcaattaaatattcttccttcaccgctcatactatatttttgcgtctttgatttgttgttatttctgcataattatttttcttttgaatttttttgtcagtttacttaggctcgacaattccgtttctttgtttacttctcatttgaagtacattggaagcaatttttttttttaaaaattaaattatttattatttctggactattggaaaggaaaaaaagtatcttttagttaatttggatattttacttttattgtgttctttgctgattttgaaatgcagtattt

SEQ ID NO: 105558 - DNA, 817 bp, Mimulus guttatus
  Intron number 2 from transcript mgv1a012692m (locus mgv1a0 12692m.g) derived from phytozome v7.0 (chr-ID scaffold_80; pos 63341 to 64157)
caacaaaagaggtgggcgtcattcttctactgtttattctctctgtcttttcgatgtgaaacttgtttctacttttgttaatagttgatgtgtcttgaataattttggagatgcaattttaataaatttagttgtgttgcttttgcgaaggataattacctaaagtcaagacgtaccatatgtccaaccatgcttgtcagtgactaacttgagtcttgagttcagttcagggtttcctttctctaaatatccagtggttttcaactttttgacatccatcaaatttggaacaatttgtgtgatagtatggtggggagggctttctgttaatcgtatgtttgttgtttggtatttttagctgaatttatgcgtatttgactttaaaaggatgcagttaagtttgtattcatgtagtcttgcttaggaatttgaatactaaaactattagagagtgaaactctgtatttaactgcaaagagccaaagacaaagaccttttttttttctttcttaacacttgcgaagacatgcatagatttgtaaattgaacgcctttgtagtattattccacgacaagaaacttatacatattattagttagtgaattgccattcaacgcttgatattcatgtttcctccactcacatttgaggtttgttcatggatatccccccttatgatttacgaatgatcttttttcatgttcaccaaattaaagatcctttattaattaatttcagttcctgcagtttagtgtgtatattaatactgaataatgttttttccttattttttgtcttttaaattagaagttcaca

SEQ ID NO: 105559 - DNA, 472 bp, Mimulus guttatus
  Intron number 3 from transcript mgv1a016692m (locus mgv1a0 16692m.g) derived from phytozome v7.0 (chr-ID scaffold_27; pos 1893345 to 1893816 reverse strand)
atcaaaatattaattcaaacaaaaccacaggttcactctttttcttcttcttttattcttctgcaaagttggtttgcaggtttgtgatagacttaactatggaagatcccgtgtttaacttattaggtgtttattattattattaatctgttaatgatttgttttaaaggtgaatttgacttgcctttaatggtaccgacgactgctgacttcacaaatagaatcttatacctcagccttttgttttcacaagtttgagacattgtttcaaattttcttgcttattattctccaactctttctcgagaatcataaagtgggagtgcaatttttcgggtttcttctgctttcatagtagttgactttgcatgtatatctattgttgactttccgtgtaaacaattgaaagagatggtgcaactattgtgagacgaggcttaatctgctcttgttattggtgtgcaggggtgtc

SEQ ID NO: 105560 - DNA, 825 bp, Mimulus guttatus
  Intron number 1 from transcript mgv1a025926m (locus mgv1a0 25926m.g) derived from phytozome v7.0 (chr-ID scaffold_182 ; pos 322218 to 323042)
tttccgttggtacgttacgaattccctttcattgattacttacttatctactaaaattgatggatttgttttcttatcatttacatgcgtattgccatctaggataatttcccttttctatcgaaatttaaaccgtgagacgtttaggtggggcccgctttcgataaaaacaataaatttaaaaaaaaattaaaaaatatttatataagcgaaaacgacacgcgtaacaaaatgtggcttaattgttgtgatgttacttattatttttcaatcgtttgggttgatggcttgatgcatagacgttagaacaatttcgatattttagatttttaaaaaaattaaaacaaaccctaaatcaaaaaataaaatcatgtagctccttaagatatttcaaaaaaatccaacatacaattaaaaaatgagaatgacaaaaaattaagagatataaagggggataaagatattgagaaatttcctaattagcttgaaaattttcattaaatcccatccgcattaaatgattttttctttttgacaaccgtgagacgtttaggtggggccgctctcgataaaaataataaaaatgtataagccctcccccaaatgattaattgttttgacgtgtacgaagtaactatttttcaatcgtttgcgttgatgcatagacattagaacaaccggaaatatattaggtttcaaagaaccctataagcttaaaaaataaaataaaccctaaataaatttaaaaaaaataattcattggtggtaagtttgaataataaaccttaattgacagtgtgtaatataattttttttgcagctgac

SEQ ID NO: 105561 - DNA, 113 bp, Mimulus guttatus
  Intron number 2 from transcript mgv1a016319m (locus mgv1a0 16319m.g) derived from phytozome v7.0 (chr-ID scaffold_75; pos 1052772 to 1052884 reverse strand)
agaaggtgaggttttcttctttgattattattttttattattattattattattattattattattatttatttgtttattgtttttattattatttatccagaataagagag

SEQ ID NO: 105562 - DNA, 259 bp, Mimulus guttatus
  Intron number 1 from transcript mgv1a016268m (locus mgv1a0 16268m.g) derived from phytozome v7.0 (chr-ID scaffold_251 ; pos 238268 to 238526)
gccatcgcttgtcaacaaagtcattgaggaaagtttgtttagcttcttcttatggaaaattcggttgttaactgtgctttcatgttctctaagctgaaaaaatctccaaaccattttatttaacccttcagctacttcaatattttcttaagtgcttatatatatatcttagtatcatgattacatatcaccatttccattcagtaatgagtaatcaaacaaacaagttattttttttttcctgtcataggtgagcaga

SEQ ID NO: 105563 - DNA, 523 bp, Mimulus guttatus
  Intron number 1 from transcript mgv1a026458m (locus mgv1a0 26458m.g) derived from phytozome v7.0 (chr-ID scaffold_16; pos 331779 to 332301)
cttcacctcctcctcctcttggtacgtacgtacgaaactattaatacataccatacgtagagtcgtctttttattacaatttaatcaagttttcatatccacatgcattttattatcgttttgattaattaatgcttcgcgaaatgacgaggaaattgagtattttttttaatctgcaattagtactaaaaaaaactcgtatgtatatatatatatatatatatatatatatatatatatatatgaaagatgattaatgttcgttcgtctgaacatgtctcaaattaattaatctggtaagaaatttttttactttcaaatggatgggatattaaggaccagacaatagaacatggcatatgagtattgagttcttgcatttattttcttgttttttttctatttttttattttacctaattaatgtcgaaaaaattatcgagaaatacgatcgagtagcttctcattatttgtgttttttttcttcatgtagttaataacaataagaatattccggtagctg

SEQ ID NO: 105564 - DNA, 387 bp, Mimulus guttatus
  Intron number 2 from transcript mgv1a026458m (locus mgv1a0 26458m.g) derived from phytozome v7.0 (chr-ID scaffold_16; pos 332446 to 332832)
gagttttcaaaggaacacttcaatcaagtggccaggtaataacatattcgaacaactccgaaaaataaataaaattcaaattgttaattaagttgagtttattgcatttaacacccatatattatatcaaattgttaaaaagctccccatattattttattggcaagaaaccccttaagtagtcctttaagggggtaatttgcaaaaaacaaatgaatcatagggggggttgtggcaataaaataacatggggttttttagtaattagaaaaaatacgagggtgctgaatgcaataaacaaaatttaagaatgtatcttttaacgtagtttttttgtcttcttttcaaatagattgtggctgttaggcaactagacaggggtgcaac

SEQ ID NO: 105565 - DNA, 694 bp, Mimulus guttatus
  Intron number 1 from transcript mgv1a004600m (locus mgv1a0 04600m.g) derived from phytozome v7.0 (chr-ID scaffold_106 ; pos 317831 to 318524)
attttgtgatcgctgctgctggtgtttgtgttcaggtgagttcatcttttgattatttttcagaattacaaaactgtctatttaattttaatttgcctctaatttaatcgcgtatgaaacatttgtttgttagcagtatatttgtggctaatgttctccgggttttgctgttcgttattcggagaattttgggttttagattaatattttgattaggcagttggtaatttagcagttaaccttttcgtagatttcgccgatttttccctaattttaattagctttatcgaggattaattgcagtttagttcttcgattgatgctgcatttagcttgctgtttctttgcggtgcatcattagtacgttgtgctatagatacaattcgtatattcgatgatataatatccaagaagcaaaataagatgtgatttcgatccgaaaactgtgaaaaaaaccgaactcgaaagcttgttcaccgtataattgcctgatacgatattcgttatagctcgggatttgatttgaagacgaacaggagttgttgaattttttttgttcgatttttctttgtagaaaagaatgcaggtgtataattatttttttctaatgttatttttataagttcttgattcacatttttgaaagccttgcgttattcgtctacagctggggttgaatatcttgtcgtcgact

SEQ ID NO: 105566 - DNA, 421 bp, Mimulus guttatus
  Intron number 4 from transcript mgv1a004600m (locus mgv1a0 04600m.g) derived from phytozome v7.0 (chr-ID scaffold_106 ; pos 319165 to 319585)
cagcctatatctttcccacatactacgagtctcaggtaaactaatttccgatgctcttattcaaaaggcgaaaatgtttgatcttcaaatttgaattcttcaacattttgcagaatcgtatctcgtctttgcaattagtttatttcttcaataaaatattcgtattttttttttttttgcttaggaaaactttatttactatcattcgtttggcttccgaaatcctaacatacgtgattgtgataaaattttaagacaatgtacctacataatatcctcgatttccattaatacagatcaaataatattcggtcatttatcgattcataagaaaattattctgcgacaatgaattttgaagaaataatttgcattttgttctgtaataggatttgtgccggttgtaataccgagattgggc

SEQ ID NO: 105567 - DNA, 623 bp, Mimulus guttatus
  Intron number 1 from transcript mgv1a009281m (locus mgv1a0 09281m.g) derived from phytozome v7.0 (chr-ID scaffold_1; pos 4744229 to 4744851)
ggaacatccctcctgctcctgtattggatttggatgtaagctttcttttcctttgattcatccgatcctctacaaatatacttatttacttcttctttaattatttgttttctgtaatataatctcacttcttcaatggttcttcttctttcttgttataacattcgttttataaattaatctaggatatatgcttcaactacaaaattcagtttattatatttgattgatgatgccaaatcgcaaacccaattaaattaggaagggaatcaagttcaagtagtattcattcaccttgtatatataacaagtggctactgactagattctttgctctggaatccatccattccaggctattttctcttttatcgtctcctttttcttccaaagtagccttttttaaaaagataaattctggacctggtaattatttcattggtatgtgagctcagctcaactcaggaggaattcacttctgagctttgataaacactgctacctagggctgactaaaaagcccctaagaacgcagtattattacttgcatgttatttttgttaattactcctgaatttgtgtgatcaggccgatattaaatctccagatagccctggggcgaa

SEQ ID NO: 105568 - DNA, 824 bp, Mimulus guttatus
  Intron number 1 from transcript mgv1a017519m (locus mgv1a0 17519m.g) derived from phytozome v7.0 (chr-ID scaffold_211 ; pos 114179 to 115002 reverse strand)
ccggtgactgctgaaaggacaacttcaaattttctgtaaatctctctctctatctctctcttcttctctctctctctgtctattcctaatttcgatgattttattccagaaatcaaattaggttgtgttagattcaataattcccccctttttttttcaattagatttttttgcctttttgagagtggattggattctctgcaaaatacagtatttattttcttctataattttctcaattaaatgctctcatgagtcatgagtataattagtgctgcgattctgcaactgatgcctgggttttacaattacatttatttttttattttttgcaatttgctgagatactattttcgggtggaatatcggaaatgtcatcatgtaagaatttcctatcttagtcatgaaaataaataaattgaaaatttcgacaaatttaattgtttccacaatgtctggatttaaattttgagaatattacaaaatttcgtttatctgatttgaaggagcttttgttgaggcaagtgcttgaagatggtagattttttccgtctgtttccggctaatttttcgtgtatatttatatatttcgatttatttctccaaggtccaaatgcagcgtcgaggcgagaacatgttaggaaatgcgtgtgcatgtatataattgtggaaataattcgatatctgcaaatttacttttttcgatttttccctgatttttagagattgatttataaataataaatgtattgcaatggttttgatgatgaatgctacttgtgtttgtagacgtactggaacgcttcaaagtgctgaaacaagtg

SEQ ID NO: 105569 - DNA, 455 bp, Mimulus guttatus
  Intron number 1 from transcript mgv1a004572m (locus mgv1a0 04572m.g) derived from phytozome v7.0 (chr-ID scaffold_1; pos 1903920 to 1904374)
tctccgagcaactccacctctaccaaggtaaactgtgcctccttttcttttcttttttttcttttttagctctgaatagttttaatactgctactcgtctgggtttcttgaattgtgccttgttcttggaagattgaaaccttggttttgttcaaagtttattttaggttgttagcatttctgttaactggattgagttctttatttaggatattgttgactagggtatgattaagtgattaagtaactttggagattaatcagagttaccaaatgagggtttggctgttgaaagtgatgctatgtaatccacaatagttagctcgatttcggactcgagctgtcgtgatttacgaactcagtgcacatactcaaataaaaaagttctgcaatttacgtttcttggttaacttctgtaaataacgaaccacctattatcgattcttaatagggta

SEQ ID NO: 105570 - DNA, 420 bp, Mimulus guttatus
  Intron number 2 from transcript mgv1a010432m (locus mgv1a0 10432m.g) derived from phytozome v7.0 (chr-ID scaffold_5; pos 431574 to 431993)
ctcaagcaaactggcaggtacgtgtaccaatctggaatgaattttcaataatttaatttttgcttcattgtaatttcagatttattgttgtttgaaattcgatatttttctttctcaagcatcataaattgcagcgtttatgtgatttcatgaaggttcttggcatttaaaggaaacggattttttcagaaatttaggacttcgaaattttaaaagtcgaaaaatggatgattgaactgaaataataatgcatttttttatttgagaaactttacacggttggctgatttttcattttgaggttaaagtcttcgtcctctttgaatttgattgaagtactattaatttgattggagtctgaagcttttacctcttaatcaataattaagcatttcgtgttttatatgttacagacctgag

SEQ ID NO: 105571 - DNA, 905 bp, Mimulus guttatus
  Intron number 1 from transcript mgv1a013794m (locus mgv1a0 13794m.g) derived from phytozome v7.0 (chr-ID scaffold_290 ; pos 17077 to 17981 reverse strand)
tcaaaactgtaagaaattaaatcctctttgtttttttttttttttttggttcatactaaataattctcttcgatatgacagaatttcttgaaaattgtttatttataggaaattaatgctgtcacgtggtaaagttaaattaaaaaaacaatctttatttttgggtaattacaatcatctatgaatttttttggcggccttagtcttatggtggccttagtcttcaaatttagtagaatcttttaatttatgaacaatattctccaatttgtatccgttttacactattcgactccatattttgaaataagatgattataagatgtgtctcttgatttgtgaatatcagatcggatcctggtgcattagatcggatcgtggtgcatctgaaactgcacttttgtacaaaatgagtacaaactagagtacattccatataatctagaatctaatctagaagattataatttgacacccttagggttagggtggacgtgtaagaagattcatggttgaggagtggttataattacccaaataggaggtggttttctgtaatttgaccttacctcatggaatggccgtaatttacccttatttatattttctctgggataaattaaaagagggtgttttggagataaattaaaagagggtgttttaattaggcctaaaatgcttatagtatagttacaaaaacgataacacaatgaacttcacatgcaggttcgaatagtttcgtaattttatcaatgtccgtttttattgtattcaatgactacatttacaattgagaattcaccaggtcgatatttgttattaatctgctattatattagttggttttgatgaaattcaactttggtgcagcaaattctcaactatttcacgtacaaggctgttag

SEQ ID NO: 105572 - DNA, 810 bp, Mimulus guttatus
  Intron number 1 from transcript mgv1a008156m (locus mgv1a0 08156m.g) derived from phytozome v7.0 (chr-ID scaffold_15; pos 672045 to 672854 reverse strand)
tccgccgccgcaaaaacttccgcgccgccctccaggttttgattttgtctctgtatttggattattgagatgaaaaattgcgattctgcttgaaattttctctttgagaaaatagagaaataatattgggcattccagaaaaaaaatgaattttgatttttctagtaatattattttcattggtggagaaatggctttgaatgtcatgttatagctgatgtaatgttttactgtgtaatgcatctctgcttatttaattaaaaacatgcaaaaatgcagcctgtaatgtatcgtatatttagttttctttgtacatcttatgctttgtttaagaaggggttttcgcacgacgctttataaaacgagacttagagaaagttcacattttattatgtttagcagttagaagattttatagccaagccagtaaacgcaaaacgcatgctccttttaatccttaatttacgattctgttaactcaagtattcgtcattttgtagatatagttttactctaacagaggtcaagtatagatttctgaattcaatagcatatgtatttcttattgtcgttgcaagaactaattgttgaccataaaagtataaactttctatagttttctaacgaatcagaaataaatttaatggggtttcagctgactaagaacgatattaagacaggcatattttatttggcttacgaaactcattttccctcttgaaacgtgtaattactgcacgttatctgacttgcgattttgtcaaatttttttttttgggtccgatttatccacatcagctgtatgactgg

SEQ ID NO: 105573 - DNA, 1002 bp, Mimulus guttatus
  Intron number 1 from transcript mgv1a005082m (locus mgv1a0 05082m.g) derived from phytozome v7.0 (chr-ID scaffold_37; pos 875533 to 876534)
atttctgcaggttcttctctccgtacaattcaacagtaagcagcagcctttgatttttcttttcaatttgtctcgacgttagttttatctgaaatttcttgtcacttttggggatgccgggattctgatcatgccattggtagataaattcatccgagtttaaaatttcagggtgattttattctatttattcaaattttagggttctgtcggatgcaacatgattttttccttttttttttttaatgtttgttggagaattcgcctaattttgttttttctgatttttcacttacttggaaaatgggcatttatacgtttcctggtatatattggtattgaattgacgttgcgattcattgcgatcgtatcgtaaaatatgtttcggctcgaaattcgaataggaaatgttggtaggttgagttgaacaatgtgtaattagttgttttacgtcgtgttgcttgcatatagtagcatacactcgatatcagaagatgttcattttgtgattaacgattgtaaaatttgtttagcttgaaattcgaatgggaaatgttggtaggttgagttgaacaatgtgtaattagttgttttacgccgtgttgcttgcatatagtagcctacactcgatatcaaaagatgttcattttgtgattaatgattatgtgtcgagacgaaaggggtacattttagaatctcgttgtacacatgttcatcgaaagatgttttagtatgatgagacgatgccagctagtatgaacgctcgtcggtagtttatttatatggaatttcttaataacaattaatcggacccgtagaaagaaatttcataaatagtttcctcttattaatatttcgaaagaatcttatgaaaaaggtagtagtatagatcaatttgtggaatttacctttttggtgatagtagtagaacggtcggttatacttcaatatacagtcggttaattaatcgaattctatcaataaacagggaacaagtgacat

SEQ ID NO: 105574 - DNA, 873 bp, Mimulus guttatus
  Intron number 1 from transcript mgv1a005414m (locus mgv1a0 05414m.g) derived from phytozome v7.0 (chr-ID scaffold_17; pos 1358480 to 1359352)
gctaatcctcctccaaccgcttgttgctgctacaggtgacatttagttttgaatttcttcatttattacgcgctgtgcgtgtgtcaattggattgatctattttaattgcggttaagatagtatttttgcttttaagtttaaaaaaaaaaagaattgaattagttctttgtgcagttgtaggtcaagttaagtttattgtcaatgaccctccttttttcattttgatattagaattttattttaaagaggtgtgtataattggatttttttgtggattccaaatgtaaataatcgactgcaatgtaaatgccgatttgtatcatatctatgacttctagtgtctagacattgcatagacttgttgcgatatcaagataattacacgggataatgaaacaatacttgccattgatctttgaggataatatttatttggggtctgttggattgtgcgtttacttcactttggactgaagcttttgtgggactcagtatttcgatcactttctttagaagaaattggtgatattgttgacattcttcgttatgcattttgtctgagaatctattaaaaatatttattgattgttgattgacatgcattgatgggatggataagaaatgttcaaaatctgcttattgtatatgatgttaatctgttggattcacttattgtctcatttttttctggttccttcgtgcgtgcatccaatggaatacatgatgatatatgctgtctacttgaacttatatgacattatcttgaattcagtcgccaaatttaattgtgaccattaactgacataaacaccaattcattgtggcataggactgaggtggctataactctttccttctttatgtgaatgcag

SEQ ID NO: 105575 - DNA, 851 bp, Mimulus guttatus
  Intron number 1 from transcript mgv1a017195m (locus mgv1a0 17195m.g) derived from phytozome v7.0 (chr-ID scaffold_36; pos 232800 to 233650)
ggtttgaaggtatgattcgataaatcgattaaattgcggaataaattccttctgctattattatttttttgctgaaattcgagtttctgttactgttttcccccaattgttgtgcttaatttgcgtgaattgattatatggtgaattgattttttaaaaaatgtattagatctgagtaaatttgtaatcctggcttatgatcgtcgattcgtcgtacttccttgttgaattggggattaatttgtttactaatgatgtattgagttttggttttggttttggttttggtttcggtttcggtttttgtgtgatcctaagttgaaagagatgtcttgaggaatttgaagaacagatttgatcttgaccgattcggttaaggtattagtgtttgttccattagacaacgaaaaatcacgattctttttcacggaaatagatccgatcgtctataataaatatccgaaaccttgatgttctcgattttaaatgttagatcttttgaataaaagtttagccagacaccatcttagtgtgtgagacccaagtttgaataaaaatcacgattctttttcacgaaatagatccgatcgtgtatcataaatgacatctccgaaatctcgatgttcccgatttaaacgttggatcttttgaataaatgcgtaaatcgatccatggtattgtggaagtaacctttgggcaagtttgttttgttacgacgaaattgctttattattattattattcagttcgtttggtttcggaaaatgtggttcgtttgctaaacttgacgtgaaaaacttgtgtatggatctataggaagaatttgacgagcacgcggagaaggcgaagac

SEQ ID NO: 105576 - DNA, 1002 bp, Mimulus guttatus
  Intron number 3 from transcript mgv1a021566m (locus mgv1a0 21566m.g) derived from phytozome v7.0 (chr-ID scaffold_100 ; pos 621102 to 622103)
ccgttcgacctaaaccaaaactcgaccaactcaaggtattccgtaatgattttttttctagaagagcgtgcgatacttgaatatttaaaaaaaaaaaaaaatctcgatataaaataacaaaattttgagaagcggtagttgtttatggccccatctggccctactctggctttattactatgtttatattgttgtacctcgcttttcttagtacttcatgtttccttacgttgtttaatgtttagataagattaatgtccactcgttgtgatacttcattatatgatgcatacataaacagggcggacccaggagtttttcttggggtctagaatatgggggtgtattaagagatttttttttatggactgaaatgtatgaaattgaaagtttagggagacgaaagtacattaactaatacataaataactaataaaaaaaacattacgaaaaaaaaattgggggcgggggccaccccaaccatacgccccgtacatatatacatacttacgtacacatacatacataccgcagatctattgcgtatatacatagggtgtactcaatttatcttatgtagcctacatataaatataattaatcgatcacccgcatctacgaaaaaatatatatatttgaaggatataatatgttttaattaattaatgattatttaaactcaaaaatatagtactcctaatagtagtgatttggcgatgttgccctcgatccccgtaaattttcagtccatgcactctcatataactaaatcctggctcggcgctgtatatatataattcatcattttgtatagataacgtcatctacttcaagaaataacgatccccttaaatactaaaagagcgattcgccttttatcatgacaaaaggggcacgaatgaacttacattatacatatatacgatgaaaatacgatgtttaatgttttatgtttaatgtcttgtagggacatttctgaaatcccggagactgcttcactac

SEQ ID NO: 105577 - DNA, 712 bp, Mimulus guttatus
  Intron number 1 from transcript mgv1a018661m (locus mgv1a0 18661m.g) derived from phytozome v7.0 (chr-ID scaffold_381 9; pos 1174 to 1885 reverse strand)
tcgctcaagctgcgcctactcatcatcatctctgggtaattccgtaatatcatccatccatccttctcttttatttgctcccgtaattatatcattatattatgctaattaaactctagtagagtagatcccactcaagcctattttccaggaagcctaaaccatttctagggttaattagctccccattatggcatcataccgggtaatatatatgggataaaataatatataaaggattatttgttgcaaatatttattttgattactactccgatccgtattaattcttgtttaactttctctctaattcttcgtactttatctttttagtgctaatattgtaaattgctaccaaaattgaagacagctcagtattattgactattgagacaaaccgacttaattaatcatctaattaataattgtgtggctaaaataaaaaccttagagattagggcaaatggaaaattaaatagtgacggcagagttgaggaggggcaatcactttaatgaggaaagcttcccctttcagcacaagtaaataattttgtccccaaatgggacccaattttttattttatcaaggagtaggtagaattctgtacacagcttttatatgtttttttgtcaataaagcagaaaagtgtgattgatctacaagaaaatagaatttttttttttttaatttttgtttttcagggaagtatat

SEQ ID NO: 105578 - DNA, 924 bp, Mimulus guttatus
  Intron number 2 from transcript mgv1a002539m (locus mgv1a0 02539m.g) derived from phytozome v7.0 (chr-ID scaffold_130 ; pos 228486 to 229409)
gctggtgtttttcaagcttctttaggcttgttgaggtgatttttatttatttaattaatagtaattatgtatatataatcaagattatgcttgttttataattggttattttgcaattagtacccctgcattatatcgaagtgtcaacaaaactactccatgttattttattgacgaaattccccatgatttaattgtttttagcatacagttccctaaataggggcactaattgctcaaaaaattaaattataggagggttttgctaataaaattcaatataatgtgggtttttttagcaatttagaataatgtatatagggttagtgattgcaataaactcagtttttaatatttggctaattagaaaaaaggaaatgatcacatgcatatatatatatactattagcttctagtggaattgaattagttctaatatacataagccgcagtggcgaaaccagcataaggctgctgaggggccatggcccccgtcactttgcaaacaatctactacattatagaaaggtttattaattttgttaaggatgcagtatcgtcggccatcctagtccgtcgaacataaaatcctcgctccaaagacacgaccacacacacagaaacatcacacgtgcacacatagatgatagatacataagtttgtatgtataaagcatatgatgagatacacacgaatattataaggtgtaccaaatattttgtccaatacataggaatttaattttgccatagagacaaaacaaaacaaaaaataaggttggatgagaagagaacgaattaattgaggatgacgtaaagacaaatttaaaaataaaaaaaaaaataaaaaaaagtaattaatgcataggtgatgggtattttggtaattttgcaggcttggattcatagttgactttctatcac

SEQ ID NO: 105579 - DNA, 337 bp, Mimulus guttatus
  Intron number 1 from transcript mgv1a001783m (locus mgv1a0 01783m.g) derived from phytozome v7.0 (chr-ID scaffold_37; pos 124304 to 124640 reverse strand)
agcgaaaaggtctgcttttatttctttatttattttttgattatcatttaatttaataatatttatggctttggcatatttcgagtgtatgtacatttgaagatcatgcacacgcattaattaagaagaatggaattaaatgctagctcaagttgatgattgtttaatttgtaaagcatgttcaagtagatttaggatttatggattgttgattgcaatgtgttcgagcatatgtttctgtgggagtaagaatccgaaaaacagagtttacgtttatgcgatgaggtaaaacgaagttatcgaatttgctcgtttttcggcaggaaattaggcacct

SEQ ID NO: 105580 - DNA, 1036 bp, Mimulus guttatus
  Intron number 1 from transcript mgv1a013318m (locus mgv1a0 13318m.g) derived from phytozome v7.0 (chr-ID scaffold_8; pos 1659155 to 1660190 reverse strand)
cccgaccagaggtggtgttcgcggcggtcgtgatcgtaagccctatcttcccttcccctttttccctctaatttttagggttttctgattggttcgtgctttctgttttttccgtgaattttgtgtaattttgtggaattttgtggaattttctgtttttactggctctaaatagtttgggatatagtcgattttgctttacaggaagaaagtagaagttactgttagaagacctaatattattctgaaaaaaattaatctttgaattatatgaaaatctgaactaggccttgttaccatatacttgaatttggaatttctgcttagataacaagttttaggaagtgatacgcaccttcttcgattcggtttgttgaagtattgtgtggatgtaatcttctttgctctacaattagggtatttctgtaggattttgatttgtaaccattgtttatttgctctgatatatgcgatactgtgctttaaactacacgagttttagcttatcttatcgcgttcgtttatactgaatgccggcacaaaatatgttcagttgctcagttaccaacataagcttgggttgtcgttgtcgttgggggtttgtaggtcttatttgagaagtaataactaatttttctggtgtttctcgattagttatcattgagttggaaggtgtggtttgaagttagtaattaacgataattttctcaaccgacagtattctacttcatcgattgatggtcaaacattcagggtagactacaaatcatatcatttaattgcattctttcttgtaatcttcttgtttgtgggttatcaagttgatccgtggatctagtttaggatttatgtttcaggaggaaaatgattagaaagtaaaactaatattaagccggatataaggttgtagatgatgagttcattagtcgtattatcatttcaggccctgtaaacatgtttttcttaattatttgcatctatgatgaattatctaatacgtattgcttcttctcaattgcagaatttaactgggacg

SEQ ID NO: 105581 - DNA, 1037 bp, Mimulus guttatus
  Intron number 1 from transcript mgv1a008343m (locus mgv1a0 08343m.g) derived from phytozome v7.0 (chr-ID scaffold_54; pos 182279 to 183315)
acccaatcctggacctctgttcatattcaagtcaggtaaacaaaaatctctattttaattaattatttaatttttttatttttttttggaatttgagttgctaaaatttattatttgattttttttatgtctttatatttcaatgtcaatgaaatggggtttcttgaataatttctgggttatttcggttttttttttgttcgaattgagttttttacgtccccgaattcacgtcgtacatagtaaaaaaatatacattttttcgagtagtcgaaattgcaacattgttccttattggcacttcaatttgtgcagaaaatacgataaaaaccagtgtgtcgaacggaaattagaaacattaattagtttttgtttcgatacgattgttgtcttgtttgttcctcttgttatcatcgattatcgaatgttaatagattatcgaatgtggcaagtactcttgaagtgtaacaattaatgaaatttgctgatcatttaaatttggaaggaatattcccaaacaatatggaccgcaacccgagagttgcgaaaaccgaggatgttttttttggcccttatctttagtaagtctttttgtgacaggatatggaatatggggaagataagatataggagtgagtatatatatattctttacgcagtttcgaattattcctaacgttgcattcaatttcgaggaccacatagaattccgggccaaaattaaaaaatataaaatcgaaaaaaaagacgtaattttacttcttcgtaatcgtatgttaatgtaatgcagtaaaaggtaagagtcgacgtaagaaagttacttataagacacaatctatttgaattttacaaatacatttgatgaatttgtaagtagtatgctcgtttaatcgatgaatttgtaaaagtcgagactaccaccactaaaatcgtctatatcataagtatggattaatacaccaaaattttttctcacaaatctttattattttttttttctgttgtttttaaatataggggagtggttattctcttgc

SEQ ID NO: 105582 - DNA, 1003 bp, Mimulus guttatus
  Intron number 1 from transcript mgv1a009289m (locus mgv1a0 09289m.g) derived from phytozome v7.0 (chr-ID scaffold_101 ; pos 100695 to 101697)
tgcaataagtggcctcctaatcgtcctcaattcaggtatttatgtaatttatgtgattttttgcaaccacttttatgcatattgattatgaatataatgagtcggataacattattttttttcttttttttctctacatgttaatagtaaaattcaactattgatatgttataatagatgttggtagccatcatttcaaaatttatgagtttcttgctgtgtcgaaaacaggattttattactagagggtacatttaaaccaaaagataggaaaataagatatttgatgacagtttttgcattaattcggaatttgggtaaactaaataataaaaattgggtggactaaataaatatactgatataatctagtggattcctttttcaattgagggtgggcttgagtagacttatttactattttctatgtttacattgattacaaatacttaattttactttttatataaaattaaattgttaaaaattaattataggagcacaatatgaatgcaataaattatatatacatatagtaataaaaaaaatcaagtttgatgggggtcatgaccccctctgaccctacactggattcattcttgtcgattttttcatgtctatatggacaatgcataagcttttattgaaccgaattaaaagttatttagttctataacaattaaaagtctcgagcttttattgaaccgaattatgagcctcgtttcactttcaaaagataatgtaacgttgcattttagggattacatgtgttactataacagtgaaatcatgtcaaaagacgagataaacatttggaatttttttgtttcccaaaacaatttggaggcaaatttgaaaagtttagcaaacacggtattatttgagtgaaacgaatttcaaaaccagatgaaataaagctttgatattttgcactatatggtgcatgtatatatatactcacactgattattgaaaagattttttcatgtgttaaaagggaggc

SEQ ID NO: 105583 - DNA, 589 bp, Mimulus guttatus
  Intron number 2 from transcript mgv1a024785m (locus mgv1a0 24785m.g) derived from phytozome v7.0 (chr-ID scaffold_90; pos 304603 to 305191)
gcgcatctccttacttgcaggaatttgttttggaggtaggtcaaatttttctctctacgtttcttcattttttggtttgtctatatcaactcatatgtgtaatttttcaccttagacatatatcttgatttaaaaaaaaatagatattattagataaaaatacccttatttactaattagtgtatacatagcatccgaattctaagtgacaggataatattggagaattttttttcttctcaaaagtgacatatattgtcgaacgagttgtgcctctctgttaatatgtgtcatttttcaccttggcgcgagtcttaaaaattaaatctcaataaatatgtcttgattttagaaaaacagatattgttataccaaaatactcttatttactaattaatatagcattagaatttttaagtgacggataatattgaaattttttttctctcaaaagtgacatatatcatggaacggactagctatacctctctttgttatattatccattaattgcgggggtcttattattattatttttttctccgggtgtgcagaataaatacaaaaacgctaagccggagaatatacg

SEQ ID NO: 105584 - DNA, 748 bp, Mimulus guttatus
  Intron number 1 from transcript mgv1a023989m (locus mgv1a0 23989m.g) derived from phytozome v7.0 (chr-ID scaffold_5; pos 96338 to 97085)
gtgggccccatttgtcgttggccaacggcgtttgggttgaccagagtctccgtttcatgccggccttcgaaagaaattgtccggaattcttacaaggccgcttccggtcgtgttgattttaagaaggtttgttttctgcatgcatgggtttgttgtttctttttagggttttgtggtgccgtttcgattaatcgagatgtgcttttgttttctgttgcatgtttattttgatattagcgttgattcaatgaaactttaatttcttagcatatatatccacctatacattagttttataatttccgaaaatttataaatcaagtccgaccatatatatatatatatatatatatatatatatatatatatatatatatatatatatatatatatacacattcaacaatctacgtacactaatacaaaaaaggcttttacttaactacgaccatttatcggagcgaaagctattaaattcgtagtaaaaagtcttttgctacgtattgtgccccgtagaatatacgggcttgacaaaaactttgctacggtaaatggccgtgccaaatacttttttactacgtaaatcctagtatttactatgacttcaaattgttccgtagtaaaaagtacattttattacggtttttttttttaccgtagcaacaaatttcgtagtaaaagcatattttctacaagtgctatatggtgattattgtatttgttctacattgacggtttttgtaggctg

SEQ ID NO: 105585 - DNA, 370 bp, Mimulus guttatus
  Intron number 1 from transcript mgv1a011407m (locus mgv1a0 11407m.g) derived from phytozome v7.0 (chr-ID scaffold_208 ; pos 288464 to 288833 reverse strand)
gtattaatttatcgaggttctattgtattttattataataatgcaatacattttgttattataatttttatgtcaataattatttttttacttttaaaatgctactttaatcgtccatctaaatacgcaatttagtgggacttttatctaattcccaaaaagtattgagtaagaaaaaattgataatttgctgagttagaaaagaagcggaagatgtttgagtgcctctattatatgtgcgggcttggccgacgagatgaaaagcccaaagcccgttaacaggcgggcccccaattttatttgattttggtgcaaatctaagtttccttttgtaggtttccgattcctgccaaattgaaatccaaagccc

SEQ ID NO: 105586 - DNA, 477 bp, Mimulus guttatus
  Intron number 2 from transcript mgv1a025383m (locus mgv1a0 25383m.g) derived from phytozome v7.0 (chr-ID scaffold_5; pos 3041453 to 3041929 reverse strand)
taatcagatttctggccattacctttattcgccaggtatatattattttttatgggaaaagcacagtttgcaccgtcatgtttgcaccgattttgtattttggtccctcgtgcacaaaaatacacatttgattcctcatatttaaaaaaaataaacacttttagtcatttccgtcaattttccgttagtactaacggaatcaagtgtgtgccactaaaagtgttaagctattgaaacttgatggaccaaatgtgttttttatgaacatgatggaccaaatgtgaaatcggtgcaaacaagagggatgaaaattgtaatttccccttatctttatctttctttttgtttcttcttttttttatttttcgtgttaattagtttgttttagtcctatagagtagtttctttaaattgtcaaggactacttttttttatttataatattatttagcaggaataacaagacgtttccaaaca

SEQ ID NO: 105587 - DNA, 630 bp, Mimulus guttatus
  Intron number 3 from transcript mgv1a017509m (locus mgv1a0 17509m.g) derived from phytozome v7.0 (chr-ID scaffold_27; pos 584712 to 585341 reverse strand)
gttttcaaagtggtttgacaggttaagcaaactaggtttgtgatcttttttcgatttcgtaggacaactccatttgtgttttaattattactttatctgctctatgtttatgtgagaagaatagtgctctgaatggattcttatttgttgaagcatttgataaattatttgattcctcactgtttcaaggatgagtttaattgtgggatgaaatgtcgtaaacgtgttgtattagattacgtgaatctaatctaatcttgtctataaagttttaacttttgagatgctttagactgatataaatgctaacttcattgccattcgtctcatagtctcagttcaaactaggttatgacatttttcggggtatacatattgtaatccactctgttttttctactaagaagtgtcgaatactgtctccgtgcatttctgtttgtgtaagtctcattttctttacaaatatacgtcaattgtaatgatttctaaagttggattttataacacgagttggtgtttagtttgataatgcgaatatatgcgattacaaggaccaataatataatcccaattcttttgaattaactttgtgcagagaaagaggcagctgatagaagaaaattagtgagc

SEQ ID NO: 105588 - DNA, 673 bp, Mimulus guttatus
  Intron number 1 from transcript mgv1a017509m (locus mgv1a0 17509m.g) derived from phytozome v7.0 (chr-ID scaffold_27; pos 585553 to 586225 reverse strand)
aagatcgctcaacatcttcgaaaaacaaaaataaggtaatttttactcataactttgatacattcttgtagtattggacattttcttcagtttaatggtatgaattgatgtttatattactaaatttactgatatatattgtcttcttcaaacacccatttgttctcgttagtttagatgaaaaaaattagggatctgtttctagattttctgtttggttttggttttggttttggtgttaatttgttgttcttcattttctagtggacaatttacaccaatttactattttattagatgctaaacctgataaattttggaatttcagttcaaacaagagaagaaaagtaagccaccattagttttaaatagtggaatacaaaatgcataagttccgactaaagagttgataaatcagtcgacaaaataactacgaaaattcactattgacctactgatgtttgtttcatgtctcaaatattttatttggaagcgcaataagtagaaaatagatagctattgttcaatagaaagcagttttaccttgttttttgttagaacatgtattacatataaagaatgtttgtttaggttcatatatgagtgaagtattcttttgtattttcactgaagaagcattccatactaattgaaaattatgaaaaatggaagt

SEQ ID NO: 105589 - DNA, 407 bp, Mimulus guttatus
  Intron number 3 from transcript mgv1a000302m (locus mgv1a0 00302m.g) derived from phytozome v7.0 (chr-ID scaffold_445 ; pos 52473 to 52879 reverse strand)
gccgatcctagggtttgtattttttcctttcttgttacttctattttttgttacttcgatttttttgtttctctatttggcgttccactaagattctgcatagttattgatttttttttcccttcatattttgcttgtttttagttcactcatacttaatttttttgtaagttacattacaatgcctttagtgagctgaacctcccatgaactagaagattttgccaaactatctctagtggtgaccttttcttccctccccccagttttgtttccattaatcacatgggctgttactcttgtttgattgaaagcgctaatcagaaaactattgtatggagttctgactttttgtatcttaacacttagaaggacgtacgtgcacataactttataagaccatctgg

SEQ ID NO: 105590 - DNA, 484 bp, Mimulus guttatus
  Intron number 1 from transcript mgv1a024561m (locus mgv1a0 24561m.g) derived from phytozome v7.0 (chr-ID scaffold_3; pos 226725 to 227208)
gcctttccgcattttgcggggcgggggtgttttgcatttaactcatttgatataatataggctactagatagtaatttaactattctttgaccgtggtttaatgttttaacaattaataaatacaacacaaccccctgcattttagtaccacttgtttgttatactaaaatattcccatactcattctaaaagaaaatttaaaagaaaaaaaaaaaaagaatatttccatgatctagtagtaaaaggaattgcaaatggaagcttagcatcattgacattgacattgacaaagctcaaagctgtcattctaaatgtatcagatacattctcacaacctctttcacacaattcattgagaaaatatgcgatgaagtctccatctctgtatatcatcttcgccgtagctttcttcgtcttcttcatcgatcttacctgcgtcgaatcccagtcgttggattatccaacggcaaacctctccactac

SEQ ID NO: 105591 - DNA, 483 bp, Mimulus guttatus
  Intron number 1 from transcript mgv1a007928m (locus mgv1a0 07928m.g) derived from phytozome v7.0 (chr-ID scaffold_79; pos 436364 to 436846)
gcactcgggaataaacaatcggaggtatttttacaaagtcggggttttttttttttttttccggcataatttcaacggtagtcgatggattcatcgtgtgcatgtgatgattatttaattttcttcttctatctctatctgcatatttttcagttgcaacttgcaaatgattatgaaggactgttttacctgattggtttaacagatcataacatgtaatcatacttttcggtttaattgcattcagcacctccatgttataaatattagcaaaaataacccctatgattcaatgttattagcaaactacccctaaacgcatcgttttgagggttttttttcctcatttttacaacaaaaggagttttttttaacaatttgatataacacgggagtgtcgaatgaaacgaactccgtactcttatctaaaagttgaacggaaaatggttgcagataattcgatacttggtgcaaaacacagac

SEQ ID NO: 105592 - DNA, 774 bp, Mimulus guttatus
  Intron number 1 from transcript mgv1a010713m (locus mgv1a0 10713m.g) derived from phytozome v7.0 (chr-ID scaffold_163 ; pos 2243 to 3016 reverse strand)
caggatccaaacggttgtaccgattatacattgacgagggttaattggaccgatagtgttaacgggcatccacacacttatcaccccccagaagtatccgctgagctgatttcaacgcttagggaatcgaattctagttactcctatatgtttgcgaggaaattctcgcccgattgcttgaaccctttgttggaaatcgctgattcggttatcttcaaggactgatctttccctctggtaagtgaagatgataccttttttgtgcttatcattcttttcatcgaatagtagtttgtgaaattgaatagtggttcgtatttttggtaatgcgatcccacacagttggtctcgtaattatcctttttgggttgctaccttaggtttatgaatgaaaagtcatttcttcgcctttttgaattattttgaatatccactcaaatttggcgaaagtggcaatgtttcatttcgaatgtaggatgtatgtatttgtttcttgctgcaatgctttgtcacacgcgaaaccccgtaagagttaagagttaattgattagattacgttgtctgtatcttaggtaacacattttcgatgttattcttttcttgaattactagcatacagaagagtctttatggttccttcccttattgaaacatgctcctttgagattgtttgtttaccatactcaattctgataatactcgattggaacctaattctatatgttcgaatacgataacatgtccttgttcttgttgcagggtcgaagcaggaaa

SEQ ID NO: 105593 - DNA, 819 bp, Mimulus guttatus
  Intron number 2 from transcript mgv1a018189m (locus mgv1a0 18189m.g) derived from phytozome v7.0 (chr-ID scaffold_20; pos 1471840 to 1472658)
gaaaaccaaagttttgtccgttccagctttcaaacgttagcttcacttctattctattgctgtaacagtttacataattgtctaaaagaactaataaagtaagaattaaacatttaccgaagttgttccctgggagctgaatattatatcctcagtcatctagagtttttttatgtcaattgcttcatatatgtgtagacacacacacacacacatatataatttgttagggtaattaattaatcttcccatcataattaattttgttctccttgcatttttcgtgatatatatatatatatatatatatatatatatatatatatatatatatatatatatatatatatatatatatatcttaaatttaatgtcatcctattttctattttggggtgattgtgttgctttacatcttctgtcaaaaagttgtgtcaagacctctgcgatgtaaacttaaccaagtgttcatgcgagatgtttatggcttttggttcttgagttgtatttaattatccatgacagattatgattataatttggaagtttgcaaatccaactcgtttacttctttacttgttctgtaagtaagtaaacatttcaaagtgctttggcattttaaatcctcttgtgcagtactcggcttcgtcttttgttttcggctactctcaggaaacaaaagggacagtacaacattgttattatataaagtgtataaacttttaggaacaaattgttttggtgattccttgccattttcttattttctcccccattttgatttattgatttctcaggacgagacgacactaatttggt

SEQ ID NO: 105594 - DNA, 891 bp, Mimulus guttatus
  Intron number 1 from transcript mgv1a019323m (locus mgv1a0 19323m.g) derived from phytozome v7.0 (chr-ID scaffold_46; pos 1334957 to 1335847)
gcgtcggtgagattattaatggaatgattaatcttttttagatattaatttgaattgcatttgcgtttggaatcagagttgttaatgctgggattagattttggattagtgttaatttagtgttagtttttatgcaaatggatctaatttaatataatgaagaagatggttaagttattttaattcatgcatgttattataatttaatcttctctacaaatttattgtgtataaaataattacatattagcaaatacactcacaaaagtggcatttctgaacttctgagcaaatttaagcctctgtttttatgtaaaaaaaaggttgctatttgctaatactagattgagaatgctgtttcgagacgaccgttgggcgaattgtgagataatatcttttcttttaggaagttagaacacatgcaatgcataattagaaaagaagcgaactcgaatttgaatatagttttcctttttcaacaatttgttttatgttttgtatttattgccttagttgatggaactgtgtaaatattagtggttgctctaatagtagcatatatttatcatggattttgcatatgaattaatgtgctcttagttttggtatataagctctattaatcgctattacagttttacataaatttgtgttcttcatagtcatactaattgtgtagatgcaatcatttgtggtttacaagagagcttcattctgaatttccgtttttgctgctttacgatccttgcatgcatgctcatggttccgttaaaactactttttcatatgtacctctttctcaattcacttactcgtcggtcgcttcaattatgaggttgcatatatacccttgagaatctaagataaccagttggctttaatgtagtcaaa

SEQ ID NO: 105595 - DNA, 1022 bp, Mimulus guttatus
  Intron number 1 from transcript mgv1a022932m (locus mgv1a0 22932m.g) derived from phytozome v7.0 (chr-ID scaffold_9; pos 532651 to 533672 reverse strand)
ttgactttgttcgagcaatttctgaaaattaatccgtaatttctctacggatttttccaatcgctccacccgtcttgtttctgacatcatgattttcacaaagttttgatgtgatctcaactttgctccagcgtagctttgatgtaatcgctgccttgctaacgaagcgttggtgttaatcgcaacttcgctctgataccaattgatgcgatctcttgtgtatcataagatttctttactgatcgtaagaaaactcttctttattatttctcttcataataaaaccctagcacaattacctatactaataaaatacttaatatctatcctataaccactaaacctacggctcctaactaaattaatacttaaataatatatattaaataataaaatactaaccaacgaataaatatacgatatattaaatatatatcgtatcaagtattttataggggtttcattaaagatgccctaatggactgtttcctagagttggtagagaagactttgaaatttctccaaagacttcaattttctaaataaattttcatttgcttggaaaattcttaaaataataaagagaacactattacgaaaatacatgcatggacaactatctgacttgagtgtaataacgctgaacttcatgatgaatactataagtggttaggtaaagtctgaaatacttgcatattttttttgtaattaattatagtctctacgccttagagaatgacaatggtgtatctatcaactctctcttcttgactcagcccatgacagagtcaagtcaatgacaattttccgagtctttttctgtaattagtatatctccactactaaacataacatatatatatcatatatatctagcatactgtacatacagtttttattcatcatcaaaaaaataaatacatacttgaaaataacagagacatgaaatcccttctagtgttggtttgttgggttgtgttagtgtgtgtaataattgagcttgagggatatggaagtttagg

SEQ ID NO: 105596 - DNA, 918 bp, Mimulus guttatus
  Intron number 2 from transcript mgv1a012029m (locus mgv1a0 12029m.g) derived from phytozome v7.0 (chr-ID scaffold_3; pos 4121012 to 4121929 reverse strand)
ctccccacgctctcttcaccattgctcgcactgaggttgttgtttctcgatgagtagattttccgtattcgagattcattatgacattattttttggttttcctgtgattttttgttttggatgagtttgattaaatattcttttttggaggaagattttaattaaaaaaaaagttgcttcgttttaccatcgtatgcagcacttgacaattatcgcatcagaagtatattatacacagtggaagacaatgtagaaggggttaagcatagcttgtggaacttggaaacaataagtcgaagttttaattcagttgacattcataaacacaatctatgagctgcgttcgaaagtattacgtgtacttcagtttttttattttggtgtctttctgagtccaaatggcatattattaatcaatccttctaattgggaatgcattaagtgggataaaaaactatcctcttctggcctaattatttctgatacgaagatgtagagtgcatcacaaactgcttcgtattaaagagacaaatagtcatggttgcttactatctatttatgataaatcaaaagactggaaaataagcagaaccttgttcagatttcagctgccaacttgggtaattcagcatctataagaacaactaggactcgaatcttggatatcattcttctcattttaacacactctatttgtttaaatcctggtggcattgtggctagcactgctttgaagaaaacagttactctgtcaagtcatctgagtcagctgtaactatagataatggtcatagtgcatgattctcgtttacttcaatttgccagtttaattagtcatatcattccaaagataattttttttcatgttttgaataatcacattgcatatttcgctcttcagggttttagagggctat

SEQ ID NO: 105597 - DNA, 457 bp, Mimulus guttatus
  Intron number 1 from transcript mgv1a009633m (locus mgv1a0 09633m.g) derived from phytozome v7.0 (chr-ID scaffold_123 ; pos 573798 to 574254)
gatcttattaatcagcagaagatgtgagaaattcttcttaatttctctttaatatatatattttttttttattttttttttttgatcggtctttcatatttttcttaattgtagcataatttaacttgatttaactcaattttggtttttgagagggtgggtgactttagttttaattttacatttttgcaacaatatattaaattggatgcttttcacacttgattttagctcttctattttctaggtcgagcttgtcacacatgattagcctggtgttgtttatatgattcgatttcataatatataatataatgagtttgtgatttaggtactaactacgactaatttcgtgtcatttgaagatgagattaaaagtctttgttcactaaaataaagtttgaatttttttagtatttgttgaattatttttttcccgattatagtagttgtgttg

SEQ ID NO: 105598 - DNA, 233 bp, Mimulus guttatus
  Intron number 1 from transcript mgv1a018653m (locus mgv1a0 18653m.g) derived from phytozome v7.0 (chr-ID scaffold_65; pos 772326 to 772558)
tcgtgtgttgtacgcgcggcttgtgtaactgagagtgtaatttttaacctaaaaagtcaaaaataccctcttaaattcttttataaataaacataaatctatttggatctaattataattttcaaaatttcttacccaaacaaaaattctacagccgaatttaaaaaaatagactcaattagaaaagaaaaaaaatagatctcaatttaacttgtcttcttcccaaatttcct

SEQ ID NO: 105599 - DNA, 731 bp, Mimulus guttatus
  Intron number 2 from transcript mgv1a016084m (locus mgv1a0 16084m.g) derived from phytozome v7.0 (chr-ID scaffold_117 ; pos 831697 to 832427)
aaatcgaaggctgattctcgcaaggccgatagcaggtaaccgatgtattttttatttgctattgatttatctaccttgtattttgatgaatacgcatccccgatcttattgcaattttaattctgctgtgaattttttttttagttttttttttaaattaatatatcccgatttaatcatttttaccacattttcagtacttttttgatatttttttttcaattgtcacaatgacattgaggcaaattcaattaaagttgtgttctatagattttagaattaggttttaaatgtggttagttctgtgatattgtgaattaatgattatagatcttaattaactgattagtttatcggagattcatatttgcttcactgttgtaaattgtaatgattctggttccattaataataatgattaatcatcgattttgttttatttttctgaaaattcattttttttccttcactgttgtaataattctggtttggtatggtttgataaaaaataatgattattcattgattttgttttattttttttgaaaatttatatttttttcttcaatgttgtaataattctggtttgatagaaaaataatgattattgaccaattttgttctatttcatattttcaagtcattacggagttgtttaaagtaattaatttcagttcgattttttgatggtactaggcttgctgtgaagaagcagacgaagaaagagagga

SEQ ID NO: 105600 - DNA, 600 bp, Mimulus guttatus
  Intron number 2 from transcript mgv1a020613m (locus mgv1a0 20613m.g) derived from phytozome v7.0 (chr-ID scaffold_198 ; pos 19021 to 19620 reverse strand)
agacagggtctcgacgaccatcaattacgcaacaggtcggtgcgaaaacgtacgcctttttgttttgtttattcgtgcgattgaaattttcattttctatgatttttttagtaagtttaggcattgtcattctaagattaacgaagataaaattaaataatctaatgaaaattcagttatttagttattttaagcttcttttaaaggtaagataatgcaaaataaatcatgataacataatatttacggatcaactagacaagttatttaagatactaaatatcacacaaagtccaattatttaattaattatgacaaattaaacaaaaaaaaaaaaaaattccgattagataaaaaaactccgtgcgatattaatattagcaaaaatatatttataatgtattatttagtacactatcacctaaatggtttgtttttattttttaagaattgtatttattttttaatatcttataaagggatacgtttaattttgaacaaacagaggcatttttgttaatatagacgtacgtgagggttatttgtaaattttatttccgcatttttctattttttttatattatttaggggcaatttaa

SEQ ID NO: 105601 - DNA, 531 bp, Mimulus guttatus
  Intron number 1 from transcript mgv1a004249m (locus mgv1a0 04249m.g) derived from phytozome v7.0 (chr-ID scaffold_20; pos 2222347 to 2222877)
accgcaaagagatccgcaaaaaggaattgaagcgggtaattttccgtttctattctcttttgatgtaatttttcccccttgttgattatgtattttgccgtcctgtcgaaaatttaggttatttgttcaatatgaaatcatgtgtggggatattgttggaacaatttttttttcttcctttcgttttggattattcgattttgatttataaattcaagtttagttagtgtaagttttcacttaattgaaataattgttttttttatagcaatacctatggatgtttctgtatgaaaaaagttgagaaattgggcatgtgtcgtagttgagttttatttctactgcacatttttagagtgatgatcgcataacagttttaatgttttatgattcaaatttgttgcttgtgtcgtaaaaagtttcaaattgttaagtattttgaagaatagttgtacattctagagcttctaaaatcgttgttgattttattgtacagaacaagaaggagagaaagaaggttcgggaagttgg

SEQ ID NO: 105602 - DNA, 928 bp, Mimulus guttatus
  Intron number 1 from transcript mgv1a019439m (locus mgv1a0 19439m.g) derived from phytozome v7.0 (chr-ID scaffold_112 ; pos 77397 to 78324 reverse strand)
ttgttgtcaactactgtaagcttcgcctttgggaggtacgtacatacatatatacgatcactatatatatactttgcattagtttcttttttatatttaattatgaattgtgaaacttatatatgtatattgtttaattaatctttatttaattggtttgtgtaggcatattgttcaagttttttctaagggttttgggtgcgttttcttcaccctttggtgtgtagtttatgaaattacgacaacgaaaaagcagtactaataaaatcggaatccgaaaaaattgaagatcgataacgagtaattactattaggggttattgaatttaattattttgaagaagaccatatattttcttattttgaattgatttcgatctgaaattcttcaattttgaaggaactatggaagtttcgatttccgatattttcgattttcttcaaacgagattcgtgtttttgatccgattttataatttttgattttgttttcttttcgaaaattacacttgttatatattttgcgttgtgggtgaccaatgtatttaaatttccgaattacgcggtttccaattccaaagtttcggacaatttataaaatttaggtttccgatggaaacccatttattgggaacggaattggatatagttttcccctttcgaaaaaaatggattttttttataccaaattaccaatgtattaaattatagtaagatttttttcattaaatacactgatttacaaattgatctagttagttcggggaagccaaatttcgagagccttaaaagttataacacgaaaaaaaaaattaatgccataagaatgtcgaatgggcaaaacgcgaccctaatattaaatcattaagtttgttattgagaatagttttatgcgtgatttgctatgtagtttgtggagtacaacaaa

SEQ ID NO: 105603 - DNA, 183 bp, Mimulus guttatus
  Intron number 1 from transcript mgv1a002283m (locus mgv1a0 02283m.g) derived from phytozome v7.0 (chr-ID scaffold_300 ; pos 188265 to 188447 reverse strand)
tcgtcatgattagtttgtgtactttcttctcgaattctctctgtgtaaatgttttctctcagtagtggatattgttatttttttttttttttggataatttgattttatattttggatcagtctcggtgcagaaggcttggatttacatgtatagtagccaccgtattgatcgacactcgcaa

SEQ ID NO: 105604 - DNA, 689 bp, Mimulus guttatus
  Intron number 2 from transcript mgv1a012206m (locus mgv1a0 10242m.g) derived from phytozome v7.0 (chr-ID scaffold_17; pos 146233 to 146921 reverse strand)
cttcctccggcgatctctcttatctcggcggcgaggttttctcaattttttatttcttactttcttttttattcccttagggtccatttggatggagggatttggggagggatttgatttggggaatggatttgaaatgactccagttttggagtcatttgaaatccacctcaattgctcaaaacataactaaaaatgaggggtgggatttgaaatccatcaatccaaacaagtccgagggatttgttattatggatttgaaatccctcccccaaatccctccatccaaatgcacccttaggttattaagcatgttcttctgagttgtgttttcaaaattaatttgtcaaatcgaaatcttaattgcatacacttgttacatgtatatatatatatatatatatatatatatatatatatatatatatatatatatatatatatatgttctatggtgaaaatatgttcgattttgaggatggattcgaatttgaagtatgacaattagcatcgaaactctgtattaaaaaagaaaaaaatgatgttgccccggtgtttacgagaatagattgtcactaaaacacgacaattgctaatcgtttctgaatgattttttgaaatttgatttgtctaaactttttacttaatttccagtggagaagggaagttgcgtttgctggttttgaggt

SEQ ID NO: 105605 - DNA, 1021 bp, Mimulus guttatus
  Intron number 1 from transcript mgv1a019753m (locus mgv1a0 19753m.g) derived from phytozome v7.0 (chr-ID scaffold_208 ; pos 142312 to 143332 reverse strand)
gtacaggcgcaaacagttggctcgttcagctagaggtttgttgcattatttctctcgaattatgacgtacggaatttcagttatttttttggggttcgaaacaagacaaattgcacttcacaccctttaaaattttcgaattcacgagcatcccctgcaaagtgctattttggttgcacgctgtcccgatagccaaatttcgatggctcattcatgggagtcgagtgtttttgttgcacgttgcccctttaaaatattattttttgttgcgccctgctcaccgaaaattgggttttgggccagagtgcaaccggaacaatatcttaaagggggtcgtctctttttgaattttttggggggggggggagtgaaaagttgataattttatagggggcaaaatgcattttcttctcaaacacagttcaattgtaatttttgttttacggcccaccgttctttagaatttacacaagaggcccactagtttcagtatcttcgattcttggattatcgatgctccggaaaatgtgaaagataggagttgattgcatttagtaccccgctatgttaaaccgaattgctaaatggtccatttttacggggcagtttgctaataaaattgaatcataggttttttgaggttttttgacaattagagaaaaggcgggggtgttaaatgcaataaacactgaaaaatagtgctaaattttttgaagtaatgtacaagcttgcttctttttgcagtctagaaataaatttgaggtgaattaatctttacatacacaaattccgtctttttttttttcgttttcgttaataggtacactattccacaatgcaattgagattaataatcccataaatatataccaactcgaacactgtctttttccatgctttttttttcatttataggtacagtatccacaatgcaattgagattaataatcccataaatatatttaataataattaatcactgcttaatgcagggtggagggtggtgcaataatcttaaatc

SEQ ID NO: 105606 - DNA, 1041 bp, Mimulus guttatus
  Intron number 5 from transcript mgv1a001316m (locus mgv1a0 01316m.g) derived from phytozome v7.0 (chr-ID scaffold_178 ; pos 131806 to 132846 reverse strand)
acagcgatatcttgttactgttagtggcagtgagtttcaaccttttctgtaatatttttcagtaatccttcaaaagtaaaagatacaccggcagttatatggcttaattataagtgggagatatcaccggaataactaaaaatttattagtgcatcacaggaatctcatttgtgcaatagtgaagggtgttatttggttgttattgcaatcttaaattgagtcctcgattggctatgggagcttttacggaataactagaaattaactagtgcatcaccgaaatctcatttctgtaatagctaaaaagtgataattggttgtttattgcaaagcttcaattgagtcctcgattggtagtggggggctcttatgtgtaattttgttacgtaagtataagattcttcaatttataagtgctggaggcattgggaattacggcggtgaatttcaaattgtccaaattcacttaatttctggaccagagtggaaatctgattggattctgtatgtaagattgtgaggatggacataatcccatttatctttctacgttgggctatgtccatttataaatgtggacatttctggaagttaatgctattggttaatatgcaaaatttacttatccgaagggttttgcagtcaataccttttcatggtcaatttagtttcggattcttcttggtggtgggatgagtggaagagcaatctaaaagtcaacaaagtttagaggtgccttggtcaaatttggttgatgattgcatccttcgaagggtaaaagtatttggatagtgaaatttgaactgaattaaagaatccaaagataagtgttcccactggggaaccatctccgacaatgtttccagaacctgactgtcacatgaattttatgatactggtttgacttggatacatttcttagtgatggtgttcgatactctacgttttaaaaaaaaattatattgagtgcatctggttttttagctgaaactaacctaaaagagatcttttgatctttacaggtaaaagagtgctatcag

SEQ ID NO: 105607 - DNA, 582 bp, Mimulus guttatus
  Intron number 1 from transcript mgv1a023100m (locus mgv1a0 23100m.g) derived from phytozome v7.0 (chr-ID scaffold_59; pos 570969 to 571550)
ctgataccatcatcaaagctacctgcacggtataattatacatgcattcttatttaattactgatgattagtgaactcgtttagttttaataattgtaatccttccaaaaaatataacactaggagccattaataatatatatcttaagagattgaagattttgttgtctaaatttcatcaatttaattttaaaatatgatcaaattagtgataccatgcatgcatgaacttataacatagcaaaagtctttttttttttttttttttttttccctttttcttgagaaattagatgctatacctgattatttatactgagtgtatttgaatcatggatttacatataatcacacacacacgaatgtactgtatgtgtagttagtgggtagttattaattaatcaaatatacggtacaaatcaacccggtgtaaataaccaggtgtagcatctaacttcccctctttctttcgtattttcggaaaaatcaatttctaacaaattaactaaattatgtttataacatgtgatcaacaattctttgttagattttgattgccggcgggagtgacacaactacagt

SEQ ID NO: 105608 - DNA, 470 bp, Mimulus guttatus
  Intron number 1 from transcript mgv1a010345m (locus mgv1a0 10345m.g) derived from phytozome v7.0 (chr-ID scaffold_19; pos 1599263 to 1599732 reverse strand)
gctacccctgcccaggtttaattctattttatctttacttttatttgcaatacatagattatctcaagtttgtttttttattttattcttccttccttaattatatgtatatccatgggttttagggttgttgaggcaagaaatgacaataggatgaaacgcataacatatactaatttaccataataataataataaattgaactggtattgtgcttttgctgctggcgatgtggtcttatttagcctataatggaagagtgaaattgtcggttcgaaggtttttttgttttcaatccaagggtgtgcaagtacaaaccccaaacaccctaaaactatggctatgcttaaaatgacttcatgcctccaaggatagttttattttgtttccaggtaaaatacgtaattagttgatatcaatctttttcactttggttggttgaaacaggttgagagatcagtttcataca

SEQ ID NO: 105609 - DNA, 988 bp, Mimulus guttatus; identical to SEQ ID NO: 105040
  Intron number 1 from transcript mgv1a016192m (locus mgv1a0 16197m.g) derived from phytozome v7.0 (chr-ID scaffold_22; pos 1184137 to 1185124)

SEQ ID NO: 105610 - DNA, 511 bp, Mimulus guttatus
  Intron number 2 from transcript mgv1a008191m (locus mgv1a0 08191m.g) derived from phytozome v7.0 (chr-ID scaffold_16; pos 831197 to 831707 reverse strand)
gggccatcgtagcgaatcaacggcggcagctcaatgtaaagtttcttgttcattagtgtttaattgttattaatgctgccttttttgaattgaagtgttattaggttaaaaatgtgttggaaaatgttttttgggggaatttcaggggttaatgacatcaattcaagttttttatattgttgttattattattatgatatatatcgatgaaattggacgatatgcatgtgcgaagactacttacggacggggctccaccgacctcgacaactggctgatttagcggtttcaatatacattatatacaaacatatgatatttagctgttcttgtgtaagagcttattgcattatacgtattaggttttggaaacgttgtttgatttctggtacttagaagcacatcggatcattttattgcgttcggttgttttgtggctttgctaacagttcattgtacttgaactatttttgcagctgttgaaagtgcagaactacaagcagtttcctcg

SEQ ID NO: 105611 - DNA, 698 bp, Mimulus guttatus
  Intron number 1 from transcript mgv1a009883m (locus mgv1a0 09883m.g) derived from phytozome v7.0 (chr-ID scaffold_27; pos 577313 to 578010)
ctctgtcaacactactgttagaacagatcatccaggttaatttttcttttttactgtttttcttttacaattcctagggtttttattatttgtaactgctttaattaataatatgaactgaatgaaaagaagaagaaaaaataattaatttttttggaatgaggggatttttgaaatgtttggtattggaaattcttctgaattttctgagttattgtcatttgtctacatattcattaatagatcaaatcaatcgacattctatatttggagatcgattaatatttaccgattctgattcgaaaaaatttatcgattttggaataatatttttcattcagagttcgattttctccggttttttttggaactgaattagaatatatttgaaattccggtttccgatttccgatacgattcaatctcatattgtgtcaaagactacataaagtttgaatctttgatccattatcaagctaattaattgtgtcattaatatctcatgagttttctcaatataatgtttgattctagcaaacaaaggccaaagtgtactattactcagtgggggtttttagtaattacaaacacacaaggggctttttcgtaatttgacattggtttacgggtttcttgtaatttaccctctcatttttttttcagacataagttacctaaaaaaccttccaaacgcaccc

SEQ ID NO: 105612 - DNA, 541 bp, Mimulus guttatus
  Intron number 1 from transcript mgv1a002587m (locus mgv1a0 02587m.g) derived from phytozome v7.0 (chr-ID scaffold_58; pos 4439 to 4979)
ggaagaagtctccaggtaacaatttaaatcatttcattcatatttattacccatatatcaaaacacacacctacacacactgcagcgttcttgaatttgctgcaaaagttatttctggatcatcatcatcataatcaataattaataataataataataatatataattccccattgaattgttgtttttttcatgaaaaagggttcctttctctttcagttcagttcaccggaattcctgcaattttatattccggttttttttgttttctttttggcactttgttgctaattttagcaaatattcaaacttcatttgtttttttatttcttcaacataaaattcttgatttgtctgccaaaataaaaaaaataaaaaaatgttttttgattgtatgtgtttattattgaagaattccagattggaaaatgatataattaattagaacacgttatatggtggagttttaaattatacatatattatgttaatataataataattaatggtgggcaagtgttgttgtttattatcagaaaa

SEQ ID NO: 105613 - DNA, 726 bp, Mimulus guttatus
  Intron number 1 from transcript mgv1a000047m (locus mgv1a0 00047m.g) derived from phytozome v7.0 (chr-ID scaffold_58; pos 934221 to 934946 reverse strand)
cttccaacggcagcggccttccccataacgacttggtaagatttgtctttaattgagagttattacattatttactgttagttcgattcttggaatatgctgaacttccatgatctgaagtcaagaattagtttttgattgttcttgattgtcgaagttatggtcggatcttatgcgtgagctgtagtacttacttgtgacgagtgttcctaacttttgcttttgtcgttgctagttgttttagctaacaataatgtggagtcgagaagggttcttgccagtgtacttgaggaaaagggatctcgttagatttttcgtattaagttgcagcagtatataatttgttgattgttgtttgtacatgcaatacgagctgatattgaaagtacgattaatcacgctgaagtcggatagctatttcacattttcctgaaattacttcttgaaaccattgaaaacagagggaatttgcttctcaattttttcctggttttatatttcatccaaagagatcgtaagatacagattgacctgtgcgatattttgaaatttatataattctgccacttaatttactgctatcttcagtgacaatctttgctagattgctataattcccagaatttgaatagttatgtgatcatattccatttatatttgtgcatctcgataagtttatgcatttttttttccttatgcaggagagaagcggggaaggtaaacctc

SEQ ID NO: 105614 - DNA, 575 bp, Mimulus guttatus
  Intron number 2 from transcript mgv1a003365m (locus mgv1a0 03365m.g) derived from phytozome v7.0 (chr-ID scaffold_30; pos 1815977 to 1816551 reverse strand)
ttttacctccaactattttatcccagcatcttcaagtaattatttattatttatttatttcattcctttccattattcgatttttcctccgttattttatttagtgtaaattgcacttaaccccctgtggttataagttttagtttttgcagatgaccccttgttgctcgtaatatcagtacataaccctcttgtgatttatgagtaacttcagttaattttttcgtcaaacttaaccgcatgtgtcaaactttatggggtgatcttcaaaaaatgaaagaaaagagaaaagggaagcacaagggctcatctgcaaaaaaaaaattactttgatttttgacactagtagttaaagttgacggaaaaactaacataaactacccatcaaccaccacgaggaggttatgtgctgctattaaaagcgtaaggggtcagtctgcaaaagcttgtaactacaggggttaagtgctatttactcttttatttatttaatatttattatccacttaataattactatgatgattgattgtgttatgtaataataacttaatatcgaccaggagaagaaattc

SEQ ID NO: 105615 - DNA, 744 bp, Mimulus guttatus
  Intron number 1 from transcript mgv1a000916m (locus mgv1a0 00916m.g) derived from phytozome v7.0 (chr-ID scaffold_20; pos 1855511 to 1856254 reverse strand)
ccaacgctttgctgaggaagaatctgatttttcaggcgagtacattttttgagttctgtttgattcagtttttggattgtttgttggtttattttccttttttgttgtatttttcccttgaaaaatttatgaattatttgaggatttaaggtttgatttaccgtggaaatggcatttgtaaatgatgtatgggctgcacttaattaaattctatgtaatttgaacttttgttgtttttttgattaaattatttatttcattttatttaactctggtaaaagtcaattaactctgatttcttgagtcgaactgtgtaaacatacaatttcgtgatcactgtaaatgcatgatggattggatattttgtacatctgctgcgtcaatgcgcgatgcctcaatctgtattttaggttatttttcggaataaattttgtgattttcagtgattttttggaaaatgtgtgtttttttcttctttcaaaatggatgatatgatctacggaatccaaagtgtctcgttaacagaaaatatatttcaaaatttagatgtcatttgatcgaagctgttatgaattagatacatgttagtattggagtggggtaataacgattgtaaaatgttgttttatatataggaatgaaaataattggatgacgtaaatatttattgtatttagtctataataatgtcattctaaactaggtttcgttttcatggtttccttttgacggcagaaacgtaat

SEQ ID NO: 105616 - DNA, 695 bp, Mimulus guttatus
  Intron number 3 from transcript mgv1a021817m (locus mgv1a0 21817m.g) derived from phytozome v7.0 (chr-ID scaffold_37; pos 651000 to 651694)
tgcgttgaacaataatttattgaaatttttgactaacgattgaagttttttagagaagaaagatgcaatgacgaggtacatatataactgttaatgtgaaggaggtagctagctagactgcaatgtgttaaaatatattatttttaagtatttacataagaaagaaagagcaaaattatcttccaaaattactatttcttttagaaaatattatagaaagattaaaactactagacaatgagttagctaaacgacattgaatttttaaaggaggtttctataatattttaaaatacaaggggcgtacatgtaatttgacataatttcacgggcggacgatttactcaataatttctccccccaaaaactcttaaattattccgatatttcagcccacaagaaacgcccgtgggtccgccattgtctatatgtacaacatagcagagagcttgccgttggtattcctactgtgtacaagcacgaacaaaataaatgtgatttctcatgtgtcaagtattaaatgccactgtacaaataaatattcccattgtattttttttttgtttttttttttttttttctcttgaaaggatagttatgttggttaatattatcaatttactaatgaaaggatagttatcttaactatgaaatgattattggatttttacattttgttttgtgtaacaaattag

SEQ ID NO: 105617 - DNA, 1026 bp, Mimulus guttatus
  Intron number 1 from transcript mgv1a006826m (locus mgv1a0 06826m.g) derived from phytozome v7.0 (chr-ID scaffold_18; pos 818565 to 819590)
gttatctgcagtcgtgctttgctcaatctggggaggtaatatgaattgtctttctttctttctttcttcagtttgtttgttttaattttgtgtgtatattgtgatttttagtatgctataagtttacggaagtgaattatctgttttttatgaagaattgtggtgatctgtctgcttttaatctatttttgaaggttgtgttttgatctgtaaaaaaccaaattaggaaattttagatgtcaatttgaccggtgacttgaaggtgtttgatgaaatgccggatttagttgagatactagttttagaaagtttagaactgaatttagaccaattaatattcgaacaatagtcgtgtgaatccgtttttgtacgtctataaagtaactatatgtatgcatcgaaggatggccagttaaagactaacctaaactaacacatcttaatgtaatattgaaagacacatgctcttaatttctgtaagggatttaaatgtaaacatatagtaaaggtgtatgtttgaaaagggaaatattatatatttagtatatttgcatatttgaaacaggacaagactatagatgcaattaatgtgctaacatgatatacgagcaatgattttgaactctcgagatttattaaatcggaattggcaagtttcggtaaggatcttttttatgaattcatggcacttaagggctggttcgttttgtgtacacttgataatagtaacatgacatgattgatctgtcgttttgaaaatgcattcctggttgtgtaagaataatttgtaatatttgaaatatctaatcttgcagcgattaattctgtattaacacgatcttgatgaagaactatgttatgcttagggctggcaatatggggtgtttgttaatgtatcataaatgtacaaaatgaagtttagtgttataacttatacagcagttgtattttttacttgtatgttaatcacttctctaatccaaacaaacaggtcgtttcagtcaagataatccgcaacaagcagac

SEQ ID NO: 105618 - DNA, 415 bp, Mimulus guttatus
  Intron number 1 from transcript mgv1a010135m (locus mgv1a0 10135m.g) derived from phytozome v7.0 (chr-ID scaffold_89; pos 69234 to 69648)
ttcaccctcggaatcaacttcttcgacacttctccgtaaactcaattcaattcttctttatcttttcctccattttagctgttggtttgttttagcccagtgctgaatcgtctcaatcaatgtggatattttttttgttgatttaatgattattagggtttttttttgccccttttatgtgtgtgtgtgtgtgtgtgtgtgtgtgtgtgtgttgatcttaatttttggtagtgagatttctcaatttgtcccttcttctatttgatctattaattaattttgttgacgttgtagatctctgcatattttgattttgttgtagtagaactattgttagtcaatttctgttgggattttcaaaaaatgtgatcaaattctgatatttcttattatacttattggatattcaggtatt

SEQ ID NO: 105619 - DNA, 991 bp, Mimulus guttatus
  Intron number 2 from transcript mgv1a017049m (locus mgv1a0 17049m.g) derived from phytozome v7.0 (chr-ID scaffold_113 ; pos 656128 to 657118)
aaaacaagcgtcaagattattcacgctaggtttgatttctgattttttcttttatttattttatgtatttttttttataattggcatataattttatttttgctgtatgtgatgtgttcaattttttcaagggtgatgtcattttcttgtatatttggttgtgtgctggttggtaacatagtaatttcatgcacaagtagaccgtgtttgggatgccgattttgtatatgattcggcttagctagcgtatgttgatgaagaatcgtgtgttctataagcatacacttttgcataatctgctctttttcacgattgagcgaaaaaaaaaagaaagaaagaaagaaagaagggttgtgtaattggatcatacgaaaagtgatcccgaataattttttttaaaaaacagcttgcagtttagacagattttcgttttaatgattctagttatcaataagaacatgctccatatattatagtttaatcaccttttactaattatcttaggcctcgtttgcttggggagattagccataattaactggactttgtttgatgtttggtatccccactaatttatcgggtcgacccacaaatattatgttactgtggtttatcttgcctttagggagcattcttgttggacgtcccggggtccgataaaaataattgggttttcattagattatttgatcttatcttggctaatgttatcttggcaaccaaacgaggccttagtctagttgtaatgacatatttaggtttccatataatatgtaaccattgtccaatattcactcgctttaccattttgtgtatgattttcgcagcaatatctttatcgttatctatattactatttttcacttatatgatcgatcacttttcttatagatgaataaatagagttttattaatctttggttttgtaattttactcggaaaaaaaaaaaaatcaggttgcacgcacaagcactgactcttgctgcattag

SEQ ID NO: 105620 - DNA, 396 bp, Mimulus guttatus
  Intron number 4 from transcript mgv1a008489m (locus mgv1a0 08489m.g) derived from phytozome v7.0 (chr-ID scaffold_18; pos 2263459 to 2263854 reverse strand)
aagttgggttcagagatatattcaaaaaggtcaaggtaagaacatatggctaactctccttgatggataagtagattattaccacaaagaaatttcatccatgttaagatttgagaataagttatgccgtgtttatatatctttatgtctatctacctatccaaatttatcgctgtgggaggtgcagtagccagaatgctttctccctctcttctgtatgttcaccttctctacaactccaaattttagctcatatggaacaaaagcctgtaacatctatatcagtttattgttcttctgagtcccttgttccctttcttgtttgatcatttttcgcaaggggagaaacaagagcatagttttacgcctaagtgattgttttgattgtgtgacagg

SEQ ID NO: 105621 - DNA, 526 bp, Mimulus guttatus
  Intron number 2 from transcript mgv1a022559m (locus mgv1a0 22559m.g) derived from phytozome v7.0 (chr-ID scaffold_17; pos 2245653 to 2246178)
agtcaaaccctattgaagttcttgaggtatggtattcatttttatttcatttatttatttatcataattatgtctttatcagtcgtaatcgaagatactctgtttgttttaaattatttgtcattttaaagattctataaacgaagaaaaaatagtttgaaattaaacgagggagtaattagattttaattgcgaattgaggtctgcaaatcacgacgtacgtggtccaatttaacccaaccaaatatgtggttttttagtatactatatattatgataatttgattagtttattgaatttttgtactgttaattatcaacagttgtgaatacttaatctgatactttgcacacacacatggcattataattaataatacagtatccagtaactgtttgatttaaaaaaaaaaaaaaaaaaaaaaattgggtatttttttgaagtatgattggtcattaattaaattatatctgagaaaaataattaaaaaataataaattgaaatggcagttgagtatatccagc

SEQ ID NO: 105622 - DNA, 628 bp, Mimulus guttatus
  Intron number 2 from transcript mgv1a014311m (locus mgv1a0 14311m.g) derived from phytozome v7.0 (chr-ID scaffold_68; pos 171148 to 171775 reverse strand)
tttacggtggtagcaaagaggcttctgcttctgtcgtaagtattcatacctaaacttaactcgtctttttaagattatgcaagatgtttttagtaattttattctaatcaggccaattataaggatttgagatgctttttatttttattttttattttttattctgttgaacaaatgaatgtttatcgcctcttatccatgctggtgttccataacaatactcatgaccatgtttcctctggattaaggtgattgtttgatatcaccttttgagctttgatttttagaaggtttgcaaaatcgagcattccacgttccattaatctgacagtgatatgtgtaatagctgagaaaagctaagaagactgtaacacatgataatatactgacacatgattttgctcataagggggttgctcataacgaacacatgattttgcctacttttaatatatatatatatatatatatatatatatatatatatatatatatatatattttggtttcgtggatatgacaaactttttgatattcgggatcttcttagtggatgttatctaataccaaatgttcgtgaaagactttgttgagggagaaatctttatatctttattacagagcaagg

SEQ ID NO: 105623 - DNA, 683 bp, Mimulus guttatus
  Intron number 1 from transcript mgv1a014311m (locus mgv1a0 14311m.g) derived from phytozome v7.0 (chr-ID scaffold_68; pos 171811 to 172493 reverse strand)
aagcgcctgaaaaacaagaagaaacagtcaattatgtaagtcagagtatgtatgtaattcaccatatccaggatgcatacgttttttttttgtgcattgtgtttgagtgatctgaaaattatggtgcttcatgtattttatctcgattgatctggaattttctgtggaattttctctttcttgttaaatactgtgaattggttttttttttttttttttttctttttttgtttgttcttgctattttgaaatatgctattagaatggaaagattaagtctaagctcactctttgattcttttagtatggttaaatgactgttaattgttactctaaatgttagtctaaggcctcgtttggttggggtgattagccatgattaactaaaaaatgagactttgtttgatgtttggtatctccgattacttgctgggtcgacccgcaaatattatgttatcgtgctttatcttgccttttaggcatgtttcggatcttccaaggtccaataatacaattggggttcattagattatttaattttatcttggctaatcttatcttggcaaccaaacgaggcctaagatgatatgcacaaatctggcagtaatttgtctaggattgatagattaaattcgttttgtacgacagaggaccaaaaaattggctgggactgtcaattgggg

SEQ ID NO: 105624 - DNA, 424 bp, Mimulus guttatus
  Intron number 2 from transcript mgv1a007105m (locus mgv1a0 07105m.g) derived from phytozome v7.0 (chr-ID scaffold_98; pos 197263 to 197686 reverse strand)
tttgacctaccatctgtttctttgccttagccctggcaagtttcttctttccgattttttggctcgtttttttgatttcttggaatgaatctatggctgttttagattcgaagtccgtgttttttgttaacgcagacatcgagtaaattggttaattcggttatttctcgttcgtgcttccttcagtgaaagttgtgtgtgttttcgaaattaatttatcttccttggaaaaaattgcatgcttaatcttgaattaaggttgtcggttacttttgaatcttgattatggtataatcaagatttcatatgattatattttgaatttatcttattttaatcaaagtctataaatattaacttaaaactcaaaatatgctacactgttgcagctttacttgtagagaccggtaaattccttctctcc

SEQ ID NO: 105625 - DNA, 762 bp, Mimulus guttatus
  Intron number 2 from transcript mgv1a003205m (locus mgv1a0 03205m.g) derived from phytozome v7.0 (chr-ID scaffold_195 ; pos 86955 to 87716)
cgtgttccacttgcgaacagtgcggcaaacatcaggtttcttaaattttgatggtttatttattaacttttttcttctgtgattgaacaatgcaattaggtttgttgttgatctatgtttgacttttctcgtcttgaattttgattggatatgtattgatttgggtgaattgaatagtgaaagtgcacatttaaggaatagttgagaagaagatttccccattttcggtttggttatatgataatttcgatctgttgggacaattgcaaaacgaccgatatgtccgtctcttgcaagacactattttgaaatctgtttttttaactgggaaagaatgtccgaatagtatgaaagagcgacgcataacgaaacaggaaaaaactacaatgaagttaccactaatttatactgttattggcttttcgggaagagaaaggaggaaacctttatgtagtttttcttcactaaattgggaaagaattggattttatatgtgaaattgaatttttggaccttaaagtgttgctttacttttattgttccttcccttttgagtaatctttctgggtaaggactcgcgtctcttcatttgacatcagcaccattggtagcaactaataataattttagttcttcgaatacatgtaaacggtgtattatcaagtcccttgtgttgtgtttttcagtttctttgcatgatttaatttcaaatttttcttccaaataggacccaaagtttcaaccagacttgtcaagcaccta

SEQ ID NO: 105626 - DNA, 800 bp, Mimulus guttatus
  Intron number 1 from transcript mgv11b023208m (locus mgv11 b023208m.g) derived from phytozome v7.0 (chr-ID scaffold_1 67; pos 340298 to 341097)
taacacgttggggttatttagctacaatgttcacataagcaataactgtaaatgtatccgaagaatccaaagaacagctaggaaatattcacgtacctataagggctagctagctatatcaaagctattatgttggagttgagttgtctgctactccgttcaatatctgcataccccgaaatattttgcgcccataacacacaagcatttgtggctcccgttctgcccgtccagtcccctgaattggccatttaacatttgtgacgaagatgaagaacacaaagaaatttcttaaaaataaataggttttttcttagcttgtggctattgctaaagctccaggaatgtcgaattagtcatgtatattttggaggtttcattcatttgtagcatgatgaaaataacaggggaataggctttattaatcattatttgtcgaatcttttcgttggtattgtatatcatgttgaatgttctgatgtactcttatttcatcttttatggtatgataagaatatgaaatcatctaacaagattataaaggtccatgtttgttcattaattcataaaacctttcttgttgatgttgtgtatcattaccctatgctttgttaatgatttatttcatttgaaatgaggtgttattaattttatggtgttatcagataagtgccattatcaatcctcgaggagcttataaggcaccgaggttcaccactatatctgcactctcggcatattctggcaaatattaaattgtaacagtagtagactcgttggctggtggcggggcaaatcca

SEQ ID NO: 105627 - DNA, 525 bp, Mimulus guttatus
  Intron number 2 from transcript mgv1a015555m (locus mgv1a0 15555m.g) derived from phytozome v7.0 (chr-ID scaffold_45; pos 1022060 to 1022584)
tatataggaaacgcagcgtcttctgagcgaaccaggtaagcctttcaattaagttatgattccgacgaattaaatctaatgaaaatctcaattgtatttctaatatgcagttttcgttaattgttctttctgttgtttctgtgttctttccgatttttttcactccattgacttgaaaatgaagcttgccggttcagaattttatgcgttttatttgcggaaattgatctctagtgcatcgtgataaaatatcgaatttgtgaattttgttcctattgaagttttcagttttaactattactctggttttaaatatcgagaaaggtgttactggtttctgatcatgatcatttgatttgatcaactagttactctgatcattttgcccgtttcttctgatcagagtgtgaatttacagttgagttattttaggttttggtgaatcattattagagtttgactgtgtgtttgtttggatgtgtggatacagcaccaggaataagtgcatctccgtcagaagaaaat

SEQ ID NO: 105628 - DNA, 708 bp, Mimulus guttatus
  Intron number 2 from transcript mgv1a007803m (locus mgv1a0 07803m.g) derived from phytozome v7.0 (chr-ID scaffold_52; pos 1386627 to 1387334)
tttctccgggtcgattcgacgagcgggttttcagggtaagagaagtttcgggtttttttttgttacaagagagtgtttgtaagagaagtttttttttttttactatgattggtttcttgatgtagtttgattttagatgagggagtgtttcagagtacgagaagtttcgtttttttttttttttgctgtgattgggttttgatgtagtttgattcgatggtagtgtaagttcttgatatcgtgagagcgtatttcttgattctaattttttttgaccaattagaagaaaatgtaggtttagttgaagtatagaaagaaatacgtaatctgcaatttgtcgatcattatgtagaagttcttgatatcgtgagagtgtatttcttgattctaatttttttgaccaattagaagaaaatttaggtttagttgaagtatataaagaaatacataatctgcaattttgtcgatcattatgtcgaagttcttgatatcacgcgggtgcgtttcttgattcttatcttgaagttcttgatataatgagagtgtgtttcttcattcgtttttctctaattttttgcaatacacttcttgttgacaacttttcttacatcgtacatcattgtcatttgtcacatttgcctcttttttttcttttttttggataacccgattaaaaattattacatgtgcaattgtaggcgttggatc

SEQ ID NO: 105629 - DNA, 817 bp, Mimulus guttatus
  Intron number 1 from transcript mgv1a012843m (locus mgv1a0 12843m.g) derived from phytozome v7.0 (chr-ID scaffold_26; pos 116395 to 117211 reverse strand)
gatctatattggaaccctcagccgcccatccaaaagtgagcccctatctcaattatttttatttcatttatcatcattgtttaaattggttagaacccctgcgcgtgtgcgcgtgtgcgatgcgtgtgattgtgtgtttctgttagtttatcttctcttccttctgtatgtaagagatttgtctccaatatttagggatttcagcttctgttctctgtttggaattcaaaatacctgaggggaaaattagaaaattaataaaaaaaaaaaaaaacctttttttttgttttcattttaattttattttgtgaaaaaaaattattttgtgaaattttatacaaaatgtggagtagaatgattggtcaagaggggcgttttggccgtttcgccagccgtctctagagcttttttactttttcgatatcgttaaatttgatacattatcacttaatcaatagtagtgtgattcttctacataatgatgttcaaaacaatgatcataaaaataaatatattatttcgataagaaacatattgctagttgtaattagacttaattttataaaacggaatattaaggataaccgttagtatcgggaatcatgtgtgaatctatttgagcttaacttgtttgaagtccaaatatattgtgttgatgtaggaaatctattacctctgcattttgtcgtatatttttactagctttcggtttgtgaatggaattatccgggcaaatttacattacgagtaaaattttctgcaagagtggttctaataagaccaactattttttgttgcagtggtggtgtgacaattg

SEQ ID NO: 105630 - DNA, 711 bp, Mimulus guttatus
  Intron number 2 from transcript mgv1a016695m (locus mgv1a0 16695m.g) derived from phytozome v7.0 (chr-ID scaffold_32; pos 437055 to 437765)
gccttaaacaatttcgtgtttacgtatgtacttctttattttctttaaaaagctaagatatacagcatattttggtatttcgatggtaaatttatgacttaaggaacaagtttggccgtacaatctgagtctgcttttaccgtttctttagatgtttagaaattcacgtttaaagcctcattatcgtgtcatgtaatcttgtaattaaaatggtgttgcagaggagatttaggtatctattgttctatgtcgagattaacctcggaatctaatgtaacatgttagggtagcatgaagaacagcaaagcacttgcggaaactgttttcagtggtctataactctatatgtcttagccaccttttagtattttatcttctcggatagtaacaatagatctctaaatcttaatatatcaaaactaaaacgggttttcaagaacttggtgtacttatatctatgttagttgtaagacctctgatcgggagattatgctttctttcagtgaaagtactcttttactaagactaagacgatcgatagtgttttcacgtacataatttgtatttatcttttcgtgtgaagtttaagatttgccacaagctacgctgcatcttttcttttctttttttctcctcgattttaaacagtagcttaagacagttgaatatttgtgatgcccttgttcattttatggtttgtgattgtgcagg

SEQ ID NO: 105631 - DNA, 747 bp, Mimulus guttatus
  Intron number 4 from transcript mgv1a010067m (locus mgv1a0 10067m.g) derived from phytozome v7.0 (chr-ID scaffold_13; pos 733229 to 733975)
tggtattgatactgaaggaacagttgctctattaggtaaaatttatttattttatatttaattgcgattatttgtattgatattttgttaatttttcgtgtagtgatgtatacgtaacgccacgaagacaaatttttttttcttctttgaattggtaaatagaattttggtttcaccgctatatgaactgttaatggctcgtttggctggtaagattaatcacgattacttaaataattggactttattgaatgtttgatgaattcaattacattttgtgttggccatagattatgaaaattattatgatggctaattggtcgtttggtaaaacttgctttaaacagctgataagcccttacatttgataagttgttttaaaagctgataagttgttacgtttatttttagaattaatttctgaagtgcttggacaatgagcttataaactatttttactcatgttaagattttaaataaaaagttagggtagatgtatttaaaaaaaacttatttgctctcaataagcttattttgtgattttttttacatcttattaaaaaaattgtcgaacactttggaggagcttataagctcttaaatattttataagttctttgtaacaacttataagcttaagcaaataccctctaactttaccttagaaactaaagaaataataactctttgattcaaccatgaactatttcaggtgcgcattcagtcggacgagttcactgcagaaac

SEQ ID NO: 105632 - DNA, 490 bp, Mimulus guttatus
  Intron number 1 from transcript mgv1a002429m (locus mgv1a0 02429m.g) derived from phytozome v7.0 (chr-ID scaffold_45; pos 773806 to 774295 reverse strand)
tttctccagagatttttttttcgggatcgaattcagtaagacccacccaccatttttgctttttcctgcattttcccatcttctcaacttttttttttctcgaattaatggggcttctgatcagctatttgatatgggtttttactgtaattgctttgctttcgctcggaattcttcaattttgctcaattttcttccgtttctgtactccgttcttccatttttctctgtcaattattccagtcagatgaacttactatacttcttttttaatcaacttgtatatatatacaactagggttcttaaatttctgaatttgatatacccccaattttgttttcccctcacccatccccttttcttttttttcaattttaattttgattcagtaattacggaaaacccacccctttttttgttatcagcaaaacccaccatttgatgcaattttgaaaaatgcagatcaattgctctcttcatctgtactaa

SEQ ID NO: 105633 - DNA, 601 bp, Mimulus guttatus
  Intron number 1 from transcript mgv1a002276m (locus mgv1a0 02276m.g) derived from phytozome v7.0 (chr-ID scaffold_52; pos 1401507 to 1402107)
cacgaaaagccgatacgttcgaaaaattggacaaggtattgttgaattcgttgcaaaattgtgtgtggtatttgtttttcggtaatgaaattgaatttcatgatcatggatgtcataatctgttaaccgagtttgacttatgttggttttttttttggcccccaatggaaatgagtttagtatttttttttccgagttcttcaggaaaccatatcaacgaagtaattggattaatatctatgatttggtttagttgatatctcgttttcttgaaaacaaattcagttcgtaagaaaggctctttattgtagaatcttcttcatcaatcataggtaacaaacagttggtgtgaatcatgctctttgtgaaacagtcgtaaagagactattgaaagtattcttcttactgtgagaaacatttatcaatatcgaacattaggtttcagatagtcaaaatatttatcaacattgaccattgacattcagctcccctttcctcgagacattttgtgtatttcaggacttgtggtagttttttaaccatgatttttttttttattattgcagattggccaaggaacttacagtagcgtgtacaaggg

SEQ ID NO: 105634 - DNA, 818 bp, Mimulus guttatus
  Intron number 1 from transcript mgv1a000248m (locus mgv1a0 00248m.g) derived from phytozome v7.0 (chr-ID scaffold_20; pos 519834 to 520651)
ggatcggttgctcgagatctctgagagggtctacggtacgcctttttttttcagctactgttcttgttcaattacagctttaattcttcagtattggtagtatctgaattgtagagtctttactctctaaattcgacttgcattggagttttaatcgaacccccggcagttttcggggttaactatccccaaattgtgtgaacttcgagctcaactttgcttgaattcgggctaggtctttaactgattcgcggatatttggaggcattttgtgaacaatttatagaaagactggaaatccgtttataattttagtttccacaagtgaaaagagctgctggatgctgtagagtttagcaattgttttgccgttcttaaactttgttatcattgaagctgaatttatatattaacgtgaaattacggtgtcatgaggttcaaaatgtagtgttggattatttagctgcctgaaactgttggattacatcgcttgatgacatttcatcgacttactgtttttttctccctcgagtacggtggaatatagttgcgataccagaatggcatccaggtttcttgggtttgccgtataaatgctcattttctgattcctcccaatattttctttgtttgcgctgcaaataaaatttaataagattaacgaggtatttatttacgcattgctagtttagttttcaaaaaaaatctcatattgttcaaaagatgtaattttcagattgcttgttgcactatgatgtcatttgatttaatttgatttctgcttctatatctagtgtttgattgctgcttctccaccg

SEQ ID NO: 105635 - DNA, 394 bp, Mimulus guttatus
  Intron number 4 from transcript mgv1a012318m (locus mgv1a0 12318m.g) derived from phytozome v7.0 (chr-ID scaffold_41; pos 575360 to 575753 reverse strand)
acatacgaggtagggaattttccccagtgttattcgggtttctatagattttgtttcgattttggtttgtgttgtcatatttaactgtaagtagtgaaaaaattagtacaatatatattggctaggcaacaaaacgatgttcgagaatggacaatgactataatgccattagagatatatttagtgtaaaacttaattaagtaatttgtaaaaaaatgatttccagaggacataacgaaatggttcaaaagatgcccattgtcatatgttttcattccctaacgactgcagagtatttactcggagaagacgaactatttgaatttaaggttaatttattcatgtttttgtgtatgtaggaacttctcgatttaggcgaggcagtgggaaccga

SEQ ID NO: 105636 - DNA, 214 bp, Mimulus guttatus
  Intron number 3 from transcript mgv1a012318m (locus mgv1a0 12318m.g) derived from phytozome v7.0 (chr-ID scaffold_41; pos 575777 to 575990 reverse strand)
ctgatagtactcaggtttggcatttttttttttcgattctatttgacagctggcttacctcctttgagaactttctttcatttttcatccggattgcatgttagctcatcttcttgcataaatgaattacaggggctacaaagttgttattaatattattattatttttttgaatttttcgtttggtttgtgttattgtaggtcttgtgggaag

SEQ ID NO: 105637 - DNA, 593 bp, Mimulus guttatus
  Intron number 1 from transcript mgv1a000534m (locus mgv1a0 00534m.g) derived from phytozome v7.0 (chr-ID scaffold_113 ; pos 591909 to 592501 reverse strand)
gcattgcagagttcttctaacagggtagataatcttttttatttatttattaatttctgctttatcccgtgtacagtttaattgtcattttgttcttggtcgaaggttgactctcttgtttcaatggcaggttctttcttgggtagtaagtttgtataaattcaaattatatgttttgaattccttattggacttcttctgtagaactatgtttgaagttttggtctacatgtgtgctaatcaatcatatgtctaatgttctttctttaaaaaaataaccgcatgtcaagtgttcgacgaattgcttcttgcattcatatttattacttcgttgttggagaaagttttgagtagttgtgaaagaaaaggcataatgttttttctgtgcacggtttttctcggctgttttagttactttgtgtcgcatgtatgataattgttttaaaagattaaacctgttgtgctttaggggtttcattacgagctacaaattgtcgatttttttttttgccccccttatggtggaaacatctaatatggtttctcttatttgatcaggctctgtcgctgaaaaattgctcatcgtttaggaa

SEQ ID NO: 105638 - DNA, 816 bp, Mimulus guttatus
  Intron number 1 from transcript mgv1a025065m (locus mgv1a0 25065m.g) derived from phytozome v7.0 (chr-ID scaffold_607 ; pos 1479 to 2294)
cctaactctaaacaaaaagaattgggagtgtggaagttcctaatgatagatattagtgtgtgtatttataatttaactaaattttagggcaaattgcactttgcccccttaagaaagttgttttgcacttttcccctcaaaatacaaaaaacgagactatcctccttcgaaatatacaactcggtgcactttgcccccaaatgtgtattcccagtctcattctcacttaattaagggtgtatatgtcattttacttttttcgcttgaaaatccttctttaagagttacttagtgttttcaaattaacgaaattatcttcccaaattgatgaaattctcatccaaattagacgaaattttcttccttaattcgacaaaatttgttctttgatctgcataatcattgtaatatagaagaaaaaatgataaatgacatttaaatctttaaaagacgaaattacccttccagtttactcaaatccgacaagaagtaaattggaaatacacatttgggacaaagtgcaccgagtcgtatatttcgaaggaggacagtctcgtttttgtattttgagggtggaaagtgcaaaaaaaacattcttttagggagtgaaatgcaatttgccctaaattttatataaagtattaatattcaaattttataccgttagcctatcatctggttctttcatgtctaagtgcccaaacccctcaattccagaaaacttgaaccttgcaatacgtttcttgtcgcagcaattccgccaccaccgcaacaatttcagaggcaagaattcgccaccatcggagctgttcaaac

SEQ ID NO: 105639 - DNA, 804 bp, Mimulus guttatus
  Intron number 1 from transcript mgv1a019263m (locus mgv1a0 19263m.g) derived from phytozome v7.0 (chr-ID scaffold_212 ; pos 328341 to 329144 reverse strand)
acgagttcgttatcgggcaggagaaggcaaagaaggtttgcctgttcttgctgaatttatgtttaaaacgcgtttgaatccaaatttctgcaatattagtttctgctagacggtgcttctatggatcgaagtgtgccattaagttgttgagtatgtcggtgtagttctgtgccgactatgtgccgattatgtgcatgaattttattaattgctgattgctgatttcatacgtagaatgatcaattgagtcgttataattataattatagtattttagctatgcttcttttctacaccaaagttggcattctgaacatacaaaacttttcgctgtaaattttatgtattcccgttttcttatagaatccgtcaactttcagtgaataatatatctaaaacttgtttggacaatgtccccttggaaatgccgaatattaggagatcaaaatgtaatatgtgtgtttttacattttaccctgattttagctatgattcttttctacattaaagttgactttccgaacatacaaaattcaaaattttctctccagttctctttacaaatataaatgaagtttggggttttagtttgggtagttgttgtgggctttatccaattgaattcatttaattggagatggctgtgatatgatccaaattatcctgaacagatgtgctaattggcgatccttgttttcaacttcctcacctgaacttcggtgatggatgtatcaaaattttgagctaaatgactttattcatgtaacaggtgctttctgttgctgtttacaaccactacaaaag

SEQ ID NO: 105640 - DNA, 505 bp, Mimulus guttatus
  Intron number 1 from transcript mgv1a010844m (locus mgv1a0 10844m.g) derived from phytozome v7.0 (chr-ID scaffold_1; pos 2410679 to 2411183 reverse strand)
aagcattcatttgctgtatttgccggtaatttcatttccctccgcgtaggattccttctttttataaaattaattataattatgcgcagatttgttcgcctggaagacgatgaattttgtgtatctgtttattgctttaataatttcatgttaatttgtatttgctcaaggcgttctgttatgttatgttagaaatttgaggtttaattttggcgtatcaatactgttattgttcatatttatgttgtttcagagaaaatttgtgcgcctactgttagagctcgattaagaagttgattttgcattggtttttgcaagttttgaagatttttagattgtcattcagttgttcatagctagttttagaatcatagacttacatatagttgccggcgctgtatattttatttttcgaatgtgaagttttgagcgaataagcttttttgataattctgcttccgtttttgcagagatctcctttacaagcctgttgtgttaggtaagg

SEQ ID NO: 105641 - DNA, 769 bp, Mimulus guttatus
  Intron number 1 from transcript mgv1a012297m (locus mgv1a0 12297m.g) derived from phytozome v7.0 (chr-ID scaffold_102 ; pos 601057 to 601825 reverse strand)
ggcctcctcgttcgcaacatatctctcaccgctaggttatttccttttcaaaataaaacgctttatcatctaacagtcgattattgtaaattacgtggaagaaaaatgaaggaaaaaggtctaccgaacaaaagttgtattaatgtgttagaaattttaagcatatgtggtgttgaaatgtggttaaatactgatgggattcttgcaatttatgtatcttattggaattgagctcggtagagtgcactagtttgtaattcctgtgcgtattttgcatacatccacgggcatttgtatgtgaatacgttgagtatgtggtgagatttaccttatgtaattcaccgatgaagtgtgatgagatcgggttgtaatgaggagtttgatgttagcataatgtcaattctgaagggcatgaatttgtctacaatgtttttgaaggcctacattctttagttttttcatcctttcagaatagtaatttattgattttaagtccctagattcagatttctgattgatcgtctggatttagaggtgcgtggccaaatgtaataagtcgtgaaattacaaagtcactatagattcttgagcatgttgatcaaatagcaattttgtaacaagttgccagtacttctgaagccaaaaatttcctatttgtctgcccatccgctttgattttggtgctaaatttgtatttatggtgctgttttattgatgattatgtacttgttttgaaggccggaagacttgagggctccttttgaaaaat

SEQ ID NO: 105642 - DNA, 291 bp, Mimulus guttatus
  Intron number 3 from transcript mgv1a009988m (locus mgv1a0 09988m.g) derived from phytozome v7.0 (chr-ID scaffold_1; pos 4469446 to 4469736)
aatattcaagacatttttagttcgtaagttcccttattagcttatgttaatttgtattaatacgtgttctgttattttttccaaactatcagtcagtgtaaagtccttgaagtgtgaagaatttttcgtaagattgagcttcagaactgatagctttagtttattaagctaaggtgttctctttgatatgtgcgagtgtttgttgattgtgaaattgaaaccccatccacgacactataaattactttgctgataaagaaatctatttccagtttcttcggtggcggttcg

SEQ ID NO: 105643 - DNA, 868 bp, Mimulus guttatus
  Intron number 1 from transcript mgv1a009536m (locus mgv1a0 09536m.g) derived from phytozome v7.0 (chr-ID scaffold_249 ; pos 89284 to 90151)
cctggaccgatctcgactactgcacatcgcgtcaggtttctctctctcaattttaattttttttttaaattccaattttttatttggttggatcaaatttaattaggaaattcgatttagattcgatttggataattttatttatttatttgaataattcttagaaatcaagcacgtgttagaattttcttgtgaatgactgatattctagcataacttaaggcaatgaaacttattacctatgaaatctacttttgttgttgatcgaagatcgtacgtgttccgaattcttgattttcgatgtaatgttactatatatactttagggtgcattgaaaacaaaattgccgtaaaaagcactagaaaaatcgataacaacgaatcgtcatattcaattcttagctttgttcaatgtgaaacgaccccgttatcaagtttcggcggcctttttaattttctagcattcactagctttacttcatgtctcggaaactcgtattaccatgtctagtacttatgtggtgactacatttacgagctaaacgaattgaagtagttagtggagtaaatgcgaaaaaacgtactcaaagaacctctagagtatattccatattgcccaaacaaaccacaaaaaaaaaaaaagatcgtattatttcccatcacgagtcgtgtatctccatgcttaaaagtatttatttcaaccgacgaaaaatatccgattgcgattctacgtaatccattagagcccacaagggtatctagatttttttttcacctctactaattgcgaaatttgatttcttgagcatgatcataatcttggatgttgcttccgatttacgcaacggctttcttgaatgggacagaa

SEQ ID NO: 105644 - DNA, 976 bp, Mimulus guttatus
  Intron number 2 from transcript mgv1a018414m (locus mgv1a0 18414m.g) derived from phytozome v7.0 (chr-ID scaffold_101 ; pos 72790 to 73765)
ctgctggtaattcttttttttttttttttttttaactttaatttaattattattatttgtcgaaaatcgaaaaatcgaaaaatattgacttttacgaacttctaaatggaattggaaatcccacaatctaagggttataatttatccttgttatgtattgcatatatcatatttaagaagatatatgttatggtgtttaactttaattagataaaaaaattaaaaataaaaataaataaataagtaaacattgaatttgctacttcataaaccctcgttagggaaattttatttcgcatatcatctgtcatttttaaaacttaaaatttgtccgtcgttagaaatctatgtttaaacgacacatttaaataagtattattcaccgaaattcaaatcgtgttcttcactactttctattacgatctgtaacgacaatttgaatttttaataataaaacaaaacattgagtttgctaaatataacttcataaaccctcgttagagattttctattcactatattatctgtccttttaaacttttaaatttatccgtcgttagaaatctatgtttaatttgtttgccgaaaccttaaatgacatgaatttcgagtattattcaccgaaattcggatcgtgttcttcactacttttttttttccaataaccacatttgaatattaaataaaaaagattaaaaaaaaatttaacatcttattttttatgcattattacagtagaacctctataaattaataacctcgtttaagtaataatttcttctggtcccgactcggtaaaaacgtattaaattattagttcaacaatttaatatctcgctaaattaatagaatttcgttagacccaactgtattaatttatagaagtttaactgtatttaattttctccgtaataatatatttaaattttcgtttcgtataggaggtgcctgatctccaaagagccgacgcagcaaa

SEQ ID NO: 105645 - DNA, 508 bp, Mimulus guttatus
  Intron number 2 from transcript mgv1a001127m (locus mgv1a0 01127m.g) derived from phytozome v7.0 (chr-ID scaffold_479 ; pos 45577 to 46084)
tttggctgcagacactcaagttagtatagtgaagaactcgagctaggtttgcctttttttttcagctgcattgcttaaaactttctattttcatttatatgatcgatttcaacttgcgatacacgcaagacacgcaatatattgctgaacatataaatgcattacgtagtgtgccacgtggcttgggtacctttagatatctgccatgatttcaccgctttgagttttgtcgcttctccgataatcttgctggtccaatgttatctagcttgaggaattgtggaccccatttcatttaatgcaatcacgtccacggatttgtcgttcatctttcgatgtttcatttaatgcaatcacgttcgtgtcattaatgtgtttagttatttatccgtttgtgttattgcgactttttattgatgcctttggaattaaataaagtcgactcattttctatttatttatgtgctttccaggcacagtgatttcagaagttcgtctaaggacaaaa

SEQ ID NO: 105646 - DNA, 634 bp, Mimulus guttatus
  Intron number 2 from transcript mgv1a014980m (locus mgv1a0 14980m.g) derived from phytozome v7.0 (chr-ID scaffold_206 ; pos 400609 to 401242 reverse strand)
accggaactggcaggggcggcgaatccatctacgggtatctctttttttcactctcttagttgcttgtgtaatttttctctcagctgatagtactaattcttatcacaattagggtttggactaatcagatatttaattacatttcaagatttaaattttgtttagtgtttattttttattttttattttattgaaggcatgtgtagttagatatctcaattttttcggacttaaggacattgtatgtgctcaaaaacatttcgttgaatatgttccgtagcatgcttaggcccagtttggttgccaagataagccgagattaactaaatagttggacttaatttgatgtttggtatcatcaataaattgccgggtcgacccgccaaaattatataatcatggcttatcttgccttctagtgtgtttttttttgttggatgttacgagctccaataaaataattgggtttcattagattatttaatcttatcttgactaatcttatcttgccaaccaaacggggccttagtgtttggggaattcagtggtgcgattacattgtctgaagaattcggcttacaaattgatttccgtaatctctttttttttgttaatgcagtaagcacttcgaag

SEQ ID NO: 105647 - DNA, 337 bp, Mimulus guttatus
  Intron number 1 from transcript mgv1a002685m (locus mgv1a0 02685m.g) derived from phytozome v7.0 (chr-ID scaffold_89; pos 261619 to 261955 reverse strand)
cccaccgaagaaatcgtggaggtgagcaaacttactacattgctgtaatgtgattgttcattctcgatttcgtttcttgtttcattataagatgagtcctacacttgcatttagttttcgatttttcgtataatttgacttgttgtttgtttttacgaataaaagaaaacgaatgatataaagtataatacgagccgaaatttgattatcctaaatggggcagttctcaaatgattacgagaatgtgcaataagaaatgctcgaagaatcttatttactacaaatgtgggacgttattgcagatcgaaggtaatctttcgtctgtcaagagagcact

SEQ ID NO: 105648 - DNA, 935 bp, Mimulus guttatus
  Intron number 1 from transcript mgv1a027048m (locus mgv1a0 27048m.g) derived from phytozome v7.0 (chr-ID scaffold_17; pos 171183 to 172117 reverse strand)
gaagtctaccaaaggacatgtgcaataatctttacggacgacggctcagagtatttcgtgtatcgtataaccgattgtatggagaaataccatcgagtttggaccaatgctcacaacttgaagaaatctacttatatggtaatgatttttccggtaacgtgctcaggggttttggaaacatcacgcgccttaagatgttatttcttggttccaacaattttactggtaattacagtatatatttcttgaatccttatgttttcttttaagttttttcatatgcaattcttatatttatcttgtgcatagtcttttagctaaaaagcaataacaagtgattatgaaggtgtttgcaaaagcttttgaaaagtgattatgagcctttttttggttcaaaatcactttttaagtatttgcaattctaattttttcttctacttctctaaaaataagttgctttaagctaaaattaaaaaaaaaacacctatggaccaacttctccataaataagttgctggaaattgatttttcatagaatttgcaaacaccgccaacttttaaataaacatttattgttaacttaactcataatcaccaatttttgtttttttaaaaacttttgcaaacaccacctatataattgtctcatatacaattaaacctttgtaaattaatacagtcgtgagtagtagaattctattaaacaacttaattaataaatttagcataatgtctgcgagtcggaacttggagaaaatattatttaaacgatgttattaatttatcgagattctactctgtataacgaattttaactctccgtccaaattttagctcatttaatattaaatgatttttcaatttaatcaaaagattattaacatattttcctacatataggacatctgcctaccgacttgtttaatcaattttct

SEQ ID NO: 105649 - DNA, 770 bp, Mimulus guttatus
  Intron number 1 from transcript mgv1a011614m (locus mgv1a0 11614m.g) derived from phytozome v7.0 (chr-ID scaffold_3; pos 1128482 to 1129251)
agtcgaggctcgaatctctccccactgatttactggttggtattcagcatcttctgaactatgctattccttatttttttcgagtcgtaatatgttatttgattgatatggtggtgttttacagttgtgaaatatgaaccgatctgttttctctatttgttggtttcatagaaagtttctgttctttttggttatgataatatttgtagcatatcgaacaggcattgcgattccgctcgactgatttcttgcattaacttttcaatatccatttataatcggttacagtgtttgcaagagatgttataagctcaaagggcttatgaaaaatataggctattgcagtaatcttttgaggaataattttgatctttattatcacagtagaaggtattgttgatcagtaataatcccggcattctatataagcacccgttacttttctctgtcgagatcctaagtggttaactaaattatctgctgctatcacagaactaaaaagataacaggggaatagcgtttgatctcgttctttgatcgaatggtcttcttagtttcctcttgctagtgctgttgaagttcttgagaaaatagaaaacaacaaaagaatgacatctctctctctctctctctctctctctctctctctctctctctctctctctctctctctctctctctctctctctcttgattataggggatctgtatctatatctgatggatttatttttgtacaatgaaggtcaaaatactctgccacctgcacc

SEQ ID NO: 105650 - DNA, 874 bp, Mimulus guttatus
  Intron number 1 from transcript mgv1a009402m (locus mgv1a0 09402m.g) derived from phytozome v7.0 (chr-ID scaffold_41; pos 1129583 to 1130456 reverse strand)
aatcgtcccaggtattcattcatctctcagtttttcaagttaactgtataataatattaattccgcagtcttaatccgtaatctgaatccaatacttgaaaaattattttgggtgtttatcgaacgattctgctgtttcatacgatgttttaattccgaaaattgatttgatttgtgtataagttcttaacttcatattaaaaaaattatatatgtagttgtatttgttgttttgtataagaagaatgaagaaacattgatctgtacaagttgaaagaagaatggtgctttcctttaaaccctaatttgtttcacccatatttatctgctggcaaaatgcagcatcgaatatcgaaaacggcttgattttgttcccccgatttgtgtttacaagtgtaataagcggccccttcgttttataatcgcgatctcacttttttgtactataacctagtgataatactgttatgtgatgtggggaaatacgttagactccagacgatgggaaattatcggggcgtgaataaaaaaccggagtatatctgttgatgaatcttgaatttgcagattttgtccaaagggtacgtgaacggggcaaaaatttgcttcgattttcaaaaagaaggccgctcttcaaaaaataaatagatatgtgttcgatttatgcacgtatggatggataatgctcgtgttctctagaaaggatatgtcagcagtaacaataaactaacacttcagtacattgcttagttgtaacgaaattatttggatattcagtttgagctgttttctttatgtgtcgttattgaatttcggcatttttttatttttatttttgtatcataaacagggaacggacactttgatagctttg

SEQ ID NO: 105651 - DNA, 387 bp, Mimulus guttatus
  Intron number 1 from transcript mgv1a005603m (locus mgv1a0 05603m.g) derived from phytozome v7.0 (chr-ID scaffold_116 ; pos 179945 to 180331)
tcaatcttcaaacagcgcttcaacgctgccaagtaatcctctttttcccttctctttttctctaattgatgatcgatttttatttggaaaaatcctgttttattatgaattttagggttttatgattgtaacctttgctgaacttcttcccagtagttgtttgagaaattcatgtttgctgaactccaaatttgatcttgaattcctgatcgtattctgattttctcaaattgataattgtcagcaaaagtttacccaaatcggatttaatctgattttggtttctgtgattgtgtccccaattttgtaaataatttaaatagtgcagtgatttttgaactctgatttacagtaaaactttgctaaaactcacaatcccgcggatta

SEQ ID NO: 105652 - DNA, 789 bp, Mimulus guttatus
  Intron number 1 from transcript mgv1a013076m (locus mgv1a0 13076m.g) derived from phytozome v7.0 (chr-ID scaffold_290 ; pos 210201 to 210989 reverse strand)
ccttgattctgaaggtggccctggaaccgaacgatgttagtttctaaaccctaatcagcttcatctttgctcgtcttcccttttcttcttcatttcgggttttgtatgtgaatttagcagtttcgttcttatatttatgttgtgcttaaggtttggcgtgataaggatttgtgatttatttatgtttgtagtatgaaaagaaaacaatgacgaacaaattgttctgcggattggtaatgtatcaaacttattgattgatagacgttttttttctacatacgtcagagttaaatttattttagggttgcagaaattgggtggggttacgagttttcgaagctctaaattgggaggagatgcacggtagagccaggaaaagttcgagcgccgattttctcatgtttccttttgtttgtcattagtctattttgcatagttttaaggttgcgatatcatgatattttggtgttagttcctcttagccatcaatttctttaaatccatttatatctcaggtttccagaattttgattttatgatcaatttatctaggttcttactcctacgacatggttcgtttaagaacgatatgtttattttgtcacatttttagcgcttgaaataacattgttgtcgagaaaattccaaattatgtttgacaattagtaataataattagaggcgctttgactcaaatgacacaattgttctagttcagagaaattgcagttgtttattacgatagaaggggaattctaattgttattgcacatgtgtagccattgaagg

SEQ ID NO: 105653 - DNA, 362 bp, Mimulus guttatus
  Intron number 2 from transcript mgv1a019932m (locus mgv1a0 19932m.g) derived from phytozome v7.0 (chr-ID scaffold_6; pos 3853983 to 3854344)
gtggcttaattccttgcgaaaagaccgattttgaggtaaaaaaaaaaaaatcaaatttccattaatttcgaaggctaatttcaagaatctaaattttcagggttatttttagcattatgagtttattgcattagtacccctatgttataaatattagcaaaaaaaccctatgatggatttttttagcgcacaaccccctaaatagtgcatttttagggggtagtttgctaataaaattgaatcataggattttatttttttgctagtatttataacacgagtagaggtattttttgctatttaaaaatatataaatcttcacaatgtatgtatataacttccgttttctctattatcgcagc

SEQ ID NO: 105654 - DNA, 948 bp, Mimulus guttatus
  Intron number 1 from transcript mgv1a023816m (locus mgv1a0 23816m.g) derived from phytozome v7.0 (chr-ID scaffold_17; pos 1642922 to 1643869 reverse strand)
accagcactttccaccaggtaattaataacaactcctttcttaaatttcttatttatattatttattttctgttaattactatatatatacacacacacacacacacatatgtatatatagtgattttgatgatgagttatttcatggaacttttggaagaatttatatccaggttacatatatatagtagttgttttcattcataaagcatgatgtggacgcctttaatttgttttaaattcaaacgattaattatatattctgattattattgaaattcagaaataatttaaattaatatcatgcaatcagaaactagggtttttgattctcacaagaaactgctagaatgataacttagaattattggatctggtatttcatgttgtatataaaattcggcggcgcaaccacataaatttctacgtatcaactcgtccaacttataatttgaaaagttcattgtttaaatattgttgaaactaagaacctttgtatgaattaactcaattaattttcttattcttgagtagttggcatatgtgtacatgtgtgtgtgtgtgtgtgagagagagagagagagagagagagagagagagagagagagagagagagagagagagcagaaacccttttttgagttttcgctattaattagtacattctgggaaaatctgaggttatggaaaagaaaagctgcatgcatgctttgattcattaagctacctgtcagatatatatatatatatatatatatatatatatatatatataaaagagcatcatccatcatcatctttattcaattattatttattatatataagaccatcaggccaccttatttattattttttttaatgttttgacttgacatgcataattaacatttgaaaaaaggatctctttttaatatatataactttttgttgttgggagaattagaa

SEQ ID NO: 105655 - DNA, 340 bp, Mimulus guttatus
  Intron number 1 from transcript mgv1a008587m (locus mgv1a0 08587m.g) derived from phytozome v7.0 (chr-ID scaffold_384 ; pos 41557 to 41896)
ttaccctcattgacccgtaagcctccatagtcaaccattttatttttctgtagcattctgcaatttattctgatctgatcaagaattatattaattatcaactcaaatattcaatttctattatttgatctgagatctgtgtttgttattatgattattattagaagtttttaagatttttttatttattaatttaatttaattcatgaagtttgaagatcacaaacatcctaagaaaacagagtatttaattcattttattttcatcctagtaattaataaaacaaattctgtatatatatttggattaaaaaaataggaaggaatattttgagatacc

SEQ ID NO: 105656 - DNA, 530 bp, Mimulus guttatus
  Intron number 1 from transcript mgv1a006329m (locus mgv1a0 06329m.g) derived from phytozome v7.0 (chr-ID scaffold_8; pos 785627 to 786156)
ctgcctgaaccctaatttctcgattcttccatcaggtaacttcggtttctccttgtatatctttattgtgtgatttcattattttcaattttaattaattatgttggttcttaaattagggttcgtgtgcatacatactggtatttgtttgagcccaattatttgattatctaaattgacgggttgcttctgttatttatcaattgaattaactccagttcctggaatatcaaaatttcaagctgattacggtttattgcgtgtgccattcatttcgattgtgagtgttgtattgcaatctgtaattgaattggggatttgattcaaattgggtttccgatttgtgtttggcagaagactttacataagaaaatactttgtgcgttttgatatatctttcatatgattatgtatgtttttcgaagcaaatgttatgcttcatggctagaattttgtagtttacttatgatattcattttattatggaaattaaatatagttgtcttttgaagctctggttgtagcgcgga

SEQ ID NO: 105657 - DNA, 356 bp, Mimulus guttatus
  Intron number 1 from transcript mgv1a009139m (locus mgv1a0 09139m.g) derived from phytozome v7.0 (chr-ID scaffold_163 ; pos 123188 to 123543 reverse strand)
ttgttctttccaggccacgcatcgaggtacttaattcgaaagttctaagcatgagttaccttattttcattttattatgactgagtttttttttccgcaagatcttcgtataccgaaaaaagaaaggtttttgatttaattttaattttttttagtattaacgttaggtaatgatgttgaaataattacaagtgcgccatcaaatgaagaagtatttaccctgtatgttgatgattattgatttggtcccaatttgactgcattatgtttctttggcgcagccagaaaaaaaatgttttttttttcttttttgtatgtaacagtttccacttttatgatgcaggaggtacacgaaa

SEQ ID NO: 105658 - DNA, 551 bp, Mimulus guttatus
  Intron number 1 from transcript mgv1a011116m (locus mgv1a0 11114m.g) derived from phytozome v7.0 (chr-ID scaffold_3; pos 3698211 to 3698761 reverse strand)
acgtcaatcaccaacccactctgcaagaatttctggtgagcaaaacgtggctcttattttatacttccggtttcatttcaattttcaatattcttattctttacctcaattaccatctctttaattgggaaatattacgttgacccccttttcgcaaagaatcgatcttttttcatctaccgaatctgctgtatttgtttggtatgtcaatttttttttcgttccttaattttttttttctgggttgttgtgctgatcttgttatttctgtttatgggagcatatggatgattaattgggtgcgaattcacggtatatatatagatatatatattggtttctttatggggttgtgggatttactttgaatcctgctattaagaaaaaaaaaaggctagatttttttatagcccttatggtgtttgtagaaatgcctagctgagactttgtcatctgtgacttattcttcatagtattgattgtgatttttttttatttcttatcttggaaatgtagggagtccaagtctttttcctagaaaaaggaagtga

SEQ ID NO: 105659 - DNA, 587 bp, Mimulus guttatus
  Intron number 1 from transcript mgv1a004739m (locus mgv1a0 03650m.g) derived from phytozome v7.0 (chr-ID scaffold_8; pos 122990 to 123576)
aatcagcattgaatcattcccccggaacggtaacggtactctctcttgctgtaatttctggtttatttcttaattgaataatggatctgtgtatacaacgatgaactatttagcggtgaattgctatttttgtttagtgttaaattaaattacccagacctatcattttcttctgatttttgaatgcatgcaattggggaaaaaagaaaagactgtacctttggctgtagattgtatttgaaattgtattcccccctaaatacagagccctaatttttagaatgcaaagttatcgattgtaaagaaagagtggtaaaggttggccagtgcttggtaactttcttactaacttgttaattcttcagttttttcggtgagctttttctctttaagtttttgaaagagaggtctgtagtttgttgattacatgctgaactgttcttgttagctgacctacttccttgtatcaaagattggaaattaatgattgaatttgggaattaacactgaaatttgatcgttttcatcaatgttagttgcatatgactgccgatggcataattggatgtattttcacatgtttgcag

SEQ ID NO: 105660 - DNA, 539 bp, Mimulus guttatus
  Intron number 1 from transcript mgv1a006714m (locus mgv1a0 06714m.g) derived from phytozome v7.0 (chr-ID scaffold_51; pos 546087 to 546625 reverse strand)
ttacgctattggccccactggagggacaccagcaggtgattttattgcaatgatcatgtttgttgatgaagagtgtgcagttgttgatgctgatatacgttttatgtggatcagtgttttgatttttatgaacagatccatcgttttctaatcatgtaattgggtttagtgccaaagtgttgtcagttttcccttcattgtattgttgaattgggttctatctagttgaagcatgttggggtttagtttggtcttgttggttgtttgggtaaattggtgtggaaagatctggtcgtattgctcaatgcatcatctgtttgtcttgattatgtatggtgtagtaatggttgggaaatcaaaacaagctgactattatttttggttgatccaattcttctctatgtttataaatatgatttcttttgtgtatggtgttttctttattattgttttccttttgcgatttttctggttcatgtgttatttaatgttgttctgaatccaacaaaataatttatcaggttattactgggattgct

SEQ ID NO: 105661 - DNA, 686 bp, Mimulus guttatus
  Intron number 2 from transcript mgv1a026457m (locus mgv1a0 26457m.g) derived from phytozome v7.0 (chr-ID scaffold_5; pos 3421704 to 3422389)
taatcatatttctggccattacctttattcgccaggtatatattattttctatgggaaaagtacagtttgcaccgtcatgtttgcaccgattttgtattttggtccctcgtgcacaaaaatacacatttgattcctcatatttaaaaaaaataacacttttagtcatttctgtcaattttccgttagtactaacggaatcaagtgtgtgccactaaaagtgttaagcaattgaaacttgatggaccaaatgtgttttttatgaacatgatggaccaaatgtgaaatcgctgcaaacaagagggatgaaaattgtaatttccccttatctttatctttctttttgtttcttcttttttttttttttcgtgttaattagtttgacttagtcctatagagtagtttctttaaattgtcaaggactactttcttttttatttataatactatttggcaagaataacaagacgtttccaaacaatgaaatttgaatggggcctttcaaaatttatttcgaaggaaattctgtctgatccattaaacggatacctagttaatgataagtgtgtgtttggtgctgaggttttcgtttgtcttagtcctatagagtaatttctttaaattgtcaaggactacttttttttatttataatattatttggcaggaataacaagacgtttccaaaca

SEQ ID NO: 105662 - DNA, 977 bp, Mimulus guttatus
  Intron number 1 from transcript mgv1a003762m (locus mgv1a0 03762m.g) derived from phytozome v7.0 (chr-ID scaffold_45; pos 1541800 to 1542776 reverse strand)
tgctcgtcgagcgctcgattcaccgcttgggtaatgtgagtcgctttcccttgttcttcatattcgattttggtttcaattttgagtgtaacatttgaatttaactccaacaagaagaaacaaaaaaacaagaaagttatgttctttagtttgttttaggatatggcaaattacggtcgttgtagccccctgaggtaagattaaattacgaaaaaacccctcatgtttgggcaattacaatcacttctcgatcacttctcaactgtgtagtgtgtattgtgttacacgtcacctttacagtgtcgaatttttctattgagtgaagggttttttcgtaagagaatacatagttaagggatggttgtaattaagtaaataagagggtttttttttcgtaatttgatcttacgccggagaggtggccgtaatttgccctttaggtaagttcaaattacgaaaaccccccattagtgggtaattacagtcacccctcaatagtgtattgctcttatggtgtcaaatttacctattgaaggaagcggttttcgtaagacaatacatagttgagaggtggttctaattactaaaattagaggggttttttcgtaatttgatcttacatcagtgaggtggctgtaatttgccctaaattaggatatgatgttcgattttcagacaaaagatgatgttagtgctggtgattaagacatacagcagaacctcgattaaataatagcttctctcagtcccgactcggtaaaaacgtattaaattattaactcgacaatttaataattcactaaattaatagaatttccctagtcccgactctattaatttatagaggtttaactgtacttgttttacttcatcttcttgcataacttaaataagcacttttaaactattccgcgagcttacgcttttccgaccatttcacagtggttgaagaaaaccgatagaaaacctttggttgc

SEQ ID NO: 105663 - DNA, 963 bp, Mimulus guttatus
  Intron number 1 from transcript mgv11b024638m (locus mgv11 b024638m.g) derived from phytozome v7.0 (chr-ID scaffold_1 56; pos 552095 to 553057 reverse strand)
tgcgaaattcaattcaaattccaagtaagagatgatggaattaatttttaaagtgctgtttaatttgagttatccaattattttgtgttgctttattttatttttttagttataggaatttttatacttcatgtcgatggatatttcatgagttaaatttttgtcagtatgtgtgtttcaatgtgacaatattttttattttaccaaatgagttaatttcatccctgaaagattttgtgtaagttttatttgaattgaaagattcaaaataatttgaaacccccctacaattgcctgaaatttaccaaaaaaatgtgggctaagaatttagaatttattgtcaaataactcaatcaaaacaagctcaacaaatttgaacttcatcataaatccttccatcgaaatacaaattagtcatgatttattcagagctcgctgctgacagaattagtccaatttttttttaaatgaaccgctaagcacttgacagctccattcagagaggcagatcaaacatgttgaacaaaagtattgctgaccgaataaggaattcataccattcaaagctcattaaacactctgcgtagttatttctatgttacactcggtaaaaactatactgtgtatttttttaccgttgatctacacactaataccaggttatttatatgctacactccctaataagccttagtcagtaaatctaccagatgataattaaggctaattgcaaaatattaacatgcacatgcatactataaaatccagaaatctaattgaatacaatcacatgccctgtactaatggtttaaacgaagataagaatgccttttgtaaccataaaaggaatcagataactaaaaaaacagctcatataaccaaacaaacgaaattcgcaacgattaataaattaaagaaaaaaggaaaatacacatgcaaattaatattaataaagtccaacag

SEQ ID NO: 105664 - DNA, 625 bp, Mimulus guttatus
  Intron number 1 from transcript mgv1a016964m (locus mgv1a0 16964m.g) derived from phytozome v7.0 (chr-ID scaffold_12; pos 1500272 to 1500896)
tccttctcctgccgacaagattcttaactaaggtctcgattcttctccttcccctttactcctttgctttttttttttgtttctgagaaatgctgctgacgagtaatttaatttatgttaaagaatttaaggataatttacttcaatttctaccatttcttgtttttttagtgatgatttgaatttggtttggcgtgggtctgcctaaaatagaaaccagaacacgttactgtgatttttcatgtttttagggtttatacttgatttttgttttttttaattgaattttaggtatcatctttgttgatatttcttgttgagttggtttttaactagactttgtgttcccatttgagctcaatcgttttttctgaatataaagaggaatattgaatctcactttcaattcttgcactgtaagcaatgtctatcgtattacatgtttatggtttcggtgtgatttagcctatttgtattattagtttcttattcagccaatcaggttacacgatactttggaacgacaagtggtttttgttagcacttcctctcgtgtggttgatgaatgatttttattgcacaaatataatcttgtgataacgttgttgttgcttgcgtgtgtagg

SEQ ID NO: 105665 - DNA, 955 bp, Mimulus guttatus
  Intron number 1 from transcript mgv1a016400m (locus mgv1a0 16400m.g) derived from phytozome v7.0 (chr-ID scaffold_36; pos 366759 to 367713)
aaatctgggactacgtcaaatccaacaatcttcaggtaattaaatttcatcctataatgcattaacatttctatcattttgggtaaattaattgtgtgtgtgtgcgcgcgcgcttattatagttatcgggttttccgacgaacattttaaatgtgcaatgtactgttaaatggttttgttctgtgccgccctaatcgtaacatgaacatgatatattactgagtaatgttacggttgatcgagtgtaaactgcgattgtgaaataatgcattgacgtttcgtatcctggtattcaaattgaaatctatagtggatagcttgagattttaacgaagtagacgttttattttcctttgtttttcgttgatgttgcattgttttatgaataaattacactagtgctcgaaacttttaatatactacctatttacagtaacaatcgttttcccatatggcgagtgttaattacgatttatgccactgcaatttcatatgatacgagtgaatcaggatgtttttcttggtaaagaaatgccacccctggctctctgtactctatgttcaccacataaattgactcacgaacggtctaaatatagaatgtagaaatctaattccgctcaagattattcttcaaagcttcactcgagttctgacttcagtatctaaatcgattagtcgtgttacttggtataaatgaatgggtttttgttcgtgtggatattgtgcatgagtcgagattcgttccttttatttcccctagtattttccaattacttttattgctcggaagagaggattctgggtatgtttctcgttgatgttggatttcaagatttaaaaggttataaatggccggaaacctaaataccaatattttgaaggatgtaaatgcaattataataactttgatatcttttgcagaacccatccaacaaaagagagatcttttgcg

SEQ ID NO: 105666 - DNA, 886 bp, Mimulus guttatus
  Intron number 1 from transcript mgv1a019319m (locus mgv1a0 19319m.g) derived from phytozome v7.0 (chr-ID scaffold_130 ; pos 288464 to 289349)
agtgcctcattagttcaccccacctcatcagaagggtaccccttttttccttcatatatatatatatatatatatatatatatatatatatatatatatatatatatatatatatatataaactgtccctatctcaaatggtctgagtacgaggtttattcaggatttcatcatcgttctttttttttttaaattccgttaaattaatttaatcagtcgaacatgcatatttaatcatggttttaatttttttttaatttctctttaatcttcttatgccccgtttggttgacaagataagattaaataatctaatgagacccaattattttattggaggttgaaaggtcttacaaaaaaaactcattaaaaggcaagataagccaagataagacaagataagccatgattatataattttggcgggtcgacccggcaagttattgaggataccaaacatcaaattaagtccaactatttagttaatcatgacttatcttggcaaccaaacgggtcttatttatttgagaaaaaaaaagaagtttttacacgtcatcttctgacgagtaggtggataaattctaagttctccacctcgttgttctctttcagtacaattcatgccgtgtgacacgtgtcgttttcctgcaataaattaaagaacacaatcaagattaggtggcaattttgtaattttggtgaagttatatgtgtatgtatctaatctacaagtagtggtatgattataaacaaaccgagtcgagttgaacgatacatatttgtttgaatttattcgaatattttatcgagctttcggagttgtgtttgagtttgatttgattgtcgatcaggttcacctggattacctagaagctggtgcaaacat

SEQ ID NO: 105667 - DNA, 905 bp, Mimulus guttatus
  Intron number 1 from transcript mgv1a001986m (locus mgv1a0 01986m.g) derived from phytozome v7.0 (chr-ID scaffold_119 ; pos 268146 to 269050 reverse strand)
actgcattggtggaataattgggttagtatttatgtttattttttgccttgttattttggaaatgtcatttttatatttggttttcggttaaagtttaattttctgatatatggctttgttgtatactctgtttctaaatcgagattggcagcgcgattaggttcttttcacactaatgccattgatctgccaccccttaggttgtactatgaatatgaattaactatataggatagtttgttgctatactgcttatcaaaattagtcttcttaaagtagaatttgcagggaaacatcaataaacacagcatcagattttacataattttattcaagtgaatacataataactctttacttcttgtagttgatcgtattcttttctttcgtttgactttttcttttcgacgcgggtgctcatctcgaatatttgctcatttggacgctctggccgttttacaacaaaaacaaacttttcctgtcacgtcacatatcatagtattatttttcagttgaatggaatagcattgtaatatctttcataattcatctagtttttcctctggttttctcatctatacttgttagcacttaataaagcttgatatcacaatgggaaggccatttccctaaatactgaatgctgttcctcactgcttaagacttcatctcaacatttttagttgctccattgctatatcaatgacatatcgttttcattcttcaccgaggaatggaaaaattctgcatagctgtagattttatagacactgaggccagtatgttacttgattatgaacttcttgacgtttggcattagggaattatctcttttgcattatcaacttttaaacatattcctgttacagttaccaggtgagtgtgctagagctgcttgctcaat

SEQ ID NO: 105668 - DNA, 428 bp, Mimulus guttatus
  Intron number 1 from transcript mgv1a012411m (locus mgv1a0 12411m.g) derived from phytozome v7.0 (chr-ID scaffold_34; pos 1598845 to 1599272 reverse strand)
tcttcaaaaggaggccgacaacactagaggcaaaggtactcttccccaattcattattatctccagaaactgtatatttcctctcttttgcgtactttgatgttggttggttcagtaagaatcgtataatctgtgattcgtaaatctttcactaatccgtattaattattatttgggtagattaaaactgaaatctctttgttaatagcgatgaatttgtgtaattggtttatcatacttcgatgctaaaattgtaattcattgcctaggttagggtttaatccttaatttcaggggaatggtacattttcctagtctagtttaaaggtaggtgtttagggtgaaaaacaactaattaatttcatccaaattatttggattgctaaggaaatattttctttccagccagtagtgcaagattgagactc

SEQ ID NO: 105669 - DNA, 914 bp, Mimulus guttatus
  Intron number 1 from transcript mgv1a017398m (locus mgv1a0 17398m.g) derived from phytozome v7.0 (chr-ID scaffold_48; pos 1540707 to 1541620 reverse strand)
tccagtgtcaggtacatatatattttactgttaaatttcagaatgaaatttagggtaaattatgacaattccttgaggtaaggttaaattacgaaaaaaaaactatccgtatttggataattacaatcacctatcagctatgaatattcttacgcattcatgcttatggtgtcaaattcaacaaaatcttctagattttgtagaattttctctagtttgtactcgttttatgcaaaaaaatgcaatttatgatgtacaacaatctgatatttacaagttaaaagacgcatcttatgattatcttaatgtttcaaaatgcggagctcgaatcgggtaaaacgggtacaacctggagaatattccacataatctagaagattccactaaatttgacaccgcaagaatatatggacacaggggcgtacccacgcctaaggctggggtggcccccgcccccccaagaatttttttttaagctgttttttttttttttttttttttggggatttatgtattagtttatacactttcgcccccccaaacttttaattttgtacattttagtccctaaaaacaaaaaaaaaattctctcttaatttacccctatatttccgccccccccaagaaaacacccctgggtccgcccctgtatggacatgtaaaaaaattcacagttgaggaatggttgtagtttcccaaacatgagtgggatttttgtaatttgatcatacctcaagcaggtggccgtaatttaccctaaaatttatgtttttttaaataaaatttgttgaaacctttttctttttccattaatggctaactcaattactgaataatatttactgtatatttattagtttgtacagctctgataatcaatattattgcaggtaccactgtatgtatcaacaaaa

SEQ ID NO: 105670 - DNA, 666 bp, Mimulus guttatus
  Intron number 1 from transcript mgv1a024069m (locus mgv1a0 24069m.g) derived from phytozome v7.0 (chr-ID scaffold_4; pos 655555 to 656220 reverse strand)
cgttgactactgacaacgttaaagctgtactcgtggtaattatttctttcttttctcttttttgtttttggttcctttaatttttaaacggcgtcgttttgagtattttaattccaaaagcgcctatatatataaatatatatatattatgagtgcgtttttcactaataatggtgtgtgtgtgtctcatttattctatatagtaactaattattggtggatttgagaggaatattcgatttatgctgattcggtcccattttttctctgattatttgggaaaaaggttcattccaaatttcgaaatttcaatttttgatttttcttggatgagagttgaagtatatatatatatatatttgatattgctatcattgggttggcactagccatgtttgattagagtgattagtcatgattaactaaataattgaattttgttcgatatttggtactccaataacttgtcagatcgatccataaatatcatgataaatatcttccgttatcttggctttgagagagtttttttagttggacatatcggcccgaggttagataaacttattatgacaaccatgatcatttatataatcatgagagagttaattatttgttgaaaaaaattcaggatattttgactgctggaagtgagacatcagccat

SEQ ID NO: 105671 - DNA, 568 bp, Mimulus guttatus
  Intron number 1 from transcript mgv1a005215m (locus mgv1a0 05215m.g) derived from phytozome v7.0 (chr-ID scaffold_87; pos 157913 to 158480)
tgtacgtgacaagcttcacctaacaatcgttggcaaattaattcaaacgtgaatcagttgacacatgcttgttagttccaagagttaggccgccctttatgagagcatatgttatgttctttatggtactatggcccacattctaatttatattttgaggtttccgcattcttcggaagtcaattattagtacaataattatcactttaaaacttgagattgaggatagcaaataataatgtatcacaaaatcttagtttttattttaaattataacataaataatattttttcaactgtagttattcaaagggttaatctagtgtttctaaaaagggcacatccgtcaagtaatttcactcaaaataataaataaaataaaaatcaaatcaagctccattattttctgcaccgtccgatcgcatcttagcggtgtgaatacgaatcgtacggtctcgatttagcattacaaataggagggaaaaaattatggccgtcgatttcctacactctcaaatataaaatccctctagggctaatacgatctctcactcctcactctctcact

SEQ ID NO: 105672 - DNA, 640 bp, Mimulus guttatus
  Intron number 2 from transcript mgv1a005215m (locus mgv1a0 05215m.g) derived from phytozome v7.0 (chr-ID scaffold_87; pos 158540 to 159179)
tcttcgattttccgtgttcgaatcgcgtttcagaggtaatttttcatccaatttgttgtttttgcgttaattcacctgagatttctgaactaatcacagttttatctgcaatcgaacttgtgattgtcggtaaatcgagttcgtttggtgtgaaaatgcgtgtagatcgagataatttcgcatgtttttgagttttagttgaagatcgcattgcgtttcgtatattcttaatattccgaacgagtatttgtagatctgatgaagatatggtaagaaacactaatgagtaattaagtaatgtaattatgagtcagttgtttaatgttctgcaagatatgtagaaattcaaggtgttcgaagctctatgttgatgatctgtgtatctgtaaatgtacggtacttaattctctttcgattcaagaaccgagccggtagttttctcctagatctttagatttagttatctgccgatgagtttgagcaaacatcaatatttttttatgtaattagaccaagtattagcaaaattggtagaatcatataattgaaacttcattgactatcattcacacaaaaattgcaatgtgatacatgatttagtgttatttcctaatattttttttcacgaattgcaggaaaa

SEQ ID NO: 105673 - DNA, 954 bp, Mimulus guttatus
  Intron number 1 from transcript mgv1a016058m (locus mgv1a0 16058m.g) derived from phytozome v7.0 (chr-ID scaffold_69; pos 361781 to 362734 reverse strand)
aacccacctctcgctcttctcgagctggacttcaggtttcaattttttttctctctctcgaattctactactgtttgtgttatctgttgattattttcattttctttcgtggacttcgtttcattttattttatttaatttatcaatgactttttgatattttcagcattttttttttgtggccgatgctttttctctacgtaattttggatgctggatagggtttgattagggctcttactttatctcctgttaactgtattcaagttgttcgtagattaaacgatgcactcagcttgatcgattatcatcatcatctcttttttttgttttttgtttttttttttttttctgttgattttatttttatgtattaaggtaaatgattttgttgtattaggggaaatagttttgaaatataatattgacaaccctgcatgattcggttgagttattataagcgaaacaacacattctagaacactctagatcgaattgtggttgaagggaaaagtaactgagctgagatgagctgaattcatttcgtgcatcccttgtgctgatttgagcttctcgtttggcttgagcataagtgcgtcacgttaaaaaacgcgaaatcaatcgtcaaagaattaagataatttatcgtatattgtttgcatggcatgatatggacatgtggctgtaattgtgcatgaatgataattgaaccctattttgtttcgtgaaatgtttcgttgctacatataatagaagtacaacttaagaatactacatctagtctatattttgttgatgcagtgcctgcattttcttttagtacgatttttttgtgctaaagaatcttcgataacttttcaatagagctcattaacttttttaattttttattttatttttggttattttgtttgtgtagtttcctgttggaagaatccaccgacttttgaagga

SEQ ID NO: 105674 - DNA, 521 bp, Mimulus guttatus
  Intron number 1 from transcript mgv1a001209m (locus mgv1a0 01209m.g) derived from phytozome v7.0 (chr-ID scaffold_244 ; pos 146211 to 146731)
cccactttcttgaaaggtaaagccccctatttcacctcttgaattagttattacataatattttttaatttaatttaatttaattttgatttattttatttttgcccactttcttgaaccccacttgcaatagtactttggtgctttcttttccactactgtcatttctgctgagttatgtatatgtaatatgtaatatgtgatgtgcttcaccacaactttgttctattgtttgttggtaaattttgttactgatttgtgatttatttttaatcttaagcaatatttttgatgatcttgatcttgtctgtaatgtgacagtacacttgtttaatcattgttcaggtgagaattgtagttgccaagtctctgttcttttttttttttcatttcttggtaaaagggttttatcaacagatgttataatcaccactttttgctgtctatttttatttattttttatttatttttatttttatgtgcagctcgaatttcttgaattgttacatactgtgtatca

SEQ ID NO: 105675 - DNA, 350 bp, Mimulus guttatus
  Intron number 1 from transcript mgv1a023524m (locus mgv1a0 23524m.g) derived from phytozome v7.0 (chr-ID scaffold_414 4; pos 3044 to 3393 reverse strand)
tcactacttctgctgtatctgctggagttctactggtattttctgatacaaatcatgtctggtttgttttcttattaattatgcagaattcctttggactgtttagtttaagtttgaagtacactaggttaaaaattccgtgattggattggtttgatacaaaacggtttgacttggtatgctatttggcatgttaaacatgacactgttccaaaatatagtgtaacatatgaagtgcacaagttggatgtgttggagctttgagcctcttatttattcaattcatattatatgtactcttctgtattttttcaggcaagtaaaaaggccctggaccctgttgctccaat

SEQ ID NO: 105676 - DNA, 724 bp, Mimulus guttatus
  Intron number 2 from transcript mgv1a012242m (locus mgv1a0 12242m.g) derived from phytozome v7.0 (chr-ID scaffold_7; pos 99995 to 100718)
ccttgataattggagatcaacaaaggtataataacttcataagttcacgaattcttatttttcttaaaattcttcttctagttttggtgatctctcatatttcattgagtattaggctgttccagcagagcataaatatttaagataaaacaaacccaacttttcaagatatccacctaaaagttgcacaatctttttgcttcgttttaactatatggactagatcgtgattaagacttatgttttgatctggaaaatggggaatatgtttagatctctaatgtaagtcctcttaacactgaagatgcatcttaagtcttaattattaacatgagtttgttctaattcttttgctccaacttttcttccctcaaaatgatgtttattctcctaaaataaaacccaacgtagaattccatttttccacctgaatacattttctctcaggaatttcaaaatatcctgcacactccgaacatatatatacctaagcacacacatttcaaatgttattacttatctgtcaactatatgtgctcaacccgttacattctaaatgccatctcatatcattacattaaagaaacatgtttatggtaacagcgaaagagagacattaccttaattttgtcaatttgcatgatttcttatttataatttcatgaagtgtttttttttggtcttctataattcaggagggctttgcttttgctcactgtacaga

SEQ ID NO: 105677 - DNA, 576 bp, Mimulus guttatus
  Intron number 1 from transcript mgv1a010181m (locus mgv1a0 10181m.g) derived from phytozome v7.0 (chr-ID scaffold_7; pos 1376638 to 1377213 reverse strand)
ttgctgttaaggtaaccttttcttttattacctatgatcttgttctgtttcttgatgctctgacatttgattctgtttaattttgattatgttttatctattggtgtttaattaattggttgtgatttagtgttctttgctaaaagtgtagttcttgtggtttcacactggttatacattcaattatcggttaaaccaacagtctcggtatattcgaatacttatcgcaaaattatgcgatagccaatgattatgagtcggtaatcgtatgtagttatgtagtagcaaatcgtgtttttttttgttttgttataaatcattcttaaatccaaatgcttttataataatgattctcgtcaaagtgtacgacgattcgcctaatttgcaatgaaacaaacattcatttaaagggccctctctgctaatcgaccttgtttctaacgactctttcaattaatatctaattattcgtgtcgattatcttttatagcccggaaaaaggtcaaatagcattagactaatatatagttttacacaattctccaattatttctctgcagagcttgacggtcaaca

SEQ ID NO: 105678 - DNA, 812 bp, Mimulus guttatus
  Intron number 1 from transcript mgv1a007274m (locus mgv1a0 07274m.g) derived from phytozome v7.0 (chr-ID scaffold_36; pos 1716933 to 1717744)
atcctccgatcagtactaatccagttttttatcaggtaacttaatcggaactgcgtttttgagctgtaattttttttttttttttttttgtgtacgtgtttttacgtatgcagcatcatatatttgtagggtttaggtgaagtaattacgattttactttgttccttgaacagagacgagtgattttgcttttttcgtgtattttgttagttcaggtgttttatgaagaaaaatcgtttattttatgttgttaattcagcttgttttgttgtgctttcgttgtagaactttcaattttttgttgttgatggagttgatgttaaaaaaaactgtgctaaaaattcgttctttaaagctatagatgtatgtgcgcacacaaatagcttttgaaattgacagcatctgaagctcaataaactactttggcttttacggtgtccggtgtatcggaatatatgttttcaagtgtacttgtgtcgagtgttctggtggtttgttgtctggtttccgagtgttctcgactactcgtctgtatatttatatatttattctgtttcaatctgttgtggatgatgggtctttcgttcgctaacgaattcgcttttttgcttaatgattttcttgacaacattagatattttgagtctagggtcgactatagttcctattacgttgctgatgttatggacgttcgtgacgttaaggagtattgacatgtgctaatctgtattacattgcagcgtttctcgtttcaatttcgagattccaataccttatattgttataattgtttgttttctatttcttcagtc

SEQ ID NO: 105679 - DNA, 796 bp, Mimulus guttatus
  Intron number 1 from transcript mgv1a017321m (locus mgv1a0 17321m.g) derived from phytozome v7.0 (chr-ID scaffold_108 ; pos 362241 to 363036 reverse strand)
ctatttgattcaacaaggaaataaggtgcgattgtttttcatattaatcttttttctttatgtatattagtttactctattaattgctaaaaattatgcaattttgtattggtactgtgaaaagttgttcgattttgtttctttttctttttcagttcgttgtaaaatcttgatgagattatgtgatttaatttgttaattttattctcatatttgttaaaatttctgtgtcgatgcggagtgcggactgtgtttttcgattggaactaattacaatttcacaatcttaataatatatatatttttttttaaactaacatcatgcttcattttgccactgaaaatatagtaaaaatagtaattaacatctctatggttgatgaaagaaagctaattcgaatacgaattctttgagctgtttctgtttatgattttgatattttttttttataattcgataagtgattgcgaatcgtatgtatctcgtttccgtagtttctgaacaaggtgattactgcagccacataaatttcttttcgtaaaactttttgtcggatttttgagaattactatcgaagtttcagctgttggtgtataaacgcaatcgtgatatgtatgtaattttagtttacgagtatttccgaaatcctcttgaattgtcgttccagattgtatctagagtacgatagatattttctgaacttgtttttaaggtagatgttgttataagagcctcgtatattcacttgataaaatttgttcgctaatatgaaatattcttgtgagagcagtgaca

SEQ ID NO: 105680 - DNA, 425 bp, Mimulus guttatus
  Intron number 1 from transcript mgv1a022962m (locus mgv1a0 22962m.g) derived from phytozome v7.0 (chr-ID scaffold_130 ; pos 769555 to 769979 reverse strand)
aaaaggttatacgtcgtcgttttttgatccgtttgttgcttgtttttttagggttttggttttgtattggagaatttggggttttttatttatttatttattttgtgcctaattttgttattgggtgatgtgttcttaatttctatagatgctttttgagtagtttattagcaatttagtatttttcgagctaaattcaagcgaaaaacgtcttcgtctaagctttattcgaactagaagggctgtaaaagtttattagcaatttagtatttgaactggtttcggttgtacgtttcgaaaaattcatcacttgaaaaattcatgcttaaaatgcgtgacgaattattatattgtagttacgaaagattgtatctcttatcagtttaagggtgttcgttcctacagatattgaaggatttcttatt

SEQ ID NO: 105681 - DNA, 815 bp, Mimulus guttatus
  Intron number 2 from transcript mgv1a001129m (locus mgv1a0 01129m.g) derived from phytozome v7.0 (chr-ID scaffold_37; pos 633613 to 634427 reverse strand)
gaagacctggtatgtatgtacacatgtgatgtattaggttttgcttttctgcttgctagatgcatattagattatccaattaatctagaagattaagactatgtacagttggtattagaaccttgtcggcgcttgcctgaagttgagatgctttaaatttttttctaatcctcagtttttgagtcgagcattttttacatgttcctttattatttctaacaaaaattcatcgcatatttcagtttggtttttatttgggaatatgcccagttagcagcgtgatgttgattgtaatttatatgatatcgttaaagtcaaaggccagtttcttttttagctgctagaattggtaaacgtatatcgacataaagacttgtcaaaccgaaatatggtattgttttgatatgatgactaatggaaattcctcaggttatgatgcaacatgggaaatttgttcagaggaattttgctgattgtttcactgtcataagaagaatatccctttaagaaaatagtttcccttaaaatactgaaaaatgctttttgcggaagaagatgcatttttgtgaaaatagtaaattgttcttggatgtgttttgagagttgtcctccatttatttcgtcaagtttggcaaactgatttcgagatgattgaaaaattgttctcctggtaaagccgttagtaattgtagcttttaagatattgcggatatcaatagacaaaaatatattttgcacttggtttgaggaaggtttagattctgccgatgggtatgactgctttatcagtgcctccatgaaaattttgaaacagg

SEQ ID NO: 105682 - DNA, 964 bp, Mimulus guttatus
  Intron number 2 from transcript mgv1a004531m (locus mgv1a0 04531m.g) derived from phytozome v7.0 (chr-ID scaffold_98; pos 774599 to 775562)
agcctttcctcattcactggtaataaagattacatttttattttttggtattagaaatatattcatgatttattattattattaattttttttataaaaggaatgccttttggggttggatttacttacatcagtcggatttaatattaaattttgtagtaatattagtctgacacgattcccattgacccagtcccataaaaaaaattaatcttttcaagaaaaaaaattctccttcattgggattaaaaaaaaattaccacatttatttactggcaatttaacacaaggtggctggaaaggtgaatagttcaattatacaataaattttcacctatttaaaagaaattttggtatggtataatagggcaaattacagtcatgcccttgaagtacgttcaaattacgaaaatatcctttatattttgaaaattacaaccactcaactatgtactgtcttacatgtccactgttattgtgtctgaatgaggggtttgttcgttagataatacataattaagggattgttttgtaatttgtgcttacctcaggggtggtcgtaatttactctaaatcatcgttataacatcacatttaagatgtagagctcgtttatctaacatcatttaattcaagaagtttatagtcaaagtagatatgattattgatttgaattaatttggagtttttggcatgcatgattaatattcatgtgagtttatgctacagtgaactcactagtgtgaaaagaacccacacatggattctcagacattgttaaagaagcccacatgggactgttacatcattagtttgtcaagaagtagcccacctttttcttttctttaaaaacaaaataatttgtgttaaattaaaagatttgatatttttaattttatttaatcttgatggattcatgaattatatatatttaaaaaaaaacaattgaaaaaaaatggcagga

SEQ ID NO: 105683 - DNA, 991 bp, Mimulus guttatus
  Intron number 2 from transcript mgv1a018008m (locus mgv1a0 18008m.g) derived from phytozome v7.0 (chr-ID scaffold_45; pos 685062 to 686052)
tttcggatattactatcggactgttgctaagtacggtacgcactgggggaacatttaaggggcatggggggccgttgaccccccaagaaaaaaaaaatttagatatttggtactaaattttttgaatattacttttgaccccccaaagtttttgtaaatatttatcttgacccattattttttttgttttttctccaaaatcttatataaattatagataaaataatcatatttaatataaaatataaaataagatagttaaaacttgtattattttaaataaaatttatgaatattacttattttcgaattttttttcatctaacgccttaaaaataaaagatgagatcgtgccatgaatctccgaaatattaagtgcagctattattagaataatttgaattaatttagatttttttgtgatgattaaaatatgatatatatatatatatatatatatatatatatatatatatatatatatatatatatatatatatatatgatattttaattaaaaattagttatataaacttattttttgaaccccaaaattttagttagccccccttacattttaatcctggttccgcccctgacggtacgtaacaataattaatattcctgttatttattatcctatttgggaaaattacacttttcaaccctcaagtttatactaattccacattaggtccctcttgtttcaataatttaacattttttgtcatttccgtcattttaccgttaacatgtagggatgggcacacacttgattccgttagtaataaccgaaaattgacggaagcgactgaaagggttgaatttatgaaacatgaggaaccaaatgtgtttttttgtaaacatgagggactaaatgtgaaatcagtgcaaacttgagggatcaaaagtgaatttttccctattatatatactcgattttcttcttattattactattaattttttttttcaggtaagaattctttc

SEQ ID NO: 105684 - DNA, 725 bp, Mimulus guttatus
  Intron number 1 from transcript mgv1a008523m (locus mgv1a0 08523m.g) derived from phytozome v7.0 (chr-ID scaffold_1; pos 3084717 to 3085441)
gacgaattatccaagtcgcctcctgataaggttcttgccattttatttttatttttattttctttttgttttttgcttttgggaattgggattttgaaatgattcttactgaaggttcttgaaatcccctgaattcacacactgatacttatggtatcctcttattttaaagaacagaagagatgaaatatattgttacatatgtcctgagcagatgagcatgtgagtttttatgattcgaatgttaggttttcataatactggggtacgagcccgggaatcaatacaaacgagtaccgtagatttatttttttatgattctattttggccagtaattgtcgattagccctcaaaatcggtagacggagaacaaacttactaagtagaggactgatctgagatgaaataaaattaaacgagacaggacactgtcaattcttgaggggttttcttctgtgaattctttagtgtgtttaataatccctttggcttggaaacttggaactgaaaatttcagaatagttagcagttacttatagttgtgtaacatatgttatttgatgaaaaaatggttacaggtgtgctccctatcgttttgctgctcagtgttcagtttatgttttagtaattcattttgcatctaattttgtacgtattcgtgttacgggagttaatgatttagcactgtttatagaaatactgggaggctggtggcaattgcaat

SEQ ID NO: 105685 - DNA, 516 bp, Mimulus guttatus
  Intron number 1 from transcript mgv1a011901m (locus mgv1a0 11901m.g) derived from phytozome v7.0 (chr-ID scaffold_30; pos 1392134 to 1392649 reverse strand)
aatcgtccaatcattatcaaggtaataatttttttttttaattttttaattttctctctaattcgactttctactgctgatactttttgattttgtttttgttttttccgctatttttttaattttattcatatatcgcactcaattctgatatgtatttcgtaatttgatcatatctcagattacttgtataatattttataaagtgttctatttttattgtgatttaaaaaagctaccatggttgcctgcaacttcatgtgtatacagtaatttttattttattttaggtttcatttttaaattcacatgtatgttcggtttcggtttcgatctttggttttcggtttcggtttcggtttcgctaatccctaaaccataactaattttgcaaaaaaaaaaaagaagaaaaaaggaaaagggcaaaagaaagatttcgaaatcttcgccttttttgcacatcaagaaattatttgtaacagttgttcttagtacaggcacaaaacttgagaatta

SEQ ID NO: 105686 - DNA, 897 bp, Mimulus guttatus
  Intron number 1 from transcript mgv1a025885m (locus mgv1a0 25885m.g) derived from phytozome v7.0 (chr-ID scaffold_112 ; pos 673536 to 674432)
taaggataccacaagagcatctgcatccgcatcaggtaaaagttgttcaaaacaaatttgctatcatttttttttgaattagataaaatctttatgaaaaaaattaatttaattttcttgtgtactggcaatctaacattcaagctcttaatttaattttttggatcttttgttttattattatcttatataagtcagatttaagtttacagatcttttagatacctcgtatagagattgttgtttgaattaagtaaaaattatatttttgtcggctttcgtatatgattctattttgattacttttatatttgtcaagtaacattctttgattaactcatgttttgacggcgcacaacacgcgttaatttactttatttgattctgagtttatatacttgaattattatttttccttttatttttacctttttgcacgatatatcttaagtagaaatgtcaaaaaaaataatcgtgttttttttcggaaatctgacatctagatggcgttcatgatgcaaacaaaaggattgggattgaaaaaaaggggaaacgtcaatcataaaaaaaaatctttaagtaaaattggatactatgttgcatcttatggattttatttatacatgtcacgtatatacatatccatgaggtgtattgataaaataaaatgtgagatgatatatacttgaagtgttatagaagaataaaagtctgagaaattaatagaataaataagtgcaaaaaatgagagtaaatatgcatggttgtcattattcttttgttgttgaaacgaattaagtgcaataaattaggggttatatttgatttttacatagttggtataccattacttggttattttataaatatatgaagaaaataaatattggtctgaaa

SEQ ID NO: 105687 - DNA, 735 bp, Mimulus guttatus
  Intron number 2 from transcript mgv1a015382m (locus mgv1a0 15382m.g) derived from phytozome v7.0 (chr-ID scaffold_134 ; pos 712200 to 712934)
cttcccttcctaaaggttttgccctatcccctattttgcgtcaaagtcccgtaaccctatatctgaaacttgtacataattacttctaatttgtctttttctttctgtaatttatggcatagagtgtgagtttggtattcaagtgttgtttaattttgttttcttaagttgcgtacatacattaacagagtctttcttttacttcagcttgtttagggcaccatttcttgtgtttttcttttcttttaataactcattgtaatttccgtaatcgagtggttttgtaagttgatgtccgaaggcactaatttatctacggataaattgcctaacacactcataggcaatatggattttttgacagaaatgtagggtgaactccataactaattggcaataatgtctaggggaagttttctgcacaaagacatgtttgtataaagggcaagatacgataaaatcgttgtctttgtgaagggaagatctgattattaaatccgtggtcgctcaaattgacaatatattgaagtcttcaattaaattaagcgttgcttttcattgattcttacagttttgagtatatcatgattgttgatacaaaaatatcgagaagaggagcaatcgtgattatctggacacttagaggacattctttctgtgatattattgaagccctagtgactatatattttgtacataaatttaatgatctctagttattctctttcagcaact

SEQ ID NO: 105688 - DNA, 493 bp, Mimulus guttatus
  Intron number 1 from transcript mgv1a013153m (locus mgv1a0 12317m.g) derived from phytozome v7.0 (chr-ID scaffold_2; pos 3042572 to 3043064)
tgtgggttttgttgcggatttgaaaatagttctaggtattgagtaccttaaattcaaataattgttggatctgtttatatttctgctgttcgaatatgagaacgatggatgtttttgtttctcagctatagtaagaagattccaattgcattttcatttggtttgcgtggtgtgctgggttaatttgttcttgattggattaggggtttttttttagggtacaattagggcttttattctttgattggactactttttgattttatggattggatagagtttatgatgctagaatcagttagatctgtacacgagtttcttttattacatatatacatgatttcgagcttcattttataccgaaatatatgaatagacctggatatatatcgaaatacaaggttgcatttcgattaaagaattctgatttttgaaaccgactcggaaaataaatctagtattaagataacgagattgcatttggattacagaa

SEQ ID NO: 105689 - DNA, 441 bp, Mimulus guttatus
  Intron number 1 from transcript mgv1a020641m (locus mgv1a0 20641m.g) derived from phytozome v7.0 (chr-ID scaffold_5; pos 1344390 to 1344830)
gaagaaagtaccaaccacacatacacaaataaaaaaattccttgtcaaacaagtccaacttttacaccacccaccacaataaaatgatacaaaccttgttttctatgtaaaagatttccttgctcaaaacgcaacatatacaaaaacacacacacgcacaaaataataataaaaaaaaaaaataataaaaaataaaataaaaaatcagtagcatatataaactgaagtaacacagcttctcatagttcatactcaatctcaaaatccaatattttctgataataacactaattagtagtgtctcatggaatattcctcttggttttactctgtttccttattaacccttcttttcgccgtttccctctcgaaattaatcgttcaacgcaaacgtaaccgaatcaagaacttccctccgagcccgcccggaaaattaccgat

SEQ ID NO: 105690 - DNA, 676 bp, Mimulus guttatus
  Intron number 1 from transcript mgv1a010291m (locus mgv1a0 10291m.g) derived from phytozome v7.0 (chr-ID scaffold_66; pos 80681 to 81356)
aattggaggctttgaatcatcctttgtatttcgaggttcgttatttcattttgatttatagaatattgattatgattaagatagtgatttattgcacaattagtgtttataattcttggtttcttctcttttagttatgagttggggtggaaattggaactgaaattccaaattccgttgattgcgatctgaaaatttcctattttggaacaataattttcattccgaattccgaatttttttttttggaacaaaaattccgaattctgctgattgtaatccgattttttttttcgattttggaacaatgtttatatttttgaattccaaaagttccaatttctgatttttttttggaacataatcggaatacatattcgattctgattttccattccgatatttttttccgaaaattctgatttttcgaaagttacacttataatatcaatattattatgtattttgtactttacgtgacaatttttttttcgaatttccaaatcccgccgattttctgatccgaaaaatttcaactttgaaacaagtttgttccattccaatttccaaaatgccgatttccgatttgaagtttaataaaaacaaaacgaactttcttatttttcattataaattatcaggtggccgaacacgcatttgcagaagaatcattcga

SEQ ID NO: 105691 - DNA, 554 bp, Mimulus guttatus
  Intron number 1 from transcript mgv1a001351m (locus mgv1a0 01351m.g) derived from phytozome v7.0 (chr-ID scaffold_4; pos 3001278 to 3001831)
gcgaagcgtggatataaactgcgtatcctctggaattattggtgtttacttttttttcttttttctttttagctacatgtttttggtacactttctgtatgcgtgtctgcgtgaatggcgcgtgtcggtgggtttgaatggtcggttgtttgatttattttagggttttaatttgtgtttgagtgatctaagctgattcggtattgattttctggataagatgccttgttaattggtgtttactttttttaatcagtgataagaaatcgagaaaaatcctgcaacgaagaattgttacttggctttcttgcgttttatgtgtttgtgaaaaatcctagaagatcagtgtaagttgttaaggaattgtgttgattatggtggaaattctcttttcctgctcttgctttcaaatgtatgtttccccttcgatttgttgtgctttataacttttagtttgcgactttgcagcgcttaattgataacttgcaaaactgtattttctgtggtgaattgtcgtttcttgactgaatgtaatttagaggaatttgtggcac

SEQ ID NO: 105692 - DNA, 434 bp, Mimulus guttatus
  Intron number 1 from transcript mgv11b013888m (locus mgv11 b013888m.g) derived from phytozome v7.0 (chr-ID scaffold_6 4; pos 446171 to 446604)
aaacacttgctgtaagttagattaatcttcttgttgatgatccttaaggaagtcgatttttctttaacttttaatttgggatttttagatttaatccctttgtcattgtcagttactctatgtcgactgactttattttttgaagcatgagctaatgaatggaatctctttgattttttaagtattttatggaaattaattagaaaacttggagttagctcttctaatggactatacaatgaacaaatatttatttcactggtctttttgttttttttcttatgattattttctaactgaaaggggttggggttgcgagacatcaatatatagttgattgtttaagagcttatttgatattttcactatgatcttactattctttaaatttgttctcagaggttttatttgatcggaagtgataggaacaagaa

SEQ ID NO: 105693 - DNA, 537 bp, Mimulus guttatus
  Intron number 3 from transcript mgv1a000605m (locus mgv1a0 00605m.g) derived from phytozome v7.0 (chr-ID scaffold_1; pos 2732429 to 2732965)
attacactcccgatcccgctcatcattcggtaattattctattcaatcgaaattagcaatgttagaataattgcaaaataaataaataaatatgtacattcggaacggaaaaactaatttcaatttcgtctaaaaaaaattgaaaatcgagaattttttttaatcaaaactggccgaaattggagattccatttttggttaattcacatataatataaaatgcatatcaaaactgattttattttttttggaaattaaaatcgtattgtatgtactactactaaataaaaaaaatatcgaaattgaaatagtcggaattcagaataaaaaatattactccaaaatcagaaatcttcggactgaaatcgggcccatatgaagatgggccgaataacgaatattgggtttcttaatttcaatttctgatccaacataataatttgaataaataaataataaatagaataaggcgggaaattcaaattacttttagccgctgcaggaagtgaagttcagtcagaatcaaattcacatcaa

SEQ ID NO: 105694 - DNA, 959 bp, Mimulus guttatus
  Intron number 1 from transcript mgv1a015677m (locus mgv1a0 15677m.g) derived from phytozome v7.0 (chr-ID scaffold_204 ; pos 232403 to 233361)
gcggttcgattcgatccgattatgttttttttttttcattataaactgcataatttcttctatgaaaacgtgttatacatctctgtgtgtgtgtgtgtgtttggatatggtttttttctgttgttttgtttagatctgatttcctttttgaagcggtatttagctgtaggattttcctttgatatgaagaattttccaattttactgcaattgttcttttgttatgtgaattaatgcattttgattcagcgatgttttttttttttaaataattatttttattaaattttattctgttctgtatttagttaaggaaatttgaggtattatttgaaattgatgtgaatttatctcaggaaatatattatctgttgaggtgaaatcttccatgatgaatttaatcatctttgatttacgatgatagatttattcgtaaggcttacagattaatttggtttgatacatgaagagagaaactgtttgggggtgagagagaggttaaataccacgattcttcgtgttattccgaccttttcttggttgggtcataggtaacacaattttggtttactgtagggatcaaatctgtatcttgattttgcgtttagaaaatcctttattttggattcgtaacacgcagatgagaatgccaagtggaatactgtgtcggaaaatgctattcccaattgcaaaatcttgtttatgattgtggggttcgtttttttaactggcgtttgtattaagtatataaattgatgcgcctttaattgttgtacttgatctagatcacttgaatttattgcatccgttgcggtggtcaacatctgctgtgtgtttattaagatgctatctgctaacacaattcgacttaacttatcgaatttcgaatgttcgagtttcgcaattaatttcattcaacatttgcaggttgcatcacgacaaaggagctcggaactgtg

SEQ ID NO: 105695 - DNA, 477 bp, Mimulus guttatus
  Intron number 2 from transcript mgv1a007017m (locus mgv1a0 07017m.g) derived from phytozome v7.0 (chr-ID scaffold_46; pos 1320812 to 1321288 reverse strand)
gtcaaggcttgtgactccgcttccgttcattccaggtcttttttgtgtttcttcgtattttcgtttctttttctaccttagtgctttattgtggcatttcgtatagttttttctatttctatataacttctagtttataatctataaatggatagggaataatgcatcagacaaattgccatatcggtttttgcaaaaaatcaaagatgtaccgatagtttcggtttttcccattttaaaaaccaaacatgccgggtttttttcagttcggtgctaatcggttttcgaattacagtttcggtatcaattcggtttcggtttaaccttttggtttgggtttcggttatgtttcaggctgcaaatgatacacattgtttgaagtatattttatctaatatgtaatggtgatatttgtgatggcgaaattatttaaagtatcggtgacttaggcatgacaaatattatgtgatgtcaggg

SEQ ID NO: 105696 - DNA, 495 bp, Mimulus guttatus
  Intron number 1 from transcript mgv1a007017m (locus mgv1a0 07017m.g) derived from phytozome v7.0 (chr-ID scaffold_46; pos 1321401 to 1321895 reverse strand)
aattccaacgcgcagccctcgacctcaaacaaacggtacgtacccctttccgtttctccattctttctttcctttttctaacttcgaatgatgcaaacaagaaaaacaaaaaaagtctttttttcctgtgttcttggctttggtgtgactcgttcgataatcaaaacccagttatcttttatagaagattgtgcttagttaaggttgttttcatctgctgctgtttaatttcgagcggtcttccggttgttttgacatgacaaaacacacatatatatatatatatatatatatatatatatatatatatatatatatatatatatacattatacatacatgtggatatgagcaaagtgtatagtaaatgtatgcatgtgtatggtaagataccatgtggtgtaattaaccggatttatcatggaataatattccgtttgatgtgttgttttgtgaacagattgtggtgaagacctgggggggatttactgggca

SEQ ID NO: 105697 - DNA, 289 bp, Mimulus guttatus
  Intron number 1 from transcript mgv1a000098m (locus mgv1a0 00098m.g) derived from phytozome v7.0 (chr-ID scaffold_181 ; pos 19230 to 19518 reverse strand)
acgttggacgacttggaaaccttattcgggtacttgattcttgtgctgttttgcatttgcaactacgtctttactagcaacttctctttttgaattgtgggccagagtagggagttgggtcccatttaattgcagtttgatttttgcactcttctaaagcaccttgttgtgggacggttcctgcaattgttctcgtgcagagacttaaatatttctaaatgtatctataatctctttattctaattatcgctttatcttgatttattttctgtttctttctccaggaga

SEQ ID NO: 105698 - DNA, 610 bp, Mimulus guttatus
  Intron number 1 from transcript mgv1a006003m (locus mgv1a0 06003m.g) derived from phytozome v7.0 (chr-ID scaffold_3; pos 3744208 to 3744817 reverse strand)
gtggtgtcaatattaggtaaatttattaccttttttcgtttcgtaaatattttgcgtgtgtcgcgtttcgatcgaagaattcgcatttttttttaaacgaagaaaatcgtaatgattcccgaagcatcacttttgttatagcatgcatgtaaaaatataaattacacgtttttgtaatggttcaaaatcattataaagggcaaattgcactttaccccctataaattttcagttctcgcactttccccatcaaaattcaaaaacgtgaatgtattcccaatcaaaatattaattttgttgcatgttgctcggtagccaaattccgatcgatttcaattgccccctttaaaatgttattgttgttgcacgctgtccctctaaatattattttctagcattttgggctaaagtgtggaaccataacaatgtttcaaaaggcgtcgtctcgttttttgaacttttaggcgggaaaatgcgagtttgaaacatttctagcggggcggagtgcattttgtctccgtatataaatattgaataaattcactattcacacaacatgatatttttaccggcaggtacgtagctgtgggaaacgagccgttcttgaaat

SEQ ID NO: 105699 - DNA, 791 bp, Mimulus guttatus
  Intron number 1 from transcript mgv1a013814m (locus mgv1a0 13814m.g) derived from phytozome v7.0 (chr-ID scaffold_75; pos 119085 to 119875 reverse strand)
aagtgcaggtccttttttctcctttgcctaattcttccttactcattattcatcctttttcttttttggttctttttattgtataaatcgtacacagtgatacttacttatggaattgtattctgtttcgttggaatcatgtaattttagtttaatttgttgattatccgtggtttctggcaagtttgagggttggtgtctactttaatttgatattgagaaaaatgaccccaaatctaagaccttaatttggtatgataaaaaaaatttattggatgtttttaataccatttgtacatcctcctattcatgttaccacccactgtacatgtacattaccgagtccgaattaacaagtgttgcacaattgaataggaggtaatgtccaccttgtataagcatgattttgcttcccagaaaaccataattgataccaatcgtagcatgatttctcttcccaggaaaccacaactgccacatataatatcaatacagatgtgtagggatatttatagcatgtgcaaccatatttatgatggatgttggatctaacttgcataaatactcattacttgcattttcttggttgcataaaatacatattccaattagaacatggtttcttgtgttgtttcttaatatgaatctacagaatgatggttttgatgcgtagatgtttttcttttttggatgattactgtttgtattttggttatgattagaacttatgatgtagtaaatgattatactttgtagataagcgatatctcagtggaagattatatcactgc

SEQ ID NO: 105700 - DNA, 691 bp, Mimulus guttatus
  Intron number 1 from transcript mgv1a009617m (locus mgv1a0 09617m.g) derived from phytozome v7.0 (chr-ID scaffold_186 ; pos 84402 to 85092)
ctgtattgggtctggtaattattattatttttttttttacttctttaattgtgaagattgaaaagagattgaatttaggctcttagaataagtctaaaaagaaacatataatttagggtaatttacagccacccctgaggtaaggtcgtattacgaaaacaaatcctcatgtttgtgtaattacatcgactatgaatctttgtaactgtccacctcttatggtgtcgaattcaacataatcttctattttccgtggaatattctctagtttgtacccgttttgtgcaaaaaatgttgtttctgatgcacatcaatctgatattgacaagccaatagacacatcttatgatcatcttgtttcaaaatttggagtttgaatgggataaaacgggtacaaactggagaatattccacataaactagaagattccactaaatttgacactgcaaggagtggacgtgtaagaagattcatagttgaggggtgtggttgtaattacccaaacaagaagagtttttttgtaatttgaattgcgtcgggggtggccgtaatttaccctataatttaataaccaatctcaattgcaaaagtacctaatgaatatgataatacatttttctcacttgacattttatttacaattttttatgtggtatattataaatgtatatatgtattgccagctaccag

SEQ ID NO: 105701 - DNA, 939 bp, Mimulus guttatus
  Intron number 1 from transcript mgv1a009082m (locus mgv1a0 09082m.g) derived from phytozome v7.0 (chr-ID scaffold_211 ; pos 325840 to 326778)
tttgccgtttaatcggtgaagatctgtttttttcggtgagttatcgacggattaaatttttttcttcgtttttttagcggtaatttttttgtttgattgacatagatgattctgtaatttttcttcgagtataatatgattagagatggaaattagcttagattttgaatttcgggtttgaattgtgataattgggagctaatttgtgcgttgaccgttttaatctgtgtagatgtaagtagatctaataattggtttaagatctgtgtatcatctttgagtttctcaatccaaccgacataaattttatgatttttttttatttatttattattattattattattatcattattattattattatagatctgagtagattttttgtaattatgctaaattttattgattactttcttatgggtttctggattaaaatattttaatagatgcttgtgtgctagaatttgggcattatttacgtatcatgggaaattatatataataaaaatcatgttaattggtgattttatggtccttaaattgagaattataggagttgtctgatctgtttttatgctttcaattgttagtttgtctagttcttcgttattttttttcttcttaaaaggtagttttttcggttaatttattgatcgcctccgacttacagttatttagaggggcacaaattctcatgagatacacttttaggatattccaaagtgcatcagaacaaaattgtgaaaataacctatgaatttgtgctcttacatctgtactggttttaatttttttaaattgaattttttttgtactaaaattgcttgatagcattatttatacgaagtccaaacatacttatggagcggcttcgctagctatcgttatctaatgtactatacgttttttttcttgcggcagttttaagtgtataaa

SEQ ID NO: 105702 - DNA, 612 bp, Mimulus guttatus
  Intron number 2 from transcript mgv1a005148m (locus mgv1a0 05148m.g) derived from phytozome v7.0 (chr-ID scaffold_48; pos 340827 to 341438 reverse strand)
tcgtggggcctgttagccgataattacggaagaaggcaagccccccgatttctcgataaacttctcgaaaaataaaaattgaatcttttttcgacaggattcggtgactcgttgtgatatgttttaattgctttttttttcgatgattagattcgtgaaagcgcatttttccagagctcggttggttttgattgaaccatcgtattcttattgtattcttattgcatgaaacgtacattaaacaattaggcctcgtttggttggagaaattagccgtgattcattaaataattccactctatttgttgtttggtaaacccaaaaacattccggcttaatcttgcgttttcattatattatttaatattatcttgacgaatcttatcttacgaaccaaacgaggccttaatggtttaattccactagaaatactaatttgtatcagaatttgatcctcaaatttacgtgctgaaagatttcggtatttctcttttgtttcttgcacattgtttctacggagtcttcgatatcgaagaactacattctaacttattatgttgttataatgtatgagttttttatctaacatattttttttaatggttttttagg

SEQ ID NO: 105703 - DNA, 506 bp, Mimulus guttatus
  Intron number 1 from transcript mgv1a009397m (locus mgv1a0 09397m.g) derived from phytozome v7.0 (chr-ID scaffold_41; pos 488650 to 489155)
aaggttagcttccattaaaactgttccgatttttgttactaaatctagcaaccaaaccctaattttctcggctgatattgcaatttgaagaaaaggaagatgaataaattaattgattaaattctgtggggattatgatctccaatttcgtatattgctatgaatttgaagtcctgtaaattgagatgaataagggaaaaagggaattaagttttttgcaggatcaaaatcattttcttttcgtctttattcatcagattgattaattgttacaaaatatgatgaaaatatcacaatggtcatatttgtgtaattacagccacctccctcaactatatattatcttaggaaaaaaaaccccgaggtaattattttatctcgtcctatcttgtctcttggggaaattatttgttcgtccttccatggtccaataatacaattgcaatgtgtttttttttttaatctgatgggatttttttttaatcattttttgctatagctcgata

SEQ ID NO: 105704 - DNA, 630 bp, Mimulus guttatus
  Intron number 3 from transcript mgv1a004747m (locus mgv1a0 04747m.g) derived from phytozome v7.0 (chr-ID scaffold_252 ; pos 59990 to 60619)
gaccgccaacggtatgtaataattgttgcagcataataatctttttatttagaaatttggaatatggaaatcgggtaataaattcgggacatgggagtattaaaacgtggaataattcaattacgattcctcatcattgttcataattgttcttctaagatgtctcaattatcattttttaacgaggaaaatggaataattagtatcgaattgtgggaaatatcgattacgtaatatattagtggtgatcagaacttggatgagttcaagaatgttttctgatttttgccgcctttactaaataagttaaaagattccgtttcttttcgactttactaagcctttttcatggacgggaaatcgtcaaatacatgtgaaacaaatgaatcgttttgacttgcaaaccgtatgattcctcgtcaatgatcataattgttcttctaagatgatcgatcaattatcattttgacgaagaaaaaaattggaaaattataatattttcgggtttctgctttgagaagtttttcaaatagcaaacataaataattaaaacaaaagattccttttttttttcttttctttcatcaaagtacctctaatattcacatgtttttttttcatgtattctag

SEQ ID NO: 105705 - DNA, 992 bp, Mimulus guttatus
  Intron number 1 from transcript mgv1a006971m (locus mgv1a0 06971m.g) derived from phytozome v7.0 (chr-ID scaffold_211 ; pos 313320 to 314311)
gaggcagtcgttggtatgtatattcctccgtatttttatgctcttcgtatacatcactgcataattaatattagaaccgtatgtgtaatttaatatttgtgttttttttttcttcccgattttctgtgaattgtgaactgaatgagttggtggtttctgtatgtgtatcgcgattcatttgtttgcgattcagtgattgaactttgaattcctcggagtcgtattttttgagtttcgttcggttgtttggttttgcggtggtggttgtatacgggactgcgtgttagggttttgcataaatttgttctttcaatttgaatgccagaggatttattcattgaattgttgtttgttgtatgcctttcatctgtgtatctatgtattttgatgtttcacatgtgtattagtatatgactgttgatgtacatctagggatgggcattttttttgcgagtgaatgagttgttggttttttttaatgtgatatagtattcgggatttagtgatttcccttcttatcggagtgttaagttttctagttcttttaggtttgttgggtgtgaacttgaaatggatgatggggattttgtatatactgtatgcaattgatattagcgtcactcggttctatgaccttttgttcaatcgattaaatttcctatagtataaaaaatagtcgatagtaattggtatgagtgtgcaaatatgagacagattacgacagtgagttttcccatcacattcaatacgatgttggggtactgtggtctgagctacatatattaactgaatgttagaattttttttgcttcaagaaaatgatgttaatctgtgattttttggggaaactgtcccactttttctatatttcagtaaattcctcctaaatgacagtgtagctgcctttgtaaatagcaaatacactgtcatattttgtctcttggctgccctttttatcgtttctaatttggctttcatatgatccaggtgtt

SEQ ID NO: 105706 - DNA, 921 bp, Mimulus guttatus
  Intron number 2 from transcript mgv1a018571m (locus mgv1a0 18571m.g) derived from phytozome v7.0 (chr-ID scaffold_24; pos 432567 to 433487)
gagagccattttccaaggtgatcgatgaatatatatctatatgtgtgtgtgtacatgaagttgaaatacaaaataacctcgataaattaataacctcgttttaataataatttctctcggtcctcacttggtaaatacgtattaaattagtagttcgataatttaatatttcgctaaattaatagaattttgttggtcccgactatattaatttatagaggtttcactgtagatagcatgatgtatttaatagtatatgttctttgtcagggtcgaaacacgactggtattctgcagttctgtcggacataaatgtagcctgatttcatttttagttatctccttggaaactgggatatctttccggaatcgaagaacttaattagctaggggctccacaaatggaaatctgcccatgatatcaaatacatatatcaatagatgaactgattaaaaaaatctttattattcgacattttagaatttagacgttcaatgaatgaataggagcgtgggtgatggacttcacggttgaatccataatatcccactctactctgtctgtacgcgtgcatgaatcttgcataattttttatttatttttccagtttagctaaataaaataacaatagcacttgactcaagattcatgcatgagatcgattttttttcgtaatgatatatgtgccaattttgagttacttttagcaagagggttgtcactttcgccacttgaagaaaacgaaatgctttatcttaactggattaacattcttgaaattagcagtattaataattaaatggttgtgtggattaaagaaagcttaagtaaacactattaatcaaacacgatgatctaataaacaagaggattgtttattttcaggttgcactattacgtagtctggtgaacgggaagat

SEQ ID NO: 105707 - DNA, 839 bp, Mimulus guttatus
  Intron number 1 from transcript mgv1a003216m (locus mgv1a0 03216m.g) derived from phytozome v7.0 (chr-ID scaffold_18; pos 505128 to 505966)
cctctgtcaaagctggttagtaattaattcttaatattttgcctgcttcactttttgcttctgtttccggtgatgttattcgagtgccagaactctgtcaggcatttcttcgaacagtatgctttaattgcttttaggattattctaatgtggtggattttatttttgatttgtgaattttttgtttttagattaaattggaaatgtgactaacgctgtggctgttctgtcagatctgattccttttggaatttgcgaagttataaaataaagaatccccaaaagtttttctattgtagtgagatggaagatactaatataatctggagatcacctgcggaagcaactctgcttatatttctttcgactcaaatttagcatgtgatagttgaatcgtgggtgtgactgtctttttaattttgaatgccattgtcattgagctttcgaatatctcacatagtaacgattcattgtacacgagaatacctttgaataatcgtcattcatacgaactttataccctctcatatgctccatatatcctttgttttgtaccgtgccatgcatttctatctctcacagccagaaatgcaaaactggattataatgtttgtctcaaaattggattgaaaatacagaaatataggaattatacatcaaggattcttgactttaaaaaaaaaaaaaattccatgatacaattcattggactttacatattagcctatcaggtgtagtggttgtgggcacttttttttttttttttttttttctagataataagaaatgatatattggagaaatttctcaagttattatgttgtgattaaactaggtaa

SEQ ID NO: 105708 - DNA, 1021 bp, Mimulus guttatus
  Intron number 1 from transcript mgv1a001086m (locus mgv1a0 01086m.g) derived from phytozome v7.0 (chr-ID scaffold_69; pos 969549 to 970569)
ctccaaatacgacgtcgttggggcagctgcagcaggtaattaattaacagtaacacgaatactaattaattgcactctttctgcttctttttaggtggcattttttttattttttttttcgaaaatctgattcaaattaggaatttggaaagaataaaaataaataaaaaattcaatgtttgtcgtgagtaaaaaatcagttccaaaaaaaaaatcaaaaaatcggaaattgaaattttaaaaattggaataaaaagatcttatctttggaattataatttttttgaacaaaatcgacgaaattcaaaaattctattttttattcacctaataagttttataataatgtttctcaaaataaatagttttataataatattgatattatatatgtaatttttgggaaaatcggaatttatgaaattagttctggaaattaaatcagattgaaaataaagtatcgtatatatttaccattttgatctaaaaaaattgaaacaaaattggaaatcatatttttttggaattcaaaaataaaatattgtcccaactagaaaatttcggttcaaaattgtcggaaaatgccaattccaatttcctctcctaattttatcgaattactcataaatctattatgttgatttattatgcataaactttggttatatatatttagattactaacccaaactcattttctccgttgaccaaataaaatttgacacaaataatcctaattttctaacatttacaaaataataataataataatatcaattaaataaataaatatttaaaatcaaactattattatttgtttgtaatttttttttttttttgggtatattttgtaattaatatgatataaaatttataattttattttattacatgaaagttttgttgcacgtgacgaaattcaggtttggacctactgaagaatgtccaagtgcaagcaatcataggccctatgttctctgtccaagccaacttccttatttctctcggacacaaagctcaa

SEQ ID NO: 105709 - DNA, 246 bp, Mimulus guttatus
  Intron number 1 from transcript mgv1a017734m (locus mgv1a0 17734m.g) derived from phytozome v7.0 (chr-ID scaffold_26; pos 707302 to 707547 reverse strand)
cttctgaagattgctggatcatcatcaatagcaaggtatttattttaatttcaatatctcaattattgtatattttcttcattttttttattttttttcgttttttttcaatcaaaattttattttttgtttgaatttccgatgattcaagaattagtgaataaaaaactggaaacgattagacgaggcctgattaaatcgaaaattgtaggtttataacgtcacgagcttcttaaacgaccatcc

SEQ ID NO: 105710 - DNA, 321 bp, Mimulus guttatus
  Intron number 1 from transcript mgv1a005674m (locus mgv1a0 05674m.g) derived from phytozome v7.0 (chr-ID scaffold_4; pos 2957346 to 2957666 reverse strand)
gaggtaagagtgataaatatctatatatatagatatatggtatatctatttacttgcatgcatgcatgttaatgattatttataatgcagggtttttgaatttaaagaaagaagattcattgtaatgaagttgatccatagataaaacattaaaactcagtggactcatcacttattttcccccgaaaaaacaacttttttaataaaatacagtttttattatttagtgtatatttctttgtcttgttctcttgtaaggtgacaaacaaacaactctgttttctaggtcccggttgctcctctgtgggatacggagcaaca

SEQ ID NO: 105711 - DNA, 598 bp, Mimulus guttatus
  Intron number 1 from transcript mgv1a009463m (locus mgv1a0 09463m.g) derived from phytozome v7.0 (chr-ID scaffold_8; pos 1468552 to 1469149 reverse strand)
cctccatcagttgaattgttcgtaatctacgaaaggtaattcccgccctagctgctgcttcttcttcttcttttcgtctgctctgtatgttgttttcaatatgtgtttgtgtttgtttttgttgtgtattactacgtgctttgaattgattcctcggaagaatttcggcattctctacttattttcatagtgttattgcaatggtatttgctgttaatgtattgttgcttcacctattgatgttatggaaacaggctcaagctgcattttgagtttgtgtgttgattattaattaaacaaggaggtccttcatttggtgtagtacaatctcgtaatttattccgaattatcatagtcgacttctcgttaatcagctaactgcatcctctaaaaacgttcgcgtatgggatatttctgaatggttcgatattttttcaagacttgaactgaaaaaacgaatacggggattgcaatattttccccctttttatcagtgaaattaatgtaactaattgtcaaactctaaagcatcgaggtaaagtaaaagtgccttgcttaattcatatactgtattttttgttcttctgttttttcagct

SEQ ID NO: 105712 - DNA, 829 bp, Mimulus guttatus
  Intron number 1 from transcript mgv1a019747m (locus mgv1a0 19747m.g) derived from phytozome v7.0 (chr-ID scaffold_3; pos 1320458 to 1321286)
cattttgaagggcgacaaaacttttcagagctacggtatacggactaattaatcattcttttttattattttttcgtattcgaaaattgttaattgaattctgttttgttttgttcaattgtgaattctgaagaaattttgtttaatttgatcatactcgaacaattgagtatgctaattgggtgtgggtgtgtaattgagtattgtgtattgggttttgttttttgttcaattgaattctgaaggaattttgttggcgaaaaattgagtgtctaattgtttaatttgatcatactaattgggtgtgggtgtgtaattgagtattgtgtagatcagagactgtttctagggtttgaatcaattcatgtcagtatgctaattaattgctctcgacatggctaagaaatttgataatttaaattcctggcattttatgtctttggcactcataatcttgccttgattgcagtcatcgatgaaatatcgttgtttcttgataagaagtaacagggtctattattaaagccaataaaaatctctttccgatgctgtatttgtcgtaaataatttcatatttctactttggttggtcacggttttttgcttgaactgttaccgttgcccgacacgctagaatattgaaattgcaagaggctaagttttatgatgctgagatgtaatcgtaatagcgtaattgggatgcaactcttggaatatatgaaattttatatcggatgatatgggaggtaaatgaatctggaattaattaaactattcttattttatattgacaggtcttaagtctggtcacactgtccacttggtacga

SEQ ID NO: 105713 - DNA, 414 bp, Mimulus guttatus
  Intron number 1 from transcript mgv1a016640m (locus mgv1a0 16640m.g) derived from phytozome v7.0 (chr-ID scaffold_4; pos 2443888 to 2444301 reverse strand)
gtatcgaaggtgaaaactttttcttgttattcccttttgtttttacaacattacgtttgacgaacatgatcaatatttgtctctggaaattggtgattatgtgcatgcctttccacaatgtaactaatcttttgtcccttacaaaaatcgaaccaattttttttttttttttttttaaatttattgtggatgtttgtataacaaattcaatgaatgtgcactgtcagggttgatttttttttttttttttaatttattgttggttctgtacattggtttgaattggcgcatatgtaacgtacgctatttcattattagtattaatcatgatcgataattgttaaatcagtaagcagattctgtttttcttcgttcgcagtcttggttactttcgtcaaactcacacagccaatt

SEQ ID NO: 105714 - DNA, 624 bp, Mimulus guttatus
  Intron number 2 from transcript mgv1a000451m (locus mgv1a0 00451m.g) derived from phytozome v7.0 (chr-ID scaffold_130 ; pos 623804 to 624427 reverse strand)
gagccgacttcagcatcgattgaccgaacttgagggtaactacaaagttaaattattccgtatatgtaaatagttcaactatattgcataactctgtagtaagaacttaggttgcatttggatggttggatttaagcaaaagatttcaaacccattatccaatgagcaatagatttcaaagctgtgtctctcaatttaatccatttttgagtcgttgtggtggatttcacgtccatctcgtttgtggcgaacgaaagctggaagtcagttttcagttaaattaagaatcttttaattccaaatccaaatagatcctgtattttgcaagggtccaaagaacttgtcaataattgcataaaaatcgcccggtgtacaaatcctcttttgtaacttatttatacaaaaaaactaaacacgggtttgcaaaaccaactccaagtagatccccacaagccaaaaacactgtcaacatgtgcgtgtaatgggtcgatgactgatttttcttcgtttatttcttaaaattcttcgcctgtcacatgcaatatgtgcttgccattgatgttctatgcttatttggttttgtgaacagggttgcccacaagcggaggcgaggagctgcagtca

SEQ ID NO: 105715 - DNA, 863 bp, Mimulus guttatus
  Intron number 2 from transcript mgv1a011842m (locus mgv1a0 11842m.g) derived from phytozome v7.0 (chr-ID scaffold_68; pos 1100551 to 1101413)
cgggtaatccttacaatatacaccactttccgttgttaaaaaagaacttgcaacctctgtttggttaacagttttttttttttttgtttttacctgctatctgctatcttatgaattcttgcattcgtgagtttagacttatacgtaatgaatgttcacatatgattatgtgtgcatgctgtatatcgatatcatagttcatgaaatgcctgtggaagttaattagctttactcctcacgattctctattaccaaatctctggtgttcttcttagataacacttagcttaatttgccgtttaagattccattatgatagtgttgtgctaattattgacgcatttgcctgacctggcagatttctttgtcataaagtaaaccggtgtcttaaagttagtttttgatgattgaatcccgtgatgtgttactaacgaagctggataagcttcttattaggggatctctagggtttgtatatatttctgtcattgataaagtggtctgatacactttaattttgaagagttcggaacctgttcgttggttgaagttttcgtgactttttgtgctaagtctagtgttcttcttaccttgtcattcatgtggtccaccacttactttttgctcttcggctttcagaagctgcgttaatgtataaaattaacttatccagcaatacatacatacatcgacacattcactaataaatatatgaatttacatattcaaatatgttctgtcttcgcacatcttgcacttggatctctgttgattcagttattggattccaattttgttgttacctcttcaaatttcatcagaattttcttaaatcatttgtatatctgttaatgcagctgcag

SEQ ID NO: 105716 - DNA, 702 bp, Mimulus guttatus
  Intron number 2 from transcript mgv1a006859m (locus mgv1a0 06859m.g) derived from phytozome v7.0 (chr-ID scaffold_335 ; pos 52328 to 53029 reverse strand)
cagttgactctcgtttggttgttgtggacaaaaaggtaaaattgataatattgaggtcaataccctgtattattttattaaatatatgcaagttccctatgctgggcggccttatttttaatacaatgatgtcaactcgcgcagtttatttccttaatctctgcatgtgtttggtctcatcttcctattcattttgaaaaaaatctgtgcttcatcatttgcaagttttattttggtgatagcacccttgaacctacaacgaaggcccatggtgatgtgcgtaaaaaacaatattatgccagtaataaagccctctaatgattttgtagttattgtgttccagatcttcgttgcactcatcaactaacaatttattttatttgaatttattctgagatggccctcatcgtctttgttgaagttaagatacttctacgcatttctttacatatcaattaaaaagcatggaaaccatcctggttttttctcctattgtagacgagatactgcgagtaatttggttttaaaaatctccacagctccttcgatgtatctactgcagtttgtaatctatgcactgacatcttgttctgtctgcctatcttattttgtaatcattcttcatatagtgtgtagaacatttgattttaatgtccacttgtgacagcgtaccaccccgcagtcatctagaagagcctctga

SEQ ID NO: 105717 - DNA, 733 bp, Mimulus guttatus
  Intron number 1 from transcript mgv1a002810m (locus mgv1a0 02810m.g) derived from phytozome v7.0 (chr-ID scaffold_3; pos 4109723 to 4110455 reverse strand)
ctgctgtttccgatctccatctcgagtaagtgtgcggcgtctgtgcgtttttagattttctttttttagattttttcttagattttttttcgtggagtttagataaatgcgcttgaagttatgagcataggaggtttaattgaattttgaaatatagcgagagtgatgatgctatttaatgaagagtgcgaacatgctaattggtaattgagtgttatacagtaacgaggtttggtccgcgttgagtgaccccggtgaatagatagatacacatgtatatacagttttgtgtatgtgtaacagtaagttataactcataaccatgttcttgattgttgtgtgtgcagaatgctgttagaaaaattatttctagatttgaattttttgtaccttcattagaattatgcttttagagatcaataaactcacaagaaacaaaacaaagaattagagaaattgcaaaagacgggttgtggagcaggacaaaaatgggaaaaaggatgtaactcaattaatgatcactaagaaaagacgattctcatggtttatttaaatctcgtgtacaattagtgttgttgactgctcatgaacccatctgatgcgccacttcatctgtttgttccacttactttgtagtctttctttagtcatctggtatcgcaacaaacacggaaaactgcaagaacttattcgtttgtttgtcttaatttctctagctcgatagcactgtctg

SEQ ID NO: 105718 - DNA, 796 bp, Mimulus guttatus
  Intron number 1 from transcript mgv1a018548m (locus mgv1a0 18548m.g) derived from phytozome v7.0 (chr-ID scaffold_97; pos 72044 to 72839)
gagggaggtgaggccggaggggtgtttgtcggaaggatgttcagtgtatttctggaaaataattaaattagcctctgacttaaggaagaagagggccttttaaaaatgggagggactgaattgaaaaacagaggtggtggaggaaattgccagttttaaggatggggaggaaatggaagagagaatgaaaaccgtgacggagaggactaaaaagttgaatttttgaaacatgagggaccaaatgtgttttttgtgaacacggtggaccaaatgtaaaatcggtgcaaacttgagggatgaaaattgtattcttccctttgttttatgctacacccatcaatgaattgtactggaaaaattaaagtttttacccctcaagtattagactgattacatatttggtcccctatattaagaaaaaatacatttggtccctcatgtttcaaaaattcaacatttttagtcatttccgtcaacttaccgttggtccgtcagttaaggcactgagggtacacacttgattatgttgtgaaatttgtgaaaactgtatttttctcgaattatatttcatcgtatagaattatactatatagctatatagggatggacctagaatattttataggagggtgattttttttgtgaaaaggttgcatcaaaggtaggtaaatatgaattatttaaaaaacaatggctaaaataagtaaataattgtaaatatttaataaagaattttgttatagctgaggtatgattatacacaaattttattattataatcagacgataaccggat

SEQ ID NO: 105719 - DNA, 963 bp, Mimulus guttatus
  Intron number 1 from transcript mgv1a005467m (locus mgv1a0 05467m.g) derived from phytozome v7.0 (chr-ID scaffold_173 ; pos 246640 to 247602)
attgacaggtgaattgacgtgattaagcagttatttctatttttaataaaaatgttgaaatatgaacttctttctatttttaatgcttaagcggttctgtgttgctgttctctccatttttagtgaaaagtggtgaaatatcagctgctttatatttgtaataaaaacagtgaaatatgatgtttcaaaaattgctatttgtgtgcttttctgtgacaaggtagactttttttttttgtttatgcatgttgtgtgctgtatgatcttagtacgttttttttattgttgtctgagggtgaactctgtcttaaagagattcgtgagtcatttggtttgcaagtgaagacttgagcatttgactttatgacaacatgcaaacatccaacaatcaacaatcacttggtctacattaacgtttcctgttacaaatgtactttttgctatttaagttgccttgctatagttcaatgcctttcagtgtttatgcaactgtttattacctattgaagggcaaaggtacatcctttcagttatttactgcccctttgttttatcattaaccaattgctatcaatgtagagtccagaatttttttccagggtgggcttaatttttcgggggcagtgcctccggagggcatctatgtgcattaaatatgacaaaatcaaacaataggcaaagaaaaaaaaaagattggactttttttaggaggttttttttttggcattaattttgaggtgggctaaatacaattatagatataatttaatggtataatttttaattcagggtggggttgagtccaccctggcaaaggggtggactcgcccctgattgctatagtatgcatgagatttttctgcctgttgttagtatgcatgagatttttcttcctgataagtgcttgttttgttgcttatattttgaaaagggagcaaggagggagagaaaatttgtcagaaa

SEQ ID NO: 105720 - DNA, 585 bp, Mimulus guttatus
  Intron number 1 from transcript mgv1a022004m (locus mgv1a0 22004m.g) derived from phytozome v7.0 (chr-ID scaffold_113 ; pos 424499 to 425083)
aagattgcggaaaacggagaagaagggcctgaattgtgagcaacttttttttttgtcaagaatcgtgttcttgatatatatgtttattattacttgtgcatagtatgcttgtttatatgggtttgctctctatttgggttagtgaatagtatgtttttaagctactttcgggttctattttttttcgggttagaagaagggcttgaattgtgagtactccctttgaatcaagtagtgtgtaattaacattcattaccatttccttgattttgcactcatcactcttgattagtttaggagagattagttaatgggaagggtattttggtcaaattctataaatttgttttcttgaaatccgtgcatgcacatatatattagttttgttgaaatccgcgcactaacccaaaacgacgcttatattgaaaaaaagggagtaactttttatttcaagaaccgtgttcttgatatacgtttattgttacttctgcgtagcgtatgcttctcctatttgtttgatgtgtttgctccttactcgggttactcgggttttgttaacaacttggtggtacgtacattgagcag

SEQ ID NO: 105721 - DNA, 603 bp, Mimulus guttatus
  Intron number 1 from transcript mgv1a004352m (locus mgv1a0 04352m.g) derived from phytozome v7.0 (chr-ID scaffold_1; pos 1655197 to 1655799 reverse strand)
caccgatttcggcctctccgttttcttcaaagaaggtcttctctcaactaccttaaccaccatgcgttttttcctttttcaattttattcattttcaaggatcaaaaattacgaaaatacccctcatatttatgttattacaactataccctcaactatgaatttacttacacgttcactcttgcggtgtcgaatttagtggaatcttctagataatatgaaatatttcttcagtttgtaccctttttacccattcgagctccgcattttcaactaagatgatcgtaagatgtgtcccttggcttgtaaatatcagattgttgttcatttttgcacaaaacgagtacaaactagagaacatttcacggaatctagacgattctgttgaatttgacaccataaagttagacgtgtaagacgattcatagttgacggcggcgggtagttgtaactacccaaatatgagaggtttttcgtaatttgaccttacctcctatttttaatgatgaaatcttattttatttttatttatttttagtgagtaaaaaattgtgatgacacgtggcaggggaagtattcaaagacatagtggggagtgcatat

SEQ ID NO: 105722 - DNA, 897 bp, Mimulus guttatus
  Intron number 1 from transcript mgv1a009014m (locus mgv1a0 09014m.g) derived from phytozome v7.0 (chr-ID scaffold_24; pos 639794 to 640690)
agtgttgccggcgccggcgcctccgccaaagagaggtggggtttttattttccttaaaacgagttatcttgtgaagggggttgtgaaattccgtgtctttatgctgaacaattagggtttaaatcttgcatttgtctaactattaattattagcaggatcagtgtaatatatttcttgataactcaatcttcgattatgcctccattttcattggatttaactacctgcaaatatatgccgcacctaaaaccgagcgaacaactttagggctctaggtgttaatgccatgtgcgatgctcgtagaaaaacactctcttttgcaacgaaaagaatgtccctttttcccatgtgataagagacggaagtaccgtataaacacatagcaaatttcatgatagtgctcttcgtttattttccactcgtctttcttgctaaaactttgcagtacatttccattcatgaaatttccttttacaatttacggatgctaagatatgtaatgacgtggcataattatctttgattgggtgttgttgacccatttgacgtgaaatggaaatatctacgtcgttaaacaacaaaaggaactttcgttatgaaaatcttagttattgggcatgttgctcatactgccttttcccctagcagaataagttggaaaatgatgggctgagggtaaacaaatggacctttcgatttctcatttgtatccatcagttaaggcaccttgtcgattgttgatgtagaaaccatacaatagccagctctaacaaggatagtagattctcaaaaatctttaactaaacgttctttagatactgcctttcggctttatattctctttatgcacgttttttgcagtgctccgccaaggaaaaaaagaagaggtggacccg

SEQ ID NO: 105723 - DNA, 479 bp, Mimulus guttatus
  Intron number 1 from transcript mgv1a013492m (locus mgv1a0 13492m.g) derived from phytozome v7.0 (chr-ID scaffold_81; pos 1016660 to 1017138)
ttcagtctttacttcaaattttgcggtaataatctgtacgtgttcttcatttcatgatccaattttttttttttatttgggtatttattagttgttgtttttctttgttatctccgtcgaatttcacatgggtttttagtttcagtattgaatttcacatgggtttttagtttcagtattgaatttcatatgggtttttttttgtgttgaatcaagaatgggttttttgattattaatcaagaaccagtttctgttcatctttgcgaacattctattcatgcggatttcccggacatgtaataaattttattggctgaaaaaaccttagactaacatgcctttggttatttggtaataatatgaaatcttttttttatatttttaagtgatttaactactttgagtgcttgatcatagtttttttctttttttcttgctttcaggttgtgtgctttattccctaatttttttttcgaaa

SEQ ID NO: 105724 - DNA, 1036 bp, Mimulus guttatus
  Intron number 2 from transcript mgv1a017615m (locus mgv1a0 17615m.g) derived from phytozome v7.0 (chr-ID scaffold_18; pos 1738523 to 1739558 reverse strand)
ttgtttacgggagcgtaaaacttaggattcttaaggtatgttatttattttattttatttttgtttttcgtttttcaatccttttggttcacaggtgatgaatggagatgtaaatcatgttttaatactgtttgagcttcatattttacttcgttgtttttgtttgagtgaatcgaattagattgttattctatgttgatcgatttttctacgatttggtttgatttggataatccggcattgggttgacttatctatctaaacacagcttgaaccgtaaattgaatttttacacttactgaagtagggtgagagacgttgtatgttaataaatgaggacgtaatttgctgcatgattaacgagtatgttgtagtaatggcagtgattgagtatctttttggactcgatgtactcgatgcatgcttgcagtgcctagggttgcatttagtcgaggggatttgagagaagagtagcaaattgattgatcttctggattggttcattttgacgaatgtatttttaaatctttagctcccattttaagtcattttttttttttagttttcgggggtggattcaaacctgtttcattttgaagttattcgaaatccttcctcgaattaaaatccttcaatacttagcttttggatggaagaatttgagtgatgatttccaatttataatagaaagtccattgagattgtttggattgattcatttgatgatgaatttcaagttcttagctcttattttaagttattttttgagttatgcggtggatttcaaattcatataatttgtagttatttgaaatcattgtgtttgaactaaaattcgaataattcaatcctaatgcactctaaaagacgtaaaggaccattgcttctcttgattggttttattgacgagagcttgtaaccattatattattttctgattttccatctgtcaccggagcatcgagatgactcatattttgctttatttcttatttcaccaggctcaggcaaagtcccataagaaagctgaagctaa

SEQ ID NO: 105725 - DNA, 487 bp, Mimulus guttatus
  Intron number 2 from transcript mgv1a013879m (locus mgv1a0 13879m.g) derived from phytozome v7.0 (chr-ID scaffold_105 6; pos 8042 to 8528 reverse strand)
tatcttgaagatcgaactgtacggttgcagttgtaagatctgattcttaattgaaatgatattctctctcatctctctctatttgtatgttgtactattgctgagttacatttccattgagacactttgcatctccatttctaaatgataataatttagttgaaataaattattgaaattcaataggtagtcgacagctttggtcatttatgtgtttcgtatatcaaggcgtttttgcattctttgttgactggtatatatgtccgcaccatatagatattcattcatctttttcgttgaagtcatggtttcatgacaaaatcacggcagacatgagatgagcttcttttactaggttttataacctatatttactgaacactcgtttttatcgtcccctttgatttttatttttttctgaagaaataatcttcgttaacttgcatgttcagggacactgctggacaagaaagatttaggagtctca

SEQ ID NO: 105726 - DNA, 593 bp, Mimulus guttatus
  Intron number 1 from transcript mgv1a013879m (locus mgv1a0 13879m.g) derived from phytozome v7.0 (chr-ID scaffold_105 6; pos 8533 to 9125 reverse strand)
tacgataaatttgacaatacttatcaggtgcgcaaatcaattttccgctgagtttatatttttttattttttatttattattattatttttggatttttgttttgttatgcttgaggtgtaaagaaggtttttagtacggtcgattcatttgcagttatctttgtttgccaatattgtttttcctcgttagctcactgtccagtgtccagctcaataacaagctagaattgatttttagaattttgttttcgctagtgatttgatgtcaaagacgattcgttatagtaatcgatgatcgttttcgtacatttgtaattccactctgctgtagtaatttgattttttttttttttttttggttaattctgatgatcttttggtttattcgtttcgttataatctctcaaatgaagttagtcaaactttaactgatttgaatttggaaatgtgaagagttaatctgcgacgatagagttttaaagaaggtttttaggaacgagggaaagtgggatgagaacttacatccctgttcttttgatttttttttttcttttcaggctacaataggtattgatttcctctcgaagactat

SEQ ID NO: 105727 - DNA, 458 bp, Mimulus guttatus
  Intron number 2 from transcript mgv1a017765m (locus mgv1a0 17765m.g) derived from phytozome v7.0 (chr-ID scaffold_7; pos 1859876 to 1860333 reverse strand)
caagtgatccaagagttgaagaggtccaactataggtcaggtccgttacactattttgtctctggcaattgatgggcgttagtcagtcgtctaatttagaagtcctggaaaatatggataccatattctcaaacttttcgttgatcgggaattattattctttagtaatgatttatgattcattagtatctattgatttatttattgatgttctttggtttttggctcatggatgttgattttttgatattgaatttgcttgttctcatacgatagtgttcatcatcatgtgggtcttgataatttttttgattaactaagcaattttatttatcgagcagtgagtacattcaatatgtgcgtgggtataatgcgtgaagatgtagtatattaatttaacgagttaaatatgatgaaattcaggcccaaaaccgtggtattaggatcccgggagcaat

SEQ ID NO: 105728 - DNA, 725 bp, Mimulus guttatus
  Intron number 1 from transcript mgv1a013713m (locus mgv1a0 13713m.g) derived from phytozome v7.0 (chr-ID scaffold_8; pos 1653850 to 1654574 reverse strand)
gaagctcctcctcccgctttcgacgagggtcagcagtaaggaattcgcccttctttctctctctacaattttgcatgttttcttcgtattaagtaggtgtttgttgttatatgtgataattgcaattgtgtttgattttgtcaatttttgagctcgttttttggtggatttagtgtgatctttgcaattttatgtacaatggtgtgtttttcgacttgaaaatttgcgtgtacatatgaagaataggtgcctgtgcttcttttgaaagatgtcgttcaatttacactgcagtatgtatttacatgtggtccggatgcgtgcattgctgttttattcgttttggttttccgaagtttttactcgagctactgcaatatttttctgccaactgttgtttcctaataatacaatatttctgaaattacataactttgggattggaaataacttaagaagtatttgtaatgaagatgtaatcacatattcgcctggaaaaaaaaatccaatctatcgggattgaacatcgtgcgtaattattttaaaatttctcatcttttatgactttatcgtttgagataaataacaaacatacggctgctctctttcgttggtttagattttttgaaatgatctgctctatacctaaaataactgcatgaggatgaccggagttattttgatgtattgtttcagcccgttgtttgtgacttggaagaaggccgtca

SEQ ID NO: 105729 - DNA, 304 bp, Mimulus guttatus
  Intron number 1 from transcript mgv1a011237m (locus mgv1a0 11237m.g) derived from phytozome v7.0 (chr-ID scaffold_4; pos 467347 to 467650)
atcaatttttctcccccggcgggatccacgataaggtgctcttcttctcttaatttgcttcttccccgaatcagtttgatactctcgaagatttaatttgatttctggttcgattatctctctattttttcaattacatgatttagttctgagtttctgcgtagtggtttttgtttttataattttgtggtttgctttgttaattttattataattatcagtacctgaattagtagtattgagaaagaccagctctacttccaatttaggttatagatcaacggtttggattctcgtcatttgc

SEQ ID NO: 105730 - DNA, 675 bp, Mimulus guttatus
  Intron number 1 from transcript mgv1a010429m (locus mgv1a0 10429m.g) derived from phytozome v7.0 (chr-ID scaffold_13; pos 1193156 to 1193830 reverse strand)
cactgttctcgtcaccggcgccggcggcagaactggtaattttatctttttttcgcggcgtttctgattctctccttcctatgtataattctctgttaattatgataatgtgtgtctacatggggaattaaatttaggtaattgctcgtgttaggtaaagatgattaaatatgcacttaaaaatgaaattgtcttgtcgttctgttggataaaagtggtggatcttgttacactgggtaatttgaaattttgcccaaggattttgtttggtggcgaatgggagcttcggcttagggtttagggttttgtggatatgtttgttgcagattatgaccattaacaagttcttcgtttaattatgaacttaaagatgatttgctgattattgattgtagattcgtagtaaatgaaatcaatccttagaacaccgattcaaagatgaagcaaaaatgggggaaaatatgatttgtgtccttcaatcactcgttttgttttcggtgatagtatgtttgctatctctcatccatggaagttgctctatggactattagtgcacttgtatttgtttatactttcttgtatttccacgacatgtcgaaaaagtcccctgaaaacaaaatccattgctcgataattgcaggccaaattgtttacaagaaactgaaggagagatca

SEQ ID NO: 105731 - DNA, 623 bp, Mimulus guttatus
  Intron number 1 from transcript mgv1a009340m (locus mgv1a0 09340m.g) derived from phytozome v7.0 (chr-ID scaffold_16; pos 1684340 to 1684962 reverse strand)
gctcctatattccccccttcctccctggttctgtaagattctgaatatctctctctctctctctctctctctctctctctctctctctctctctctctctctctctctctctcacacacacacacacacacacacacacacacattttacttctttgtttgtaatcttgaacattagttaatggtttcagaataggctagttttggtgactattgtttagtgtctgcacttcttttaggatctttttgagtttgaccagtcagagtcgagctgaatgtatgattgttcaaacgcgttcgaaatatttactaagtttagaaaattgtgtttgagttttgtttgattaagaatcgagctcgagtatcttgattatttttatattttttttatcaggaagaaatgtgtgtatgagcatggtttgtttagcaatcgagcttccgataccgtggttttaatatacattttatcacttttttttaatggagttcgactcgagtagaccttcgtatcgtaatagaaccaagactataagtagatttatatacattcgtatcctaaccattgatttgattttttgggggaaaataggttatcgaaggatttggagtgtcgaaagtaatcaa

SEQ ID NO: 105732 - DNA, 841 bp, Mimulus guttatus
  Intron number 2 from transcript mgv1a016073m (locus mgv1a0 16073m.g) derived from phytozome v7.0 (chr-ID scaffold_3; pos 1285525 to 1286365)
ctgttcatcacttaggttctactgagacattgcaggtaaactattagatctccccctctccgattctgtgtagattcttgctttgtttacctattgtgttagtctgtaatgcatggaatctctaaatgcagaccactgtggatgtgactgtgtgtgtgtgtgtgtgtatgaaagtgcatgtgcaatgcttgggagttttagattcttttgccagcacttagaaatatgctatatacatggtatccttgttgggaagtctgaaacacggattgttggaaatgcaactcagcgaagctattacaaaagaaaaaggttgtgggtcaagtaggtcaaaaaaatgtatagtactatttgcatggttgcatatcaatttagaggtgatgtatccggatactgcacggattccgcaactttgcctgtgtatgagttttttgttaggagagcctttttgccctccactatttttggttctatttatggctgctttcaattgaaacttcctctgcaaaggaatctctctttttccaatgcagtgctaatgagatttctcataaaacagcctaatgaagtttttcataaaacataaattgtgcctctctagaagtatttactttaaatctgaaaataatgtgagctgtgctatgtgcaatgctaggaaatctcgtgtacttttgaagtaaaaatataacattctatgaaacaccacaatttcaaataatttatcgtatttattttcttctaatctacgttcccgttccagttcctactatagacctttgactttgtggctttttctcctgtctcagcaacttaacagatctctgtcatctcgacttggtcg

SEQ ID NO: 105733 - DNA, 669 bp, Mimulus guttatus
  Intron number 2 from transcript mgv1a022488m (locus mgv1a0 22488m.g) derived from phytozome v7.0 (chr-ID scaffold_103 ; pos 900658 to 901326 reverse strand)
attttaacgaggtaatttcttatgttagtaaatgaactatcataatcaaatgtcgttttcttttatgattctgtacttgttcaatatcttatgttagtaaatgaaataatcaaatgtcgttttcttgtatgagtctgtacttgttccttgatctagtacggtgaaaaatctcagttgtttttactacttgaaaggaagtatacttcctataatgtcgtaaatcattcctataaccactgatgaagaaatgttgaacatttagtgaaagcaaaataaagaaaaatactgtttataatcagtagagcttatatttattttgttctttgggatttgcttctcaacgacattttatttcattttgtatttgttcttaaactaatagcttatgctagtagtgtcagaaacattaactaagaaaagaatatcattttctacattaccaaaagacttatttcgtatcttcttgggacgagtaataatcagcgagtacatacttatgctgttgttagtctttttcttagattcgctacttgttccgtgttctagtggtgaaatatgacctcattaagatatttaattaaccagcttgatatttaattagacggtaaatgcgttttttccgagtttgtgaatactatgtgatacgtctgagttattggtctaggtaca

SEQ ID NO: 105734 - DNA, 542 bp, Mimulus guttatus
  Intron number 1 from transcript mgv1a003679m (locus mgv1a0 03679m.g) derived from phytozome v7.0 (chr-ID scaffold_79; pos 1009859 to 1010400 reverse strand)
catcgggctactacacagcgcttcaccctaggtgaattctctctctctctctctctctctctctctctctctctctctgtgtatttattttgtggtgttcatactactgactggtttgcttacaagtgaccctttcttcacctttatttcaactcgaattccgctgagttttttgctgttctgcaatcagggtgggttttcaccattattaagttccattttcttgaattcttgttttggtatttcttcaatttgtctctcttttatttgtgggataaggataaccttttctgttgaattagggttgacttgattgatatcctggtaagaggcaaccttttgtgttctgcttttatgtattttatatctctattaactactgaactaaatgcttcttgtatttttcacttttccccttttaaactttgattttttttgaaaaacagagtaaaaaaaagaataaggcaattgattcgtggtttttgctcgttcgtattatcgtatcgaaatctcgtgtttttttttcttcttcaggaataatt

SEQ ID NO: 105735 - DNA, 665 bp, Mimulus guttatus
  Intron number 4 from transcript mgv1a005812m (locus mgv1a0 05812m.g) derived from phytozome v7.0 (chr-ID scaffold_182 ; pos 248547 to 249211)
tttacgacaattgcattgcggatcgaattcaagaggtatatatatatatatatatgtatagtagtagtagtagtactcttatgtggtacagaatcgtttcgtttttagtaatcgaattatgagaaaatcattaaaacgccgcaaaccctttttaagcctttaaattcgccttttttcgtgtgcgataacaatgaagattccgtttctttacttggtaggagtatccaatctccaagtcgcgtctcagtcgatttcttcgtcgcaaaattaatccttttttgtgtgtgtgtgtgtgtgcgcgcagtatgaatgtagattcctaactcaatttgatttttattatatctattcaattctgaaaaagaaaaaaaaagaagaaataaaaaaagaaaaaaaaaaacaagagataaaatcacaatcaaattactgaaagtaaagtgtaaatgtctataaggcaagtctctgttacaatcaataaaatcaaaagtatatatttagtaaattaaaattagaaattaaaaaatagaaaaaaaaaaaaaaaattctgcttgtataagtttgccttatttttttatttttttatttttttattttttttatatatatatttttttaatgatttttttgtttatatgttacagtcactggtgaaaagagcagagagt

SEQ ID NO: 105736 - DNA, 902 bp, Mimulus guttatus
  Intron number 3 from transcript mgv1a004060m (locus mgv1a0 04060m.g) derived from phytozome v7.0 (chr-ID scaffold_55; pos 32673 to 33574)
ctcaaattccaattatattaggtacgccgcgacgtctcccttcgtttcgtttttaattaaccgtcgttcttcttagaagattttgttttttgtttcatattatctattgttttagagtctaaattatgcatttatgatatatatttttcttaattttgaccctcgtgctactaattaattgagagaaaatttattacaagatagataataagtattttgatctattaattgcattttcctgaaaattcgtcatatttgttactttttttaaaatacttgtgccggaatttaaataacgggccagataattttggaacggagagagagtattaatctactaagtagaacatcgataaattaatactcgataaatcaataacctcgtttaaataataatttatttcggtcccgacttggtaaaaatgtattaaattattagttcgataatttaatatttcgctgaattaatagattttgctagtcccgactctattaatatatagaggtttaactgtatctagacgttcaaattcttttgtgttccatttggattgctacgttcgagtgaaatttgcaagatgtcgaaaattgtagaataaatcgagtcaaataagttcaacaaaattattattatttgttgaagatatataaatattaactgatttatcactaacaacttaaattttaattagatgactgattattcaacatggtattagagacaacttaaacgaagtcgaaaagtgatcatgcgtgaatatatagcgtacacaaaatataaagataaatttgctaagcatattattctagagataaataaatatttatatagtattattttttgaattaaaaaaaatgaaataattagttaaataaatatgtaggggagtggtggaaaagtg

SEQ ID NO: 105737 - DNA, 541 bp, Mimulus guttatus
  Intron number 1 from transcript mgv1a000079m (locus mgv1a0 00079m.g) derived from phytozome v7.0 (chr-ID scaffold_87; pos 847810 to 848350 reverse strand)
tcaagattcgccaccctttcatcacctgtgctgaggtctctgttctctctctctctcacacacacacacacatacaattgtacagtgtttgtatttacacatattgaggattgtgtatctcaatttggggcaagaacttcaggatcaacaattttgatcttactgtttcttgtcaatttttttgataattaattaattaattaattaacattgattaatgtttaattttcttgtgtgcccacaaataatttcccacaaaattgatgtacatgttatgtatgtatattgtatctaatgtctgataaaactgccagcaggtatattcaccagctcttgtttaattttacttcacagttctttcgagtctcgggttcttaaaacaaatcgatttcgtatttagtttccgagagcgtttgaattttatattttccatgtgttcctagtttgatgattggattgattaaaattaaaatttagccatgttgtttatttactaattagtttcattttcaatgggcagattttgcttccaaccgttgtc

SEQ ID NO: 105738 - DNA, 313 bp, Mimulus guttatus
  Intron number 1 from transcript mgv1a009206m (locus mgv1a0 09206m.g) derived from phytozome v7.0 (chr-ID scaffold_224 ; pos 70819 to 71131)
ccatcagcttgctaggtcaggtaatccttcttctcccattatcaattttaataattttgtttttggtaatttcagtgtacaaatatttaagattttttatttgggtgaaattaacttttttttttgtggcaattttcgtttccgatttcaatctgatgaaccgaaaaatcgaacatcgttatggcgtatattagtattattaaaaaaatagaaacatattgattaatgagtgtagtaatgctggattctaaggcattgcaatttattgcgattttcagggcgagagcgattcaccggctggtccagttgcagg

SEQ ID NO: 105739 - DNA, 952 bp, Mimulus guttatus
  Intron number 2 from transcript mgv1a013561m (locus mgv1a0 13561m.g) derived from phytozome v7.0 (chr-ID scaffold_39; pos 19756 to 20707 reverse strand)
ttatctcatcaaactccttttgatcggcgacagcggttcgtagttttaagccggaatttttttttcccggttgaagttttcctgcctttagaatttagatataatgaattgagtttatcagcttgtgcattttggtaccgtttcagctgcatttggttcgaagttagagtccttcagcgatcatttggttttgaattttttttggttgacatttgatgatgttttatgtgttcttttaattcgaatttactggcaaaattttatgtcgctgtttacatataatagcgatatatccgataacttcgggaataatatccaaatgaggaaaaatgaaatacttgatatgatttgatgtatctatactaagcttgggctatgtgcctccatcttagattctagttaatgtatgtgttttttgggcacgtatgactgtatcgtagaccttaatcactaaatacccgagatcagaataatcgagaatttcatttgggttacaatttattaggggtttgcaaaagaatatgagtggaactagtgaatgggagttggctaaatatgtcaaagtaaatgcagtttaatataagttatcactgagggtatgtgaatttattattatgcactatatgttaacttagaatgaataaaatatgtgtagtcatgtataatccgagtatccatgctgtcgatgtaaatggatgtcgatagaccccctcatggttttagattcagatgtttccctaaaacgaaaagtcagcttgatggtgtttcggaaatagttgttctagttggctggaagagcttataatttattttttactctcgttgttggcatgttatctttgtttcttgtagtttgtctgtaattcattttacatgactgggttgaagtgatcaatatttttttatttcttcttcaggtgtgggtaagagttgccttcttttacgattttcc

SEQ ID NO: 105740 - DNA, 607 bp, Mimulus guttatus
  Intron number 3 from transcript mgv1a006858m (locus mgv1a0 06858m.g) derived from phytozome v7.0 (chr-ID scaffold_109 ; pos 300757 to 301363)
ccaggtttcatttggtcataaattactttcccgtcttgtgatatatgcttgtgcaaactcttcttttaatacgaacattattgttttctattgttgcattctttttataaaactgtgcatccagccgaaatcatctaattttgctgtatttattggtcataatcctgcctccagaaacttttcttgccatacctgtaaatttagcattaggtcaaaaaatctatcacctttggatagagatttccgaagctaaatcatgacatttcgtcattcagaaataagaattagaaaatgattgtagattttttttttttttactttactcccgaacataacaatgaaacaacaacatatgcatttccactgtggcctggataggcttatatacgattcctgtaggatggatgctgttttaccaactcagccgtgctcgcctagttgcttgcattaacttacagttgcacctataatccttatatactttctggttatgcctgttgtggttggtctagagacaatacttccaattgttatttgaatttcatttttatcctatgctgaatttattccgatacaattttgtttgaatgttattgacaggacccaa

SEQ ID NO: 105741 - DNA, 982 bp, Mimulus guttatus
  Intron number 1 from transcript mgv1a014126m (locus mgv1a0 14126m.g) derived from phytozome v7.0 (chr-ID scaffold_115 ; pos 321715 to 322696 reverse strand)
cgtccagcggaaataagaacatcaacgccaaactggttcgtactctctcctccgacgatcccctatttttgcatctaatttgttgtataattttcctgaaaatctcggttttaatttttgtttaccgttttctgacatcatcaaacaagactctatcatgtttgtacgaatttgttccaacaataggttagaattttttttgcgtcgtcgggaaatagtccttgattattaggttaacggtcagcagtactggtttacactcttcggcaaaggtgtatcaattatgtgatgggcagtatagcagctagggtttcagagttcttcaattcgtattttcttgtttcaatttttgtgcgattcttgtattgaatggtattcgtgtgtccatttcaccatttgtatatatgggtgagacaattaaataattagtgcaaaaaaacagtttaatcatacaattgaaattgatagtgattaaataatttggtcattcaatagaaaaaacatactgaagaaactttcatctacttccaaaattgaatttgttttctgtagtgccacagatcagttgccagtttccactatatattttattgctaagttctctgattttgtgatatatttatatggtgaaaacaattgcagcagttatttttatttggggttggttgaatggaattgagtaaattgataaaagtgcagctcaagtagaaatccctttattgtcattcaattcaagttcggtccgcattgagcagatcaagtatttgtgtagtatggaattatttttttgcattatgatatttctgaacggttgattttctcatctgcggttttttcccctttcttattttttcctggggaagaaaaaggctgcaaagtgtttgagttttcgcttaactgtttatgtttagtgcctcgccttttgcttccgtattgctaagttggatgagggtttctttgcttctctaggtactgcttggag

SEQ ID NO: 105742 - DNA, 653 bp, Mimulus guttatus
  Intron number 1 from transcript mgv1a008481m (locus mgv1a0 08481m.g) derived from phytozome v7.0 (chr-ID scaffold_41; pos 331278 to 331930 reverse strand)
agtggaagtggaagatcagcagagcccagtttcaggtgattgattatcttactttacctaccttttgtctttgatatcgtacagaaatccccttaattttgaaatttatgaatttgtttatagttcaattgaagtagataatatcttaatgatgagttattaatctgaattgtgtgatttgtgactgtaattgaagaagatttttaggtgagaaatcgtttaataacttcgaaaatattatgcacgtaaggtgttcgactgtttgtctgttcctctttcacttcatattcttcttcaaatcattgtattgatggtgtatgtagtcatttttgcagaattgtagcattggatgtaagtaaacatacaccttcggcgattcgacatgtttttttctccggaaaagggtgtctaaaatttgtgttctttggtatttgtttcgcttcttttatcgaactgagtaaccgtcgttctatttggtcatatagaaaatctttgtgttcattacatgatgatacagttcatatatcagatctgagaaatatcttcttagtcgtgtattaatattcaataattcaaatttcgtttggtttttgagatgagaaactcatcaagtgatgaaaacacgacacatgacaatttgttttcagatcaag

SEQ ID NO: 105743 - DNA, 408 bp, Mimulus guttatus; identical to SEQ ID NO: 101474
  Intron number 1 from transcript mgv1a022536m (locus mgv1a0 22536m.g) derived from phytozome v7.0 (chr-ID scaffold_211 ; pos 97005 to 97412 reverse strand)

SEQ ID NO: 105744 - DNA, 688 bp, Mimulus guttatus
  Intron number 1 from transcript mgv1a017662m (locus mgv1a0 17662m.g) derived from phytozome v7.0 (chr-ID scaffold_66; pos 1246643 to 1247330)
cggtggttagtgctgtcaaatttactactggagaggtatttgtagattcatacccttttttttctcgtttaatttataaaaataaggtcgatttgattgctattatacaatcctgattccgagtgctttattttgtttctaggagaagaaatcaccgtgtaaatacctctgctgcactttctggatcgagaattactgcttttaatgatgtgggagtcgaagaccccgatttcgaatatatccaatgtaaggttttgttagattcgactgtgactgttttctggtgaggctaaataatttgaatattgtgttaaatctgaatttagctctagccgaggctggtattgttagaagcaaactgtccgacggctcaaattcgaacgaagctgtcgagttttttcctgagaggtaccttaagatctccaaattttatattcttcccaattgtactccaaatttcatatcttgactgaaaatagtaatcttttatgtaataggtttatatgtcgccaggatctagttaattggaaagcaaaactcgagtatgaagtcgtaccaggaatcaatgaagaggtaggaatattttttagctctaaaaatatacaaattaatagttttttgttttctctctctaaaagcctgatttttcttgcagttcagatatcaagaaagaacattggtttcttgg

SEQ ID NO: 105745 - DNA, 730 bp, Mimulus guttatus
  Intron number 1 from transcript mgv1a012192m (locus mgv1a0 12192m.g) derived from phytozome v7.0 (chr-ID scaffold_8; pos 2655910 to 2656639 reverse strand)
ggggtgccatcctctccgatatctacgcccgcaaagtatgcccttccttatttttaattttttcccccttttttctgttgattgattttgcgattttggatcttcaaaactgaaacaaattgaatggtatgcttgttgttttaagatgagtagttaattttacattccgcatttgtcgacatcaattttccagaaatttactggatttttttttttcgaatgctttggcaaaatcactgaattgtagaacagtgttccgaattgagggggctttttgacaaatcaatataagccatgtgagaagtgcattttgataccagagcacaagagtaaaccctagaacaagtgatgaaagcataatagctttcattcagagattattatagctaattggataataggagcttcaataaattaaatgtagcttttcctcttatgagaatatggttattcggggcgggcgatttttttttgaaaggtatagttgcttttgtgtgcactctgcagcttcaattcctagatctgcaactcaaaattatattatttgaaagaattgatgtaatgttgatttacatagtcgaacaatgattggtttctctactttatcgaactgtatattttctggattgtggaatattgctactaagaatgggttctgtttttgagtaataatcttctaaacttatctctcgtaggctgatataattacacgaggttattacggttggaa

SEQ ID NO: 105746 - DNA, 1013 bp, Mimulus guttatus
  Intron number 2 from transcript mgv1a022462m (locus mgv1a0 22462m.g) derived from phytozome v7.0 (chr-ID scaffold_205 ; pos 281379 to 282391)
ttcttgaggtaaggttatgaaacaccattctctcttaaggaattcaaatttataatcagtcaactctggatgcagtgtagtaaaagaaaaaccgttatttatttgttattttttagatagttttgcttcaatttactttctggaggatataaacaaagagatattttacaaaaggaaatagtttgagctaaagaaaaactttctccgctcatgccatgcatatctagagatgtatggacaaagtattagatatataatcattacatgcacgatatatatcgacaaatcagatccaaattatgataggtagtgtgaagagtttaagtagatagtaaataagaagtaatttcatacatattgtccagatatgtttcgatacaagaagtcaagaacaatagaaatgattactattaggaatttaatgcttgaacgatgttgctttaatctgatcgtgtttgaggggttcgtcctgccatatgtgaagacatattctgtcagttaatttcgtacatgttgtccaaatatgtttgtgtttgctttgtgaatactttaccgtgtgagtgtgtgtctaagcaggagtgcatgagcttttgctggtgatcagataaacaggaagacgataaactgaaaatggaaggaaaaaagaaaaaatataagaaaagtaacatgaaaagaaataaatataataaaaactgaaaaaggacatgtgaaaataaaccagtatctgaaattattttggtatttgcagaaaaattaataaaaaatatgaacaggagtgcatgagcttttgcgcgttatcagataaacaggaagaagataacctgaaaagtaaggaaaaggaaaaaaatatgagaaaagtaacatgaaaagaaataaatggaacaaaactgtgtgccctgcacgtactgattattaacttgaccaaaatttgatcccatttagctctcacttttttttctttgtctaatcttctgtaactgttcgcaggtaaagggtgctttgtttgctgcagg

SEQ ID NO: 105747 - DNA, 182 bp, Mimulus guttatus
  Intron number 1 from transcript mgv1a010837m (locus mgv1a0 10837m.g) derived from phytozome v7.0 (chr-ID scaffold_4; pos 2455728 to 2455909 reverse strand)
tactgtgaggaggacgactgttacgatctcctagggtgcgtaaacctctgctccgatgttcctctctactgttgcatttctcttatttttcttcatttttcgacttatttcgtcaccaattttgttttttgcgtattaattatccagagtaactcagactgccaatagctccgagattaaga

SEQ ID NO: 105748 - DNA, 496 bp, Mimulus guttatus
  Intron number 1 from transcript mgv1a020104m (locus mgv1a0 20104m.g) derived from phytozome v7.0 (chr-ID scaffold_151 ; pos 296814 to 297309)
ttttgcaccttgctgttgctgataaacaagttgaggtattattattattattattattattgttagcaattttttctgtgtgattcaaaaaaaagaagaaaaattaagtatatgataattaaattgtattaaaaatgataacattatattaaaatacgaagttgtgtgttgggtatccgcccggagaagacaaaccacacaaaatcaaaatactcatattttattcgaaacaattaaaatataatatataataaatcaactaaatcaattaattatagcatatgacagcaattaccgaaaacaaaacaattatgggaataagggtacaggactctaattattacttatattatttaaacctaacaacaactgcaaatcataacaattataaagactacaagaaaatcagaataattgcaaaaagtaggaaacaaataacacaaataataaggaaaaactagagtaataaaggggaaagaagaaccacggcgaatca

SEQ ID NO: 105749 - DNA, 858 bp, Mimulus guttatus
  Intron number 1 from transcript mgv1a003292m (locus mgv1a0 03292m.g) derived from phytozome v7.0 (chr-ID scaffold_26; pos 289783 to 290640)
gactgcttgctccttcattgttggtatacatacacctatacatatatatttcctctctctctctctctctctctctctctctctctctctctctctctctctctctctctctctctctctctctctctctctctctctctctctctatatatatatattaatttggaataaaaatatgtgattgtgtttggttggacctaagtgaaacaccaatcaaaatcatatcaacaaaaaggtaattaatcactaactaattattagctagatagcctctactttcccatccaaagattgaggagcactaccacaacttttaattaattacctccttttttcacccttcaaataataattaaccatgcatgaagtttaacttctttttttttttccaattaaaaaaataaaaaaaagctatatatagatataattaataatagtaacaattaatctgtttgtgtggtcatcgttacatgtcaataactaatctccccaaccaattcagacaacttggtaccttaaattctgtctaaagaatattcaaaagaccaaattacggccacccctgaagtaagcctaaattacggaaaaatctcttatgtttgaataattacaaccatcccctcatttatgtattatttcacgaaaaaaattcttccttcagtagggaaattttgcaccataagaatgaacgtgtaagacaatacaatagttgaggagtgattataattacttgaagagttttttcgtaatttttcctattaaaaatggtgactattaaattgtctttcaattttagatttaatgaatttcttatatataaatttataaaaaatataaataaaaaattgtgtgcagtgt

SEQ ID NO: 105750 - DNA, 978 bp, Mimulus guttatus
  Intron number 1 from transcript mgv1a000908m (locus mgv1a0 00908m.g) derived from phytozome v7.0 (chr-ID scaffold_177 ; pos 109797 to 110774)
cattgaccattctgtcaagctctataaatttcctggtattttcttctcctctctttatttaagataagataacccatctgcaactgagtctatggatttttactgctacgcttgtaatttttttggtgttaatttagggttttatacaattcgaagtgataaagttttttttttcctttctttgcaattttgggaatctgaggctcaaagttgattttatgtataagatatatactgggatgtgccattttatcttcattttaacctcaattctgctatgttttcaaattggtaaagtatgtttgcagttcgtttgcttaggttgaaggatatcaaattacagcaatatctgaaattggacatgttagtaagtagtatgagattttggaaaattgactgttgcaacaaattagaagctcaatgtaaaagaaattcaataaagggcaccgttggaatgaactttatattgttgatatcatggctgcactcgatgaacttatcttcatctgcagaggtaatacgaaatgtttttgcggtgaacccagtggtgccactgaactttaactgcttattggatgattgcttgtttgtgtaaaattgctcaatctttagattgttgtggctgatcttcataccattcccagtagctcaatctatcacttctttggcaaaataaacatgcacataaaatgtttatttattgtattggaagtctcaaattgctaatcaacttcgtttcttcgaatttgcctatatatggggttgatgttaattcattggctcactaattcattttctaagtgaagaaataaatcgaaacttctgtgttccaattatttgtctgtgaatttagattaactatcacacttttaaaagttttagtcaccatagatactccagattgtaagtagtactaatagaaaatttaattatctttcttcaggtggagattttgagacaaatatcaccagattcaca

SEQ ID NO: 105751 - DNA, 792 bp, Mimulus guttatus
  Intron number 1 from transcript mgv1a016124m (locus mgv1a0 16124m.g) derived from phytozome v7.0 (chr-ID scaffold_128 ; pos 347026 to 347817 reverse strand)
ataccaccttctccaagcggtaacttaatttcttcctccatattgtttttggataagtttcattcatttctctctatgtaatcatttttttcgttttctgatacgtcgccgtatcgtttcctggttaaattgaaattagattttgtgaatttgcatataaagtccctgaatttattgcgtattaacaaaaacaaagagtttgataattttcctatagttttgggccctctcgattttttttccatgttacttgtcactttaggttgttgctcacagattatgaaaatcaataaaatgcatggattatagcaataaaaaaacatagaaaatcagtaaaatacattgttactaattatctttcaattaattgagtaggatgaatgggaaaattggaaaaagtgctatatgcttcattggatttctaaaattacaaataatttgaaatattttttttatgaatagctattgggatattgttttgattttcattctaaaaggagtgaaatttgaagttttcgcaagtcattccggaaaacattataattataaccaactctttatgccactttatgcggaggctattggtcttagaagaagaaagctatgacttgtatttagaaaataaaaattaaactacccgatcggtcatcataattgcataccttttattcacgcaggggagtttggttcaactaatttagtctcgtattatgtacccttaactaattgacatcatatcttcgactatcttattcaggtacttgaagtacttgacgaagaaatatctgaaga

SEQ ID NO: 105752 - DNA, 421 bp, Mimulus guttatus; identical to SEQ ID NO: 100716
  Intron number 1 from transcript mgv1a015411m (locus mgv1a0 15411m.g) derived from phytozome v7.0 (chr-ID scaffold_36; pos 94175 to 94595)

SEQ ID NO: 105753 - DNA, 648 bp, Mimulus guttatus
  Intron number 2 from transcript mgv1a007691m (locus mgv1a0 07691m.g) derived from phytozome v7.0 (chr-ID scaffold_54; pos 218331 to 218978)
ggccattcttgcgattgcggccgcgtcttctccaggtttttctttttcctttttttttaatcttttcttttttaaaaatagatttaattaaataaacttaattacacgaatatataattatatataattgttgcagaaggggatgagggaatctagtcccactgttcagagatttgtattgtaatcagtgccgcagaatatatgtttggtagctatatatatatatatatttcaagtgtgtgtgtttttgtgtgtgtcaaatcattttctgaaagatatatgtgcaggaaagaatcaagatcttcgttgactagggtttgactagtataatttataagtacatatatagtgcatgaaatattcaaatacattatccttaattgtatgtttggaattcggataattaaagattaattatgtaattaaagcggtggtggtgttttcttccaattgtttgatttaatataagtaattcttagttatgatttttattgtattttgataaatcacttttcaagaatattattccagcttttgtgatattatatatatacataaaataaattaaaatttaaagtagtatttaggtaattaatgcgtggttgttggtttattattgcagggtggagagtttcattgagcatcagg

SEQ ID NO: 105754 - DNA, 759 bp, Mimulus guttatus
  Intron number 2 from transcript mgv1a000249m (locus mgv1a0 00249m.g) derived from phytozome v7.0 (chr-ID scaffold_83; pos 552663 to 553421 reverse strand)
ttctcaatcttatcctcccactcaaagagttctatgtcaggttagtctctccacccttactttttttcaaatatgctttgaatttgttaatagcgtcgcaaatctgtattttggaatggcagtcactataatatatagcttttgtaacttagacatgctttattcttttggaggaatttgttgtaagaaggtaaactggttgaaaattgaaaattgtctcccagttatggttgtggtttcttaattgaaaaaggcattatgtttcttctctcttagaaactataattaattggcatggctcgtttgtacatgatgtttctaagctgcatgcactaattactttgccattttgacaggtcgacattgtacttgtgcatcacttcagtcttgttccaggtagattaatatctctttgccatggagttcctcccaacttgttttgttttcttccttagaccgtaatcatagtaaatctcacataatctgagagcaagttgtaattttctgtggtaataagcatctagaatttctactatataagatgatatttgactcacttatgacaagacccaagtcaatgttaatcaaatattgtttttgttgtgtatcatttggatgtgaataagcatgtccaactctaactttggcagaaattcaaaacatacgagttgaggtggtgatggagtctaaaagagtagaacattcatatatgaatatgtgttcttatgcaggttctgtttggtttacttcttcttcttt

SEQ ID NO: 105755 - DNA, 803 bp, Mimulus guttatus
  Intron number 1 from transcript mgv1a016834m (locus mgv1a0 16834m.g) derived from phytozome v7.0 (chr-ID scaffold_6; pos 1656481 to 1657283)
attttggagcaaacgttttctgagccgcagccgtaacttcatcctccttgcttgtttctttcctgtagatcttgtcttctcaaaaatcaaaccttttcgttacatttctgtttcgatttagcctatttcgctgaagtaaattcgtggaattagtgcttttacaatctgtttctgtttttgcgtttgtgtattctggatttgatcttctttttctgagtattatgtgtgaatttatttgtctaggttcgatatgttttaatatatattctgaggtttcttttgcgacatgggttaattagttaaagaaatgactgttgggaattattgtgtttcttttttgtaatttattgtggccatgtttaattttcattttatttttatttctgaaagaattatttctggaagaattatgttcaatattatactgattgttgtttgagctgaatacaccttcacttcaaatattttgtcgattttacaaacaatttagctatattcgacatgtgaatgtgtggtaaataatcccatttgccagcctttgaatattaaaattttggattccatcaatatttaattaatttgaaaaagagttggaagaaaatatttcgtcctagatttgtattcatctttatgttttgtaatatacatgtaatatacatcctagattttgaaattaatttgaaaaagagtttgtgatttgcgagtgacaatgttttttcttgatttccttgttatgacatgtttttgtgatgtgtacgtattgcacaggtgaacgtaccaaagacaaagaagactttctgcaa

SEQ ID NO: 105756 - DNA, 355 bp, Mimulus guttatus
  Intron number 1 from transcript mgv1a010911m (locus mgv1a0 10911m.g) derived from phytozome v7.0 (chr-ID scaffold_34; pos 1202803 to 1203157 reverse strand)
cccaccacaattctcccgcatttctgcagctaaaggtatgcttccttcgttttacccttgtaatttatccatcaaaataatccagtttcaggatccgaaacatattgtaaaatatatattagaaaaccctcagtccagctcttaaaccctgtttcgttgctttgaaacgtaaagcactcatacttgctgttaatttttaagaaactcgcataattctgtttttttttttgatatcttgatttacatccgagcccaagttatcaagttatgatttgttcttctctctctctgttttttttttttttttttctgtcaaatggttaatcatgttgtttttcttgtttaggaattagaa

SEQ ID NO: 105757 - DNA, 958 bp, Mimulus guttatus
  Intron number 1 from transcript mgv1a017817m (locus mgv1a0 17817m.g) derived from phytozome v7.0 (chr-ID scaffold_85; pos 1105802 to 1106759 reverse strand)
cacgagaatccactgctcggcccctccgccgccacgtcagtacatttattttaacatgtttactttgttgccgataaaatgtttaatttgttctttaatttctgattatggggcgttttaaaaattgttaaacatgtaaaaatattggaaatttataattttggtcctccattttgttctatttagggatttaatcctttaagttgacctattttaaataactttgcgaatttgacggattttagattatatggacttttaaaaagagaaaattgtaattttggtcctctatgttggcatatttaggaatttagtcctctaacttgtcatgtttcagttttacatgcaataactttacaaatatagtatttttagtcatattttgcataatttttaattttatgacgtgacaaataaacctgacgcattttatttgtatggacgcttgaaaatttatgaattcgacatctatcttactattggtagaactttaattatgcgagacaacacatttataaaccaaattcaaggagcatttataatttttaagtgtccatataaataaatttctgcgagtttgttatgtacatcattaaacgacaacgacagctaaaattcaaagtttgagtgaaataagactaaaaatactaattttgcatagttattgtatgtaaaattgaaatatgacaacttataggaccaaatctcgaaagagaccaacatatataggaccaaaattacaattttcccttttaaaaatgctaaatttgtaaagttgttgtgtgtaaaactcagataggaaaaacttagaggactaaatccctaaattgtccaacgtaacggaccaaaattacaattttccttaaaattatattagttattatgaagaatatatatctttgtataattgtaaaaaattgcaggcttctgaatataggcgctttggaagtgcacaaag

SEQ ID NO: 105758 - DNA, 1002 bp, Mimulus guttatus
  Intron number 2 from transcript mgv1a006051m (locus mgv1a0 06051m.g) derived from phytozome v7.0 (chr-ID scaffold_217 ; pos 343065 to 344066 reverse strand)
tttgtgagcacacagcaatcaagtataaacaaaaggtatgttttttacctacatacactttctactgtttaattcatgtctgaaacaactatttttttttttttttttgcatcatatttagttcattttttaattttgatttctttgtttgtcctgcttgagttttagaaaaactcgttagtcgcgtcatggtcttaattaggcatctcaatgtcatgtttaccgttttcaaccgctcaatctgtatgttttttttttcataatttgctgataacttgtttattttctgtgtttataacttgaagttcattatctaataggttattatgtgtcataaaacagcaattaacatgagaggtggattttcgtattttcgacaaatacttcaatcgttattaattcatgtggttatggcagaaagtatttgctttcgttcttgaactctatcttcaaaaatattttgatctgagttaggacagtcttcattcgtggagattatttaatgttgtgcttcgtaaagcagagtccagaggaacgaaagatcaataaaaggctataaagtcccctaatgaacatcgtcttgtcagaaatataattaattagttaaagataagaaacgagtaaatgagtcgtctaaactcaactatcacttctctttctcatttattgaataagactgcattattacacgtttctctgttctatttagattatagaatacttggcagccgatcgagtcaatcatttctctcattattgtcgattttctcataaactatattcttcaaggattatttaaatgtattatgtaaatcaaaaaagttaaaatcaatgacagttgtagagcatgccatatatatgatttattaatatccaatactttcggtgcagaaattaaatatagcagcttgataaagttccactctttcgtttagttaaatgtatgtacatacatgcataatcgatcaattaaagcattaaactattcatctatgcagagcg

SEQ ID NO: 105759 - DNA, 795 bp, Mimulus guttatus
  Intron number 1 from transcript mgv1a001646m (locus mgv1a0 01646m.g) derived from phytozome v7.0 (chr-ID scaffold_213 ; pos 231127 to 231921)
tccaatctctgccccgtcgagagcctcgattacgagtatgccttgcgcacttttttctctctcgtgtatatgattgtaatctatccgcgcaattctcgtttttttttttgaactcaattgctgtgtgtatacgtgcgtgttgtgtgtgttttgatgtgtgtgcgactgtgtgtgagagagatgctgtatttatgaattgtgattatgtttgtgaatttgaaaattggggaaatagtttgtgaattttggcggaaaaacacgtgaaacgcataattgatgttcacgagtggtttgttggagccgttagtgtacagtaattattctgcactggatggaaagttctcaacaaaccatgggattaatgtttgaaattgaattttgaaattgtattttagcagtattcaaatactccaaagatatgtggcagaaaataatttgaccttatactaaacgtgttgatcttgatcttcaatttacaggatattttcgacttgcgagttacttcaattcgatttgttttctcgttaatcacaacttgctatcgattttctttttctggattttcaaatttttcgttgaatctaattataataagtgtctaaaggaagcttaacgtataatatctttccgttttgtcttgagtaatttattaatcaattgacgcaattatgttattttttggcttgagaatcatctacctttttttttttttttttctttccgggttgcttgtgctctgctttcagttgtttgactcgaaatgaactgaactttttgcctgcaggattattgaga

SEQ ID NO: 105760 - DNA, 511 bp, Mimulus guttatus
  Intron number 1 from transcript mgv1a010282m (locus mgv1a0 10282m.g) derived from phytozome v7.0 (chr-ID scaffold_24; pos 2491 to 3001 reverse strand)
tagacgtaagtatatattacaacttcccatttttagcatttttcacatttatacgatgcttttttttttttctttttgttcgtccgatggattcaaaatcgtccattaagaactaagaagagattctttaaacttttttcggtgacgtgtttcttaaaaatttaaaagttataaacaatgccgttttttttttggtagttcacaaccgttaagtatagtgttcttgacgattttccgtctttttttttggctctttttatttgtcccgttaggcctcgtttaattggtagtataaactacgatttactaattaattaggtcttatttgatatttgtttagtgcaattaacttttcgagtcatcgaataattaggacaagatgttaacgggatcttatctggtcttattgggggattaggtattattagcctaaggtctcatttggtggatttcatagttctctctcgatttttcagacagaaagccgagttgcaaaggcatcggcgcggca

SEQ ID NO: 105761 - DNA, 607 bp, Mimulus guttatus
  Intron number 1 from transcript mgv1a002140m (locus mgv1a0 02140m.g) derived from phytozome v7.0 (chr-ID scaffold_36; pos 997376 to 997982 reverse strand)
agaagagctgttcttcgagctgcatcgtttctcaggtgagctcagcgctttaattttcttcaattatttcttcaaaattgtttgttcacactgtaatcatttgtattgcggtttttccctttgaatttatctctgtttgctgggtgttaatgagttttttcacggtaattgcttcttctctttttcttcccttcacaaatctatgctgatgcagttgtttggcgattatagagctgatttgaaagaattccgtgtttcgtgggggaaaaatcttttgttagggtttagggtttcgggtatttttcagggtttgtagctgttcactagaatttcgtatgtgtctgccattttgattattgattttttttggttaatgttttctcactgcattgggttatatttgttagggttgctattttcccttttgatttggtccaatttgaatcttaatacagcatcatgaattttacctctgcgctttcttggatctgataatgttgaaactgttatttaccatgtgcttattcgagatttttttgataactacagcaaaaattgcctgtgaatctacttatgctgccttttgatttgacagtcgcataagtta

SEQ ID NO: 105762 - DNA, 633 bp, Mimulus guttatus
  Intron number 3 from transcript mgv1a007149m (locus mgv1a0 07149m.g) derived from phytozome v7.0 (chr-ID scaffold_8; pos 2074808 to 2075440)
gtacagtcaaggtgaacaatttactgcttctgtactattgtttaaagttgaatgttctaatgatcagttgtttggattgaatcgctgtggatatgtggtggatattgctgtgtacgctaatccatttttaagaaaatgaatgatggtggtggggtaataatgagctaatagaaaacgaaattttgattgatttgataggaaatggaaaggcagaacatcaagaagcagcataaaaatctgatattgtatctctttgaattttttttgtttatttatctaaaaacctctggttttcagaacaaaatacattcagtatatgttgttctctaataatcgaaggaatggactgacactttcacaatttaacgatcggcatttccaaacttatggagatagattagttgcgtaaccgacatatgtatgatcttcttcgttacgattaaatgcctattattgctgtttgttatgctgtttactaatttctgaacttcatgtccctgtcgtggaatgtattgtgctcctaatatatgttcaccaaaaatatgacacgtaatttctcttgttttgtatgtgtttgcgtgtgcaaatattattatcacggctcttttcgctttcagttgctactaaagctgg

SEQ ID NO: 105763 - DNA, 613 bp, Mimulus guttatus
  Intron number 2 from transcript mgv1a009759m (locus mgv1a0 09759m.g) derived from phytozome v7.0 (chr-ID scaffold_1; pos 889040 to 889652)
ttctagccattgccgcccgcgattctgtctccattgtgagtttttataaatttttgggtaaattacaaccatcccctaaggtatggtcaaattacgaaaaccccctcttgtttgggcaattacaaccaccccttaattataaatcttcttacacgtccacccttacaatttcaaatttagtggaatcttcgagattatatggaatattatcacttttgtacccgttttatcccatccgaattccacattttgaagcaagatgatcataatatgttttttgacttgtacttatccgattgtggtgcatcaaaaactgtatttttacacaaaacgagtacaaactagagcacattccacgatatgtagatgattatgttgaatttgacaccataagggtggaggtgtaggaaaaaatcataattaattataatggttgtaatttaccctaaattttataactagtaccgatatttaattataatcattgtagctagtgctccatttgtatgaaagaatctgaagacgggggcccacgccccccgtcgcctcatcttggctccgccactgaatatataataattaaaattaattaattgcagctcggagggccgga

SEQ ID NO: 105764 - DNA, 839 bp, Mimulus guttatus
  Intron number 3 from transcript mgv1a010812m (locus mgv1a0 10575m.g) derived from phytozome v7.0 (chr-ID scaffold_121 ; pos 115345 to 116183)
gtttgaaggtacttctgttacaacttacactctcgactactaagaatcgaagttttattttacagcgttgatgttgattaactatgagataaaccttccatcatatgttatttttgtccataagtgattaacttgtttgttaataattggtttgtaataaaaaaaatggtagtgtaatacatgtctgcattttttttttttatctgatgaagaataatatcgcgtatagaaataaaagaaaattcaattagtatgtgtatatcaaagattaattaaaactatatatttcaagatgtacgtggtatggatcatatggggggctgtgagggggttgttttgcatgggatgttgttattcggtgatattttaggaagttttcttgaacaaaagtccgttttataaagaagattaaaaaaaaaaggcctatggaaaagatgcaaaatgctgcacttgaatgtttgtaagatgcaacaaacttccaatatcgattttctcatctcttgacgtgcactacacggttaaatttggattacgcattctttttatgaaatcagcatattatgtgatggtaactcattgctcgcgtaatccgtaagatagattcaatgtcaggattgattttgtaactgcgaaacatagaatggtgtctttaaaatattatggccagtttttgtgtttactatctcttctgtggggcatcaacttttgaattaatagtccagtggtagatttgaaattcttcaattttcctccctctgtatcatttttctttatattaatttgtttgaaactgcaagtcacttagaaatttgttgcagatcatgctccggataagccag

SEQ ID NO: 105765 - DNA, 593 bp, Mimulus guttatus
  Intron number 1 from transcript mgv1a005475m (locus mgv1a0 05475m.g) derived from phytozome v7.0 (chr-ID scaffold_261 ; pos 256429 to 257021 reverse strand)
cgggtcgggcgcatttgcccgaatcatccaaaattgtacgtgtcaacttacttcttggttttcggatttccctaattcagaatcaggggtttgaagtgatttttttttagtgacgaattctgaatttgttttttgacatgaacctgcattttgatttcttctgcttgtttgtactttcaagtggtacgtgtggttatgggattttgaaaatgtgatttttttatttcgttttaaaccccctgtgaattaatttggtttctggattctgttatatgatttttatgtttgtacattgtttttatttttctatggggaaaccgactctccgattgaagttttcttcgacgagatgattagccttttcgagggttttattttcgtgtaaagagcagtttgatttttctcaatccgaatagggcttttttgcaaaatcagtccctgaatttaaaaatatgatatctgcatatatgtatttgcttatgcatttaatcatgactatgatttgtgttgttgtctttggttagatgtaattagttggactaaacttcaattctgtaggtaccgtgttcgacgaagatcgtgagcattaaaaa

SEQ ID NO: 105766 - DNA, 646 bp, Mimulus guttatus
  Intron number 1 from transcript mgv1a009625m (locus mgv1a0 09625m.g) derived from phytozome v7.0 (chr-ID scaffold_83; pos 853581 to 854226)
aggccacacagttcacgccgccgtccgcaatcctggtaattacctgagaccatagccggaacttacaaggggctgttgaaaaccctccccccaatatttttaaaaagaattttttttagctattttggcactatattttttgaatattacttttggtccctaatgtttttgcaaatatgtatcttaattcttaattttgttttcttcttcataattatttatatatatatcaaattaatatgaaaatataaaataaaatggtgaaaacttatattatttgaaataaaatttatgaatatttatatatttttgaattttttttattaataactctaaaaattaatatgagctaatgccatgaatccccaaaatactaaataggttacattattagaataatttgaattaatttagatttttttgtcttatgtttaaataacgataaaattataatatatatgacattttgattaaaacatatcaatataaacttatttttgcagtgtctagtgatcctaaaaaaaaattcgggggcgctaccccgaagcccgaaattcgtaaattctctaacatttataaacaaattaccatgatctgatcgtatattccagagaaggcatctcatttgttcaaggtttggcaagat

SEQ ID NO: 105767 - DNA, 934 bp, Mimulus guttatus
  Intron number 1 from transcript mgv1a000620m (locus mgv1a0 00620m.g) derived from phytozome v7.0 (chr-ID scaffold_257 ; pos 19323 to 20256 reverse strand)
gtcatcacagccgcagcaggtgagtttttcgattttatagtcttgtaagattattgtcatatggaggactcgttggttctctcattggttggtatgttttcattttgatgtgtgcctgttgaagactcgtataagtttgtggagtgaatgttgactgattaatgtgtgttcgaatagcggttagattaatgaaacgagctagttctgttatggtgttgcaactattatatcaaatgtcacattctgacgtatatggacaaagtttaactatttgcaccataggggaatgcgatcaaaagtccttttataatttttagatttaataattattctcattgttttcctgtcgatattttggattatttgaggcacagtttttagatttaacaattaatctctttgactggaaaatcttgaaatctgaaattgtttgaaaagctattgtctgcttatctccggatttcttgttaaccaattatttgttcatacatttgtttccaatgaagaacacatatatagcacgggtttttcataaataactgactaacattttgctacatgtcctggacttggagattttgacttttttttgcttcatttatttgatttttcacatttaatgtagcttgcggggataatatgaactaatcatgtttatcgctgcatatttttgcaaactgtgcttcatttttaggagtatatctaaccggacatggattgtttcacattgaaaatatcattaagtgggataacatgttctaattaagtttaatgcagcattttaccttatctttgggtgttcagtgaatgatgaaactcaataaaatcaacttcttcttcattacaccattatattgtgttgctcaaggtgccttctaatttctaagtcaagtatttggtttaggtggttccacctcctcccattcctgggcat

SEQ ID NO: 105768 - DNA, 940 bp, Mimulus guttatus
  Intron number 2 from transcript mgv1a005261m (locus mgv1a0 05261m.g) derived from phytozome v7.0 (chr-ID scaffold_57; pos 536780 to 537719 reverse strand)
aagcctctgatctcgacaaagaagagaggcctgaggtatatctatatatatatatatatacatacatatcaacaagattcgaatctgaattttgtgtcttcatttttttcattagatgatcctacagtgtttttattcatgtttatttgctaccgtacagtcttgtttggtttgtaagataagtcatgattaattcaaaactcaggtgatttttggccagtccaataacttttcgggctgacccgatttaagatttaaaaaaaaaatgagtccttatgattttttgtgttaggtgtattattgattattgaacatcccctattccaattattaaattggttctccacaaaagattgcaattttttattttcttggttaatcttatcttggcatccaaacaaggccttaatctgttaataattactgtcttgataagtgatgttgatccaaagtggggatcttattggtgatatattcttgacaactgatggtcatgcttaaagatgggatcttttttttttgtttttttttttttttaatatttttattgctttttctttgtaggattttgatgtgggtaaattaaaagaacagttttttttttgctattttttttaccacagtaatttttttatttttcgttattatttatttttcgtgattaaactaagtttctatctggatcgtaccctttttggatcttatgtgaatttgagtatctttacttaattaggagttgatttgaggctttagataaagaaataagattgtgtcaaataactttgatttacttatgctttgtgtacattcggtctcctcattttgtcaatgtcgttttcagtgtttaataaatttgattaggactaatagttgacgatttcgcgtactatagttgtttcattgattctgtgaggtatgttcggatatttaggtactggct

SEQ ID NO: 105769 - DNA, 961 bp, Mimulus guttatus
  Intron number 1 from transcript mgv1a009352m (locus mgv1a0 09352m.g) derived from phytozome v7.0 (chr-ID scaffold_164 ; pos 506860 to 507820)
gcacggagtggccttggaactgcttcgtaacatgattaaaagcatctgtgtgtatactgacacgatgaattgctttttactgcaattaatgcatctggcatgataaattgttttttactgtaattaatgcatctatgcatatgtttttgtcttctgattttttctgcattttctgttcccccaatttgtggtaaatactttaaccaactctgaaattgaaatcacgccggatgataatcttaaaacagagattagaagccttaattaatgatgatgatgatggataagccttaattaattaatgatgatgtaaggtgtcaattgctttaaggtagatggttttggtctgtcgatttctagctagggagagtgagctgtgatagtaggagtctcggaagaaacggtaacgagtttggtgaactacggtggtgttagcagtaactctgtatcgtttaaatgttaggatactcgaagtttcaaatcgtgttaatgtaggtttaggtttggcctacattttattcagcaatgagcaattgttgtgccacgctatatcttttgatttgaaaattgaaattgcaatttaggatcggataattgaaactaaagaagaaaatagaagcccaaaaagcatatcggctatcagtaggaaatagttagggaatagtgtaagtgttgtctttgaatacgagagaacaagataagggggaaaacttatacccagtgcattatcttgtttttggattggctgcaatgtactctggcttcgtttttgttttttgatgtataggtaacagaaatgatgttggagtccatcacgagcttctaatggtttgatgttgttgtaatttgctggcttggagtattcacatctcagagcaactttgcgcgttgaactgtaacaatattttcgttgttttgtagcaacctgaactattttccattaattttacattgtgcagcc

SEQ ID NO: 105770 - DNA, 461 bp, Mimulus guttatus
  Intron number 1 from transcript mgv1a019250m (locus mgv1a0 19250m.g) derived from phytozome v7.0 (chr-ID scaffold_590 ; pos 26451 to 26911 reverse strand)
gcagggtgtgtccacctacaactccgccaccgtcggtaagtcgactgctttctctgttacttgtgatctagtttacttgttaagattgaaatttcatctccaattttgagtttttgtatagctttcgatacgaaaaccgcataatatatgacacatagtttgacattaaagagaagttttgcgataaagcatgattaatggaagtgtagattcatctagtatcgtatatgtatgtataatatttaatggtatcgacaaatttctttaaaaatctcgactcaaatattgcactatttgaagagctaattcgtgtctactctgttctgatttgctgatggaattcatgaacaaattaagtttcgaatatacaaaagttctattcttcactgtcacatttgattgtataaatagatcatctaatatttgaatctctaattgaaaaaaaataggtgttgttggag

SEQ ID NO: 105771 - DNA, 695 bp, Mimulus guttatus
  Intron number 1 from transcript mgv1a001150m (locus mgv1a0 01150m.g) derived from phytozome v7.0 (chr-ID scaffold_2; pos 1906043 to 1906737)
gccaagcctcgtgttctcgccatttcgagtacgaactatcaatttgtttttagatatttttctattttatctccttcattgtatatgtatgatttgtggtcatggagataggatttatacgcatgattaactgcaaactacttgcagtttgatcaataagaattttaccgctgcatttaattttgaaattgaacctggatatttggtgcttgaatttcggatgttaatcagcttagaatctagtggggacagccgatagcttattatatttcacttatttactctctacattgtgtttcagttttcctggacgcctttggttgtggactttatgatcaagttcttttactaggattaattgctactaataacgaactttcactttccattgttgtgtaatttttgttttagataactttagaggagatatgctgattcagaccaacagacaacagtagattttaaatcttatgtttgagttggttcatccacagttgattagtttttcagttttcagagaatcattatgaaagttagatttggatagttgacaagaagttaactatgatgaattaactaactaaatctgtacgactgtaccaattaagttctcaatctagaatagatgtagtattgattacttgacatggttggttgcagaaaaggtagaaggacaacggactctagcttttctt

SEQ ID NO: 105772 - DNA, 1013 bp, Mimulus guttatus
  Intron number 1 from transcript mgv1a007142m (locus mgv1a0 07142m.g) derived from phytozome v7.0 (chr-ID scaffold_54; pos 1234862 to 1235874 reverse strand)
acctcaattcccgaggtatggagtcaattcgatgtacttcaatttgttgccgcttcgtaaaaccctagggatgggaaaacacttcagcgtttattttcctctttggtgcggtcaataaatgaaattatatgcgaggataatttaacccctcccccaattttgttcctgggcgtcaatttgtttttttttccgagtaggtgcttttgtttgaactgtgtattggtgagttccctggatgaagaattaaagcaatttgatttttgttgtaaaaagtttccttttttgttggtggagtggaaggagatatgaggtcctctttctatttgataatgagattttagggtttttcggggtctgcgttagtgttgtgtgtttggacacgaaatcattccgattggatttaaggactgttctattggcatagtttttcattgcatgtgtaatgttaccatgactagatttgtgacattttctctgctttctatacaatacatgctaattattaagtagctgccatctaatcctcatgtccttatgtatggtttgataagaatgctggattaatatggatcaaattcaagttttgaacagagataagtcattatggttgtacaagtttgggaccaacgatatatctgttctttttatgctgaaattaaaaccttcaatgtttagttttttcacttatttcggcttatttcatcttttacaccatacaaattagttttcttttttaatattttctacttctttgtattacatatcaattgatcttattattttgagaacctttttactattaaataattgttttacgatgaataccccgtgcatcgcacgggtgtagtactagttatcttgtaaagatgaagatatttcataggtaaaagatgggtgttgtaagcataagacgtttgtgttgctcttgttatattgccgagtatcttctgatgaaagtttttatttcttaaatggcagtaagatcgctgaaggaagagttgcagcttcttcag

SEQ ID NO: 105773 - DNA, 578 bp, Mimulus guttatus
  Intron number 1 from transcript mgv1a003115m (locus mgv1a0 03115m.g) derived from phytozome v7.0 (chr-ID scaffold_26; pos 1588851 to 1589428)
tacgccctcattcttcaatctccaatcttattccggtgagctgcttattgaattcttagattgttcttcaattatgcagtgtttgtcgattaattgtttcgaattgggtattttgaaatgtttttttctgtgtagtgttgattatcgatggttttatttgtacatttgaactgctggttttgtttactcgatgaaattcagcttatccagttatgaattttgagttttctagatgaagtgtttgagtaaagctgaattttttatatgaaatgagttgtgtttgtattgtgggtcttcaatatctgaatgggtcgaagaattttggttttgtggtattctagttagagagagaaagtaaggcattatgttcttcaataatggtgctgcattgctagctaaaagcagcatatttctttttagttggaggataaaatggaatttgtttacgaaatgttacttttcgttggtcagaattgtttcttcttgtttgcattttttcgatagatgaattccagcattatgaaatgtaagcttgttaattattataatttgttgatgatatcaggttcaccgagaaa

SEQ ID NO: 105774 - DNA, 619 bp, Mimulus guttatus
  Intron number 3 from transcript mgv1a003115m (locus mgv1a0 03115m.g) derived from phytozome v7.0 (chr-ID scaffold_26; pos 1589867 to 1590485)
gagttacagtggccagagaggtaacttgactgagaaccttcagttatcatcgtatatgttcttagtggacaggcaacaactgtcttgattattgccaaatgagttatatatgaaagaaattaaacttccgaccttaatgttttattagtgatatctagtctcaagtcgccccggttttgaatatgttgactagttccttttggttttaaagatgatatggttttacatcttctattgaatctatctatcaaaacagaggttcactataaactttactaactgacttaagtgatttaccattttcttgatttataatttgtgtttaatgagttaataatttttaattcaatcatattagttgaaaattaattcatgaagtgtaaaaaatgccgtttcttggggtttttccattcagcaagggtattctatgtttttacacacaacttcttaccgttccacctcagcacaacatgggatggtttgggattaagttgatgaagttatttgatcccggattatgaagtcgcatgctatatgagctacccttttccgatgaatttatgatcttactgattttgatgtaggttgagttggaagatccagttgagaacattggagc

SEQ ID NO: 105775 - DNA, 598 bp, Mimulus guttatus
  Intron number 2 from transcript mgv1a021366m (locus mgv1a0 21366m.g) derived from phytozome v7.0 (chr-ID scaffold_5; pos 3393548 to 3394145)
ggaagagtacagtttgcaccgtcatgtttgcaccgattttgtatttcggtccctcgtgcacaaaaatacacatttgattcctcatatttaaaaaaataaacacttttagtcatttccgtcaatttttcgttagtactaacggaatcaagtgtgtgccactataagtgttaagctattgaaacttgatggaccaaatgtgttttttatgaacgtgagggatgaaaattgtaatttccccttatctttatctttctttttgtttcttctttttttttcgtgttaattagtttgtcttagtcctatagagtagtttctttaaattgtcaaggactactttcttttttatttataatattatttggcaggaataacaagacgtttcaaaacaatgaaatttgaatggggcctttcaaaatttatttcgaaggaaattctgtctaatccactaaacggatacctagttaatgatacgtgtgtgtttggtgctgaggttttcgtttgtcttagtcctatagagtagtttctttaaattgtcaaggactacttttttttttatttataatattatttggcaagaataacaagacgtttccaaaca

SEQ ID NO: 105776 - DNA, 892 bp, Mimulus guttatus
  Intron number 1 from transcript mgv1a005698m (locus mgv1a0 05698m.g) derived from phytozome v7.0 (chr-ID scaffold_44; pos 1458886 to 1459777)
gagcctgaggttccaagaagggctcctagtgctaggtatattcttcgatttttttttaagttcttgaaatgttcgattaatatgttaaattatctcgcgatgtcgaaattttaagcgcattgtgatgtttcccgtttgttttgcttgatgattattgggattgttgatattagactgtatattttttttaaagttcttgaaatgttcgattaacatgttaattatctcgcgacgtcgaaattttacacacattgtgatgtttcccgtttgttttgcttgatgattattgggattgttgatattagaccgtatggacttctgcattgtcgttttgctctttataactcgttccttgcgttgcggttttgaatttttttcagataatttggtgaaatttgttatctaatgttcttgtcgttttcttgaatctagtgcttctctaactgtattattgacaattaattataaaattgctgctaaattggtagcgtcgttatcattttatcatattttaggtgagttttaacgagggaatccatcggatttattatcaatggatccatcgtatctagtcgataagatagactaataaattatctattattccttcatttcaccgatcaataaatgcgacttcattcgtattaaatgtttaatagttgactgtatcggaacgattatgcgtcgaattaactcttctagaaacggaaactttttatcgttataaataaatttcagcggatatctatttgatttgatctcattgtgcgctctctgttttagctttcgatttgtttatctgcttttttgacgaaaatggaatttcggttgttattatataatgtatatatatattgacagtgccactgttttcggagtttcgaccgaatca

SEQ ID NO: 105777 - DNA, 993 bp, Mimulus guttatus
  Intron number 1 from transcript mgv1a012497m (locus mgv1a0 12475m.g) derived from phytozome v7.0 (chr-ID scaffold_11; pos 224918 to 225910 reverse strand)
ttgattttcattcggatcggtaaaatcgttacacggtatagttccattcttcgcctttttctaatttaatttttgataccaattagggttatgtttcgtttacctttgttaattgcttttgggtttcattttcagcgatttttgttttttggcgtatatatatacatgtgtgtgtgtgtgtgttttatttgatatcctcatctggattcttacactagattaaggctggaagatattgagtacttgctgaagaagttagaaaagtgatgttgaattattggtcaaatatcaaatgtgttgatttttgcatgattgggtttgatccggattttatggatgtaagttgatgtttgagattagaaccgtcggactttgtgctgcattgtgcgataaagtaacgagaattttatatggtattatcatgttggatcacgtccgaatacgtttgtagtcgtggtgtttctttgaagtatacggcttgatatcgatgttcttagttatgatttaggaaataattttactccattatactttatgcattaaggatgattaatttagttcagcacacagaatgacggaaatgtacttttttttttaggtattctccgtgttcctgttcctgtaattacgtaaaacggtatggaaaatgaaacatctatgttcttagtgatgcttgatttaggattaaagatgattaattgagttcagcacggagaaatatattctcttgaggcattttccatgttcctgtaattggtaaacgatgtgaaaaaatgaaaccatatcttcacgattctcgttaatgcaaaaaaaaaatatagctattttcttatggagggctctaggatttcatgtcgtgtgaaattccatatatacatatgtggcatctgatattcgatcggctttatttcatttcaggaacaatgtggacaagctacgcgtagtttgattttaaaaacattcaccatctgaagcattcaacattttccgaaa

SEQ ID NO: 105778 - DNA, 561 bp, Mimulus guttatus
  Intron number 1 from transcript mgv1a002484m (locus mgv1a0 02484m.g) derived from phytozome v7.0 (chr-ID scaffold_27; pos 589771 to 590331)
agagtacaagacattccgtcaaatcagccgcgatagtaagccccctaccatctcgagccccaattcctttaattaggttacggcgttttaatctgattgtttttcccccttgttttcttcagcatttccccctcttctgattataaattgatgaataaacgtagttaattatcgaatgtattctcatcgcttaagagaaatacgtttgaattttgctggtccagaagcagatcttttggggatttgattttactgatatagaagtgtctattaaatgttattatgtatttatttctgtaattagatttttggatttattgctagctaacagaagtgaaatcctgtcttttcatctcgaacgatcccgggaaatagatcgaaatgcatttaaatgagaatattctgtactgttgcttgctacaattgcaatgtgatatatgctattttgcagttttatttaaattgatataggagtggtgaatcgtggcttcagatttatgcgataatatatagtatttggattgattaatgaggggtaatcatctcttgtagggttattgt

SEQ ID NO: 105779 - DNA, 385 bp, Mimulus guttatus
  Intron number 1 from transcript mgv1a009114m (locus mgv1a0 09114m.g) derived from phytozome v7.0 (chr-ID scaffold_83; pos 332719 to 333103 reverse strand)
gccgtgtcgaggagtttatccgggctcgggtacacgttttttggcttgttactcgacctgcttttttcttctctagctgattgtgttttgtgctttccgttgtggtgcatttcattttatttttatttattttgtatttgttgtatctgtgtgaagtttttgtgctgcgaaactctgatgattgttttgaattagctacgtttctaatgattgaattcgttgctccttcatcattgaatttactctgattttattggacttcctatgttttttcagtgatttcatttaaaaaaattctggaagcaaattgcatatcgagtaacatattgccttcaattttgtcaccccagacacttacagcagctgatttgcgtgatcctgagat

SEQ ID NO: 105780 - DNA, 542 bp, Mimulus guttatus
  Intron number 1 from transcript mgv1a007246m (locus mgv1a0 07246m.g) derived from phytozome v7.0 (chr-ID scaffold_36; pos 1723266 to 1723807)
ttcctcagatcttcgttcgagttgagttttttcaggtaactttatcagaactcagacctatagctgctgcaattttttttaatctatatgtgtgtaggattaggtatggttttagttttatatatttttttttgtagacatgattttgatttggtagttttattcggaggatctgtttattttatgttgttgctgaacttatattttttggactataaaattagtttaaatttttgtgttttttgttatgcgacgtagttttggaaattacctttttttcatgttgattttgttgtttgtttgctttagaacttccagattttgctgtttccatggttgttgttgaacttcacttgtgacttagtgaataaatcagctaaaaattggtgatttacgggtttatgtgtgtttcgtggctttctgaagttcaatgatatattgatgaatacagagcaagtgtgagaagatttgcgtgaatcctactgttttaactgtgggcatcttgtttcatttgtttatctttgttttctatttccacagtc

SEQ ID NO: 105781 - DNA, 947 bp, Mimulus guttatus
  Intron number 1 from transcript mgv1a006078m (locus mgv1a0 06078m.g) derived from phytozome v7.0 (chr-ID scaffold_48; pos 349686 to 350632)
gtgtgctctctgttcaggtaaattttgaaaacattatcttttatgggataaattagggttgaattaaattttaggggtttttagaaaattttaaaatagtataggggtcttattgcaattttttcaaagaaaatcccagtttcaacctttaattcaaccgttaccgttatttctacgcgctccaccaaatcgcgcgcggattcctcgcacttcactaaatcgcgcgcgattgaatacagtgctgacactgatagggcttggaaggcacgctaatgtcaggcccgtggccgccacttgtgcgtcacgcgctcttctgtctctctccattttttttatactttcgcgtgcgcgaatcaaggcacgcaattggcagaatgcgcggagcccacgcgcgcgtgctgtgcacgcgctcaccctagctatcttttttcttttttttttatattttcgggcgcgcgaaccgagtcgcacgattgacataatgtgctgcgtccatgcgcgcgtgttgtgcacacgctcaccctactttgttttgtttgcgcgaatcaaggcgtgcgcgaatggggactcgcgcattgacgatgaacaattggtactttgagtgatgattttagactgaatgttggtatttctgataccaccaatggggttggtactgtttaacattgtcattgattttggacagaatgttggttttacagtgtctaaaatgtatctattgaagaagggtttttttgccgtggttgtgattattcaaacaaacgagagtttttccgtaatttaaacttatctcaagatcgtaatttgccgtaatatcttaaaccttaagataaaacgataataacagaatattttaattacgatgacaaagttatgggataaaattatttattaattaattattctgtatgccaaacaactgaaaaagcgcaggtgacggagctgaa

SEQ ID NO: 105782 - DNA, 778 bp, Mimulus guttatus
  Intron number 2 from transcript mgv1a014572m (locus mgv1a0 14572m.g) derived from phytozome v7.0 (chr-ID scaffold_320 ; pos 110551 to 111328)
tgaataagaccagacaggtgaattttattttattttttttaattttttttaattagcaaatttaattggtttctaggatttattttggccccatcatatatataaatatatacacatatatatgtagctaatttcaaattccaaatactgttgaaaaattgagatatatttttttttaaagaaaaaaaaaatagttggattttagaatcttgaaatcttcttgcatctctgagttgtataagtccatcttcaccaattttcacatacacacataaaatgaataattagttatacaattgcaaaatatgttttacatttcaaaaggataatagatctttctcctccaaaaaaaaatgaaaaaagaaagaagggaaaatagcagccaaacccccccctcaggtaaggccaaattacgaaaaccccctcctgtttggataattataactacatcattcaactatgtattctcttacacgtccacctttgtggttgtcaaatttacctactaactgaaggggttcttgtggttgtaattactcatacaatagtggttttttcgtaatttgactttatattatgggtagccgtaatttgtgcaagaaataaagaaggataatagagcagtttgatttgagccatacaacttcatatttgccagaaataaaatttgtctcatatatatatatataaaataaattaaatgtttaataattaatcgagtaataataataatgtaaattcaggtaaagcaagagaagcagaggtcaagaaacaacac

SEQ ID NO: 105783 - DNA, 691 bp, Mimulus guttatus
  Intron number 1 from transcript mgv1a007311m (locus mgv1a0 07311m.g) derived from phytozome v7.0 (chr-ID scaffold_11; pos 619343 to 620033)
tttgcatttttcgtcgccgaaattaaactacacaggttaaatttcatccatgtgtgtatatttttttcccgctgttctagcgacgtgattcgtagaaggatttatttatttatttttgcgggaaaaatatttacagttttattcacgtatagataaaatatctgttggaagaagaataatgtaaaaggcatcagcagatccatcgggtgagtggaatggatattagaattaaattggcttgtttgtgaactctgtatgaagataaaaattgtgggctttgattatggctgagaatctttgttttaacttattcgattgtctactgaaagtacataagaggggtaaccaatccacctttgcatatatgaattacggagcatctacgagtttacttttggtgtatggatacatttgtttatttgttgccacataagagaaagggcctcgactataaacgtgcattatgttggtggttttggctaaaattgcatatagatccccacccgtagctttgagtttcggaggaagctttctcttacgtgcacttaaacaagagaaaatacacgtcgtaacttctgtgctgtcattcttattttgtatgcatgacttcttgattctgtgtaaatatcatttaataatatcgtctctatttattcagttccaattgatttgttgcaatgcagatattaga

SEQ ID NO: 105784 - DNA, 358 bp, Mimulus guttatus
  Intron number 1 from transcript mgv1a003712m (locus mgv1a0 03712m.g) derived from phytozome v7.0 (chr-ID scaffold_102 ; pos 283227 to 283584 reverse strand)
aaggtaacatataaacacacacacacacacgtgattgtgtgccacgtgtttgatttttattttgtgtggggcttgtgtttttcttatttgtggatgcatacaaaatcttatagtacaacttgggcaattgtattgttattaactgtaagaaattgtgtattggagttttaattgtgtgctatgtgaagttatacagttgttgaaatcatttagattaacttgtcaatcgtaagcagaaattgtaatgtagttatgtctcgttttattgcgttagtcgacactgtcttgattttaatagtctcgattcgatacatactattaatcttctttttttttcttcgataattgtagttacgaa

SEQ ID NO: 105785 - DNA, 599 bp, Mimulus guttatus
  Intron number 1 from transcript mgv1a005743m (locus mgv1a0 05743m.g) derived from phytozome v7.0 (chr-ID scaffold_216 ; pos 317893 to 318491 reverse strand)
aaaccccctctaagcactctcgcgatctacctcaggtacaaatttccccaattttctttttcctaattttttttttcttctcttgattttctcgaaagtgttcttttactttctggccacattcaaatgtttccaatctttaagttcggaagaactggaaattcacgaataaacaattcttctgttcaattcatacctttttttttaaaagaattattcatacacgttaagttttggtaaagaatcctctatttcattataccatgtgcatttttaatttagtagggcatttgcttttgcgaattcaatgagtttttagttccggaagtgataaatttgataaatggcgttatagacggtgaatgcatagaatgtatttgaatgatgctgaagatgtatgtaatgaatacaacaatcagatgtttgttattttcatatattaatttgttgaatgggtgactttggatggttcttgttgtagtcactgggaaatagtttatgtttggttttcccgaatatgttcttgtttttttttattctttctcgggttatttggttaaccaggaattggaggggcttttgaataacttacaggactg

SEQ ID NO: 105786 - DNA, 639 bp, Mimulus guttatus
  Intron number 1 from transcript mgv1a006854m (locus mgv1a0 06818m.g) derived from phytozome v7.0 (chr-ID scaffold_96; pos 681698 to 682336)
ttcttccccaagcccctaaggtattttccgatctggatctcaaaattcttggacaatttctttttttttttcttttgtttctctgtagatctgatgggaaaaattgatttttattggatcaggtatgaatagaatttgatctttgtgatgattttttatcttgataattatttctagatctgtgtttttttttattgttttgaatcgattattttttatttattaattcttctattttatgatatattatttggggcttataatcattaaattagatgaatttctgtgtgttaatgatctaaagctgggttatttatcttatatgattttgggagaagcattcacttgtatctcagatcatgttgaattttgtttccttggaattttgaaatcaagattcccttttttttattttatttaaatgtaaattattatatatttcaataatttatgaattgttttgttgttattcgatagttttgtttctcttttggattgatagatatactaggtgtaatttggtatggtgcacagggatatcgaggaggtaaccaaaattaaattattgatattgagtaaaatttgaatgggtgcctgtgtgtaggctcagctatcattgttttctgcacaagatattgg

SEQ ID NO: 105787 - DNA, 882 bp, Mimulus guttatus
  Intron number 1 from transcript mgv1a022875m (locus mgv1a0 22875m.g) derived from phytozome v7.0 (chr-ID scaffold_240 ; pos 218726 to 219607 reverse strand)
gaaccttgaggacaaggttcatttcaagaggggtggtttgatacgatatatatttaatatatcgtatatttattcattagttattatttaattatttaatatatattatttaagtattaatttagttagagccgtaggcttaatgattataggatagatattaagtattttattagtttaggtaattatctttcctagttagattaggattgtagggttttattctctttaaatagtcgtattgtgctagggttttattatgcagagagaaatattaaagaatagatcttacgtttcgtaagaaatatttatgatactcgagagatcgcataatatatatcgtatcatagttgtttttaagaaagaccatttcaaccccaaaaatttagtactatatttcttgcaaatgatatcaatattattgaggcttagtactttttggagaaaatatatatttcatataaatacattagaaaataaagagaaatcaacaattttttatattttaacaaaaataatgcaaatattagtacaaaatgtcaaaatgtcaaaatattagtatattgctttccttttatttttctttttcaagagaagagccaaaatgtcaaactccaaaagtgatcccaagaaaacacaacacaaaatattagtatatgaactgcaaaccttagtacttttctgcaaatcttaacaaagtgaaacttattagtactttctctctcacacacacacactgacacacacagagagggagagagaaagagaggtgttagtacgaaatgggttcttgtgctgctttaatctcccttaatcagacactgaatcgcatttccgaatccgatgattttctttccctaacagacaagcagtgtatccttc

SEQ ID NO: 105788 - DNA, 776 bp, Mimulus guttatus
  Intron number 2 from transcript mgv1a016078m (locus mgv1a0 16078m.g) derived from phytozome v7.0 (chr-ID scaffold_128 ; pos 338636 to 339411 reverse strand)
gatccactcctccggcgtcccccttcgccggtaaggtttgataaacaaaatcccaattctattgtgtgttaaaagatccattccatattagggcgtctagaagaatctttgggatctgggagagggcaatttagtcatttcgtaacttagagtgagatttggagggtagtttggtcataatactcgaatgcggttgaattttcaacgggatattcaggagcactactgattggtagggtctctatttaattagagaatgacatctgtggaagtggaataattaattattggtagggcaataatgaataattatttaagctgtttgacttgcaaccccgcgcatatatatatatgtatgtatgtatgtatgtatgtatcatttatattattttcccaaaacatcgatcttttagattatgaggttcttagttagaaatgtggaacatgcttatttatagcaatcaataaatattttgatctaaatattgcatttcgactgttatttatatgctacatccggtgaagattacaccaggtgtttttatctgttgatctacacacactactgtgggtatgtgtgtgtatgaatagtaacgatttactcggtgtatttcgcccagtctaacatagaataaaccgcatttcgacactattggaatttatttaattagtaacatgcatataaatatggttaactaatgtggaaactggttaaactatatatacaataatggtatataggtggaggaagagaagcattcaggtttcgtcggagg

SEQ ID NO: 105789 - DNA, 792 bp, Mimulus guttatus
  Intron number 1 from transcript mgv1a009858m (locus mgv1a0 09858m.g) derived from phytozome v7.0 (chr-ID scaffold_97; pos 859313 to 860104 reverse strand)
gccaaaccgctgctagcaagaacaaggtacattttttcttttcgcttattcgattttgttttttttttaattcacttaattgattcatgcttcatctgtgatgaatttaacaaaagtgcaaattaatttcttgttatatgtcgaatatatccccatcccctgtattattggtagtattgattgtttgttcgatgaatttgcgaacaagtttacatttttccgatttgcaaggtcaaaatttctctgtagaagttaagttgacaatcatcaattagtttcaaaaagttgcatctaaagcgattcgaattctcgattgattgcgtccagagggattcaaatttattcatgtaattgacatgattaattgtgtttttttctcttcaagtttatgaaattgcctccaaagtgattcaaagggattcaaatttattcatgtaattgacatgattaattgtgtttttttcttataatttataaaattgcctcaaaattgattcagatttttcgaccagtaatgtattgaagtttgtcattattgtatacatttgcaagcttccattgaagttttggtgatagtcattagtgtatacatttgcatgttttgtatcgaacccttggttattgtcattagtgtatatatacattttcaggctttgtatttgaaattgtgaaaacgtgcgttgatattttgtacagtactaattggtttgtatgtattgcaaaataagtgatgttttttgaaatttgatgtttgtagatcatatactgcacctgcctcaactggagtgccga

SEQ ID NO: 105790 - DNA, 526 bp, Mimulus guttatus
  Intron number 2 from transcript mgv11b020635m (locus mgv11 b020635m.g) derived from phytozome v7.0 (chr-ID scaffold_9 8; pos 188426 to 188951 reverse strand)
cttctgtgcacatgtaagcagccacatagtattgatgtgtgtgtgtgtgtgtgtgtgtgtgtgtgtgtgtgtgtgtgtgtgtgtgtgtgtgtgtgagtgtaaattagtgagatttggagttttaaaaaattatcaatgttcttcattcgtttagtttgattacatattgcgggtagtgtggatgattgattgatagcgaagccatttttttttgctgtttgtggttttgttgcgtaaacgtatatttagcttcttactcgttcggcctcgagttaaactatttaactacgctcgacatacttttgctatattttttctcgtcctgcttaagtagtaagtaagctctagtaaattcagtggaaaaatgaaaaaaacgacatcgagtttttgacagggctttttgatgattttttaccgccctacaagcagtcgtaccgtctttaatttgtttagccattaactagttcttgattgtgtttgtcaacggtttgattttttttttttcccagctactgtctgggattgg

SEQ ID NO: 105791 - DNA, 505 bp, Mimulus guttatus
  Intron number 1 from transcript mgv1a007134m (locus mgv1a0 07134m.g) derived from phytozome v7.0 (chr-ID scaffold_1; pos 1061369 to 1061873 reverse strand)
cttctcctcgcggcgctacccctccctctgctaaggtacgatttcccccccccttttcatatttttttttcttcctattctccaattaggtatgtagattcgttatcaagtcaaagttttttgtttccccttttaatttgatgatttgtggttctgtaatgattgaaagttgttttgcgtccctatcgattctgctactatatgatctacgacacactgtagaaattgcagtttatttttaatattaattggaaagggtcacattctcaaaagaatttgacttgattttgaatttctagtcagttgatgtaaccttagacattggatcctgattacttgatcttcgtttcagaatttattttctggataaagtaaattacattaggaaggaggaattatagttgaatcaagttgatatgttttagtaactgtgtagagtttaaacaagtaatcattgatgtgaaatataggattcagccatacacgaggaggatacaccaaagaa

SEQ ID NO: 105792 - DNA, 818 bp, Mimulus guttatus
  Intron number 1 from transcript mgv1a013971m (locus mgv1a0 13971m.g) derived from phytozome v7.0 (chr-ID scaffold_130 ; pos 321313 to 322130)
ggcgcctccggcgagaccggcgaccggtaaaaacccccaatttctcaatttcttactaattcccattgattgatgcctttaattttttattacattttttagggagaatttttttttggaatcgtctgcgatttttagctaggataattgtttcgatgaggtttattgggccgttttctggggttagtttgtatgatccgcgcgcgtggttgtgtatttcagtctagtgatttttagggtttaaaacttttgattcagtatgcaagtgtaggtatttctagaaacatgcgcagtttaattagcttaatatatgtattatctatccaaacagtaaattgtaattgagagcaaactatgaaagaaagcttcactcttgctttctcgagagcaaactaaaacaaaactataaacgagatggaaacaacgtaaatcgaccattaaactttcatcggtagtcggttgaagaacaaagggactaaggttgttgctctaagcctcagttcagtaattaggtcagtttaaactttcttgtactaataatcagctgatcgcgacacagtagtgtaaaattttgtagtgatgctattgtgttcagtctaatgcaatttgatttctaactgatttatagaattcgttcactaaataccgtaatttgattggttcctaatgtaatgtttctgttctagataagatttcttacattgttaaatgtgtttctgatttacttatcgactaatctttctatggctgaagttagtgttttaaccgttttatgtaatgatgtcttagggctcagtttacagagtacgtacagaaga

SEQ ID NO: 105793 - DNA, 633 bp, Mimulus guttatus
  Intron number 1 from transcript mgv1a018735m (locus mgv1a0 18735m.g) derived from phytozome v7.0 (chr-ID scaffold_151 ; pos 617260 to 617892)
ctcttacttttcagcaagccattcagcgcctccaggttttactgcacttctcatctgttactgcattagttgtctccactaacgcgattaaatagtaattaagttgatttcagccgaatgccgaatttgttttttgatttgtgagttgttaacttgttgttgaagatgcttcaattgcaatatgtgatttaaggtgttagcactggagaattgacgataactttagacacagttattacacgagttgggaattataacaaaaacaaatatgaaacggtgcgagaattttgaattggaatacagtaaacttaagcaaatacatcttgcggactttgataagaggtgtattagtgtatgtctggaactggattggacaaagtatataaaaaggtgtataagttgtttgtttgtttgtttctttctgggattatggattaacggtaaggatgtctacacattacacacacaaccctttttaattcgtgcaaggtaaaataggggaaactatgagaactctctggttttggcagattttttgttttcttacatgtgaatgtaaacagtcgatgttatttttaattccattttggacctttaatattatattatgcaggaatattgggcttctgttgg

SEQ ID NO: 105794 - DNA, 982 bp, Mimulus guttatus
  Intron number 1 from transcript mgv1a017380m (locus mgv1a0 17380m.g) derived from phytozome v7.0 (chr-ID scaffold_307 ; pos 176150 to 177131 reverse strand)
ccggcgaacacatctactctgttctgttattctcggtaacattttctcgcatttccgctctactaaacacataatttgtgaattagctcattgtttttttttccctaaatatattttaattttatgttatctatctctgtttgatgaaacccagcttggattcatctcgtttttcaataatttttggtgttcttttgattccgattttaccactgtttgatgaactctcagatttagtgtttaaaataaataaatcattttctgcattgtttttgggatttgctgtttagtccttggatacttagggctaatagtttccagttattgattgatgcacacttgtataaattatgattcaaaaaaatattctactccgtttcccgtttagttcgtggtttcaccttcgtttcgtaaaattcggaaccgaacccgaaaccgaaaatccaaatctcgattgacccaaatcaacacttttgtcaatcttagtggaactgtatggttttcggattaaagtactgcatacaaattcttaagtaactgcctttttccgcataatagatacgcatttacatcctaactgtatgtcaagttgtcagataaacgggaacggtatctctagattctccttggcatatatcaaaaactttgtatagtagtagccttgttagagggtgggctttagttttcgggtttcgtgtttgcgcccccgaattttttttagaatttttttgtgatcaaatcagaaaataggaaaagaacaaaagaaaaaaaaacaaaatttcgagctttttttttttgcattaatttggattttgggtgggctaattaataaaaattgggtgagctaaatagatatataggtataatatacggagaaaattatgaattgagggtggacagcatgaaagtgtatttcgtgttagaagagaatccgtaattaaagtggtgtattaattaaattaatataatgcaggtaaggtaa

SEQ ID NO: 105795 - DNA, 914 bp, Mimulus guttatus
  Intron number 1 from transcript mgv1a017987m (locus mgv1a0 17987m.g) derived from phytozome v7.0 (chr-ID scaffold_2; pos 211708 to 212621)
aaggtcaccgccaatttttcttttgttagtaattttttaatttaaattttaattagtggatgggcaatttgacactgcttccttattcaattcaaatttgtactttgagtgattaattggtaactgtatcgtttatcaacgaagacctaatttgcaatgaagaatgagcaatgtgtttgatttttttttttttttttttttttttccgttgcgcttcgattttcctgtggttgatgtattgttatctaggagttaccattaacattcatttctgtagtttgaatgtagaattgtgatgtagagtgtctattctcacaataaataatttggttgccaatagaatccgagaaacagagattgtgtatttgttgtatacagataatgttacattctggtctaacgagaatttcgttgaatatcacttgatccgcttcaggatgtgatatcgatatatcacgtgattcaattcttagttgtgagaaattttcgatacatcactagcaggaagtttgaacagtggacgtttgttttagggagattgaatgctttgatggctctgatttttcttttaaacttttttgtcgctttagcaaatttagtttcatcttgttatgcatctctcttgaagtttggcattagttatttgttcgagaagtcataatgaaacttatgatagtatttgtgcagagaaagatggcatctaggctctagaaataaatggatttacggaggattatttatttattatgatcaaagttatgaaataactgtactgtggttatccaagatatacagacaactccatattgcacttcttgaacgttgttcctacattgcaactacagttaaattcatttgctgattccactcacgttttttccgtgacagctgtacgaggtggtgcggaaagaaac

SEQ ID NO: 105796 - DNA, 961 bp, Mimulus guttatus
  Intron number 1 from transcript mgv1a011941m (locus mgv1a0 11941m.g) derived from phytozome v7.0 (chr-ID scaffold_60; pos 254193 to 255153 reverse strand)
ttggtacttgtaccaacctcctctcgcagctcaaggtacagtttacaccatctcaatttttattttatttttttaattttttgtggttttttgataatttcattggtttttatttgtgttctacgctttctgtttgtttgtttgggagatatatatcacaattttagacttttgttgttagccctaatggatggttattgacatttttccggtctctggattttaatttagttgtgtggatcttaattttagttgggtaaaattggaatttttgcgctttgactgttattttatttgaattgtggtagctgagttgagatttttgatggatgaggatgagtgattagtgaagtttcacactttataatttatgaaatcgagatggcatttgttggaaatgataattgggaagtgtttggaatttccatatgcttgttgggtagcttaatactgcgttggagcagcaacttggtcggagttaaattttcgaaaaaaaaattggaacgaaatcattttatatctgtggtgtggtgtagaaagttttcatatggtcttcttatcttctagaggttcacagaaactgaaccgataccgttctttgttggtaaaataatggaattggtataagcttttatgtattattgtttctagtgtttataaaatgagcaagtattgactattatttctatcggatttcgtaatgaatgattcagagaagaagggattgcgtgatttagaaggatttggtgtttagacgtttaagtttgtagatggctggttccgtcactgtcaaattggacggacgcccaaatcaacttgtgggattttgagttctttgcaatttacataaaaaaaattgaggccttgcagcattttttgaggctgattttgatatatggtgaaacttattatttacttgttggcaggtttcattgacagggtacaaaagtctacctccatt

SEQ ID NO: 105797 - DNA, 897 bp, Mimulus guttatus
  Intron number 1 from transcript mgv1a024432m (locus mgv1a0 24432m.g) derived from phytozome v7.0 (chr-ID scaffold_212 ; pos 31803 to 32699)
ggagagtttgatctctctcacaggttcttcttcttttttgttgctgttttgttttcccatttttttttttttattgctaacacttatagagagttcttttaacaactaaactaaaacacaggggtatcgaatgcaaaaaaaaaaaagttcgactttattagatttaagcccggcacgtatcgaagtttgaacttttaagatgcatcttgttgatttaatagcatcgcttaaataatactttcttttggtcccaactgggtaaaaacatattaaactattagttcgctaaattaatagaattttgttagtctcgactgtattaatttaaagaggtttagctgtatttcgttgcctaaaaatgaatagtgaaccggggccatttttttatcctaatatatgatataaacttaaagtatatttatgaaagaacttcgttttggcttgaaagatacaaatgtgttaaatcgttatttttcaacttcttcgagcatatcatcttcgttttggctcttaatctttcttgcgacattgtcgatcttaaaaaaaatatcgattttaatttagaaaaaaaaagagaggaaaattatattgcaattattttaacttattggggccctattgaattatttttagaaagattgtaattttatattttccaaaaaacaaaaaaaatctattgtaccaaaatctttttgcactcacactaatcttttaaacctcaaaaggatggtctagttgccgggctactaactaatattgcaatttggatttataatgtatagtattatagcaagtgcacgcatatgtatcatttaatatttaatatctccaacaacattagttactacggtcaaatttacaggtaccgagatacacctggaattcggacaagggagc

SEQ ID NO: 105798 - DNA, 817 bp, Mimulus guttatus
  Intron number 2 from transcript mgv1a017972m (locus mgv1a0 17972m.g) derived from phytozome v7.0 (chr-ID scaffold_14; pos 1795155 to 1795971)
ggaaatacaaatcctccagcctctttcaagggtatgttttcgaattattatgtataatcataaacattttttaaataagaaaattatttttttcgacttttcatcaagtttatttcatggtaatcattgtagtataaatattggcaaacaccctaaaattcattttcttaagcaaattacgactaaaacctcatcgtttaggttgttgcatgttaaagaaatgcgtcataagagttttttgttattataatatggggaaagtacagtttgcacccctgaactatagggtttgtcgcaaacaccccctgaactatgaaacatatcaaaacaacccctgtcaattacggtcaacgttaacaaaattaacaccgttagttttattgtacatttacttaattgccctcaaattttgcttatgaaattagacccagtcaacaaccgcttctctctcctctctctctctatttctctctctcctatttctctctctctctctctctatttctctctctcctatttctctctctctctctctctttcctattctttccttttcatttgcaggtggtgcccctctctccacttccacacttttattatttcttcttcattttctgccggcggtgcccccctctctctctcaacttccacccatttgaagagctcaaccacatcttagtcttcactcgaatctgaccaattagcccaactcggtctcaaatcaggaaatacttaaatgtatggcctccgtcggtgatccccaacaatcctgccgccaccgctcctaataatatcttcaataatgaagacctcgtcg

SEQ ID NO: 105799 - DNA, 621 bp, Mimulus guttatus
  Intron number 1 from transcript mgv1a010448m (locus mgv1a0 10448m.g) derived from phytozome v7.0 (chr-ID scaffold_198 ; pos 36310 to 36930)
gagaacaacgcccaagcatcaggtatttgccgccgttatttcaatcaaatttggatcaatcaaatttgcaatctctttggattttttgaatttttttttggtgtttaattcgtagttttctgtgtgcggtgttttatgttttgattctgtgatttggcgaatttgttattttacagattaatattgtttcttcaatcgtccgtttgaagattagggctccttgtattaatcaggaatttgttcatgctttattacttttttcccttattgcaaagaactgattgcggagctcctttaaatgatttagttcaatcatctatttccgaaattgaagaatgctcttttaatcttattcaaaccatttcctctcgtttacggatcctgattcgacttgatttttggttgtaaaatgatcacagaagaatctagcaatattaggcaatgaaaccttatttgatttttttgccgcttggccaattaatgtatttctcatatgtccaacgtgtctacgaaaggggtttttgaacaggaaagtatacaccattattagacgatatacttattcttcttattaatttatttgtaggtggtggtggcccaccgccaaaaccgtgggagaga

SEQ ID NO: 105800 - DNA, 717 bp, Mimulus guttatus
  Intron number 3 from transcript mgv1a009579m (locus mgv1a0 09579m.g) derived from phytozome v7.0 (chr-ID scaffold_63; pos 974205 to 974921 reverse strand)
cagtcaacgatcccttcatcaccgttgactacgtacgttgcctcgtcttcctttcttttcggtccatttcttttttctgctttaaagttggtcttttgctgtatttatcatgtatgaatggtgattgattggttttcaggtgaaatagttatggtgtgtttgtttattattatgtgtagtagaaatgtttcgatgctgaactttgatcggtaggagttaatttcttgcacacattagaaatgtgagttagccttgtgaatgcggcggttgcgtagctttttggggatatttttcaaaattggaaaagaaaaaagaaatttacgagtttggaatgatcagtcggttttgcataaccaaattataattcttgctgtgaaattattcattaaggtcggccaagtcagcaagaaatctgattttttaattttttcgtcttttacggacttgcttggttcgatttgcaaatctatctaaaagaaccgtaaatgtcttttttattcattcggatcaaatatcatttctttcgttttcatagtcaaccaccaaattctatcccaaccccatacagttatttgatcctcgtagtgatcatgtttggtatgtgtgtctttccatgtcggtagagctattttttcttggtttagctctgctctacgtgtttcgacattctcagagaaaatctatttaatgtttgtgtttctatttctgcagacctac

SEQ ID NO: 105801 - DNA, 456 bp, Mimulus guttatus
  Intron number 3 from transcript mgv1a006005m (locus mgv1a0 06005m.g) derived from phytozome v7.0 (chr-ID scaffold_64; pos 1052247 to 1052702)
agaaggtggtttttgtgcttcttgattccggtttatcgtatttgtacatgactttactgattgttgttgttgttgttgttgttcaatagtaagtcatgaaataaccatgctgaagtgttatattgaaatcctcgaccgggaagaaaatatagacgataatatctagtctattatcttcaaaggaaaatctgttactttgtctttgccttcgattatatacgagagagagaacattcttcttatcaataactaataaataagaggggaattggatttagaaaaaaagttgaatagcattatatttcttgattattgttatcttcattttgaaccgtctttttctcacgtgctgtttgttttttgagggattgattaactttgcttgtgcttaactctccattatgttcttgtttgcttctagatctttccggctactgccacagataattacaagct

SEQ ID NO: 105802 - DNA, 833 bp, Mimulus guttatus
  Intron number 1 from transcript mgv1a000762m (locus mgv1a0 00762m.g) derived from phytozome v7.0 (chr-ID scaffold_27; pos 1104057 to 1104889)
cgggtttggggagcgaagagaagaccagaaaccaggtacccttttcattttctcttacactgctcatgtgatttacttgtaattttttttcatttttgtggatgtttctttggttttcaatggtgggttttctgcccttcgaaagttttactacagtgaaaaggactctagttttgagttatgtgattttcaagaatattctattcatctgggctttttcatcagtttcttgtttaggtcatccttcagtcatattacaaataaaccttaaaaagttggaatctctgtatgtgtaataataaattggttgatggagaaaggaagccatcaatcttgatcacttattcctgggataaagtacggaatataaccttttttttttttgttaaatagaattggatttggggcttcaatctcctagttgactttgtctgattatcattgacttggtggtttaagtaagtactcttaatgttaattaagaacagaggaaatgtgtgagtaatttcatgaaacaataaagcaattttgatgcctccaattacttcaatcaagaattcgaatttgactcagaaactgaaacaagagaaattgaagaaaagattcgattttgaaagtcgaacaaggtagacagacggttaaaaaaatttgctgcctctgcgaaagattagtcttgaatccatttgcattcagcatatcgctagatgataattaggatatttcgttgtctttgtatgagtatgaagtttatgatttaactaaaattccgatcaatgctcaattttcacgtctatttcttacaaacaggtaactaactttcgtggcgtaactca

SEQ ID NO: 105803 - DNA, 469 bp, Mimulus guttatus
  Intron number 1 from transcript mgv1a016167m (locus mgv1a0 16167m.g) derived from phytozome v7.0 (chr-ID scaffold_4; pos 3566475 to 3566943)
ttttgctgaaaagaaaaaccttgcaactgttcttggtaagccctttctttcttctcacggtagacgatgacgtctggttagaattggttatagaaatttttaattgttcgaacaaatccccaaagccctaaatttgttttcaattttttcgttaattgctctcgtctggatgaaattacataatctggttgttgttaattacattgtccaattgctgatggattgctatgaatcggatttgtttgtaagattgaatagttagaggcgtaatatataattaaagtagttccctttagaaattatattttggagtaagaatctatacttgaaagtttgaatcttttgttacctcttaaataccttttcttcaataatatctgaaattaagaatttatcgcatttcgttacttgtcgtattttgtgtggtgattatttgtttaatatcttcttgtagattggaaaattctaa

SEQ ID NO: 105804 - DNA, 587 bp, Mimulus guttatus
  Intron number 1 from transcript mgv1a008083m (locus mgv1a0 08083m.g) derived from phytozome v7.0 (chr-ID scaffold_45; pos 1565262 to 1565848 reverse strand)
gcctcgtccgacacgtggcaccttcttccaggtactgcaattctctctctctctctctctaaatttggttgattttgaggttttttgaagcttcgataatggaggtgtagtagtatccatgaatagatttatcacatatggaatggtgctgattttgcgttaattaccctaatttgccataattgaagcttaattggggaaaaaaaagagagggaaaacggaatttctgcgtttttgaaaattaattgaaaaaaattaatcactcgaggatctaaattcagaaggttcaataaattaaaaaaatatggtgatttcactgttcctaacttgcagtaatattcaattggaattggaataacaatacggttatttctatgctacgcccggtgaagactatgccgggtgatttttttatcgttgatgtacacacaccaatgtgggtgtgtgtgtgtatatgaatggtgtattcaatgtttctagtcttgtttccccaaataacataacgtaacggaaattgttttttttttttttctgttttttgcgaaattgcagcttaatagaagccattgatctgcttcttgaaggtg

SEQ ID NO: 105805 - DNA, 252 bp, Mimulus guttatus
  Intron number 1 from transcript mgv1a003388m (locus mgv1a0 03388m.g) derived from phytozome v7.0 (chr-ID scaffold_4; pos 2734960 to 2735211 reverse strand)
gaaaacgggctcaaagcattggctagtcattgcaggcaatctcttgttttttttatcttctattgagttaaatttttgttagattctaggttttgttgaaaaggtcaactgttgtttcggttgttacatatctgattcttgtttgatttataggttactgtgttcgatttcttttcttaacgagatcattaattgtttatatatatatgggttgtaggaacttgacagaactggatatacaagacagtatat

SEQ ID NO: 105806 - DNA, 776 bp, Mimulus guttatus
  Intron number 1 from transcript mgv1a020202m (locus mgv1a0 20202m.g) derived from phytozome v7.0 (chr-ID scaffold_13; pos 1560006 to 1560781 reverse strand)
ctccttaaagattccgaaattccttgggtaaggtttttaacgttcatctgttgcgaatttgttggtttttgttctgttattattgaatcagactttatttatgtgtcatctcgtgttgaaaattatatgcttaacttaatatgatcgtattgtttgtcactgtccatttataggacgaaattagtttagtttcacatagaagaatcgggttcagttgaacaaggcttcttaaaagttaactctcgtctgattgttttagttcgctttggtttaggttgctgattaaggatgaaattcgtaaacattctttgtctacgtaatgtctaatgttagatttgggacgtcaattaattgacgttgtctcgaatgaagaatacctacataagttacctagttgtgaataagtagttccatagctatataacattagcgtggctttgttttatttagttagtatatacttgttctttcagtgcaatgattaattatgcattagtactaagtttgaagataggcataacagaagaaacaggacagcatttatatctagaaaactttgattctacttttttcaccttggggacagaaaacttgtaataacttttccagccaaacttggaactttccaaataaaccgtgaagtatcgggatgagatacgctacataattttgttcaacttaaatcaatatctgtaagctcgtggtcgttcatgcagaataatcatttttttcttcttacagaaaaagcggaaactagagcagttcatcaaaaaaga

SEQ ID NO: 105807 - DNA, 1002 bp, Mimulus guttatus
  Intron number 2 from transcript mgv1a002280m (locus mgv1a0 02280m.g) derived from phytozome v7.0 (chr-ID scaffold_261 ; pos 22841 to 23842)
ataaggtgacaaccaagaaaattgggagaatgcaataaaatttgttcatgttcatttttttttttttttttttttttggatttgagaaaatatgatgtgtttgtgatggttttaaatagaggggatgggattataattcatggtaggcgtaatattttggtgttaatattttgttgacttaattaaggtcatgccaagattgtattggtgcttagatggcattaattttacgttaattgtgtgaaaatctgatttttatttagttgaatttatacgagatttttttgtatatggtaaatgtatatattttattttatattatctatcattttacggttcgatttttgtttccaaaattttatccttattacttaaaacaatattttaatattaattgtcacaaacacacgaaataatttatgaagaaataaatggtgatatatattttagtcacgtttgtataatatgtctactccctaaaattcatccatgcttattagttttgattctaacacgtgcactggaaccttaaacgacttcttaaacgacttttaatataacatgaacgaaatacactttgaatatatatactaatattggcgtatggtatgtgtatttgacccgagtaacccgagtacttgtatgggaacaagagacgtcgattgacccaatgtcgaatgtttggtatttatcgaattcgattgactgcaagtttttttttgtcaataaaaaagaaaataaaatttcattatttaataaatataaataaatggttatttcatattaaatttcatgtaagaaaaaaagattaccaatcattctcaatttgcaggatgtctattttcaagaattaatgaaaaaaatatattattttattcctgtctacaactcagtgaaacccacccccaaaatcctaggtttaaatcaaatttctgcgcaaacaaaaaaaaaattagggctttggcagaaatcaatcaacaacgcaataagcaatccgatttc

SEQ ID NO: 105808 - DNA, 559 bp, Mimulus guttatus
  Intron number 1 from transcript mgv1a012594m (locus mgv1a0 12594m.g) derived from phytozome v7.0 (chr-ID scaffold_20; pos 2031906 to 2032464 reverse strand)
atcctgaatcaatttcataccttcattgacaaattgtaagtcttctctctctctctctctagaacgatgaatcttcttgattcgtgaattattggtcgtatgcgcttttaaatgattctagggtggccctaaattgtgaaagggtttttggaatgaaaaaaaaaaaaaaaccctatttctacgaactcaaattcttcgctgtacagttatacttgtttaattgttcaaattttactcttacaatcaacgtatgtttagttatgttatgtattgtgtatatttgtaactatgttttctgccgctgccttttttctctactgaattcattacatacatctccgatgagcttaattttgagggcttttggagccagtggtgtttgtgaatcgtgtgatttactaaattgcccttttcgttgtttcgtgtgtaagcgaggatttatctttattaagagtgcgataattttgataaataaaattatggggagtttttttttttttttttctgggatgattagtagtgaatactaaatgtttttttcctcgaattcgtgtaggaa

SEQ ID NO: 105809 - DNA, 1067 bp, Mimulus guttatus
  Intron number 1 from transcript mgv1a021277m (locus mgv1a0 21277m.g) derived from phytozome v7.0 (chr-ID scaffold_184 ; pos 297705 to 298771)
gtggtcgcctcggcccctcgatttttagaaaaaaagtaggggtcccaaataatattttgtatcatttatataggctagcattaaatgatatttaatattatataaatagtttaaaattttgaataaccgtaactatattactttacatagtttaagtatttattggaaatttttacatttatttttgaattcttttatcaattttttatctatttcaagatttaatttttttattttccagcaatctttgcaatttttttaataactcacattttctatcgctaacttcgaagagtctccacaagttgaaaaatactatattttagttttactatatttaaacaaatgttacatatattcactaaaaaaaaatcttttgatggacaacacctatttttcacatagttaggcaaaaagtgttgtcactacgcttgtcactaacggggtgttgttaatgctctatagtgacaataaataaagattaagtgacaacaaaaagagctattagtgacaataaaaaagatgttgtcacttaatgcacacattaagtgacaactttttcaataatgcaactttttcttgtagtgatttgtaacttcttcaataatatttatatgactatttagtattttcagaaacacttaaaagctctgcccggaactccataaactttttatttaccttaacctcgtcaatatattagtcatattttctccaaaaatcttaattctaatctattaatttactgtccagaaatgctcgttagaatgaattaatgtgtaaattatataatacaaataggactcatacaaaatcttaaaattcgcatagggccaccaatttctcagtaacgaccctgagttgacgtacatcctcttgtctcctcaccaagttcacgatcttcttaagagcaaacttctcacatatattagtcaacctagctattagcattttttcatcaatatattttagataatcattttttataacctatattatatatattggatctaatttacatcttctgctgaggtggcatcttttaccgaacgaacacacgggaactc

SEQ ID NO: 105810 - DNA, 788 bp, Mimulus guttatus
  Intron number 1 from transcript mgv1a024173m (locus mgv1a0 24173m.g) derived from phytozome v7.0 (chr-ID scaffold_25; pos 63070 to 63857 reverse strand)
gaatctaatcaaccaaacgtgttattagtaactgaacgagcccctaaataaataatgctagttgactttgattttttaacacgttctaaaagatctcatatctcaatcggaataatcaagttttctttaatttctcgacagcaaaatcatgggtcaagtggcaatactctaataaattataccaggaatataatataatataatataatgatgcggatgcttaacttaatgggaatttaataagtaatgatttagaggctacttggctaaatttattgaacatatggggtgatttttgaaacttattaaggatcttgaatttaattttacatatttagttgactaattgactttatttttttaaggttcccactagtgaaaataattggaagttgaaagagtaattagtaggtttagaaagcaactcccaagcagccagaaaaaaaattaaataaaccaaaaaaaaaaaagaaaaaaagaaaaaaaagaaatgatgcttataaattcatggggtgcttcattgcatgcttagcgcagttcttcatgtaagaaaacttgttactttttagttttctgttcatctattcttttttattcttcatgtaaaaattatctttttccttgttttttttcttatgaatcgaagcgacaaatagctgaatctcagcggatcatggcagaataaccagtactagagttgccgatgacagtaatgtcggttgttattgatttgacattacttaatgatttcaggagctactaatagctggaacagattcaagcagcat

SEQ ID NO: 105811 - DNA, 655 bp, Mimulus guttatus
  Intron number 1 from transcript mgv1a000742m (locus mgv1a0 00742m.g) derived from phytozome v7.0 (chr-ID scaffold_52; pos 22565 to 23219)
ggtgggtaattttgtagcttcggttccttttttttttttttttaattatttaaatcaatgtttgacttatcagctgcaattttgtgttgtcggattgtgtattttcgttttgttgttggaaaatggggattttgtttatttgatcgtggaattctgagtggttttgatctatcatatatataatgtttgatcaacttaatctaaatttatgtttcaatttttttgtgagaaatggaagatggatcctggtttctaaattcgatattcagttgctaattgtttgactttgatgtacaatctgaaattgttccacagtagtcatatgtgaaatttggtgtctttctcttttgttttctatgacagaattgacgctgactgcgatctagtattttttatttgtttattatttgaaaaaggtacatcggatttgacttttaacgtattttctttcgaactttgcaatctcatgtcagaaacttttgcatgagaagacggacagtatatttatttttgcgtcggtaatttgttttggtggcataaagttctagggaaagaatttttctatagttaagtgtattttttgttgaagaataatttgagtttctaacattgagcaaactgcactcctcgtgatatatggtttcagcttctgaaa

SEQ ID NO: 105812 - DNA, 437 bp, Mimulus guttatus
  Intron number 1 from transcript mgv1a016951m (locus mgv1a0 16951m.g) derived from phytozome v7.0 (chr-ID scaffold_35; pos 380029 to 380465)
cgcctaaggccgccgcctgaacctccgccgccgaggtatgccttcaattccatcttcttgatttgctgtttgcatgcaaaaaaaaaaaaaaaaaaatggattgattttttttttctggttttggctatccgctgcagcccattataattaaaaatcttataagtggctgatctttgttttttttttttttaaatccgatttgattatggacatgttttttgttccggatatttgatttgtggtgtgtttcttttccgggcagatttattcagacaatttattgattgatttgtaactttacacgttaattacattgtttattgacagatctttgttttttgttttaaaccccgatttgatcatgtttgattattacacagatggatgtttaaaaacctgatttatactttctttttatttgcttttttgacatacag

SEQ ID NO: 105813 - DNA, 609 bp, Mimulus guttatus
  Intron number 2 from transcript mgv1a000208m (locus mgv1a0 00208m.g) derived from phytozome v7.0 (chr-ID scaffold_36; pos 905132 to 905740 reverse strand)
ccaatattaacacgattgaggtaattaatttaaaattaattaattataaataaaataaaaaataatttatttttaagtgaagttttgctgttttagtaaggaaaatattatttcatatttatgtgtgcgttaattaatttgaattttagacgaatttgtttgtgtcgaactttattctacaagttaaaatgacaaatatgccctcattcgcatattatttgtttgtttgttttttatctgaattattagtcgcttttgaattgcaatgaagcattaattgcaaacttttttttttcaataaaagaaccttagtcaacaattaatttattgaaagagagttacttgacatacaattagtgacatgtttttttgatgattttttaggtttttctggcataattcatgcatgtttattgatttttttattttaatccgtgaacgatgattttcacagagttaattttgtcaaataatgattttttttcgcttaaaatcgtgtcatttaaaaagaaacgaagagaataataataattaagattgtgaatattttttttaatattaattttatttgtagggaatattgaactcactacacatacttccaagtag

SEQ ID NO: 105814 - DNA, 614 bp, Mimulus guttatus
  Intron number 1 from transcript mgv1a011363m (locus mgv1a0 11363m.g) derived from phytozome v7.0 (chr-ID scaffold_205 ; pos 137641 to 138254)
tacacttagatcatcaaaacatttgcagaaaaaaggtctttaatactggacaaatacattttaacccctcataatatatttccatttcgtctttagtttccacaaaaaacaaaaagggtaaattacggccaccctgaagtcataaagattgaattgttaaataattattttcaccctatccaagatgaagtaaaaatttattacaacacacaacaagaacaaagaatgagaaaatgtatacaaatatatgaaaaaagcaaaccccatcttttttttttcttctttcatttgctggttcatttcaagtgatggttacatcataaagcagaaatgccacctcaaaaaaagagtgttattaccaactatacagtcagaatcgacacatgtccaattgcaaacctatcgtcgtaattatccgattcccatgttcgttagagatgaaccgaaaaaagcagagagaacaactttatgatgcattcacctttagttcttggtgacacaaatcttagtcatgaatcgaaagttaaagcacagaagtagggtaacgaaaatatatatacatgttatatatatatatagatagattaagccgaacaaagatcagaatcagagga

SEQ ID NO: 105815 - DNA, 330 bp, Mimulus guttatus
  Intron number 2 from transcript mgv1a017500m (locus mgv1a0 17500m.g) derived from phytozome v7.0 (chr-ID scaffold_163 ; pos 242173 to 242502 reverse strand)
tctcatatccttctgatatgtttctcttctctgattttacatcaccttttcctttttgtggatttctaattgaccgttgcttgtaaattaatttggggttaaattatttgatttttttagttttagcttatggttattggagttttctgcttttttctgtagaaaaagataaaaagatcaagtctttgaaacaggaagccctaatttggctttccttctgatttgaattgaagctaatgaatgcagaggtataatctttttagcatttgatttgatttccttgacctaagctaacgtggtaatcaaagagatcgtgaccgagaaagggct

SEQ ID NO: 105816 - DNA, 826 bp, Mimulus guttatus
  Intron number 2 from transcript mgv1a007669m (locus mgv1a0 07669m.g) derived from phytozome v7.0 (chr-ID scaffold_590 ; pos 19887 to 20712 reverse strand)
actggtggtgtccacctacaactccgccactgtcggtgagtcagttgcattaatgttgttattcttttataattattacgtcccttaattgtgtgtttatattaattaattcttttctaatcttgtttttaatcatctctacactaaccacaactcttgtttcacatgttctgtatgaacagctagattctagaagttgtattatacaaatgcttctcatctaatccgaaatttatcgatttctagaaccattatttttcacttcaacattgaaaattcccattttgtttttcaatttgttttttgatcgaaattgaaatagaaatgagattacgaattaatttccagaaattattcagaaattccaacatgtttccgaaaattatctttataatatcgatattattattattatctaatttgtatattttatgtgtatgaaaaaaaatgaaatttcagattttcggcgattttgatcccataaaattccggcgaacaagatttttcctttccaaatttggattcttttaggaaacttgtttgaacgaatttcttagtttttcacttcacaaaaagaaaaatcgaatttttttcgaaattgctaatttcggtctgatcggtccgatttccattctcttaatccattgcgacgaggaaaatgatgcggatgttaatgaaatgaaatagaaacaattttaaagaaaaaaatgtttttgcatagtcacattttattgtattgtaaataatttgcatagacacatttgattgtataaatagattgtctaacatttaattctctaattaaaaaaaaaaggtgttcttggcg

SEQ ID NO: 105817 - DNA, 915 bp, Mimulus guttatus
  Intron number 1 from transcript mgv1a016270m (locus mgv1a0 16270m.g) derived from phytozome v7.0 (chr-ID scaffold_12; pos 2204793 to 2205707)
acagacagaaaactcaaatctgcagaaataaagtaagcgacgttttcccgtatatgtttagactggtttttgtaatggatttctctattctgttttttgttcgatgaaattatttttggatttctctattctgttttttgttcgatgaaattatttttattgttgctagggttttagctccattgatttgcttcaatcaattgttatgattgtgctcgcatcttctttttctttctccgatttcattagatttgtgtatgagctgattatgctagccttcttcatgatgatttctccgggctgtgcgatatcgcagctttgatgtttagtttctcattattaaattttgattttggagtataatttactttaattaaggaacttaggtttcgttcagttcgcaggccaaggcagtgagcttctgaaattccttttctgtaacatgtttctgtttgattctaatggtgtaatgtgctgagttgtgtgttcctatattagttttcccaattgagcaaacctatgttttctggtatctgatggtgaaaacaaattcggattagctgggtgattttacggttgtttaggcgtttgctttaggtggtgtattagtttgcgtcttcattctctgttggtatttttacacacctgcttattcagccaaatgtcgtagctgtgaactatttttgtggtcccttttttcgtcattcgtcgtgtaacacaagattcttgactgtcactaaagagataacgaagagctaatgtgttaatcaaagttgtatctgttaatcatggattcgtccacgtgcagttgattatagtgattatcagaatacgatatcccgaattttggtcatatgttactaatttgattgtattgtaggctgacccggaattggaagcgatcaggcaaaggag

SEQ ID NO: 105818 - DNA, 683 bp, Mimulus guttatus
  Intron number 2 from transcript mgv1a005063m (locus mgv1a0 05063m.g) derived from phytozome v7.0 (chr-ID scaffold_1; pos 318523 to 319205 reverse strand)
tgtctgcggatcccattgtttaccagcttgttcgggtacgtctccatttgccagtgcttgaaaagttttgtttgaagaatcggttgtaatgaaaagatgcttgcgcttgcagatttattgtttcttattctttaccttctttcttgcgggcataagttattatggaagaatgaattatgatatgttttgagatattatggagattattggagacttgattgattttgagatataattgcacgattacttgcctattgaggtgttttagaagttcgtcttgttgtgtaaccttttattttcttattagctcttatatagaatataggaagttgttcagccaacatatttaatgtagatatgttgagaatctagattagaagtattctaccaatcatttgtggctatgaaagtgtgaatgtaaacaaactattagattccgaatttgagaatatattctcgtgttatatggaatgtcataacttggtcaatgtttgagtttacaggcaatatgattgacggtatttcttggttagaagtatatgcgataaatcagtcacacttttgaacattacctcaataatgtgctattttcatctgtaatttagtgagatttattttttgaatcagaaatctgatagttctaaagtaaattaaactgttgtaccgtctaaaattttaggttg

SEQ ID NO: 105819 - DNA, 794 bp, Mimulus guttatus
  Intron number 1 from transcript mgv1a001195m (locus mgv1a0 01195m.g) derived from phytozome v7.0 (chr-ID scaffold_63; pos 769348 to 770141)
ttcctgctgtgtatctatcccttcagtagttaagggtatgcagtgtgtgtgtgtgtgtgtgtgtgtgtgtgtgtgtgtgtgtgtatatatacacactcaagccttttattttattctacggacccatttttacttgctaaggataatcaacaagacattgtaaaagaaatttcatttggaatataatgctgttttgtagttaaaaaatctcgtgttttgtgctcgtctcgccgtgtagtagtttataaggtaaaatggggatggtgtattaatgaatatgtcagcgtcgagagtcgaatactttcgtgccctttttgttaatgtgaacttcgggtaaaattcttttttcgagaatataattggttcggtatcttgttcgtgttcttggctgtgccgtttgttgctatctaatctaattttatggttgcttattaagatagtggggatttgttccgagattaatttcgtgttttagtggtgacttgacgaaccactaaactttatttacatttctttctcaaataactttctacttgtatttttcattactgaatcccaaatatgtggtaatttgtgaacatctcgtttggttgaggcaattagccacgattaactaaatagttggatgttatttgatgtttggtaaacccaataattttcggggtcgacccgaattgtccaataaaacaattgagttttcattggattatttgatcttatcttgacgaccaaacgaggcctaaccgtattattgtttaggtacacaaagctcgaaaatacccaatagaaggtct

SEQ ID NO: 105820 - DNA, 727 bp, Mimulus guttatus
  Intron number 1 from transcript mgv1a000758m (locus mgv1a0 00758m.g) derived from phytozome v7.0 (chr-ID scaffold_85; pos 648325 to 649051)
aggtacattagtgcatgtttcttgtgattttttttttacttctgtcaacttttgtttccatcttcaattcctgcaaacctttatcctctctagcatattcatctccatttcgcccatttacaagctcaggatgttgagctgtactatgttaattgctcctctttctcctagagtgttctttttcgccttctcagtctactctattatgccctatatattgtatatacatagtctgtaactgctgaaggtaaccagttctagcagacatttcatttgaaacttccaagtttgtggttcggaagtttctgaaagtatgaggcaattctttctcagagatttcagaaaaccgattatgaggttgcccagccaaagttgttattgaaagatcttccaaaatgtaaataggtgaagggcaaagctgcaaaactttcaacattatgacataggatagcaagtttcaaaatttctcaaattaagcaaatatagttgaaaatatcatgttcttttgcaagtaatagtagacactgctgtaaattgggatggctgctggtgaggttgtgtttctttgttatgatgtcgagcttcgtttgcatgcagttaatatctaatcatctacaccctgtacatgattgtttgctgtcttccctttctttacgctctgtttttttctgctttgatgtgaatcttttcctctctgtagatttgtgtttggtgttggcatcatatt

SEQ ID NO: 105821 - DNA, 483 bp, Mimulus guttatus
  Intron number 3 from transcript mgv1a026399m (locus mgv1a0 26399m.g) derived from phytozome v7.0 (chr-ID scaffold_209 ; pos 355633 to 356115 reverse strand)
tggtgacgtgcttcgccgtagatttctcagacaaggttttcggttttctctcagtctccgatcggttaaatatattctatgccaaacaatgaaattacttcttgtgggagcgttttttctcctaggtgtcgtgttttttattttggaatcgttttgcagtgagattgagtgacagaaagagacgaagacttgatggtgcatcagtgcaatcatatacatcaggtgagattgcactttgatatatctatatccacattttgtattttaaatcaacctaattatgtccgagaacgtcttgaagtaaatatgattttagccttttacagttcaaataaacgtggcaactgaaatgggttcggttttggatatttaagtaaatcgtcatttcttaccaatttttacgatggccttcacatggaaaggtttattctgagatttttagattacctttttgtacttacagatactgctatcgaaagtgaa

SEQ ID NO: 105822 - DNA, 800 bp, Mimulus guttatus
  Intron number 1 from transcript mgv1a015197m (locus mgv1a0 15197m.g) derived from phytozome v7.0 (chr-ID scaffold_5; pos 1275832 to 1276631)
ccttgtttttcaagaacctcattcctccactcaaggtacactctttcttctctcttgctttttctgaatttcaagaaccttggtcgagtatagagttaatccaatctaatccaaccaaatccaatccaatccaattcaaatccaatcaaatccaaaataatccggaataggtagccaaatgaagccttagaaaatggagggcccaaagtggaaacaaaaatcgatataacttgcattcgtatgggatcatgcgattccgataagaatttgtacgtttttccagtggatgtaatatgttgtgatttaatatattgataacatccataaatttatttatgggtaaattacaacaacccctgagttatggacttatggtcaatttacaaaaaaaaaaaaaaactctcttgtttggataattacatttacctctcaactatgattttttcttacacctctacccctatggtgtaaaattcaacataatcatctatatttcgtggcatgtgctctagtttgtactcattttgtgtaaaaatacagtttctgatgcatctcaatctgatatatacaagccaaaaaacacatattatgatcatcttgcttcaaaatgtgaagttcgaattgtataaaacgggtacaaaagtgataatattccatataatctagaagattccactaaattttatagttgaggggtggttgtaattacccaaacaagagagggattttcgtaatttgaccatacctcggggtggttgtaatttaccctttatttatttggtatatgcagggctgggcta

SEQ ID NO: 105823 - DNA, 638 bp, Mimulus guttatus
  Intron number 3 from transcript mgv1a009173m (locus mgv1a0 09173m.g) derived from phytozome v7.0 (chr-ID scaffold_54; pos 1425627 to 1426264 reverse strand)
aacgtgcagttgaagcaaggggaaaaggtcggtagttgtttaatttttttgttctgctattagttgaattatgattgcaggatctccttttacatttattctgtgattttgcttgatttagtaccgtctatgatcataccatcatcactttaatttggtagctaaatattattcactttattcaggcaacacgaccttaaggagttgaacttagcatactactcttttcattttcctaattaaacaaatctcatcgttatattcttagcttgaagagatgaaattagtgaaggtaaaataaaatgtttccttttcatcgatttgaatgttgtatatcattgattcgtaacctctggtaaaatttttgtccatggaccaaaacatggagtatatgaagtagcctgacatcgaaactacagttacttcgtagctaatcatccgtttatctaatgtttaatgtattagagaggagataaatttaatatttagggcttacaatgatagttttctcaattatctcttgctatggatatccattaaatctgtattaaactgctccgactttttcgctcaatggatgtggtttcaactgcatttgtgtagttagaacgggactagaagggccaggattaactgtt

SEQ ID NO: 105824 - DNA, 669 bp, Mimulus guttatus
  Intron number 2 from transcript mgv1a024713m (locus mgv1a0 24713m.g) derived from phytozome v7.0 (chr-ID scaffold_10; pos 453958 to 454626 reverse strand)
attttaacgaggtaatttcttatgttagtaaatgaactatcataatcaaatgtcgttttcttgtatgattctgtacttgttcaatatcttatgttagtaaatgaaataatcaaatgccgttttcttgcatgagtctgtacttgttccttgatctagtacggtgaaaaatttcagttgttattacgacttgaaaggaagtatacttcctataatgtcgtaaatcattcctataaccactggtgaagaaatgttgaacaattagtgaaagcaaaataaagaaaaatactgtttataatcagtagagcttatatttattttgttctttgagatttgcttctcaacgatattttatttcattttgtatttgttcttaaactaatagcttatgctactagtgtcagaaacattaactaagaaaagaatatcattttctacattaccaaaagacttatttcgtatcttcttgggacgagtaataatcagcgagtacatacttattctgttgttagtctttttcttagattcgctacttgttccgtgttctagtggtgaaatatgacctcattaagatattttattaaccagcttgatatttaattagacggtaaatgcgttttttccgagtttgtgaatactatgtgatacgtctgagttattggtctaggtaca

SEQ ID NO: 105825 - DNA, 510 bp, Mimulus guttatus
  Intron number 1 from transcript mgv1a004951m (locus mgv1a0 04951m.g) derived from phytozome v7.0 (chr-ID scaffold_41; pos 373263 to 373772)
ctctcaccgatcttcccgttataggacatctgccggtgagtcgccgtggttccatttcttctgtatctgtttttttttttttttttttttctgagaatttgcacaagtgtgtgtttggtgtgggtgaccggattttgtaattgaaaattgggattttgattcggttcctgtgctgagttttctcgtatacatgtattttgctgcaagcctgcaatcgtgtttattattattatattattaattaattaattaattactgtatttgtttgtggattgttattttaagtttccaaattttgattgttgcaaactgttgacaaaattgacaatacattttaaattattttttttaattccactacacttatagcctataggactatcaaagggacagaataaaaaaaattgtcatttgtacatttgtttttgtgttcctgcacagaataatttattccacaaaatccggcagcaaattaattaaagtagtgatgattgttgtgtacctcagga

SEQ ID NO: 105826 - DNA, 602 bp, Mimulus guttatus
  Intron number 1 from transcript mgv1a017056m (locus mgv1a0 17056m.g) derived from phytozome v7.0 (chr-ID scaffold_24; pos 683602 to 684203 reverse strand)
atccggtggatcgagttcttctctctaacgtcgaggtcggaattcgttttcacccacgcaattcaaattacgcattgttttaatcgatttaatttttttattttctgtttatttatttgctgctcgtttcgctactgatcgttgtaccgtactccgcttttcctatctgcttcattagcttgagaaattcatatttccggtgaggaaaatgaaatcacagctaatttttcacgtggttgctcaaattttgtgaattttctgatattttttttaattagtttttgagttatgaaatagggttgatgctgacgtaagaggggtttgtattggggatttttggcaaaattaatttgatgtttctgtcgtcttccattgtgttgctgtttgttcaatgatctattggaaaataacttaattgtgaaatgaataatattgctttgcctttagtgtggatttccgggaccgttggattacgattcttgcattgaatgttctatattactgtctgagtgtaatcactttcgtgttctgatgaatctttcgtttttagcttttttttttttacaggcagagccttcttcgacaaaatagtttgtttttcg

SEQ ID NO: 105827 - DNA, 777 bp, Mimulus guttatus
  Intron number 1 from transcript mgv1a019442m (locus mgv1a0 19442m.g) derived from phytozome v7.0 (chr-ID scaffold_82; pos 846737 to 847513 reverse strand)
aaatcacgaaagctctcgcgaagaaaaagcacattgttaatactcaacctcctttatttgaaaacattaataatctctccctccatcctcaaacaccacttgtatcacatcatctacatgtaagtctctctctctctctctctctctctctctcacacacacacacacacacacacacacacacacacacacacacaaaaacatagtttggtaagcttttgggcttacatttccattttattctggagaaagatgttttgggagaagaatttcgaaataaaataaagtttgtttgtgttttgagaggagacaatttgtactgtagcaagtcaaatcatgtctgaaaggtgttggaaaaaaggtattttggaagaagaatttgaaaaataaagtgattttagtgaagacaatttatactgtagcggtcaaatcatgtttgttagagagagaaatatttgaattgtttttgggaaaagtttttgaaaatattgtagaaagataattttcattttgggaaaagtgtgaaaataattcgaaaagcttaccaaaaacatagccatagatagtatacttcaccaattctctctctctctctctctctctcaaacacaaacacaaacacaaacgcatagatagtagttcaccaatattaagaatctacgaacgaatcgaaaataccacttttatcccgatttttcctattccaacacactaacaattgagcaaatacatcttcacacagtcgggcaaccgaataaccgaaagaataagaggcgg

SEQ ID NO: 105828 - DNA, 749 bp, Mimulus guttatus
  Intron number 1 from transcript mgv1a008674m (locus mgv1a0 08674m.g) derived from phytozome v7.0 (chr-ID scaffold_26; pos 1542021 to 1542769)
aaacaaaccccaatcgttcgtttcttcttctcctggtaattcatttcaaatttcctttttcgtttccgcgttttgacttttttttttcttttcttcttcctcgtttaaacgatgatgaattgatgatgatgacgatggtggtgtttattgatgtttgctggtagaaactgtaaattccgcttctctatcatgaattcgagccccgtgattgattttctatggtgttgtgttatttcacattttttttgttatttttattttttattttttagaagcagaagatgtttgtttatttggccaatgggaacacaaattgaccaaaattatttatggcttctgtttgtttctacgaatacctaaattttgttttcttcttattgaaaataaaaataaagataaaaataaaaattcaatctggacaatctacaaccgttcattctgtttggattgccaaattctggaatttttaatcggcagcatttctagtcagttttcttccttactgacatagttgatcttttattagcaatttttctttttgttaatatagggagtaaagttcttaacagatttctcctcgttgacctgaagattactctcttgtttagtgattttattaattcgattaataattaattagatttttattttatttgattggttgaaacacaaatcttcgttgcatttttttaatgcctctaattctaacacagaatgccatttgctgtgaacaggtgggaaaacaaaca

SEQ ID NO: 105829 - DNA, 1024 bp, Mimulus guttatus
  Intron number 1 from transcript mgv1a008538m (locus mgv1a0 08538m.g) derived from phytozome v7.0 (chr-ID scaffold_290 ; pos 45113 to 46136 reverse strand)
cgtacggagactcggccaccgacaatcctcctaaggttagttaattttcaccaattcaatttacagataaagcatttgcgagtttgattatatgttccatccatttattcatctgattcatcttctccctaattcggtttctgctgatgcttttacattttccctgaaagatctgaactccgctgttaaaaccccaagttaattgcccctttttataagaatttgggaaattggtgttttagaaatttgtgaaaagaaaatttgctgcaattttgatgaaaagttgaaaacaataggaaatgattatctaaaacgtgtttgacttgaccgacaatttttggattttgtttcttcagtctgcgaattgcaggattatagtctgatcaataatatgcttgatctcctgtcaattcatgtttatgaagtactgaatgaagtgtaggttactcgtttttcgagtttgtgaaaagattagccgatgcaaatttatttaatgatagcaaaacttgcattaaatttagatgactgggctgaaaataaattcattccagttgtttcagggtatctatttgtgtcgcatattccaatttctcacatcttggcttattcactctttatttcaatggtgatcgggctttttgttactttattttcagtgtaagtaacatttcatattatgggatttaagataatttacggtttcactttggcactacttttcaagttgtcttgtattgcaattcacttcatcataatccagacacgttattgatttgtgcgagctattgtttacgttcgttgttcttaatgctagttatgttaacaacagatgcgcaacatttagcacacactcccattcacgaacaatacccttcgatcgcaataatagcagtttcaatgcattgtcacaaggtgttacttataagcaaattaaatgattaatcatcctgtaatcttattatccggtctcctctttaattaaatttcagaagcaagctgcgaaaaaggacatctttcagatatt

SEQ ID NO: 105830 - DNA, 984 bp, Mimulus guttatus
  Intron number 2 from transcript mgv1a025346m (locus mgv1a0 25346m.g) derived from phytozome v7.0 (chr-ID scaffold_114 ; pos 721872 to 722855)
ggaatttcattttactgaggtatgtattcatccactcgtaaatacgcgttgtgtctccttttctctaacagaaactggatcgctgaatcatgagtcaccattcattctttttggttttaactaaatacaagaacactaactatcttgaaaatcttcaacagctaataccagcagccacataaatctctgattctctagctgctgtgtcctttcgcaatttgtactgcatcttagtagattctaaagatatatataagatctatgtcttaagcattaattagaaactgaactgttgagttcttatcagcggtggaaattggaacggaatcctgaaagttgtgattttggaacaattttttcacgttgatttcggatgctttagaaatttatcggaatggaactggaattagcttttcacttccgaaaaaaaattgggatgtttccataaaagtgctaattccgatccggtccgtccaatttccacccctggttcttatagttcaagaaatctaaccggttctaaattctctgttacactctcagcactcctgtgtttacagctccatatatagcagttgccccttattttcaaaatcatgaattagcttttagattccttctattcacaatccctttagtctgcgtttggattgagggatttgaaatgaatggattgaaatgcgcctatatagggagcgtttgaaacgactcaaaatgagtagatattcgaaatccctcgcaattgctcaaaaaacaactaaaaacgagagctacgaatttgaaatttcttgtcaaatgacccaatccaaacaacgtctattggatttgttattatggatttgttcttgaatttctctgctcaatgatccaaccaaccaaaatcactctcattcatttaattctacaaggcaaaaaaaaaaaaagaagccagtataaaagtgagtgagtggaattttcttacatgatgtttctttcttcatcagg

SEQ ID NO: 105831 - DNA, 689 bp, Mimulus guttatus
  Intron number 2 from transcript mgv1a000381m (locus mgv1a0 00381m.g) derived from phytozome v7.0 (chr-ID scaffold_92; pos 183872 to 184560)
agaagacggtaaagtactatttgtagattgaagggcttgataaaataaatgaattcaccttcgtttttctatataataaagtgcctactgctgagtgctatgttactttatgctctgagcttggaaatagaaacaatctatatttcgacgggctaagatattgaaaactttcatctgacatacttcttgaccatttgttttgtggtaactgcatgttgcttgaagagtgatatcttttttttcgtctttattcatatgtcaattttttcatttactggctatcacatttgtatattccctgagatatcgttgtttgctcttatcattgtaatagttgaaatgcatatttggtaactgttgtactgtgtaatggacttttatctgaaactaggttcataatatctcgctatctccaggttttcatttgtattgaaatggataagagaaaaaattaattttatgctttttcttagtttagagaaatacataaacctttcttcttattaacaattattttcttggaatagtaatatatcaaggttatagaaaacctatggtagtatgaattcatttttcagggaagcttgttaattgttaaaagtttagttggtttgtgacacttcatattattcactttgtctttgaattatcaaggttgttgctaatatatccaaagtataccctaaaga

SEQ ID NO: 105832 - DNA, 816 bp, Mimulus guttatus
  Intron number 1 from transcript mgv1a001886m (locus mgv1a0 01886m.g) derived from phytozome v7.0 (chr-ID scaffold_24; pos 1932810 to 1933625 reverse strand)
ttttcttcctgtccgagatttttcaagaacatacagtaagtttgtttctcagttcctgaattttgctctcttcaatttgttttagagagagaaacaataaaaaaagatttcagctgaacttctttgattaattccatctctctctctctctctctctatctgttatgtaatatgtataccatcatttctttgtttgaaaccctaaaacgaaaaccaaaactccattgttattagtctgttgtttaaatgtaaagtaaaccacccgatttatgtttctctgatactgacagagattccatttttaagaagggtttttttttttttttttttttgtacagaatattccggcgagtttaagaaactccgttactgtttaattagtagataagacttaccatgatctcatcaatcgagaacaaatgggcaaatcatttattaatttttttattttttattaatttccaccattgatttattttcaagtactgtacatacaaataacttttgaacaaaccctatttaatttccttgtcatatcacacttttattaattataaggacattttattctttaacaataattattttcaagaaagtcaaccatttcgtcttctcatggttaattaaaaaaagaaaaagaaaaaactgaaccgtctttggatttaatttattacatcatggattttaggtctaaatttatcacactggttattgacttactgtatctatctatgtatctatctatctttttaatacttgttgattaattcttcattctcaggttacctaaaattccagcttttttcaccgtgtcgg

SEQ ID NO: 105833 - DNA, 529 bp, Mimulus guttatus
  Intron number 2 from transcript mgv1a010405m (locus mgv1a0 10405m.g) derived from phytozome v7.0 (chr-ID scaffold_16; pos 2262384 to 2262912 reverse strand)
ccgcctccgacctgtcggctgagctctctgttccggtgagccccaccgttctttttaattatttttgctttgcaataataatttcccatacgaaattctgaaaaacgacaactattttttgaaatttcgcagtattattattttgagcacatgtaagtgggaccttaactacataaaataatttacatgattgctaaaagaaaaagaaattgaatgccttaaaaatttcaaaaaaataatttggcaaattgtcttaatctttggtaagttaggtgtcacatctcaattcaccattaaaattttattttagttttcatctaaacctttttccaactgtattagacatgatttgtattagacatgatttgactgctacattgtttatcgtctcccgtttcccgaaatataaacaaacacgagaatgttctagtcgttttgaagagagtcactcgtagtcttttttcatttttataaatctaatgcatcccctgttttttttgttttagtacgaggatatagtccaactcga

SEQ ID NO: 105834 - DNA, 526 bp, Mimulus guttatus
  Intron number 1 from transcript mgv1a009558m (locus mgv1a0 09558m.g) derived from phytozome v7.0 (chr-ID scaffold_27; pos 523648 to 524173)
ctccccgcctccttcatcgttttcctctcactccggtaagtctcagtttttttttttttttttcctaatcttaatttgccgcgttttttgattttttttcctcttgaatttgcttgatgtatctgttttttttttcccgattttttttggggtagatcactttgcgaaatgaaattcggaaatctgtagttgtgattaccttatagtgtgtgaattaggatataggagtgaggagaggtaatctggcaatgaaattgggtgaataattcctttttccattttgccctattactcgatttgaattaaaatttgcattgtctttctgttatgtggtttcgatacatttccaaaaataagaaatagtttattcaaggtgtgtttgttaattgggtgctgctaatgaagaaattacagagcaattttcagttcaattagtaaaaaaaatatttgatttgaaaaatatatttatgaaattatttgttcttgtgggttgggttagataatttgaaacccagaatcagaaaga

SEQ ID NO: 105835 - DNA, 624 bp, Mimulus guttatus
  Intron number 1 from transcript mgv1a004173m (locus mgv1a0 04173m.g) derived from phytozome v7.0 (chr-ID scaffold_196 ; pos 278583 to 279206 reverse strand)
ccaccgtctggctagcttgggacacactgaaatcagtacgtttttatattttattttattttattttattttccactcgctgcatttctggtatgtgttgatttgtggtgtttcttttcacagttttgccatgtgtttatatgaattggtagtatttttggatgggagcggggggtttataaagttttgtagttgttttcttctgaaattttatcctcaagtatattttttattgttggattttgaatatgaaaactttatcctccgtttttttgttttgtttggtacctccagagggtacatatatgggtcaagttttggattttgtttgatgctggaatttggaaataatttgaggggttcacttttattctaagtcatggacatgcttgaacatgtgttgtcactttagttgttttggttgcttcaatcatgttactgatattatgacagtggagaaaaatagttttttttttttttggatcgaagaatgtcgagaataattaatttgtaaagcttttttatttattatttttttgaagggaagtgaacattttagatttaaacagacacaaacatgacttgtattatcattcatgacattgcccccatatctggttatag

SEQ ID NO: 105836 - DNA, 666 bp, Mimulus guttatus
  Intron number 2 from transcript mgv1a012922m (locus mgv1a0 12922m.g) derived from phytozome v7.0 (chr-ID scaffold_44; pos 818392 to 819057 reverse strand)
tctacgtctgtcgttctggctcggtaattgtttacctcattgagctttctatttgtattttttatggcaatgttccttggtattcgtttgattgtttttttgtctctttaaattttttagggttattgtgcataaaagtagttgtgtttagaagttgaaattgatgtaaggaaaatattctgaattgagtttcagctatttgattaaaacttgtgatgaaaggaagagcttgacacaaaaagaagttgaactatgagaaaaaatatcttatggtagtaaatggcgaatttcgattcacttgagatatttttgttcttaaaagttgtatataaatatatgtgagactgaagccagatggggcaactttattgtcaacatatttctgcttgttgaatttattcccggatgaattttagggggtgagggtgggtatttgcattataattagattaaccacgtgctttttgcaacataggggtttgtttttcagattgattcttgctgttctaactgaaatgattttggggtgcattttggccatgaaattaaagatatgtaatacttttaattgctggattggcttttctttttcttttgtaaacttcttctgagtagcatttgcaatgttctttaatcaggcagcagactcgcagattgtttcagatt

SEQ ID NO: 105837 - DNA, 848 bp, Mimulus guttatus
  Intron number 1 from transcript mgv1a012346m (locus mgv1a0 12346m.g) derived from phytozome v7.0 (chr-ID scaffold_115 ; pos 92692 to 93539)
tctcagcttctctatctatctatctatctatctgggtaactctctaaaaaaaagttttcctttttctatcctttctcgtttggtttgtgtttgtttttatgttgatgattccttgtgatatatctatcatctggataattaaaaaggctagagctttccgcatttatttgttaattgttaataataatccttgtgatttttgaatcatgttttcattctgttggatgagatgggttccatgtattactgtttattgatcgaagcacaacggactttcacatttactgtttgtgtgtatgtactgtaccagccaccaggatccaagtatgtgtgcggggggatgtttggtatttttccttgtgattgagtattaattttatctctttttaattttttaatacatcatgcctttagcttgttttccattccagttaggagttaggacccttgctatgtcatctcagaccttctttcttcttttacctttatacgcccgccctgtcatgtgaatgttctgaaaaatcatcaaatcaattttgtttttttattcattgtgtcccatgcttcatcttcaggtatgcccatactagcatatgtgattccgaccttcctttatgttttttgcctaatgcttttaccaaatatagaattatattacttgtaggatgaatgatgcaagagttggttcctctctctctctctctctcactgatatttcaaaaacatatttccgattgcttgggaaatttcatgttaagtgacgtattagaaccatttctaaccattcaaattgatgtgctatactcgacgcagggttgttttggaagagtttgatacgagtctatttg

SEQ ID NO: 105838 - DNA, 580 bp, Mimulus guttatus
  Intron number 1 from transcript mgv1a026837m (locus mgv1a0 26837m.g) derived from phytozome v7.0 (chr-ID scaffold_17; pos 1821542 to 1822121)
tcgggcctaattgaagcccgattatatttgagtagaccttataataacaagatttgatagtatgtgagctcacgagcaacccaaactcgtcttgcatggtctgattgtcagccataattacaagtaaaacaaatacctttttctcatttattatttcctataaaaatatttatatatctcgagctataaaggctcaaacatataaaaatcacacaaaaaaaattgtaaaatatatatatatatatatatatatatatatatatatatatatatatatatatatatatatatatatattttcctccacttgaaattaaggagggcctctcttttgagttttctcccaattcctaatatctatttggaaagggaaaccacacaaattggaatctcaaagatctcactacaagacacgtacttttgtcgcttaccattcaaaggaaaaacacttctaatggacgtgtaaacaaacaacctccctctctctctctctctctcttccctcttaatatatatataacacacacaaatatatctctgattttcatttttcatgcaaagaggtgaagaaacaaccacc

SEQ ID NO: 105839 - DNA, 436 bp, Mimulus guttatus
  Intron number 2 from transcript mgv1a019455m (locus mgv1a0 19455m.g) derived from phytozome v7.0 (chr-ID scaffold_68; pos 991870 to 992305 reverse strand)
ggtttcgtccagcagctctctcctaaagttagaaagcaagtttgatattccttttcctcaattgattaattgatatttcaatttataaaattaggttgtgttttttagatgaaatcgaaactcaagatcaaatttttaattgctgtagctcatctatgacttaatttttttttattaaaaaaattatgtagatgatctttagtttgagtatgattaattctttattgtcttgagcaaatgctagatatttagaggcgtttggtgattagattcccaccataccttaaagttgaaaaaaaaaaaaagaaaagaaagtgcttcccactatgcatattgtatttcgagtgacacaatgtttgtccattttcagtaatttctatgttcgatattttgcgatatagggttgtggtattggaccatcacaagactgcactcg

SEQ ID NO: 105840 - DNA, 772 bp, Mimulus guttatus
  Intron number 1 from transcript mgv1a010483m (locus mgv1a0 10483m.g) derived from phytozome v7.0 (chr-ID scaffold_136 ; pos 2016 to 2787)
tacccgttgttaccggcgttatcattgctagtggggtatgtctcttcttcttcttgttttttttttatttttattgtttgaatttaatttgatctggagtgtttttatttgatatgaatctatgtgtagagcgctagagcttaattgatggggtgatgggtactactgggaaattcagttattggtggtactggtaatagcaagttgtaaagacataggcctcgtttggttggggagattagctatgattaactaaataattgaactttgtttgatgtttgatatccccaataacttgtcgggtcgactcgcaaatattatgttatcgtggtttatcttgcttttgagggagcttttttgttggacgtcacggggtccgataaaataattgggttcttattagattatttgatcttattttggctaattttatcttggcaaccaaacggggccttattaggcagatttaagatctgtgcatgtgtttgtggattgtgcactcaacgtaaattttttcatattagtggagattggtttgtgagggattgaattaggattgactgtgttttctgtaactgcgttatgagaatggaagttgtattttaagtaaaaaggtgattgattattgcaacatagttcttgattgtgatatgcacggagtagctgagtatttgttttggaatgttccaggaaattaaatgttaaattctgatattcaccctctctgattggtgaagggtgagcccagtttccatttgtttggatttctcat

SEQ ID NO: 105841 - DNA, 663 bp, Mimulus guttatus
  Intron number 1 from transcript mgv11b016593m (locus mgv11 b016593m.g) derived from phytozome v7.0 (chr-ID scaffold_7 0; pos 762693 to 763355)
gcggagattcgggaggtgaggcggaatccgacgacgggggtgggtttgggagttgtggttggcattttgacggggaagaggaacattacgtatttttttttttttttttttgttttttgaattttgtttatggtagatgaatcgatgaggttaatttagtcattttatgtaagtcaaatgcccattttaatattaaggggcgatgtgctttgtcaaaaacaataaaggggggtatgtgctaatttttttaacacagggactttttcggcaattcgaaattacacaggggcttatgtgcaattagctcataattaatgtctagaactgtaatgcgtcgtttttgagactcgtttgcaaaaacaaaatggaaaaggaagttggtgtaatggagtaccctcaagctgatgatggtggagtttttaccataaagaaaacttcctacatcatctgcaatgatgtcaagatatttccttacaaactctctgaactcttggaactacggacgcggacgtgggcgagacgaggaatgtgacagttggattcattgaggtgagtgtcttgattattccgtataatcttattaacattttatttcttcaattttcatgcacactttgtatatatttttttaattaatattgttaatagattctggatttgctc

SEQ ID NO: 105842 - DNA, 412 bp, Mimulus guttatus
  Intron number 1 from transcript mgv1a004985m (locus mgv1a0 04985m.g) derived from phytozome v7.0 (chr-ID scaffold_109 ; pos 465493 to 465904)
ccttagattccagacccggtgcctctccaatcagagtatttcgctaaacctcttgttatttttttttattttttttttgctgaataaatttgagctcaataattgtttattatgtgatttctggttggatgaatgattgtagtggttctataacgaatagctacgggtggtttgattattttcaatatgcttggtgtgtatgataattccaattttttttgggtaaatcagattagtttattttgttaaggtataggggttaagatttttgtgtttcttcttggatggggacgatgaaataattattaggatattgaattttggtatctgtatagatttatatatattgtcttatgcgattttttttgtcttgtgttcttcgttttattttcctagaattacaattctattg

SEQ ID NO: 105843 - DNA, 557 bp, Mimulus guttatus
  Intron number 1 from transcript mgv1a009107m (locus mgv1a0 09107m.g) derived from phytozome v7.0 (chr-ID scaffold_12; pos 2687991 to 2688547)
tgctccgaagcccccttcgccgcttccttcttccggtgagacgaaattaaaattcttcttcgtccctatttatgtaaaatatatcgattctacagtgtaatttacttcgtttgttgatctcggagaaattggcattctaattccagatttttttttaatctggaaaataatttgggggttttctgtggtaacttctcgaaagaagttcaacattgtgaattttatgtttaggtttctgccttctatgaatgtgatttatgcactgattaagtttaatgtatgttcgtatataatctccctaactgttctagttttgaattaatactatctattatttatatatttagttacatatcaattactttcaaatcataagtacatgcttgtgtccataaccatgtttgagcaaaattttagtcgccccatagcggagcttaacttattcatacttaatgcccttatgttcctaaacctctgcacattagttttgaatttgattgcatagttgtagatataacctatgtacaaattcatgaactcattgtcataattcagac

SEQ ID NO: 105844 - DNA, 488 bp, Mimulus guttatus
  Intron number 1 from transcript mgv1a018013m (locus mgv1a0 18013m.g) derived from phytozome v7.0 (chr-ID scaffold_5; pos 211069 to 211556)
ctgattttcaatataaggttattttcttctaaccccggcttgttatttttcgattttataggcttttgaattttaattttttttcacatcttatacatgatttcaaggtttatttttgtttctacaaaaatttaaaattatgatgggtccgccggggagttagatgctacatctggttatttataccgggtggatttgaaccgtagattttattaaataattactcactaatcatacatacatatgtgtgtgattatgtgtagatttacagtttaaatccacccagtgcaaataaccaggtgggtacatgttctagggagggttattataaatttatagaagatgcaagaatttgtatgtagtcatgataaactttgctagttgcttttcttagtgaatttatacttgcaacaatttatatgctaattatttaatctttttaccttgatgattttctaactaggctgaagaagtgagaaaagaagtga

SEQ ID NO: 105845 - DNA, 419 bp, Mimulus guttatus
  Intron number 1 from transcript mgv1a007249m (locus mgv1a0 07249m.g) derived from phytozome v7.0 (chr-ID scaffold_68; pos 177178 to 177596)
catcccctgtttcttctttcagtcaggtaaaaataaaaaatatgggttcattttatctttgctgtgtgtgtgtgtgtgtgcagtaacggagccaggatttcaagtccggggggcgaatgcattatattttgttttaagggggccgttaataatgctattagcctattatacatgatttttcttttttatatttctatataatctaatagaaatttgaaatttgtcggggggccatggcccccttagccttatgctggctccgccactgtgtgtgtgtgtttgggcttaattttgaaatgggttatagtttgttttcggttttcttgtctgaatttgttttcttgatggtttgtttgggcttgtttttcttgtctgaatttgtagttgatagagtctttgataagcggagtggatttgtc

SEQ ID NO: 105846 - DNA, 458 bp, Mimulus guttatus
  Intron number 2 from transcript mgv1a007249m (locus mgv1a0 07249m.g) derived from phytozome v7.0 (chr-ID scaffold_68; pos 177701 to 178158)
aagaagtaagtgctttctgtttgtgtacatttgcaaatttaatgtcgattttagtggggtttttcgatattttccatgatgccagttatagcagagtgtgtcctatgtttcagttctgtccagcttctgagtgatgcaagaattgcgactgcgtcaatataatcgactgcattttctttgttttctttgttcggttcttgctatatattcaactcatgtattatggagaaagattgtagctttagtacgataatacgcgtataaaactcttgtgcttcgagagatagaagagtgctttgagtttgaatttaatcaaagaaagttcatagccggtccattaaataaagcatttacttgtgtgattacgacgacagtgaaaattgccttcgtttatgagaacagtgaaaataaattacttgctgtgaactattgaataggtagttgggctagcaagagca

SEQ ID NO: 105847 - DNA, 960 bp, Mimulus guttatus
  Intron number 1 from transcript mgv1a009061m (locus mgv1a0 09061m.g) derived from phytozome v7.0 (chr-ID scaffold_139 ; pos 407260 to 408219)
agaacgccgaagaacttcgctctgcatctgccaaggttcgttttcttcaatcaactaccttcatattctctttcaatttttttttttttttttttgttgttgttgtaaaattcaatttattgaaaatgagtgaaatttccgaatttgggaaatttaccttgaaaattttgcgttgattagggttttgacattcaatttgggttctgaatcaagcttatcttctcttgttagtgatttttctgtgactatctctttttttttcgaatttttaacttgattgtaatgttgttttgtgatggtcacccctgaacagtggcagagtccaggaatttgttctagggcttaattttaagggggttcgggggcagcgccctcgaaaaaaatttagggcatctatttgcattaaataagacaaaatcataaaataggtaaagaaaaaaagaacattggaatttttttagatgtttatttttgcattaattttgattttgggtgggctaattaataaaattgaggtgcgctaaatacaattatatatatagtttaatggtataatttttaattcagggtgggcttgagtccaccctggcaaagggtggacgtgcccctgagggaagatcaattaagaaaaaaccacttttgtttgggtaattacaactaccctcaactatgtattgtattacgaaaacccctctccttcaataggtaaatttgacaccataaggtggacgtgtaagacaatacatagttgatgcatggttgtaattacccaaacaggaggggtcttttttgtaatttgatcttacctcaggggtggtcgtaatttgcccattttaataatgaatcagtaaaaacaactttttcatgggtttgtatttgatcctatttgacgtttatttggatttttttttttaattcttaataggagaagccttctggatttcttagcttgaatagagt

SEQ ID NO: 105848 - DNA, 697 bp, Mimulus guttatus
  Intron number 2 from transcript mgv1a023593m (locus mgv1a0 23593m.g) derived from phytozome v7.0 (chr-ID scaffold_158 8; pos 7977 to 8673 reverse strand)
tagtatttgggatactttcactcatcaatttccaggtctgatttctctttctacatattcgaattagccgagctcgtctcttttggaaggctcgagctcgagctgacgagttgagatatccaggctcgagctcggctcgagctttaaaattaattagctcattattaaaaataattcttttttttataaaataataattgttttgattttattgtatagtttatatatatatatatatataaataagaagctcgtgagccagttcgcgagttgtcgaacaactataatcgggctcgagttcgagctcgagcttttgttgagtcggctcgtcgagtccacgagccggctcagctcgtttaccatccctagctagttgcatgtatgattaatgtatcgtacatatttattacatttttttgtacagtcacaatatttattgatatttttttaatgtcggtgacaaattgtgatttttgaaatgaaaataattttgatttttgaataattgtcgacagactttaaattatgtcagaaaatgtacagggggtttttttgaacattttgaagaagttgggggactgttagagaaaatagctgatttagttttgcgattaaccctcaaagattagggatattcagttttcgcccttaaaacattgaaaactttttcttacaggaaaaatagctgatcggagca

SEQ ID NO: 105849 - DNA, 764 bp, Mimulus guttatus
  Intron number 2 from transcript mgv1a010021m (locus mgv1a0 10021m.g) derived from phytozome v7.0 (chr-ID scaffold_66; pos 898473 to 899236 reverse strand)
ccaggttagttcattatccaccattaatgaatctagagaattttgatgaagctaacctaactgtcatgtttgtttgtttgttgatgcattaattgtgttcacaattttcagacatagataataactacttcattagttgcaaataataggcatattcctctatgttaatctcaatgagacaaagattatcggtaaattatagggtaaattacggccaccttcgtgctgtaatgtcaaattacgaaaaaaaacctttatgtttgggtaattacagccacctcctcaactatgaatcttcttacatatatcaaattcaaactaatcgtctagattgaatgttctctagtttgtactcgttttgtgcaaaaatacagtttctgatgcatcacaatctggtatttacaagccaataaacacatcttatttcaaaatgtggagctcgaatcggggaaaatgggtgcaaattgcagaaattccgcaagggtgaacgtgtaagaagatttatagttgagaggggcggttgtaattaccaaaacatgagggttttattcgtaatttgaccttaccttagaggtgcccataatttaatatggtcctcaagttcataagatggagacaaagaaataaatcaattcaattcaagaaacaagtagtgcacattttactatataaattagaatctccattgacaaaaggatttgcaatattttgtgtttactgtgtgctgtaattaatgacagattccattgcttgtggcaactaaa

SEQ ID NO: 105850 - DNA, 1045 bp, Mimulus guttatus
  Intron number 1 from transcript mgv1a005990m (locus mgv1a0 05990m.g) derived from phytozome v7.0 (chr-ID scaffold_2; pos 4206559 to 4207603)
gtgccagtgaatccaacggcaacgacgatctccaagtacatagctatcacttcattttacttaaacatgtttgtggattttctattgtattgagttcgcgcttcgtggtttgcaatctgcatttatcgtagatttttaatttgattatcattaatgcatctgggttgggtttagtggcttgatgttttgaattgaattgatttcatctaatttcatgccttttccttttgtatgttttaattctatatggtagaaacattttgtttaattttgttacttaaccgcgttgatgctcattctggaatagaatctctggactagtggctttggatgctaatttgactgtatccttatttccttttcctggatcatatcagttcgtttattgttcttcgtctcgaatagaagcatcgatgtgattaattacatatactttttaatgttatgaaatggtgtcgaagaaagtgttagatgtcaatactgaatactgcaagaagctaaataaaataaatgggaggaagaggcccatcccatttgatttttgaatgtacgaagaatcggattaattttacttgcaattagactatgtttgcattttttttgttcattggcttatattatcgaaaaatataatacttataccggaaatctgatctaactttggggataacagataatttgacaatcgtacctaaataattactttgcgccgggattacaattttaaaacaatatttagtttcttatcaatgagtgcataatgccagattgacatgtcaccatagttcgtaattcccattttagacataaaacttccgttttggatgctttaggatagtcgtttggcttgtctaagttgactgtattcttgatgatttcatttatcttactttatttctgcttgcgttagcaatgggggtggttacttgccaccatgcatttgaataaacagacaggatttagtgaagctatagctaatcttattacatataggtcgagattagagtttttgactttttaacttatttacagagtaaagtttcga

SEQ ID NO: 105851 - DNA, 476 bp, Mimulus guttatus
  Intron number 1 from transcript mgv1a005374m (locus mgv1a0 05374m.g) derived from phytozome v7.0 (chr-ID scaffold_112 ; pos 415339 to 415814 reverse strand)
tactgcagagatttacctccaatttcttcaatcaagttcgtactttccccatttttccttctccgcatatgtacgatttttacggaatcattacttcttctacgcttgttgattttccgatttttttttttttttttttttttttttaatttcataatacggacgattcaattgagtaatcagtagtttgaaccgacgaaatcttctctgtagttgcattttcaatttttatagttagcattttgatgaagagagaagatttgtggttatttgaatttaatgaatacacaatttctagggtattgtttggcataaagtttgaatcttttaattatatattggatctttcttcttatgcattacaggagaaacccctctttagtattacattttttgatagtgaaaatatattgaacttctttccacatattttccaattaggcagttaaggccagaaaattatctagtagaacagg

SEQ ID NO: 105852 - DNA, 346 bp, Mimulus guttatus
  Intron number 1 from transcript mgv1a009190m (locus mgv1a0 09190m.g) derived from phytozome v7.0 (chr-ID scaffold_11; pos 674739 to 675084 reverse strand)
ttcaactcaacgcccattccaccaccaaacagcaggtattcctctctctctctctctctatgaatatgcctaattttttttttcgcaagtaatttttcttaattccaatcttctttcaatttttttgaatttgaatttgattgtcttttgcataccctattagtaaatacaggcgttatttcgttcccgcgttttgatatatgatgaaaaaacatgcagacagttcagaactgaaattatagtgtgatagttcagctcataatttaggcatatttcagcaattgaattcggtaattctttctccattgcagacacagctgagacaggttaggttagaggaagaaaa

SEQ ID NO: 105853 - DNA, 374 bp, Mimulus guttatus
  Intron number 2 from transcript mgv1a012421m (locus mgv1a0 12421m.g) derived from phytozome v7.0 (chr-ID scaffold_58; pos 1172272 to 1172645)
aactctctttccaggccggcgaacgccattcagtccgtttcactgattttttttttcaattcgtgcaattggtacataggttttttttttttttgctttcgttaatttgagctgtacgggtttgtgaagattgctgattacctgaattcgtgcggtgtagagtgaaacaaaaagctagggttatttgttgttgcagtttagtctatgtgaatttgattttaaattttgatgggttaagtttttattttttaggcttaaacggccaagtatatagcttttgttgtggaataatgtggttgtagtcattaattcttctgttgttcttttcatcgtttgtaggaaaagatttgcaactggattttgagacagcacga

SEQ ID NO: 105854 - DNA, 337 bp, Mimulus guttatus
  Intron number 2 from transcript mgv1a009067m (locus mgv1a0 09067m.g) derived from phytozome v7.0 (chr-ID scaffold_79; pos 90658 to 90994)
gtacaccgacaatcgtaagcacccaatttcgctcaattctcaattcatctttctttacttgttcattcaactcagtcaggactctattgcttattaactatgtcaataattcagaacaaacaaaactccggtcttgatgaaaaagattagttttttattttgtatttttcgattttgtctcttaagttaattgctcaaagatttgtttttttttaattaataattaagatcatcatccagcttaaataaattatgttgttaaaagtctgtttgagtgtttctaagaagaattattgatgttccattggtaaagctaaaaagttaggggaagagcttg

SEQ ID NO: 105855 - DNA, 728 bp, Mimulus guttatus
  Intron number 1 from transcript mgv1a013891m (locus mgv1a0 13891m.g) derived from phytozome v7.0 (chr-ID scaffold_104 ; pos 685347 to 686074 reverse strand)
ctccatcgttttgttctgcatacatcgccgccgccgtaagtctaaaccctaggagatttgttccgttgtttcattttgcagtctcgtttcatgaactgaaagcttattatatttccgaagaaatagttagttatttctctgtgatttgatttttcatttaacttggctgatcaatgatgtgtgttttctctgtaaattgtttaattttttgtttctggattcaatcttttttccattctggcattttcagctactctaatgattttgttacaagttgatttttctgtgctcgagttttgtattgttttgtaagcggcgatgaggtttcgtgatttcgttgcacaggtgataaatgacgaagtattatcgttacagatcttgagtaataaattatagaaatgcgtgtatgtattgtatgtgataatatacgtatgcgagttgcgattgttactgtttaatgtgtttgtaattcagttatttggtggaacgatttgctgatgaaaatgaaaatgtagaaggtgctgatgtagaatttactggattatagtttcgtgtatttatgcagcttaatttttattttacaattgattggattgtcctatgtttgatgtataaaaaagttgattgtctccaagccatctttgtttgatcaattctcgatttattttttcatctcggttatagtggagttgatatcatcctttgattgtgtttactctaggtaaacc

SEQ ID NO: 105856 - DNA, 681 bp, Mimulus guttatus
  Intron number 1 from transcript mgv1a017924m (locus mgv1a0 17924m.g) derived from phytozome v7.0 (chr-ID scaffold_45; pos 1375441 to 1376121)
gactccacgtgcgacacctcgagttttctctgcaggtttgtggttgttcaagtttgtttgaattttattttcggttatatcgagttttgcaatttacgcttcaatttagtttcggtcatgagccgattcggggtttcgagttcgattagaaagtcaacttagtgctttgagttttgccaaactcgaaatgaaaaatataatggccaatatcccatttaaaattaggagagtaccagtaaaattaaaacgacatttagcgccttttttttaaaatacatattcttatcattttagttctaatcgaatcgagttcgacgcaagcttaatatattcccgaacaaacacttcaagtttagtacattatgccaacaatcttagatcaaataagctcttttctttttccttatcaacaatttcaaattgagtatcgagtacagtagaacatcgataaattaatactcgataaattaatcacctcgcttaaataatagtttcttccggtcctaattcggtaaaaatctactaaattattagttcgataatttaatatttcgctaaattaatagaattttgctagtcccgactgtattaatttatagaggtctaactatagtttgatttgattttcaactctatatacgtgcaggcacttgccggagtgcgactcgtcggtgttgagtg

SEQ ID NO: 105857 - DNA, 835 bp, Mimulus guttatus
  Intron number 1 from transcript mgv1a014138m (locus mgv1a0 14138m.g) derived from phytozome v7.0 (chr-ID scaffold_11; pos 1682852 to 1683686 reverse strand)
attttctctttgaggtaagaaattatattacagtttttccttaaaaaaccagattaaataatttattgatcaaattgttgatgtattcttatctctctctctctctctctttttttttttttttttgatttttttaatttaatttaaagaactgatccttgatgagtgttctcaaaattaaattttagatatatttactcataaccctaaaaaaaattaaactatgattacatactcattttctacgtgaaattaaataaatatacaaggaaaaaaaaaaagaaaaacccagaaaattaaattcaatatatgatgttattaaaaaaaaatattttatttatttaatttgtttgaactagatatatatgatctgaattgagttacatgtttggtctgaataatgtgtggatatatacagtccagaaactaatggaaatatctaagtcaacaattaatcagtactttctacactcactgtgcttttgaaagcgatgccaattggccatgctctcctagatattttcttcctctgcaaataaaataattacaccatggcccaaattattatgtgatcacaaaattacacccacaataaaattaatatataagaaaaataaataaataaataaataaaaagatgagttttcacatccatgggttcattgccatgatactttcagtctttcacgctatagctagtctttaatatatatgtgtggtactatctaactttttttttttttttttttatgttgacgacatttcttttataattatttcctgccattttcctcgtacaggtggttattactacgaatccttacacataacaaca

SEQ ID NO: 105858 - DNA, 588 bp, Mimulus guttatus
  Intron number 2 from transcript mgv1a023367m (locus mgv1a0 23367m.g) derived from phytozome v7.0 (chr-ID scaffold_45; pos 1205187 to 1205774 reverse strand)
aggatattgctgtaagtgatttactatttggattttggagcccccctttttttttcgctaggtatttgtatattagaaaggaggaaaattgttactgtagtttagtaacctgtgacactaactcaattgaaaatgtgtcggagtttcttggatttagttgctcaggattttatttttattttttttccttctccgttcgagaatttgcttatctattcggtaaattgggtttgatgggaagggaaagaggaagtaagtaagccattaattttattgatgtcttgcctctgccatgtttgaaaacctcaattccatacaaacactcatgttctcgtgttcagtttttctataccttctgtgtgtttcattcagagggatgtgtaaaatattgggttatttgagtcctgtgttgctaaattgttgccctttagctcgtggggagggaaggagattatattttttgaatagaattaaatagagggtagtttcttgtcctgaaggcatcatatatatctgaatgatttttggtggttgtttttgtttattgatgaaggtgcgagtgcaaacaattcgcgggcttcctctttt

SEQ ID NO: 105859 - DNA, 1038 bp, Mimulus guttatus
  Intron number 1 from transcript mgv1a005614m (locus mgv1a0 05614m.g) derived from phytozome v7.0 (chr-ID scaffold_2; pos 2150809 to 2151846 reverse strand)
cgccgtcgttccgatcaaagatcaaggcagctgcggtaactattttttcttcttcctttttttttttaattcatgaacacatatttaattaattaattaattaatttataagtcattaatatatatttaaactccataactctgaattatttttttaaatataataatgtttgttcatgtatttaatttggatctagtcagtctacccatacacagataattgatgactgacatttaatttcttaattatagagtgtgtgtggatattgatggtaaacgattggtggtttgccttaatcagtgtgtttggtaggaaaattagtggtattttaataaattgattactcttaactaattttctttaaaaacaatttaattttaaatatttgttagtgtgttttgtaggataaaaatggatactttcctttagtttttctggacaagaacctggtatgaatatacactattgaacttagtgcatagatctggttgatgtgaaaaattatacagtagaatctcgacaaaataataactttgcttaaataataatttcttctggtttcgactcgatgtaaacatactgaattattagttcgataatttaatatttcgttaaactaataggattttgctagttccgactctataaattaatttatagaggtttatttgtattttcatttgttgattagataatctatccaaaaaaagataatctttttagaatcttttcattgtatatggtggtgcctacatatcaccaattatcatgcataaaagtcattcctttgtgggccttgccctttaatttggttagctgtattgataatatctaatattgaattattatatattttactcaattgtgtgttttaactctagtccatattcaagaatctttttttaatttttatttattaatttattttctgatggtatgtatatattcaagaatcttgataatgacgaaagttttgattgaaatgatttgaattatttgaagggagttgctgggcattctctacaataactgcagtg

SEQ ID NO: 105860 - DNA, 711 bp, Mimulus guttatus
  Intron number 2 from transcript mgv1a007870m (locus mgv1a0 07870m.g) derived from phytozome v7.0 (chr-ID scaffold_108 ; pos 175031 to 175741)
atcaccacatcgccgccaccaatccactccaacaggttatcatcaacttaatcaaactttacgaattccaagggttgggagaagagtttttgtttaattgggtttaattaacattagtcgtttgtaaccctaactccacttggaaaaaatcctagaaaaatatctgcttttttttttttttttttctctgtatctctctgtatgtataattgcatctatggagtccgttggtgcataattttgattatgatgagaatgagttgaatctgttgcaactgcattagtttgaaagaatattttctgcaataagattgtcaagtcgaaactaggccaatcgaatgagggatcaagtgtcgaatgatgttgcgtatatgttagccgatattattatcgataaggtaatgaatgttttctaaaaaaaatttaccaagtcgaaagataattcgaaaaaattatatttgtatataaaaaaaaggtacaatttgttttcatgtttattgttttatatactttcttttgtattaaatttaaaaaactggaccaaaatcctgaatttgtgttatgtgtatatgcgtatgcaaagagtcggattctcaagagtccattagtattgaagttctgtactaatggagccgtaatcgatcctttttttcttttttttttttgtcaagtgcagtgtacatctaggtcgtcttccaaccgaagaacttc

SEQ ID NO: 105861 - DNA, 426 bp, Mimulus guttatus
  Intron number 1 from transcript mgv1a013233m (locus mgv1a0 13233m.g) derived from phytozome v7.0 (chr-ID scaffold_106 ; pos 366874 to 367299)
aaaaagccgtcggccttggcggttggcactggctggtacaccaatttcacaatttttcattattatttttctctgcattattttattaattgttatttttttgtaatatttgattcattgtcggtgagactgagaagggtatatgtatattttatccctttctcccggaaattcatatttgttgttttataaattataaataataaataaataattcatgcatgtataactagatttcaatttaacataaatttggtgttactcttctgttgtacggtaaacggaattttatttggcgaaaaacgactgtaattgctacgtttttaccggcgtaatcagatgaatatgagtcttttaacgcaatttcctctcgaattacggtttattaatattgactaaaaaagtaaaaattacaggttcttacga

SEQ ID NO: 105862 - DNA, 507 bp, Mimulus guttatus
  Intron number 2 from transcript mgv1a002681m (locus mgv1a0 02681m.g) derived from phytozome v7.0 (chr-ID scaffold_1; pos 3620971 to 3621477 reverse strand)
tgtgtttctttctcttttcctcccggagttgggtaagaagaatttattattttttttttgatttaattattagtgattaatcccacatgcagtactatcgcgatcaatattcgactattttcgtttattttttaagaataaaggtataccatacaaggatagtgaggcattgattgtgtaggggcagtgataaatgcaacctgaactaaattaggggggttgaaatcaaagttttaattaattatttctctttgttattaaaaagtctgtgtactactgagtggttggtgtcaataaaatgcatggtccatatgaaccatttatatatatctcttgtaataaatttaccacctatatatatatatatatatatataaaaaaaaaattatgactcttttagtggcattatttaattaataagcaaatgaaatagttaattaaattaaggttgtggtgttaataatgaaataaggttgcctggaaaagcatattcaaagcggcagcata

SEQ ID NO: 105863 - DNA, 453 bp, Mimulus guttatus
  Intron number 1 from transcript mgv1a023047m (locus mgv1a0 23047m.g) derived from phytozome v7.0 (chr-ID scaffold_123 ; pos 666581 to 667033 reverse strand)
gctacgtcaatttcaagttttctgcccacggtatgcatctatatctgtatctatatacacgtgtgtgtgtgtgtgtgtgtgtgtgtgtgattctgattttcattaaaaaattaattgacaaaaataattccgtaaaaaatatttttacaaaaaatgcttatcatcaatctgaattacttcttcttgtaaccctaattttacaaaaaaaaaaactagttacaaggcctatctttaacctattaattagctgttatttgattctttatttattttattttattttaatttagttattgatattttgaaggataagttataatttataaacagttcatctatatattttgttttgatcttacgtttttttccataaatgaaattattttgtttgtgattgtatgtatgtatgtatatatagctgcaaaggccatagaggaattgaacttcactctt

SEQ ID NO: 105864 - DNA, 457 bp, Mimulus guttatus
  Intron number 1 from transcript mgv1a026019m (locus mgv1a0 26019m.g) derived from phytozome v7.0 (chr-ID scaffold_79; pos 101268 to 101724)
cttgtagttggggaactgcttcacttctcaatctcgtatgcttttttttttaactcaaattcctcatatttattttcctcgatcgctcggtttcttattacttgtttctcaattaatgttcttgtctttaatatcatcgctttaaatttctgtatattaatgaactgctatatatatatgtattgctcaaacatgccaatcaaacatatgttgaatgtaatggcattttgttccataaagttttcctccactcaacgagtagttgactagttgagtgcatgtccaataacaaaaattccacaatacagtgacacagtgaaaagggctctttgtcccttttgaatttatcttcatatatatgtaattcttttaattttcaaaaaaaaaaaaatgtaattcttttaattttttttaatttataggacctaagcaacaagattttggtaaacgcaatcag

SEQ ID NO: 105865 - DNA, 1021 bp, Mimulus guttatus
  Intron number 2 from transcript mgv1a010478m (locus mgv1a0 10478m.g) derived from phytozome v7.0 (chr-ID scaffold_104 ; pos 192000 to 193020 reverse strand)
gaagcagcggattggtcgataataatacagagtaagttctcacatttcaagaaatgttgtttattttctaattttgtgtttttttatatcgaaaagttcgtaattttatcgaggaagagtcagcagtggaattgtggtggtgtagtttgggtagagaagtagaaatcagtttatttatttattatcttattttattcggagctggaaaatcagttgttcgtaagtttaggtttttgtgtgacaaattaaatgtccgtcttttttaagcatggcagatcatgtgaactaacggatgatgcgcgtattgagttttatgattttataaatgctgagtgaatgtctgatgttaagcatcggtcgttttgtttaggattttttcaacaaaaacacgagctttatgctactcattcgttttgatttccatgacagaggtataggcaagcttagattattggaaaagtctctcgtggttatattttggatcccttttgatagagagaaaaaaatcttaaatcgtataattgagagttctgttggtatgctgcttcgttaaccataatacgtcaccttaccgaaattttaattttggattcttcaagactttcattagtatcctaaggtcccgtttggttggcaagatgagattagccaagataagattaaataatctaatgagacccaattattttattggagcttgaagcatccaacaaaaaaaactcattagaaggcaagataagccaagataaaccatgattatataattttgacgggtcgaccgggcaatttattgaggataccaaacatcaaattaagtccaactatttagttaatcatggcttatcttggcaaccaaacggggcctaaggaatcagaaaatgcgccgaaagaaactttttaatgtcaattatgaaagatttgttaagagtattgatgctgatttttgctgacatttacgtcgattataaaaacttgccaaaatcgatttctgacttttgattgcatctttgttgatgaagac

SEQ ID NO: 105866 - DNA, 649 bp, Mimulus guttatus
  Intron number 1 from transcript mgv1a002043m (locus mgv1a0 02043m.g) derived from phytozome v7.0 (chr-ID scaffold_75; pos 532806 to 533454 reverse strand)
aatcgccgtgctgatcttcaggtaccacactttggttccagtttgaaattattaaatatagctgttcttcacattatatacttcgtatttgttggttgatgggggttagatgttgtttatatctcgacattttgtatggttcagcttaatatgtaggtttattcagttcattttcgtaaattgaaactccaattgcactatcgattttcggcattggtgttccggtactgtccgagatgtcgaactatacgcttatcttgattggagtttgttttctgggagttggaggtctcaatttgatattcgagatgtaatgctgtttgagtttcactccgtcggaagcaaatttattacttccggcgagaatttcgaaatttatttggttgatttttctgttaccagttgaatttgagctacgtttgcgggcttttgtgcatgcatatgctggtttgggtggatgaatttttcctcagctttatttgtagtggttcttgggtgaattggtttgagttttagtttgtgactctccataacagttgatgaatctggattatcatgattaatacctaaatgtgtatatttttttatgtttgatgattaacctgtattccgctgctttctttgtttaaggaaacccttcagaggataa

SEQ ID NO: 105867 - DNA, 594 bp, Mimulus guttatus
  Intron number 1 from transcript mgv1a002616m (locus mgv1a0 02616m.g) derived from phytozome v7.0 (chr-ID scaffold_25; pos 1446901 to 1447494 reverse strand)
aaccccaccaacactgtctttggtgagtttttatgttatgtgtttttatttttgtgttttgtttgactctatccttcttcttcttgattatttggcgcttgtagttgtatattgaatgtacactacaacattgataaattaatactcgataaattgcttaaataataacttttctgtaaaaaaaaaatattaaattattagtttggatagtttaatacttcgctaaattaatagaatcttgttagttcctactctattaatttatagattttaactgtatcttgtttagaatttgtatgttttttttcaatttgagtgagggttctctgttcttgcattgtatgatatgatattggtgttgaattttaactccgagatttctgtgggtatctaattttcctattttaaaaaagtataaaatattccacattttgctgcatgattctcgaatgactgtgttttcgaattgtacaacaaataattaggttctattatagtgtttaactcaaaatatgtttgcttcttcaatattggatgtgtaatttagaaataagttaaacttatttctaaattgtgtgtgcttttgtgatgcag

SEQ ID NO: 105868 - DNA, 764 bp, Mimulus guttatus
  Intron number 1 from transcript mgv1a016297m (locus mgv1a0 16297m.g) derived from phytozome v7.0 (chr-ID scaffold_109 ; pos 679003 to 679766)
gcggttttgggtttgcgacttacgccgatcccccggtgatttaggggggtgaatgtatatggtgggcccgacgatgatagttattcatggtatgggggcggctatgggagtagtggtggaagtggaagacatcttatagtagatgtgaaagacatcttatagttgggatcttaagcggcttagactgtctgttagtttttttttttttttttttgagtaaattcaagtccattacaaggggaagtaggggagggggggactcgaaccctagaccattaccctattggtaaaggctaggtaccaactctcctaatgagggttggtgactgtctgttagttatgcaaacaattattaggactctaatgatcgttaactattttattttgcgttaatctgttatattcgaagatctgggactggcactaagcttccggcactagtctttgttttattcgttatatatgtggctctattttcttattccatgttatgtatgtgttggctcatgctgacttgcgcaggagcagctgtgaattaaatcatgagcgtctcgtttttattttactcttttttctgtgttttttccccgtaatgtatcaagttcataactatctgctatatatatatatatatatatatatatatagatctgaattttaaatcattttttttctctcgtcggcagccatctgcgttgctggagaagaagagtattctggagatgaatctgaatctgaggtatctggagactctgtaactgaag

SEQ ID NO: 105869 - DNA, 466 bp, Mimulus guttatus
  Intron number 1 from transcript mgv1a023107m (locus mgv1a0 23107m.g) derived from phytozome v7.0 (chr-ID scaffold_98; pos 1019890 to 1020355 reverse strand)
ttcaatctaaagaggaagcatgtttgaaaattgttttcccgctcatttgatagttataatttttatttatttatttaattatttatttttattatttaatttcatttaatataatcaaggttaataaatccactaagtatccagattttttgatccgattcttcacacgtaatcaagtcttttatgtgttcaattttagttttatatatttagatgatgttttcttaatgattttttgtttcatgtgaatacatataggttaatggattggaatagtattcccgaagagcttcttgagttaatattatcgaacatatttgctagagacagatacaatttcaacttagtgggtcgatcttggaatgtagttgtggcaacctcacaattccgtatttcgccttgtctgctgttcaatctaaagaggaagcatgtttgaaaattgtttcagaacaacgctttcttctac

SEQ ID NO: 105870 - DNA, 718 bp, Mimulus guttatus
  Intron number 3 from transcript mgv1a026586m (locus mgv1a0 26586m.g) derived from phytozome v7.0 (chr-ID scaffold_75; pos 840276 to 840993)
gggagctaaaactgtgttgagggtatgtatgcattccctttcttatatagacatgtattcggtactccaaaatattttgtgagttttaaattattatgaacaatttgacttcaaataatagacattttacacgttccggaatgctacggaagaaaaaagagaggaatgaaatgctctggttaaaatcacttctgtttcgtttagacttttgtatttatgttttataagtatttcctgacaacataatcaaaatagttaagtgaaaacttggcatggttttttgcttgttttcgtattcaacttttgttttatgcttagtatttcatttttcatgaaatttgatgtaccattcaacccaacttttcggtacacatggcgggggtgggggttctgcagattgcttagtatactaccagtgatgcaaatttacatataattttgtaaggtaaaacaaaaccacgttgaattgctgtatatacagtgatagtatatagtagattcctcgaaagagctcaaaatggataagtggagaaacagacagcagcacaactaaaaactaatagcaactgaaggcctttaattccgatttcatgtagacttcatttatttgttgtaaactttgatattaatattatttgatattcaagttctctaatttcatgtcggcaacttgttattgaaccccataatggtgattaaaacgtgcagctggaaaaca

SEQ ID NO: 105871 - DNA, 756 bp, Mimulus guttatus
  Intron number 3 from transcript mgv1a016033m (locus mgv1a0 16033m.g) derived from phytozome v7.0 (chr-ID scaffold_13; pos 2245698 to 2246453 reverse strand)
gtaattcgtgatcattttcgttatacaaatagaaggtgagctgaacttttttagacagatgcttcattacgcaagtgttgatgatatgtgaatcgtttgattttgaaatgactagattatggatttaatagacgtttcttgataggcgttaatttgttgtgctgttcttttatggtgatgatgccggtggtttttcttttagttaaaaaatgattgtttcttcatctcttagtcgaaaatgtgaccttgttggtactaaatttaagcagttgtaattcttacacacaccctgcagaaaaaaataaaaaattcattcgttgaaatttacatgtcatcactgttcttcgagatacacctttttgagtgaggaatgcatgtagaaagatatacaaaaatgtctgaaacaacgccgagcaagatagaatggagttgtaaaaacgacgaaattggcgaacgatcctgttagcaataacttgtgtgtgtttaattttcttttagcaagtggaaaacaaactatggggatagaatatcatgattttgcaagtgtttgaagacgagtaaataaaccgtgattttgccagaaccgattctgtgtttcttgaatacatgtgtgtttggactttataaggttgtcttgaggccatcctttcgtttctgtggattgtttggcacatacataatgttttcattgatcgattaattatgttttactgttctgcagggtcgataattggcttgtgcagatctcctccgatt

SEQ ID NO: 105872 - DNA, 984 bp, Mimulus guttatus
  Intron number 2 from transcript mgv1a012075m (locus mgv1a0 12075m.g) derived from phytozome v7.0 (chr-ID scaffold_101 ; pos 552104 to 553087 reverse strand)
acgtaacacatttatttagctgctatttgtcttttcttcaacaatgaatcaagatcattctggaacctatgtttcgattgatgcagttttttcttgttaatttttatggaattgcaatagttaaatacaacttaggttcaatgtcaattcccgaacaatctcaattttcaattatttgaccattacattttaccaagttcagtgttagccagattagtcaaaagtgatatccttccgtgcacttaaaaaaaatgattttcgtttacatgttaataatctttttaagtttttagtttagcacatgaattattcctcaactgttttacgagaattaaaagtcactttcctctaattaagttaatagactaacacaaagaatcttccaacatgatcttatgtctggattaagttggcagatggaactttacccttctgtctaacacttaaggttgattcctgttatttgtaaccagaaattgcattttgcatgaaattgtttgaaccttggatgaatagttttttttgttttttaacaattgcacacagaaactgtgatatgtttacgtaagtgcttttatctacaggttatctcggtgtgtttggtgcttcttgataatttcaaatatacaagcttatctgcgacttgcctaaattttgcggaactaatgacgttaattatttatcagatcattgcgatgttaatctctgtagggttctaattgttgcatatacaacattagaagcctgaatcaaacatgaatgatgtcccagaacagcatttttatgccgatcattttccaagcttgtttgattatgtcataattgtattaatattacataatatcctagcaacctccctgcattagagctgaaaattggtgctgctcacaatatttccgtatttacttgttggtgttcgttttcttaagagtcccatttccgattgcaggttcgtgtgaaagctgctcttaatcagcagtccaa

SEQ ID NO: 105873 - DNA, 833 bp, Mimulus guttatus
  Intron number 2 from transcript mgv1a009469m (locus mgv1a0 09469m.g) derived from phytozome v7.0 (chr-ID scaffold_113 ; pos 498301 to 499133)
cctattctctggccttccaaaccctctgatttcaggtactactactactaatcatcaattcatcttctcaagggcatttttgtcatttcactttccaattttgcgggacgttttcgattagtgggtcccacgtggcggcggcggcggtggagccactattaatttattcgcttttcaatcagtctgtgtgtgtaagcgtgtttttttttccctaaatattgcgtcgtgttatttttatcggtataaactcatgtatatatatccttttttcgtgttctacttcaatttaaaaatcgcagaaaaagtaacaaacgtgttattaaaagggcatttgtgtcatttcagtccaaaattgcagatcgagtaacaacatattcggttagtgggtcccacgtggagccactattttctcgcttttctatcacttttttctttttcttataaatcgcgtcgtgttatttttatcggcataaactctcgtacatatcttacgtttttctagctagcactttttcgttttctacttcaatttaaaaagtaacaaatatgtcactaaagggcatttttgtcatttcagtccaaaagtcgcagaagcacatgtaacacattctattagtgagtagtgaccacaatggccacaattttgtcactacatggtcaaaacacaagtcaaaacttctaatactcgttcgggggtcatggccccccactgccctatactagctacccctatactagctacgccactagagggcaaaatcggtaattcaagtcgataatttttttaatttttggcagtgagacggtggaagtgtactctcgagaaataagga

SEQ ID NO: 105874 - DNA, 257 bp, Mimulus guttatus
  Intron number 1 from transcript mgv1a005419m (locus mgv1a0 05419m.g) derived from phytozome v7.0 (chr-ID scaffold_58; pos 20229 to 20485 reverse strand)
tctgtgggggaaaacaaaagttgcatccggaagaggttcgattttgacctgaaacctcaaacatttgcttttgattttgttgaattaaatgcggcgaagtttatttagggtttttcttcgatgtttttttttaatgtagttttaacacttttatgtatgagttttaagtcatttttactgtaaattgggtttaactcttcttattgttatatgtttttgcagatttgaacaaagaattgttatatttaggcaaagta

SEQ ID NO: 105875 - DNA, 489 bp, Mimulus guttatus
  Intron number 1 from transcript mgv1a013486m (locus mgv1a0 13492m.g) derived from phytozome v7.0 (chr-ID scaffold_81; pos 1016650 to 1017138)
aaaataaaaattcagtctttacttcaaattttgcggtaataatctgtacgtgttcttcatttcatgatccaattttttttttttatttgggtatttattagttgttgtttttctttgttatctccgtcgaatttcacatgggtttttagtttcagtattgaatttcacatgggtttttagtttcagtattgaatttcatatgggtttttttttgtgttgaatcaagaatgggttttttgattattaatcaagaaccagtttctgttcatctttgcgaacattctattcatgcggatttcccggacatgtaataaattttattggctgaaaaaaccttagactaacatgcctttggttatttggtaataatatgaaatcttttttttatatttttaagtgatttaactactttgagtgcttgatcatagtttttttctttttttcttgctttcaggttgtgtgctttattccctaatttttttttcgaaa

SEQ ID NO: 105876 - DNA, 763 bp, Mimulus guttatus
  Intron number 1 from transcript mgv1a015919m (locus mgv1a0 15703m.g) derived from phytozome v7.0 (chr-ID scaffold_18; pos 343639 to 344401 reverse strand)
agatttgggcctacatcaaacaacacaatctgcaggtatctgaattttttgaaaccctattttttttttgaaaatattgcttccagccttcccttgcagcttgtttgtaattttgtagttatgatgtttaacgagtgaaatttgatttgcttacacatggatttatttcatatggtcatattatatttgtttaaacataattatgagctaattaattccattaatctggatctttcagtattccttttcatgtttctgaagtttcttctgcaactggtataaattgttctgctaaaaccacgaaataagaaatctccgacaattatttacgtacaccgagcagtgttttgggctcgtattgttgcatgctgcgaattaacgaatcgggattttgctttttaagttgctaaagatttgaccaatcgaactgaactttacgaacatactttacattgttcaattgtcggacccaatcattcaaacagcttaattctcaaatcgtatttcgcaactaccactttattccgtttttgctggctcggatgtacttatctacgactgcaatacagcaaaacgaagagaagtaagtaaacagttcgtttcgcgaacatttcttaagatatgttgtgaacgctacctttggacttgaacgcaaatgatttgtttcatgaacattatttatcacatcatacgtacgtaactgatttttttcgtcttcttatttataggatcccaaggacaaaaaggtcattatctgcgacga

SEQ ID NO: 105877 - DNA, 741 bp, Mimulus guttatus
  Intron number 1 from transcript mgv1a018070m (locus mgv1a0 18070m.g) derived from phytozome v7.0 (chr-ID scaffold_148 ; pos 526275 to 527015)
ttttcagttaagggttctaaggtcattgcacacccgtaagcctcttttcgcttcattttgctgtaaattggggaaaatgtagaaatactgataaattcgtcgattggtgaacgtaaatttgattttaattttgccttttagttagcaattgccatgaaagtgtaactaagctctggagaaggcattgtagttgtcgaaattccttatttcggctatagattgtttaattgagagtatgggcaaatcgatttgcactccgcgatgcttgcattgttttcaaactctttcgacaccataactacccgattatcgatgataaagtgtagttttagatctttgtttgaggtcagccagaggagctctttttttttttttttgcgtttgtccgtttcgttttttcccctatctgttgcaaatggtaaccctcgctagtttttgttaatttagacttctgtttgcgtaaaaattaaaattatccggctataggaaatgataagaaaaatgaaatgcacgttttttcatacatggttctgatgccgtgcacgtctgacgagatttaattctgctgttagaaattagaattctgtcatgttcaaggtcttataggagcatttctcgcatcgagttcattgacattttgaaataaaatattattcagctgatacggtttcatcgagaaattttacagattttgagtttctctgttctggtgcaggtttaacttccacgtgtttccaaggg

SEQ ID NO: 105878 - DNA, 349 bp, Mimulus guttatus
  Intron number 1 from transcript mgv1a021263m (locus mgv1a0 21263m.g) derived from phytozome v7.0 (chr-ID scaffold_925 ; pos 8959 to 9307)
ctcaactatccgaagtcatcaacaatatcaagaaggtaaagaagaaaagaatgtggaagatttaaatgttggaacggcatttgtgaacatgttttgttgctcaaattgttatttgagtacattttgtaaaaactttttgatgaatattggttgtctcttttgaatatattaatgttgtttttgttttttgaatgttggaacagtgaacatgttttgatgctcaaattgttatttgagtaaattttgtaacatccttttcatgataaatattgcatgtctcttttgaacatattaattattaaatcttttgatagccgttggtgaatattggttcttaattgttgttact

SEQ ID NO: 105879 - DNA, 701 bp, Mimulus guttatus
  Intron number 2 from transcript mgv1a021263m (locus mgv1a0 21263m.g) derived from phytozome v7.0 (chr-ID scaffold_925 ; pos 9267 to 9967)
tgatagccgttggtgaatattggttcttaattgttgttacttgctgaactgtaggtggttggattgttggtagttgattgattgttggatcatctctggttgaaaacaggggagagggagatatatagaaagttgcaaaaaaacaaaacacaacattgtgaaaatgacattgataaattgcacgaataacatgacattgtcaatattaaattgatagattaccaataatgcttgaacaaatgacaacattgttattattacatcgatgaaggacaatactacactacaacatctcaaactaagaaaacatatcaaaatgataaaacaaactaagataacatccaatcatcccacttcaaatcttcattaacagaaccaagattatgacgaacaaagttacgcatataaccaatgagatttgcaacataattcgataatattgattattttcattatttgcagcaacactggatcgttttgaaataacttcaccaaactcgtcaatttgattcggcaactcttgctcaacatatttccaattttgatattgtacggctgtcccaataggtttccaagttgctcgatccgggacacaccagcgtaaaagattacattgacaaaactcgcaagaataatacaacttacctgttgttagttttgttgggttttcaacaacccttatagtgggttttcaaaacatt

SEQ ID NO: 105880 - DNA, 219 bp, Mimulus guttatus
  Intron number 1 from transcript mgv1a002137m (locus mgv1a0 02137m.g) derived from phytozome v7.0 (chr-ID scaffold_7; pos 1639245 to 1639463)
atctctctgattcttccattcaattccaattcttggtacgtgttttcctccatttttttttgtgatttttttttaattttttttaaatcgctttaatcttattatttgttgaacggattgtgtaattcactcatacgtacacccaatagaatcagaagattgcattttttcttttctgattggggttgattttgatttttgtttttggggaaatcaggg

SEQ ID NO: 105881 - DNA, 488 bp, Mimulus guttatus
  Intron number 2 from transcript mgv1a014592m (locus mgv1a0 14592m.g) derived from phytozome v7.0 (chr-ID scaffold_149 ; pos 104622 to 105109 reverse strand)
gaaaaaaagcttgctccaaattgttcaagcagcaggttttgcatttttcgttttctttgattcactggatgctatatcactctaatttcgttaaacgattatatatccccaagttttgacagtgaaaacgtatgcgtgtgtgtgtgtgtgtgtgtgtgtgtgtgtgtgtgtatatatatatatatatagaaacggtttcatttcgaattgctaaatagaacacatctacgagtattagtttcttaactttatactatcactgaagaggtaatgttatttacaaatgtcagaagaatttctccatttatgcaatatttgtgatgtaaattatttttaagattgtttatttgagaggcgactctagtctaaagcaaaaaaatgtacgggttgtctctgttgtctattttgaatgtatatgcttgcaaatgtgacatattttttttttcttttcaggagcttcatagagcgcagtttttgtcgtgttacag

SEQ ID NO: 105882 - DNA, 414 bp, Mimulus guttatus
  Intron number 1 from transcript mgv1a007675m (locus mgv1a0 07675m.g) derived from phytozome v7.0 (chr-ID scaffold_159 ; pos 317171 to 317584)
tgaattgtttattggcctattttcgggacgaattggtatgaatgaatgaatgattagctttgttttggtacttttgtttcactgtcaaattttcatgatgtttgggtagcaataattgatttattaaaggagtaatgagcttcgattctttctccaaattcgtttagaaggatacgatcttcgaagatttatggttccgaactgcattgcatgtagaacaagtacaatgaattctgattattgcatttgcactttatctttgtttgtagagttttataaatcctttgccaaatcaactatcaaatgacttgtcgagtaaatgacaagagatagatttctttgttgaattttttagagatttatatcttcttaaatctacattttgtattgatgtgatttcagggttggtatccg

SEQ ID NO: 105883 - DNA, 188 bp, Mimulus guttatus
  Intron number 1 from transcript mgv1a005807m (locus mgv1a0 05807m.g) derived from phytozome v7.0 (chr-ID scaffold_79; pos 98964 to 99151 reverse strand)
tgtgctgaagagaatttcaaaaggactgctcacatgtttgtcttttatttctctctctacatcttcatcttccaattcttctttttctttttttctttttgtttttttaataattgtggaatttacttttgatgtattgtatgataataataggcttgagcaggaaagtggttatttcttcgatttgg

SEQ ID NO: 105884 - DNA, 920 bp, Mimulus guttatus
  Intron number 1 from transcript mgv1a001098m (locus mgv1a0 01098m.g) derived from phytozome v7.0 (chr-ID scaffold_26; pos 1134953 to 1135872)
gctttgcttgccttcacccagtgcaacattaccgggtcagtaaactcgttatgtttctcgtgcattctccgctttgttcgtttgccaatttatacttctctttgctatattttttgaagttaaattatgtattctgattccaatctttgatttatatgcccgcaccttaaaaatgtcgaacgttttggagctccgaaaatgctagataacgtgtaacatattttgcccaagaatgaatagttttccaattaagtgtatgcgaagcaggcacgtcaaaagaatttgggtgagagcgaactggggttaatgttacgcactattcgcacgtatttattaaaataattgcggatgtccgaacatgggttaggaaatgaattgttttctataactggggttatagttttgaacctcatatctattattttcttattttcaaggattttcatgagagagaacagctgaacagcaaatttcaccataataacaaattaaactgtatatattttgatttttttttttgcggaagttagtttaattgactcactatcaatgtagtgccatatagaaaaaggttcgtaatgttttggtttacggggaccccagtttgggccaagaaatacgcttgaacaccacatcatgtgcagcttttaattcactgggtgtaatgctttcaaaacatcgtctctaatgcttctcctgttacatttagcattaggctttattcgtgtttcttctaagaagagagaaaggacacatcattttagagttttatttgtttgttatctaaattgtagaaaaagaatttcgaaataaatattttataggggacttcgtgcatatgttgagccaaagtgaacgtcgtttctattgtctgcatgcttacaggccagtggctaacattcctctgattcctctcgtgg

SEQ ID NO: 105885 - DNA, 703 bp, Mimulus guttatus
  Intron number 1 from transcript mgv1a025412m (locus mgv1a0 25412m.g) derived from phytozome v7.0 (chr-ID scaffold_2; pos 2394866 to 2395568 reverse strand)
cattgacatctttgttaaggtaacaattaataatttctttttcaaagtttgtgttagttatttcagaaaatatcttcttttttttccggagtgaaccactaattctaattccataaaaaaaaaaaaaagggatctgaaaaattggaaatcgaaatttaaaaattggaataaaaagcttgttcttaaattaaaattttcaaattggatttagcagtatttctgggaaaatacttatttattttggaagagaaaaactaattcgaacgccgtttacaagaagtttggaaaaattgaaaattgaaatttcgaaaattggaatagaatttcttttttccaaaatccaatattttgggatcggaataggtgtaattcggatttttttataacaaaaaatacataataatattgatgttacatgtgtaatgtttggggaaagaatcggaatttttgaaagttaaaatgatatcgtaaatcgaaattgaatgatcatatcggaaaatctactagatgttataattccgtacttaaagaaaatcggaaatcaaaacttatggaatccgaaatgaaaaatattgttaccgataatttccgttccaatttcgacccctaatagtttctgatcagatcaaattctttgatttaaattcacatggttttaacttttaattaacaggtaagatacagaagagcagccaaagcacta

SEQ ID NO: 105886 - DNA, 334 bp, Mimulus guttatus
  Intron number 3 from transcript mgv11b023536m (locus mgv11 b023536m.g) derived from phytozome v7.0 (chr-ID scaffold_6 4; pos 71865 to 72198 reverse strand)
ctgaccaattttattgtcactcctattgaattgaggtaatccttcttgaagctcaagtcactattcattcaccagaaagttgaatgttcgatattttttgttcattggctatgcaaactaaatctttgactgtgtagctcatatactctgggcattattcattgcaaggatttttcatttacggtgcagaatactaaatgttgtagtaattctacctaacattatatagctagttctaattattttcttctgtttgcttatttctccaatgcagcatacttttgatgaacaacctcaaaaattctgatatgttttggttttgttttatagtctg

SEQ ID NO: 105887 - DNA, 964 bp, Mimulus guttatus
  Intron number 1 from transcript mgv11b019602m (locus mgv11 b019602m.g) derived from phytozome v7.0 (chr-ID scaffold_2 43; pos 176220 to 177183 reverse strand)
aggggcaagctttttcaatactgtagcactgacaggtgataaattcaatttcttcttttttttcatgttatttattatatgttgatgatcttatttgaaaaggtggtattgataattttttttattcacacagttggatttgatatagttgaaatgttgttattgatgtgttcaatctggagtgcgtttgaactttgaaggttcttttttttttttttttggggacgtttcgaaaccctaggtttcaaattccaacttttttttcttctttcctatgaaagacccaaaaatagaattttggagatgcggatgttgttttattttttagtattaaaatgatgactatttaaaaaaaaatgaacaaatactagtaatttagtaatattgaattaatggactcatcgtggtgacggtcatacacgataatatatgtaggtgatatattgaagatgggaccaatcctcgttaaggagagttggtacctagcatctacttagaatagagtagaggttggagttcggatcctgcccactcccctacttttccattttccccaattcggaaccgaatttgaataaaatatctgaaaatcccacacggaaattactaaatcatacacataattaaattattttctctctctaaaaacacaatagcccaaaaacgtttctccaatgaaacataatgatagcctataggaaaggaattacataattgcaatgtttgtttcaattaaggttggtgagtttatatgtatgaatccttccatattaggttattcctaatttgcccttattctcgacgtgcgtcccattctctttatctcattatctctttggcgagatcttcgaaatccaaacccccagacgatccttaccattcataatctcgccaaataatatttatcattcatgcatattcatatgtagagagaaacaaggttttcgtaaaaggcacttctata

SEQ ID NO: 105888 - DNA, 634 bp, Mimulus guttatus
  Intron number 2 from transcript mgv1a012326m (locus mgv1a0 12326m.g) derived from phytozome v7.0 (chr-ID scaffold_2; pos 4373997 to 4374630 reverse strand)
actctgcttcaggtatatatatgtgtgtgtgtgtgtgtgtgtgtgtgtgtgtgtgtgtgttttcatcacgtgtacttgtgtgtgtgggattgcatataatttgttcaagagtctgtgtatgaaattatgaattgatgtgttttagagtctggttagtggttactgactattgatctgtttaaagaaaaattgtttgattaattagtctgtattttgttcacttgatttttttctgtggctgtttttttttaaatgattattagatgtatataatatctcggaggtaaaaatgttgattgcggacactcactcgtgaaatacttgtaagaagatgatgatactgagaagagcatttcatctgtcgtattatatattacttcgatttctcttgattgaatgttgctggtgtgctgctctcatgttatacgttctaaagtgactcgtaaattttgcatgaaatttagtattgcattatcagatgctgatataaccgcaaattatattccaccaataacctgattagtcaatttaattctaatatggaatggccgcacgggtgattctctagcagataccttagagtatttgataattttagatttttttatgtggtggttgtaggagaagggttcag

SEQ ID NO: 105889 - DNA, 629 bp, Mimulus guttatus
  Intron number 1 from transcript mgv1a013190m (locus mgv1a0 13190m.g) derived from phytozome v7.0 (chr-ID scaffold_18; pos 1845131 to 1845759)
ttctgatatttctcgtttcttccttctctcggcaagtaagtcttctcctctactccgtgccgattattccttttcatttttgatgttttttatgcgtttttgttttagtttgagtctgcgttagttctgtaattggctattggaatttgagattgaattggcaaatgcctgtttgttttggatctgaattctgattgccctgttaggtttttttttgtcgatttgggggaaccgatatttttgtttttgaattgatcaatttaggtagaaactccacttttctgagctaaatttacaaattcatgatctatacttagaagaaacacaggactttttggtatatgtactgcaatttaactggaatgtagactttgtttcttatctgtacatggatgtatatataacttcgtctttggagtataatgtcacgtcgtgattgcttgagaacaaaatcgaaatcgaggaatctatgctatggatgttagtttcttattgttataattttaaaattataaagttatcatgttagagtactctcgttaagtcattactgccgctgacatatcgggtgtgtgcttttttacttatctagtgtgggctttctcctttatatttgcaggaggcggaga

SEQ ID NO: 105890 - DNA, 727 bp, Mimulus guttatus
  Intron number 3 from transcript mgv1a003179m (locus mgv1a0 03179m.g) derived from phytozome v7.0 (chr-ID scaffold_7; pos 3358469 to 3359195 reverse strand)
agagccattactgcaaatactgtcactgaagtcaggtagtttttgctgcatttgaatgtttcgtgtttattagttgacgggctttccatactttcgggaccttgcttcttttcgcattctaagaaactatccgagcattactttgtctatcttaagatggaaattccatttgagttatgattcaactgttattaatgaattgattcccaaaaacaaacctattcttttggctcagtcattgttatttagatgattgttttaatatttgttattctttccattatgtgattagttactctttttgatgcagtacttctgttctttgaacaatattgaagcaattgtgaaaatcaatcaccttgccaattccaatctatgtgtgaagtagttctcatttagtttttgtttttttttatttcacataatttcaaccctataacgaaatcaatgttctataatctatacaagaaattttgtgagtctactgccgagttaactcacaaacgtggctatcaaattcttcatttacgcactggtgtggggaaaatgaattatgcatcattttacgtcagccattccttcaatcccttgtctttctagatgcttttaaatttgttttaaggataatggagttgtgcatgttcaccgttgtcttagtttgagtactcaggatgtggaattttgcttttaattgatgaatgtccctgaatcttcttcaggtttctcc

SEQ ID NO: 105891 - DNA, 335 bp, Mimulus guttatus
  Intron number 4 from transcript mgv1a009608m (locus mgv1a0 09608m.g) derived from phytozome v7.0 (chr-ID scaffold_48; pos 1352568 to 1352902 reverse strand)
tcacagacaaggacaaggctgctgcccacttgaaggtcacacttctttccgatttacgtcaccgtctttttttttcgcatcagttattatgttacgaattgttgatctctggtttattttacttcaatttgctacttaatgtctatttgtctgaaattgcgttaattctttgtcatttgtgacataggtacagatagttacttagggcatttgatttgaatagttatgtatgaagctcttcttgtttttagttattgattgttctatgtttgttgatgatctaaaaaaaaaaaaaaacagggtggtgctaagaaggttgtgatctcagccccgag

SEQ ID NO: 105892 - DNA, 791 bp, Mimulus guttatus
  Intron number 1 from transcript mgv1a002348m (locus mgv1a0 02348m.g) derived from phytozome v7.0 (chr-ID scaffold_41; pos 156793 to 157583)
caacatcgagtccctcgtcaaatccgtctaccaaggtaataaaattccccccaatttccgacatatgcaatcacttctccgacatgttcatctctggttttataacaacgttagggcgttgacttttctttggtccaatttggaagaagaagcagaacaaacaatgtggggtttcattttttttttccttatatatatttgttttgacaaaggttgtctctaatgtacttagaattttgattttgacgaggatcacagcagtttcatgtttgcctttgatggctttcatttagtactgagtgatacgataaagttattactgagatgtgatttcaagatcaatataaaaaattatactgcgtaatcgtttcgaaaatcgtgagattatataagggagttaattcaatatcgagggcttggagattctttagctttatcgtgttatgtttccttgttgagtagaagttgcgtacgtcctcctggtattgatttggttttcttggaaatcgagctaatctttgccacgaatctgattaagtcaacctcttcaatcatttcacgatatttttgcttggttaataatcgagcattgaaactgccaggtgtctgttgaagtttccttctagcttggtcgttaaaatcttgtagatttttgaagtatcttgtttacagtattagtccatatcgattattactttttaacttctatgaaagtaattaaatcttagtttatatatatatattttcttctttcagaggttgctgctacggatttaaatttggaagaatca

SEQ ID NO: 105893 - DNA, 896 bp, Mimulus guttatus
  Intron number 1 from transcript mgv1a011022m (locus mgv1a0 11022m.g) derived from phytozome v7.0 (chr-ID scaffold_4; pos 1617849 to 1618744 reverse strand)
tatcgacgccgttactcagctcggtggcgcaagcagttagcaattagcatagcattcctcttccttatcatttttttattaattatatttggctgtgtttgtgtgtttattttggttcattagttacttcaataatttgattatcaaacacaatgtgaatttctgtatctctaaattgcttggatctctaaattatttgattatctactggaattattaggtttttctacagtaaagaagtttgggatagttgtatattcctgttaactagaaattctatcccaaacttagtgctggtttggttatctccactctgataatacatatgttattagttatctaaactgtaatggttaactttatcaggctaggtttattataatggtcaatggaaagtatgatgttgtgaaattttagtggctacgtctattagttcttcgttattaaggttgacgtatgcttatgacatgaggcgctctgttccggcacaattgaatatacaaattcatgcgtaaaatttcgaaaatcttcctgctaagagaatctctccattctggcattaacttgtaaataattaagaatgtatccaagatttttggtcggttcatcgagaaaacactactaatctagtagttgatttatgctggatcaaagagttgagttgtggtatatgcaatttcagtttctgtatatccaaaaggcgggatgaatatatgtcatatttgtttgcttatgtttctacatctgtgtcatgagtttgactaatcacggcaccaataacagaccaaatgctcacatactttgtagtttttgtagattagaagacttctcatactttggcacttttttttttctttttttttgcagaagctactccaaaagctattctgcgcaca

SEQ ID NO: 105894 - DNA, 499 bp, Mimulus guttatus
  Intron number 2 from transcript mgv1a024592m (locus mgv1a0 24592m.g) derived from phytozome v7.0 (chr-ID scaffold_27; pos 1027630 to 1028128)
ttattaattcccaaatcggaaagcttgatatcttggtaatgatcggaaactgttttcttaatttcttatttttttaattttcctttttttcgtgattctttgctttgagcaatggctcattcggaattatgttcttctcttacaatgaaatttcactggaaaattaaaatatatatatatatatatatatatatatatatatatatatatatatatatatatatatatatatatatatatatatatatatatatatatatatatatatatatatatatatatatatatatatatatatatatatatatatacgtcttgtgtgtatatgtgtgtgtgcattctgagggatggatgcatatctaatgtctcgaacatatgaatataaggggggcttatatttgtttgtttaacggccttacgaataaaattattttgatgaatataggatatcagaagattcaaaattgttcgtttttcttatttaatgtgcaggtgaaca

SEQ ID NO: 105895 - DNA, 1032 bp, Mimulus guttatus
  Intron number 1 from transcript mgv1a006890m (locus mgv1a0 06890m.g) derived from phytozome v7.0 (chr-ID scaffold_106 ; pos 272510 to 273541 reverse strand)
tttaaggttttcttcaacattccaattgttcttcagtaagtgctaggtttttttaattgtttattgaattcgccgctaaatttaattatgccgtacgagattctccaaaaaaaatttgtgtgttctacgaaagtggagattctttctgcaatttacactactttttttttttaattgtttgaagtgaaacgatgatgcctaattagggttgagaagtattctgggattttgatgtttgatgaaacaaaacctagttcctgtaattttggttacagtatgcaacgaaaaatcgaaaaaaatgttaatgaacaatagatgattaagaagctgttaagagagttgcttgatgctggcgtggcccctatgaattaattaagaaatatttccccccgcttttcgttaattggttagaattaggtattagaatgatacggaaatgcatttggcccatattattgtgataaatgctacccgtatttcgtgttcgtggtttggatcagacgaccttcttaggcctcgtttggttggggagggagattagccatgattaactaaataattggactttgtttgatgtttaatcgacccttcaaatattatgttatcatggcttatcttgcgttctaggcatgtttttttattggattatcgaaagtctaataatataattgagtttcattagattatttaatattatctttgactaattttatcttggcaaccaaacgaggccttaatctattatgtaattggttcgtagggtatctgatatgcattgtctgcttcggttcttgtcttaatatactctaataggattttatgatatcttctacggtccaattcaaaacaaattagacaagttcttcgtccttttagaaagtactatttcttgtattgcatattgtatacctgttatttagtatccgtaataaacaaacggaggatttagcgcatgattcttttcccttctgtttttttcccttacggtgatctctttcttcttcgtttcttataatagtttgaacaagttac

SEQ ID NO: 105896 - DNA, 827 bp, Mimulus guttatus
  Intron number 2 from transcript mgv1a000045m (locus mgv1a0 00045m.g) derived from phytozome v7.0 (chr-ID scaffold_161 ; pos 51852 to 52678)
gagagaaaggttttttctctttctataataatattgctttttattagctagtgaatgagataaactatcttctttatttggattaatcattgaaggtcgtccttccactttgtaattatgctctcccttgggattttattccttgcaaaatatgcatggaacgatacattggtagggtcatgtcattgctgatgagttattgacttttattttcccgagatttgatattattattattattattattcatattatattatgttggtttatttggtcttaccttttttagtttgtggagtaattcgacggaaagcttaacttttagggataggacttgctctaagtacgtaggtagaacaacccccagtattggcgtacaatgattgatgaactttcccagactccacctccattatactttttagttcagtcatagttgctaaatttagaatttacttctaacttgattgtgactactgaagagttaagacttcacctacacttggcctgtttaatataaaatctcaactgcattaggttgataaatgagcatggagtaacggtagcatcaagtatggtgactaaccaacagaaaaaatacaagtcaaaattttctgcttggagttcatgttagcacatatatgatgatatcatatgttattctctctttgaattttcttgttggttgattggtgaggtgacttatcttttacaattaggacttgtcttctttctccttgaaattgaatacatgcttaattttcaaatgaagttgtccttatgaatattttttgggttactatgcagtgagtctccaaaaggtgcaa

SEQ ID NO: 105897 - DNA, 699 bp, Mimulus guttatus
  Intron number 1 from transcript mgv1a015402m (locus mgv1a0 15402m.g) derived from phytozome v7.0 (chr-ID scaffold_11; pos 1722502 to 1723200)
gtacaaagattaataataaaacgcctctttgccacctccaaaaggcaatattctatctcttttgcaaattgatttatttttctatttcaaaacaaagctgttctgacagcggcaaatgtcccaaacacaacaacattaataaaggccaattgtgttttcaaagttcaaacccatgattaattttcttatttaattcaaaaaaaaaattattgttctttaatttagataagtatgaattagtaggtcaaattagtgtatatattttcttggccaatcagcttcatcgaggaaccttcgcggcatgcaactttttacaagtttaagcaaatgcttaagctgtttgacaagcactattaacataattaattaattatcttggcctaatttgtcaactaattatcataattatagtgtgattaattataataatacttcgtgtttattccacttatttaaatcttgtgccagcgattttactcaagaaacaaaacccctaattaatggaagaaagaataataaaaagaaaaactaaaaatgaaaacaaaaggagagagattaaaagaaattctagcagcttttattcttaattacgacctaattaaattaattgattaattaattaaaagaggtttagaagcttgatttcggtaggtggttgattttggcaggtagtcgttagagattcctccgaattcatag

SEQ ID NO: 105898 - DNA, 901 bp, Mimulus guttatus
  Intron number 1 from transcript mgv1a000419m (locus mgv1a0 00419m.g) derived from phytozome v7.0 (chr-ID scaffold_160 ; pos 70491 to 71391)
agtggggtgacaccacaccatacgcgtccaagaaggtacacgttaagttctctgcattgttttctttgttatatatttgttcaacttcttctgttacatactttgtgatgcacttgctgcctgattacacacacctgtatattgttcttgattgctcctgttttctttttttattctttcatctgattttggattgcagttatgtttattgcctaattgaatacttcacgttgtgtggtcgagttcgctgaccatattcttctttctgtttcttgttttaaattccgaaattaagatgcaatcttgctgatttttttttcaaatttataaaccggaagttggattccggtcaagttgtattcatgttagcagtttgaggttttaacattaatcatgataataaagaatttattaggtaggtaagcgttgcaatattcctctatcttatagaattactagctgaaatttgaaaagttcatcttatatcctttatggcatctgtttgatatttttgtgttcagaactctacattgcatatgtaaagagatgctattaagatattagatatgaataaagcggttgcatgagagaggcctgaacatttgctaataataaagtggataattgtaatattatttgtttgtcagaatttgatttttccataagttccaacaacgggtaggaatattgtatttttgatgctttcgatccttgtattgtgatcttgaagattcagaatggttctaacatattcccgttcatatacttgtgttttttaaagctagataataattatttcaaaatcaaaataactttttattgttaaaaccgtgttacacaaatgtaatcaccattgaagcggctcctaaactactaaatttgttctgcagatagttcagtc

SEQ ID NO: 105899 - DNA, 1037 bp, Mimulus guttatus
  Intron number 1 from transcript mgv1a002772m (locus mgv1a0 02772m.g) derived from phytozome v7.0 (chr-ID scaffold_1; pos 170203 to 171239 reverse strand)
atctccccggcgttgcgcctcgcgattttcaaagagtacgttttttttttcttcttgctacctcgattcacattttttttttccgtttggagattaatctagttatcgttttgatcagtagatctgtgagtagtgtgtacccgatttcgcgagggttgtttttatctactctcgattgtgattttttttttggttttggtcattttgatgaaattctagggttttgtgcgttgatccaattggtgatcggttgaattcgattgatttattttctctgcatttgagtctttgatttattcataatttgttttggaaatttttgtttgtggtggttattgatttgattggaattggatcgtgttggtatgcatttgaaggagttattgaaggctattagtttgagtcagcgtgtgaatttctccacctttattttattttattttattatggctatgatcgatactgacatttgactttctgtaataccagttcatgtttctcttgttattatgttctgtacattaatcactacgtaacttctgggcaaaaatgaaaagtacgattttcgtagtttggtgatgactgctttgacttttttgcatgtatcttttgtctctcggatggtagtcggtgatagttatgtaggactgatgtgagagatttttatatgcaaccatttgagtattgatgccataaagcagcttgtaacgaaaatgttggcagaaaatgcaaccattattggcactttcttatggttatgaaaccataaccattagaaaatgtaaataatgcataacctaagtacagctattggtatgaaaatgcttgatctttatgtagaaaatgattttggccagttatatttttgttggggaatgaataagtgcttcaacatggtcttccctttttaattttatattgttatgttaaatatacatatatttaaatattacattataaagatcttatttggcgttgcactttttcacgtttttctacgaacttatattttctgtctttgcattctttacaggagg

SEQ ID NO: 105900 - DNA, 220 bp, Mimulus guttatus
  Intron number 1 from transcript mgv1a010885m (locus mgv1a0 10885m.g) derived from phytozome v7.0 (chr-ID scaffold_114 ; pos 652311 to 652530)
ataaggtatttcaagggtgaaaaatgcaattaaattctttgggggtgaaaagtgccgaaatattatatttgatgggtgcaaagtagaattaatccccaactatcggccgtagaggattattacacatactcaaatcaagatatttgttgttcttgatttttggaagatagtttcttgtacctgaaaatctcatttttttttttttttttttttgcagtac

SEQ ID NO: 105901 - DNA, 514 bp, Mimulus guttatus
  Intron number 1 from transcript mgv1a006624m (locus mgv1a0 06624m.g) derived from phytozome v7.0 (chr-ID scaffold_98; pos 449077 to 449590)
tctgttaccgccgttctaggtctcgattggcacaagtatgtatatatatactgagaaatttggggcattaactgtatttgttttccttgtgagagcatagatttcatgttagggtttcggattttgcttttttgaggattggggttattgaaatggtagattatttaacagatcacaactttcctaaattgaggagtaattaatgtatgctaaaatagatctgatttgtgtcttgaagaaatttcacatttgttactatttatatagcaagttcaaatatagtaaaaatttccacttgtcaacttcgttatctatttgcttgctaaaacacaagctgctttcttaattgttggaaaaaaaaatatgaaaagaaaaaattattttttacttcatgtttgttgcctccgaaaaacgaactcggttgtggaatttaattcacatgtaatgaaagtattatttctcctacaacattacataacctaattttccgacagtgccacaccgcctcttcctg

SEQ ID NO: 105902 - DNA, 770 bp, Mimulus guttatus
  Intron number 1 from transcript mgv1a006676m (locus mgv1a0 06676m.g) derived from phytozome v7.0 (chr-ID scaffold_13; pos 1512339 to 1513108)
aaactatttggttctcgattcaaatttcctttctggtaatgtattctcatgattgttttcagttatggatttctttactgctatgtttatttcttcttctttttcattgtctgttttttgtattccggaagaaatttaatatgcctgaatcccgagtttatttcttgtcaagtagattgattaacaaagttcagaatcatgtattgtcgagtgtatacctttctcgtagaacttactgctgttcgtgtatgtttgatgtgccgtacgattgatttcatcgggaaatgaatatatatacttctgaaatatctggatggtggcttttcctgaatatatcaattgctttcatgaatttctttgcccatggtaaaactgcgtagttttatataatcagttaactatttttattcgttttttcaagtagttgatagacacgaatgtgagcattgtgtgcattagacaagaccttcgtctcctcatatgtatcctagtcaacctagtttctgaagtttgacgaaaatgttgcgagggcgttttttttttctttttcttttttgtcactttggatctgtgtgcgataagttagattttgaccccatctgatatttcaagtttagtagatcaatactaataaataagctgggtccatctgcaataaaaccagtttttcgttgtttcttgttcggctttgtatttctgaaatcttgacgtgtgtgtactcctaactctctataggaggaaagatcaacgtttattttctgttgagaaaa

SEQ ID NO: 105903 - DNA, 786 bp, Mimulus guttatus
  Intron number 2 from transcript mgv1a014090m (locus mgv1a0 14090m.g) derived from phytozome v7.0 (chr-ID scaffold_13; pos 1121180 to 1121965 reverse strand)
cttcctctgattcttcttctgatcttgatactgaggtaaaaattattaaatttaattagtttttcttaatcatctttccttttttagttcattaattaataaacccaccaatttttttaagggaaaataaacttacatgtttgatttcctgatcttctgcacaagacatatataaagatgccatttttatctcaaattatatgtttttcccctcaagggcaaaatagtcatttcattcttcttgtatttggctgcaagaagagtatgcgtctctgtagaagacgtagataaagatgccatttttatctcaaattatatgtgtttttcatcccactcaagggcaaaatagtcatttcactcttcttgtatttggctacaaaataacaaagataagatttccttgaattttatttttcttaattattatttattcgtttttctttttctgttaatggtgtttgatagttactgcatcaatagtggagctaaaggagaaacattgctctgaaaaagttttaagtgtatgaattgtttatatgcatgtttcatgtttaatatatgtcagattcagaccaagtcatatgcttatgtttactaacaaaagttgaaaggagtgcttccactttaatcttttcacatgcccctttcaatttctatttttcttttaattttcgggtaccctttaaaatttaatgattaaaaaaattaaattaaatgtatggggtgtgacaacataatatatgttaatgtttgttcatatgttgcagtcaactggttctttcttcc

SEQ ID NO: 105904 - DNA, 335 bp, Mimulus guttatus
  Intron number 1 from transcript mgv1a000871m (locus mgv1a0 00871m.g) derived from phytozome v7.0 (chr-ID scaffold_16; pos 2421754 to 2422088 reverse strand)
tttctccttagattaaaattaatcctccctttctcgtgagtttctttcttctcccacccacctttattttatttttatttttaattttattttattttcatgcatgttttccttcgtacgttcctgtaaatcaaactcgatccgctttttcctgatgaatttgctttttttttttttaattaattaattaggatttgtataatttcttcatgatctgaaatgcgccattttttttgatttttcgagatctccttcctctgttttttttttttttttgtgtttccattattggaaatcaaggtattttggggaagcgaatttggcgaattagggct

SEQ ID NO: 105905 - DNA, 841 bp, Mimulus guttatus
  Intron number 1 from transcript mgv1a002143m (locus mgv1a0 02143m.g) derived from phytozome v7.0 (chr-ID scaffold_113 ; pos 221739 to 222579)
tacagccccacccttgctgcaagaagaatcatcaggtctgaaatttgttcattttatttttgtttttattttcgaaggtgcccatttgccaatcttgaatcttggacatgagttacgagattttcattttttttagcattaaaaataaaaatagatttgtgtggtctagattctgatttggtaactgtgcttatctgattgggtatactgtgtacatctttgtttatattattttgtttttgggtccatttttgcatatcttcacctctaaatatagtattatagtttatagggtaaattacggtcggtaaagttaaattacggaaaataccctctttatttggtaactacaatcgtctatcaactatgaatcttcttacacgttcattcttgtggtgtcaaatttagtagaatattctaaattatgtggaatattatccagtttgtactcattttactctattcaagctccatattttgaaacaagatgatcataagatgcgtctcttagcttgtaaatatcagattgcggtgcatcagaaactgcgtttttgcacaaaactagtacaaactagagaatattccacagaatgtagaagattccgttgaatttgataccataaaagtgaacatgtaagaagattcatagttaaggggtgaacatataagaagatccatacaagaagggtttttgcgtaatttgaccttacctcagtgtgaccgtaatttgccctataatttatgacgactaattgaaatgtttgtccttttttttttaaatataatttatttataaattataaatagtggtttttgttttagaaggtaagaaaaagctcaa

SEQ ID NO: 105906 - DNA, 804 bp, Mimulus guttatus
  Intron number 1 from transcript mgv1a015471m (locus mgv1a0 15471m.g) derived from phytozome v7.0 (chr-ID scaffold_42; pos 1309996 to 1310799)
tccggctatccttcgctaattccagcaacactcatgttagtgtttcttcctcccctttttttctgtgtgtgtgtgtgcgcgcgcgctattattctctcctctctagggttgtggattttgttggcaaattgatgatgccctcaaagttttattatgacactgcgataatattcagcatcaattttgttttgaaatgtacgccttggtgtattttcattttttttgttactgaacatatggaaaaatagaatttagagagagaaagatgctcccttcttccaaacaatattcaaacgctgtagattcttgatcaatgatcgcatgttaatttactagttctgattaaacacaactagtggaatttatggaattagtccaattggttgatgtcttacggttgacaacgaagaactggtttttgtcaaccaaccatgtttacgtctttctcgatctcattaaatccatttcgtgcggtacattacattgtcctatcatatgtccttatcacagcctcttcggtattgtgccaaacagcggtgtttgtgattgtttgccgagattccgcttgttagacgtgactagtgcaccataggtggcacaaattattcgtcgcaattttgtcgtaaattatctgatttcatctgtgttaaaaatactttctgtcaccaatttgtggaaaaacattgctaattttagttggatgcatgaattcgcattgcggtagaaccaatagtatgtccttctaacatgtgtctttcgtgaattatagaggccagagtcatcagatttcgacagcagttcgga

SEQ ID NO: 105907 - DNA, 418 bp, Mimulus guttatus
  Intron number 2 from transcript mgv1a008692m (locus mgv1a0 08692m.g) derived from phytozome v7.0 (chr-ID scaffold_233 ; pos 201592 to 202009 reverse strand)
acacaatcaaagattacgtaatttttatttttttaattttatttattatttctcagtccagatttgctcatttgatttaaatggtaccttccattttatgtatatatgtatatatataacatatatactatactataccttgtttctgagcttattgattgcttttcttgatttagaaaaaaaaaaacagaacaaaaacatgaatgatctttaatcattgatgatctattttgtgtggtcttcactagctgcgtttatgtcgtactgcgtgattatgttgtcgatttcgaagatgaactgtgattctattgataaggtctacagccattgctaataatatttattttcattttatcatttccgtttattacgattgtgtacagaacgatacgtgttacttcggagccattgttggaag

SEQ ID NO: 105908 - DNA, 904 bp, Mimulus guttatus
  Intron number 1 from transcript mgv11b018504m (locus mgv11 b018504m.g) derived from phytozome v7.0 (chr-ID scaffold_8 5; pos 25650 to 26553)
aaagtcaatcgactggtccaggacaaagaacatatgtgtgtgcgcgcttgctcgcgcatatgtctgtgcatatgattcttgatttttggtagagctgatggagtgtgcattgtgtaaccgtcccatatcttggcgtggcgaacccagatggctgtgattttggggtattttatatttccccaatcgcatgcaatcggtgattctacagtcatgggcgtggtcgaatgtctatttgccagcttgaacaacagatctaagcctcatttcctctaattctctatatcttatttgctagggtttgcctttgctgatgagaaacgtcgaccgcaatacttctagaatactccagattgctcatggtccaagtatccacttcaccttattttgttgaataattaatttacattttcattattattttcttcaatgtttcattgttatttcgtgtagattcatttggttcaatgcaggtggcaaagttgaaactggggaaatgcagatcatataagagctgatgtcgtgagtttccttactagttgttctaacttcttcaattccggtgcttggtttacaaacaataaatttggatttgcttgggtacaagtcctaagcttttgtctatagaaagggaaacaaaaagattttaccttgatctaatcatacaaagtgagggataggtgagggaggggagatgtgagaaaatattaatgtgttagcacaattcaaagaattagcaatattttctagctacaaatatataatgatatcagacatcatcctcaacttcaatgggcttttttagaatcaattaacaaagataaatgatcaatggtgtctgtggttgagagttcagacaccattgataatgttatgattcaggataagcattccaccggaccaacaa

SEQ ID NO: 105909 - DNA, 677 bp, Mimulus guttatus
  Intron number 3 from transcript mgv1a000239m (locus mgv1a0 00239m.g) derived from phytozome v7.0 (chr-ID scaffold_165 ; pos 205600 to 206276)
taaaacttttcggcatagtaaaaccaaggtgaggaacactacactctgatttgctaaaaagtgaggttgttggtatgaggaaatttattgtttctcagtgtaatttggtatttttgcacacaaataactgcaaaggtttattaacttattttcatatttacactgaattggcatggctatacctatcatcatcatggttatgtaggcatggcaataaggtcaaaattgttcaattaaattaggtgatattgaacttaatggagtttaagacaaaagcataaccaactaaggactttctataacatgttgttatcaataatccttattcttgaagtggtatgaaacattttacgtccattttgtttttgataaacagtggaactaatgtgagaataggcaaattttaatcttgaaagtcgtcattgacataaatgagttattgcggcatcattaattaatgccttgtgtatgcattcagttaatgccttatgctgcgtctcaaattacaaccttcttttatcagtgttctaatctttagtttttgttttgaataaaactatttttatgttattgaaagactctagaaacatatattcgtaaaactatcaaagtgaatgcgtccaatttctattcaaaatgctaatgctcgtcttcttgtcgtttttgcatgtctcaga

SEQ ID NO: 105910 - DNA, 443 bp, Mimulus guttatus
  Intron number 1 from transcript mgv1a017690m (locus mgv1a0 17690m.g) derived from phytozome v7.0 (chr-ID scaffold_51; pos 813839 to 814281)
ttcatcagcccgcgaattttgtctcactctgtaagccaattacttcactttagtctatgttagtttttctgtatgtagttttaaatttttcttttaaaattgttgccgatgtgtgtggaatttctgggtagttttgtgattaattcgtggataattcctgattaatggtttggcttgaattggtatttctgtgtgtttgtgtttgggagaggggttgggtttttcttctttaaatgggcttgaattgtttactttttgttttcaaaatttgtatcagcatgcggttttaccgtatcctctacttgtaggagttatcacttcacatatgctgtcgattttgatagaattggtgccgtactccagtaacctttgagttgacatcaccttttcattcacgtgtgtttgtagtgagtggaaagctgtcgacgagcaaacttaaaact

SEQ ID NO: 105911 - DNA, 375 bp, Mimulus guttatus
  Intron number 3 from transcript mgv1a025286m (locus mgv1a0 25286m.g) derived from phytozome v7.0 (chr-ID scaffold_249 ; pos 153863 to 154237 reverse strand)
tcggacattgcaggattaaccgagttgcagacactgtatgtttttctattcttttctcgtcctatgtttccgtgttgcaataaagcatgttttccaatgtgcattatattaactgtctggcattttcttatactagagcaaacgattcttgaatggataattatcagtaacttatgtaacgttgaatttggattagaggagaggaaatattttaaataactgcaaaaaaaaaaaaacgagagctaaggatttgaaattcatttaaaaaagaaccgttcaaacactatattggacttgttatgatggttttgaatgtgtatgctttcgctgatattttgcttttctatatatagggacctgtcatataacaaacgt

SEQ ID NO: 105912 - DNA, 684 bp, Mimulus guttatus
  Intron number 3 from transcript mgv1a021442m (locus mgv1a0 21442m.g) derived from phytozome v7.0 (chr-ID scaffold_21; pos 25213 to 25896)
gcaatattgatctaaccaagcttgaagaggaactggtcaatgtgatgaaacgtgtttaattatatatatatgtcaggatatcaataatcaagagagaagtgatcttgaatttttaatttgattttttttttttttcattgtattttgctgtttgtgtgtatttgtgtggtggttttagcgatgtgcggcggtggtggggtggcggcgccggcggggtagtggtggtggatggagagtgatgaagaagctaaaaaaaaaggaaggaagacgaaagaggaaataaatagattttttgtaattaatgccacgtcatcatcctttgactttgattttgttttttcaaaagtaaaaccgctctgccaaatcttgtgtaccatctttctccacgtcataaaaatcagttattgttcttttattggtaaataattccccaattgttcaattattaagatttttcatacgcaacaaaaaatcttaagattaagcacgtcacaccctttactatatatggcatcgaagaaacttccatgaaattaacttgaaattaaatgaattattaaatatttcattattaattttaattattatatttatttatattagcgtatatattatatatattacgtatattattattattcttatttattctagttaccttgtataataggttaccttgtgtag

SEQ ID NO: 105913 - DNA, 332 bp, Mimulus guttatus
  Intron number 2 from transcript mgv1a001438m (locus mgv1a0 01438m.g) derived from phytozome v7.0 (chr-ID scaffold_1; pos 271869 to 272200 reverse strand)
ttcttccttatcgtggcttttgtgctcgaaaaggggtaaaaagataatttcacaatttattaaactcgtgaaacacgaaaacacacacacacacacacacacttatgcaagaatgtaccatcacattgatcttgaattaaataagaatgaacttattcttgaactcaaataaaaccaaatcatgagaataaattttaatttcactcgaagtgatcatatatcttcttgtgacgcgcaataattatctctcgacctcgattaatattttaagttttgtgatcgttatatgtttattagattcgcacggaagaggtcattctacacgatctcga

SEQ ID NO: 105914 - DNA, 713 bp, Mimulus guttatus
  Intron number 3 from transcript mgv1a000406m (locus mgv1a0 00406m.g) derived from phytozome v7.0 (chr-ID scaffold_52; pos 354607 to 355319)
ctggggtattgattctttgatgatatatatagatatgttcgttgaaatttttgaatatatgtgtttagcattgattaattttgttggataatttactgattttgttagggtagaattctgattttttttttcggagcttgtttagattttttgttagtaaaataaaataaactggaaatgcagtacaaattattgtcagaactcagaagttatgtactatcaagtttaaattactgatttatgtggaaatagttcacttctcccaaaattaggtgcaatgtataagtttagtggcttttcaataacttgctcaacctgataattttaatttaatagtggcaatgtagaatttgagaaagaaagtaatgtttgtttgtatttgagaagagataatttatactctagcagtcaaatcatgtttaaaggttttgggagaaagatattttgtaagaagaatttgaaaaataaagtggtatttgtttgtatgccagtgcaacaatcaaatcatgtctgtagggaaactttgaaaataaatcccaaaggtttatgaagtccaacttgaaaatcgtaacaaacattgatttaatttgggaaaagagtaaaaacattgctggctctgttactgtaactagagaagtgattatttgaaacatgaagatttgaagtattcaatcaaatccgtgaattgcaggaagcaatttgtgatttactgg

SEQ ID NO: 105915 - DNA, 441 bp, Mimulus guttatus
  Intron number 1 from transcript mgv1a009485m (locus mgv1a0 09485m.g) derived from phytozome v7.0 (chr-ID scaffold_8; pos 3270995 to 3271435 reverse strand)
ctcaccggtaattttccccaattatttcttgattttttttattggatcacatttttttttgtgtttcttcgaatgatcttgatcgatttagagtaatgggagctaatttcgggtgattttccagttttttttttttttttgttggcccgtttaatggtttgacttgatttgatgacaacttggcaagttgatttgtttaaattccaagaatgcaagtttaatttttttaatttcatattgaaattaaaaaatattcatcatttatattttaagctctaaatattgcatctagaagggatccaaccacagtgagatattgttataattaacagtgacagtaaaattaacactgtaatgacatattgaagaacattgtataacgtttccgatgctaatcatatttcagacgaggaaactgatccgaataaaattccgacaaag

SEQ ID NO: 105916 - DNA, 625 bp, Mimulus guttatus
  Intron number 1 from transcript mgv1a016232m (locus mgv1a0 16232m.g) derived from phytozome v7.0 (chr-ID scaffold_2; pos 1844240 to 1844864 reverse strand)
acataaacagaagcggcggccgctccttttctcaggtaaccctctatctcagatcttctacgccggcggcaaaccttgatttcttcgttttgcttgttgacgatttcatttatttggtatcctttcgtaatttcaattgcttccattatttcgtagggtttggatttttttttttttttgagtagtgagtatttatctgtgttagtgaagatagagggacaaattaatgctgaataaaatatatatgttttcactattgtttcagcctttatgttctgttgaattagtaaatggggaaatgtgagagaaatcaatacttgaaaaaaataaatataaaaaaatgatcttgtgtttacattcgcaatggtagtgcttttgttcaaaatgtttgcagtccttttcatgtgggtacttttttgttttgaatgtttctgggtattgctgaattgttcttatgtaattttcaactgttgggggttttaattttaatttcatttggttaacgtgctttgatatacgttattgtagctattggactgtataattaggttgagattctgtgcaatagatctttatgccctgtttaatatttgctgtactttttcctatcagcttgcacttgaaa

SEQ ID NO: 105917 - DNA, 605 bp, Mimulus guttatus
  Intron number 1 from transcript mgv1a022769m (locus mgv1a0 22769m.g) derived from phytozome v7.0 (chr-ID scaffold_17; pos 1054198 to 1054802)
ccggtaattgctgtttccgattcttcgtcattttatatatttttgctgtttttaaatatttttttatagaatttatttgcaagtgattactgtgaagttattgtggctttaatgaggcaattgaattgagaaaatggattttggattttcggttgatttggggattcgacattttatttctccagttatcagaaaatgaaaaattgtacacagagatggtttgttgatggtttttattttttttaattattttttatagaatttagttgcaagtgattactgtgaagttgttgtcgctttgtgctgccgaattatcgatgttgatgactgatggatgatgatatgttttatctgaaggactgtttgttaccgttaataaccaaaatagtacagggcttggaatccagcaaatagggtactcgtaaatcaaaagttattcataatagattttcttccaatcgttttattttgttttccaatgcaaacacgtaatatccaaattggcactccgtaagtataagcacagcatgaaattttgttttctaattgtgttttttgcattctgttcagtttggagataagaccttcgacgcgattatcgacaa

SEQ ID NO: 105918 - DNA, 1019 bp, Mimulus guttatus
  Intron number 2 from transcript mgv1a002259m (locus mgv1a0 02259m.g) derived from phytozome v7.0 (chr-ID scaffold_44; pos 553511 to 554529 reverse strand)
gacccttccgctatcgacgttcttcttgttacccagtacgttttctttttccgcctttgtttgtcgtatttcttaagtgttcttgtttagtatgttgtttcttaactgtgtttttgtaatatatatatttaatttggagcaactctagtgtatcgtcaaaatggtggtgtattaacgaccattttgatgttcgtaaaattaacaaccatttgatgcctataattggagcaaatgaattttataaaggtagcgataaactaaccatgaaatggacatttcatagcgatacacatagttggagcaaatgaaatttataaaatgaatatttgatactatagtttggagttgctcttatatgcctcctgccctcgaaaaagttggaaactgaaattatgaaatggccctgcatctaagacggatatccttccattcttcttttatttttaacgaggcccttttgagcgaacatttgtggtagtagattgatggatgacatttttgaagttctgttgcaaagagaaagtcgggatgctgatccacacagttttcgagagattacaaattgctcttgagctatacagactgattggggattgacgttgtgattttagttcttgtgttcaaaattagaaattatgttagtgatccttttttccccggtactttagtggctacatacagtgttcgtatattattcatcgaagagaatattttaggcaacagatttggttctctgaactagtgtctattaagttcttaattatctttcaaatcacgaagaagtgccttttagggagaaaaacatacaatagtgatcttatgattgaaatcttggataaaatgtattattgctttcatctcgttcactactttgactcggttatttaacactcttgcttgaagccatgcatttgggcagctagaattgaaagcaaccagatagtctttacttccgattcttgcttgcctttttttcttacacacgcttatatcacttttctgcagctttcacttggacc

SEQ ID NO: 105919 - DNA, 571 bp, Mimulus guttatus
  Intron number 1 from transcript mgv1a010277m (locus mgv1a0 10277m.g) derived from phytozome v7.0 (chr-ID scaffold_68; pos 545277 to 545847 reverse strand)
gaacacaatacgcacatcaaaaaagctccacaaaggtaatcaatttctcctgtgataaatctcgcgcattacgattgtaaaccctcttttgctacttatcgatttatcttgctgtgttcgaattcatctgtgaatggtaatttttaaatttctcgttttacattttgggggtctttgggcaatttcgaaaaaaaaaatatctgaaggtaaaattcaactgaagaattttaggttaagctgttgggctgtgactgaagatttacatatagatatctggtttaaatttgttctatgctgcacgaatttcgatttcaagaactgatttttattttctgtaataactgaaagcaaactatatatagtgtgatgctggcaggtatttgtttaaggattaattcctctgatatgtcttaatgataaatgattgaaagccggttgcgttaattttactgtcgaacgatttcgaattcgtttagcattttgtcgaaaatatatgttttaatcagaatcaaacaccaatgttaatatctaaattttgttttttctaggatttaaatctttctacttctcg

SEQ ID NO: 105920 - DNA, 732 bp, Mimulus guttatus
  Intron number 1 from transcript mgv1a010880m (locus mgv1a0 10880m.g) derived from phytozome v7.0 (chr-ID scaffold_11; pos 1839959 to 1840690 reverse strand)
cggttttcaatttctcaactctaaatcactgacaggtacaccttttttttttttttttcttttttttttttttttatgaattggcatgttcctcttccacgagatgttttccgtttcatttgtgcatgtgattctgcagaattttgattggggtttgatttgtaaattaatggctgatttaatctcggaacattttcttttataatttggacttggaaaattaatagcttgtgcatttcatgtaaatagctgatgttgttctgaataagtgatttttaggtattggtatgaattgatttatggcttctttttttttttttttttttataagattttgctctgcgcatcaacaaatgatgaattagagattttgtatctgttgttcttcatctggagaatgtccgaaacccaaatgcattagctgtagattaaagttttttcattgcttggctgtcaattatcgtccatctcagagtttgtcatgtaaatttaaaagggttgttgctttggatattaattcgataaggtgtgattcaagagtcgcctaatactgaaatatttagaaattctggatttgttaatgatttggccgattaaagttaccaacgtggttaaaattcagaagttgtcggttgcagtttcttcatcttgcagatatgattcttgacagcatagtttatgtcttaaattggtctagttctcagtaggtattaagatctcgagtcggtataa

SEQ ID NO: 105921 - DNA, 501 bp, Mimulus guttatus
  Intron number 2 from transcript mgv1a026884m (locus mgv1a0 26884m.g) derived from phytozome v7.0 (chr-ID scaffold_11; pos 954708 to 955208 reverse strand)
ccctagctccaggtatttataaatttaatttaaacattttattttgataaagaaatgtctttttattcaaaggttttagataaattttatataattcttctgaaacaaaatataaatactgcataatatttatcataattgttaactgttgttaattgaaactaattaagcttttaaaatttgcatcatattaatattaattctttgcttaccttattatgctcgatcatgtacggaaaacgaagctggaaacggtccacggttcgatttgcttctcaagaaacatcacatttcaaggctggtaaatatttgaacgaagccgatcgatgatcttgaattggctattttacgttattattattattaatttttttatttttactcttacattattaatcatgcatgtgcttaattttctttgaatttgttgaactctagcaacttcgaaaagattttgttgtggcagctggcttactgagggaaaacgccgtgattctagaa

SEQ ID NO: 105922 - DNA, 475 bp, Mimulus guttatus
  Intron number 2 from transcript mgv1a003544m (locus mgv1a0 03544m.g) derived from phytozome v7.0 (chr-ID scaffold_42; pos 1438704 to 1439178)
cttctgctcttggagaacgagtttctttacctcgggtttgctcacatttacttctttgttgttattgagtccattttcatagtcattgtgatttgtttctatcggtgcccgttcaaaataacgttttacctaatcgttctacactggtctctgaaaatcaaagaatttcatattttttatgtctgattatgattagcagttgtgtttatttccttagatagaatgaatatgttataagtatctcctcattcttagtaaattttgagagaggtaatacgagttttacgatttacacttttcaaaccatagtctatacctatgtcaatatatagctgcctcatcataatctatacttacgtatttaatatgagttttacggtttttttttctccaccatactgcatatctatgccaatttatagctgcttcttcatactctatacttatgggttcaatcgttttcctttatcttagt

SEQ ID NO: 105923 - DNA, 773 bp, Mimulus guttatus
  Intron number 5 from transcript mgv1a004590m (locus mgv1a0 04590m.g) derived from phytozome v7.0 (chr-ID scaffold_75; pos 829392 to 830164 reverse strand)
ggctaaagtcaacggttctcagcagagcattgaatgtatcctttctcgtgggactcaaactcattgttgatattttaattttcgagattgtagcatcatgttcaacagaattggctgcagcactcgtatattacatataataactacttagtctgtcattcatacattttttttcttcattttgtgcatttttgctgtgtgattgctcgatactgtaccatgttatgcatggtagtaggatatccttcaagtatctatggaactgaggatgtagaacattattttcaatttatcttgccttgaccaaatgtaaaatttaggttgtctggaaagttctttgatggtcaaataagaactgatttctgctaaatttcttgatgtgttgctctctttccaaatagctgcaaattgcaaaaattaagatatggctgtagattttatacaaatagtctaataatgacggtaaagcagtatatgcaattttctgtatttttattttgtatacatccaatcatcaatgaactcgacttccttgtctggaattgacacttgccctgggatacaattcccaccaaagcagtctgtccttgaaaggttcatgagaaaaaaatataattaaatttctcagtcttcatcgaatctgtatgtgaaatttgatttggctaatgattagtcacatttttcgtgttcattatagagaagttttttttttttttttttttcttaacatacgattagctgtatctcggtggtgcatacttcaccgcaaaaag

SEQ ID NO: 105924 - DNA, 1020 bp, Mimulus guttatus
  Intron number 1 from transcript mgv1a000805m (locus mgv1a0 00805m.g) derived from phytozome v7.0 (chr-ID scaffold_57; pos 300125 to 301144)
atactccggctgaagttgttgcttatcgatattgggtaagtttcaaaatattgtttttttcttgacgacgattaatagcagtttcattgtcgagttagcttgagtgcaatgactgtttagttgaacgagttgtgcttcaattgagatgtggtatgttatgaaatcgaatacatatcgagtgttaaagtactcttcctaccgatctcctgtagcctattggtagattaaatatgtgctatgtgcagaagaaagtttgctcaaacaatttcacgaggcgcatttctggttatcgaagaaaatgaacgttagcgattgctaggatttttgatttcctatttaagtcacttataagtaatcatgtcctaaaattgagaataagccaagctatacaactaggttgagtgctaaggtttggcctcgactaataaactcgaacatcataagctgaaattagagaattaggcgaatcccaataagtaaattgaagaagtagtagtgtagaagtttcttaataaatcgctgaatatggcaaaatataatcaagatatatttttttctcatttatttaagcttaatccgaattgctttgatgtcttagctatttcatttgcagttgtcctatatttaatgtctacaatttatgcgagctaactctagcctacctcaatcgcggatagatacaccattataactagcaactagcttaggactataggattacagaaatttgccgaaaactctaaataataacaactaggcgcactcgcatgtttatattcgatgcaaaatctacgttgtggcctgaatccgagacatctcaatattattgcatatataaagacaatgtttggttttaattcctcgaaataaaaccaaacgttttttcgaacagacagaattattcccccaaaatataatccaaaacctcctaatcattaccaacttatgcaatgatcctctctacttccattctaacataaatctcatattctagatttattcatgcttcacagaattaca

SEQ ID NO: 105925 - DNA, 798 bp, Mimulus guttatus
  Intron number 1 from transcript mgv1a003434m (locus mgv1a0 03434m.g) derived from phytozome v7.0 (chr-ID scaffold_113 ; pos 733612 to 734409 reverse strand)
agaaacttgcctcgacgcctttgagaacaccactggtaaattctatttatttagcgaaatattattaaattatcaagttaataatttctcatcaccaccgagttgggataggaagaatttattatttaatcgaggttctattgcatatattatacaatattactactcctaaggaaaagttttaagaaaataattattgtttaatatacatttatggtggaaattggaacgaaatttcaatttccgtcgattttgatttgaaatttttcgattttgcaattatatttttcaactggattaagataattttgattttctggtttttcgattggttttttctattggaacgcattaaattttagttttcatcgattatgatttcgaattttccgattttgagattatatttttcaatgggattccaaaattttgattgtggggttttgtcattgtttttaatttattggaattagagtatacacgagattctgattttcgatctaatttaatttctagaaactgtggaaaaaaaattcttctgaaaattacgcttataatatcaatatttttacgcattttatattttaaagtgacaaaaaattggaattttatgaattatgttgattatgattattagaattttttttttaattttggtaatagtttttttcatttcaatttttgatatttcgattttcttttaacaaaattgaattagtttttcacttaaataaataaataaatgagtttgtgttaacgtttgattatgtatgactgacaggtgacactggggagaag

SEQ ID NO: 105926 - DNA, 957 bp, Mimulus guttatus
  Intron number 4 from transcript mgv1a012113m (locus mgv1a0 11194m.g) derived from phytozome v7.0 (chr-ID scaffold_83; pos 996803 to 997759 reverse strand)
gtacagcgaagcaagaaagtggaatcaggtacgaaaattattaactgggtttcgcgctttttaattagttaaactaataattcagtggtggtcgttacttaaaagtaacacgcttttagcaaattggaatacgattccccttgtgatggatgattcttgcgttacgaaaaagttactacaaaagtgatttttagtaataattacagtacttggggtgcaactttattcagattttattttcgatatggcggtggcaaatgcagaacgtattttagtaagtgtaggacacttattttgtcaagttcttttttcacgtccgaagcagacgcaaagttagtaacatcgcattctagctagacgaaacgacataaaaaaattgaattttgtcaaattttctgatgaaattttgtttcttgatgcaataagttcattgaatttaaaaatgtcttacgtctactaaaagtcgtcatttaaaatagaggaggatgtttatgttttgtgcagaatgcaattccaatactaatagggaccaaatttgatgattttgttcaacttccactcgatattcagtggactgtcgtcactcaggtaattaattaattaattaattactccaagaatattacttaatatggtaaatttttattatttaattttcggaatattaatttacgatttctagtaaggagtcattttcaagaatgacgtggcaactaaaattggaattaaaatcaccccccatatgtatattaaaacaaaaacgtgttttgttttatttcaacttttatgaccgagtcgtctcggggtcaattgtatttgccataaggaagaaaacgtgttggagatggtctctgctttggtttattataggatatatatttgtaaataataataataataataattaaactttgattaattctgatggcatacttgtaaaaatgcaggcacgtgcgt

SEQ ID NO: 105927 - DNA, 372 bp, Mimulus guttatus
  Intron number 3 from transcript mgv1a005428m (locus mgv1a0 05428m.g) derived from phytozome v7.0 (chr-ID scaffold_1; pos 848290 to 848661 reverse strand)
ttgttcaggtataatcacatctataaagcacgccttcttgtcgatctcaagatcttttgactagtatatatatgaatatcttatgattcggttggtgttatatgaaggttcacatacaactgtttgtgcttaaagttaaacgatacttttgtcgcataatgtatcatgagtacttgatatatatgtactcttgttcaacactctaggaaccaagaaaataacgaggcagtgttgtctttcaagaaaaatagttaccgaccgttccattttaatttttttcagaaaccaagaatttgtccattaagtaatacatttgacttttttgtttttcatgtttggcttctatttatttgcaacagactggagttcacc

SEQ ID NO: 105928 - DNA, 611 bp, Mimulus guttatus
  Intron number 5 from transcript mgv1a015532m (locus mgv1a0 15532m.g) derived from phytozome v7.0 (chr-ID scaffold_113 ; pos 188823 to 189433)
tgctagtcaaggagaagcttgaggcactcataagggtaattgtctaactactttaacaatttaaagaaaaaaagtttaaattataaccaccctgaggtattgtcaaattacgaaaaaaaccccctcttgtttgggtaattacaatcacccctcaaccattaatcttcttacatgtccacccttgcggtttcaaatgtagtggaatcttctaggttatatggtatattctcaagtttctacccgttttatcccattcgagctccacattttgaagtaatgtgatcataagatgtgttttttggcttgtatatatcaaattgtagtgcatcagttactgtatttttgcacaaaacgagtacaaagttgagcacattccacgggatctagaatactatgttgaatttgacatcataagggtgcaggtgtaagaagattcatagttgaaggggtagatgtaattatccaaacatgaggggtttttttgtaatttgaccatacctcaggggtgattgtagtttaccaaaaaaaatcgtaattacagaattttaaaatcgtattttttgcgttacatttcagttggagcagcagattgtggcagctggtggagcgat

SEQ ID NO: 105929 - DNA, 916 bp, Mimulus guttatus
  Intron number 2 from transcript mgv1a016600m (locus mgv1a0 16600m.g) derived from phytozome v7.0 (chr-ID scaffold_169 ; pos 458382 to 459297 reverse strand)
gattgtttctctttgaggaggcactacctgtcaaggtaatcttttttccattgttctttacaaccttttgcaaagtgctgtcatattgaatgtttcgattgtgtcatgtaacaaatgccggttctcgaacacactaattcatagcgttgcttgttcctatggtaacgggactcgtaatcttgtaaaagcaacgacttgggtctaactttgttatgaggttttagaaactaaagctgaaaaattggaagcaataatcgcaaacacaaataatataagtatataactatcgactttattctactataggtttttgatgatattatctgatatatatatctctctccatgagactcatctcgtctctcacttaaagttcttgcaatcactgattttattatgatgatattatctgacatgtatatccaagaaaaacccgttgatttttttttttttttttgtgttgaaaatttgtatttgattttctgaacgagttgtctgttatttatgctaaacgctttctcaaaagtgcggtggaaactaaaacgtgcaagggtaaaaggcgatcgaaagtcataaactaagtttaagctacaagatttttttaagcatattcatagggagcttccctaataaaatctcattaatatttttcttaatttctttctttgttagaaaatatatttatgtacaagcttccgataaaagaaataaattattaaataaatgaatgcgatgttattagattagcatctggctactggtgattacttagattttcttctgtagttataacatcttgaaaattcagtatttgatccgttcgaattgtgtctcgcaaaaatatattcatactagattactatttgaagtatttgttacagtggtttgcaggtgctgcactaatcgtaattggtgt

SEQ ID NO: 105930 - DNA, 670 bp, Mimulus guttatus
  Intron number 1 from transcript mgv1a016600m (locus mgv1a0 16600m.g) derived from phytozome v7.0 (chr-ID scaffold_169 ; pos 459403 to 460072 reverse strand)
tcgcagccatttctgccaaattcttttcttcccaggttattttattttaggttttattccactaatcaaatcatggttatgaagtttataattttccccaattatttattttttccgtggcctgaatcactgcccacttctattcggaaacctaattttttttttttggcccactttctgtatttactcagagtgcattttgctttgttttgctgtaagattgtgtttaaaggttgattttggatctactatctgaaaaatatcatgtaaaaaacctcttgctgcgttggttagttagttaacttgtatatgtaatgattctgaatttctatctcgatgaaatatataagaaactaatcatgctagtttttattgcgtttaacatgatcagttttatagccgttgttttcttcagttttcgctgaaaactcgttaccagtgaaaatttcaccaagatttataaattatctcgtcgagttgacgatttcatgcacattacacatacattgttgatttgtctattgattgttgtttgttgatatatcactagattggtaggtttattataattgacaatgtatctccatattggcagctaaaatacatacaacctatgttgacacattgtctccacattgacagctaaaatacgggctagttgtgtttttca

SEQ ID NO: 105931 - DNA, 656 bp, Mimulus guttatus
  Intron number 1 from transcript mgv1a018887m (locus mgv1a0 18887m.g) derived from phytozome v7.0 (chr-ID scaffold_41; pos 1324867 to 1325522)
gccaactgagaattcgtctcttcgaaatttaagtaatgatattaacatgttattttaatttatttgcagttatatataaaaagttaatttaagttaatattttgtactttgaatattgtagtttcaagtagaaataagagagtgtttgtaccaccgactaaatcaagtatttcaaactctttgactagacaatcggcaacaaacgcaaaaacaagcgataaaggtatttttttttctatgattgagtttatttttgtaaactttgtttattaaatagtataaatttatatatttccttaacgcatgtaaatgtaatcaatatttacagctagagtgcatacagaagaccttcacgaacaacatgtgactaatgcttcgaatgagcacactggagttgttgttacaggttttgttaagttgtatatttttttttttaaatatttttacttctaacttttattttaaaaaactaattgtagaatcagtcgtagatacggtggataaagcagatgcgataaaaggtaatgttaaacatactattttttctttttcttttttaatctgtattggtatattaactattgatttatcttttatttacttatgttaattatggattagtgggtcaaaaacgaggtcgtggactgactaggggg

SEQ ID NO: 105932 - DNA, 910 bp, Mimulus guttatus
  Intron number 1 from transcript mgv1a016245m (locus mgv1a0 16245m.g) derived from phytozome v7.0 (chr-ID scaffold_212 ; pos 400688 to 401597 reverse strand)
tccaggtacagagcttccagtgccaatttgctgccgcaaaaaccctttcatacttgtctgtgtttatataaccatttaacaaaatatacataatattaacgtgtgctgcattttctggaatttttttttgtgtatgtaaattatccttattttattcgaggattcggttcaatggtgcataactaatgtctctttgatgagtgaaactaaatttgttctcgttgtaacctttggagtttgattacgaacgcgtagtgatgagtgatttgttggcatggtaaatctttgtcggtcgtatagcagtagaagtgaaaatgcacggatttacaatatttaagaagcttacgttctctttcgttgagtctttccttttgacatttttttgaggtggttagggcactgttagtagaattttttgtatcgagatacgagactcaataatggctaatctatacgaatgttttatttataaatttgagagaaagtgatgtagaaatgtctggagatttctgttgctgtttcatttcccaagaagttcgtatggcattgtgtttgggtggccaaggttaaaacttgatatgtttataattttgctgcaagttggctagtatttttgtttcttctgattctaacttgttacttttggttgcctagaccgcgaaatagatgattcctctcaatcggcaagctttgttttacaatatgcatacatatctaatggaaatattttccataaaatcacagtttccctcacacgcacatatctgatcacaaatgatattgccttatccattatttgaagtttcaactttgaagactagctgacttattcctgacattattttcttttttcttctattttgttgttgttttagtatattaaaattctgcggaagcagggcgacataga

SEQ ID NO: 105933 - DNA, 718 bp, Mimulus guttatus
  Intron number 1 from transcript mgv1a010757m (locus mgv1a0 10757m.g) derived from phytozome v7.0 (chr-ID scaffold_37; pos 1012743 to 1013460)
agtcgtaagcagcccctgttttgctgcgattccaggtaacgaaaacggtctcctgcttttttgttggttgtaatttaggtacggtatctagttttcttttatggtttatgcccacaaggtgtttggtgaaatgcttgaatgtagggatcttattattataattgaggaattgagagaaaatgtttttttttttgttgttcaaacgttgttgtttatgtcttgagatgcgaactgtatctttgaatttgcaagtagatggagtttcagattgtagtgtagctggggtttgaatcagagggaagaaattttactaattattaattaatccatctgaatttctcttaattctttatgttgaaaaaaaggttactttattgaaaacccttgtgcattaagataacggatactaatgtcagagttgtgatcataaacgcttgttcgccgaatgttttacatcaataatcacattgtttgtgcatttaccttcgtcgtacgttttacggaactattgatgattaattatttcttggcttgctctgcatcatcttatgaaaaattagcaagtaatcattcctacaccgttctattggttctgatttatcttgtactaaacgaatttcgactgtttcgcctcctaaagttcacaactttttcgatgctataactgtcgataagaaataacgaatgaaccgtacaaaaaaaatttgtgtcttggcag

SEQ ID NO: 105934 - DNA, 252 bp, Mimulus guttatus
  Intron number 1 from transcript mgv1a012822m (locus mgv1a0 12822m.g) derived from phytozome v7.0 (chr-ID scaffold_300 ; pos 22186 to 22437 reverse strand)
cctccaaattgagccactcgaacttcaattcccgtgtacgtacaattttttttcttctgaattttatgctatttgtgttttttcgtttcaattatcacttctagacgattctatggattgggggaaaatgctagacgaaacttgaatttgattctgtttcttttagatctgtgctttggatttttttaattattttaattgatttgttttccgtttgtgttctgcaatagtcgaattgaagaagcagatctc

SEQ ID NO: 105935 - DNA, 783 bp, Mimulus guttatus
  Intron number 1 from transcript mgv1a006666m (locus mgv1a0 06666m.g) derived from phytozome v7.0 (chr-ID scaffold_132 ; pos 219444 to 220226)
cttgcaaaaaagtgcagctgtggttgttctaattggttggtctctttctccaattcttcttctcttatattaattttattttctatgtatctaattggtgtattgaaatcgatggattgttgatttttgtcggtttctatgttgttgttgattgaaaagctgatgttttttttttgaatttatttagggttagattagttttgaatcatgtgagattatcgattgatttgtagtccagtttatgaatatatatattattgtctattgtgttatttatctgtgtgtatcgaaagggttttcgtttaatgtattctgatagaacagtgatttgtttatgtagatctatgcttttcatgatttcgtggttttaatttgatgttttgttcgatacccgagctgattttagtcggttttgaattgtctaatatatgcacggtaattcaatttagctctggatttgattgtgtactgaacattgatatgtttgagtgagtgcttcgttcagatgctttgcgtataagacgttttattaatgtttgttgtcgctgcatcgtttgttattcgtccaaatttaactaggggttcgtttttttcttaaaagaaaagtaatctttgtcatgtaggtattgtggtatgtgaaaatttcaattatcttatgaataattgtctgaagtctccagatttgcactgcgttttgtttcgtatttatcagttttttaatccgtcaatgttgatctactctctacaggtttcaaggctgaagtgtagcaagatcgaagcttc

SEQ ID NO: 105936 - DNA, 1029 bp, Mimulus guttatus
  Intron number 1 from transcript mgv1a001735m (locus mgv1a0 01735m.g) derived from phytozome v7.0 (chr-ID scaffold_1; pos 4579087 to 4580115)
taaagatttttacgaggagaagccttctatttcaggtatttcacatacttgttgttaatttcagtttgaattctgttagaagcttcacagtttttctggcagttgattataatctagtgggctaatgcagcggatttctgtatgctttttagtgctttgatctctgatgagaagtgtatgttagcgccaggtttacatgtttgctactggaacttttgttaatgatctccatatttagtatatcgtccaacctgtaagctataagagatcattttagcagcccctcactgagttgaaaaataaaatattgtagtctcgggcacttcgtgattttagcaagtcttagttatgagttttctacaattatcctaattttattcagttaagactcatggctaatgggttaacttttaccatggttgaaagctgcaacgtcagtaagaaataacatgcattgctccactatgatcaagcaatatcgggatattattggggagatttgaaagaaatgcatcatagaatgataaaagaaactaaaaacaattattagtacagattaaaaactgatagtgaatcaactattaataaaattgattaaatttgtaaaaaaagtagggttctagatgttgcatcgaaaatgtattacatatattaactgaactgagttttcatccaatatgagtatccgaaaagaagtctaggctccaacaatcaatgattattagatactattgctaatgatatttgacggtgccgataatatcatttgacattagcgactgttagcgactgcacatgtgaaatcagagaataaagatatcatccggcattcggttgccagtgtctatctagccgataaaccgacaatttgaactatatctcatatcctttctcttagcagagtcaaggaatgatgaaacattttcttcgagatatttcacattgctttcaaacttttcgtgcatctttagaattcattttgcatttatacggaagcatctgactagtaagtaataatgttttgcaggt

SEQ ID NO: 105937 - DNA, 893 bp, Mimulus guttatus
  Intron number 2 from transcript mgv1a020282m (locus mgv1a0 20282m.g) derived from phytozome v7.0 (chr-ID scaffold_45; pos 1562316 to 1563208 reverse strand)
acccgattctgatcatagataacaatattaagctggtatgtttaatcactgtataatgtttcttctgtaattttgattttatttttctctgtttttaattagggtttgtgtatgatcaagtaacaagggtttttcaatgttttttttattaatatagtattggattaatttgtggcaatcaagtgaatgaggtttgcctatttgcagtgctttgagtaaatccttcactatcataaaacatctagggtaaattacagccatacctgaggtaaggtcaaattacgaaagtaacccctcatgtttgggtaattacaaccaccccttcaactatgaatcttcttacacgtccacccttatggcgtcaaattcaacataatcttctatattccgtggaatattctctagtttgtactcgttttgtgcgaaaatgaagtttctgatgcaccacaacaatctgacatatacaaggcaacaggaacattttatgattgtcttgtttcaaaatgtggagctcgaatggggtaaaacgggtacaaactggagaatattccatataatctagaaaatttcactaaatttgacaccgcaatgatggacgtgtaagaagattcatagttgagggtggttgtaattatccaaacatgaatggttttttttcgtaatttgaccttacctcatgggcggtggtcgtaatttacccaaacatctaaacagactaaaacacagactgcaccgtttttatatttgtatttatatatgatcgtgaaataggttaagcgtttgtttatgttaagtgatgcatattatcttatcgttattttaattgtagatttaataacatacggtgttctttatcagattggagagtacaaagaaacatttgggacctgcct

SEQ ID NO: 105938 - DNA, 1013 bp, Mimulus guttatus
  Intron number 2 from transcript mgv1a004517m (locus mgv1a0 04517m.g) derived from phytozome v7.0 (chr-ID scaffold_257 ; pos 222284 to 223296)
ccggccttcgcccaatttacagtacgtccaaaattgtagaacaacactatccaaaattattatgattaaatgattaatgaacatcataattattaattatttaccacttccaaaagtctaatgaacatcaatatctttaaaacaaatttagagctcatcaaattaattaggaacaaatcgtttgaatcagtgatttaaaatccggaccggcacatcaaactgattaaaccgcaaattgttgtcttgtctagtctggttttggtgatcgaacagtaaaattggagtccagctgatattcagattcttttgctaaaaattgtgccttttattattaaaaaatattataaaaacaaataaaatggctaaaacacacttttatttttgcctagttgaaaaaaaaaaaaaaatcaacaaaattgaaattagaaatttaattatagttcatgtaatacttgaagtcattttttgtgatatgcgtgtcgatatgttgtttgtctaaaacgaatatagccttgacttacatttcaattggaggagaataatgaattatgatgcgaaataaattatgttttataatatataaattaaatatcatgattatgaagaaaaaaaaaatgaaaaaccccgggtcaacgtaaccttgacctaattgtatgtcagagtcaatatctggtccggttttaaaacattgatttgaatcattgaatgtcaattgtgccaaaacaaaattattaaagaataaaaaaatgactaaaaaaatttaaaacaaatgtcgaaactggagaaagtcctctgttcttttttttttttttttttttcgtttttgttttttttatttattattaaatattaattagttattattattaataaaatcgtaataataataatactaattagttgttattattattattatttattttctgtttaaaaaggtcctactgttaaatactggggatgtttacatattagcagaggagctaactacgagagagagagaggagccggag

SEQ ID NO: 105939 - DNA, 464 bp, Mimulus guttatus
  Intron number 1 from transcript mgv1a006148m (locus mgv1a0 06150m.g) derived from phytozome v7.0 (chr-ID scaffold_204 ; pos 151692 to 152155 reverse strand)
ttgcttcctggtattttgttttcggcacttttcaggtaaagtaagttctgatttcccccgcattcaaattatcgatgggttttttgacttcagtatttttctattggttgatttactaatgctgatttccagattaaattgagttgttgttttcccttgctttcataaattgtgaacattatttcgttgattggtagtatctgcagttttctgcttgtttggtctctcatttggcaaaggtttcatttttgcttatactgaatctgctgcatatgtgtgtgtgtgtgtgtgtgtgtgtgtgtgtgtgtgtgtgttcttttcttgcaagatttggttttgtattcttctgctgtaaatgccaagtgtttttgattgatacaaacattggttcttggggcttaattgtattacttgtgagtggtgaccaacttggtgtaaactgtttttatgacagcgccctcgaa

SEQ ID NO: 105940 - DNA, 593 bp, Mimulus guttatus
  Intron number 2 from transcript mgv1a004263m (locus mgv1a0 04263m.g) derived from phytozome v7.0 (chr-ID scaffold_2; pos 1962343 to 1962935 reverse strand)
agacttgtgttatcttcggattcttagaagtcttggtaagtttttatcctctcaattatgatcccaaccgttcattttttttcatcgcttctcgttatatcaaattgttgtcttaaaggaagcagtaagttttgtaggagattaaattactgcatgtaaaaacttaaacatagatcccaatgtgcatttaattccactaactatctatactaaaagcatttgactaaggctccaggctaatccttttttctattcccaaaccatggttacggagatactcaaaatccgtcagactgtgttattaatcctttccacatgacaactgagattatatattaaaataaaaaacgctgctagtgcaattctttaatatgtaaatctcttctatcattattagaatatcaagataggacaatgcattatagttcaatgacggtcaatgatcaatatcaagatttcaaatattatcgcatgaataatgacgacgatgaatgataaaatagtgagaataacattggtaaatctgtgtaccttaaaactccattaggcgctaatccagcaaaaaaccaaaaatgtgccgttctttcaggggt

SEQ ID NO: 105941 - DNA, 586 bp, Mimulus guttatus
  Intron number 1 from transcript mgv1a020612m (locus mgv1a0 20612m.g) derived from phytozome v7.0 (chr-ID scaffold_24; pos 208553 to 209138)
tttctagacttggttgtaagaatgatcaagatagtggttcattcataagaaagaagttctttacgtactcctcacgagtacattctttgaaatctagaatttttagtatttatctttttgtttctagatttgaatgtaagaatgatcatgttaatgattcattcataaggaagaagttttcgtacatcttctctttgtattcttgtaatactgttttaatataatttttccgtcctgtaaagggcaaattcacaagttttacttgtgaacatttttagatctgagtattgactttatatttccgctgcatgtttattcaagtgtcataacacttaagataacatctctgtattaaatgaattcgggaccataaattctttcaatatttttgaagtttgtaggattagcatattgagttctgcatgaaatagatagattgatgtatacaacttcaatattttcgctgcaaatgtgtgtagtttccattgattttatatgaattcttaagcaaattttgtttgtcgtactaattttcggttttcctgtaccaggttaaatcgaaagagcagccgattttgatcgtctc

SEQ ID NO: 105942 - DNA, 866 bp, Mimulus guttatus
  Intron number 1 from transcript mgv1a009668m (locus mgv1a0 09668m.g) derived from phytozome v7.0 (chr-ID scaffold_255 ; pos 145001 to 145866)
atttgtggagagttgaggtataaaacgtcgtcgttttggactaattaatacttttctgttagaatgtctaaactgtcattagctgtaattagctaagctaatgtttataaatgtccatctgtccacattaaatatttaagataacatgtttgaatttagttaatttttttagcatttagatttatatcgacgagtctaaaccaacggttcgattacttaaataacgcacaagtaattatgaatatttgaacgggatttctgaatactgtcactttttccgattttggaacaatatttcttactccaaattttgaatttattatttggattctttgaatacatttagattccgaattctgatccgatagtaatttccgagaccgagttcgaaaattttgattttttttaattaaattatactttaaatagtttaaatatcaatattgttatttattttgtattatacggagtatggcctaaaacagtaaaatatttcgattttggaaaaagtttttttttatttcatttttcgagattccgatttattattttttcgaaattattggaacggaacaactttgtttaatacatactattttacacccaaaaacttttttcctcacaatttggattttcaaaatttctcaacctccgttatctaacggcgttaaaatattccaaattcattccccaactgtgcagcagaggaggacaaacaaaacccaccgtcaaaaatccagacagagacacacacacacacacacacacacacacacacacacacacacacacacacacacacactgcgagttgaagaaacctctcgataaggaaaaatccagaaggcaaatatactcagaagatcg

SEQ ID NO: 105943 - DNA, 353 bp, Mimulus guttatus
  Intron number 1 from transcript mgv1a016409m (locus mgv1a0 16409m.g) derived from phytozome v7.0 (chr-ID scaffold_129 ; pos 75340 to 75692 reverse strand)
tctctggggagcagcacgccctcaagtttagtcaggcatgtttcttttatcttcttcttcttttatttttgttcattttcctgacaattattgaatatattcaattttagattcattgtcaacttgtagttaagactacaacaagttcatttgaaaatgtgaagctgatggatattaatctagaatcaatagagaatgtatggtagatggatattatgtgaagattgaattggattttaaaatgaataatgacatgatgatatgaggtgtgatttgtttgaatgattgaaatttgaaggttttatcaagtgatgatttgtttgtttgattgattgttgtttacattattacag

SEQ ID NO: 105944 - DNA, 523 bp, Mimulus guttatus
  Intron number 2 from transcript mgv1a006875m (locus mgv1a0 06875m.g) derived from phytozome v7.0 (chr-ID scaffold_267 ; pos 79187 to 79709 reverse strand)
atattgatacttttgagattgtcgcggtgaagatcgtaagtcacgacatctgtaactttattggatgattcaattttcattactaaatttccgtgtttatgtgctgctgattaattgaaatgggtttgaaatttgcatggagctatgtgtagttcatttcgaatatattcataaagttgtttgggaactagaaattgggaaactcaaatcaactggtgattttgtttctgcctttgtatgtttgaactcctattgttagtatagaatcattttttaatccactcgcgagtgcaacgatgctttcttgcctgattaaaggtgacaacttgtttggagtgatatctattttagcatgttttaatttttcgtgggaaattcacgcggcaggaaattagaaggaggttcagttaaaagaaatctccgagggcttaaatcatttaatgctgactgctaatgacctgatctatggcatatgtttttctttgcaggaaaataataaaacgaagcaccctcaacttcttta

SEQ ID NO: 105945 - DNA, 990 bp, Mimulus guttatus
  Intron number 1 from transcript mgv1a005225m (locus mgv1a0 05225m.g) derived from phytozome v7.0 (chr-ID scaffold_36; pos 823181 to 824170)
agcctctgtctgcactccttccaccaatttcaaaggtttttcttctctctctctctctctctctctctctctctctctctctctctctctctctctctctagctttttttcatggttcattgttcattaattagttatacagatgacttaattattttcatgttgtctaattaaaactgtctgattagtgtctctataaattaattagcaagttcaaaagttttcagacaaaaggaaatatatataatgcatgtttcatatatctttgcttttgatgacaattattgctacctaatttttttgcattattggagttaagttaagcaaaataagagaaacatttaaaagtgttgcacagctgtattcaatatcaagttatgcttttttcttcatccaataaacaaaaacttataggaagattaaattacgaaaaaacccctcatatttggataattacaatcacttccatcaactatgaatcttcttataatatgtctatccttatggtgtcaaatttaacaaaatcttctatattccgtggaatgttctctctagtttgtgcaaaaatgtcgtttctgatgcaccacaatctgatatttacaagctaagagagtaagagacgcatcttatgattattttactgcaaaatgtggagctcgaatgagataaaacgggtacaaaattgagaatatttcatataacctagaagattccactaaatttaacaccacaagagtgtctgtaagaaaatttgaggggtgattgtaattacttaaaacatgagggatttttttcgtaatttaaccttacattggccgtggccttaatttatccttttttaagtgtttcattgtgacattttttgattgcactaagaaaacaaaagcatataacaatttcaagaaattaaaaaataaaaagaagtatctaattgatcaaaaaaaacttgaatcaggttccaacaagagacaatcaacattggaagttctc

SEQ ID NO: 105946 - DNA, 748 bp, Mimulus guttatus
  Intron number 2 from transcript mgv1a008497m (locus mgv1a0 08497m.g) derived from phytozome v7.0 (chr-ID scaffold_68; pos 908691 to 909438 reverse strand)
ggtgctaaaattccgccgtctgaaaattcggtaagctatgtcggagttaattaaaccccacctgcggtgggtttgtctctctgtgaaaattctttacactccatcacttgttattttcactgtatgcttctgcaattttgtttgattcggttcaaaaatggaaaattgttggtgggttcttgtgggttttcgatgggggttgagttgtacgctcatacggttatttcgtcgacgaagtttttccggattgtgttgatgatgttactgacactgagaaatagttcaaactgatcttcgaattagaaattttgggggttcggttcgatgagggtttgttcttccccgttggttcttcgattggtcaagattatgatcgttataagagttcaaaacgagggtttttttttaatcgaattcattgcgaaacaatgttgtactttctacggtttacgggtttgagcattataataggggagtttgatagaataattaacaaacgtaaaatgcagctcatgcaatgctagtctatgatcgaaaatcagttgtgcgtttgcgttaaattgatgaagaaatctttgaggctctttatacttttgtgctttttctttcggtagtgtatgtgaaagagagtcacaatccgtaatctaggttgtattttagccacctgacaaggagttattcgattttcaccgatgaacaataaactgatgcagggtagagataacgagaaaaatcaagatacgaagca

SEQ ID NO: 105947 - DNA, 539 bp, Mimulus guttatus
  Intron number 1 from transcript mgv1a000731m (locus mgv1a0 00731m.g) derived from phytozome v7.0 (chr-ID scaffold_32; pos 118503 to 119041 reverse strand)
ggtacgataattccaatgtgagttcagatgtaactcacttttttgttttacattaaattctgatgaaagacttctgaatttttggcgtctgtttaatttctgaaacaatttgaatttggtttgctagaagtttcaaatacagaaacagtccattcatgttttcagtaagaaacataaaattttgaagcgttgccttatgtatatctgtgagtttcttgagtattttattgcaatgaatccttgacgacattttgaactgatgctaaaatgatgagatttttttacaaataggctagttgacttaaaagaggccacaggtatcattagggagctttgcactatatttttatcttctgtttccaggcaaagttgccttggcgttgtcactttccagaagactgaatggatggatttcgaatgatttgtaagatttgtttatacttgcatggattgtttatgctgtaagagatgtgctgaatatttcaatgattaacggtttactctttgttttattcctttacagggagttactcaagaga

SEQ ID NO: 105948 - DNA, 870 bp, Mimulus guttatus
  Intron number 1 from transcript mgv1a016460m (locus mgv1a0 16460m.g) derived from phytozome v7.0 (chr-ID scaffold_44; pos 278461 to 279330 reverse strand)
catacaagccgaaggtgttttactctacagcttcggtaggtgtagctcttttaattttttttttttttatttttttttttttttagttttgtttctaaatcagagaaaaaccctaattttctctctctatcccactccaaagtaattaattcgaaattaattattagtatgctcatttcattagctttcgatcatagggatttttggtttctgctgtaatatagattgtggttccttctgaaattaccaattaatataggtttgggctgttaattaagtatgattagcttaattagattcaagtgggcccctctaattagggaatatgggcctgaatttacgacaattagagcccgttaagcgtgttgtttgtttgggctgggcttttcagaaaaaaataaagtcgtggtttgattagcgttttaaggcctcgtttggttggggacattagcattaactaaataatgagactttttttttttatgtttggtatcccaataacttgtcgggtcgacccgcaaatattatgtcatcttgccttttaggcatgttgttcattggatcttccaacgttcgataatacaattgggtttcattagattatttaattttatcttggctaatctttatctccccaaccaaacgaggcctaagtagttaaaaagtatagaatatataatgctatctaatttgtgaaagatttcattttacttggatttttatttggacaattaggggtaacaagatctggtgattccttttcttttatttggattatgtgtgtttttcttactatatattttttttaattattgtattataatctatttatttgtttttttattctaggaaaaagagtttgaacgtgaa

SEQ ID NO: 105949 - DNA, 322 bp, Mimulus guttatus
  Intron number 5 from transcript mgv1a021335m (locus mgv1a0 21335m.g) derived from phytozome v7.0 (chr-ID scaffold_7; pos 3446418 to 3446739 reverse strand)
gcttgctcgttattggggtttagctgcacgttgtaatgtacattaaaaaaatccaattgaaggaaaaagacactcatgcagcaatatctggcatttttttgttttctctatgcactaaagataaacatatgtccaaaatttctctttcaaattgacttgccatatttgcgaaaatttattatgtatagcatttaactatagaaactaaacattttttacgtcagagcgatacctacttcatataatctcttatttacttttatatttataaaagcaaattggctcttgatgcgtttctcaaaaattctttgccgacagctat

SEQ ID NO: 105950 - DNA, 653 bp, Mimulus guttatus
  Intron number 1 from transcript mgv1a005525m (locus mgv1a0 05525m.g) derived from phytozome v7.0 (chr-ID scaffold_22; pos 268773 to 269425)
gcagtcggaaatttacgggatctttgttgatttgggtttttattttaattttattgatttgatctctcatttgatgcgtaattctggtgttagttgttttgattgcgcgaattttggtagatctatgtgaatttgatgaagtatagcatctgattcgaatttttattcatgtgtggttttacgtaaattaattgcaagtagtggatttggagctgttgtgtgaaagtgggctgtgtatgtgatagatctggtaaaaaaaatattgtaatttaacctgattaatttctgattagtgtgaaaaaaatggtggtgtgttggtttcgtgataaattttgtgtcttcgaggtgtcgtggttttgttctttgttttggttccaacaaatcagatctgatttccgaaaaacgatttccttacgaaatactatgattctatttcgattgtatcattaacaaatgatactgctggagtgaatgacttttatgatttctttcgtgtcgtgagaatgctgtcgaaatattggtatcctgatatgtagacgtaacctaaattccgcgtctttctttgtgttaatgttgcagcagagggtaattttttttttttttttgaaatgtgtacattcgaaattttgcaggtcactaagaacaagtgaaag

SEQ ID NO: 105951 - DNA, 726 bp, Mimulus guttatus
  Intron number 2 from transcript mgv1a007148m (locus mgv1a0 07148m.g) derived from phytozome v7.0 (chr-ID scaffold_45; pos 975148 to 975873)
attcatttccccacgcgcttctgcttcttcctccggtatctttcttccccttttgtagtgtgtgtgtgtgtgtgtgtgtgaaattttgtctaattcaaccagttatttgagatgggctgatctttagaacttttgttgtaaatgcagctaagcatcacttatgcagagttgaccctgtattttgagtgtttatttcgataattatatctggtttatcttcgtcgaattttgcaaagcatttcattttcggaaaataggtgttttgggaaaagaatttgagtaaaatgaaagtgaatatgtttgtttgaatttcgagacgggacaatttcaacagtgaaatgtgtctacgggtgttgggagaaatgtatttcgtatctccgaattaaattaaagagagtattttcaaatcccaaagaatttgagtcccaattcggaatgcaaaacaaacacgaattaattttgggggaaacgggatttttgttttcttttttcgaaatggtgccgaaaattgctgtttttggtatctcatcctaaaatgagtacagtgtgagagcgaacgagaacgagaaaaaaacgggtcttacttctgttatcgagtcgggtttcgaatactatacaataccttctgagaaatttcaccacaaactagagaaagagagatcattgaacttatcctttcgcttattttcagatcctcttttggtcaaagctgcgagaggggaaccg

SEQ ID NO: 105952 - DNA, 654 bp, Mimulus guttatus
  Intron number 5 from transcript mgv1a009810m (locus mgv1a0 09810m.g) derived from phytozome v7.0 (chr-ID scaffold_76; pos 392545 to 393198)
cggaagttctctctcgccgtgaatacgacggcaaggtatatcgatacccacatcactcctcttataatattttattttgaaaattttataacaaatatactccaacccattttattcatagtattttttttttttgtttttttggaagaaattttattgatagtattaattaagggtaaattatttacacctcacccctagtgtatgttaaataactctaaggttcatgtagtattggtaattacatcaacacccctgcaaacaactatcggagtcaagatttcatgttcttgggaccgttatgcactatatttgtttcatgtgggtccgttaatgctacaatagacgaaaatttataaatctttgtatcaaaaataataaggatttaagaaatgttaggagagccgagagccatgtcgccccggacctctgtgttgtctccgccactgcttgaaactagtagcctgttagaatcctactgaaataacttatccaatacataaggggtgattgtaattaccgatattgtagggaccttaaagttattttagcatatctcaagtatgtaggtgtaatttaccatattacttaattagttttttatttatttttgaaaatttttttttttttttttttggttggagaagttggcag

SEQ ID NO: 105953 - DNA, 725 bp, Mimulus guttatus
  Intron number 2 from transcript mgv1a021737m (locus mgv1a0 21737m.g) derived from phytozome v7.0 (chr-ID scaffold_32; pos 1393327 to 1394051)
ccccaatctcgattttttagataccaccttcaaaggttaccaacaagaatttctatccgttgttaacatagggagttaattgctaattattttaacttgggggcttttttttttcttttatagttttctaattttgtttgtttataaatgaaataatatcaaaaattcgttagggataattcagtcatttcatgtaagtcaaacaactaactttcaaaaatagggcggtatgcctcgtaaaacaaaacttagggatctatgagctaatttgattttttatccgggtgggtttttcgcttccaagaaataacacattaggtaagaatcatacaaccaagtgggatctacccctaatagttaagaatcataaaacaagtaaatcacgtttgccaaaacataaatcattggattctttttttttttttttttgctaaaaaatcattggattttaccatgtgtagaaccgtccaacaagcttatggaatttataaaaagaagcttataatacaaccctgagagaaaagagaaatccgcaaccgccgttaaaagatggacagaatatccgagttgtcagacgacatcttgcagagaatactttctctctctcccaagaagatgttgttcgaacatctgtcttgtccaaatcatggcgtgatatttggtgcactcgacccaatctcgatttttcagacgaaaccttcaaaggtaacaaacaaaaatttcta

SEQ ID NO: 105954 - DNA, 602 bp, Mimulus guttatus
  Intron number 2 from transcript mgv1a013456m (locus mgv1a0 13456m.g) derived from phytozome v7.0 (chr-ID scaffold_121 ; pos 854642 to 855243)
atttcaccttttgtccggtatgttcttcgatgtttttcatgaactatttcgtattgtagtttcaatttattggcaaattacttgctcgtttttggggcggttttccctaaatcgtgtataaagatcaatatgagttgctttttatcgacttgttttcaaactttaattctggcgtctgctaatagtgacggagccaatgtggttctagggcggttttagggtgtttttgtatatttaaattgtagattgatctgaaattttattaaaaattcgcaatctgttaagaactcctttcaaaatctttcgtcgacaattccacttttgcagtttagaaaatctcacggccctagcaaatattagtcattgggggattaattgatattttggtgtcttacatcgagaaatatatatcagacagtttctaatatcgacaaagtgatggttgtttttcgataaatattttttatataaaaaatgtacattttgttttcttgtacatttttttttcgatttgtaattcacctattcttttagtattcaacttcgaacactttgtggtgttattaggttcccccgccagtagacgatactcagaaagttgc

SEQ ID NO: 105955 - DNA, 565 bp, Mimulus guttatus
  Intron number 1 from transcript mgv1a021049m (locus mgv1a0 21049m.g) derived from phytozome v7.0 (chr-ID scaffold_308 ; pos 192655 to 193219 reverse strand)
cacttcttatttctggaaagtacgtattcgttcgatttcccccttttttcggtttttaaccctaaaaaatgtgtttggattcttgcaagagataaagttgaatgtgcaatatcactttgaattggttaacattgtatagtttttcaagtgtcagtgctaattgatttggatcgtctcgatttttatttctgcgtcttgctactttgcgattgaaaagaatggaatagagtgtttacgatagtgtgttcagatcaagattaaattctgttctgtggggccgggaattgagaaatgccatgaataaggttgtccgtgaatagatagccgagttcaaagaagaccttggataaaacaataattaagaaatagattcgtagggcttttggaacattcaatattttttttttcaattttctcaagatttgattggaatgtacttgaatgacatatgtataatttcttgatgatgcaatcgtaaattgatgaaagttgatttatgcgaagggcggatggtggttgtaaacaattgagactataatatatatatgtgatgtattgttgagtt

SEQ ID NO: 105956 - DNA, 691 bp, Mimulus guttatus
  Intron number 1 from transcript mgv1a023754m (locus mgv1a0 23754m.g) derived from phytozome v7.0 (chr-ID scaffold_60; pos 687267 to 687957)
ggcagcctcgctgatttgctttccggtaattctttctttgtcgcatctcgtgttttttaatagactattattattttagaaactcttactataatttatttagaaaatttgcttcacaaaattattttgttatgaagcatatcatttaaggaggactttaaattggaattggatttttgaattatgtcgattctgattctgattctgataagaaagttttaccttttagaacaataattttcattccgagtcgtttttagatttttctattttttttttgtattggaagaattggaatatgagattccaatttttttaatacgatattaatttttgactcttttttgatttttttaagtagaggggaaattggaatgagatttttgaattttgacgactacgatccgaaaatttcggctttcagaacaatattttccatttcgaatcccgaaagttccattttcgatttttgttactttattttttaaattagaattgggatgcatattagattccaattttcaatcataatttaattttcgaaaatgtttattcattttcgaaagttaaacgagaaaatttccattttttttttatttttttaaagtggaactggaattatattttcacttttcgatccgatccgtccgattaaattaggtgcaagggaacaaggccacacggcattgga

SEQ ID NO: 105957 - DNA, 929 bp, Mimulus guttatus
  Intron number 1 from transcript mgv1a021852m (locus mgv1a0 21852m.g) derived from phytozome v7.0 (chr-ID scaffold_90; pos 331989 to 332917)
gagataatttcgataaaagtaaatattgccatatataaaagtggcatccgaattagggaaattaattaaatcaattaaatcatgtatcaagattcaatacatggaaagccaactaatctataccttgtcaaagaccgaatggattttttttcttcctgtatgtttattagttgagagatttagtcctccacattttaagatcagaattttagtcctataagttacaagatttgcaattttttgtcccataacctactataacatgtaatttgaatgagttgacatttaatatatacaaattaataaattaaaaacaaaaatcgataatatggttgataggttggacaattttggagggaaattccatcctcgatgtaaaatactccaaatgtaaaagacaccgggtggagggaagaattacaacgctaactactatatacatggaggaattataacgctcggtctttgatggaatttccctccaaaatcgccacaaattttatttttatacattaaatggcacatttttggtcaactattgatcgagttatctgcgataacatgtcatatgaccaaaaatttcaatttctataatttatagggctaatattatggttttaaaacgtaatggattaattctctcaaccaataaacttagaggtctaaaaaactcattttgaatattctcaaattacaatcaaacataccaaatataaaagtcacgaattaaaaatattaaagaaaaaagtacaacactcacattataaattaaggcaagtccaccataaaaaaatcctgcacatcttttctctttctctaaacactgatctacagttgcaaaagaaaacatttctcatcagaagaaattatttttttctttttgcaaatatggagataattggttcagcgaaccaaaagaaagccggagg

SEQ ID NO: 105958 - DNA, 632 bp, Mimulus guttatus
  Intron number 1 from transcript mgv1a014461m (locus mgv1a0 14461m.g) derived from phytozome v7.0 (chr-ID scaffold_64; pos 587751 to 588382 reverse strand)
gccatcagaaaacgaattgccagcatgtacgtacagtatttctgtattaatttacatttgtatccattcgttgattttttatattttatttgtaaaggttgaagctctattggttttcttataaattttattgtttaaaaatcaattgaactggacacattgattcatgttgatttgttttcttcactttactaattactcaggaattaggttgatttgattaatgaggaggtgtattgatgtagagttttgtgtgataattaacaaaggggtacctttactagggttttacttgattccgaaaacccgaaaacccggaatgtagtaggaaataggagctcggagttcgattctaatttcttcggatccatgatgaattttgttaaatttactaagaattgaagtcataataatctaatagtctcggactcactgttgatacttacggtacagacaacaattgtcttgtactatgtttttcttgaagtattgcttttctggtaataatattgtcacactttgttgtaaagtcgggtggcgtaatctattgaatttctgtaacttgaatcacgttatgtataacttatgtgtttgcagatataataaaagagtggacgatttcgaatctttaa

SEQ ID NO: 105959 - DNA, 1006 bp, Mimulus guttatus
  Intron number 1 from transcript mgv1a016136m (locus mgv1a0 16136m.g) derived from phytozome v7.0 (chr-ID scaffold_36; pos 815716 to 816721)
gaacgtgcttggttgatttctcaggtactttctctctccttttttttttattttttttagggcaagtgtttaatgggtttccctgttgaatggttgaaaaattcgtgttcatttgattatgttggatttcagtgataaattgtaaaattagtttgctcattgaatttgagcttggacctccaagtatctggttgttacgattttacggtttcgatttctcgatttcgacggtggagaagatgagaatttcataatatcaattttcatttgagtattcggtgctccactgcacacatgtacttatagaatcggaagtaaatcgaaactcgttacaatttgttagaccagatcacttagagtgaccacatagcaacccgtgtaatcgggaaattattattttggagatttatgctttatccacaatatgtgctgctgttggacgagagacgaacccgtgtttgtgatgtattattattaatatcagtcttgaaccaaaggtttcttgaaaaaaaatttcgaccgagattctgaatacgaagactcgtaactatgatatgctgaatagttgagatgtatgaaatatgttcggtattaggagcttgcttgaagctgtgaagccgaatcaagcaaatgcagatgtattcttaactttatcagtcgggattttcatcggcaatttattccataccttgagtttcttgttttgctaaatgaagatgtattcttcgttaggtgaaattaatctgttaactatccatcagaaaaaaaaggatcaaatgtacattgtacacgggtagtgtaattttacgagtattgttaagacatgactgaatagtgtcgtcgacaatcgatcgatcaaggcagtcgaaaactgtataattggctaactgacattttaaggattaaccctaccaaacactgcttttaaattttctgacattatcaaaatatttgtcttaaaaaatgcgcagcaacctaggcccgttgcgtgttcttcgtgcgaatc

SEQ ID NO: 105960 - DNA, 586 bp, Mimulus guttatus
  Intron number 1 from transcript mgv1a010058m (locus mgv1a0 10058m.g) derived from phytozome v7.0 (chr-ID scaffold_85; pos 707811 to 708396 reverse strand)
gtgttcctctcaccaaagaaactggttttcatcaggtatgtatatgtgtatgtatttgcatgcatctttctctctctaaaagtacgtagtctgcatgcatgcatgcagagatgaaagcatgaaacaaaaatcaagaattctatgaaaacaaagaagaggcatttggcataggggggatgagtggttgtttgattggcgatttgttcgattttcagtcgtgaacaattaattggataaatcggaaatcgataatatagtgtttggttagttcgataacttttcgaatcttgatttaattggacgattgtgggttgaaaattaccttgatccaattacaattgatgagctttaattgtaagattaattgcaatgataatatcaaatctgatatggagttatgagtgattgtttttgctgctaatccttttgattttgtcgcgaacaattggataaattgaaactcgatcggtatagtaattaatatattcatgaaccccttgatctaactataatataattgacctctaattacaagattacattgcaataatcttatatatatttttttcttgaaaaatgcagtacg

SEQ ID NO: 105961 - DNA, 883 bp, Mimulus guttatus
  Intron number 1 from transcript mgv1a010490m (locus mgv1a0 10490m.g) derived from phytozome v7.0 (chr-ID scaffold_2; pos 4340144 to 4341026)
aagcttgccctttctgtaacaaagtcaaaggtattgatatatagttcaatttttggctggaatatgtatgggacttgatttatctaaattcaagtttaaatcaaatattggggaaatttctgtgcaaagttaaagttaaatgtgttgtactctgtgtgcatcagaaattgctaaaatggaagcaggatcgaaacagttaattcttatgattgatttgctttgagagttaagaagtatggtaaactaataatctttgatttaacaggattgtgttcggagcttagctattcaacatttatctttcgtatacagatcatgttaaaacttataagtttgagattatcttgctttattctgttgtataaatatgtatgagcatctaatacaaaaacaaggttcgacgcttttcttttctggagcagctgttagtgcacatgtaccctagacattttcaaagataatatgtatttaatccatatgtgcaagtaaaaggggtgatcagtgacatgtaccaattgacatagaatttgatgtttggatagaatagcataaaacgttgtgtatagacgtatagtacgtaatacattgaagtacctttgcattccttttcagaaaaaaacagcattttaatttgactgtacatcacactcttatgtgctttaacacattctcgaaaccattctcctctctatatacatttttatctcactttttgaagacatggtttttcaagaatgatatgccaagaaatcattctcttaatattatgttgtcttgttagtaaccataccctgtagtattcaaacatttgatcatggtaacgttcctgaaaatgaactctttgtaattatgaatcttacttttccagcgtttctggactact

SEQ ID NO: 105962 - DNA, 655 bp, Mimulus guttatus
  Intron number 1 from transcript mgv1a019201m (locus mgv1a0 19201m.g) derived from phytozome v7.0 (chr-ID scaffold_8; pos 929063 to 929717)
tgttcaatttggcagccataaactctaactcgtgggtcagttttttttctcgaatttaataactactcttttcgtgttagtgattaattggcttaattccacttttgtacactcaaaatatacaattttagcactttacactcttaaaaataatttatggcactttgtactctaaaaatatgtttaattattcagcatagtctatattttggacataatttttatgttgttttcttattttcttatagtcaatacggtcatttttgtctattcaattgatttttttttcttcagagtgcaaattgttaatgtattttcgagcaaaaatgactgttgactatcaaaaattaggtcaatgacggaaattctggccgaaaaataaactatggtgtaatttgaacgattagacatttttcatgggtgcaaagtaccataaattattttcaagggtgtaaagtggcgaaatgatacatttcgagggtgcaaagtgaaatgaagtcgtaattaatttacacctatttaattttaatttgattcggaaatcaattaattatctaatttcttttttttaaattgattgtttgatcatttacaggctaatatatgtgcaaccattaagcaggcggcggtcccgtggaggtgtagccgccggtga

SEQ ID NO: 105963 - DNA, 987 bp, Mimulus guttatus
  Intron number 1 from transcript mgv1a020045m (locus mgv1a0 20045m.g) derived from phytozome v7.0 (chr-ID scaffold_119 ; pos 717482 to 718468)
gggctgctgcttatcgtgttgattttctgactaaggttagtttttttgttcttttagttagtccacgtatagacaaaggttagtttttttgttcttctagttagtccacgtatttgtctatgcctctattatatatatttgggttaattacattttgccacctgtactttgcttgtttttccactttgcccctaaactaaaaactttcatatgggcacacccaaaactacttttttgacgcacataacacctatggcgaatattccgacgaatcttttcacttaccagcgcacgcacatgcttaatgtaagctctttgtggtctttactcttttcaactcaaataatttgtgggccctgtttttttctcttcttctccttctctctcgcacacgcacacacatacagacattcccacgtcatcatcttcttcttctcttcctcatttcatgcattttttgtttgtatttcatgcattttttcttgatcgtcttgattacaagaagaatatctcatggctttttatcttttccttctctagctatttgcttcgtctcttgaatgggttttgtagttcttttcaatattttgtttggattttgagttttctgcatttttacatatacacaaaattgaggggtaaaaatgtccgaaaagtgaaactttgaacaaatcatataaatgagaatcccaatatcccacatcatcatccactaatagattgtaaaatgtaaacaaaatgacaactttgttacattttgtagttcaagggtattttgtacgaccacatagtttaggggtgtaaatctaatatagctgggatacgtaaaaatcaactgtggatttgtaaagtgcctttcattgacaaaattgataaccgtaagtatagcttttcaaagtttacgtgtgttgcagttttattttaattattgtatttcttatcttgatgttttttgaaggctgctgaggtaatagaagaagtgaataa

SEQ ID NO: 105964 - DNA, 685 bp, Mimulus guttatus
  Intron number 1 from transcript mgv1a011330m (locus mgv1a0 11330m.g) derived from phytozome v7.0 (chr-ID scaffold_125 ; pos 233747 to 234431)
gtttgatatattgacgaaagaagccattgcctccggtgagatactttgtcccttgtgttggtgttcgtttcgatattttttttttttttttctctttctacgtacttgtctgaaaatcgccaagcgcttggatacatttaaggcaatgtttggaagcgttttggaacttattttgatttcattttgagaaaatatgttttggggaaagaatttgagaatgaaagtaatgtttgtttgtatttggaaggagacaaaatacactgtagcagtcaaatcatgtttaaaggtgttagaaaaatgtattttaaaagaaaaaaattgaaagatgaagtgatgtttatttgttttttagtgaagacatttttcactgtagcagtcaaatcattttactgtagcagtcacatcatgtctgaaggagagataaatttttgatattgttttgagaaaattatttgagtagtgtaataaatataattttgttttggggaatcaatgaaaacaaaatgaaatcacttccaaacattgccttagtttatctgttttcagttgtatacagtgtgatcgtttcttgaatgctagttgaagcgaatttgcgaggtttaagacactctgtactagctcgtaatctgttgcaactgttttgtttgcagatattcagtcggcattgttattaccaacgcgttac

SEQ ID NO: 105965 - DNA, 498 bp, Mimulus guttatus
  Intron number 1 from transcript mgv1a000644m (locus mgv1a0 00644m.g) derived from phytozome v7.0 (chr-ID scaffold_37; pos 1642466 to 1642963)
cgagacttccctccagcaagcatctgtacagccaggtgattgagattattatttctgaaatccgaattgatgttgttttaatttttgatgaaattctgttggataattgtccgatgattttggttttttcatttgaggaatttcatgtttatatatgtatatttatttgcttttgccaatcgattttggatttataaatttaagattgttaattgtatttcaggacacattgcaattttatcggcgaagatgaattttttactactaattaacttatgtagacaatggcaaatattgttctttgcgatctgcgtatcttctacagatgtgaacccattttgttttcaaatgttattgcaagaactatggtgctagttccactatattattgaaacatttgatgtggtttaattgttgtgcttacattttcttttctcgatatatatcactgtatagctatgagattgattttgtttctttctgcattcttgaaaggtt

SEQ ID NO: 105966 - DNA, 500 bp, Mimulus guttatus
  Intron number 3 from transcript mgv1a000644m (locus mgv1a0 00644m.g) derived from phytozome v7.0 (chr-ID scaffold_37; pos 1643241 to 1643740)
agaaggttttcttttacttgatgtgcattaccgaaaaaaagtaatttgtagtttttgtcgatatgatgccaccatggactaaaggcttggacttcaaattttacttcattttcaagctttacattgttttgtgtttgttttactcaatttattgagaatttatttctttccctcaaatttagcgaaccactacaatattggattattttttttgtttcatctcaaattattgtttggtgtttgttcaaaagtaatgtcattaatagagagaaatactcttctatatctctgtgaaatgaaaatgttatgttctctgttaaacaagtggtgtttcatttttaacataaaactttttttgctgtcaaacctgttgggtatcgaaaagttgggttacatataaacagacaaatttatagaggattaattaaatatcaaaagttatacctgattctgttatttaatcaggcatctgttcgacaactacttctaggatcactaga

SEQ ID NO: 105967 - DNA, 815 bp, Mimulus guttatus
  Intron number 2 from transcript mgv1a000621m (locus mgv1a0 00621m.g) derived from phytozome v7.0 (chr-ID scaffold_9; pos 393896 to 394710)
ggcggatttggaatttggctcgccaaaaaaagcaggtgatgattttgtttttccttttttgtttgtgtggctgcttcaaatcaacgatttaacctttttttccgctgattcaattttcttttaattcccttttttggtttttgtgagcgatttgaagattgttagaatgtatctattctcaaagatgtgagttccatatgacgtcaactaattgaaatctgatacgaggaataatattttttttatgttgagttaattattgttgatgcgaatcggtagtgaagtttcgctcagtgttttctttcggttgcaactgtagcacatttagatatcaggggcaaatagaccaacggaatctatttattcagttttaagaagaatcttttagctgcgtttgcaaagtaagcaagaactggatttacgagtattactgaagcagaattttatagggaatagaattgcctttctcgtgaagtagtttgcggacgagcgaatgaaatatggaatgaaacagcttgccataataaatacatgacgccgcacatgatttttgttttgaattggaaatgtttctaatgcagatttactttttgatccattttcattttatgtgtttctacttccctgtttaacttcttactttctagttacgattatttgcatttgcatttaagtgtacgagaagttacgccataatctcaagatgatttaatactgtttaaattggtatttattttaccgtagccgaattatcaccattgcttttactgacgaataaataatccgtgtagcttgagggagaggaagcccaaagg

SEQ ID NO: 105968 - DNA, 916 bp, Mimulus guttatus
  Intron number 3 from transcript mgv1a006192m (locus mgv1a0 06192m.g) derived from phytozome v7.0 (chr-ID scaffold_29; pos 143685 to 144600)
attcagctcagaatcctgactgaaactatcgaaaggtactatacttttttttttcatcttcgttttcggctctacacatttgactagttttgcatcgttctagcattgcaagtctttcagatcatatacagttaaacctctataaattaatacagtcgggacaattaatttagtgaattattaaattatcgaattaataaattaacacactttcaccgagtcgggaccaggagaaactattatttaatcgaggttattaatttatcgaggttctactgtaacatttaacaacctttcagatcatgtatcttcgatttatttcatctctttatgttttcccaatttttgtatcggtgatgcatgaatcttcgggagccttattttcccgttaatgttgaagctgtgcatttgatcatagtttgacacgttggaagttacgaacgatctcacatacgcaagcttaaggcaatgtttggaaccatttttagtttgttttcattgtttccccaaaacaaaatgagatttattacacttttcaaatcattttctcaaaacaatttcaaaagtttctctctccttcagacatgatgtgactgctacagtaaaatgatttgactgctacagtaaacaatgtcttcactaaaaaacaaataaaatcacttcacctttcaatttttttcttcaaaaattcatttttctaacacctttaaacatgatttgactgctacagtgtattttgtctccttcaaaaatacaaacaaacattactttcattctcaaattattcccccaaaacatattttctcaaaatgaaatcaaaataagatccaaaacgcttccaaacattgcctttaagtttctcgttttcggtgtttgtgcagaaagaaagaaactacttacctacttaatccgacat

SEQ ID NO: 105969 - DNA, 451 bp, Mimulus guttatus
  Intron number 1 from transcript mgv1a020988m (locus mgv1a0 20988m.g) derived from phytozome v7.0 (chr-ID scaffold_13; pos 1587094 to 1587544)
gtgacaaaattgatcctggtttccaagcaaagaaggtcagcttccatttctgaaaaaaaaaattagaagatttaagcttttttttttttttttttttatgactcatgatatctactgtaaatctatggattaaattctctgtttatgtttattaaattaatgaatcaaaccccgtcatttttttcttcttcttcaatttgccacacacacaaaaaaaaaaaaaaagagttaattaatgaagatttttggagatcatgcagtttcaatttgatgaaatcgttattcccttatgtaaaaaaccagattaaattaccatgtttattttactgttactgtaactgttgcttagttgtggattgtaattgattatattcatgaagaaaaaaaaagaaagaattgtgattgattgttatatatatctgtgtttgatagcgggccaagataacctaca

SEQ ID NO: 105970 - DNA, 649 bp, Mimulus guttatus
  Intron number 2 from transcript mgv1a017087m (locus mgv1a0 17087m.g) derived from phytozome v7.0 (chr-ID scaffold_3; pos 3911449 to 3912097)
attggacctcaaacatctaaaatttctgtttccaggttaggtttattttatggtttaataatatgtatatatgtgcattcatagagatcttcaaattcgggatttattgttgaaggatttattgttaaaggattttatgggattgcgaaaattattctcgtgtttgttttttcctatcggcattttgattggctcgtgcgttcgttatgttcgttaagttagtttgttagtacttgtcttgggcggcgttggttgtcgttttagcgtgtgcatttgcatttgaccattatgaatctgtttttttgctgtcgaggatctatcttgcgtttgctaaaagtagttaagtagtcaactatctagacacgtgtcgattttcgttgatggaactttttaaatatgatattggctgtcgtatgtatgtgtgtgtgtgttgtgacaataagaagaagaatctgttttcggttgtcggtattagagaatctatcttccttgtgacagagcatttaaatagttcgtcaatcttggcggcgttttttatttattaggtatgattagcctttaagcatttctctgccattgcacaacttgtaacactaattatgtggttactgcagattgagattatatacaacttcgggcgggaggacaa

SEQ ID NO: 105971 - DNA, 764 bp, Mimulus guttatus
  Intron number 1 from transcript mgv1a020023m (locus mgv1a0 20023m.g) derived from phytozome v7.0 (chr-ID scaffold_154 ; pos 427686 to 428449 reverse strand)
aaaaggtacatattatttgatcaagctacttccttttacctaatgacttttttttttttttaagcaaagatataacaatttttgttgactctctagaatcattaaatctagtgttcaatcttcaacagaatagatcaaatcaagaccacaaggataaacttggtatttgacaaataatgagtcaactcagtcaaaatctacaaaaaaatctatagaattgacccaaaaaaaaaaaagtaaaataccaaaatttgatagcatgtaggaaaaatgtacaaaaaataggctcaattgttggatccataatagattggggacgaaagttcaattgttttttttctctataactttgaaaaatgactataaataagtaactatttgaacttttatattttaaataactataatatcattattgatactacttaaacttaaaaatcatttattgtaagtgactaatatattttttagggaggcaaatatacaataaatatataaatgcaaatagaaaaaagtattaagaaaaaataaaaaataaaaatatcttgcaggggcggctgccccgccaaggtatgtcttgggtccgaccctggatccatgatcgatcgacacatgtatatatggcctaaatcgaacccagtcgatgcattagccatgcacctttagtatcaacaagaattaagattaaatagctaccaactctagaaaatgtaatgtactaaaccaacttagtgtataatttgattacagtgtgttccaagtgt

SEQ ID NO: 105972 - DNA, 873 bp, Mimulus guttatus
  Intron number 2 from transcript mgv1a007892m (locus mgv1a0 07892m.g) derived from phytozome v7.0 (chr-ID scaffold_419 ; pos 45433 to 46305 reverse strand)
ttgcagaaattccccaggtgcgttcattttcttaggcgggtattttgtgttttttgatacagatcaattggtaactctgtgtgtgtgtgtgtgtgtttctctctctaagatacacgagaagaattgattggtttggcattctatctctctgtttgtttatttgattgggttataaaattgaaatgttatacattaacagctttgtatattaacttttcaacgaggccggtgtatactcagttgtccactctcagttcttaggatgggagaccttgttgagattgtatcgaatagttcttaacgataagattaacaactgatgttttgattttcatatacgagtctttcgttcgtcttttatgaatttcatctattgatgaatcctatttgaataactacattggaccacaaaacataagttctagaatttaagaccaaaattatgtcggtaaatccacttctacagtgatttgaattacttgaagaaggattttgagatgtagctgcttaacattgaatgagacaactaactgaaatataaaagggaatatgtagtctctatcaataacttacgtgataagctttatcgattgactttcgtattgatcgcaaataagtattcaactgactatatatttcttgacacgagcaattctgcagctcccttttcgaaaatatattcaacctagatataacctctgcagtttacatcaaaattattaccctttttgtagggtaaatgtctgtggtagaatttttttttgtcctcgtgtgttcatttaggaataatcattatttgatttacatgatagcaaacttttgccttttcatattgcagatttcaaatttagaagtttggttccaacgcccaaa

SEQ ID NO: 105973 - DNA, 492 bp, Mimulus guttatus
  Intron number 2 from transcript mgv1a001053m (locus mgv1a0 01053m.g) derived from phytozome v7.0 (chr-ID scaffold_13; pos 2195348 to 2195839)
cattatttgtgcaggttccatgtttctcctttctggtgtaatttacaagtcgagtatgctaattttcgacgctatgcaaattcatgatacttggctggaggccgtacattatacagtttcggattgaatttcatgaatccaagcatggacatcttatgaatgttaaactgttgttaatatttagttgtagattttcttggagttggcctacttagaggacttaggtattgtaatacttggtttaaaaattcatgattatgtactctctctctctctaggactattgcaatttttgcatagagaatttgttttgaagtatacgtgccatttttatcttcatgccgtaaaaattgttggtcttcttgaatttgattcatgattaaagattttgctattaatatttttggggttatattgatggtcagcatctattaagttccgtttgttcttattttaattttttgttgcatgatattgctacagctttgttta

SEQ ID NO: 105974 - DNA, 828 bp, Mimulus guttatus
  Intron number 2 from transcript mgv1a017360m (locus mgv1a0 17360m.g) derived from phytozome v7.0 (chr-ID scaffold_5; pos 1649843 to 1650670)
tccatccaggttttttttttctttacagatttactgttatgttaattttattatgctgaaaaaaaaaattaatctgaattttttgatgatttcgtgttaatttatgttaatatatatttatttgtatgtagtaattatttgattgggaaaactcttgacctaaaatctgatgtttagggctagacagaaatctggtgttcttgttgagtaattcttctcttttaaggttttgttgatggtactgaattttgtcagaatctgacaacctttttcttttcttacttgtctgagtttttatttatttatttatttcttcttattaataaatttcttctagtttgaacttttcttttgtaatccgtatggaatcaacttgatcggtgcttatatattacaagttgtgattggatttagcctttgatctgaccgtgtttgatgacatatgctgtgaatatcgattttgagtatcttatcttcctttgagttgtaacaaagccagaaccattaaatttgatcgatcgattgttacataagctttgagaaccattaaatttgagaaataataatcgtaaaacaaaatgattattatttctcaagaacctaataattattaaaaaattgttattttcaaacttttagtgtatatttggccctgctgaatcttgttgttgtttgtttgatatcaatcaatgcttaatttgcgcgtgttctattcttgtgctaacgtgttttcggttgtatgtgtaaattgtaaagctaactaatttttttattattattattattaattgtttattttctggttcgaaattgcagtgcaagatttgc

SEQ ID NO: 105975 - DNA, 555 bp, Mimulus guttatus
  Intron number 3 from transcript mgv1a006467m (locus mgv1a0 06467m.g) derived from phytozome v7.0 (chr-ID scaffold_13; pos 44595 to 45149)
tcatatatcaggtaccttcaaaattattcctggtaatttctacaatagctagttagaacttttttgtcggatttttcatcggtactttatattcctttgtgatgatttaaatatgattgatgactccaaaccatgatctttttatggtataataatctcgattgctgtaatacttggccgtattttgaaattctaacatagacttgtacttatattttctttctcgcttgtagtatagaattcgattggtcgaactacaaatttgtgttccagaaaaatatcatccatctgtattttcatcttcatcgctccaggttacaaacattttgaaatacgtctaactgaggaatgatgcttgttttaattttcatctgttgatatgtgaatgttcccacttaatacttcaatactcgagaagttttttctttatcggaaatattgctgaatttttttgatttctcgatccctccctgacactaatgggaatgatactttccttgacattacacattgttatgaaccagtttgctccactcgatataccgtccactgtgg

SEQ ID NO: 105976 - DNA, 703 bp, Mimulus guttatus
  Intron number 1 from transcript mgv1a002160m (locus mgv1a0 02160m.g) derived from phytozome v7.0 (chr-ID scaffold_8; pos 2175742 to 2176444 reverse strand)
cttccagtaagtaaataagttcaaaaattatcatcaataatttattgaatttaatctttcatatatatatatatatatatatatatatatatatatatatatatatatatatatttttttttttttttaaattttctttttattcttaaaagggtgaaaagataaagataaacaaatttacattgatagctgaaaacaccccacttgatgcaatcaaagaaattctgcggaacggacatcctatcattggtttcatacaagcatcttacgacttagaaaatcattctggagaggtaaataaatagatatgatattcaatataattatgcttcatgcaacagattattaaggtatacatttatttatttttgtagggcgtatttaaaatcaaaccttcaagtggacaagataattttcacatggtggcagtcatgggtattggtgttgacagttgtggggatctttactataacatccaaaattcttggggtattgagtgggcaaatggtggttgtgcaaaggtgttgtgcactttggtacacctggcaggttatgtggaaggagcccatattgaggtatgctatgtagttgattttcttccatcttagtttttgtttattttttgttctctaaatttttattgcggtttgcataaatggcgggaaaagggcgaaggtccggcaatcgggattaattgggggac

SEQ ID NO: 105977 - DNA, 360 bp, Mimulus guttatus
  Intron number 1 from transcript mgv1a009179m (locus mgv1a0 09179m.g) derived from phytozome v7.0 (chr-ID scaffold_106 ; pos 640697 to 641056 reverse strand)
tttccgtttgctgctcagctttcgacacaaaaaaggtaccttttttttatgacatattttgttgtgttttttcatgtattttgattgattagattcagacatgtaacttaatttaatttaattatttgatttttcagaatgttttatgtttttcaataatttcaatttctcttcagaaattgcttgtttcgagatgcatgtgtagttaattcggttgattaatcttacgcgagtaatcggaatttgaagaattttcagttattcggagaattatttgaaatcatgtgttggaatttagaactcatattagcttttcttgccctaatactatcaaggttgtgattgtgcggctgtgttact

SEQ ID NO: 105978 - DNA, 412 bp, Mimulus guttatus
  Intron number 4 from transcript mgv1a014250m (locus mgv1a0 14250m.g) derived from phytozome v7.0 (chr-ID scaffold_169 ; pos 336400 to 336811)
aaagtcgggactattctacgcttcgttgtcaaaaggtgaaatactgctttcccttttgtatacgtactgcaatttctcgatcctttttctttgctggtgaactttactatgataaattggttttcaagtgataaatttatgtatttgcacgttacgttagattaatagatgattacgagtgaaaataatcgtttcgaactaatgcatgattgatcttatgcttggacaattgttggcaaagagaatgtttgttttgaagtgaatcgatattatcgagcgctacactttgaattccgacattgttagttaatttcagtttttttaaatgatatgttatagtttttgtgaaaactcactttccgacgttcttgttctagcttcgacgaaggtatacttcacatagtgggatcaa

SEQ ID NO: 105979 - DNA, 546 bp, Mimulus guttatus
  Intron number 1 from transcript mgv1a008129m (locus mgv1a0 08129m.g) derived from phytozome v7.0 (chr-ID scaffold_139 ; pos 74474 to 75019 reverse strand)
caaattctccaaccgcttcaaaacccagcagaaaagttagtacctttttattttttattttttaaactcatatttatttttaatttattaaattttcttgaaaacccagttgagaaattaaaagtactgggtataagtatatctgtgcatctggctattttctttgtggtccttatttctgccattattactctgtcatagtgaacttaaattttcgggggttcggggcagtgccaatgaaaatttttttaggacttttttgtgacaaaaataggaaataggaaaagaaaaaaaatgaagagcatttttttttgcagtaatttggattttgggtagactatttaataaaaaatggatttttttttttgttttttttgcattaatgtatattttgggtgggcttattaataaaaattgggtgggctaaattgatatatatgggtatgaaaattgttattattttctttatttatttatttatttattattatattttttttgttgcatttgattatttgtgtctctttaatctattagggattcacc

SEQ ID NO: 105980 - DNA, 906 bp, Mimulus guttatus
  Intron number 2 from transcript mgv1a001283m (locus mgv1a0 01283m.g) derived from phytozome v7.0 (chr-ID scaffold_1; pos 4764379 to 4765284)
tgcagcttgtgcttggaaggaagaaaggtgcggcattgtttttctttgaccttcgttactctttaacttaatcttttttctcagttctattcttttatagggaactatcattcatttcgatactcatacttttcatgttctaacaccagtgatatgatatttctgcttaggagtcttttaagaaggtttagatgtaaatttacttcttggcgtcttaatgattcatcttggctggaatgtattgccagatgtgaaatgaaacatattctcaataatagcctgtgagtctggaacttattgtgttttgagttgcacattcactcactgaagcaaaaaatgtatatctgcttggttgttcacagcctcatttgacaaatttgtcagtagtttgagacttacttcctcagttatactgatgaggggtagagtagcctcgtagatagtttgcttcaccatagaagttatttagttagagcttatgatcatgattctgcagctgcagaagccatggccttaaatctcgcttttggtttcatgaacacgataatagtggataaggtcatcttccaaaatgattttttgcattattctagttaaatcgcgtgtcaataagatttattggtcaacaattgttcaaagaaggttttggagcaaacggttgaggtggttctgtaaaattcatagtaactgcaatacgaccgctcgtaataatgataaatgttggttttatcccctttcttgtttcttggtggatgagcttgtcgatgaaggcattctaggttggatttactgatctaaaaacaaagtggctatctaaaactaataaggatggcttattagtcttgtgatacggttctagtggatgcaacaatctgacagaatgttctttgattctcaggttttcat

SEQ ID NO: 105981 - DNA, 902 bp, Mimulus guttatus
  Intron number 1 from transcript mgv1a010963m (locus mgv1a0 10963m.g) derived from phytozome v7.0 (chr-ID scaffold_11; pos 305016 to 305917 reverse strand)
tctctctccatctccaactgagttccttcaatcaggtattttttcgtcattgagttaaccagatcatgccgaggacgacgtttatttgatttgtttcatgtttttttttggctctcgtgacgtgatcggtgaaatccgtggagtaatttctgttcgtctttcaaatgatcgagaatgtatgtttatgtgaaccgaaatatttgctggtttgagtttctatagtcgccggtgcttttgaattccaagggttttgttgttggttcatgtcacgggttagatctggtggtgaaattggcgaggaactcgtaattgcttgtttttcgttgttgagttttgtgttttgtgttaatgttactgcatatatgaccgcattttgaggaaattttgttagggtttatagtgcgatgcagaaactgagctgataagggtttataggaaaatgtcaactcattttgattgtttgtcgtcgtgttagatgattttcccccctattttaatgtgccgtgattttggttcttcgttggaagctgactgtttaaccatttatatatttaaataatttatttgcttcactatccgaggcatcttctgttggaattttaaagttttgcacccaaaacctggtcgttgcagttactctttaactcactatgcaggaatgtataagtacctaaaatcagctatctcttgctaaatgaatctatttcagcatttttacgttttaatatatttagcttagcttccgtcaatcgattttgtttatgaaatatgcaccgaaatgtaggttggattactatcgagctcgagctcgttttgtactgttattctctcttctcatttttgtatgtacctgtttaaatgagattccattatcgcattacttaaactattttctggtagga

SEQ ID NO: 105982 - DNA, 972 bp, Mimulus guttatus
  Intron number 1 from transcript mgv1a014036m (locus mgv1a0 14036m.g) derived from phytozome v7.0 (chr-ID scaffold_91; pos 664035 to 665006)
gcgtcgagtttgagatcgacaagatccctgggtttgccccctaatctctctctctctctaaaactctctctctctctctctctctgattttgcaattcggtgttatttcaatttgctgtttggttgcttgtcgattttggttgaatccacgacgaattaaatcaatcaatattggataactgttgttgatatggaaatcagaataaaccctctgttatgatcagagattacataactaacataattttgttgaacacaaaatataacttcatcctgtttttcatttttttttttgttggtttatttgactcacttcaatggcttcattggataataaattccaactatttgcctctaattgaagaaggtggaactgttgttacttctcgtcgaatctttaacaattacaacaattatatatctatgctccaggcttgtagcgtagtatttaccaataattcgtagattttccgctaatgatcaataaatttgggtgtgtcctgttaatgttaattccaatatgatcatccttctagtgctcttcttgatgcctcgatagtttgtcgaaactgttgcgcagtttatctattctgtcggacgtctttgaagctaaatttcaggctttatcgtccgtatttaatgttttcttttacatgatatatattattttgattaggaatcggattttgacttttcatttatttttgaaggtaaaaagtcgatacaaaataaaaatgtgttcaataattcattattattcttattttcctctttttttctcaactaccgaacaaaattagtgaaattgattttccataaaatcattttcgttactatttttattaagaacccgttttctttttcctcatttcgaaatccatgaaccaaacgaagcctataagcaatatattgtacactgataatcgtaaatgggttttttcgtgttttacacactcaggaatcaaggtggga

SEQ ID NO: 105983 - DNA, 725 bp, Mimulus guttatus
  Intron number 1 from transcript mgv1a003512m (locus mgv1a0 03512m.g) derived from phytozome v7.0 (chr-ID scaffold_126 ; pos 48689 to 49413 reverse strand)
cctggtgagtacattgtctctgtgtttcaatgtgtgtttttaaaattgattatttttttttttttgaaaaaaataaataaatgtatcttgatttcttaaaatgtgaattcaatctgtaaaataatatattctcttgtaaatgaatcgagttcgaacgtagtttgttcaaggttgtttgattttatcgagtttttggagttgtgtttgagtttggattgatacgaaatcgagtcgaagtcgaaaagccacacacgaattgagctagagtggcttgatttttcaattttttagtatattttatgatatttttttttctaatcgataaagagttggattcgatcgtcatgtttgagcttcataaaatatttgttcaaacttggtttgtatgataacaaaccgagctcaaatcgagttcctaatgaacgatctcgaatcgagtaccgagtagatcgatttgatcttcgactgaatgtgaaactgcagagatgtatttttctacaaatggaattcattcaatttgtagttatgataatcgaagaatcgttctgtttcttactcttattttgcttggtgtgatatgatagtgattcataaataatgtgctgcattaaagtgtattagttcatatttgcagtaattaggttctttctattagtttcagcttctagaagattctagaactttaacttatctcaatttcccgtatttgcagctcacacaggatc

SEQ ID NO: 105984 - DNA, 459 bp, Mimulus guttatus
  Intron number 2 from transcript mgv1a001960m (locus mgv1a0 01960m.g) derived from phytozome v7.0 (chr-ID scaffold_24; pos 940573 to 941031 reverse strand)
gcttctatcaaggtaattggaagggcaaattacggtcacccctgaggtatggccaaattatgaaaaaaaccatcttgcttgggtaattacagtcacccctccttttaaatatttttacataatttttttgtaattcggttatttaccgaatcaaatcgtatattcagttcggtaaacagtttgaaatgttgtcgtaccgaaatttcggttcggttttaccgatttgacatccctaaaatttacctctgaaggaattttttcgtaagataatacatagttgatgggtggttataattaccaaacagaagaggggttttcgtaatttgaccataactcaggggtggccgtaatttgccctaattggaatgatcctacctcaatagcttactgccttaattctttctccttaattttttattaagttttttttatctgcctgtgcagaaactgtaccaagaa

SEQ ID NO: 105985 - DNA, 795 bp, Mimulus guttatus
  Intron number 3 from transcript mgv1a001988m (locus mgv1a0 01988m.g) derived from phytozome v7.0 (chr-ID scaffold_242 ; pos 299419 to 300213 reverse strand)
ccgtttggctacgggtatatccagtttcttgacacgtaagcgatcttgtcctgcaaacttagcttttttcatctctcatagtttatctatttttatcttgtagttcttacgcccgttgagttttttctttagctgaatgtggactttctgaaggtgcaaaatgtaaatatgtttaatcttacatgaatttattagtgaaaagtgaaaaaaggaataatatgctattgcattggcttgctagacgtatcttacaacttttgatatttggtttctctttaatgttcttgttctaattcatgattttagagcccgtttggctaagcttattttaaataaccgacaagctcttgcatctgataagttgttttaagagttgataagctgttacgtcttatttttaaaattaatttgtgaagtctttggataataagcttataagttgtttttactgtttttaagatcttaaacaaaaagtggagtataggtactttaaaaaaatatcttataagctttttataagctctccaacagcttactttttgaatatttaggctctttcggaaagaaatttgccaaatactttggaagagcttataagttcttaaacatctcaaaagatgcttttaatagcttataagcttagccaagtaccctcttagctttggaacttgcatcacgagttcatgacattagtcaacgaatagctttgtttgagcttctaacttttggccaactgttcgtgacttctaatacttcaaaattttgtgttttgattagagctgttgcagctgaagt

SEQ ID NO: 105986 - DNA, 358 bp, Mimulus guttatus
  Intron number 4 from transcript mgv1a017929m (locus mgv1a0 17929m.g) derived from phytozome v7.0 (chr-ID scaffold_45; pos 1496688 to 1497045)
tttccaagcatattcgcgagtactttctcagccatgtaagaagtctttgtaggcaaacgctgcttagttaacgagaaaaattgacggacaatacttccgttcattactcaccgtatagtaatgtgttctttgattccgacgatagcagaacctgtttgttatggacaatttgtttagaagctctctttttcattatctatttattttgttaaacaggttcggatttcgtctttaatcgtttgaaaaaatttattgaagagatagcgtgtgtatatttctagatattccatgcttttgtacgattattatcaagactcgtttagattgttctgagaattggttcttgtgcgtgcaggtt

SEQ ID NO: 105987 - DNA, 595 bp, Mimulus guttatus
  Intron number 3 from transcript mgv1a026089m (locus mgv1a0 26089m.g) derived from phytozome v7.0 (chr-ID scaffold_308 ; pos 202245 to 202839 reverse strand)
ttgccggtttgttagtagctgcaagtccggtgcaggtaatcgtttcccgcttttattcttaataatcaattttttttaatacaaatatgattgggcaaattacggctacccccctgagttatggttaaattacgaaaaacacccctcatgttcgggtaacctatagccaacccctcaattatgtattatcttacttaaagacccctccagaggtaaatttagggacgttaattcggtaaaaccaaaccgaaatttcggttcgccatcatttcataccgtttaccgaacttaatatacgatttggtttggtaaataaccgaattacataaattttatgtaaaatatttaaaaggagggggtgactgtaattacccaaacaagatgagttttttcgtaatttggccatacctcagggtgaccgtaatttgcccagtatgatttgattatatatatatatatatatatatatatatatatatatatatatatatatatatatatatatatatatatatttgatttcttcaacatgttaaatgtgttttcttgtgaactgccagattgtggtgggaagttttctagcgggtaaccagca

SEQ ID NO: 105988 - DNA, 977 bp, Mimulus guttatus
  Intron number 1 from transcript mgv1a001359m (locus mgv1a0 01359m.g) derived from phytozome v7.0 (chr-ID scaffold_13; pos 364779 to 365755)
ggggaaagagggtatgcttacaattctaatttatttatttttgcattattttgttgtggttattattggttttatttacctgttcttatgcttgttattactatactaccatgattgatattgttagatcgatattactggtatcgttaatcgttattgaactttaatttgttttctgcatgccgaagttttttccgtatatatatcttatacctgcatcattgtaggaagaaaaatgggcagttagtgcaatttttggtaccattcatatttaaaaaagtaatttattagtgtttcatctctgtaacggggagatgagaggtgcagggagaggatgtcagggaaggctctatagactctttttcctttcatcctcttcctgaaataaggaaagaatctcatcccactttccaaataagtagagtagtgctcagtgagctactcacaagaatactcatgtttttctcgctcaaaatctaagaaaacataaaacagtagctattgtagattaatatatttgcctggaaatttttttcatgctctggctgtaatttcagatttatcaggaattgaatagtgcacctgccattaagctaattcaatggctatggaatggaatgcagtgatttataacatattgagcatataactagcatttttgtttggaatccgaacagtgatgcttgatgcctagtcccacaagtttttcatccgttgagaaaggggaaatgaacatatcacgtaaatagatttcatagaagcaggggtctcattgaaattcttgtatagagtccagattaagatatctttctcctaatttttatagtaaatactcttatcttaatattactgattataaactattttaatcgcatatttgtcttcttgtatatgactttttatttatgatttcttttcatggctctcaactgataattacatcatctagggattcccactacgtggaaccataacag

SEQ ID NO: 105989 - DNA, 668 bp, Mimulus guttatus; identical to SEQ ID NO: 103046
  Intron number 2 from transcript mgv1a005111m (locus mgv1a0 05111m.g) derived from phytozome v7.0 (chr-ID scaffold_15; pos 486305 to 486972 reverse strand)

SEQ ID NO: 105990 - DNA, 681 bp, Mimulus guttatus
  Intron number 1 from transcript mgv1a000865m (locus mgv1a0 00865m.g) derived from phytozome v7.0 (chr-ID scaffold_51; pos 405051 to 405731 reverse strand)
aaggtatccttctttcttctctgtgttcatttaattttctgaactctgcgttaatggtgcgttatcattttatttgaatttggggggtttgtcataattccattgtgggtattgacctctgagattctattctccttgtggagaatgtgacttttggccttttcttattttttattttctctttatttgttgatttatatttttgcactttatggtaaattgagatttatgagtttaaagctgtgatgaagatactgtctattttttctcatggtgaatgatgagagataaagtttttgatcccctctctctctctaaaatccatcttcgctctctttaattgattccttgatttcaattaagttttcatcattagttagtagctagaattgatctctctgatttggggaaaaatgagtgttgttatttgcatgtctgctgttaattttgttcattacccccctattagtttctctcttaacagatttataatgattataacctaattagcagccattgtcgcctttgctgcatttccctaatttctaacgagaagtcgattattttattatggaaaatccactgttaatttgtttgcctgtatttacgttcacatatgaagtatatattcttctattcgaactgatgtaacagaattattgtgtaacaggaaaatcgttg

SEQ ID NO: 105991 - DNA, 716 bp, Mimulus guttatus
  Intron number 1 from transcript mgv1a016973m (locus mgv1a0 16973m.g) derived from phytozome v7.0 (chr-ID scaffold_8; pos 1920359 to 1921074)
tcgatttcatccacattgtattgtatgtgctgcacaaacatacataacaacacataaacatgcgtacaccgtaagaagaaccacttaataatcattaaaagtaaacaaaaaaaaattacgagaaaaaaaaaagacctgtcttttgttgaacacatcaattgccatttgtgcataacctttgagcctcagcatttctacgggattacagaaatcggttgaatctcgatcatacgttagcttggcatcataacaaaaacaaaagtccctgataatcgagttccttatatccacatgtacccgtttcagcatctcttcaaattccttctcctcttccaatttcttcatcgatttcagtttcttctcttcttccaatttcgtttcctcttcttccaatttcttcatcgactccaatttcgtatcctcttcttccaatttcttcattgattccaatttcttctcctcttccaatttcttcactgattccaatttcttctcctcctcttccaatttcttcatcgattccaatttcgtatcctcttccaatttcttctcttcttccaatttcttctcctctcccaatttcatcatcgattccaatttcttttgctcctcttgcaatttcatcatcgattccaatttcttttgctcctcttccaatttcttcatcgattgattgacgaggtcgagtatcatattgattctcgccgtgcgcttgt

SEQ ID NO: 105992 - DNA, 880 bp, Mimulus guttatus
  Intron number 1 from transcript mgv1a010924m (locus mgv1a0 10924m.g) derived from phytozome v7.0 (chr-ID scaffold_39; pos 313552 to 314431)
aaagagattctctatacaagaaagagttttctcttgtaagtctctcctcagttttttttattttattttctgcgagtccatatattaaattttgctagataagctttccttttagagttatcaaaattcttgatttttatagcaactgcatttgttgtaagatcttgtgcagtaaacatgttttggagatctactccacatgagctgcattaatgtcttccaactcatctcttgcatccttcattctgatgttaaaaatggctgccgattccagcagttttacagataactaaacagtttttggctaccagcagttctcaacttttttgcttccaattttgtcctaccccttgtttctttttcctcgatatcctttttagcagcagttttaagttttttttccttgatttttttttgcatgcactttcacaagctaatgtagtccatttccgtctgtatttattttttcaaaaccctacagatgtatgtttatggctactcgataaaactcattctgtctccataatcgcagatctacttcctttaatttgtttccaatttcttttaaccctttgtttctttttcctcgatctccttctttagcaccagttttatgttttttgcttttcgattttgttcaacctttttactttttcctttttttccttgatttcctgttttgacttgttctttttctgttttgctaatatttgcatgcaccttcacagactaatgcagtctaattctatccatatttatatgtttatggcaactccataaaactcataccgcctccgtaatcgaagatctactttctttaatttattttactttgcgattttttaaatgtccaatttctgttttagcaggctttatcacc

SEQ ID NO: 105993 - DNA, 821 bp, Mimulus guttatus
  Intron number 2 from transcript mgv1a005806m (locus mgv1a0 05806m.g) derived from phytozome v7.0 (chr-ID scaffold_64; pos 481168 to 481988)
actacctctgctttcagactccgccgtcaaccagggtatatctaacattttgcaccgtatattgttctcattgtggatttaatttggggtttcttgcaacgtgtattctacttctgattttatttggagttttttgcagcgtgtattgttgttcttgtgaatttatatttggtttatgtgtgggcatgttggatactacggtgaatagtagttcttgtattcggattgagttattttttattctctttttgaagattcaagaatatttgacggggatcgagtgataggtggaataacacagtaattatgaatgagtattgagtaggaacactatcatctcgagttgtattttggtttagaggttgtgccttgattgttggtagaaaactttggctgcatcagtttcgtcctatgtgctcctcatttgcttactgtttctttgatgattttttcttcgagtgctcactcatttgttattgtgtttatttacttctgtttgattcttgattttgtgacattaaagttttgaagagttaattttacagtttctctgtcaatcgagttccaaggttaatagaaaagtgatattgtttgaattgtgaaacaccaaaataaatttggaagtaataattgggaaactaatccaactatggaaggtcaccggtaagctctgatcatattctggtgtcagactgtttgggaactttaattgagtgccacactgcattgcttctttaattgttaaacgatgttattggattttgaggttcttattgttgcttctttactttacagctgggaagcaaatagttgtggatatc

SEQ ID NO: 105994 - DNA, 868 bp, Mimulus guttatus
  Intron number 1 from transcript mgv1a019698m (locus mgv1a0 19698m.g) derived from phytozome v7.0 (chr-ID scaffold_4; pos 1361365 to 1362232)
ctcggagaaggtacaacaatatgtgaaatattgaaattggcttctctttcttaatttgttgatagcggaaccaattcttgttactagagggtaaatgtcaataactcaatatatctctgtggccttagttggcattctataggatgactaaatttatttttactgactaaatagtttttttttttaaattgtatctgtttcgttttgattatacgaatgttatgcaggcatacttcctgacagcttcagctttggaagcattctgagagccgttgctggaaaaaacgggctcgtgaaagtcgatactattcatggatatattctgcgatatggttttggatcccacatttttttaactggatcattaatcgacgcctacgtaaaatgtggaagcttggacagtgcaaacgaggtatacaacaacacccagaacaaagacgtagtatcgatcactgcactgatctcagggtatgcttgtgaagatacaaaccactctaaagcccttcaactcttcaacgaagcacaaaagaatatggcaatcgatggcatgttactgtgttccatgttaaacatatgtgccaaaacatcgtcgttgaatcttgggaaacaattacatgctaacgcggttaaataccaaaaccagcacgatatcgctataggcaatgcgctgatcgacatgtactccaaatcgggagtaatcggagacgctaaacgggttttcgatgacatggcggagaaaaatattatttcgtggacttcgttgattacgggttacgggaaaaacgggtgcggcgacgaagcagttgcactctgtgtagagatggaaaataaagggttgaagccaaacggcgtgactcttttgtctatt

SEQ ID NO: 105995 - DNA, 988 bp, Mimulus guttatus
  Intron number 2 from transcript mgv1a013943m (locus mgv1a0 13943m.g) derived from phytozome v7.0 (chr-ID scaffold_22; pos 879979 to 880966)
aagacggtataaaaaacactaattattcctttttttttttttttgtttaaaatcatactagcgattgcagctgttccgattttgtgatttgtgtggtttttttttttttaattttgtacgatatttagtgtctggtttgattatttcgtaattagggtttctggatttgattattttcttggcatatgttcatcgttgagcttaatttgtggaggagattgtagaattggatattgatttgtttagtgcgtggaaatgcaagcgtttgaaaaaaacaaattctctgtgggttttttttcgtgaggggaattaaatatgttgtatgatggttcaatttctgttttttttttctagcttcggaattatttccggagaatttcacaaatgcgtgcaattcgtttcggatcatagatgtttgcggcttctgattacttgtatatagtcatgtatctatataatatgtggtatgatcttcttgctgtgtttaaatcactgttttttgaggtgcttatgtttattgatttcccactgtcacatgctcacagctgcgcaattatttctggagaattgagtacaaatttgcgcaattcgttttttatcatatacagtacagtgcattactcatattgagatatgtatctaatctttttaacatctggactctgttttctgcttcaaatattggtagtttatagtttccaaatccgaaaaaacgattggttgattcgattaccattatagggtacctctttttttttattacaattcagtcacgtgcttgctcaaattgtccgacttggctatttactgaatattctagttagctcataaaccgatatttcatgcaactcattatttacattcatctaaaagtttgttctatgctcatttcctgcaattctttcgtcatatataggtgctgatttttaatttctatcgtataaatggaaaatgccaaatttacctaaattgaataggtttcgacgat

SEQ ID NO: 105996 - DNA, 576 bp, Mimulus guttatus
  Intron number 2 from transcript mgv1a009366m (locus mgv1a0 09366m.g) derived from phytozome v7.0 (chr-ID scaffold_20; pos 1872901 to 1873476)
ccgcttgccgattccaccaactccgcctctaaaaggtccgtcggtgtttgtatttgtatcaattttgtcttcttaattaaatatcgtgatttaatcgcttgttagttatgtgctatccttaattttgttttttgaatttaattgaatttttaactcataagtttctttaatgggggatttaggatcgggggttaataagacagtttcatccgtgaataataaaatttagggttccagttctgaacattaaggattttacttgtaaaaatatgtttccgattggggtaactacatgaaattttgaaaacaaatagaaaaaactcgaggtgccaaattcgaaaaatcaatgtgtgaactagagtgtagggggaaagatgaaaaaaatggaaatcatttgtctataatgccctcaattcacgaattcaatccgtaaaagtatcgacaggatattatattctttctgcagtatatatattacccattttacgatgcttttaaaatagtataattacttatttcgatggggtatgtttatttttaggggaagggctgcatcatctgtaagtaagagtgtga

SEQ ID NO: 105997 - DNA, 787 bp, Mimulus guttatus
  Intron number 2 from transcript mgv1a006882m (locus mgv1a0 06882m.g) derived from phytozome v7.0 (chr-ID scaffold_2; pos 756804 to 757590 reverse strand)
gctaaagaaacttttgagaagtaagtttttcagtctccctctttcacttgtgcagaaaaaaagatattaaatctataccaaatcaattttatttgtagacttgcgtttttctcacgaggcaaaagggccatcgaaattaaattaatttcagggctacaacgttatggattttaagaacgtatacacgagttgctcaagtaatgaactatgcattctcacccgaacatgttaggaaaatttaattttaaatgtgtaattttctcgggggtttcgacttgaaattgcctttagttataatcaattaactgcaattgccttgttggtggaggttgtgggggaaggtgagtggaggttgtgtggagcaaataaaaggtaaaagccaccagaaagcaaatttttgtaaccaggtggtcgatctagatggaagtgacagtttgttttctgcatttttttttgcagacattagatgaatggtcacatactttttcacgtgacttcagacgacgaataatgattttgatatttatacatttatgaaaatattgttgatggaaatatccatttattttggttttaaagatttcattaactatttggtttgtaaaattcatcaaaccattacatttggaatatacctgcctctgtaaaatgagatttattcacatttctctgtttgtgatacttgggaggaactattaatgcatttcttttatgttcatacattacaaaggatctctctcttatttattttgaaacatgagaaataacatttaacctcttctcaggg

SEQ ID NO: 105998 - DNA, 636 bp, Mimulus guttatus
  Intron number 2 from transcript mgv1a016446m (locus mgv1a0 16446m.g) derived from phytozome v7.0 (chr-ID scaffold_3; pos 4137508 to 4138143 reverse strand)
ttaaggtatacttttttcttgcattacaaacatgacttgcgtaaatacagtataactgtatatgttgcaactaagcatatattaactgtatatgaatcgtcttcttgacttacaatgcattattcaatccaattttatatccgacaatacatacgatgagagctatgtcaatgtaaatataagccaactcgatttgttatgctacagcatgaaatagattgaattggcttctttagcattggccaatgcatatctaacagtgataactagcctttatatctattgtgttttttccttagttgccttagtttttgctgatgtggcacttaacactactttgaactataaaagcaatcgtgttgtctcgtccattctgatttagtccttatcttgaatgatcccatatgattcttgatctatgattacatggcaatgaggctcagtcgaagtctttatctggtattggtattagatacatattatcgggtgattacattagttgtttgattgatcctctaacatctggtcttgaacttttcagactcgaaattacaattaaaatggctaattttttttattttttatttttgattatgattaggaagttggtttgaaaggtctgaatagcaaaaggca

SEQ ID NO: 105999 - DNA, 432 bp, Mimulus guttatus
  Intron number 1 from transcript mgv1a004917m (locus mgv1a0 04917m.g) derived from phytozome v7.0 (chr-ID scaffold_178 ; pos 211997 to 212428 reverse strand)
gaggtaaaatcatttttttcgaatcttcttcttttgtgctctgtgttgtgcacttcattttaaatgtgtggccgatagccgattgattattaagtatccttaggccccgtttggttggcgagataagattaaatagtctaatgaaacccaattatttgatttgagctcgcgacgtccaacaaagaaaaacacattcgaaggcaagataagccacgattacataattttggcgggcaatatattggagataccaaacatcaaattaggtccaactacttagttaatcttggcttatcttggcaaccaaacggggccttagaattgaaattaatgaaaagatactttcttcgtcgagatttgattagaagttggattaatcggtttttttccgtgccaggtttttagttggagaaggaaacaattggactattc

SEQ ID NO: 106000 - DNA, 941 bp, Mimulus guttatus
  Intron number 4 from transcript mgv1a006013m (locus mgv1a0 06013m.g) derived from phytozome v7.0 (chr-ID scaffold_65; pos 1203359 to 1204299 reverse strand)
ctgcaggattgggtatatttttgtttgatgtttttgtatttgcgttaacgatgtttagatatatatggtcttgcctgtagtatggttgtctttcgaattttcttctataagttcgagtgaagtgtttcatgaaggcataaacaaggagtgctacttcttttcaagagcattagtaaaacaaactttgtcggcaagaatgtttagatatgtgcaaattttaacttttgtgacaatgaaaaaaattatgatcatttatctttgttattttgcacaagggttgtctattattgtcaatatactcgtttaatttttttttgttacaagaaattagagaacggttcgatgggtagagaaaatttccagtctttatgagtatacgaatgacaagtcgtatgctaagaccaacttcaatcaagttctgtcattttaagaacttttgattttgatatcctatgtcgataagaaatgtcgaacttcaacagagggacgtccattttgtttatgtgatagttttcgtccctaggctatcgtacccaatcttttcatttgtgcccttttctcaaccagttggagtgttggtattctctttcataaaattttgctcaaagtaatttcccttgttcaaacgtgttctccttcagtccttctggatataaatcaggcttccgaattatctttttgtcgatttcacaacagaagccacatcttacatagatcaattagaagttaaacaaaatcgtgaaccctttctatgaaaaggctgtatcctgatttccttattgttgaatgatctgaatttgactccgaaacattttcaccaaataattttctggaactagctgtgttttccctctctttttccacagttcgagtcaaaattttgatggtttacatcatttcttgcaggagatattgagttgttaaaattcttactgaccaag

SEQ ID NO: 106001 - DNA, 551 bp, Mimulus guttatus
  Intron number 4 from transcript mgv1a004334m (locus mgv1a0 04334m.g) derived from phytozome v7.0 (chr-ID scaffold_4; pos 4042785 to 4043335)
gtgaccgcacaaattttttcgcagattcaactaaggtgctctttctttatcagttatttcaactgtcagagttttgtgatttttctttattatgtagacaaaccttgcaaactgcttttgaacaaaactctgtatcttaactttgagaattaatgttatttattcgttttatcaacatagattgctctcatatataaccatatttttaaaatgtactctgtcaagcaagttccgccggagagtaacatgactatcattcatacaagaaactctaaaagaaaagcattatttcctgtagcatatagcttccggtctacacagagacactagatcaagttattttttttatcaacttccaatttttcactttgtaagtaacaaccagtgtagttcaaatcaaatagggccaataataccttctcacatacagtaactactatcttttcatttcatcatttactctgtctgcatatacctaactaatttccttttttttttcttttccttgtcggacagagctacaaccgtgatctgttcctttttctgtacgc

SEQ ID NO: 106002 - DNA, 571 bp, Mimulus guttatus
  Intron number 1 from transcript mgv1a017425m (locus mgv1a0 17425m.g) derived from phytozome v7.0 (chr-ID scaffold_60; pos 768211 to 768781)
cggttttgcccctgctcctgccccaactagtgacggtatgtttttctttcttttatttaattacaattacaatttgtctttactttatttagaaaaaaaaatcatggaaatgctgtttcttgaatgttacgtttttattattgttttctttcaatattttttatcgatattcttcgagctactaatattaaatgaatatatatttcagcaacactttaagtttatagttcagatgatcgttcaacatagtattatcaaattcaggtctattcaaatatttcaactgcaaatttcactaataactgaagttttttttttgttgaggtcgtcattccacgctgcaaagtgttattttagcataaattaaattaaattaaaacataaatcgtcctcgactttggtttggactacgcgttgattaaaaaatccccctcgttttattttgaattgctaaataaacttttatattgtttcgaatatatatatatatatatatatataaaggtgtataatttagtatggaatggcataaacagggacaacaattgaccagggcattgcgtgtgggctg

SEQ ID NO: 106003 - DNA, 974 bp, Mimulus guttatus
  Intron number 1 from transcript mgv1a000176m (locus mgv1a0 00176m.g) derived from phytozome v7.0 (chr-ID scaffold_60; pos 955061 to 956034)
gctccatcatctggtggaaccttgtttcctctcccggaaaatcggtaatactagttccactgattcctctaacctgttatactaataattccacaaggaaaattgtcaaatcagcttttccatttactcgtacatacatttctttctcatttgattatatgaatgcgcttagtttctatatcactgacttaatttatagtgttctcggttccgtaagatttaacatgtataatattgccgaagtttatgcaatttttacttcaattgcgtttgatctcaattgaatgtgttttggctgttgatttaaatacgtttggcttatcagtagacatgtaatggtgagaatgtgcttttcttttctcttctcccatttaggatatgtagtcgagtggaggtttattctatgctatatctagtgaatttcactgtaagatctcaccataaagaactgccgattttgtgtgattgtatggggacgaatggtgtaaaatagccccatgtattatgaaattgaagctttgaaatgaaatgaaacgttcttccatccattatgtatctctttgtatgactggtttagcctttcagatagttgttggatgttgattaagtaataggatctatgtggaataattcatgctaatcagcttagtgatacaattagagggtttaggtgtttagtttaaacttaacatgtccaaatcatgggggtgaattactgttctctcgaatgaaacttttgtcatttctacacattagcctccatgttgaagctgcagaaatttactaagactagcaatctttagaatattttgagatcatgaaccatagattctttatttcaaacacttgcaaaccaaacagggctttgaagtacttaaatatatgtactcaactgtcattttacttttgtgcttcagtgaccagtgaacacagtttttatatcattattaaaatgcatgtttgttgatcaggaa

SEQ ID NO: 106004 - DNA, 588 bp, Mimulus guttatus
  Intron number 2 from transcript mgv1a025325m (locus mgv1a0 25325m.g) derived from phytozome v7.0 (chr-ID scaffold_75; pos 285885 to 286472)
caacggccaagatcactcccctcaagatcaacgacgtaattattccatcttctctctatttttctcttaattacttcaattcaattcacttctactatacagaaacttttgtttcttaataattattatgattaattcttggggaaattaattctattctttttttctttttgttttggggggtcatgagggaagtatgttggaggggaagatcaaaaaataatttcgtttttaattttttactgatttgtactttgtttgaccagatcctctcatctggaaaaaaagatttttaactttgcaaaagaaagaaagaaataaaaagatgtatgcatgtatgtgtggattctcaaagtttggacagacatgtaacaaacttgtgcagcagaagacatgattttgctaacttccattatattctctactctgattattgacagtactaaccaaatatcactttctctttaatttgctgcttttttaattattgttgttagtagattaaattatttattgaatttatttttaatataaataaaatatttaggtgcagagaatagtgggggggtgagaccacagtgcaccctc

SEQ ID NO: 106005 - DNA, 591 bp, Mimulus guttatus
  Intron number 1 from transcript mgv1a018437m (locus mgv1a0 18437m.g) derived from phytozome v7.0 (chr-ID scaffold_346 ; pos 87805 to 88395 reverse strand)
acgcctccagctttcagttcaacatcgtcactaaggcaggcagtacttgtgttcttattcctctgccataatttttcattcgagtcctgtaaatattgcattattgcattgcttcctaaatatcagttttacttatgctggaattgcatcaattgagttctgcaaatactaatttatttaattgctattattcgtgcgcttggagcgagccacattgcgtaacgtgttcgatgaaatgccaatgtggactacaagtttgttgcacctagagcaagaattttcctctgtcaatgtagctcatcatgaatttcagtttaatttcaaaaataaatttggctaatcgactgaataaattacggcttacatcctactaatgagaatttaaaggatggctagcattgtagaccgtttcgaaaaatatttttcgcctcgtagttttgattctttaagtttgaagaatttgctcgaatgagtttttttcttcctctgcgctcaaatgaattcggcatggttatattataatgtatttgtttttcttctcttgttcttcgaacaggaattttgtggtggagaatcttgcttcaaattaag

SEQ ID NO: 106006 - DNA, 958 bp, Mimulus guttatus
  Intron number 1 from transcript mgv1a025007m (locus mgv1a0 25007m.g) derived from phytozome v7.0 (chr-ID scaffold_97; pos 133464 to 134421 reverse strand)
gagatttctccccaacaaagctggtaattttatttattgcaattagtgttttttttccttatacttaattcaagggtagctttcacctagctgcacacacatatacatacacatatacatgtataatatgtgagtacattattatatatgatattcgatacatacgtatgcagtggcgaatccagtattcgaaattgataattttttaatttttttttttaataatttacaattaataaaaatgatggattaaaaatataagctatttgacaaaaccccttcatatattgaatttcgtcttcatgatattagtcataaacccaattaactcgaattatccaaaatgcctctatttaatgaaattgaacatattatattgttatggaaaatcaattaatttttattttttatatatatcaaattcccctaattctctgcgtcttacgccatttcattttctgtttttccaattctttttgattttttaatggttttccttattttaatttataacaaaaattggttattcattatttttttttaattttagttttaaatcgataatgtttaactttttttgaaaaatccactacatatccatcgaaaaccactataaatttatcgaaaatgactaaggaattgtagttaaaattactgtgaaattaacgtaccacattgatattaatgtaatccattacaaacttccgaaatctacgtagaagcttgtcttgtcaacggtttttaggtagagtttgtcacacatagttagctagcctagtgtactgtagtatacacatctcgtatgatctgcaagctattaatatacaagagtgtaggtttaccatattcacttatatgattggttgcaagacccttcattacaagagtctcggatatatgtatatatttggcccccatacataaaatcttggttccgccactgaataggtctgttgag

SEQ ID NO: 106007 - DNA, 627 bp, Mimulus guttatus
  Intron number 2 from transcript mgv1a014468m (locus mgv1a0 14468m.g) derived from phytozome v7.0 (chr-ID scaffold_39; pos 612463 to 613089)
taatcagcttcagtccacttcaatttcctccagtggtacgaataaatcattaattcgtttatttatttatttttttgtgggtggggggtgaattatttctgttgtggtgtggtttgcagttgtttcagtatgctgcctttgataaatgatatgctacacactctctgttaaactctgtgagcaactaagagataattgtattgtttactggcttgatttagaattttgaaatctgaaatcgtagtagttctgttgccgctttctgtatcgttgatttgatgtaacagtaattttgttaatcgatcgagcaatatgaagtatatatgttatgaaaccgtagtgattacgaactgagatttttttcattcaaaatttgagtacaatgtttattttagagatgaattagagcattcggttcttctgttttcaacttgttctatttttgttcctctgtttcgaatagtgaaaagtattttaccttggaaaatcatgaaaagtagaaaaatgatatagcgaagatttctgttcttagttcttggatgaaaaagtagttatgctatgtctagtatgtcaaaccttgttttgtttgcagcaggttcttcgaaacctaaggaagaagtgaaacgt

SEQ ID NO: 106008 - DNA, 838 bp, Mimulus guttatus
  Intron number 1 from transcript mgv1a006760m (locus mgv1a0 06760m.g) derived from phytozome v7.0 (chr-ID scaffold_205 ; pos 84712 to 85549 reverse strand)
atcaaggtagagtagttttctgcacaaactgtgttaatggatacttgaatcttcataaattcagaaattttagtttctgttgactactttttgaatattgagtggcattcaactgtatgccgcgagtactaatgaatttctcgaatagttgttttatgtttgttgctttgattttattggcattttatagatgtcggtgatctatatctatgtaatttgttttgatgtataatttgatttaatgttgataaaagtgaatttgaaaaatagaatttaaaattcaaccgagaaataacgaaaaaggtcattacagtaatatatatatatatattttttatcataataggtttaacaaagaaaaaaaattatgtgtatgtatatgtaatttactaattttataaaaagggtatttaggattaggtggcaaagtgaaatatcatgcaaagtttttacgcatagtgctacgattctaagatgtgtgatcaagttagggaaccttggtggaattacccccgacggtgatttgatgtggcaaaatgtaaaacctggtacgtcagatgacattgatgaaagacagctcagaagttatatgtcagtagcaatactctctgcaaaacattgattcttgtgtctttccttctgttgttaggatgtttcatgatgtaattttaggggtttgaatttttttcagcctactcgtaacagtctttatcttttcatttatgcttcgggtgcatcatatattgctttattctattcagatctttaagctttggaactgtatacgaacatgaattttgatctatgcaggatcgagtgcgtacggaaacttatagaa

SEQ ID NO: 106009 - DNA, 867 bp, Mimulus guttatus
  Intron number 1 from transcript mgv1a014640m (locus mgv1a0 14640m.g) derived from phytozome v7.0 (chr-ID scaffold_4; pos 2387032 to 2387898 reverse strand)
ttcgctcggttgctttctggtccagttattgggtgagtctctgaacttctccgatttgtttatctgttttattatcgatgttacagttgaatatgatacaattagtgatttgtgtacttgattgacttgagtactccatcatgatgtaaggcagagtatattatcgtttgtgtcgaaataatgcgtgtttttggcgttttactttgtcgttgcttcagaaatgtgtgatgtaaagatgttgtccacataagagatttggagacaacaatgttgcatttgatgtgtgtatggggtggtgggggaaatagatattcaaatgcattttatgtgaactttgatattggatatgaagccatcatttatgtaatgttttctggataagaagttaacattcgtgaagttatagtgtttgattaggaactgtggtgctaaaccccccaatcaacattgatattgttcaaatccaaccctgaagaaaatcaattgcaaataattcttaaaagaaaaaaacatctaagatcgcattcttgaggcgaaaaatcaaaagaaccacggatattttaactcattcagtttctaatttcaataactatcttctatttacaatttttgttgtttgtaattttattgtgttataatggtttgttcttctgcagttttacccattttcttataccacttaaccttatcatcaattgcaccatgtaccatttaagtagatatattggctcttggcaggcctctccttctcttttgttatttaggactccatgaattatttcactctattaacatttgtgttacattgatttttcatttttcttgtgaatcattgtcataatattgattgaaagactcttttgtagg

SEQ ID NO: 106010 - DNA, 355 bp, Mimulus guttatus
  Intron number 1 from transcript mgv1a016114m (locus mgv1a0 16114m.g) derived from phytozome v7.0 (chr-ID scaffold_75; pos 340216 to 340570 reverse strand)
attgccagctcgaaaacatcacttacaccgctaaggtattttttcattgttaaaaatgaaaataaaattgaaaaaatatatattattctgattgtatatgttttattctcttcccctcaattgtgccatgtttgttgaaaatatatctgttgttcatttcaattttcaatcgtccctttacatttgcggttctatgtgatgttttaaaccctagtgaacagtggcaattatgtaattcagttgaattacatgaatgaatgattctatactgtaccaatggtgcacacatcattctggtttcaatgaacctaaattcgccttgctcgtaatttgacttgctctcggtaaacgcagg

SEQ ID NO: 106011 - DNA, 813 bp, Mimulus guttatus
  Intron number 1 from transcript mgv1a012333m (locus mgv1a0 12333m.g) derived from phytozome v7.0 (chr-ID scaffold_132 ; pos 500488 to 501300)
ttgccgatttcgataccggattcgtcgattttgaggtaatttatttcgattcgtgcaaaatttttgattttcagttgatttctgtgttttttgctttgaatttatgtttttattgcaccgcctctgtctctatttgcgatttctggtgaatatcatcaacaattcggtggatttccgcgtcgaacggcgttataattaacaaaatcaaattcggtatcgttttttgtgcttaatttgtttaatgagtgaattaagaattttgacctttaatcggttggttgaagttatagttttttcgttcttttctcaatcaatatttctctaaatttttttcaatcttttcttttttgtgatttttgcgttttttacaataacagatgatcagaaggttggttcaatgattttttctgttcttctgtgtcctgcgaagtccaatttgttttccccggtcagagatctgcccggatgtgcaatatttgtatattcatatatattttgcaattttagatcttatcgaattcgggcaataatcatcaagaatagtgtcatagaaaagtgaaaaagaaaataagtcagtatactgattggttttggtggtatttgatttttttttgtgagtttttatgtaaccatttgtagaattttaggttatatgtattcttaaccaggattactactgaagcatgctattttttttccaactctctggttagtgggcagatttgaatttttattaagaaccttgaatttattcttgttattccttttccatgattagatctgggaatttaagttctgtgagatccagcaccc

SEQ ID NO: 106012 - DNA, 403 bp, Mimulus guttatus
  Intron number 3 from transcript mgv1a012333m (locus mgv1a0 12333m.g) derived from phytozome v7.0 (chr-ID scaffold_132 ; pos 501626 to 502028)
cctcgtggcaaaacgaatacataccgtaaagacgagtaagattttatcacgcgtgacaaaattgttagcaccttcgtgtgtttcgtatgttgtcttcgttgattttttctctatagttctcattaatttaaatagatttgtgttatgctaatgctctccaattcttacttcattttatcttttagccctttgtataatttcatgaggtttctatttcttttttgattgggtgctattgcttataaacatattttatatttagtgtttaaggccagcgcattatactttggttctctttcttgtatgactgctaagtgatatgctgatgaattgtgtctattagtatatatttttatgaatcagtttaagtttgatatcaatattaactggtgtgtttgcagtt

SEQ ID NO: 106013 - DNA, 530 bp, Mimulus guttatus
  Intron number 4 from transcript mgv1a012333m (locus mgv1a0 12333m.g) derived from phytozome v7.0 (chr-ID scaffold_132 ; pos 502116 to 502645)
cagcaaggctctctaaacctagtcataatcatactgtatgtatagaagtactcgctctccttatttctttttctcttttgtagatggcatcagttctttcttatgtactcctgtttgttttcttcatgtttgtttcattgaagaacatgcgtacacatttattaaatttggtagcatgttggatttgatttgatttatctggaatagataagcattagatatgtgggttgtgcaagaatttgcttttggtagtattgcttttagtcatcaagcagcattgtgtatttttagttggttcagtattcaaaatatccttcttgaggatgtcttaatcgtgataatagttttctctatcatgctgtactatgaacacatccttagaagatattattgcctttgaagatttttcagtcacatgtcagtggaaataataactttacttttgagctatttcatgacaatctgattttttttaatttctttcttttcatgtagaacaacaataagagccgtatttcagcccctgtcag

SEQ ID NO: 106014 - DNA, 1035 bp, Mimulus guttatus
  Intron number 1 from transcript mgv1a004655m (locus mgv1a0 04655m.g) derived from phytozome v7.0 (chr-ID scaffold_151 ; pos 46595 to 47629 reverse strand)
tactatcagtaccctccggcaacacttttctacaagtaatgttggttaattaatcaatcgttttttattacttaatttttatttatttattttgggtaaattgcgaaaacccctctgaacttaggctaaataatgaaaaacacccccacttatccgtaatagccgaaattcccctctgattaaccgttgatcgagttttttttaatagaaaatgtctacaatctattataccttatgataaataagtgagaactaaaagaaaatatctgaaattgtgtaaagtgtattccctgaaattaaaaaaaaaattaaaaaaaatccatgagaagtcacactttaagggttggtgtaagacggaaacaaacttcaaggagtttttggtaattacgaatatgtgggggtatttttcgttatttagcctaaattcagggggttttcgtaatttatcctttaattttggttcttgaaaaaagttatagattaattagcacggtgtgaattaacatgacatctatagtctagactagaattcgtggtgaaattgggggcggagcaatttttcgattttggaacaataattttcgttcgatctgaattccaaaaacttcaattcccgatttttttcagtttttattttattttatttaaaatgtaatatatttcatattttgatatactaatatttcgatttcttcccaaaatacacgtgtactttttttttattatatcgagtatttgagttactaaaattggaattttccgaattcgcccgattccgttccgaaaatttccagatttggaacatgttttttcattacagtttccgaagttttgaaattccaaattccgattttttaaaaattattttagaatgaaattgaaattagtttttcaactttgcaaaaaatctgattttttatttttcgaaaatgctaattacgattcgatcaatcgaatttttatacaaacatcttttgctttttctttttttccttggcaggaatttgaggcaactaaagtacttaataaacaact

SEQ ID NO: 106015 - DNA, 457 bp, Mimulus guttatus
  Intron number 5 from transcript mgv1a013143m (locus mgv1a0 13143m.g) derived from phytozome v7.0 (chr-ID scaffold_37; pos 325035 to 325491 reverse strand)
cagcagctattcccagcccaaaattctcggagagtgtaagaacttttaaatattttttcgtaattaaaccatagcagtaatcattgtgatttaatgtacagcattcttagtagtaaagtcgtgggctatcaagaaagtttgttctatcgagtcaagaaattctttaacgcaaattattttgttctatgtggcagataacttgataaggaaacttcggttttcaaaatcgaaagctttgatgcattttgaacttttagtttatactgcagatacaatgaaaccctcttcggttctcatttctaaagtgaaggcgatcttaactatgttttcttacgtgttatgctataacaaatgtaccttgatgtcaataaaatataattacgctaaatcaatcaatttttttcacaattcttgcttaccgttatatcgtgcattcttgcaggaaaagcacttcttg

SEQ ID NO: 106016 - DNA, 183 bp, Mimulus guttatus
  Intron number 2 from transcript mgv1a018834m (locus mgv1a0 18834m.g) derived from phytozome v7.0 (chr-ID scaffold_68; pos 290640 to 290822)
ggcagctgaagaagctctggtgaaggctcgtgctggtaattttgccctatttttcctcactcttctgttcgggcaatttgccaattaatttttcgatttatactgtcgtttatttacagtaatttttgaatatgatgttttgttttcggatttgtagaaaaaactcgaaaagcggcaaagaag

SEQ ID NO: 106017 - DNA, 767 bp, Mimulus guttatus
  Intron number 3 from transcript mgv1a018834m (locus mgv1a0 18834m.g) derived from phytozome v7.0 (chr-ID scaffold_68; pos 290909 to 291675)
gaactacgctgctataatatctcaacagtctgaaggtgaacgatttttctaattttcaggatacaactgtttacttgtacttgaaattcgaggctcgagcatatatttcgatacgtgaaaacaatgttcttcaaattcagaattcgttagctatatagccttcaaagagatactaactttactaagggccttatcgaagagtgagataaagtcgttttgttggacttgacgagaaaatattttaataattggattgtgtttcgtaaatgaaactgaacttctatggcatttttgcctgtgttccgtttgaaatatgtacagtaaactgttatatttagtaaatatctgggtagatgctaagtaattcaatcatttgaacgacttttggaagagaagttaggacatctcgattttttttttcttaggatgtaagaacaataaaacggaagtattggatgtgcaagataactgaaaacaaaatgcctcgatctcctcggccttttgaattcagtgaccatgtctctgtctcttccactatgttaaaatgttagcctttttgttagacaattgcgtacgagcaggaaactattcgttttggttttgatctgtctacttattatctttccttgttgttcctcgtgtataagtatctgttatcgatgttctagtttagaacgtacacccttcttttgagcgaattacttaccttctatctatttttttcgagaatagctttggcagttgccagagaaaagtgtcatcagaaa

SEQ ID NO: 106018 - DNA, 963 bp, Mimulus guttatus
  Intron number 1 from transcript mgv1a014683m (locus mgv1a0 14683m.g) derived from phytozome v7.0 (chr-ID scaffold_16; pos 351195 to 352157)
ctgttcctcaaagaaaggtaggtttttttttttcaccgtttcaaattgttacactgtgcgtgtctgataatttggtaggtactttattttaggatccagacatcttttaatcgcggattcgatgttacacctgatcatatacacaggatctgcacataattacacacccctatgtgtatgaacttcaccaacggttaaaaaaaacatcatatatatatcacatagtgtagcatctaaacccctttattcttggatttgatatgtttacatgattttccaaattggaataatatttcacacattattgtactacaattctagtattaagaatattctttaaggtattctaaattattttagcattttttattggacaaaatgcactccatcccctataaattttctatttttgcattttttcccctaaaaattcaaaaagtggatattcccccttcgaaatattagtttagttgcacttttcttcagaagccaattttggagggcattatgcaagaaaaacaacattttaaagggggcaatgtgcaaaaaaaatagtgttcttaaggggaaatttgttacaaaaataacatttaaagggaacgtgcaacaaaaatactcaattccgatgaataatccatcgaagttttaccatcggacaatgtgcaacaagaataacattttgataggggacattcacttttaagaattttgaggggataaagtgcgaaaattagaattttacaaggggtgatgtgcaatttgcccttttttatttatgtctccacttcgaccacgccattgcagtatatagaaatgtaatccccgaccgtttcggcgaaccatgtatagagtacaaatttccaatctgaagtgcactcctttttcatttgatttttcttgaaatattatctgtggtgattgatgtatatagctttaatatattgcaggtaaaagtaacaaact

SEQ ID NO: 106019 - DNA, 540 bp, Mimulus guttatus
  Intron number 3 from transcript mgv1a014888m (locus mgv1a0 14799m.g) derived from phytozome v7.0 (chr-ID scaffold_8; pos 577747 to 578286 reverse strand)
ggtgggccacctggcgatcgcccacggtaaatgcattaacttttttcctagttgatatgtgtgtgttttattaacaagtctttcattttttttttcttttgaagattctggtaattcagcattgtcgattatgttgtttgtgtgttctttagtacgtataaaatttgtatagatgttggttaggagcttctttttagtattatcacttgttgcgaatttgtggtgttctatttcagttattgtgtagattggcaggaatctttggtatgtatctttctacaaactatgtatatttttactctgtagagtttggcaatggattttaatttggttagttattctatgaatgtcatagatttgtgtactcttgcataatgtaaatagtgttttatgtatttgttgatgagttaagtggattcttgaatcaagttgcctattttatgaaatatttctacggtttccaaattttgttttgattcatctatggtaacagtggacccccaagattcgagggtgagaggccacgcttcggtgaccgag

SEQ ID NO: 106020 - DNA, 866 bp, Mimulus guttatus
  Intron number 1 from transcript mgv1a013934m (locus mgv1a0 13934m.g) derived from phytozome v7.0 (chr-ID scaffold_29; pos 180956 to 181821)
gctccctccaaaattctctggagaactattcgtgggtaagtattcaatttttttttttaatttgtttcgtttttgttggtagatgttgttgttctggttgattactggattttggtttgaattttgatttcaaaacgttcgatttagtttgcattttgaaatgtgaaagaagttaatgtagttgattgtgttgtttactgaaatctgatgtttagatttgaattttagggtttaggtttttggttgattttatatcagaattagaagtatagagtgtgaaatagtacattggttcaactgagtagttttgaaatacagctagtgttaattgtagttgccttgaaggatatccaaagagattaggcaaataaattgttctaccaaaattaagtatgtcttcttttaatttatcgaccttgaggaaccctaatctttcattttatttatctctacggatggtatttaaattttgcaatattatatagaaatatttaacaagtgggcttgaagttgatgtattgtgacgtgctgtttattcggtgttaaacgcaattcattctgcgctggtttttcatctagttaaaaaaagatccatttttgtgtgttctaaagttgcactgtgataaattctgataaattctgtgtgtagcttactaataagaatcttttgttcatctcgtgacattgtatttattgtttgattgaattgatttagggtactatgattgcatttctagtgttcgtcgagtgatggttgctgtcgttttgtcttgctcttgtgtatttagctatccacacttgatatagcttatcgattcgtttaggtcaaaactagtctttattcatatacgacttgtaattgcagt

SEQ ID NO: 106021 - DNA, 893 bp, Mimulus guttatus
  Intron number 2 from transcript mgv1a017844m (locus mgv1a0 17844m.g) derived from phytozome v7.0 (chr-ID scaffold_13; pos 2168808 to 2169700 reverse strand)
acgttcagttctcggtggtatagacgactcgttaagtgaaacaggtgtggatttttgattgggtttcggttaattatttattcccccgctaccattcaacttggggaaagtttgattgtttagtaaataaaactactacggaaatatgattatttatctctgctatattcaattacatgaggtgagattaatgattagggaactgagttcagttattcgaaatggaagagagtagatttggaacttcaaatgctattacttttacattgtttcgactcaagttggcatgtagcagatagaagattgttggtagcttgtgctttaaatgctctttttaactagtgctgcattgctttggcaaacgtactttggaaaatgcaatttgtctcataaattttgtaatcactaaagttgtatttggatcggaggatttggatttgaagagaggattctcggaagaattccaaatgactccaaatgagatggatctgaaatccaccacaataactcaaaatataacttaaaagtgagagcagtgggtttgaaatccatttcaaaatgagtcaatgcaaacaactccaatgggtttgaaatcctatttctccctccaaatccttcaatccaaataaagccatatatcattgaaataaacctgattttcagtgtttttttcatgctgacaaaatttatagttgtaacattgttatataaataggtttttatgaaaatgcaatgggctactactccggcaaaagatgaaaccttataaataatgcattgcttacttaagaaaatatatcatgcaggccccttggatgggagacaagatggatatgctttattgaaaccaatgtttgagatggatccagtgaaatcagctgttaacttgaagt

SEQ ID NO: 106022 - DNA, 746 bp, Mimulus guttatus
  Intron number 4 from transcript mgv11b006051m (locus mgv11 b006051m.g) derived from phytozome v7.0 (chr-ID scaffold_3 ; pos 4061845 to 4062590 reverse strand)
acgtgattgttccagtagacttttgattcttaacactgaagttctccttgagctacagtcagcactctctgacatcaagaaattggcattgtcgatttacctgaataaatttttgttttattgcatattggattggttatgcagatcgactttgatatctcagacaactgggcggagcctataatttatggctcaaaggatgattggtccggtaacttgaaaaccatccttcagtggtctcccttcgcatcgaaggacgatcttatgctacaggttttgttcttctctttatgacccaatcagttggatttgatactgaggttgggggcccttataagaaatacaatgcagttggatacgtcttttttacttttcgttttttaatattgaaaatttattctcattacatttatggtctcaagtgttgcagtttctccttttaattgtgaaatgtctttcatgagtatacgtgtgtaaaatgatcctctacttcttccttaaataaatcttcgattatgtagtgtggaaaatgaacactcacatatgtgtgtattctagaaatattttgaaagacaaagaccttaattatgtacttgaaatttcagtatgagctgtggttgtaaactaaactttgatatccttccaataggttttagtttgtatttcatatctgctatcagctatgtgtaaataccgtttttgaccttttccttttatttttctccagttcgacaatattggatcac

SEQ ID NO: 106023 - DNA, 725 bp, Mimulus guttatus
  Intron number 1 from transcript mgv1a021841m (locus mgv1a0 21841m.g) derived from phytozome v7.0 (chr-ID scaffold_11; pos 2532370 to 2533094 reverse strand)
agaacgagtgcaagaaatacgtgaggctccaactggtatttttcttttctcatttttctctaattttaatttgttcttgaatatttaataattttggttttcaaacggaataaaatctatttatttgatccttaaatcttactagatatgaaaattaatttattaatatccgaattatttatatttaaatcatatttatgagtttgttattgcatttaacaccctatgtttactttaattttaaaaaaaaaattaccgtgttattttattattcaattttttcaaacgctatttcgagacaccagaattagaattgcagaaccagtaacaatcctccttttagaaataaaaaaaaaaaactcgtcatttagaaattcaaggagtttttgcaaatatggtaataggaagaattttagaaattctatataacgacatagggtaccgaatgcaataaatcggatcggatttattcggttatatatagtcaaatacatttatcatttttagtatggtgacggcggccgacgcatgacctaatattataattattttaaaaaaaagaatattatgtaaataaaatgaaatattatttaatttgtttcggtattaaataaattgttgatggagttcagttattaaatttgtaaatatataattgttaaaaagtaaatttatatctatatataatataattagagaatctatgtgaattaatattgttgtag

SEQ ID NO: 106024 - DNA, 962 bp, Mimulus guttatus
  Intron number 1 from transcript mgv1a021194m (locus mgv1a0 21194m.g) derived from phytozome v7.0 (chr-ID scaffold_3; pos 2421457 to 2422418 reverse strand)
agctgattcaggtaattccgtaattattattattgatcatcggagtttttatttgcagtttgatccttcaaattttctcaatgaaacaactcacgttcggggtttggagggtcttggattaggaaccgacccgtttcgagtggatctatatttctagaacgaatggttctgggtcgggttacgcgtctcgtttatcaaactttcaaattttattgtgtgtattctcatttatccatttttcactattttactttttcgaatgtcatttcttgtaaatcatatctgtcatttatcgacgaccaccggtagtcgtctttgcattttgaactttatttattatagaagataaatataattaattatataattttagtattcactttatatcacttgtagaggttttttctaattgcatttaattttgagattcctttgataaaatatacaagcaaaatattataaatgtaaaaaaatattgaattttttgtatgatgttaccaggtctaacgggtcagaacgtttcatttgagtatggatcgaggcaggtcttggttcatatatttctcgtgggtcgggtttcgggtttaggcaaactcggcccataaccgacccgttgccatccttattaccaagcaccacaactcatatttacacattcatcggatatgtgcctagagtgtaatatgtttgcttcttaatggatatttgtcattggccttttactttgtaacacccgtaggacgagctctcttagctgcacactcgagtctaaaataaatcgaaacgggaagattattttttgtccatggttgtcgatgatggtattgagtttgttttatcacatgaaattaaggtttccagcatgtcaattcgggatagttgccactctcattttttttttctcttcgactccttgtgcattttgaaaaatattaattatctggcagatcacgggtggaatt

SEQ ID NO: 106025 - DNA, 760 bp, Mimulus guttatus
  Intron number 1 from transcript mgv1a005107m (locus mgv1a0 05107m.g) derived from phytozome v7.0 (chr-ID scaffold_11; pos 2854324 to 2855083 reverse strand)
aagtgagtttttttttttttcgatttctgcccacgtttgtatttttcttgtcggatttctctatttgaatcgtgtgctctctgctttctgttcgttgattggtgtttcttgttatatggtatgacagttgggtttttctgattggatacgggttgacccgttttcttgcttttttgggttgtgatattatttatgaggtgtatgtagttcaaagattgattgatgggcatccttgttagaatcttgcataagatttagtacccagtttgcctgatgtaatagattcccaagtaaagattcttgttttggcaatcccacgcggttaatgcttttggatttcattttcttgttttgggtgtgatttttcatttactctctctctctctctctctctctctctgaagttgaaattactcaatggctttctttaattccatctcttctgctaaatgaatgttctactgcaccccctttcgtcgccacatcaccgatcacgttttctaggcacacattccattgtcgaatgttaagcgcatatttcacaacctatttggtttccgaaatccgttgttttttgcatatcggttatcgtaattaccacccgaaattattcttcacaacgtgtaacatacttacatttcttgcatttcatcttacgcgacaaagaatgtccaacattcactaattcaaacgtgcgagtcgaaaattaatcgtatacactacaggacaaaaacaatattcggaatttctctctctctgg

SEQ ID NO: 106026 - DNA, 588 bp, Mimulus guttatus
  Intron number 2 from transcript mgv1a012111m (locus mgv1a0 12111m.g) derived from phytozome v7.0 (chr-ID scaffold_85; pos 467476 to 468063 reverse strand)
aggtgcctaagttgcagaaacttgctcagaaaaaggtccttttttttaaccctagcaaaaattttttttttttttaattgtttgttatgagatattctggttatatttatagttgatggatattatggatcattattgggattcaatgtatctatacaatttatgtatgtattgctgcatacacaattcgtgacgggaaagaaaaaaaatcgagaagacaaatagattcgaaagttacacaatgatcatagtgaatggtattattacatcaaaggataggttcgttgaagaaaacgagaaaaaaactgtcgtgtattagattagctaacaagatttttacctagtctgcgtaactagagcaagagattgaaatgcaaaggctacctataaacttcagtctagaaaaaacaaatttacgtggccgtagtgaaatcaaagaaactaccgcgtcgaacttggataagtaataaactgatatatgttttgcagctgactaagcaattactattaatagggcgatgttttgatgataatatacaattaattccaacaggtgaaaggccttactaaagaagaactggaagctcg

SEQ ID NO: 106027 - DNA, 557 bp, Mimulus guttatus
  Intron number 1 from transcript mgv1a017699m (locus mgv1a0 17699m.g) derived from phytozome v7.0 (chr-ID scaffold_1; pos 2952768 to 2953324 reverse strand)
ggtgatagttttaggacttgtaagtttccgcctggccccgagaagttcggttcttggttacgtgccgatttacgggattgttgctcaagtaatatctctcgtcccgtttctagagcaagatcaagaatcatggttacatcagttgatcaagatgaacgcacgagtttgctcgcagtagtgcctagaaacccggagccgaatattcttgatcaatcctcggatcttggtgtacgctgctcgatcggtttctaactatttgtggataatttttaaatttaaaaaacatgatatattttgtgtttaattctacttattatgtttctgtctacattttctcatgaaggatgcatcttctcagcaaagtatacattttgagcaagatgaaactgagacgactacttcgacaaggttatcattctctacaacgtagatcttcgatttgattcattggttatcgatcaaattcacataatattaatctttaagcttttttgtttttgtttgttttccgggacagaaatctgtggcaaaggctgattttgaacggtgtagatttg

SEQ ID NO: 106028 - DNA, 623 bp, Mimulus guttatus
  Intron number 2 from transcript mgv1a024377m (locus mgv1a0 24377m.g) derived from phytozome v7.0 (chr-ID scaffold_24; pos 1615615 to 1616237 reverse strand)
agccttttgcttgggcgattttcgccggtgatcaggtttgtggcgattagatacgtatttttattcgataatttaggaagctcagctcgtgctcgagctcgattcgggtcgactcgaacaaaaaatatagataatataagaagaaaaatcgagctactcgagcttcattgagcttgactaaaaaaacgaaataaattaaagctcgatgaaaattcaagaaatagtgaatattttatgcgtttgcctctactagtaacatttacacctctatttgtttctcttgaagatgatccctttcaagcattttgaacctctcttgaatatgtatttaattcaatatgatatgaaattcagcttgagctcgattcggctcgactcaaacaaaaatgattttaaaaaaaagatcaaagataattaaaaaaaaaaaaaagaagattgaatattttacgcgtttggctctactcgattcgtttcttttgaagatgatctctttcaattcttcatttatacatttgctatgtggattcctcaattatctattgctttatgattccatgaatatgctaatcacgttgaactctaatcgctcgttttattgaatcttcgttgatcgtttttaggta

SEQ ID NO: 106029 - DNA, 580 bp, Mimulus guttatus
  Intron number 4 from transcript mgv1a004462m (locus mgv1a0 04462m.g) derived from phytozome v7.0 (chr-ID scaffold_85; pos 280380 to 280959)
ataagttaagatttgatccaaggtaattgttattgtccttcctcttttagtctgagaaatcattgatttgttaaatagtttgagttaatcggttattatgaaatcagctaatgagaatttgctcgatgcataaagagattttcctttgttgccaaatgtttgttgtcatggtatgttccgaaatctatttatatatatatatatatatatatatatatatatatgtgtgtgtgtgtgtgtgtcaacttgagtaatcataaagaatcttagatgccaaaaaaaaagttagtaaccgacaggttatggcctcttaattatttgaacatgtctattttcagtcctcttgctagacaaaataaacatttgttgataaacaatcccgtgtacaatgtgtgataaacagtcaaaacacaaaagagaagatttcatgaagtagtttgtctctagatattacaatgccttttttatcttatgaaatagtagtgttgtttttctacacacgttacagagatatctaagatttggaatatttgtttatcatcatgcagaaaagcaaactgccgtttgttaagtacccacg

SEQ ID NO: 106030 - DNA, 759 bp, Mimulus guttatus
  Intron number 1 from transcript mgv1a000190m (locus mgv1a0 00190m.g) derived from phytozome v7.0 (chr-ID scaffold_79; pos 280015 to 280773 reverse strand)
aaatatatgtgagtagctttcgttacttcctcatttttcactagggtttttgttgattagtgaacgcactgggagctgattagttttccagaagatgttttatttgcaacttaacttaagataggcattcggcaattaggttgaagttccatgttatggtcagttgcaaggatgccattttttgggagtgattaaatgtgggtggtctactgggataggcaactgtagccacctcatggattttgttgaatggttgtgtatatactttatgtagaaggacatttggactaaatacacggaaactatttaatgagaattatatagcggtgatcgtagtttcaggaaccataactgttggatattattgatgccctaatatactatatttgaacagagtgtgctttgctagatccttcagcaaacagggttgtactttcctaggtagtagaattcttatgattttgtattttgatatttttgttagttaaatgttcatatttgagagtttgctcggctgttggttgatgaattcacaatttaaattttattaatcatttatctccaactatgcccttttttttttcccttcgtttctttgatctacagaatatatatcttttggggaatgggtgtctaagcttgactataattataatatttgggagtttattttcttaattttttatttacagtttggctgatatattgtttgttccgattgtagacatacacaggaagtattttgattgcagttaaccc

SEQ ID NO: 106031 - DNA, 988 bp, Mimulus guttatus
  Intron number 1 from transcript mgv1a003286m (locus mgv1a0 03286m.g) derived from phytozome v7.0 (chr-ID scaffold_124 ; pos 49161 to 50148 reverse strand)
aacatctcttgaccagatcatcactctcagctgaggtactttattatatctttttttttttttaatatttaatcttgaaatcttgctcaatttagtttttggattatattttttatttttattttttatttcatgtgattaatacaaataaagagttcaagatttgttctccatataattaagggccatgttttttaggataaagttttctataaattaataaagttgggactagtaaaattctaataatttaatatgttttcccgaatcgggactgggagaaattattatttaagtgaggttattaatttatcgaatactaatttatcgaggttctgttgtattagtatttgagtagtacttaaatagatgatcaagacgaaaaagcttgcttttagacatcatacctttgattaggagtggaaaacaggggggactcggattagaattagtgctttcgagaaaattaatttttcgtttagggatttttttggcataagttggatattgaaaacaaaaaagaatcgttcaaactcgaacattttctaacgagatcggcaaaatttgaatatcatttcgattttcacccttgagttactagtataaactataaagtacattttagtcgaatatagattcatttacaaaactaaccttatgaatttatttttgattgtaaaataaaaaaagttagaattttcagaatgattttttgggaactaaaattcgatcgaaaatcagaatttcatacataatgttaatcccggtccccatccaacgtttaaaaaaaaaatcgagaaattcaaatgattttttttcttccaaaagttattccagagtcggaaattttcgaatcgaaatcaacggaatctatatctctctctctctctatatatatatatatatatatatatatatatatatatatacataacacgaaactcgattttcaggttgagaaagctatctcagacaagaagcaaatagt

SEQ ID NO: 106032 - DNA, 436 bp, Mimulus guttatus
  Intron number 1 from transcript mgv1a003952m (locus mgv1a0 03952m.g) derived from phytozome v7.0 (chr-ID scaffold_11; pos 756618 to 757053)
ttcagcgcgtgccattcaaacgcgttttggcaggggtaaaatagtcaaatcacctcccttttctcctccaccatgtttttggctggggtgaaaccgtccttcgaacaaaatcgaagaaattttgaaattcccgttctcaattttcactactcttgagtataaaaaatggttgtctgaattctctcctgatgaagaaacttcttgaaatcattcctccatgttttcttaccacaccccccatcgattcctgaaaaaaatcaaacctttattaggtcaagttctaactaagggtttcacctctctgaaaaccaccaaacgaacaaaacccatcaattatatccgtcaaaaaattaataaatcccccaccaagaaatcatcgaccaagaaaaatgacaacccagagccaaagatttactcgagggagaaaatcacaaaa

SEQ ID NO: 106033 - DNA, 991 bp, Mimulus guttatus
  Intron number 1 from transcript mgv1a009907m (locus mgv1a0 09907m.g) derived from phytozome v7.0 (chr-ID scaffold_1; pos 4791620 to 4792610)
acagacagactttggttgcatttcacagcacaatcgtgagtatttttttctactcaatccaccttttttacttttcagtttctaactcattttacttcatttcttgtttttcttcccccatctttgttttgttttaaatttaaatacgagtatgatttttcattttatgatccttggttcctttattttgcgggatctagtacaattgatttcgagctctaccactggtgtctgaatgatgcttcactcttcattttcaccaatttctgtatgctttcacttagtttattcaccctttgtttgtttataaggttttctcatagttttcatttttatttatttttaatgaggtggccttggaactgatcttaggctttcggttatgtgcattaattcacaattttggatgacaagtgatgcagttatctaaaatgatcatagatattgctctgattcttaagcatcttttgcttatataggccttaatttgtaaacataacttttttttttcgttactcctgctgaaagcattttgactacttggatacttgtataaattccagttataatgaccccaattggacgcgcattagtgtgcctagtatctattggaatcgaaagcttcggttgtcattctgttggaataaatatctgcgcacttaagagcatatattttttgacatgggcagtgtgcgcagacatctttcactatcagagtgtctacgcaaactgcccatgtcaaaaaatatctgctcaaagtcagagttttagagtaaagaatttaatgggatgatctatatactgtctgcatcatgttgttccatgaagtgttatatttgcgcaatgacatttcacttttactgttgttcggcttatttacctaatagaaaatacatttccttgaagtcatatttcaagaatttaaaaaaattaattatgtgctctctcttgctcagacgattgaaaaggaaggacatccttcgattgaact

SEQ ID NO: 106034 - DNA, 905 bp, Mimulus guttatus
  Intron number 1 from transcript mgv1a005054m (locus mgv1a0 05054m.g) derived from phytozome v7.0 (chr-ID scaffold_1; pos 63516 to 64420 reverse strand)
tcgacaatctccccactgggtaaatctctctctctctctctctctctctctctctctctctctctctctctccattatttttttctggatttccgaatgtattatatgaattgtgtttggttatgtatgtcgatttgaagtgaatttttttgcaagtgatggactcttactgtggatttagtgatgaagatttgggttgtccctctttcttttgtgatgtaaaattggatacttttgtgtgattttttctgattaggcaaattgaaatatcagtcgacgggcttagatacgaaaaataatttatggacgagacgaatatagtaatatgcaagtttgatttgtgctatatactgttggaatagtgttttttgtgtgtgtgttctatagtgttcatttaattgtgaaatttggtgatatgcaattataactgggtggagttgcttttgagaaaaagctggtctccgattgaattcaaatgtcgacaatttcctagttcattgtatttcattctaatcaggtaactcggggtatgctttaaaggtggattaacttatcctaactaaatattgaatgataatagtccagttgaacgagtactttctttcaatttcacgctggtcttatttagtctcgggtttctaggtaatggcagagtatttcatgtcttttaagaacggatggatgatttttgaaattagcttattgtgtaagagtatgtaccattctgcatttttattccgatcagcattttttttcgacatccattctttcaatgtatagaatggatgaaaagtttgtgttcttgagctcgttttttccgccttattcgttctagcttataaaattttctatgtatttacttttcacaattgtgtgtaatctcagtgaagaagaaggggtctttt

SEQ ID NO: 106035 - DNA, 1032 bp, Mimulus guttatus
  Intron number 1 from transcript mgv1a008906m (locus mgv1a0 08906m.g) derived from phytozome v7.0 (chr-ID scaffold_6; pos 2092274 to 2093305)
attgcttcgtgagtccactttcacttcccaatattcttcttttttttttttttttttttttttcttttagtgtgtgtgtgtgtggattttaatttcattttggggttatattagaaatattaatattaaattatacatttaactaatagcttaagttttttgttgagatgatcatttaatatggtatcagagatgggccaaacaaaaagttcctgagttcgaatcccaatggcacccatttcaaatatttcaagcgcaaggcttcaaatataattcggctgcacttgaggggcgtattggagatattaatattaaattatacagcttaaactttacttttagttgagatgattattcaacaagttattgggttttgttgacaaattgatgttacgttgtttgctgcccgattcatttggcgaattttgttattatgaggaatgcagatcgaatccagtatctattttccgattaaagagatccttttaagctaaataaatctttgaaatatttaatttttttgctcgattgtatgaccgaccatagtttttttctgataaatttacgcatattatcgttggtatttgaatccttaaaatactagctcatttggttgattgtctggccaactttataaatttaatttttatgcagaactgtagatcatattcttacatatacgttacttacagtctccgataatttgaacagtgaaaagtcttgattaaaaaaaccaacaatgatctttcgacaaatcgaccgaggctttatttcattttacgtcagactgtagatcttaaaatttaatccctgctcgtcgttttaacattataattttttttacgtttctgtataatttttatgttgttaggttaggtaaattatttccaactgaaattacatctatcaaatcttgatttatgttcggactttgaatttgaataacgggatcataaatttgttcaaaaatctttactgactcgtttattggggttgcccaggttgctaaagatccctctggcaaggaaatta

SEQ ID NO: 106036 - DNA, 480 bp, Mimulus guttatus
  Intron number 2 from transcript mgv1a014885m (locus mgv1a0 14885m.g) derived from phytozome v7.0 (chr-ID scaffold_92; pos 553933 to 554412)
cgttgagcctcttgttattgaattggatcaattaggtatggtttctatatctatatgtgtgtgtgtgtgtgtgcacatgtctgaatattttgaactttgatcagtattcaatacacatttacaagtgttagcagttgatcaggttctttgttgttctgaaactctttgtactaaggatcttgtttgaagatggatttaaatctttaatatcatcggctaacgatcttgaattttccgttttttgtttgaaattcctttacgttgttgttgaaaaccaccaccttgaagaggtgaagtaatacccgttcccgttaagccattgtttcgacactcgagtttaagtttacgtagttaatcgaaatagagatttaaactattatttattaattaattaattaattcaaactattgccgactgctattttacacggtttctttttttcaggtgctcaaggaccccaattgcagaggactttgaaa

SEQ ID NO: 106037 - DNA, 903 bp, Mimulus guttatus
  Intron number 1 from transcript mgv1a002323m (locus mgv1a0 02323m.g) derived from phytozome v7.0 (chr-ID scaffold_1; pos 137431 to 138333)
aaaccaatttacaccccatttctctctccacaaatgtaagtccatttttttgctcttacttccacacacacacacacacacactcaccacactgttctttttttcaagaatcaccataaccataaagaagtgattttttttttcttacataattttgatctgggttttttttcctttcttctgtgatgtcaatcccatatctcataagcatgtgacatctctttcacacacacacacacacacacacacacacacacacacacacacacacagagaaacagtgagcccccttgtaaaaaaagtgcttatctttatttcttgggtgtcatcttcttgttatgattgtcattgttgtttagctgttctgatgtgaaacaagggaccaaaaaaagacacaaagacagcaaaaataaaaccccccattactctttcccaatcttacttgcattttttttttctttctgagtacacatatttgcagtggattagtgtgtgtgtgtgtgtgtgtgtgtgtgtgtgtgtgtgtgtgtgtgtgctgattgggttgtttgggggttttctatttttggtaaagattttgactttgtgaagaaacttcaactctagcttcatctcaatgattttcttgatcagttcttgattttctttagtgtgggaaaaaaaatagaaaaccaatcttgattttaggaaggaatctcaattccacttttcccagcattccaattattggaattaccaaccaaaaaaacaaaaagggcagagagagagagagagagagatatgattttggatctgttaaaaagaagatagaaagctagtgcttgaagaggagagtgggtattttattcatttttttatttattttatttttatttttacttttgcttttcgagggaagatata

SEQ ID NO: 106038 - DNA, 878 bp, Mimulus guttatus
  Intron number 1 from transcript mgv1a002474m (locus mgv1a0 02474m.g) derived from phytozome v7.0 (chr-ID scaffold_45; pos 766357 to 767234)
tgctggtggatcctgatccgagtacgcgaaaacacgtgagtttttttaaaatttttttttttagatcccatctgttttgctcttgatctgtgtacaaaaggatttaatttttgtgatctagggtttgttgttcgatttgttcgacattttgatggtttccgtatcgttaatttagtgtttttcatgcttcggcaacgcacgcatctgtgtgtgtgtgtatgtgtgtgtgactgttgaatttacacaattgctgaggagctatggaaatatttgatatttttttttaatatttttgtttttttacctatgtggttggatctgatgattcgatctgcgatgaagatgaatgaatgcggttactgttcgagctggttttaattgatgttttgattgggattttaatgatttgtgcagcaaactaatcattctatagctgtgtttaatactctgatttagttccttaatggtgaatcttttgtgtttaattacatgattaggaattattgtcttgcagtttaccttctactttgctatagatccaatgagaactatggatgaataaactcgaaaaggggaagtaaaactactaatacacgaaattgatgattcgcgatatttgtgaatttcgtgtgtttagctacaaaagaagatcatcaaaacaagataaagtcgaactttttcttgaatagttgctggtttttagtttattcaatgtcgtgttaatacgtttaacaacttgatgtggaattaatgacttctatgtcgattgattttgtcgtacattgtctggaatctatatgaccttttttttttttttttttttcttgcatctgttttaacttttgactgttttgccttttcataggaactagagtacg

SEQ ID NO: 106039 - DNA, 1044 bp, Mimulus guttatus
  Intron number 1 from transcript mgv1a016117m (locus mgv1a0 16117m.g) derived from phytozome v7.0 (chr-ID scaffold_12; pos 63152 to 64195 reverse strand)
tcttctctctacaacccaatcttctctctctaaacgtaagttatttccgatcatcatacatacctctttgtttttttatgtatatatatatgtgtatatatatatatatatatatatatatatatatatatatatatatatatatatatagaaacttgttggttttttttttatttttcgttttcttctttatagttataatgtgtaattgtttataaaaacttttccgctgagctcatcatcgcctcaggttgtgcagttagaatatagaaaattggggtcgatttcgattttaagtactaaattaagaagaatttagttaattttctttttaatgataattgaattcgacacaattgggttgctgtagttaagactattattgaaagtaacattactatgtgaaatcggataattttgttttgtcgagaatttgatgcattcattgcccgacccgttggtttcgttccgattgttttcttgcttcgttctgcgtatgtgtttaagatatgcgatttaagctcttcgtactggtctaggtctaagcattgtatttaggaaaaaaaattaatgaattattcagttgaatgtcggagtaaagcccaaatcgcacaaccgaaaacgtatttgaataaatatgtcttcgttggtttattaatttttttttttgtggaagtgtttttattgcaacggaaactcgaatagcccaatcaatagttctcgaaataatgaatgtccactgaaatttcatgaaaaaaatttaagttgctgtattttcatagactggagaaaaaaattaaattcatcgtgtaatttcatgaaatttcacaatggtttaagccattcatttggtaaacagtaaattcccgtaattttaagttgctgtatttagtttatggtctctaattgctactaaagagcgatctagcagtttttgcattagtaaacaacttattattcgctgctaatttgcgagattcgattttttaattgaatataacttagaatttcctgccaggtagaagaacactacttaaaagtcaa

SEQ ID NO: 106040 - DNA, 1020 bp, Mimulus guttatus
  Intron number 1 from transcript mgv1a026291m (locus mgv1a0 26291m.g) derived from phytozome v7.0 (chr-ID scaffold_2; pos 137623 to 138642)
cacctctggaactcccttcctcattccaaccacaggtacttagctggttttcgcaaaaccttttacataagtcaaaaccgttagtgattctgagttaagttcattataactgtttatttctactagttggggtgtcagcaaatactgcgaaaaatcaactttgagtcactattggacaagttataatagtgtttgcacataaactttaatttttagcttattttggtgggtgttgaatgactatctcaaccaaaagtttaagttgttagtgagatgtatcgattaatatccaataaattggaattcagataaggaatataagagtgaacatgtcacatgaccttttttagttaaacataagtgcttttaaatcagagaagcagtgtttctcagaagatcatgacttaggtggtgtttgcaaaatcatatttaaaattagaagtttggattgtgatttaagttcattttatgtgtttatttctaaaagttgagggtgtttgcaaatttgctggaaaatcaacttaaatagaaatagtagggtcatgggtgcgcttattttaagagaagcaaatataaaagttcattttttaaacatttaaaaaaagattatgagcacgaaaaaagctcataatctgtttgtaaaaccttatgcaaacaccaccttaaaactgcttacttttaaagaagcagaagtaaaagctagtgttgcaaacataaaaaagaaaaactgattttaagccaaaaaaaaaatgataatcactttccaaaagcttttgcaaacaactcaaagaagctttatgcatatgccactctactaatttgcaatttttgcatatgttaaaagtgctcttgcttatcagtgtaacacttttgttaactaacataatcataaatcatgtgtgtgtggttatcaatttatcatcgtacggccattttttctctgtattcaatctagtaattaattaatcgctaaatttggtgattaagagcgagttgtctaattgggacaggaaccggtgc

SEQ ID NO: 106041 - DNA, 867 bp, Mimulus guttatus
  Intron number 1 from transcript mgv1a016428m (locus mgv1a0 16428m.g) derived from phytozome v7.0 (chr-ID scaffold_18; pos 1025285 to 1026151)
aggcgccggtgcaggggcgaggcggtggcggcgcatggcggtagacggtggtggtgatgatggtgtgagggtttgaatgaaaatgggggaaatactggggggtgtgtttgttgactgaggtgggttttgtttttcagttttgtgggcggatttgccacgtcatttaactgaatttaatgtcacgagggtgggtgcagtaccttgtccgccgtgtttgagttgtacctttagctttagttgtattctaattattactctcattttaaaattatatgagaaaataataataaataaaatagtaaattacaaaaccttcccgaaacttaagttaaataacgaacaatgcaccaccattgcaataaccaaaatccccatctcattaattgttgatcgagtttttaaacataaaatatgtatagtctattataccttatactaaatagatgagaaataaaataaaatatctgaaattgtgtaaaatctattcgctggaattaaaaaaaaaaatgacgggaacaaacctcagggttttttggtaattatgaataggtggaggtgatttttgtaatttagtctaagtttaggaggttttcgtaatttacactaaataaaataattattataaacctagctagttaattaatttaaaaatgattagcaaagtaaattataatgggctagaaggtaatatatatatttgaaggaaatgtaaaatgggctaaaccgaataaggttaaaatgggtactacttgatccaataagtaatgggccatctaactaaacccggccgcatgtgcgaagaaaaggaagaaaacgagggttagggttttagatcggtcttcattttccacactgctccgacgaaaa

SEQ ID NO: 106042 - DNA, 637 bp, Mimulus guttatus
  Intron number 2 from transcript mgv1a003392m (locus mgv1a0 03392m.g) derived from phytozome v7.0 (chr-ID scaffold_44; pos 319194 to 319830 reverse strand)
cccctgtaaatcctgttgctcttggaattccggtaagcacagttttttgatacagtcatgttactgcgttatggaaacttgcctcataggttttgtactttagggttcttaagtggagggggaggaggttttaattgttgtggaactagtttacgtaatggtgaaagatgcagtactgtcattgagttgttacttatctgaatatcaagttcttatcacattgttcactcccgccaaacgataggactcgtctatgtaatggtgaaaaatgcagtactatcattggtttgttacttatctcaatatcaagttctttcacattgttcactcccgccaaaaaaaaataatgtgaagattatttccccttacttatgacgattgccggttggtattattgctccattagcatcgcactctgtacttaaatttttcctgtactctcacttttgatttgctcacgcttattattgttgtatgctggttgccattgtgagattggctacagtatagttcactactgtggtgctcttgatttgaaagagatttcatttattgatcagaagccttgattgtattatattttttaatcgaatacttctgttttgatgttatctggaattgtaacaggactattttg

SEQ ID NO: 106043 - DNA, 563 bp, Mimulus guttatus
  Intron number 1 from transcript mgv1a024797m (locus mgv1a0 24797m.g) derived from phytozome v7.0 (chr-ID scaffold_104 ; pos 611534 to 612096 reverse strand)
gaggtgcatcccgctcttctttctctttctccttcattccctatttacatttaatttattaattaaataatcactccaaaaagaaattgaattgaataattattagaaaaagtattataaaagcattcttttttcttcttaaaaaatctttaatatataatacaatattgtttttcatgttatttttgggttgagattttggggagtttgttagagcttttgggggagttagactacaaaccttgttatttacattggctgaatttgaaccgtaaatttgattaaataattactcacgaagtacacatacacataaattctgtgattgtataactctactattcaaatatagccgctagaaataatcaggtatagcatttaatttttcgagcttttgaatagatattgttgaaattaaatcataccaagaaacctaaatatcataaaatttggattttttttttttttttttttttttatgaaatcattttcacaaaaatgtttatacatgatgcaaatcgcaaacaggacacgtcgaaaaacggcgtactggctgtccaaac

SEQ ID NO: 106044 - DNA, 771 bp, Mimulus guttatus
  Intron number 2 from transcript mgv1a002498m (locus mgv1a0 02498m.g) derived from phytozome v7.0 (chr-ID scaffold_174 ; pos 381960 to 382730 reverse strand)
tgaggtatttattacattttgtttcctcagctttaatcgtttctattaattgatctttataactcgaacatgtcgtgtaagagttgtcggttctttagtggctcgctagtggatgaaaatgtcgtctttgacagtgaagcgtattttttttaaacagatctcgtttttcttgatagttgatagccgggttttcgtttgcactgagtctacttcctttttgttcgatctcgtgagcgcgtcacttcggataaaatccatttctatgagttattgaactaatgtaaaattccaatctacaatgtctatttcataaaacgggctcgagtcgatctacaatgggtagtcactgcttgttgattcggagcaccgtttgtagttttgttgtcttgttgtttattctctttattttcgttttacacccgccaaacaattgttgtatgtatctgcgcgtacgttcatttctggatttattctttccatcacgcgaaagaaaactctgcatcaaaccgaatataagatctcgaatgaaaggtgcttgtaagtttcttattgttgagtagactaaccgatgcttttggttgtcccgtatttgatttaagcacttatatgtcgggtttcttcgtttaatgtctgcatcgagtaaatatcttatgtaaatcgaagtgaagatttaagcacttatatgtcgggtttcttcgtttaatgtctgcatcgagtaaatatcttatgtaaatcgaagtgaaataatttaatcttgataggtattgaggg

SEQ ID NO: 106045 - DNA, 640 bp, Mimulus guttatus
  Intron number 2 from transcript mgv1a014237m (locus mgv1a0 14237m.g) derived from phytozome v7.0 (chr-ID scaffold_42; pos 497892 to 498531 reverse strand)
tcgttctagaggtatggcacatgtctttattcctgttcgtgggctaaaatggttattcatttaaaaggaaataaatcatgatagtccgatgcaaaaatgatgtttcgtttcagcttcggcaataaatcactagtttcatttctctgctactggaaactttaggcggtggttggttgcatttctaaaaatttaattgcggaaactttaattttcgtcttcatttctgtgattgggtgttcgtcttcattttctttttaattttctgaaaaaattttgctctgcctattttcagtacaaccaaatagttgttttcaggtttatcctttcagaacaccattttcgattatactaacttcaaagcaaagggccttatgatattgctgttgggagatgaaattaaaataaaactatcaaagatgaaaataataaaaagtatggaaatccatgtacgaaggactttacttctctgcgagtgtgcgtgtgtgtgtgtgtgtgtgtgtgtgtgtgtgtgtgtgtgtgtgtgtgtgtgtgtgtgtgttttaatctggaaaatgaaacatttacttggatattaagtttctgatgtaatggctttttaattgcagctaaaatccgcttacgcaattgcgaaattgagaaa

SEQ ID NO: 106046 - DNA, 694 bp, Mimulus guttatus
  Intron number 1 from transcript mgv1a014237m (locus mgv1a0 14237m.g) derived from phytozome v7.0 (chr-ID scaffold_42; pos 498573 to 499266 reverse strand)
tattcagcccgtgaatcattatctttctggtataggtaagtatgattattattggtgtcgcatgtgagaccatattgaagattttcctgtcattaacgcatttaaaatttgaaaatagtttattttccacacgctactaggcattccaacaatgtcagtgattgccatcggattttcacttcgattatcattgaaagtttctgtgttttgggaagtttttgttacatattttatcttttgtatgtcgatttttccatctgtgaaaacatgctctttggaaaaaagttacacgacccatctatcagaaagattattgaggaaggttttatattattgtccaaattaacaaaatcattgaggttaaaaatcagattaatttgccgtatgctactgataaaatatgattgagatcaatgttttattgcatgaatagctacagaaacttcttggagatgtttatggttcagcaattttctaccataactgtttttgggaatgaaaataatggatatgacacgattctggtcaaacagatacacatgcatattgactttgacttgcgttatgttgacattgcattatttcacgagatgcatgcttatggttgatacaaaaggactgatttgaatgaacatttcttctctttctgatacgtaatagccttggtctttgctaacttgatttgttggatcag

SEQ ID NO: 106047 - DNA, 492 bp, Mimulus guttatus
  Intron number 2 from transcript mgv1a019139m (locus mgv1a0 19139m.g) derived from phytozome v7.0 (chr-ID scaffold_44; pos 482817 to 483308)
tgcttacacgaggagtaatagcacttacgacgtgggtcgatcagtaatcaaagccactcgggaccttctcaagtgtaaagctgttgaactaagccattggttcattgaggtaaagtttgttgtatgtgcaaaaaaatcatgcatcataaatcttgttcttttgcactgtcataaatctttttttttcttacagtatctttacatggctcgtgatctgtggaggcagacgccttttgctctgctccatgacttggtgattttggacacgagtttatggccgacaaacgagcacattaaaacgttgatggtgctcctttcgagatgcccaaacctcactaaactctctgttagaattgcggtaaaaaaaagcttatccttttacatctgatatgaatttgtgatagcagtttgttgttttagttttgaagcgcgttttttttcttcttcttttcttttgacagccttcacaaagagaagctcttcagttgccca

SEQ ID NO: 106048 - DNA, 200 bp, Mimulus guttatus
  Intron number 4 from transcript mgv1a012717m (locus mgv1a0 12717m.g) derived from phytozome v7.0 (chr-ID scaffold_27; pos 835318 to 835517 reverse strand)
tgattcaacaagtgaaccagcaatttaaggaccctgtaagaaatatctcgtttctttcgatcaaattacacgttaatcctatccgtttgcattctgcagctccaaaattaaatatcccataattttgtttttatacgctatgcgttgcttttttttcttggccaggatttgacgactttcgtttgcgtctgcattccgga

SEQ ID NO: 106049 - DNA, 424 bp, Mimulus guttatus
  Intron number 2 from transcript mgv1a012717m (locus mgv1a0 12717m.g) derived from phytozome v7.0 (chr-ID scaffold_27; pos 835830 to 836253 reverse strand)
ctcaagtaagtttgaccgctttgtgcttcaaaattgaccggcatttgatgtatggaatgtactcgatttgctttggcaggaatgtttctcgtttatatcgatactttccaaattaatgttcattagtgtgtcattcgcttgagaaaaaaatgaccgtatagctacgatttctctcacaaatttgcacgattgcttatattgagaagcatcgattcaaattagaaaagctttcgtatattaatagagtcacatgttcttgaaattatctaagaagcataaactaatactttatcacatgaatgtgaacaatacttgtcgatctatcattgaagattcatatatatatatatatattttatattgtttttgttttgttttaaaatgcgaactcgccttgaatatattcttcaggctagtacaaact

SEQ ID NO: 106050 - DNA, 640 bp, Mimulus guttatus
  Intron number 2 from transcript mgv1a005120m (locus mgv1a0 05120m.g) derived from phytozome v7.0 (chr-ID scaffold_273 ; pos 178362 to 179001)
ttggtcttgccaatcttctcttgcattttttgcaggtaagtcagtagctgaatttttgccttctatgtgtttgtgaattttactcaaagaagtaagataacttgtgcagttttgtttgcttctttatcttttggctaatgactcgttactttattgctgattgatttgtcactaatcttttcctcgtatatttaattatgagaacccgagaattaatatggggatattgatttaatctgatgtgagtattattccagacaatgattagcatctttaagttggtaatgggaactggtttgtgtgcttatacttcaatagttattctagagttgtaatgtgcggtgatataaatcgtattgagaaactactcacagaaaagctattaaaataaattcaagagctagtttaggttacggaactttgaagaagatggagttaaggttagctactaggctgtgtgttctcacgtgtgctcaataagataatgctacggctgctttgtatatctgttatactagaaatgctgtgaaagttgaacatttgcaccaaaagtcatactgcctccttctgaacgaagatgaatgattttgtaccttttgtttttgatttgcagctctttgtaataaagatagcaaagtat

SEQ ID NO: 106051 - DNA, 661 bp, Mimulus guttatus
  Intron number 1 from transcript mgv1a009015m (locus mgv1a0 09015m.g) derived from phytozome v7.0 (chr-ID scaffold_2; pos 4007351 to 4008011)
ggcgccccactccaggtaccctaattgtgcttttccgctgctaattaacttatgttcactttaattggagttcgtttctttcaattagctatttttgttggatttttttactgtaatttttggggttgtactttgcgctgctaacaaattcagtaggttgtgatttatgtggtttcttttgagaacatatgttccttccagcaatgctcaaataaaatttgaagttaaagtggcgccttttgaagacttaagtaggagattaaactaattaacacattttctgcatactatttttgttgaatttaatgtttacaagaaccagggcattaaatgattaaatacaaacttcaaagtcgtggatccttctttttttttttgtttggatcttgcgagtttcagaactttttattcttacggtacgttacgatgcaccaataaattgggtcaaacatcttgatagttattagaaatttccatcgttgaggtgtaacttgtggtacacaatctcgtcagacatggatatgttgcacattcttcttttaaaatgttccccaagggattagattgtttctttaaaacaacatttttttaagaatggaagtgtatactcaggtgttatatgacaggtatcggctatagtgattcgaatcctatcgcaact

SEQ ID NO: 106052 - DNA, 749 bp, Mimulus guttatus
  Intron number 1 from transcript mgv1a009459m (locus mgv1a0 09459m.g) derived from phytozome v7.0 (chr-ID scaffold_142 ; pos 393299 to 394047 reverse strand)
gcgttggccctctcattgaggatagacttggtaacctaaataaccaaccttttatgttcaattaattcttttttttttttttttttataatgggtttcgatttttgttggtgattttgaagattacttgttttgggtgctaagattacttgttctgggtgctattcattttggattttatgaattggatatgttaaagattgtgtctttataaataccacgttgaatgaccgcttcaaccaaaagcttaagctatcagtgaaataaaatatgtatcatttatgtgccacgttgaatgacaagcttaagctatcagtgaaatcagaaatgtattatttatgtggtgtttgcaaaagctttttgaaagttattataagtttttcttttgctcataatctgtttttaggtgtttgtaaaattaacttttgtttttgcttctcttctcttaaaattggttgttttaagctattttttacttttttaagagcatccatttacctgatttttctatttaagttcattttccaaaatatttgcaaatacccccaacttttagaaataatcacttaattccaacttaactcacaatcactaacttctatttttaaataaacttttgcaaacaccaccttcatattaatatcttcaatagttagacatttcgaaatttgaaactacaatattaagattaaaagttatgagcctcagattctaaaattatgtcatttgatgccattacagattctggtg

SEQ ID NO: 106053 - DNA, 432 bp, Mimulus guttatus
  Intron number 1 from transcript mgv1a011497m (locus mgv1a0 11497m.g) derived from phytozome v7.0 (chr-ID scaffold_69; pos 33604 to 34035 reverse strand)
aaccgcgattcaggtcagttgtagcttcctcttcgatttattcgtgtttacgcctctgaaattagataattttgtttttctattgtcttgatttgggatttcagcagttctcgattgttttttgtgtggggaattttcacaaacacttagtgtgcattatccagtttcgagggaagaaaacttgtctttttttcttctctttttttgaattaattgggacttcagcagctcggattctgctcgggaatttctatacactacttcaatttcctgaattttgtctttagcaagggaatcggcttaatttatgcctttttatgatgatttcatttttagggatttcgtaattctatgcaaacaacaaacttatacttaaccaaaatgcacgaatttcaatttccataaaattttgaaccaatgtttcacttagac

SEQ ID NO: 106054 - DNA, 993 bp, Mimulus guttatus
  Intron number 2 from transcript mgv1a014654m (locus mgv1a0 14654m.g) derived from phytozome v7.0 (chr-ID scaffold_120 ; pos 3842 to 4834 reverse strand)
atttggtacgtgaattatggttaattacaataattaccctgaatttgttttcttagttttttgtcgtgggatatatatataatttataattttagatgggtaatttttacaaagaagtcaaactttaggggtgatttttgtaattaaacaagaagttatagaggtattttaattaaatttttaaattttaaagaaagggcagtaatgtaaaattaattttaattaatgcagacattttccaaaacaaatctagttccctctttgccctctacaatttctctcaatttcaagattttataaaaaaaaaattaaacttcactacgaataaaattgtaaaataaacgtggtgcaattctacacggaccaacattcttctaattttattctataaaaaatatttataataataaaaccaaaaaagaaaaaagtttcttcgaatttttaggtaaaatgacgattcgggtgaaattttgatcacaactatagttaaacatctataaattaatatagaaagaactatcaaaaaattctattaatttagtgaaatagtaatttatcaaattaatagtttactactccatctgtttcacaatatctgtctcttttgagatttttgtttatgtcatattatctgtcactttacactttcaatgcttcatattacatatttttcaattataccctcattaacttttttttttttttgagtaaatatccttattaactcgtctaacactagttttgcattaataagtaaataaggtattttggtatatcaacatatattttactataatgaagacgtacttattgaggttcttaaaacttgtagcaaacgcaaagtgagaaaacgacttttatttaggaacggagagagtacgtgtttgcagtgttgggactcgaataaattattattcaagcaaaattatcaagttatctgagtattaatttattgaggttctactgtatgcaaaaaaaaatttgtgacagata

SEQ ID NO: 106055 - DNA, 428 bp, Mimulus guttatus
  Intron number 1 from transcript mgv1a001137m (locus mgv1a0 01137m.g) derived from phytozome v7.0 (chr-ID scaffold_1; pos 4311685 to 4312112)
gcttctgcttcttcttcgccaggtgcgttttctatttccttctttgatttcttcgattattacttgttatgtgttaatttggtgaaatttatgttctctctgtgttttttgtttttttccgcgattgtgctgttgttctgtttctatattttttgagaagttgttgcttagtttggagcttgttagaaaagtaattgtttcggtcggtgcttgtttttctataactttgattgattttattttttctgccggaatgattggcggtatgaggatgctatatcaactttaattttgtttttggagttaattttgttgattttcagaaagttgttctgtgtgtgcttagtgcttacagtttgtttgatttgagtatttgtaatttgagtatttgttactttgtttttgaaattttcagtagtgtccgtagg

SEQ ID NO: 106056 - DNA, 692 bp, Mimulus guttatus
  Intron number 3 from transcript mgv1a015489m (locus mgv1a0 15489m.g) derived from phytozome v7.0 (chr-ID scaffold_61; pos 246172 to 246863 reverse strand)
cttttcgagctttcctgctggaagattcttcagtaataattcataataattactttcatatatcgagtaatgtgcaaaaaatacccctgtgtaatacttatctgcgaaaaaaccccctgtaataaaataactagcaaaaacctcccatataaaaagttaaaggcaaaaaaccccccatgtaaaaaagtcaaaggcaaaaaacccccttagagcagaacgtgtgttccactcgcagcttgtgtgatttttagttcatttttgcttatgaaatgacagaattgcccaccaccatcatcataatctctcttcactccccttttctcttttgattttttgggaaaattgcaattcaatcccctaatttaagttttacaagtttagtaaaattgtaatttttcctcatatttcatgttatctgatcttattctatttttattgtagagtatatttgtctttttacgttcaatcaatattgaatgtttaaaatcataatgggtgtagtgagctatttaaaaatttacaaggaggttttttgctagttatgttatcagaggggggtttttggcagataaaaattacacaggggtactttttgcgcattactcttcatatatctcctaatattgttaagacaaaattcaaaaaattaacatgtagtagaaaaaaaaaacaggcttcctttctggccatac

SEQ ID NO: 106057 - DNA, 996 bp, Mimulus guttatus
  Intron number 1 from transcript mgv1a007843m (locus mgv1a0 07843m.g) derived from phytozome v7.0 (chr-ID scaffold_25; pos 416927 to 417922 reverse strand)
caagtctacgcgccgccctaacttactcctttggggtatttatctttctcagtttctgcactctgccatttcaatttgtcattttcttctctagattatttcctattggaaattggaattgtctctgataaacctaaattctaattgtttagttaattgaaccagattatagtaagaaaaaaatatctcaagaagtatgaatttcctaaattgcaaatgtcagaataactccatgcattttaaagtttgttaaactgaaaaatttgcaaattttttgaatctatgatcgtattgagtgatcttctatgaaaaatttgtagagcacttattcagtttttttttttcttttttgtgtgtgtggtgaaaatggatttaaccagacaaaaaacccttattgcgtgaagtcttgaatattgagataatctattcatgattagttaactatttgaggatgacttgatgaaccatcttctacgaatgatgagttccctatatactgtctgtcatacctcagaaaagtagaaaatattgttgtctaatcaaacaagatatgttattcgcctagtaaaccaatgttcccgtcgttttaaataccttatcggtgcctctgtaggagactacttctatttgtatattccagaatcacgcggtaaatattatcaagagaagataagttctagcattgcccatggtatataagtcatgcagttctcttccaaaaagaacagcataattagagcagattatacaattatttatgatgtttaattgtatccaactgcttctgtgcttgtagttttgggttctgggtttcgggttcaatttcgatttccgtccaaaaaataaatagtgaaagacaaaataagaaataaaaataaaaagaacacacacacacacactcatgggttacattaataaaaactcgggctgaattcttctattacatgcctcttgcttgcaggtattcgctttaagaagatcctttattcacaaaat

SEQ ID NO: 106058 - DNA, 1005 bp, Mimulus guttatus
  Intron number 2 from transcript mgv1a017508m (locus mgv1a0 17508m.g) derived from phytozome v7.0 (chr-ID scaffold_24; pos 630181 to 631185 reverse strand)
agaatctgcttcaacagaggaccttctgctaatttgtatgtttttactttacacactttctttattgtcgaaaagtttcgatttttattttttatttttcttctcgaatttctgaaccctagtaattaactaaaccatcatttcattaacttgattaactatgttcctaatgtaactatcttgtgtccatgagaatcaacatataagaagagtttcaagctgttgtttttctagtgtgtgtgtgtgtgttatctgaaatgtgaaggaaatcacatccaagatttatatttgcttgatcagttgttcgtagttattgaaacttgcatatatttatcgggtaaattacggccacccctgaggtaaggttaaattacaaaaaaacccctcatgtttgggtaattacaactatcccctcaactattaattttcttgcacatccagtcgtctacctttacggtgtcaaattcaacataattttctagattccgtggaatgttctctagtttgtactcgttttgtgcaaaaatgcagtttctgatgcaccataatctgatatatacaagccaaaaaacacatctcatgatcatcttgcttcaaaatgtggaggtcaaatggggtaaaacgagtagaaattggagaatattccatataatctagaaaattccactaaatttgacaccggaatggtgaacgtgtgttttttcataacttgaccttacctcaggagtggccgtaatttaccatatatttatttcatgggatgttaaatgttttatgaaagagtagagtaaaccggtgggttatttgttgattgtcgtagtttgtaaatgtgtatacacatattattcgatagttgagtacttgagttagatacgaagtattacgagaaatatggtcaaaaaagaagtacaatttgatatcaagtcaagtcatttattctcatgtagctaattcgttttttgcgatgcaggttacaccttactttgattattactgcaacggtat

SEQ ID NO: 106059 - DNA, 793 bp, Mimulus guttatus
  Intron number 3 from transcript mgv1a000888m (locus mgv1a0 00888m.g) derived from phytozome v7.0 (chr-ID scaffold_14; pos 1412990 to 1413782 reverse strand)
agaaagctgtatgctctataatttcgttttttaatttatacttagaaataccgtgacttcaagttcatgaaaagtatacatctttgtgtatattgtgtacattttgtattaacagtgcctaatagttttttgtatattcttcaaaagaaagaaatcggtgcttgacgaacccattctataatttttttaagggcaaattactgccaccccaatgaggtaaggtcaaattacgaaaaaccccctcatgtttgggtaattacaactacccctcaactatgtattgttttacaaaaaccgccctccttcaataggtaaatttgacactgtaagagtgtacgtgccgacagttcatagttgaggggtggttgtaattacactaacaggagggttttttttcgtaatttgatcttacctcatggggctgaccgtaatttgcccctttttgaataattttttcccttctaaccgttgagaggatttgtgtatctagttattagaatatgtatttatatatgatcttttatagaggcatattgaaaatgagtatacaaataatgatccttcataagaatagatatggattcttgagataggctggtagccattcttctgattccttgcatctttaacggagtttcttgctccttctggttgtcgaatataacattgattatcagcccttttacttttactctaatatgattaatgtggaatttgatggtaagaaactttgggtcttttattttcgagtctttgatttgttttttcaagttctgatttaatgttctaggat

SEQ ID NO: 106060 - DNA, 468 bp, Mimulus guttatus
  Intron number 1 from transcript mgv1a000888m (locus mgv1a0 00888m.g) derived from phytozome v7.0 (chr-ID scaffold_14; pos 1414041 to 1414508 reverse strand)
agctcagaacctctctccccgtttggaaacaagaggttataaattcagaaatcccccctttttttttagggtttctttatttgtttatttattattaggttttaggattactgtaattggttttgattggggtttaattgtgcgcagttttgaagatgcaaggtttttggcttctgttcttaacaaatgcaatttcgaatttgagaattagaaataaattcaactagttattgtagtttgacatgatttcgttcttctagggatttggaataaatagcttaacaaattatttttcccccttttgtttgtttgtcttttaattgaacaattatagtttttttataaaaaaaaaattaaaaaaatagcatgctcttcattttaatttctaattttctgtttcgggttttagtctactcgatacggggtagctcgaatgtttttgacacgggtcatttttccaggtcacag

SEQ ID NO: 106061 - DNA, 372 bp, Mimulus guttatus
  Intron number 1 from transcript mgv1a020274m (locus mgv1a0 20274m.g) derived from phytozome v7.0 (chr-ID scaffold_60; pos 963981 to 964352 reverse strand)
ggtcagaaatctgtcaagaacagcatccatccaaggtatatttatatatataattatttgcattatttatatctaaaaaatattctttaatattaactaattatttagttcaacaataaataaactggtgatcagcatgaacggcattttttcataaggacttttcgagcagtgagttaattaatgaagtttgttcgttcgaatatatacaagaaatgtttgaaatagatacagaagttcttcgtttagaacaaaaatatcaaggccttgtccgataataggtttgattatcctggatatatttattatttatatatatatattttgaacaaatatcttgcttttactcttgtcactaaggagctattaccg

SEQ ID NO: 106062 - DNA, 797 bp, Mimulus guttatus
  Intron number 1 from transcript mgv1a003647m (locus mgv1a0 03647m.g) derived from phytozome v7.0 (chr-ID scaffold_21; pos 1613048 to 1613844)
gcggtcgatactagaaggtgattgagtctctcagagaagatgatccgtcctttcgcttttttggggcatttattgcagatatccgttggttagctaaatcatttgatagttgcaagttttcatttgtcagaaggcaaggcaattgccttgctcgtgcattggctagtagttctaaactcagttgtatggaatactcggttctttctcctcagatggctatttctgtctaattaatgtattcttctctttgttccaaaacaaagagaagaatcaatatctcttgctaacatctgtcattcacgtacccgataagattccaaaataattcacgttttgaggttgttgcacacatattaagaaaactaataaatatgtgttgattttagagaaaaacatataatgcgactaaagtacccctatcattaatcttagtttcattaatttcgtctttactaactaaaattattaagggcataattgataaacactaattaatgcattattaaaagtctaaaatgacaaataatatagaacaagaaaaattactcaaagtgacacttaatttggtttggaatggagggagtaccatatttgaaatattatcaatacaaaataaaaaagtaagtgaacaactaaaaacgccaataactgataccacgctttactgtggtgttctttctatttttctttttctttttacttttctttttgttttttttttctttttatttatattttgttatttgtttttgggtttaaaagtttgcatccaatctgttcattctactcccactcac

SEQ ID NO: 106063 - DNA, 596 bp, Mimulus guttatus
  Intron number 1 from transcript mgv1a020423m (locus mgv1a0 20423m.g) derived from phytozome v7.0 (chr-ID scaffold_101 ; pos 307995 to 308590)
ataaagttgaggtattattttttatttttcacacgtccttctctctctctacggattctgtataaaatcatctcctgtgccaatttttgttgggctctattttttaattttttttttaaattagtaaaaaggttttgatcttggggtttttttttcctttttcttctctctgtgtgagtttttttcatctacattgaattgtttatgtgctgtaacgtcaattttccgatttttgtttcttaattttacttgcattactctctctctctgggttaaaaggttgtatttcttgtatttgcatgtcgatttttctctgatttttcatgcaccgggcaattgggattttctttattcggtttatgccgacatgcaaaaatttaatttcctgtgtgaatctgtgtatggattatactaattgtatgtatctccttttttcagattctgtatatatataacctttactcctttccagttctgtgaaatatactatttttaaattctgtatacacttatttgtttctatttacgccatttccgtaaattccggcttaattttatttttttccgatattcgtgccaggtgaggagtctcgaag

SEQ ID NO: 106064 - DNA, 645 bp, Mimulus guttatus
  Intron number 2 from transcript mgv1a020378m (locus mgv1a0 20378m.g) derived from phytozome v7.0 (chr-ID scaffold_32; pos 956184 to 956828 reverse strand)
tttcctaaggtgatcaatataattcacacttctctcatttaatttttgcactataaaacaagaatattgtatgtggaagaacttataaaaatataatttagtaaatgttttcgatgatttcaattcgtcgatcttgtcacaaatggaacgacttcgttaagatttggattttggatgataaaaacttattacaatgtcacatgcatgttaattttttttttgccgagatttcaaggtatctattttacgaactaattaaccgacatcctatattaacatgtttctttaatttgaggaacttagttaaatatatcgtcttatagacgctaaaaacacgagtctaaatatagatttaatcatgtaaagaattaaacaattatgcaagtgcacgtataaacatattacatgtccacagagctgaaaggatcaaattatcgaactaataatttaatacgatttcactaagtccggacggagaaaaaaaaagttatgtaagcgattttattaatgcatgtgtcgaggttctactgtatgtatgtatgtatgcatgtatgtaatgtatgtaatgtatgtacgtatgtatgtgtatatagttgagaggtcattaattaatatgtacattaaaatagggtggttgggaagttg

SEQ ID NO: 106065 - DNA, 540 bp, Mimulus guttatus
  Intron number 1 from transcript mgv1a022857m (locus mgv1a0 22857m.g) derived from phytozome v7.0 (chr-ID scaffold_51; pos 1155110 to 1155649)
ttcgcagcttttgcttccttatacgttgcaggacggttagtttttattcatttatttagttttacaatttatttgctgtttgtgtttgtgtttgtttattttttctggaatttccttgttttttggtcgagtttgttaagttctgattgtataattgttgaaattcaatcggttaaaatttattactgtgtcaagtggttacattgagatgtgaatccttgtttaatttattgatttcgtagtggtggaggtggattaatcgaacattgacatccgaagaaacgattcatcagaacaatgaattacctttgatgtaaatgcatctgagatcgccaaatgttctttttttcttggaaaagaacttgtgtaacttcagagatcataaaattggaaaatgcattttgttagtttataattctaattatcaaactttcgatatgcgtaaaaaggctcggggaaaaatagaagtgttgaatttgattctttttttaatatggtatggcagattgtggcaggacgcagagaacagggtttacttag

SEQ ID NO: 106066 - DNA, 526 bp, Mimulus guttatus
  Intron number 2 from transcript mgv1a006072m (locus mgv1a0 06072m.g) derived from phytozome v7.0 (chr-ID scaffold_148 ; pos 379394 to 379919)
tggtggagcttaacaatctgcacagacaggtaatttagaaacaatagaactttgatgtatttctgttgcaacttatttaaaagaaacaatagagaattgcaattaggcacttatatatagtcgaggcatttgtcgttccccgacaccttatgcaatttgaagaatataacaaagaagccggaaatcacaaacaagtgttggaaaatgcaattaaaagcatttaccatttgcgtactaagagcattcctgattaatcgagtttatgcattttatttcgagtctatttcgttcaatgtttagaaacttgtctaggagttcttcttcatttaatattagctaaatcttggttataaatctaataaagcatgtaatgaatttgagtatatagagtacaataactgaaaaaaatacaacaactgtaccacttgatttgccattgtgtgcttgaattatcatgggactcgttactaattcgtgtcattgttttctagataattcatactgaagcatatattggaagatcaaa

SEQ ID NO: 106067 - DNA, 736 bp, Mimulus guttatus
  Intron number 1 from transcript mgv1a021500m (locus mgv1a0 21500m.g) derived from phytozome v7.0 (chr-ID scaffold_36; pos 89359 to 90094)
gattcggccgtgttcttgaggatttacttacttgggtatatattttcaagattccatttttctttaaatctttttatttttattttttttctgtttagtttagaattttttttcgttattgaatggttttcgtgttcttgcaaacttatgtggtttttagttgcattatttttctgtccggtttcgagtgtttgtgtgttcgtattcgtaaatacttgcacgtttttcgatagttgtttcgaattatgtggtttttcgtgttcttacaaacttatgtggtttttagttgcattatttttctgtccggtttcgagtgtttgcgtgttcctattcgtaaatacttgcaagattccattatttatttattaatattttttcgataattgttttgaattattctagttgttgaagggttcgtcgtggtttttataattttcgaagaagttataaacttaagttgtttctacttgcatatttcgaatccctttttaattactaaggttatgttgctttttcggtaattacgtacgaggaagaatgagagagaggagcaggacataaagaatacttttttgatgaaatgaaaaataaaaattgaagagaggattcaaatttcgttatcaaaattgtgttcgatcctcgtgtctcgtattcgtctttcggagattcttacacattttgttctttccaacttttgacagtttgaaaatattcggaccaatagcggttgtggcac

SEQ ID NO: 106068 - DNA, 1051 bp, Mimulus guttatus
  Intron number 2 from transcript mgv1a008682m (locus mgv1a0 08682m.g) derived from phytozome v7.0 (chr-ID scaffold_206 ; pos 7385 to 8435 reverse strand)
attttccgacggccgtgtactcactgattacatcggtaaattaattagtccaatttaattaaatcaaaaaataaataaactaccttttttttcttcttttcttttacttcttttctactctctggttttgccagttgccaccattaatattgcatttttatttattaaattaaatcattcgtccacgtccactttatcttttttttcttttcacacttttttaaaattaaaacatggggctttccttttttcttcgtttggtgggttaagtgctgctttcttgcttttttgcatgtattcataaatcttgctttatttgtgattttatttaaaaaagaaaaaaaaaaaacaatttcaagaaaaatctttgcattatttattatttacaaccagctttttttattacaaaaataaaaattaaaaaaataatattttgatatatgcgtgtacaagctaagtatgtttgggattagtgaagcgattaagatatataagtattgttgaaataacttttactgcgaatcatttcattcagcaaaatcacttttgcatctactgctacactattgttatcacttttcttataatcacttttggcttattagttaagatccaattttattttattgcattttgcaccccctatattaaagcaatggtcctttcaattgtagactatggccaactataatagtcgaatacaccgataaaattaaaggcgatacaaaaatatcgtggaaaagacgaaacaattcaaaatatcgcacgtccacatatatatagttgatgcaatttcacaaaacgagtggtcgtcaaacggtgttgtctctatcatcacgatgcttgctaaaattgaatttttttccaatttcataatgaactccaattgccacttgtcattttcattttttttttccttttcgaaaaggtcccttgtaaaaattgaattgtcgctccaacttttgatgattgtataaatattgtagtaataattgacatgtaattaataacaacagccaagttcttgggactcaagtcaccagtagcctac

SEQ ID NO: 106069 - DNA, 973 bp, Mimulus guttatus
  Intron number 1 from transcript mgv1a010219m (locus mgv1a0 10219m.g) derived from phytozome v7.0 (chr-ID scaffold_7; pos 2383240 to 2384212)
attgttcgaactgtcatttctcttaattgcaacaggtatttccttttttttttttttcttcttttttttgtgcagcattgatttaattgtgcttgtgatatatttacattgttttttttttgcttatatatttagttcttgtggatgtttgattgctgtattcaatcatatgctattacaattacgatgatcttcgaaagttacgacggcggacaattgaaaactagtgcatttgaaaaagctaagagattttttttaggtttcaaccgaacttcgagaaattatcttacgtagatctaataacgcaaatgaatacttggattaatgtaatttatttcacgtatagagtacgtagtatagttaacttgctcgcagttatttgccattgatcgataatctagaatcgaaccagccacttaagagtataaattgtttaatcgaaaagatataaaagtaatcattgtatatttgtttggttagcatttgataagaatcggaagtgaaggtatcgttttttttgtgtgctttttgggccttataagtttttggcttgttaacgatgtcacatcggaatcattcaatgttatatgtcgcaaattttatttaaatcgaaaaagatgggatggtatttgttttgcattggatcccattattattgggaggagaaaaaaatcggattgatatttgggcctgagtgtatacaaatagtcgttccgatgagaaatctgcatgtagatggatttgggcctaaataaagaaaacttcaaaaattttaaataaaaattttaatttattttctttcgattagaatactcgttctgcttatcgtgcaacatgcgagacgattaattagccaaaatgcttgactgttcttttatttgtgtaactcgagtatttgtttaagtaagtaatttatcttaatttaccaatttgtgaaggtgtggcgaaccagctgcgcagagtatctactccg

SEQ ID NO: 106070 - DNA, 879 bp, Mimulus guttatus
  Intron number 1 from transcript mgv1a022333m (locus mgv1a0 22333m.g) derived from phytozome v7.0 (chr-ID scaffold_24; pos 274813 to 275691 reverse strand)
ctgaagataaatctcattttcaaggtattgttttttgatatatttttgtttccgtttggatctagctatgaggtagtcttggtttttatgattcacaagctatatattttagtttattttcattctttgctatttgtgtttcctattttgcgcaattcagtgacttctagttgtcatgggggctgcatattgtcaatcaggaaaactgggtagattggacatgttaatctggggtgatgctgtatgtctttatagacaactgtttaatatggttctatctcgagattaatatgttccctgtatagtgcaggacaattcaattatcttcactgtcatactaacacagaaagggtacatagttttttaaggtaaagcagtatttaagttgtatttgaccaaccatccagttaactctacattggagaaggcaaacttgttaacagtagttgagttttccttcaagatattaattacaacttatcattcacatatctctgtagtccttcagctgtgtcaatgtgcacgaccactatctgtacataattactgatcttgtccttcgtttaaatgaattcatcttttgttgtttcttactttgttgatgaggtttcataacagaagtcctttaagtttcaccccaatttgtttggtaattctggtggcttcccgtgtatgttgtttttcctttaagccattttaagtttcttaggttgacaagtgtcattttttaattttagagttgaaaccccaaatgatatatggtggaaacagttgtaagatctggtgtatcatatatcgatttgtttgataactgttcttactcatgacttatatagatacatagttgtttctaatttagtattgcgattatgttgcaga

SEQ ID NO: 106071 - DNA, 589 bp, Aquilegia coerulea
  Intron number 1 from transcript AcoGoldSmith_v1.021536m (l ocus AcoGoldSmith_v1.021536m.g) derived from phytozome v7. 0 (chr-ID scaffold_11; pos 4097080 to 4097668)
atccattcatcactactgattacgtattattcactactgttactgaaattagactagactctagagtgtattctatgtatctgttgtagaaaaatctttacagtaatattactgtttcgtggactaaaggttgtttgtgttattaaagaaaatgttttgagtgatacctgttgctttttttattgtttagttcattcatgtttcgtgaacttgaaggttgtttagtcataatgaaagatcatgtatgactaaatttaaaagcatcatctacaagtatatttatgtctaggttttactgatttttatgaaattaagtaatgaagacattattttgtacacttttataaagaaatttagttgaattgtatcatagcgatacatttagacttttcaaagtttttaatgaacaaatcttataattttgaaagtggagaaaataacttatttctatatccaaagactgaattccactagattaatatttgctttgggtgaaagatgattaggcaatctgtgggcatgcatcatattgcgattgaaattactctgtttttcttatcaatttagttgatgtcttgtgcagacttac

SEQ ID NO: 106072 - DNA, 600 bp, Aquilegia coerulea
  Intron number 2 from transcript AcoGoldSmith_v1.011935m (l ocus AcoGoldSmith_v1.011935m.g) derived from phytozome v7. 0 (chr-ID scaffold_9; pos 2591003 to 2591602 reverse stran d)
caggtttgtgtttctgcatacagacttcttttcgtttgtggttcattatctttaccacatttcatatttcactacattttttggattatgtagcttaattgtactttaagttgaaaataaattttggaggaaagctgtagtttggatctgcccttttgaatgaaattcagatcgaggttgattaatgtatacttattgttatatgaaaaggctaatttcaatttagcagaattatatgccctactgccttaggttgtcaattgagttgattaaggatacaagaatactgaagtttgtccgattgaatttgacaatttgaaagtagccaatttggggaacaggaaggtttaccagccttgaaagaaacgtagcgttgtgagttgtgacctatagcttaaggatcaaagtgtctatattttgcactatgttatgaattatgatcatcgaattgttataacaaaaaaaattatcttgcattcctatggtttccattccccctctatgacattttgtatcagtttacgctgtatcgctcaccaagtttgtctggctggtgttggtgcagaccagaagacctccgcaggccttttgagcaatttg

SEQ ID NO: 106073 - DNA, 558 bp, Aquilegia coerulea
  Intron number 2 from transcript AcoGoldSmith_v1.008052m (l ocus AcoGoldSmith_v1.008048m.g) derived from phytozome v7. 0 (chr-ID scaffold_27; pos 2594478 to 2595035 reverse stra nd)
ctccatcaccattgcgaaattctaagttttttcaggtaaagttttcatctttttgtgtgcttgaatgtctctgtatgagaatttagaattggatcactttgatgtttgcaatttagttgttttcagtataagcatttttttttttttttatgtaattgtagaattctgatgtaatgccatgagttcgctatcatttccttttgtttctctctaatgtgacttttgcaatcaatttcataacccatagatagtgttgtttgatcttaagattgtgatctaatagatccttggttacgctttcaaatgataaattggaaaaaaaaattcctgatttctgattcggcatacagaatgtagatccctctagtgtgttatatctcttatatatttgtttaatttgggagacttcaatattatgaattttttctatgaatgaatcgatcttttgagctccttgacatgtagtgctactgttatccaataattcttcttttatgctgtttttgctatctgcttacattgtcttaactggtctcccatgttcaatgacagtctaat

SEQ ID NO: 106074 - DNA, 708 bp, Aquilegia coerulea
  Intron number 2 from transcript AcoGoldSmith_v1.025976m (l ocus AcoGoldSmith_v1.025976m.g) derived from phytozome v7. 0 (chr-ID scaffold_28; pos 697403 to 698110 reverse strand )
ccgagtaaatgtaagtttgattttattcagttttctgacagaaccaagttattttgggaatgagcctgtggctcaatggtagcacccctctcacaaagtggagaggttgtgggtttgagacacttcaacagctgattgttgatataagtttctacatgtaatttaaaaggggtagtggtcctctcaaccctgcttgtcaataaaaaaaaaaaaaaaaaaaaagttattttggcatactgatgtgtcctctgcagtctgcattaaccgtccaatcatgtgtcccgcattaattggatggtaaatgcagccgacgcgtcagtgtgttgggatttggatatgccatgcccatgtagaatcagagttatatttatggatagttaggatcaatttaacaaaacactgatcagaatgctctgccccaaattaggcagacattcaagtctggtaggtttggctagtagttttgctttaatttaataccattactatgatggtgggaagtacagatgaagtaattgagttgctttcatctagaaactggttgaccacaaggtaccacaatttctctgaaatagtacattcttatattacagaagaatcggggtgtcgtcgtgctagaacagttttctttgtgtaatggatttattagtattgacatgcaatgaacattttttgttgttgttgttgtggtaattacaggatttgaaa

SEQ ID NO: 106075 - DNA, 726 bp, Aquilegia coerulea
  Intron number 2 from transcript AcoGoldSmith_v1.002544m (l ocus AcoGoldSmith_v1.002544m.g) derived from phytozome v7. 0 (chr-ID scaffold_5; pos 1814604 to 1815329 reverse stran d)
tcgtaaattgcgcgcccataaaattttacagtcttcatttatttatttatttttgtttcctcaccatattttgttcttattttgacataatactatactcaaaaacaatttcatgacactggtgtgtccgcatcattcactgtccaacaaaaccacataccttgaggagttgagatcataggatatggaatgatgcagacatgccagtgtgttgaaaatatcaaatatataacatgacatttaattatgagcaatggtacattagtattgctcattttctaccagtttccatcatatcacttcacttcttcatgtgggggtggaggggtcattaattggaatatccaatgaaatgaatggtatcacaaagattccattggtacgttaataatctatcccaagaactctaattttcatagttgaattgaactattcccctcaaaatccctttttctcttgtcacctgaccttcccatagtcatatgtaggagtcaggagagttatgaacaaggcaaatatcaaaatcatagtcatatgtttttctataatatcctatgtagagtaaaacaagtcagatacagtacccataattcaattgtttggccaatatgtgaaatgttgctgacatatatatgaatcaatatggtttatctacttatctttttgtttctagttatcactttttccaaaataagacatttataacagaaatatgtccaacagggc

SEQ ID NO: 106076 - DNA, 426 bp, Aquilegia coerulea
  Intron number 1 from transcript AcoGoldSmith_v1.024916m (l ocus AcoGoldSmith_v1.024916m.g) derived from phytozome v7. 0 (chr-ID scaffold_118; pos 8048 to 8473)
gatctgattgcgaaaaaaccttgcaggtaattctttttctctaatatcgtaggttgttttgaacaaatttgtctattcttggtcttaccaagttgtacttttggaacacaatctgtattcttcactagatttacaaattgaactgtgattctaaataacttatgtcgactctttaaatgttcaactgtttgttcattgggggtcttctattggctgtgtctattagagaagaaaatatgctattgttgtagtctgaagtttattataaggcttgtgatgtattttggcttgaatcgattaaatttttatgggtctggcttctgagtcatcagttttaaatttatccatttaccatgaatttgtggttcaaattttcatcctatatatacaatcttatgtttcaatattcaaacagatctctgctaa

SEQ ID NO: 106077 - DNA, 695 bp, Aquilegia coerulea
  Intron number 2 from transcript AcoGoldSmith_v1.017266m (l ocus AcoGoldSmith_v1.017266m.g) derived from phytozome v7. 0 (chr-ID scaffold_18; pos 2238879 to 2239573)
ggcgtccttgcttcctttagttcaggtaatttgaaggctgctcttgttaataattatgattataaaagaaactctacttggtatcatacaaagtttagttcactgcttctggtttatttttattacaacttatttttattacaacttcttcttaaacttttcgttttttttccttctataaagcattctttttggagtaaatttctaatataagtgatacttatatgtctttaatttgttctggacaccatctctgttgatcaagcttcttcttgtatgccttttccccatttcattttccaagtacttattgcaatcttttgcaataaacattagtttaggtttttcctctgacaattatatatttttctttcttatattttgctatattcatttttgttgcatttttccttttaagcttgggtagattatggtgttagggtgaatttctagagaataatagtttaatgtatgcgtaggtgaatcaaatttccaaatggttagcaaaattttgtttcagctgatgattgataacatgaaacttgctttaaatttgtattttctaggtgatatttattaattgaattgtttctaattacatgcttatgtattataaccatcttaacttattttttacaacctgatgatttcctgaactagttgttgctgcttggagatcaagtggaagaagccgt

SEQ ID NO: 106078 - DNA, 682 bp, Aquilegia coerulea
  Intron number 1 from transcript AcoGoldSmith_v1.003236m (l ocus AcoGoldSmith_v1.003236m.g) derived from phytozome v7. 0 (chr-ID scaffold_13; pos 5269408 to 5270089 reverse stra nd)
gtattaaaggtattttctctctctatttcattttatttcgtcaacgcaaatgtgttataaacaattccttggttactagtatatttattctagatggctgatctttttttatgtttctgttcagcccaatatttagtctgtctatatatatatatttattgttcaattttagcttcagatttgttctaattaacgaatgtgctctttggatagcagaagtatctaaagagcacattgtcagaaaaaaaggaaagccttagaactgcaaaatgacctagacagcagagaagaatttgatgtaaactatttgcagactcggataacagaaaaaatcttgccaaggatttagatagcagataagattcagatctagaggctattattcatatttagaaatcaacaaatttttgggcccttgattttttgttagtcttccgaaactggtagttttgatattatgtgtagtattaaggttatcttggattaactattacctgttagatcttagaatggagacatacgcctgcccgtgactttgccatgatcactattttgtacgagtgagaatctgcgtatggaagtttcgtgcatagtttccttgttgatgtaatttgatttttttttttttttgggtgttgttggtgtaggtgttaaatattttgacatcatcgagggagctgag

SEQ ID NO: 106079 - DNA, 424 bp, Aquilegia coerulea
  Intron number 3 from transcript AcoGoldSmith_v1.009658m (l ocus AcoGoldSmith_v1.009658m.g) derived from phytozome v7. 0 (chr-ID scaffold_30; pos 2533001 to 2533424)
gttgatttgtggaatttttttgtaagttacacatgcattttaaaatattttgaagggcattggggaagttctactactgagtactgactactgacattggtaacgtggccatgtacatggggttaaatcttatttataggtaattcgatagtcataactaattggattatcctaaccaaccaacctccaattttaattgtggacctattattttttgaacattcaagcgaatgtaatgaactggttggttatgatcatctaaccttgcttaaaattgtccttggcaggccctttaagtgctatctcctttttttttcttctgaacaaagaaactgtttgagtttcacatttgcatgtatctgagactgactaggactcttacaatgcagtaccgtgagcgtgttatctggattggacaacatat

SEQ ID NO: 106080 - DNA, 148 bp, Aquilegia coerulea
  Intron number 1 from transcript AcoGoldSmith_v1.026772m (l ocus AcoGoldSmith_v1.026772m.g) derived from phytozome v7. 0 (chr-ID scaffold_17; pos 772320 to 772467)
ttttaagcgtaaacgaggagtctttcagaaagattgtgagaatttttttttttattgttcttctgaaatgaattttgataaattattgctaatggggatgttggtaatggtgtgtttttcttgtttgtttgatgttgtagtgcagcac

SEQ ID NO: 106081 - DNA, 1003 bp, Aquilegia coerulea
  Intron number 1 from transcript AcoGoldSmith_v1.008984m (l ocus AcoGoldSmith_v1.008984m.g) derived from phytozome v7. 0 (chr-ID scaffold_91; pos 637094 to 638096)
accttgtgatcattgctcaagaggtaactaattattatttcctatatatatatatatataatgattactgccctttttatatatatcgtctcattgttgttggttatttctttgaacaaaatttacaagcctgtaatatcttcttcttttggaccatattgcaaaatcatctcgtcatcatttcagctccaattgatccaccttaacattccacacttgttgccacacctttgcatgtttcctgcatcaggatttagaatcagctgagcattgttaacacaatattaattctaccactggttcacactgcctcaccaatacatgtgcgttcaatacgtgtgttaggctactttctttttgataaaatatagaaatattatagatcaagcaaaccagattacaagcctaatcaccaggaatatccccgtcaggttatcagaatgctagatatacatgattaggacacaaaaaaaaccccagactcagacaactatgtcaaaccactgagtgattaaaacagggagctggtgtctgcttctttcctttaagctctcatgtctgattgccaaccacgcccacaaggttgccttgacccgtctgcaacagcgaaaggaatatcttggaatatggcttcgtttctcatggtccatgagcaccataatatataataaggtcgaataggccaaatgtgtgtttggctacttgttaactatatcttatagttcatttgttaaaactaaatagttgaaaagcaaaaaaaaaaaatggataatttgtaagtgtcaatcatgtgttggattcgcttgctctattatctacttgcctatcaaagaaatctcgagggttagaaatcatcatgtggttcagtttcaattacgtaatttttaatgaagttgaataggttcttacattatcctcagaacctgtagctctgacatatcatgtgtttgtacctttgactcttactccaatctgacgttgctacctcatgtgcagtatatca

SEQ ID NO: 106082 - DNA, 897 bp, Aquilegia coerulea
  Intron number 2 from transcript AcoGoldSmith_v1.011138m (l ocus AcoGoldSmith_v1.011138m.g) derived from phytozome v7. 0 (chr-ID scaffold_45; pos 1776278 to 1777174)
ttcttatcctgaacgaaggtacaggagttattcagttattgaaaatatgttctctacattttggtccccttgtcactgattgtgagtttcttagtactaatttggtttcttgcaatattatatgcttcacattatcgagtttgcaattttggggaatttgtcacattttatcagcatcgtacaactcatgtggtgtatggtgcagaccttatccaagtacatgtgttaaaattaaaatagagtgggtatcagatgatatagccctgtatttgcacgtacaccaaaactagtcactctttgattgggtttttctcttttctattggttgaaatgtcataatacttagtgttatttgtttgattgtatgtttgaaagacatgcgtttgattgtatgttttaaggacatgcaattgatgccatgtttttctaaaagccgcagtttcactttttttttttgaaaaaattaggggggatttacacagagtttcacttctttgtatcctaatgtatttatcttctcaagattgctgttgatcgataactgcaaaggcatgcccttatattatatcacctgtctatcccctgaaagacttgtgttttgtggtttcctgaagaacgatggctgtacgaatcgttcaaccctgtctcaaattattttgggcaagaacgatgacttgtgttttgtgattcaaaagttctaccacaatgtctaaatgatttctcgtggcaaggatgcacatatgtgaatgattgatagtaaaatgttttgaagactatgcatcattctctctgacaattcaaaatttcttgcccaaataatttgagagacctctgttaccgtttttggcctgtttactaaagagacctctgttaccattttgcctgtcatagctgcag

SEQ ID NO: 106083 - DNA, 776 bp, Aquilegia coerulea
  Intron number 4 from transcript AcoGoldSmith_v1.015130m (l ocus AcoGoldSmith_v1.015130m.g) derived from phytozome v7. 0 (chr-ID scaffold_56; pos 757522 to 758297 reverse strand )
cgggtgatcaggtgcattttgtttatgcacttttattactagtaatttacttcattttgtatatccatttggaataccaaagcaaatatcagatatggggattggtaggtttttttttcctatagtggtagaaataattgttaagaaaagtgtatttcagatacaacaagtatatctcataaccaaattcgtttgtttgtttagaactaaacaataattgtttctcggaactgaaagtgtatttcggttctgaaagtggttatatataattgtagccctaaatttcaatcttctagttcaatagaaaatctgcacaacaaaaataaaagtattggaaaaaaaattacactttaatctaatttagtaaaccaatatgcatcttaagtatactccaggttttgtatatccatttggaataccaaagcaaatatcaggcacattccacaaagtttttagagaacttggcgctattatgtttgttttcttcaacatcattcaaagttgtctccattattggccattattggagacttttccagagatttacccacgccttttgagaatcataacaataatctttatcttcctatcctcatttgaatctagttcaattaaagaataattctcataaagcttttttccagatcttaagaacatacaagtagtcctaagtagcttcatatccgaccttcaaaaaataattatagaaacaagcagtgaattcatgactcagtatgttttgtattttgcgctagctgtacgaaaatattggttga

SEQ ID NO: 106084 - DNA, 364 bp, Aquilegia coerulea
  Intron number 1 from transcript AcoGoldSmith_v1.018896m (l ocus AcoGoldSmith_v1.018896m.g) derived from phytozome v7. 0 (chr-ID scaffold_18; pos 1653529 to 1653892)
tttggaagttttaggttactataatccattaccaggtatactatttaccaggtttaattattcatacccatttctgaaagttcaatttttaatcatacccattttatcaatttggttgattggctatcatacccatttcttctatttggtgattggttcatagttcatactcatttttctatctgtgttttgttatatgttaataaacattttcttgcatacccatttttactgtgccacaatttagatgttataggaggtaacttgatgaattcttttttatagctagatttttatcatcgcatcaccatttactctgttatgtagtttgattttagttatatttggtttactgtaggtcaag

SEQ ID NO: 106085 - DNA, 567 bp, Aquilegia coerulea
  Intron number 1 from transcript AcoGoldSmith_v1.005095m (l ocus AcoGoldSmith_v1.005095m.g) derived from phytozome v7. 0 (chr-ID scaffold_10; pos 3583683 to 3584249)
ttgttctatcttacattggatcttctccttcttttgtatgttttctatctgtttgatgaaatgtctcactcaacttttctcatattaattaattgaatcattttttttttctgaagaatgttaatgtgataaaaagattgaaagtgaaaaaggtatttagagaattcttctaattatattattaaaataaaacctatcgaaagatctattttgttacttttgttttaattaagcttacattacaatgatgtgttttttaaacaatccaaatttcaagcaaattttgtactggagaaaatgatggaaattgaaatctttcttaaaatcaaaacaccttgatgctgatattgagatatttctgaactgaattcatttgatcataaaagtatgtcaagatgaacaacccagataaagcattattaaaccatgtactgtattattagcttaatggtctatgtcatttgtaaaacatcatttatttcttattttacatatttgaatctgttgactgtaactgatttggttgttgcaggttggaaaggttctgcgcatacaaaaggcacccaa

SEQ ID NO: 106086 - DNA, 775 bp, Aquilegia coerulea
  Intron number 4 from transcript AcoGoldSmith_v1.024519m (l ocus AcoGoldSmith_v1.024519m.g) derived from phytozome v7. 0 (chr-ID scaffold_10; pos 521209 to 521983 reverse strand )
gtcgaaaattgatttgccttcacttcactttctaggtaattttagtcttgtttgtgtttcagcatagtgcattttgctatagcaaataagtaggtggagacttacaggaagggctgctaatgctgttatatatgtcattttctacgagttaatgcattgtctagtcgttgtcttttatccttgtaaggtttaggaactttaacaagctcatgattttacatagaatcatattacaaatagacaatggacgcatggtagaatggcttaggggcaatcgcagaaatctttttgtaagttaaaatggtttatggataaccggagaacaaggttttgtgtgattagtaacaaaagatgcctacatgtagtacatgacatccgcccatttgctaggatttgtatgatctatgggatctgatgacatctagtgcttttagctcaaactcgtcatcttttaaattgtgtacagttccatctgatgacctcttttggtccacagttccatcttataggagaattggtttatattctagcttagctttatgcagcataaatataagactcaggcatacaataagtattggttagcatgatctcatacatgtcgtcaggggtggagaagaaccttggaatatgatcaccattatttttacttttgattctgtttgagatatggtgtttgttggtttcttctttgtttctctttcaaagactagaaaccttaggcttttttgtaattttaatacatgtggcaggtgagacggactttcttaaacca

SEQ ID NO: 106087 - DNA, 687 bp, Aquilegia coerulea
  Intron number 1 from transcript AcoGoldSmith_v1.006028m (l ocus AcoGoldSmith_v1.006028m.g) derived from phytozome v7. 0 (chr-ID scaffold_17; pos 4185111 to 4185797)
taaaaattggggaagaaaaagctcgctcttttcaggtaaaaaaccctactcatcactcgtttcaatgcaaataatctatcagaaaatcatctcttagggttttcttttgtttaataacattgaattcaatcttcgaatttgaaattgaaattgaagttgtagatctaacactactcgcttcgaatgaatttttttgaaattaaagatgaacttgattattattgatattagtaattatcttgcttctgaattcccaattctttgatagttttagtaaattagttaatttggctttgtgattatttatatatgctttggttttcgttcataatttctactaagagcatcttttaagcacgctgagaaccttaaagattgagttttggttaagaaaaacccatcttccaatatcaaatatatccattatatgtatttagacagcttttttcttgtctagaggaaatatgaatgcaatgcaccaatttgattggtttgggttttttgggttttgctgagctcaatagtatacgcagtttgatggtatgatggtatcgcaatgggactagtggagatgttctagtaataatttatgacagattacttttgcctgccatttttaatatagggattattgaggttaaattttgcctgctttcttttgtttattgttttggatgcaggattttg

SEQ ID NO: 106088 - DNA, 836 bp, Aquilegia coerulea
  Intron number 1 from transcript AcoGoldSmith_v1.018685m (l ocus AcoGoldSmith_v1.018685m.g) derived from phytozome v7. 0 (chr-ID scaffold_45; pos 1298147 to 1298982)
cagttgagacagttgaacagggattttctccccaggtaccctttccttcccttctggtattaaagcttattgctgtttttttctttgaaatttagagaatttgctgggcttaaacaattccaatatgttttctgctaagtttcttgaaaagggtatgtgggaaatgtatcaattagttccattatatattgttaccattgtttctgaattctgatatatcattctcattcccttcaaaaatttcttttaagattggcctgtatggaaatgtttttgtattagtgacagtttgggtttttggtagtaatgtgcacattgaaggaaatgcaaaggagaatttttggaatttgattcacctggttttccactaagatatcgacaattttgttgttgaatacaagagctgtatagagtatatacattatggaaacaccaatatggtaggaatttgtatttgcgtaattctgggttttccctcatttctttcctcgaatcgagttttaatgtaatgctatattgataaattaagttttgccaagaaatttatgtgtaatcactgtctcactgaagttggaaaagggaagacatgataaagccttgtttcccacaattcatctaaatttaaaactttggtagctttgctttttcattttttttaatacaattctgatagtcatacacatagcttcatgattttgtcaaaattgagtcattatctttggatagacgcgaagttagtcagttttacgaaatacccttctctatatggtataactaagcaatatttggtgcctgaatcagagcctgaagaaacttccctactcaacagtgctcac

SEQ ID NO: 106089 - DNA, 615 bp, Aquilegia coerulea
  Intron number 4 from transcript AcoGoldSmith_v1.007777m (l ocus AcoGoldSmith_v1.007723m.g) derived from phytozome v7. 0 (chr-ID scaffold_41; pos 785027 to 785641)
ggaaagatgtaagctcttttttcttaataattagtcaatatggtgatcgtaactaacacactaagctgacttcaaacagattggattagtctggaaatatgaatgttttctataaactgaatgtcagagttgacctaattttcaagtccgtaaggaacagtttgatttaattcttacctacagtgactgttttttccaaataaatctgatgattcaaacataaaatcttgtacaatggaatcagtatcatagagtatatgtgaaatgctcgtagccaacgtgcaaaagaattgtatatatgctatgtcaatacaagacacacttcatgtatcaggatcctattttttaagtatttcttgaacctcaagccaaaaagtgtgtcttgagcgaggttacatgtacacaactcatttgtgtgttgaggtcctcatgcagttcatatttttaggtttggcaatatattatttggttaggcctcgatatcccattgatattttgtatcaatgatctttgcaatatgaaaaatatgtatgggttttcaatgtgatcttctttgaccattataactagtgtactgaacggatgctaacaccccttttgtcggcttacaggttt

SEQ ID NO: 106090 - DNA, 987 bp, Aquilegia coerulea
  Intron number 1 from transcript AcoGoldSmith_v1.020840m (l ocus AcoGoldSmith_v1.020840m.g) derived from phytozome v7. 0 (chr-ID scaffold_7; pos 1009319 to 1010305 reverse stran d)
gctaaacctagagttcttgctctttctagtaagtaatttctactttcactttttccattttttttcgatcttactcaacttattactgtttaaacatctcagatgtaatttgagacattgagtgtgagttcagattttcaaaatttatgatttcaaggataatggttaagagaataagagatcaatgttgagactttagaacatatactataattgaatttgctttaggaaatagtcgtaattcaaagatatgagaattgaattacattgtttggagaaactttcttgtatgagttctagtagcttaagacaatttaagggtgtgtttagttgtacatgacatttatttaacaagcactcgaaataggaagcattcaaaggaataatctactaccccaagagcatcataatgtgtagtttaggagtattttctaatatagggatagcgtagaagaatttgaaggaaactttttttcacccttaaccttcgtggacaattctttcatcttgccaagactctgcactaaaatgtggatttacccgtgaataattcctgtgtccgatgaaatacagcgtaaggttttaagcagattatctaattagcattacttctttggagtttggacttctttactcagccccacagctcctgccaccagtttattcagtcaatacttttgtttttcaacggaatctaagatcatgtaattgcagctgtgtagaagaagctttcacttattcatacaaccctcatacatgtttttatgatgtagtgttattttcgtgttacttattgtatataaagcttctttttaaattttaattttatatatcttgtacgtaagatagcaaaccaaaaagcttagtctactttgtttttatactaagcttactctacgctattagtttgtttctttttgatgggaactattactgttacttatttatgcagcggaatcaaaggctcaaagtgataaggcttttctt

SEQ ID NO: 106091 - DNA, 643 bp, Aquilegia coerulea
  Intron number 1 from transcript AcoGoldSmith_v1.022439m (l ocus AcoGoldSmith_v1.022439m.g) derived from phytozome v7. 0 (chr-ID scaffold_64; pos 1268320 to 1268962)
ccgtacgattgatttttccgatctaaatagagaaggttttacatgaagaagattttgctcagcatgttccattcgatacgggtaagagaagaacccgactcggtattgttaaaaaatgaaaggaagcagaaccaagtcaagatgatacgatacggatcaaccccttcttcttgcgccaaaaatcttaccatttccgaagcaactggagctacatctcttttcaatttccactcaagagttcttatgtgtttccacgattctttgagacctcgaaaaatggacaagtaaattccttttcttaggaacacagacaagattcgtcactacaaaaaaacgaatggtaaccctaccattaactacttcatttattaatttcatagtaatcaaaatacatgtcctaccgagacagaatttgtaacttgctatcctcttgcatagcaggcaaagatttacctccgtggaaaggctgatttattcggatcgacatgaggatccaactccattgcattgccagaatccatgttgtatatttgaatcaggttgacctccttgtttctctcatggtacaatcctcttcccgcctagtcccctttctccttggtccccagagaaaacatataggacgggtgccaacagttcatca

SEQ ID NO: 106092 - DNA, 572 bp, Aquilegia coerulea
  Intron number 1 from transcript AcoGoldSmith_v1.005367m (l ocus AcoGoldSmith_v1.005377m.g) derived from phytozome v7. 0 (chr-ID scaffold_9; pos 3991130 to 3991701 reverse stran d)
gtaggtgaagtggtctttaacacatctttaacagggtaagtctttttcatcccacttccctagtcttcaagttatactcaataataattcttgcttggaattgtttttgtatcaatagaacctttgaggtagtgaggggttgccatcatcctcattgctttctctgtttctcttaattatggagatctggccactttttcagagaaatttttgcaagtatcaatctactagaatttgttaaagtcaaaatggtttcttttcttttttatttcgatatagtggtcaaaataatgatgatatatatttttcgaagccttacatactgaatgctgaaagactagtttctttttatcctggaccaataggtgctctctgtaaagtatacggtgaccagtcggactagtacactattgtttgaaaatattcgtgaaagttggcatttctcaatctcatggaccataacctcagggctttattgcttcttaaaatgttctggacatccaattgctttaaatttgataatttttgaatggggcgttttaggtatcaggaaattatcacagatcctagtt

SEQ ID NO: 106093 - DNA, 856 bp, Aquilegia coerulea
  Intron number 1 from transcript AcoGoldSmith_v1.023369m (l ocus AcoGoldSmith_v1.023369m.g) derived from phytozome v7. 0 (chr-ID scaffold_25; pos 1006461 to 1007316 reverse stra nd)
aaccccactgaacgatctcaacaaggtaattaacaaaccctcaattcagtttttctttagggactgtttggtttcacactttaagctcaaatcaacaactaatcagaattattatttttttgttaattaattacatagttttattatgttgttagaattaataattaaataaatagtgtttaaggacaaagtagaccaatgcccacttgtgattgtgattagtatgatactaatgattaattaattagctggaagaacttggggtagttaatttgaatgtgtttgggattaacaaattaaaccctgacagagttttttttattcctaggtgcgcgcatagggagagatgtgagcatttgaatgtgtttctcattaaacattttactggggatattgcattgagatttgaacttgcattggccactaccatttcaatgagaattgcgagcaaggcagtatacaccgcagtaaagttattagtatataagagaaataaccgcaagtgtgaacacaagattgctggttataaacacttattaagagttcattgcttgtgtccgataataatgctgaagcattaaccaactttcttgagttgttagatagtgtatgtagtggaattatattgttgtatgagattcaatgttatagcttcaaggaacaagaacttgtttcaaagcttgaaggcatgttgctttcacataaaacttcatatatgagaaacggttacttagtttaataagttaataatcaagacaacccaagaactttctgttaaggttgtgattagtcatatcttttattgttattgagattttatcacgcatacacttgtaacattttcttttcttttcag

SEQ ID NO: 106094 - DNA, 996 bp, Aquilegia coerulea
  Intron number 2 from transcript AcoGoldSmith_v1.026200m (l ocus AcoGoldSmith_v1.026200m.g) derived from phytozome v7. 0 (chr-ID scaffold_68; pos 442215 to 443210 reverse strand )
tgttaagaagcttcctgacaaagtcattgtacatcgtgagttttctattgtttctctttccatcattaattgatttcatttttctttacgaaatattgaaacataaagaaaacatttgtaaaagaatggaataagggcaatttgagaattgcttttgtttaaatttgaattcataataatatatttggttggagatcttccaacccagtcttgtacaggtcaatcttttattcttttaaaatccgtaatcagtatgaagcaggttaattacacgacaaattgtcagctttctgtttcatgaactcttgcaatttgaaattgattcttcaacaagtgtagaggagctgtgtgtctttcattctctcagtgatgaaaaatatgtctgtagttttcaaagttcaaaatttgggaggaaagttcaatttatcttcctgcaatgtttgaaatgccaatctcatcgtatagtgattctttctataccttaaatattggtataggtagctgtgggatgtgatgtacaaaagttgtggttctgtcaaccttaagaaccacagaattaaaattttcaaacctttgctttccagttccttttattggtggtatttcacatatatacaaaagtaatttcctcgcaccagtttctttactgcagaaatcaaacgatgtattgatctttctttatggatctgatttatgtttagaacttaagatttaggactcactagttttttttttttatatatatatatatatatatatatatttccatcctattacatttcttgcttttttatctatcatcagcatcagtaagatcttcatcttttgtctcatgttgcattatttgaaccattattatatgcagccataaatacatattttcaggtgaagtatatcatggtatgatcatgatttaataaaagaagagaagggatttcttttgaccagtctttcaacacaggcagtgaacggaattcatcaacattgacttttgat

SEQ ID NO: 106095 - DNA, 949 bp, Aquilegia coerulea
  Intron number 3 from transcript AcoGoldSmith_v1.011432m (l ocus AcoGoldSmith_v1.011432m.g) derived from phytozome v7. 0 (chr-ID scaffold_81; pos 898350 to 899298 reverse strand )
ttggatattgatcgagtcaaatctgttttcccttagtgagtatattaactcctatatggacgtaatgtttggtttggtcttttttaatcaatgcaagtcattcatataaaactgtagcctctggtttgagctctaaagatgcccaatatgttttagcctgtttggagcatttcgagccaatttatctatttttcatttctagtgctttttatttctttttctttatgaaagcttttctaggaaccatttcaggaacagtaagattttaatctctactgttataaagtcgcttttagttcaattcgtgcattaacatgtggttggacaaatttatcttcccaacactatggacagaaataaactcttctaaagaatgaagggatccatcctcctagactcaatactaaacacaccctttagaagttctctaagatggatttgcatgtacgtgatggcggtgaataacatccatgacaaggaaaatttgaagcttcaaatcatgcagaagaaacaaaagaatgatattgatgtaaccatcatggaaattaagaaacctggatgaacaaaggagtttgctttcaaaatataccattgctggagcataatcatttcagtcaatgttaactgtatatgaggcaaccaatattctcacttcgccaattttagcggagtacggatcagatctattacaaaaccattagttcaaattttaagtatgagatgaacatcttaaacagtcaccattgtatccagttcataatttttgagacataaattagtaacgaatgtaccttaattggtaaaatctgtgcaaggtctagatatatgtatcatctatgtagtctggtacatttttatgtatgtctactgtgacaagttttccatcatgtagtcttgatagaattttgttgcccaattcatctgttttcttgcagtggcaaaatattga

SEQ ID NO: 106096 - DNA, 512 bp, Aquilegia coerulea
  Intron number 2 from transcript AcoGoldSmith_v1.011432m (l ocus AcoGoldSmith_v1.011432m.g) derived from phytozome v7. 0 (chr-ID scaffold_81; pos 899347 to 899858 reverse strand )
tatttcttctaattccattccagcttttcgtagaggtaatgtaatgtacctttttcttccacagcataaaaatatttttgatttgggtttttattcatatcgccaacagtttactacatatgtttttcattttatctgtgtttggttcttaatgtttattatgaattccattaatttgaaccatttaaacacatatgccaacagtgtgtgtgtgtgtgtgagacatacagtgtcccaattgtgatttatttgtaacccatgttaaattgataaacaagaatatccatggttctcaacttgttattgtatccgcgtgtaatcgtgcatccatcacatcttacattggtttactgggtttagtgagctattggcatgataatttaattttctttagtagtgctatttgaatgagaggaaccatgtatgtaattgggaaccattgaaaatcataatctttcctactttggtgatggtttgctgcaggttctatccccggtgttagttttgaagaa

SEQ ID NO: 106097 - DNA, 552 bp, Aquilegia coerulea
  Intron number 1 from transcript AcoGoldSmith_v1.011222m (l ocus AcoGoldSmith_v1.011222m.g) derived from phytozome v7. 0 (chr-ID scaffold_14; pos 2060493 to 2061044 reverse stra nd)
atctttctcccactatcggtatgtgtgtgattatgttttacctttgaatggttttcttaagattctgatcataattctaattaaatgaagaaactttataggatagattatgtaacattttactcatcttatgtagaatgtgtgattattaaatagattttgagttcatgtggactgcctgtcgtaggacacttttgactgcctgtcgtaggatgcttctagctttctaatccagctgcgactaattctaacaaaattgatgcaccctatatgatgcttcatcttgtctaataagtgcatttagcaatggtaaaattgtatctcagttggacatttttaaacctcaacttctacctgttttatccttaagtattatttcacaaagagatgtaaaggtgtcattctgtgcaatgtggaagttcaaaataaaaaacagttactcttgaaataatttcatgtctttggctctttgcttggttatttatttttgctcaattgctttggtactttattgtaggtgtggacttcaaggtcaaaatagttactcttggg

SEQ ID NO: 106098 - DNA, 487 bp, Aquilegia coerulea
  Intron number 1 from transcript AcoGoldSmith_v1.000641m (l ocus AcoGoldSmith_v1.000641m.g) derived from phytozome v7. 0 (chr-ID scaffold_41; pos 1365739 to 1366225)
tagtaagaatttagaatttttcctctcctcgatttctgtgataaatcttttgcttaatttcttcaagaatcaaactggttttgttttaaatctttacttcattactctatttactagagaatcatagttgatgctttgtgtttttccctaattaaaggatcaaatcgttaattgtcactgttttcatcaatttttgtttggaactttagatgttgattttactaataaaatttagcatgtttctgccaaaatcttcccatttgatcaattagagactgttttctcttttgttttagttattttgattttgaaactttgcaagcaatctgataattggctgtgtgtgatcgcttttgcactctatcttgttatattcagttatgtgctggtttataattaacctatgacgagcatcacttttgtagtttattgttccagtcatatttgggagcttgattgctatttggttttatgtagtctttcgacc

SEQ ID NO: 106099 - DNA, 1014 bp, Aquilegia coerulea
  Intron number 1 from transcript AcoGoldSmith_v1.008955m (l ocus AcoGoldSmith_v1.008955m.g) derived from phytozome v7. 0 (chr-ID scaffold_9; pos 5989390 to 5990403)
tgacgagactaccaaccttaagtatcgagtaattggttagtcttaattcttacttcacttttattttaattattattattatcaaagtgtttgattaaatgtcttgagttcaaaacttctgaggggtttttttttttttttttgtgtgtgtgtgtgttttagatgtgtttgattaaatgaataagttgtaaactgtagcatttgactgctaataagctacctatttttgacctagtctctgctaaagtgctaataagctacctatacacggatacaccttaatcccttacagttaaactctctgtttctggggatgttggtccagcatactgcaatgagttaatggaattggtcacatggcatatgagcgagatggtctggtcccatctctaaatggttgcttgtttgtacgaaaagtgttttttgtggtttatgtgtgtttgattaaatgatttagttgtaaactgtagcatttgactgctaataggctacccattttggacatagtgttttgctaaaatgctataaaaaaaaaactctttttataagatttaggccatattgtcagtgtgccctgtaccattactatttaagcccttaagattaagtctgtttttgggtatgtttctccaacataatgaataataaaattggtcgcatggcacatgagcggtaaaatccttatttgtccatataaacgttgatggtatataaatccctaaatggttgcttgttattgtgtttttgtttttgtttttttttccatgtcttaataaaattgttttttcttctatgaatatatttcagtgggatgccttgtcaagtcatttttaaaacattataagttcaaaaaactaggcaataccaatccttcctctaggtctcattacttatcttttgtgcttgagctcgcgactgaaatacattcacagtttcaaatagaatttaattagtagatgaaagattgtcaagaagtaggaaataattttgtaaacattacaggagtgccaggtg

SEQ ID NO: 106100 - DNA, 917 bp, Aquilegia coerulea
  Intron number 1 from transcript AcoGoldSmith_v1.008299m (l ocus AcoGoldSmith_v1.008299m.g) derived from phytozome v7. 0 (chr-ID scaffold_35; pos 2272631 to 2273547 reverse stra nd)
ggttgtcaaaaggagaattccctcttggttctaaggtaaattttctgctttattttcattattatgatcatgtagaatttttcattgttattgttatagccaaatatcaaattaaattagtaagattagtacttatttgatgaaattacccagtggagaagtgttctcacctgttgactgtatgttataatgattgtacgataaaatgaaatgaatggaacagtgtaagtgaacagtgtaagtgatacgtgtaaggaaattccgaaagcttttcatttgctacacggtacaaatcataatatcatgtgcgttatgagtagcttcattttctatgaaattcatataaactatctatgaactcaacctaaatagacaaacattggtgttgtagtgcaatacaggtttacagcacggactcttgcacatttgtacttctgatttcctattgcaagatttttttttattggcaaacctggttttaacgagatcagtaactcaaagatccactgcctgagatcgaacctcttttgcaagatattgattagctttagttatacactattctttagtcgaacactcgaacatgagcttttcgggagcaaatatttggtaataaatcatttcatttgtcatacaatacctggacataagatatattgttctgcatcaaaagctactcctaagtcttctattctgattttgtggttttataaattcttgcactcagtaaccaagtcagattctgacagccatttgtgcatacagcttatagatcaccaattggccatgttatgtatgtttcttccgaaattctatttttcatttagtaatggttatggcatattggcacttgatgaattttttttatggtgactattgcaggttggtggaaagcgtgtaggaatagttgggcttgg

SEQ ID NO: 106101 - DNA, 883 bp, Aquilegia coerulea
  Intron number 3 from transcript AcoGoldSmith_v1.005465m (l ocus AcoGoldSmith_v1.005465m.g) derived from phytozome v7. 0 (chr-ID scaffold_5; pos 4143301 to 4144183)
actctaagcaaggagaaaaggaattccaaacagaggtaattatagtcattatttcaagtactttatccttgatattcaaatggttggcttataccatgaccagcaaactcattttaatggtgttttgaggttttaactgttaatgtatgttataatagcttatgatgttaatatgattgcatcaagtcttcattctggtccattttaaaatacaagcaaggttaaagaaggccagttcttggaaaggctatagaatctaggaaactactcttcactagtaagccttaagacattgatcagtaactggaaaggacacatgcaattattgtttgcattggagggagttactaaagctactcatggatgttttactcattggttaagcatcctgttaccttttttctttacaatctcttcttgtttctctcacagatttgaatggttctctattcccaactaagattgtgcttttgaattgaaggaacttccctagcatttcaatcatgcattgttgatggtatttacattttcgctgtaggtagttctttgattctgtcttcctggattcccttgtctctattcttacaatctccttttccttctcttttaatcttgaaaaaactttatttctacctaagatcagaatcttttccgaacgatacttcctcagcaccaattttgtgatgctttaatcatgtaatgttgatgtttcctaataggctctaaagctatattgattctctcttcgtgagttttttcatctataatgcgactattttcagcatcaactttgtcacattgattaattatctttgttggttttttacagtatttgttttcttcctcaggttctgttacttgggagattgcatcacaggaacct

SEQ ID NO: 106102 - DNA, 406 bp, Aquilegia coerulea
  Intron number 1 from transcript AcoGoldSmith_v1.011471m (l ocus AcoGoldSmith_v1.011471m.g) derived from phytozome v7. 0 (chr-ID scaffold_11; pos 4397632 to 4398037 reverse stra nd)
ctgctaagaggaataaaaaaaggttagggttttaattctctcaaatttttttttttttttttttaaattttttcaagagatttgagaattgggattttgtttattgtttgaattttgagtatttactgtttaattttccaaatttcacatgtgtttgcatataaatagaagaaatatcttgtatttttttggtgaaaatcatcttaatagattgtaattactgaagattattgacgaatgactcgccaaagccacataaactgataagatagttcacaatagggagagggttaggttatttttgtttgggtagaatttttttcttttggagtatttatgtagactattttttttttttgttgaattatcaggcgaccatatagaccaatagaaccagaaccggtgg

SEQ ID NO: 106103 - DNA, 579 bp, Aquilegia coerulea
  Intron number 1 from transcript AcoGoldSmith_v1.023476m (l ocus AcoGoldSmith_v1.023476m.g) derived from phytozome v7. 0 (chr-ID scaffold_1; pos 9067082 to 9067660 reverse stran d)
atcgaaactataggtaatcatcattcttttctgtcattcaaaatggctttttgttggtttgctttttgtgatcttattctgttttttaaaaaatgggtttgatgggagaatatgttttctgttttgtttttttttttttttttcttgaagtttcctttgattttatttgtttatgcatgttttgatttctttggtttcttatacattttcattgtttctcattaatatggattgcggtgaagaacattttatagctctttggatttattttttttctaaatgttttgattgatttcttgtgttctaattcgaaacacgttttatttcaatttgcatttgaagattatgtttatagggacaaaaatattgaaaaacaaaagctttttgctagtttttatatagtttaaaggactaaatgttggaaaatggagtaaaaatggtatatgtattgagttggcattttatcttcattagtcttttatgtttctatttctatctgaattattgagaaatttgggttttttatatatactttgtttatagagctgatgacgtaattttgattgattcttgcagagt

SEQ ID NO: 106104 - DNA, 932 bp, Aquilegia coerulea
  Intron number 4 from transcript AcoGoldSmith_v1.010902m (l ocus AcoGoldSmith_v1.010902m.g) derived from phytozome v7. 0 (chr-ID scaffold_20; pos 4345518 to 4346449)
tgttattcagtcctcagcatctaacgccaaaattggtaattttttttctttctgctttaggtttgctgttttatttgtacatttaaacttttttaagattcaatatacatattttcttacttcatgtggcatgaagttggaaatcaaataattgattgtattctatttcttttgtgataattaatcaaaggtatatttccgttagttaatccaagaaaggtgacacacctggtttcggagagtgagcacttagcagttagggaagaggtaatagcacaatcaactaaacctgatcccacaaacttacaaatgcaccctaaactatccttgagttctaaatatatatgaatcctgagatttcagacttcgttagttttaataatgagcttgaaaattccaggacttgagtatattgatttcctgacaattaatgttttcatagttccaatgacctaatgatctcccccaaaatctcttttgagaaagagacattagtgcatgagattgtcaaaaatcacaaaagacttaaaaagcacctattttggagggagataggcataagtttttcatcaatatagtagcaatgaatggacaaaacatttatagtaatgtgttttcaggcatcgttattgacactacatggaaagtcccaattatgtttccacaccttggcttatttatcatttgccataatgccatcttgtcattcaggtagtgatccctaggcctcccttctcaactagattatatgaatgggagtagcgcctaaactctaaactacaaaacaaagccatttcagaacaatcaaattctagatgaaaactgaatttccaagcttttgaactatataatcttcgaagccaagtacatattttcattgacttacccccatgacagtgtgcttcactttgtctccacacatcctgttgcac

SEQ ID NO: 106105 - DNA, 690 bp, Aquilegia coerulea
  Intron number 2 from transcript AcoGoldSmith_v1.013143m (l ocus AcoGoldSmith_v1.013143m.g) derived from phytozome v7. 0 (chr-ID scaffold_76; pos 651967 to 652656)
cgagtacctgcaggaagaacagctccttctattttgtaagtttttctagctgaaaatggaatctatatgtttagttttcagattgtattgttagaattatgaatctatttgaaagacctaataaattgttataattctagtaagaaatctgttttgttcgaatttagaaaaagcatgttagttgtttgaaggatatatatatgaagatttggaatttagtttgttaacgactaagcatggcgtgtagcgataaagtctgattttgtttttaagacaattggtggtcttctaagagcaaatcaatgacacaattttattaatgtcagtaatgccttaagtacgaatgagattcaaacttgaaacaaatcccatgcaatggtgaaatgtttttcagtttactgttaaagttgacaagagttttcttgtgtaatatcttccattaccatgaggcatgagctatttgataattgttagactgaaaattctcaacatatctaaagtagagacctgatctttcgatgttgcgagttcaaaagcttttattttatcttaaattgaaaagatttttcctaatttttgtcaaatgtagttgaaatctgagttgggaatgtcgttttgtgcacatttttcaaagttttgggttattatactataggttattgagaagtgattggtcctcaagagagatta

SEQ ID NO: 106106 - DNA, 758 bp, Aquilegia coerulea
  Intron number 1 from transcript AcoGoldSmith_v1.013920m (l ocus AcoGoldSmith_v1.013920m.g) derived from phytozome v7. 0 (chr-ID scaffold_8; pos 290807 to 291564)
cctgataagacagaagaccaatttgaaattagagggttaaaataatccgataatacaattcctcaccgtctatatacaagacaccctattcccaatcctaccccttcagaaatggacttttctattaacacgttgaaaatagtcaacaaattcaaaattgatagagttgctattaataatgaatttaacagccctaaatatgttgttttttaaaaaatggtattttaaatattataatagtggacagcacgatattctaaaagaaaaatattataaacatttagaaaaaactgaaaaaaattattccttttgcacattatgtgcttaaatataataagactttagaatcatgtgttataaaagacttttataaaagttagactactactgatggttggtgtattaaatctatccaccctcctacgcagtctctcaaacttataaatgggtctactattttggaaacagttgcctttgttcaatcgtcctcagaggaaacaaatttgaataaggtttttaaacagtctactaatttatgtttacaaaccataggaaaataattacttcgcattgaaaattcggttaataaaccagaatcaaatgaagaaatcttcccgattaatatcaaacctcctcctgaaaaaaattcaatttggaaaaaaataaattaagtcaaaataattttagggaagaacttaataaaaaattaaaaggaataaaaatatctgataatataaaaatatctgataacagcattg

SEQ ID NO: 106107 - DNA, 803 bp, Aquilegia coerulea
  Intron number 1 from transcript AcoGoldSmith_v1.002449m (l ocus AcoGoldSmith_v1.002449m.g) derived from phytozome v7. 0 (chr-ID scaffold_20; pos 2548802 to 2549604)
ttcttcttctttctgctactgctgttcttacgagggtttcgatgacgaaaatgagaatgaagagaggtaaatatatttagggtttggaagaaggattattggactggactggactgggctgggctgggaatattataaatgggcttgcttagaacctattacgatatgggcttttgaagagataaactatcatgtaattgggtcaggatcctagttatttttatgtttatggttttaggaattaggctgtgaatgttttcattttcaagacatgtgaatatgtaaggggtttgaccaattttggggctttttcaatagaaactaaaagaggtttgtgtctatcttgagagctcattttcttcatcttcatcgtatactctttatttcatttttcctacattggactcattgcgataaatgtgccataaatatttcataatagattattagatttgagttttaatattcgtctaaggtgactacatgagtttttatgtgaagctttggttgttcatacttatactaaactcaaactactcaagctaacccgcttcatgagatcatgtactgaagcagctggcgagacatttcggcaaatttgataaaattaaaatgtcaaatttttgatatttccatctcaaaagtcaacacatgtcaaaggactaatattacattttgaagtcaaaattgtatcaaaatataaattttgtcaagatgacacacttcccctacctttcgtcatcatcaccactcggttgtcagtagtagcaactcaccagtcaccaccactgcaaccaaaataa

SEQ ID NO: 106108 - DNA, 1030 bp, Aquilegia coerulea
  Intron number 1 from transcript AcoGoldSmith_v1.015357m (l ocus AcoGoldSmith_v1.015357m.g) derived from phytozome v7. 0 (chr-ID scaffold_9; pos 3328825 to 3329854 reverse stran d)
atcggatctaaaccccaacgagatctctggaaaaggtgaggcaatttttttgaaatttttgatgaaatgcaagtttattaaaccgaaaaataatagggaaacagagatgagtttatttttgttttcatgtttatgatttttggttttggaagagtttgtaggttttgtgagatttcgtatgggcatgattttacttgtgtttggttgaataatacagtacgctgtataatgggatatctcatatatgccttttttgttgtaaacctgtaatggatagtggcaattgacaacgtttctgataaattcattgctaagatgtgatcgagattgtatttggaatttagtgtgttattctcattggtgatcatatcattaatttatgatcttaatgacaaagaaacagtcagtttccttgtatttctcatctagttgatctggccatctaggttttaataaaggttttttgggtaattaagatctctttctttgtcttctatcttgattctttgttatattagaagtaggccgagctacaaaaagtcactgtgtattcactctaccttctcctcgtatccctcttatcctcccattgttgtaaccacttgcagaggacaagttttaatttgagtgctgggcattttgcatagtcaattgtccttgtaatggtttaggcgttcctcctgggggagtttttgcttttagaagagagaagaatggaggagaatagtagtgtggtaaagccgtaaaggtggtagaaggaagggtctctggagaacgcctgtccctgtctgtgctggttcacttggggttaggttgtttattgaggcttgaggtggttttaaaatgtatcagcaattgtggttggtgtcaaaatattttatgtttcttttagttcttgaatgacgtgattttattgctgattgatttaattcattatgaatttactatagcaagtactaacagtttgtggtgtatttactgtatcttatttccagaaaagtagaacaagtagctgaagaggttgattcat

SEQ ID NO: 106109 - DNA, 812 bp, Aquilegia coerulea
  Intron number 1 from transcript AcoGoldSmith_v1.006781m (l ocus AcoGoldSmith_v1.006613m.g) derived from phytozome v7. 0 (chr-ID scaffold_109; pos 365840 to 366651)
ggtatgtaatctatatgtttctattgcaaatttaatgaatgaatgaattctatctttaaatgcttttggtaatggtgggttgtggggaagttttttttttttttttgcttctgtttagatttagggttgtaatctgaaatggggtttgagagaagaattgatgcctatttaaaaagggttaactttcttgctggaagttagggttttgagaaattacgtatatgcccttgtatatgcttcctttcctatggttctagtagtttatactactgtattgggttgttgtgtaaggactaaaaccagtaaatagattttcaagaacgaaaataataataatagctaataaattcagtcttttaagctcattgatttttttttttttttaccaactcagtttgcattcattatttttatgataagggtcattagtttttttttttttttttttccggagtgtggtttttaaattctgctaagaagtgtttaggaaggaaaggacatgcaatgctccattctaattttgtgaatcaatgtgttaaaccaaaagtcttattgctttattcagaaaatatgatttggcaaaatgaatttctgttggtggtatctgtttccctcggtataactattgactagttatttcattgttttggatcaagtaaaaacaagaaagtaagaatatgttacttatctttctccttcatacattcataaaaaacagtatttagtatgttcaataaaatcaaacacgaaatctttatttctaaatagtgttaatgtgtatgtagataaattttttagcttgagaaggaaat

SEQ ID NO: 106110 - DNA, 1021 bp, Aquilegia coerulea
  Intron number 1 from transcript AcoGoldSmith_v1.011985m (l ocus AcoGoldSmith_v1.011985m.g) derived from phytozome v7. 0 (chr-ID scaffold_34; pos 1363366 to 1364386 reverse stra nd)
attttcgcatctgagaaccaaaagaggtaaaatcttcaaacttgttctaaatctttctttcttctttgttaattgaaatcgatttcatcttctattacggtttaggttttcagtttatgttcaatttgtatcttcaaatgagaatctagggtttcttgtttgtgataatttgacattctagggttaggtttttcttgtttattgtaagatctttggttttctttgtgttagctacttgttacatattgttcgctttaatcatgtttggcttttgatttttgtttttatttccagtttttttgtattattttcacatagttttgcttgaattcgtgataaaacatgatgttgacacgttggatgtttgttagttgagataaaatgtcaagtttattgattctcatgatgtttttcatagttctttgtaataattatgtgtaatttgatgctatgatctgtatattctggcttttgctttttgtttcgatttttttttgttattgttgttgtcaactagtttgttttagagattttgccagtttcatgccatgttcttcgtcaatttgcttggcaagtgttgattttttatgttgtcactcgttgcaagttgctttgttactcgttggtgggattttattgcatattgtgctcttttacatgatagatcttgttgtctatgaaatgaataattacagtgtttggctacaatgatcctatgcattcactttataccaataatttctgactttcaattatccttagcaaattttgatcatatattgttttgcggctttggcgtgattgatacaattatttcacattttagtagtcaactattatctgactcacctgtatctctatatttacctgggttgtgtgcttaccgaattagattgtagtaatctcatgttttttagtatttcgctatgtatttaaaattgtccttttcttaattgccttctttaagaattagcagttaagattggattattaataagtgggaggggctttgttgatgcag

SEQ ID NO: 106111 - DNA, 276 bp, Aquilegia coerulea
  Intron number 2 from transcript AcoGoldSmith_v1.006601m (l ocus AcoGoldSmith_v1.006601m.g) derived from phytozome v7. 0 (chr-ID scaffold_1; pos 471061 to 471336 reverse strand)
aagtttctggtgcgatctcgatttctttgcctttactaatataattaattattagtgtgaattgtggcagcttgtttccacactccatataatgactaggctaaacatttactgttctttttatccactccaagtagttgatttattttcacagaatttctgtggttcatgacctatgtaattattttatgttagtttgttttcatcaaagtttcattggatttgactgtggttttattagggactcctgcggattgtgtctctctagctctgtca

SEQ ID NO: 106112 - DNA, 846 bp, Aquilegia coerulea
  Intron number 1 from transcript AcoGoldSmith_v1.002319m (l ocus AcoGoldSmith_v1.002319m.g) derived from phytozome v7. 0 (chr-ID scaffold_10; pos 804805 to 805650)
atagcaaagcgacttttcgagtaagtttggcatgaatgttggttaatttgttggtttttggatttttgtttttattaattatgtgataaatggggttttgattgaaattaaatctgaaaatttgaggattttggagttgattgagtgaattttagctggattaatgttcatttatgagtaaatattgagtataaatgtgatttttgtgttgattagtaaccgtagaaaataatctgagagaaaaaaaaaacttgttctgctgggttatcgttgctaacaattatctgtaatgctgtaatttgaaggaaatgtgttttcggcttcttcttttgtaataataagtattaattgctgtttatgtagaaagaatgtcttttgtacaatttttaactggttgagctaaatttgacaattgacactgtcctgtgagattttaagtgtagtgaatgtagttaagcttgaaatattatgtatttagttgtgtatgcagagaaacacaattctattctttcgtgtgcttcattagtttctgttgtagtaatgactaatgacttgtgaaaatttcatgccagaattgtgtttgcctattgtagtaattaaattttcttcaaaatttgtagtaattgcattgacatgattacttgatctctttttgtgtcatttcatttgcataactacatctggtggttaggttttatataacgattatgatgaccttttacctaccactaaaacaaaatattcatattcccatgttattttgtgctaaatatgatgcattttgtataattgtatgcatctagaatgatctttttgcatatttctccaggacaataactttagaga

SEQ ID NO: 106113 - DNA, 594 bp, Aquilegia coerulea
  Intron number 1 from transcript AcoGoldSmith_v1.016390m (l ocus AcoGoldSmith_v1.016390m.g) derived from phytozome v7. 0 (chr-ID scaffold_6; pos 7775828 to 7776421)
ctcttattaatatcatacgtgatttactatagatcaaataagctataaaacaaatttgcatatagatcattagctgtttaattaggtagtataatctgaattcaacaaagttatttcaaatcaaataacataacatactttgaatttgatgaattagttgtccaagagaagccagtgattcactaagagagcgcaccccagaagcgattcattttacgggggagtctcaatttctttttgccacccaagatgaagaccatgctggatggcaacaaccaagagaaggaaaacgacctcgacagaaaagaccgcatcctatcggtttttgccgaatatttcgtgaatatccgataaatgccgaccggcatggggtgttttaaattccgtttatatgccgtatgccgtaccgatccgatctccaaaaaatcggaatatttcgtgaatatccggtcggcaaaaacgattttttcacctattgtgaaccgattttttcagattctgaactgctttcatattgtgaatttttgatatatagttgtacaaaattattgtttagattttaaattattttacttaaacatatgtaggcagcag

SEQ ID NO: 106114 - DNA, 547 bp, Aquilegia coerulea
  Intron number 1 from transcript AcoGoldSmith_v1.006175m (l ocus AcoGoldSmith_v1.006175m.g) derived from phytozome v7. 0 (chr-ID scaffold_17; pos 549470 to 550016)
cggttttcttcaagaggtttctaatcaggtaaagtttatatttttatagttttcgtgttgtttttttgtttaatttgttgtttgatctgaggtagttagtgtgtgtgtgtgtgttttttttttaagattttcacttagattgcttgaaatacccaagtagaagatttgaaaatagttggtttttagaaaaaaattgtttttgttaagaatcgaattatgttaaagaagaatttagctgggttttttttcttctagtttattagtttaaaattgtgaaaacgatgtttgtgaaaaggtattaagaatttgggattgtttattaagtttaaaagtggttaattcaccttgttattcacgataagtgttagaaaacaacgtttttgtgttttggtagttatgatttatgtttgaagtgaatataattgtcggcttttttaggttttgttaatgttttgacaattagttgatctgttgatttgtttctgagttttggggttttctacatgttataggtgttgttgtgagagagggggctggaatttgacag

SEQ ID NO: 106115 - DNA, 593 bp, Aquilegia coerulea
  Intron number 1 from transcript AcoGoldSmith_v1.014179m (l ocus AcoGoldSmith_v1.014179m.g) derived from phytozome v7. 0 (chr-ID scaffold_20; pos 3235339 to 3235931)
acaagggctttattgcacaattggtttctgataacgtaagttcttaccattttatggaataaactaaataaactggccatcgttgataatagtttcttgttgcgtaattgaatgaatgaattatacatgaaagatgagtttaatatgttttgcagccgaactttcagtacttcatttttctttatgtttttctactacatttgatattgcatgaaaaattctgaagaaacacacccgcagtatttagtcacgcagtaccttgataggttgcaactctgttaaaagtgtacttgttgcctgaaccttgtcccccttatatatagtggtgctggcatgcagcatgtataattttttcgtcttttctgtcgaacataaattcttaataatcagaatgtgtttggtcgatgttacctttcagtcaagttatttcttggttagacagctgaccacctactgtggatctacttcaaaaccttttttgtttttatgttaattgtttcaaaatatgtcgagctcataatgatgtttaccagatcaatggggtacctatttgattaggggcttggcatccatattagagcttcaaatcaaat

SEQ ID NO: 106116 - DNA, 640 bp, Aquilegia coerulea
  Intron number 2 from transcript AcoGoldSmith_v1.023505m (l ocus AcoGoldSmith_v1.023505m.g) derived from phytozome v7. 0 (chr-ID scaffold_1; pos 958951 to 959590)
ctgagatagattatccatgtaaaacccataagcttaagaaccacattcatgaaggaactaagcttggtgagtctacaaccaaataatgtattgccaagaacttgggtatggccagcagcaaggaagatattcatcacagaactgatgagcttggtgagtcctttaatatttatttaaatgagattttccttgcatagtctgcactgtggtactttcttgagtttgttctcacccatagttaatttcacaaatggcaaatttgtataggtgaatcatctgcttatcaagcggttgaagatacggcaccaaaggatgtacccgcacccaagcaggtatcacgaaaaaatcattaattcaattgaactttactaccttgcaatgttgatgttctttgggtaatctgaattatatggttctgccatgataggtttcctatgatgcacaagctattaaaccaagtgagtatacatatgaattacatttcctgagtttccaaaataacaaaagcatgagcttcctatcttgtctataaaaccatgaattaacgtaacatgattttatatatcgttggcattgatcgatcttttgatttagaaatgaacgcttgtaactcttttttgttaatttttaggtcaaacaa

SEQ ID NO: 106117 - DNA, 692 bp, Aquilegia coerulea
  Intron number 2 from transcript AcoGoldSmith_v1.018835m (l ocus AcoGoldSmith_v1.018835m.g) derived from phytozome v7. 0 (chr-ID scaffold_20; pos 4090612 to 4091303)
ttacagctataagagcactgtaccggtaagtaattaggacgtactgtgcgcaatgtaactatcaataagcatcactgtcctcatccaacactcattcacttgttaagttctgcataagtcgtgcgctgctcatcagtgtattgttcttagggaatatcgtctactaatatataagtctagagtttgttgctcattatatatatttatgcccatttgaatataagcgctgatcttcttttaatgaactctctaccggcactggtgcaatctttctcactgcccctgtagatttttttaatttcacatgcctaatctgtcgtccttttttttttctttctttcatcgtcctaggtatttgtagttctaattagtaagaaatgtgaatatttgtcttgttcttgcatgtatagttcttttgcccaaagcttcagagactgcttgtgtggtaaccaagtgcctgtacccgagcctggacacttcattgttgtgtataggtgtatggtgtgtatcgttgtgccctgtatccaattgcttttaagatgctgtgttagatgctttgtatttgtcttgaaccaaatctgacaatattgtaatgtatggctattgactaatacatggaattatacatcaatctccaattcaatgctttgaggtgttaaagttagttatcgctctttgttgtttcaggagtg

SEQ ID NO: 106118 - DNA, 832 bp, Aquilegia coerulea
  Intron number 1 from transcript AcoGoldSmith_v1.009629m (l ocus AcoGoldSmith_v1.009629m.g) derived from phytozome v7. 0 (chr-ID scaffold_39; pos 2142331 to 2143162 reverse stra nd)
ggtgccatatcaagagacagatcaaaagaactggaatttttttgtaaaaagtcagtgtgtctaccaagggcttcttcaaatgtgctatgttatgtaatggaactagcttgtcatgaaatatgatgagataggcctactctgtctgtaagcacaagtaagttcctcatcaaactctggtttcgtttatcatggtacattcaaactttggtttcgtttatcatggtacatgcacgatcatgatcatagtattgctgcttatgtatatgtgacaatctatttcccacccttgccgtagtttagtttatcaattaacgactgctttcccaaagaaaatcgtcagacctgatcacatttattttccttacttactattatatcatcattatgctcccatcacaacaactattttgatactgatacactgatggcctaaggcatgtacaagttgcagtaaacaacctacaatatctctaagatataagaagatcttattcgacatttgtcacacaaccattcgcagacgatacacacccacaagagtgtcttcatatgtggacctgggatattttgaaagtttttgtaagtattattatgtggactgaagttcaggagccacaaaaatatttgggtggttctcagggtttgaaaattgtgaagtagggaaacaaatcaatccaaaatgacactagccaataggaagagatatagagatctttgaaagataaggactacctcttaccctttcagtactattaatacagactcttacaagtgttacaaacatctcaaactaatagcattaatcttcatttttagtgtaaaaccttctctt

SEQ ID NO: 106119 - DNA, 163 bp, Aquilegia coerulea
  Intron number 2 from transcript AcoGoldSmith_v1.007063m (l ocus AcoGoldSmith_v1.006140m.g) derived from phytozome v7. 0 (chr-ID scaffold_42; pos 1598379 to 1598541)
ttggtatgtttatatataagtttttcttcttcttcttcttcaatcttcttttatttgaattcttcatgtttcttattttaatggagtttttttttggggggtggggggattgtgctttgtttcttcaggtagctgagaagattggtaaagatcaagaaacaga

SEQ ID NO: 106120 - DNA, 976 bp, Aquilegia coerulea
  Intron number 1 from transcript AcoGoldSmith_v1.002402m (l ocus AcoGoldSmith_v1.002402m.g) derived from phytozome v7. 0 (chr-ID scaffold_9; pos 414346 to 415321)
gttactgcttgaagtacaggtgagtactgtttctgtatttgattttgtttatataggcgttactttcgaataccattaatattatgaattagttagtttctatggttttgttcgccccaaaacacacttctatctgtttattcttatgttctgattcctacaaaatgagtagcttgtatggttttgttcgcgctttcaaacaaatacatcaactttcaaagccaatttagatggacctttcattagtttttaaacaacattttgtttggaatgccaggattgatttccttttctgacacacgaacatacaaatatgagcattgcattggtatattaacgccccttctcaactttttataattaccacatttaagggcataaagcagatagggaagtttctggaaaatcgtacctctggcagcttgcggtgtttcttttgacatataaagaccacgacaaaggatccataaatacacatgtcactcttacgtaatcaatcccattaattattttggttcatgagtcgatttcttctatagttatagccttacaggtccttatcctctccatttattgtctcggtcgtcaaagttttaagcagatatattaagaaattcagtgatttataaattttggaaggccttatgatacgtatgggtcaaacaagcacaaaagccaagttttttttattcacatggtaatggactttgttgaaatcgaaaccttaaatctgcccaataggcaatgcgataattttgtcaggggtttaacacataattttataggtaacagctccataggtttgtgggttattgtgtcttccatagaaaaaatacaatctgttctgcctcactgacagtctggaaatggaacttaatttcggttgttaaataggctcacaaaaccatttatatgatgtagttccatttccttttttgtaggtatcgcattcaaagtgatagaaaagttgcggttt

SEQ ID NO: 106121 - DNA, 526 bp, Aquilegia coerulea
  Intron number 3 from transcript AcoGoldSmith_v1.016738m (l ocus AcoGoldSmith_v1.016738m.g) derived from phytozome v7. 0 (chr-ID scaffold_4; pos 7181384 to 7181909 reverse stran d)
cagcggtacggatgaataattttcaattttttgtgtgggtaattagcattgttaccgttatacagtttttgttgatgattacgagccttgccctagtattctcaatccctttgatataattctaaataagtcgagtagaggaacatgattcacattgccatgaaacataacatgaaatccgttaggagatataatttaaatttcttttggggtggggtttgggtgttggaggtgggtttcagaacttgagcttcaacagtgttagatgtaaccatggctaacattagcatgagaattttaggaggacgtgcatgatgtggcaagtttggaagaaatctcaaaccttcctctgagaatatggtgggtagaagaatttcgattgaagataaaaaaaccccgcgtagaaacactatatatgagtttgtttaatgcaggtaatacatgcctcgcagaattggactgtcaatcttacacgctgtggtataatgtagatattgtcgaaggcttgtcgtgacactcattgtca

SEQ ID NO: 106122 - DNA, 260 bp, Aquilegia coerulea
  Intron number 2 from transcript AcoGoldSmith_v1.016738m (l ocus AcoGoldSmith_v1.016738m.g) derived from phytozome v7. 0 (chr-ID scaffold_4; pos 7182031 to 7182290 reverse stran d)
agaagaatcctggttcccttggtaggtctactttccctgttactgaatacttaccttgccatttgtgatttgttttagtcttcttaatatttttgctcattatgctgactagttatacaaggtactcacatagttacatttttcgcacattaaccttcatcagaaatcaaaatgagtttcagttatttgtttgaaaattttcttcaacttttgttgttgcctattttgcattgtttattctgaaatactttaggtcatac

SEQ ID NO: 106123 - DNA, 542 bp, Aquilegia coerulea
  Intron number 4 from transcript AcoGoldSmith_v1.026482m (l ocus AcoGoldSmith_v1.026482m.g) derived from phytozome v7. 0 (chr-ID scaffold_17; pos 4702416 to 4702957)
gtcttgtaattgaaggtatagacttttctgacttatagttttaagagaatttttctattgtctagaaatttaattcctttactaattgtgaattcactgagtccaaactcaatgatagtatattaccgcacttttcaataagattgtacgtcccttgagttgctctgctgataatttactgttagcagcatataggggtactgggtacatctatataattgaacaatttagctggtgcatcatttcatgttttgttttctatcaatgattttatagcaagataaccatataatactaatatcttttaattgttggctcgaactcgattgattgtatctgtcattctgtttttaagtaatattcagcttttattacaaagtcctgtgatgttctgattttgaatgttgagtttcccaagccttcaataagatgttatttagtttcttgttactgatgtgttcttcttaagcctacgatggaacgaactggaaaggcttttttagttagttgattgacatcattgtattccatgtaggaagagg

SEQ ID NO: 106124 - DNA, 1050 bp, Aquilegia coerulea
  Intron number 2 from transcript AcoGoldSmith_v1.009470m (l ocus AcoGoldSmith_v1.009470m.g) derived from phytozome v7. 0 (chr-ID scaffold_44; pos 351505 to 352554 reverse strand )
atcctcctaataaggtgttctcaggcaatccacaggtatacgtataactcaatttggaaatgcggttaaaaagttgagatccagatgatatgaaccaccaatcctgaaattaccattttggaatcattttccaaataacacgcctgcaagattttttttttcttatactcctcccaatgggaatgatgaattcatacttggaacttggaagcctaaacttactttcaaaacctgcattgcactcttgaataacaccagtttttagatcttggtacagcagttcataatattctgatgcactggcagagcagcttggtgttcttgttttgatgtttctttttggtgctaattaaattaatgatgtaagaagagattcattgaatgcgaggttgagggcactggtcatatataaggaggattagagtgcggatgttagagagggaagtatacctcaagggtgtgtaactgggggtcttagatgtttaagggttggtgttgtgtgtttcttaatgccgtgctaagaatgcatgatctgatgccatggaactctaaactcttttaatggaaatcgtttactgataaaataggtttagagaaaaattgtgatgaaaggaagaattaacaatctttctgtatagatgatgtccatcatacatacaagtattaatgacccactataacagacaacacctttttctttgactccatgttcagattgttcacttcggtaccggcatcaccttatcccaattgattttgggtggtgcacgatcaacaacagaaaaggaaagctagtatgctagagaccctttttatcatctaatatacgtaggaaaaatgtatgtctcctgtctcgtttgttggcgcttctttgtctcgtgaaggcaatcgctggctatacacaattcacttagcactcatatagtctcatatgatacgatttatgttttgacgcttttgtatgcttattaccttgctattaactgcattagttattcttatttgctgaagctcaaagcccatctgttttgacaggttaacttgaacaaa

SEQ ID NO: 106125 - DNA, 917 bp, Aquilegia coerulea
  Intron number 1 from transcript AcoGoldSmith_v1.009470m (l ocus AcoGoldSmith_v1.009470m.g) derived from phytozome v7. 0 (chr-ID scaffold_44; pos 352707 to 353623 reverse strand )
catcacttctctctcgcaaatcgatcgattgataggtaaacatcgttcttcaatcttttcttctttctattagaactcgaatcgcttttcattgctatattattatattcctttggatcatttctaggtaatttacattactttttttttttttttgattcataagtttataaaccctagtgattactaaataataactaatgtaaaaacaacatttctgaacatataaaaaaacaacatttttttttaggtatcgttcagtttttcgagttttattaagaagacattttttttgaattttaggcataatcaatagctacgatctaccaacaaaaattgatataaaaaagtaaaacattttggatatacttttaagccttctaaaaattcaaatacagggaaaaaaattctgaggtataattatttacatactatcgaagagtacattacagatctttattttttcttggaaagtatttcttaaggataaacaacgctatttctgattgaatgagaggcttttcattggtaacagctgaaaatgtaatgagatagaaagtaccctttcaattgtttacttgttccaatcatctcatttaacattgcatatgccaatgcccactgttaattctcccatgaaacttcacaatgtagaactatgcagtatatatgctccctatcttatgaaagttcttcattcttcactataaagaggcaatgaggcataagcattacatgaaaattctcctgtaaaatagacctgaaatttattttctcaaacttccttcactaaattttatctcaaacttctattgtaaaacataaaataaatggttggtttttctctcattttctcatctctaggttttgttttgtttttagtcattcgtttctgaagaaattggtggaatccccgt

SEQ ID NO: 106126 - DNA, 965 bp, Aquilegia coerulea
  Intron number 2 from transcript AcoGoldSmith_v1.026836m (l ocus AcoGoldSmith_v1.026836m.g) derived from phytozome v7. 0 (chr-ID scaffold_181; pos 24709 to 25673 reverse strand)
tgttattcagtcctcagcatctaacgccaaaattggtaattttttttctgtctgctttaggtttgctgttttatttgtacatttaaacttttttaagattcaatatacatattttcttacttcatgtggcatgaagttggaaatcaaataattgattgtattctatttcttttgtgataattaatcaaaggtatatttcagttagttaatccaagaaaggtgacacacctggtttcggagaatgagcacttagcagttagggaagaggtaatagcacaatcaactaaacctgatcctacaaacttacaaatgcaccctaaactatccttgagttctaaatatatatgaatcctgagatttcagacttcgttagttttaataatgagcttgaaaattccaggacttgagtatattgatttcctgacaataaatgttttcatagttccaatgacctaatgatctcccccaaaatctcttttgagaaagagacattagtgcatgagattgtcaaaaatcacaaaagactggcacattcaatccttcgctcttaaaagacttaaaaagcacctattttggagggagataggcataagtttttcatcaatatagtagcaatgaatggacaaaacatttatagtaatgtgttttcaggcatcgttattgacactacatggaaagcatcccaattatgtttccacaccttggcttatttatcatttgccataatgccatcttgtcattcaggtagtgatccctaggcctcccttctcaactagattatatgaatgggagtagcgcctaaactctaaactacaaaacaaagccatttcagaacaatcaaattctagatgaaaattgaatttccaagcttttgaactatataatcttcaaagccaagtacatattttcattgacttacccccatgacagtgtgcttcactttgtctccacacatcccgttgcac

SEQ ID NO: 106127 - DNA, 935 bp, Aquilegia coerulea
  Intron number 1 from transcript AcoGoldSmith_v1.019364m (l ocus AcoGoldSmith_v1.019364m.g) derived from phytozome v7. 0 (chr-ID scaffold_9; pos 603888 to 604822)
gaagggaagcaacgtatgtttttctcttcttttctttttctccccaattttgctaatagtgtttctttgaatttatttatttattttataatatgaaaatgaattcgaatcaggaaataaaatgtgggtctaatttggttagatatgcctttgccggctgttaagaaatttgttctgttgattcattgtagattttgaataaatggtaatcttaactattttgggtttaaaaaatcaatgaattcccgttgtacattgatatgctcttgccgtctgttacgaaatacgaataatacatcatcaatgattccttagacttacatcttcaattcaattcgagcatatacatattgtttgcgcgggggtgggtgattaaaacaggattacggttgtagcttgaaggtgatgaaaattgagctttgatatttgcgggagcaaggttacttatagtttactcagctctgcatcacaaaagggagcattgattacatttaattctgatgtatgcgtccattgaaaaattgcttaatagggagcatccatgtacttacgtctttttattggctggtcaacaaattaatgttcatggtatcggtcagtgcatgaatattttaactgagatacacaccaagattcttttcatttttatacttagcatcaaagtggcaaatttgaacacacttggctgtatcatcttttttcttttggctgttgtctatttgtttgtgtgtactttggtctccgattgagcatacacttagtctgcaggtatgcaagtcttttgcgataggttttagtcatctacaatactcttaataaaaatagtctattcacaatacatgattggtacctatattcgtagttcaatgaattgaccaatactcacgcagcttgttttgttctggtacttacagagatttttctgtggtggaaga

SEQ ID NO: 106128 - DNA, 762 bp, Aquilegia coerulea
  Intron number 2 from transcript AcoGoldSmith_v1.014612m (l ocus AcoGoldSmith_v1.014612m.g) derived from phytozome v7. 0 (chr-ID scaffold_23; pos 2740267 to 2741028)
actgggtaagtagatttcagtttctttccattcattaatcaataaacctttttattctaaaagaagggaattgcactaaaattcattttcgattgtactactttgtttgtagtccctacgtttgacttggatgtagttgatatttctttggtgtttgaattgaccaaattttctttgttataaagtttttaacttccaaaattttattaaagaaagaattggacaaaaaaataggttttcagtatgtctgtcagtgttaaatatatcggatgataagactaattagagatttaatcagtacagtaaaacctcgaaaaatggatgttggataaatgaataacctcacttaagtaaaaaaaaaatttacggtcccaatccaaatctgatgacaagactaattagagattaaatcagtacagtaaaacctcgataaatgaataacctcactttaagtaataaagttttacggtccctcttcaagcctttggacagcactaaattagtgttggataaattaataacctcggtttagatgatatatatttttggtcccaagggtattcatttatagaggttttaaatcagtacaactttttagcccagtaattagctatatctaatcaagcttgctaatctgagtcttgcactcttgcttgaacagagccccattaattattttaccgtgtattaatacaacattttatatgtggcggggttgttttttcttttttaggtaccaagagatcctcactgatccaagtt

SEQ ID NO: 106129 - DNA, 299 bp, Aquilegia coerulea
  Intron number 1 from transcript AcoGoldSmith_v1.027468m (l ocus AcoGoldSmith_v1.027468m.g) derived from phytozome v7. 0 (chr-ID scaffold_26; pos 3293562 to 3293860 reverse stra nd)
ttgcaggcaaccctctcgtcactttacgccaaaaggtgatttatcaaccttaaaaccattattttctgtaaagagatttcccacaaacagcattcttagaagttagaactattgtttgtggactgaaattaaatttgacaatgttatatggatctaagtctttcacctgatttcattaaccgtgtgtgaagattagattcttgctttttgcgtgattctttctggttataaggttagtttcatttcactttgattatgtttcagacgttaactgcgcatagaaggtgggaagtttacag

SEQ ID NO: 106130 - DNA, 658 bp, Aquilegia coerulea
  Intron number 1 from transcript AcoGoldSmith_v1.002765m (l ocus AcoGoldSmith_v1.002765m.g) derived from phytozome v7. 0 (chr-ID scaffold_32; pos 2797111 to 2797768)
taatcgatctcatacttctaacttccagttatttggtatgttcttgtttcacataattaatacaaaaataaatgtgatataaataaattaaccgtttattcttaggttccagatgagttaccctataactgttaactaattatattggaaattctcgcttttagatagataaaatgtttatcaatgaaccttgttatgtccttcatttggtattccttggagtacagtatatgaatcaatgtacttttgggggtattgggtaaacactaatataatacccgtccgatagaagagggttgaatgaacggatgcagaggttttttgcagataagaacgaaagagtgaatcagatgaaaagtggaaggatggacatgttatggagtgtcactcaattctaaagatacctcctacgttgatcaaatacttttgattcttagtatctatctatcttgttcaaaatgtataagttatgctatcataatgtaacttgctgcgttcgtttctacaacaagaaattgtttgaccagaattaacatcacttgtcggagaagttcttattcttagttctgctgtgctgtgatatcttttttttcctattaaaaaggatatctttatgaagctattttttttttttttttgttgacaggctcctcatcaa

SEQ ID NO: 106131 - DNA, 938 bp, Aquilegia coerulea
  Intron number 2 from transcript AcoGoldSmith_v1.010552m (l ocus AcoGoldSmith_v1.010552m.g) derived from phytozome v7. 0 (chr-ID scaffold_2; pos 4465263 to 4466200 reverse stran d)
ttctccggcagtattgaacaagtggaaattgtcaggtataatcactttatatatatactattttagaaagcgactatgagacttgcacatttgtttggctgatcagtgttattgccgtcagttttctttctagtttatgttaaactgaaacattaaataatactctgattcttattataaatctgttccttgtttcctgatagtaaaatttaattcacttaaattgactaactaatagttcagattaatatcatggtcatcagtgttttgtttggagtacccttttgtaggtcatgatatatggcacagatattgtccatagattccatgattatggattctgtaatttggcaacttgacctcagattgtatctgagttttttcttcttatctatactagtgcaaggaagtcctttgcttgcatatgagggactgtccaagatttttgtgggactgtccaagatctttgtgggactgtaggccattattacccgctgacactatagtttttacctttgtcgcttttttgttataacttagtcgtcacattgggttgcaaaattaaatcgtcgacctacacaattctcccttcaaaatgggagtttgaatgtatttatttcagttcccaaaatattttccaaaatgggaagtcttgtcgtgataccaggagattcactttgctgaaatggtctttagcaattgcagtccctttcaatattaagcatctttagcactagaatggtctctgccaatagttgatggtaaatattgctgctgtatgtttctacccagctaacggtgaaaagccctacaaatgtaaacctacacaacacaacctttcatatccttttgttcttataggttgtttttttacgtgtctttgaatcttttcccgaagtaatgatatatttatcccttcataaacagatctggagatt

SEQ ID NO: 106132 - DNA, 968 bp, Aquilegia coerulea
  Intron number 3 from transcript AcoGoldSmith_v1.002578m (l ocus AcoGoldSmith_v1.001623m.g) derived from phytozome v7. 0 (chr-ID scaffold_1; pos 280890 to 281857 reverse strand)
gacagaattgaggcatgttttttttttgttatcgtaataattgtacaagttcgtttcttattggtcatcataaactttcatcatgttgcctcttgacagagttgacgaacttttgattttcctatattagttgtgtttttgtaaaatagttaaattgaaagaaaacaaatgcgtggttaatcattgtacaggtgatgttaattatacataaattcaaatgtcttatgcacaaatctcatcatattgttattagatccatatgcatgctgaatttggagagtattttatgcttcatcggaacaatattcacgcattatgacatcatggaattttcaacaacattgttttaaagagctgttattttttctttgaatatctccattatcattccaggtctatcttaatgaccataacttttaccaaaatatttcatttttgggaatttgttggatttcaaacatgtagctaaagaacaaaacttctgaatcattcattctcacacaaccacactcttaaaatgtatgtcgtttctatttaacatatttgtagtactcttctcattttttcagaaaaccgttttgaagtcatgttttgaaaatttccttcaccattactaaaattcacacatatattacataactatccttctggcatggattaccttttttttttctacatgaacttatagtagtcatgccaaatgtaaaattagtggataggtctccctgtatgcttttctatcgaatttatgattatagaatttcgcaccaccttggtcgaagttgtcatcttcaatggtctgtatggtctaagattctgacctcacttggacgtcttaggccattcagatgccttcccttcacccttttcttttctactgataagcagtagacatgctggaacgtttatttataaatattttatgtaccttatgcaggttattgatttccaccaaactttagaagtga

SEQ ID NO: 106133 - DNA, 362 bp, Aquilegia coerulea
  Intron number 2 from transcript AcoGoldSmith_v1.014280m (l ocus AcoGoldSmith_v1.014280m.g) derived from phytozome v7. 0 (chr-ID scaffold_11; pos 3030410 to 3030771)
aaattggtatatgtttaaccctttataataggtttattttgtcagtctgtgtattattacaacttcttagacagagagctgccttttcttcacttccgatgatgacaatgaacggataagcatggttacaacttacaagtttattacgtactaactgccttttcttcagttttgataaggggcgttaatctaaataactacatatatctatgtctgagagaatatttcgtgatattattgcagctgcgtatactaaaaacttctttgagttgcatccatttcttacttttatttattgaagttttttttctccttgaggctgtaacatgctacatcatctccacaattcaatgttgcaggaa

SEQ ID NO: 106134 - DNA, 699 bp, Aquilegia coerulea
  Intron number 3 from transcript AcoGoldSmith_v1.005720m (l ocus AcoGoldSmith_v1.005720m.g) derived from phytozome v7. 0 (chr-ID scaffold_17; pos 672730 to 673428)
tgatttcagtgacgctgatacttctgtttggagaggtaagatttcagattatgtttctgtccaagtttctgtatcgtaagcacatatgaggtagatatgaccaaatgtcagaaattctgtagcctattatgttctgtaagtcttactaatgtaactaagcaataatgcgagaatcagggcaacactgtgtcatattatattggcttttagtacagtaaataaacacgcctatgcatgaggaggaagataaaacggagatatttattgaaatcatgctcttttttgcaagaaattgaaatcaaaaccttaacatcttttgatggtctttttacctgatctcaatatgcttgatgttttaaaggccctggaatattagtgttctgtaggacttgaggaataaacggagtaatcaatgactcctatgacttaatggctgattgatcacctcaattgaatcgactcagctggaaaatctgatcccatcaaagttgatttttgaatttgtgaaatagatgcctatgatttcttgagttccaaaactcttaatttaagaggatattctcttcactcaattccacacttatccttttcttatggtaacaaagataccagaatgagtatactcgtgtacgcattagtaagcactaaatctctctttctctaatgaacagataataccacaatcggtttgttcacgac

SEQ ID NO: 106135 - DNA, 821 bp, Aquilegia coerulea
  Intron number 3 from transcript AcoGoldSmith_v1.021024m (l ocus AcoGoldSmith_v1.021024m.g) derived from phytozome v7. 0 (chr-ID scaffold_16; pos 3483058 to 3483878)
cctggtgttccttatttcgttctgtgtttagctaggtatatctcccaccatgtatcttaggaagctatcttgtcattttaatcatatatggtggagtttgagcaaatctgtttgcactttaacatgcttttattatcacatttttatgatattgggcaggagactgctcatactcgtcggccggcccctcccctcttctctccgtgtacactcacacacaaaagggggaaatttttttttgcggccttggagtcaggaggtagacatacacacatgtttagagtgttggacaaattcactatccttctaagagtcttatatcgtttttccttgaaaatgtgggttgtatatgttcttcaaatgctatgacagcatacaggcttgccttccctaagaacaacgggagcttacaatacattttacataaacacacttccaagcacataaatataaaaacatattagcagttgattagatctttactagtatatttgatgttagttgctctttcacgagttcaatccttctcgcctgaccattccctgggtaatcttgtcaggaaatagatgagagtagacgagagatgttgttcccatatttttgtcatagctgcctaatgtcaatgactttcggcactcttataaactttaagatttgcatcaggcattgctgcatttgtgtgactcagtttctccctgctttactcattaatgtacattcatgtaagctaaagaagtttctccaagattttctgaccatttttttgttggaattgggcatatgtagggatccaccatcaacagttgagattgaagatctta

SEQ ID NO: 106136 - DNA, 805 bp, Aquilegia coerulea
  Intron number 1 from transcript AcoGoldSmith_v1.007982m (l ocus AcoGoldSmith_v1.007982m.g) derived from phytozome v7. 0 (chr-ID scaffold_15; pos 846902 to 847706)
gctgaagatctctgctttcttaacaaggttctctttcttcttccttccttctttttcttacaaataaagttctaaacttgataactttctctcaaaatttcttctttttgttgattatcttggatagattcgatataaatttttgatatttcatgaatttctttcattaagtgattatggattttagattttcatctgattctttttacatttgcattactttggttttgaaatttcatagctcaaacctttccctttttaaatatctgaacaggaacaaaccccacattccccccttctctttcctcaaaccccacatctttttttgcttaattttgtttaatgtagtcgttaatttgtcgttttacagcttgcattcatcaccacaacctttcaaaccttcttttctctccatttttataatcttttctttgcaacttttgttatcattttagtacatttatatataacattgtgttatatgttgtggagtctgatctggttctgtaaaactgcgcatcatgcttgggtataccttgtttagatatgaaagaacctataactctcgcctgtcccctttcaacctttcacccccttttgatctcatatgttggaaggaccttgataggttgcttaaatcacctcgtcgcactagcccatatatggtttagtaggtttttataggtcactttgatctgacattcttccattctcatttcatcataaggtgattaatgttattgataatctgtgtaatatttgaatcacaggattgcttcgccttaaagtcgcctaagaagtctcc

SEQ ID NO: 106137 - DNA, 833 bp, Aquilegia coerulea
  Intron number 2 from transcript AcoGoldSmith_v1.004867m (l ocus AcoGoldSmith_v1.004867m.g) derived from phytozome v7. 0 (chr-ID scaffold_92; pos 231777 to 232609 reverse strand )
tgaaaaatcttacaatatctggttacaggcataaggtctgtctctcttttctctctataatctagttagaagacttcaaagattgtattattgtttttttttttttgtgtgtgaaaaaagctaaatgatctttttgttagcttagacagtaatatgacgtgactcgtttctcgtatattccaatctgtttagaactccattggataagttgttaaggtttacacttcgttatgggtgatagcattatcagagacttacttctgttctgtaccatatatttgagcttatgttttatttgtgcaactaaaaaagtatagattaaaatattgaggaaaataatacaaagagttgaggggatatgagctaccaacttgtgcaaactaaggactgagtatcatgctaggaattggccgtttatggggcacttatatgtatatgttatctcaatatcgctatattattttctggtacttgagccttttcttcttattttggtgcttcactcttctaaattccaatgtgtttaaaactggattggacagtttgtaaagttttattctacatagttatgtctcacagtctcagtattattgatgagtgttcttattattctgtatcatatatatgtgcatgtattatatctgcgcaagtgaaggagaatatattaaaaggaacagtaacaaatacaatgagttgggggctatgagcttgcaaatcagcagttatccgtgacgtgtacttctaatatttataaaattcgagcgattatctaattgtcacttttttttattggtgaagactttaccacggtgcgccgagttggatcaggggtt

SEQ ID NO: 106138 - DNA, 750 bp, Aquilegia coerulea
  Intron number 1 from transcript AcoGoldSmith_v1.001035m (l ocus AcoGoldSmith_v1.001035m.g) derived from phytozome v7. 0 (chr-ID scaffold_37; pos 1031164 to 1031913)
caaagcgctttgttatccgagctaaacaaacaaaggtttcattcacttttacatttataaaattcattcaatttgatgaatttgcatattttgatggattttgaaattgtgggatttctagttttctctaattgttttttacataaaaaacaagtgtaaattacataattatggacttacgtgacatgtagatatgctttaattcacttaataatcacttttgatcaactccaatgtaaatttactagatgaacttttttgactattgggtttaatgggggtagatggtaagaaacatgcatatcaaactgcaatagacatggtttaaatggaatgcatgactatacggttatatcacatcgcttaagaccaatgaacacttcaaagaagatgaatgaatcaaatctgatatccacttgttagtgaagtaaaacacccacggtttaaatctatacagtaattaagctccccattaaaacagacgtgggtgtggagaaattaccttgatgtacccagcttgttttacaaccttgatggtacactatactgtaaatggaatacgtagatactcatctgatctgacatgtggatctttacatctacctgttccatcccagacgttgtattgcagtttgatttacaatgttctttctgtttgatgtttgaagatatgacacttcaggagtatgtaattttgtcatgttatttttggcagtcccgagtctgtcatcaggcgttttgaacagaggg

SEQ ID NO: 106139 - DNA, 835 bp, Aquilegia coerulea
  Intron number 1 from transcript AcoGoldSmith_v1.002727m (l ocus AcoGoldSmith_v1.002333m.g) derived from phytozome v7. 0 (chr-ID scaffold_14; pos 1274511 to 1275345 reverse stra nd)
gatctagcttgtcgtgggtaagttcgctagcttgttttaagcgcaaatcgttccaactgtcattttaaaatgaattccctttcttatcgagaaagaaagctagggaccagccactatcttgtttaactttcatttattttcccttctttacatttcttgctttctccgtcttcaatcttcttcttcttctaatacttgtttctctattcgaaaaaaaaaaaaaaaagaagaaagaatgggaatgtttaaatctgaagatgtggtggtttatgaacctgtacaaaatattgatcttagtcctgatggtggcaaaacttatttacgagccaatgtccaaggttaattttcattaattcattccatacttcttcattatcatgatcatcatatcgtctgcactctgcatgcatatgcttgttcttgataacaattaatccattcttgattgaagttgtgcgtgttacgttaatgatgttatgcttgatccgtcttgtccctcatcttggcttagcttcttatggtgtttgatcatcatattggcttctcttatattttatttatccttcatgtttgtgacctctttcttacaccacgagaaatttcatattaacccaagcgctacgcgtccacaaacgttgatcattagctatgtgttgtcagcttaactgtgttcttaaactatcagtggatcaaatgtaccatcaaaagaaaaaccaaaatggattacttgtcaagatcttttacctttttttttgtttttcttttattggcattcctaaattgaattcgattttgtggtatacttattgttcttataatttgtgtagctcctcgt

SEQ ID NO: 106140 - DNA, 715 bp, Aquilegia coerulea
  Intron number 1 from transcript AcoGoldSmith_v1.005957m (l ocus AcoGoldSmith_v1.005957m.g) derived from phytozome v7. 0 (chr-ID scaffold_13; pos 6045796 to 6046510)
tgcagtgtgaactgtgaactctctctgctttacaggtttgttattttctctcttattatggtctaagtaatactagttttgggcaagtgggttttgtgtttaaagatgtaattttgatttatatttgtgtttttcaagaggcatttgatgaattggggttgtgagtttgatgttcaatattagtatattttctcttgtttgctgtatgagaaggttttttttgttgtctttttttctttttctatgcttcttctaataatgagaacagaacaagttaaatggtatattggtttgtttgctgctgattcttatagatttgttgttttcttactttgtttttatgttctttgtaaattagtctagaacctatagcttagtatacttttctcattggtttagaatcattttttgataaaaaaattcattagttttcttggctttcaatcaaaagaaaactcatcaaacaaaggggaaccttttttttttttcaatttatttgtgcataaacatgtttatttgttgcaaattgttctgcaaaatgtgatattcttttaaggcatcttcaggtttccttttgtaagttttctgttatatgatttgatcttcaagcattcttttgctttcggtgattctaatgacaaacaaagatataaagattcttttttcttggtaataacaccatttccaattgtttatgcagctacctatctagtcc

SEQ ID NO: 106141 - DNA, 956 bp, Aquilegia coerulea
  Intron number 1 from transcript AcoGoldSmith_v1.014423m (l ocus AcoGoldSmith_v1.014423m.g) derived from phytozome v7. 0 (chr-ID scaffold_13; pos 6148870 to 6149825 reverse stra nd)
ggtaaggtattgatgttattgttttagacttaagtggtagtttcatatttaaatacctgcatttgacacatttaacacatttggcattgtctttgaaatttactaacacatactgtagtggatctgcacatatatgttctgcttgatatgcaaaattctaaaactatctctaaattatatcttgttcgtatgatggcatggttggtcagttctttttacagtataggaaatgtttagttctaaagtattctttttttgatttgcaagtcaaccatgtaatggttccaaaatttattcatagtttggtctgttatggtgtgcataggacaaaggaatatgctaccttcatgtcgaaagaaattttcaattatctacacccctacctctgcactctttgttcttccacaattaatatgtgtcatatatatatatatttattcactggggtctattggaaagtaatgagtagtagcatataaatgaccttttacgagtagatgtgaacataccaactcgatggagataatccatctatagttcaaacttcaaactgatttcgttaaggacctcactcttcatatcatgttaaaccaaattctttagctttgaccatcctaacatgcacctcgcctattgaatgccaatggtaaggatgtgttagtttgttgtctgtgtgatctggaataggattcctcacaaatggactctagttcgtcacatataccgtagcctaatttctgcttaattatgacttttgatcctactacaagtgccctgctttgagaaagcctggtcgaatcataaacttacttaggctgaagtcaaaacacttccttaacagaacactagaattgcactttgcattgaactgcagtttcaacttgatatttaatggtattaatcctaagtaatttcatttgcgatatttaaaaacagttattgtcagagtggattat

SEQ ID NO: 106142 - DNA, 960 bp, Aquilegia coerulea
  Intron number 2 from transcript AcoGoldSmith_v1.021989m (l ocus AcoGoldSmith_v1.021989m.g) derived from phytozome v7. 0 (chr-ID scaffold_46; pos 1849983 to 1850942 reverse stra nd)
tgatctttggcgagcctgaagtgaccactggtgcagttggtgacttgcagccataggtgaaaaaatcgtttaggggcggatatccgatctgccaaaaaacggaaaatatcgcggatatccgacctcccgtgtcggatttttgaggtttggcaaattctggtgaagttactcgtaaactattcttctctactacaaatctaccttcaactaccaccatcatcatcaccatcacaaccatcaatatcataaaccctaacttttccttttccctcatttctcttttcctttcttttaacaactataacaatcaaacagatctaaaaacctcgataattaaataaataaacaaaaactagatcaatgaaaaccccagaaatcttgtaattttttcgaaattaaacaaaacccatgaattgaatgaataaacaaaacttgggtttgtaaagaaaccaagtaattataacttagttttcagctaaattgaaaatttctacagaagagtagtagaaagttgaaagctttattatgaagattagagagacaaagagatgattgattaattaattaattaataacttaagagagaagaaaagggaaaaagaaagagacgtgtttgatctgtagtttcaattcaactcaaagtctcaaactgtattgaaacaaaaaaaaagaaatatttgtaaagataaagggtatatttaggaagaaaataaatgtgttaattttataatcgaaaatttcataaatttcgataaatatcggtttttgccgaattatgccacgaatatccgataaataccgaccggcatggggtgttttaaaatccgtttatatgtcgtatgccgtaccgtgccgatctccaaaaaaacggaaaatatcgcgaatatccggtcggcaagaacgattttttcacctatgcttgcagcaaatcaccggtttggccaaacaggtaattgaaca

SEQ ID NO: 106143 - DNA, 338 bp, Aquilegia coerulea
  Intron number 2 from transcript AcoGoldSmith_v1.017047m (l ocus AcoGoldSmith_v1.017047m.g) derived from phytozome v7. 0 (chr-ID scaffold_17; pos 356829 to 357166 reverse strand )
agattgcagctggttcttcttatcagaaaaagccggtgaacaccaataatgtttcacgatttcgatgataaataaagatgaacgctcaataaagatttgttcagttcagaagatcaaagatttaagtagtcaaaaacaagttgtagaaaatatatgtagctagtatgcttttgctgatgtttgttctgttttggggattgtagtgatattattgtaatgattcttttattgtattggtttagttgttaatgaaatttgcaagcaaatcttgagtgatttatttttgttaatgctactgtgtttcatttccccttttcaaagcttttctataaagtccc

SEQ ID NO: 106144 - DNA, 825 bp, Aquilegia coerulea
  Intron number 1 from transcript AcoGoldSmith_v1.003889m (l ocus AcoGoldSmith_v1.003889m.g) derived from phytozome v7. 0 (chr-ID scaffold_13; pos 1737428 to 1738252 reverse stra nd)
tctgtttgcaaggttagttaatttttttttttatatttaattagggtctgtttggttgatcatagtaattttcgtcttttatgttcacaattcttggtttggattttgttaaatttgttaatgttgtgaatgtaatttgactgaatacatgctattgttccaaattttgattaatgatctcgatgtcggtaagaatgattttcattagatttcagtaattttcaagtgttgatatctacataagatcaaaagcatagtgatgtgtactaccaccaccaccaccaccacgttattaaagtgaatgaataagagcattttgctcacataaatttcttttatgatctgtcattgtcatgctttgtatttgtgaacaagttcatgtgaggagtactacaaatgaggataggactttattacactctaaatcttgaggagggaaccctttagtcagtttgcaattactataaaaatgtgaaatctgtgcttttgtttaggtgtgtctgagctgtatttgtgggggtatttttatgacggatttattaccatctaccccacaaatgaacaagttgaattttttgacttgtaaaactttgtaagtaggactgtcaatgcagtgtttctggtctgatttcttcattcagtacctagaagtttagaaccagaaaatcttgtcaaatctaccagttccaattcataatttaaggacctattcaggaatgtttgttttcattgatgattactaaagagagcatgttaatgatgtaatgatgttgttattacaactaagaaaaactgatctgactaattaaattacaggagggatac

SEQ ID NO: 106145 - DNA, 1014 bp, Aquilegia coerulea
  Intron number 1 from transcript AcoGoldSmith_v1.001892m (l ocus AcoGoldSmith_v1.001892m.g) derived from phytozome v7. 0 (chr-ID scaffold_20; pos 3055210 to 3056223 reverse stra nd)
ggtaaaaacagaggaagaaggtagggaacaaactggagctgaggtttttacagaggagacaaagctcataggaaaagaagaagaacataatttcaatgaatttgctgcatcatctactcttacagactgaaaattttatgttttagattcattgttggtagcatttatctgagtgtaggtttgtttcgttgagaatgtaaaaaattttgtacttgtgaacagcaataatttactctagaacaagacacaaaagaaaatcatataccatgagaaggaatgcttgtatgcaactagtcccttggctattaagcattcctccaataccatattggttagatttatttcagtatctctttctttctctagtttcatagctttccagtacttttgttttcgaataacaaatgcgcaactttagctttcattttgcatgtagttgcttttatattttttggaattgtaccactttggtatggcaaatggggattcttggtacataccgatatactgcgctatggcagtagattactttgcttcgaacaaaaaaatttacaatctctttgtacaataatttgatttttcttaatacaaaagtagaagacaagcgcgctacaaaggttgattcaacaatatatgccatttgagttgtggtttggagtctcttgttttttgttttttttcaagtaacaacgttggttctaagttaaataaacccagaatcatatatctttgttcaagttcagttaaatcagaattggattaaaaccagatgactctaaccttcattgcagaggtttaagagcttaaatggctacttcgctctcacccaatccatctatttcttcttcatcgtttttattgtttcaaactataagaatttcttcaaacagtttcagaacacttaaggttaaaactcattgttcttgttcttatcaaacaattgaagctgaaaacctaaaacccaataatcttaatgtagtctctttaatcccaacgaagaagaaaactaaacaa

SEQ ID NO: 106146 - DNA, 971 bp, Aquilegia coerulea
  Intron number 1 from transcript AcoGoldSmith_v1.017264m (l ocus AcoGoldSmith_v1.017264m.g) derived from phytozome v7. 0 (chr-ID scaffold_39; pos 2029387 to 2030357 reverse stra nd)
gatagagtgcgattttgaaggtggttttgcttttgtggcaccgacgtggagggcaccaaactgccctcccattgggattgctcttagggatgctcttacaatctaaagctaccatgcattgtttccatattcatgatgttgtatatttttgcataaaaactagctagtaggtagtagctagtctcatgtacaatattgattactagatttacggagcatggtgaccgaaaaaaggaggggtattttgggaagaaaatttgaagttagacgttaaatgggacggcagacggatggggcaaagttcaagtccaatataataattttgagaaaaattcaccatctattatgcttaaatagtgaaaatacccataattcaaaaattaccatctatcaaaattcaaaaaattcaaaagttcaaaacaagtaactaaatcatattcaaaaataattgatattatctcatttttcagttcctaaaagtctgcaatattcatatatcccgagattttctgctgtcataatatatggagtagtgaagagtatatgctttaaataccacattatatctttcaccttttctttattttcttcttcttcttctacaaaaccctagtttgctcatttcgttggtgcatcatcatatatccttcttcacagctcatttcatttagtaagtttataacaaaactctttcttttatgcactacttcttaactgttcttcatgataaaaaaataaaacattgtagtttgcaaaactttagggtttctttatattgtttagttttgttattatttgcattttgaaaggcatgttttgatttattgttctttattgtttttctatgtatgtatgcatgtgaagatcatcaattggaatctaaaataatggctaaaacaatttctgataagaagtgtgaattgaaagaaactgaatcagtgaggagaaggagttcttctagacttgtgggt

SEQ ID NO: 106147 - DNA, 737 bp, Aquilegia coerulea
  Intron number 2 from transcript AcoGoldSmith_v1.024408m (l ocus AcoGoldSmith_v1.024408m.g) derived from phytozome v7. 0 (chr-ID scaffold_21; pos 3696654 to 3697390 reverse stra nd)
aagagttgatcaatcaagctctggtagtactatactctctctctagatctctctctctctcaatacataattatacatttaaaccatactgattataattttgtgtggaagacacaggatgataactgagaatccagaaaggaaaaaaaaattttggttttgaaattcagtaaataaatatgtatttcagtttgtgtgcttgcgcgccattttttactttggtaaagcggcgcgcaatggatctacaccatgagtccatatatagaccaaatatgtgtctccttcttcaattctatgttcatttccatcttcccatcctagtctgtcacttcatcatctcatactcattttctatatatccattttaatgattatttgtcactttgaaacttagattatattacatgtgttgccaaccttcaatggtgttgaaaagaaaaaagtggggagactgcagttgattctggaagagcctttttggattcaaacattaaatgtggcataaatgtcaatcattcaaccttaaaagtttccttttattaaatgaaatgattgggtcaaatgggtgagattcaaaagtaaatgttttggcccagaagccactacatagcattgcaatgtattatttactcatttattttgatttaattgtcaaatagtaactaatattttttctctcttaatttttatgtggaataacaggttgttaaggtgaagaagctggagaacaattgctt

SEQ ID NO: 106148 - DNA, 552 bp, Aquilegia coerulea
  Intron number 1 from transcript AcoGoldSmith_v1.011200m (l ocus AcoGoldSmith_v1.011200m.g) derived from phytozome v7. 0 (chr-ID scaffold_44; pos 652214 to 652765)
tacaaaagcttcaattcattacttcaacagatcaggtattgttacgatctcgatctttgtttctctttgaaaacttttagatctcaatttagatttttttttacgtgagtttatattgaaattacatttttcgaggtgatttgaattgaattgattgcatttctatgtttcttcgattctattacatagatctatgttgttaatggagatttatggttttctttcgtcagatctgaattcgatgttgatatgaacattttgtagattcattttgcttattttgatgagtctattgaagagatctaatcaaacaaagtatttcattatattaaaatgaatctttaatatgtttattcacttgtcttgatcttaacatgttgctgttgttataatatgttcatttttgtgaaaaataagaattgataacaccgaaaagttcttcaaatcatatgtatatgttgggatttctgtgcaaatttatcctgctgattttttttcctgtttcttttttatgtgtgaagataagacttcaagtcacatttacttggaatc

SEQ ID NO: 106149 - DNA, 344 bp, Aquilegia coerulea
  Intron number 3 from transcript AcoGoldSmith_v1.005032m (l ocus AcoGoldSmith_v1.005032m.g) derived from phytozome v7. 0 (chr-ID scaffold_12; pos 3488739 to 3489082 reverse stra nd)
ttgctgttgatcattataatagatatctggtaattttttttttttttttctggtttgatgtttactttgatttacaaagcaaattgttaatggctggctactgcagagctaagctactctctttgtattttcccccattgttgttcagtttgtgtgtatatatgttggcgagagccgagagggccaccaccttttcttccattttgggccaaagatgcttcgaacataaaattataattgtcgatatttgctggatgcatgtgtctgtgaaactcaattcaactaatccattgttatatataaatttgtttggttactgtcgaaaacaggacgatatagcatta

SEQ ID NO: 106150 - DNA, 775 bp, Aquilegia coerulea
  Intron number 2 from transcript AcoGoldSmith_v1.025719m (l ocus AcoGoldSmith_v1.025719m.g) derived from phytozome v7. 0 (chr-ID scaffold_5; pos 7027672 to 7028446)
ccataggggtaagtgaactactttctattcactactgtgaataccaaaaagtatgggttaaatcacttctagatcgatttcaaaaagtagatcgattcagattctaattaatttttttggtcgtgagatgtgatgaagaagtagatcgatttcagattctaattaagttttttggtcgtgagatgtgatgaagaaaggagatcgagttcagattctaactaattactttttttggtgaaggtgatgtgcagaagaaaaagatgggaagaagataaggtaaaaaaaaagagggtaatttttcatttttaacaaaaccgattttaattagggggttttgactaataatagaaagaggggtatttagggaagtcaaaattaggtttggatggaaaatctgacggaatcaaacggtggggtggaaagtcaaattttttgaatatatgggggtttaatcaaaagatgtccattgtttggggggttaagtcaaaatttccccattatataaatatgtcaatataatttcctcttcaaacagctcgttgcaatgggaaatattattcttttccaaaattttatgttggacactattaagacgttgcataaggaactcaagtcttctatcaacatgcccaaagacatgccaattccattttttcaaagccaaggaccagtatttgagcttggtagcaaggatataagacagagacccacatagacttgatcgtggaatacttgctcaatcatgtgctagtatacgagcagcttggttccttaa

SEQ ID NO: 106151 - DNA, 839 bp, Aquilegia coerulea
  Intron number 1 from transcript AcoGoldSmith_v1.008140m (l ocus AcoGoldSmith_v1.008140m.g) derived from phytozome v7. 0 (chr-ID scaffold_35; pos 56682 to 57520 reverse strand)
ttcacttcttctactgattctttcatcttgaatcggtaatttaattttaattttcagatcttcaatgaatcaaatcaattgtttgttgtttgtttgtttgtttagtttagatctatctatctatctatctatctatctattaatcaacgattctttcttaattttatctttttagtatttcgttttttcgttagatctggtgaacgtcaaatcaaatctcatctcattaatattgtttcaacataatatgtatttcgagattattttattattattttttttaatatatatgggattttgccaacttaaatatgtaattagcttatcttttcattcatctgtgtatttcttctacagttttaccttacttgctttacacaacacaacagttagttagatgcccatcaccttactgccatatcatatgagcaccaaatttgaacttctgtctttcaactgtcaatttctgagatccctcaccaactaaaagaggacatgttactgtatacaccaacattgctacaatatacataacagctcaatctattgtatgtattgtaagatgataacatcacatctacaaggtggactcgcaacttagcctagcctaatcacattgccacttgctttttaatagaaaacaaacactactcaatttcacttgtatacatttcactaatcattttctttaatataaaattttattgcaaggtacaaattatctttaatgttttctcagagtggtgctaaagtttatgaattttatattttgattgtagaagcttaatattaagtttcatgaagattggaaggtaaaaacgtgttgagatcaagtggtg

SEQ ID NO: 106152 - DNA, 724 bp, Aquilegia coerulea
  Intron number 4 from transcript AcoGoldSmith_v1.027744m (l ocus AcoGoldSmith_v1.027744m.g) derived from phytozome v7. 0 (chr-ID scaffold_51; pos 1062744 to 1063467 reverse stra nd)
ctgactgtaagatatatcctcctttctttaaataatttacttttcatgagtttagtgttttgtatcattctacatatatacagactccttctctgttttcatagaactgaaggtctaaattgtggctagaaatatgtactatttctcaaaaagaagaagtttttatctttccttgatattagtgtagaatttcttctgattgcatcatgtagttcaaatacactaaaaagctgtgttcctttgctgaattataattcattgtgtttcgctttgagcagtgagcaactcttggaatcactggcaaaccatattgatattttcaaagctctgtcctttacgtatatgtctagggttgcatcattgactcatgttttacttggtggatcattttcaatgcatttgtagagttgtcaggcagtaagttgatgtaaatgtgtccatggtcaatgaaggatttacatactagcaccatggcccttcaaatgtagaggcgcatatagagcatgttgtctatgtgagttctgtcttacttaataacgtaagttagtaaacgtaggaaatggtctataacgtggttggagacttggagttagtaaactattggtgtggttcttggcttagttggaacactgtatttgagctttgatttttatgagttggtatttgcatagagcttctatattctctattaaattatctctatgttgtttgtttgacaggtagg

SEQ ID NO: 106153 - DNA, 676 bp, Aquilegia coerulea
  Intron number 2 from transcript AcoGoldSmith_v1.009870m (l ocus AcoGoldSmith_v1.009870m.g) derived from phytozome v7. 0 (chr-ID scaffold_5; pos 9029661 to 9030336 reverse stran d)
tgggacagaaatcaggtggtggtgttattatcactgtgagttcctccttttctttctttgttttatttattgcataagattcttccaatggctcaagtacctgtattggatatgtatgaagtttgatgctccatgaattctactttctaggtatgaattttctccattagttcttcagtttgatgcagggcaagtagtttgtttcattgtttgcatggtcctagatggttctaaatcacaagctattgaactacatgtccaaaaccaatttatggtaggattttgaaacaatgttacttagaattagaaatgtctgatattgaagattgaagaaggaatcaaacatgcatatctaaacttgtggtgaaagaaacgtaaacccccactcgtgatgaactcctagtacaaccaccagaagcttgaccagctagcctgctgaacacgtagcaatctttcatggattttcagagggatgaaatgaagtccatattaactaaaaaaaaccataataccctgcctttcactcttttccagcacataaaatagcgatagaaatcctctgctaagcaggatcttgtaaactttacgtcagcttaagtacaaactacctcagcaacgatcgcactggaatattaagattaacataatggttgcttaatatgacagggagtagaga

SEQ ID NO: 106154 - DNA, 630 bp, Aquilegia coerulea
  Intron number 3 from transcript AcoGoldSmith_v1.007176m (l ocus AcoGoldSmith_v1.007176m.g) derived from phytozome v7. 0 (chr-ID scaffold_20; pos 1644101 to 1644730)
aaagggagactgtcagtctcttaggtaagctgcctgttctatcttctctgagcttaatgaaataattcgattaagtttggtatcttctgtgtactttatattactccgtaataacatgcgctttacaattcagcattaagtgagaataatatttgatcatgtcttcagtttttcgacaaaagaaattactattgttcataacttgtaagtgaactaaaataagtatttgattatttttaatctggcaattgctagttggataaaagttgttttgctggtcaggttaagggtttttaacattctacacatttgagtttttggctgtagctatttttttatttttcatagtaagtaatttgtatactcctgttgttaatggagctaaaaatgcgcactcgactacaatttttcctgtttgttagttatatcttataatgttgatgactacggagtaaatgaacatatctgatcaaatttattttctaacacatttggcagtctgtttgctagaacaaagttaatattttactgctagttaatggacataaacttacctaaatattacttttggcaaactgtaatggttattcaccaggtgctcacagtgtaggagtagctcactgccagttc

SEQ ID NO: 106155 - DNA, 883 bp, Aquilegia coerulea
  Intron number 1 from transcript AcoGoldSmith_v1.023427m (l ocus AcoGoldSmith_v1.023427m.g) derived from phytozome v7. 0 (chr-ID scaffold_58; pos 594719 to 595601)
accttctctggtttttatcactggtgatctcactggtaacattttcttctccatttccccctttattttccttatttgttttggttatttgtagttagaatttattatattgttcaataatgtgtaagaatgactgatggggtcataccaaattgcaaaacacacaaaattagttctgaattactttttattttttgatgtgttggttctggaactatctttctgtttttattagttctttaagtatctttaaaccttttatgtgtgttaagaacgacgttaagctgcgttaagactgctcgttgacttgaactgtggctactggctagtatggatgatttagagatcactaaggtctaagataattgatattcaaagtgaatagttatatgcttatagaaaaaggggtatgtactcgctaagcgaaaacacacacacatatgaattgtttgttgattgagttttctctctcaaatcaacaaacacttcatatgtactcgctaagcgaaaacacacacacatatttcaattgtacaatatataatacaccagtgtagttttgtcatatgcaatctaagtacacattcaatagtctacgatgaagttatgcccagttctcaaccattgaacttagtaatctatattaactcataccctcaatggtttaatattattttacttttactagatgggaaaagcaaggatttgttaactacgaaacaagatgtggaggagtggaaagagtatgagagtgtaatagaagatgttgtcgaaagaagtggtcttgacaagaaaatcttctacgatctcaggggaaaccatgataaatttggtgtaccaacggttggtggcccgtttgatttcttttctttatacagtgtca

SEQ ID NO: 106156 - DNA, 830 bp, Aquilegia coerulea
  Intron number 1 from transcript AcoGoldSmith_v1.002390m (l ocus AcoGoldSmith_v1.002390m.g) derived from phytozome v7. 0 (chr-ID scaffold_83; pos 34602 to 35431)
atgtaagcttctattttcatttccgtatttgcacattgctcagttggttatgattatagttggttaagaatatcttcaacacatgtggcatatgagagtatgcttgcaagtgacatataactatttgtttctgctttggcatttgccctatctatctagaatggtcatagggacagtatttgatcagtcaatccttttttacagatatgttgaaatagtttgactgttgatataatcactatggggtcttgggtctacattgaaacaaacacatttctgcttattctcagaatatttcaaaacaactacctttctgttcatcgctttagaataaactttgtacttgacgtcttaaagctgatgaattcttctaggttctaaaggtttactcatcatagagtcaagagagttcctgcctttcgtgcaactatgaatgatgtgtagatttgcagcttgtaaagaaaagagcttatgagcctgagagctttgaacatgaatgaaatatatatatatatactgtatatatatgtcattggatcaaatctttttactcttttcttagaaaatgtttcagccctataattgtcgtgtcttttaggtttctgactttccagtccatttgcagtcctaggggctaatgtattgtgattgtgagttccagcttgtcattaaaagagcttgaaagcatggtgtccctggttcctactaaataacatccattcattttatctttggggatgtttgaatagtggtttatggtttctgtagtatttttcagtcctgatactgattaagttatcatgcctgattcgtaaaggaggcgtacggga

SEQ ID NO: 106157 - DNA, 698 bp, Aquilegia coerulea
  Intron number 1 from transcript AcoGoldSmith_v1.010405m (l ocus AcoGoldSmith_v1.010405m.g) derived from phytozome v7. 0 (chr-ID scaffold_11; pos 2249892 to 2250589)
aattctggaagtttgttttcccatcaccaaggttttgatcctgtttggtgtttctatacttatatttttattctgtttgagcttaaaaaacttaaagagttactcacatcataggtgacacacccaatctgagaaagctctggtagcttgagaagacgattaaaaaccctgttttagttcaactttacagcgctgccatttaaaattttgaattacaagtgtttgaatttattgtgaaggtgcccaatatgagatgcaaattgtaattttcttttatctcgtccgtagcctgcattacttaagaatcaggaaacatctgtatgagtttcaccaaggaaacaagtcatacaatgttcttttaataatctgatatacatagtctgacaaatcaatggctttgtcagataaatctactcagacaaattatatggcttctatactgtatcttgatttttttgaggactggcctttagtgttaattcatatttcatattaaaatatacatatcagatggttaaagacatcatgattccttctaaatttatggtggcactatcctagtcatttgtgtgtataacacccatccttcactgcactatgtatgaggcagggtccgcttgtgttctttattcatacataattaacttgacggcaattgctttattcttttataggtacgaggttagtcccattttcta

SEQ ID NO: 106158 - DNA, 910 bp, Aquilegia coerulea
  Intron number 1 from transcript AcoGoldSmith_v1.009928m (l ocus AcoGoldSmith_v1.009928m.g) derived from phytozome v7. 0 (chr-ID scaffold_23; pos 2218912 to 2219821 reverse stra nd)
gcatctacttcaacttgaccttcattgttttacgagtgagttaagcttccactttattgtaccaaattgatctctgcgatctgcattgctttctgttatatgcattctattctattatttgtaaacagtttgtaacaatgatgcaatagaatagtaagagagtcgattctttgacttagtatgctaccatttgcagtgtgattaagttatcacgattcttgagaataaatgtgtaagtacagccgaagtctttcaatactactttattcttgggattatagtatttagattgattttagaaagaatcacactgcaaaaggatgttggactcttgttatcaaaatatgtatgattctgtatataggtttcattatgaataaaattaacttaatccttttggaatgaagaacacaccatgccttcttattaatgtaatttatttcctgacattaattctattgtaagtaccattttacaatgtaagattggagtaagaaaaacaaccatcttttgtatatttgttggaatacttgacactttccataatatattaggtaatataattatttagctctagtaatatatatgtagctatatatattatatgtagtttttagtcaagtaacatgagctgtctgtaacccaaaataatgtccacatgacaacttgtgttataaaaatggcagttcttaactaacgattgacttcgaaggtcatttgtgcttgcaataaacaattgctaacttgttcccattgcgttgtatataatatattcaagccataggcttcttctgttttgtttggttgcaagtgttgatttcctggatgttaagtagagaactaaacgaagctacgttttccccagttttcgccagtctctacgagtcattcgaaacagagaagaaaatag

SEQ ID NO: 106159 - DNA, 579 bp, Aquilegia coerulea
  Intron number 1 from transcript AcoGoldSmith_v1.023605m (l ocus AcoGoldSmith_v1.023605m.g) derived from phytozome v7. 0 (chr-ID scaffold_14; pos 2022872 to 2023450)
ttcgtccggtgtgcaacctctcaattgcacagacggtatgcactccttagcacactttagttgttttagtatcaagtttgatcctttgctagttagtttatcacaatttttttcttccagtttattgttatatgcccaaaggctataaagatatatgacatgcgcaaaattccctaggcacagctgagaggaattcacatgaacataagcttcatgtgccattgacagggatttatctctgttacgacaatgtccccttttttttttttttttcgggtcaaactactgtaatgatctagccatttactagtaaatagacaagcatttcaattatttcaaatcacattgggtcctaattgtgcttattcaggaacgatggaatcatggataaatggatcagggagagatggacctagaccatctagagtagttattggaggtaactttatacttccatagtttttggcaagtttggatcattggtagttcagtttccacgagcattacgtactttatcttaatgcaacatatttcttcaacacagcgatttctgcctctgtttcaatactgtttctggta

SEQ ID NO: 106160 - DNA, 657 bp, Aquilegia coerulea
  Intron number 2 from transcript AcoGoldSmith_v1.022788m (l ocus AcoGoldSmith_v1.022788m.g) derived from phytozome v7. 0 (chr-ID scaffold_53; pos 1032623 to 1033279)
cttattcttctgctcactctctgtctgtgtcataggtttgatctcttatactacttctatttgattttttttttcgttaagttatattaaatagaaagggaaattgagaacaaaacaaagggtgggagataataaatctacccctcaccaataaccagaatacaagaaaactattttgagcaagacttaagagcactaggctcacagtcagactgtttcttcttcaccttgctagtgggtgacttcttaccatcttttctctttagaacagattgcctgttctcttccaatgctgcaagtctggctttgatttgcgcatactatttttctgaaacattgcgattatttcttcccttgcttaatttctaagtttcataatccaatatccttcaacatccatcaaaagctttcactacacatccttatgtcctgtaagagattattaatgatttcccattcatcgatatattgaataaactaatactaaggatcattaattgttttgaaattttaatcagtagcatttgaacattttatcttagtgaccattcatttattattcttatcgtataagctaaagacatttcctctagtggagagtgcattatgatgtgataacatctcttttggtgtaacagtactaaggagagctctata

SEQ ID NO: 106161 - DNA, 702 bp, Aquilegia coerulea
  Intron number 1 from transcript AcoGoldSmith_v1.016315m (l ocus AcoGoldSmith_v1.016315m.g) derived from phytozome v7. 0 (chr-ID scaffold_26; pos 1857686 to 1858387)
gcggagccagggggtttgagggtgcggaattgcgcctcctgaatttttggaaaaaatatatgtatacgaatcaaatattaatctgtttggttttattatttgactagtttacccttaataattaactaaccaacagtaattaacattcatagtaattgactagtttacccttaatattactttccttaatacatgcgtaaaaatttgcattgtttatagtttaaatatttaggatactagttagttttactttgctactgcattacccgtcctgattgatgtattttgtctttaggatccaattatccacttatatattttgctttgttaatactcttttacgactttttttttctgaggtaatacatatcaatctgtttgttttttcttctatcaatttttatattttacccaactactttcagcaaaaaattgatagttattattattttagcaataatagagtgggtgctccactgctccccttcactgaaaatcctggctacaccactgccctcaaccccgcttgcctatctaaaaaataataaaagagaattgttagagtggtgattgcattgatctagaagcaatctcctaaacttagtagttgtgaacatttcagtgatttggttcaaccgtgtgttgactcatttactttctcatccagatctccctctgggaccacattatccaggaaaaaaa

SEQ ID NO: 106162 - DNA, 914 bp, Aquilegia coerulea
  Intron number 4 from transcript AcoGoldSmith_v1.022574m (l ocus AcoGoldSmith_v1.022574m.g) derived from phytozome v7. 0 (chr-ID scaffold_1; pos 10413938 to 10414851 reverse str and)
tgtttcgaacgggatcactccatcctcagccaagagtgagttttagattttattttctactattattttcttttcttgttacacaaaatgtggattcttgttgatcttatgtgcatatactataaagaatgccgaagctttaaaacaaaataagtataacatgctgatttcattttaagaactaattcggttacaatgcaatggtattggttttcattgggagtaatacttgaacattttttccaatgttctggagtttgcgtctacaattgatatgatgtatcactacccgaaattgggattgtgcatgtgatacttttgaaaccttttcttttggtttgtgtgtgtgtgcgttgggggggggggggtttagtggtattgcccatttatgacgagtctactaaaatgcagaacagagactacataaatagattcaatgagaactaacaaaagagattaaggcaaaaaagaatctgaaatagaattctgaacattgctattttacaagtttattatttggtagtttttacccctacaatccccaaggtcttcatttattctactttgtttacccagtttaatcggatgcccttccatattatttggtttcgatcacatcgtcagagatgaaacttctggggtgggtattgtagaagtcaagtggatgaacgatgaagaataaaataattcgagagagagcggatggaagaggaaattttgattgagaaggccaaggagctggaagggaagaggaaggaggatgaagaggtggatctgtgagtgtcatggagggtagagaattatagtgtatgggagaagaaataacatgcaaggcgagatcaggaggtagagaagtcaatctttgaaggtggtgtatccgaattccgattctagtggaagattccatgaagagg

SEQ ID NO: 106163 - DNA, 839 bp, Aquilegia coerulea
  Intron number 5 from transcript AcoGoldSmith_v1.008514m (l ocus AcoGoldSmith_v1.008514m.g) derived from phytozome v7. 0 (chr-ID scaffold_32; pos 1266444 to 1267282)
ttcttaggaattccttctgaaagtgatccacattggtaatgtcctcttttatttgttatttttgccgtcactgaattctgagcatatcgaaacagaatataaactaaaatttgtagataattagtacttgcatcgttggcttaaaactttatgttctatacatttcaagtcctaatcattgtcatgtttggtattgtttatagctatcttttgcacatttgaaccatgtgtctagccacctatgtgtagcactcaaatctttgtcaatatagtcccttatttgcatcttatatgcttgtatgagagatcatcgcaatattctttcgaatatgtctttgatgttttcaaatacgaattaattgtcttttagcaacagctagtattgttcctaaaacacacactggtcttctttatcgtactatctgttctcatgccttcaattatgagtagttaagttaagaagtttgttctattataagtttgttctttaccagtcttatattttttttactttgtcaataaaagttatttcatcatataaatgaaacttataagaacaggatctttgtcctttctaatgcaaaaaagtatatactactaaagaaatattttggtaaagactggttttaatgaaaatcttctgaattatatatcatatctcttttgtccattgatttcagttctgtgtggtaatatcaatacaatttgttctatgtacttcctgccttttttttattcttgttcctcatgagctacaactacattgtaatgcatcatttagatcttattaatcagatattgtagccatataataaatcttgggttacaggtggaggaca

SEQ ID NO: 106164 - DNA, 866 bp, Aquilegia coerulea
  Intron number 1 from transcript AcoGoldSmith_v1.010021m (l ocus AcoGoldSmith_v1.010021m.g) derived from phytozome v7. 0 (chr-ID scaffold_14; pos 5491357 to 5492222 reverse stra nd)
ttttggatcgaagaaggcgtaatcattgggattctgtaagtttttatatatggagtaattattttcatttctattgaaattttcagtttgtgctacttaaaaaaaaacaccattcattttgccaattaaaggaagaattaaaaatcattttttcatgcttatgtgtgaacttgaacctacattacatttcactataaaatggatgaaagctataatcttttgtctcctaatgtgtattatagattgaatttttacaagttagtgctttagcatacactactagaacacaaaatcatgtcaaattttttatttttttaatgcttttgcgcgtaattctggtacggatatgggaacccaacccaaatccattcttactattatttgctataaaaatttattgctacattgtgacctgcaacttttactacggatgcaactactccaatatagaaaaacaaaaaatataggaagatgactgaggagttgagtgctcatggttgttgtccctgtacagttgattgtgttaatgcaatttctaggaagaatatatatataagtacagaagtagattttcctgctatgtatcatctaaagtaataaactttgaattaggtttaatggagtttcagtgatttgtaacatagggaaataaaaaagaggtcatatgataaggtctatgcacttggaatgctagtttttaataataggaaatggttaggtttaagtctttaagataagtttttaatatatttttgtttagtattagattgggagtgagcatgtgagtcctttatataacctataactttgttggtgtactttttcatgcagggtggaggtccttccagaggttcatcaaaggtaca

SEQ ID NO: 106165 - DNA, 790 bp, Aquilegia coerulea
  Intron number 2 from transcript AcoGoldSmith_v1.015023m (l ocus AcoGoldSmith_v1.015023m.g) derived from phytozome v7. 0 (chr-ID scaffold_9; pos 1102000 to 1102789)
aagtacaaatctggcggcttcttttcgagaaaaaagtcacatggcgaccagtaaatttctggctttagctgttttttttcgtgaatgaatattagcacccgttttctgtgtccaagagggtcatagacatttattaatatgatgagatgcttatttcatggagtgtcttggtttatctattcacttttatcatgagagattcttagtggcagttacataaactgtcccttccccagagccatcaatgcaaggaattggaatattttttgcataaattgagctcatgttataagtaatataaatatgttatcactattgtcacgtagacacataatacggggagatacggatggaaactgtgaatttctctgtctgctttattatccgatacccctggtcaccgtaaaatctatgaatccacacaaaaactgccccggaatatgcattttaagttataacttgtcatgtaatattagagcgcatctgcttgatactacctgtatatgttcttagcagatgtctaaatcgccttttatccttgtgaaaaaaatagaagtgtgtgctaaagcactgttatagatatgtgaagcctatttgaatattcgttattaagcgactcatttatgggattactgtagcttgaaatttgatttgaccaactaaatttataaaggatttataattttgggaatatgtatatttaggtttttttctttttttttaaaaaaaaaagatggaagtatcagaattagcgtcttttcattgttggcataggtgtgtgatttgccag

SEQ ID NO: 106166 - DNA, 841 bp, Aquilegia coerulea
  Intron number 1 from transcript AcoGoldSmith_v1.000466m (l ocus AcoGoldSmith_v1.000466m.g) derived from phytozome v7. 0 (chr-ID scaffold_27; pos 2353322 to 2354162)
gagaatctcttctgttctcgtaggaagtttgaaaggcaagttttgactctttagttttgtttagggtttcgtttgagatctgtttttgaattgtttcacctttctttcttcttcttcttcaattgattgatgttagggttagagattctattcttaattctgttcgatttgttacttcttaatccttattattgatatatttgattttgaatatcatcgtttcattttaatcaatcatgtattgttgttgatttctggttcgtgcaaatcttagggtttgtttctttgaatttatatgtttgttttataaatttcatctctaaggttaggtttgatcttctacagagacttgcaagtgtttgtttgctgtgttctagattatcttagtttcttctcttttgtctagcttcatttttgtcacaatgaacaaattgttaatttcttttggcaaattagcaccattgactgtgcattatgccctagttttcttattgtgtgagttagacattattacaaatatataggacttgcagtgtctctgtaccaaaaagaacgaattattaatgatttgcacatgatacagatattattaagttcattgtcgtattgcctgagggattattttaattatatgtagtttctgtttgtggacttgttcaaaaacttttaatttattttttcaatatttgaacttttgaaggtaaagccttctattatctagttacatttgaagataatttttgtgcttgggaatccctgatgattgaataatcgttttctttatttttctaatgattgttttgtagtttcagaatcttgaacgagtattcagatcgattgt

SEQ ID NO: 106167 - DNA, 772 bp, Aquilegia coerulea
  Intron number 2 from transcript AcoGoldSmith_v1.000466m (l ocus AcoGoldSmith_v1.000466m.g) derived from phytozome v7. 0 (chr-ID scaffold_27; pos 2354170 to 2354941)
ttcggctcgactagctgtaagttgttatcacaactcaattgattaagttgtatcagaatttgatgttaggaaaaattcctgtattatgcctgtccttctggagtatttgactcataatccttctgtctattgttgtgatttaatattttttaaacatatatatatcctatcttatttttgtttttatgaattctgatatataagtttactgtgtatgggtgtttgtttcaatatatatctgagagtaagtacaagactcatcacttgttttggaccaaaagcatagttaattgatagacatgacaagacaacactctcctgatccactctttcaatatatcagatatttcttttccgatcaaatggtcacataacaacaaagtgactttgatgttacttgcgtttggagttcattttacggcatattgttcctaataacacatttctcctgatttccttgttcaagttcattaattgattgcaatctgttctttgtgcatcattttttcagatttatgctttcgaatttcttttttgctccccaagtattgttatcaaacatgtcttgttgataagcatccctgttaggctgttactgcttaattaaagccttcgtttgaaaagctgtcttatttcatgtctgtatatcttttgtgttttgtggttgcatattacattgtgtgtttatgtccagttgttgtatttacttatttgtttacatttctgtgattttacagcatttgggcagtcatcaagtagcccatttgggtcc

SEQ ID NO: 106168 - DNA, 1048 bp, Aquilegia coerulea
  Intron number 3 from transcript AcoGoldSmith_v1.009667m (l ocus AcoGoldSmith_v1.009667m.g) derived from phytozome v7. 0 (chr-ID scaffold_35; pos 2191223 to 2192270)
ggagaaggctgttgcttataaagcaaattttacaggtatgatgattaattaaatatggctattctctagggtttctcttgttatgagggccatgttcaattttttgcgcccttttagttttagtcatcacatagatatataattggaaatgtcatgttagatttaagcatttttgaaatgtcatgttatcaaagcatccttcataacatagtggtacaaggaaggatgattgcacaacatttcttgactacttttaagaataagagtggcaatttacttggatgtcaaatctcattcgaattttgtagttttggtggcagcagtttgaattatataatctgctaccttgaaactatcccaataatgttggataatgtatatagagaagcaaattattaaaatttcgaaggtcgtgaagctgtgtccggctcactgtttctatgtggaagcattttgcatgccacaaagtgatcaacatttctctttagttctaccagagtccagaggaagtcatcaaataattaagtgatccccgagagttaacaacgtagtgttaactttcctacttcaccaagcatccccatgggaaatatacccgctcggagtgagggcgagctacgtactagaataggtttgtacaggtgtagttagggagggcgtggatctgcacctggctaacccaaggcttaggctaactcagggcatggttcgtgcactgttcatgtcactgaaaaagaaagaagggcaccacgtactcaccgctctttctcttctttcctttcttatactaaatcggaaaatgtcatatgcttttgagttttggcttcaccacgtatatgactgaagtaatttggctaatagtaaccattataaataatcaaaaagataataaataaataaatgatttgttgcacaatgtagagcatgcaggacagtaggtcttctgtttagttggaacgattttctgacatgttatttcttatgaaatattcctgaataattagctttgtgatgttttcttacaggcgcggatttgagcgacactctg

SEQ ID NO: 106169 - DNA, 418 bp, Aquilegia coerulea
  Intron number 2 from transcript AcoGoldSmith_v1.006034m (l ocus AcoGoldSmith_v1.006034m.g) derived from phytozome v7. 0 (chr-ID scaffold_1; pos 5373301 to 5373718)
tgtttttaaatttggagaaaatctcactcctagatgtaagtttttcaattctgtttttaatggattttttttttctgtttgcgcaattatgttaaattgaaaatgtgaacgaattcgacatagaatttgatgatgttctttgtaaaccaattcaaaaagatgatcactgtgtggtagatttatagagccccttgaatgcgttgattaagaaagtaaggtcaatgattttgagaattatgttaataaaatgcatttgtgttatacagatgcaaatgtattggaagagaaaatataagaaacactatatttgggttaagatgatgtagttgatattgttgcacaatgctttagttgatgcggttttgatataaattactgttactttttgtatctttatgcagataaaatactcagcaaa

SEQ ID NO: 106170 - DNA, 601 bp, Aquilegia coerulea
  Intron number 3 from transcript AcoGoldSmith_v1.001198m (l ocus AcoGoldSmith_v1.001198m.g) derived from phytozome v7. 0 (chr-ID scaffold_40; pos 588355 to 588955 reverse strand )
tgtagtaagctctacttggtaaggttaccttcctcagcatttataaccctctttgagacagttgttgtttgtggataatctttttttataatgacttagtgagtcaggtcaggactcatatcaaagtcatatatatgaagtcatctttggtatttttatcctgctttcagagtgtccgtgttttcttcttcttactatctttgtgattgctgagcattgattttattgtttgacaaataattagaggaaagatgaactgctgattaaatatgtgttagtagactttgatttggggtcccacagagcatgtttttgccctttgttgtcgatgtgaacttcacttgttgttttttaagtatgtaattccttgaattttcagtggatatatgtttgcattcaatgtgacatgtatgagatcatatgattggcctatgtaactgaaactttaggagggaaagagttcaccctgatttttttcgctgctcatattcacagctctcaagtgtttttaaattagttcaatcgaattactataaataatttacatgatgtttcccccattacaggctataacaggtgattctatactccttaaatttga

SEQ ID NO: 106171 - DNA, 749 bp, Aquilegia coerulea
  Intron number 1 from transcript AcoGoldSmith_v1.007238m (l ocus AcoGoldSmith_v1.006252m.g) derived from phytozome v7. 0 (chr-ID scaffold_14; pos 2434884 to 2435632)
ttccacgtgtcgaaatcgcgtcctctgactcactggtaattacttttacataataacaacgcatcaatatctatcacttctttctttctctctgtttataaattctccgaaaaacgttgaaacattcaaatataattatagagtttcttttcatttaggtttcttgattaagaacgagagattgagagttggtctttttgaaattagggttttagttattcacattaataaacattcattttcaatttcaattccgtcttctgaagctttctttctttctcgaggtaatctttctttcgtgatttgtttgattatttgttctttggaagtatgtgttggtttactcttgattgattgatttgtttgattttgttttttttctttcaatcttatagattgatattgaagttgctatctttcttgattctcttttgttgttgttgttagagattttgttttgttactgttgaagagctcaagatattaatggaatcatatttccttttgttttgttttttataaacatttaccactttttatccttttatattgtggtattcttatttagtagtaaaagtgttttcttttgttgttatgtttgtttgagctgaattaagaaagattagtttgtttgtttaagttcaaatagccaaggaatttgaagaaatggatttgagctatttctttgtttctttctttttctttttttttcagattaaagattctcgtagtaaaagcgtcatagatat

SEQ ID NO: 106172 - DNA, 694 bp, Aquilegia coerulea
  Intron number 2 from transcript AcoGoldSmith_v1.007238m (l ocus AcoGoldSmith_v1.006252m.g) derived from phytozome v7. 0 (chr-ID scaffold_14; pos 2436047 to 2436740)
cacgggtatgtgaatttataatttctcagcattacttttattgaagtcagatattacattgaagcatgtacgtagtttacaatatttaggtgaaagctttgaatgtttaatatggtggagtatgagacaaagtcactggtcctcgtgaatttgatttacgttgtgattaaataatttttaagttgcagttttaaattaggcctttgcagtggagtttgttctttgaattattttcttggccagttagttcagttataaaatgtactcaacaacaacactcctttgggaaataagttggcaagataatatgtgttgtctaaaatccagggtagaaaatcctctgcaatgcaattctttgggcatgagattccttgtctttcttcagaaaaaaaaaagattgagaaatttttgagaaaacaaatataagcgttctttaggtttgagaagtgaccccacacatactagtctatgccttatattaattatgatttgttattgtatgtgcattatgtatttgtatagcagcgttatagagtatcgacattgatcaacagtcaatatcttggtgctggtggtctaacatgactgcctatatcaatttggaagttataatctcttttaaactgatagaatttcttttgtgttttataaaatttcagacactatcagcctctgacttgcgtgacccagaagt

SEQ ID NO: 106173 - DNA, 938 bp, Aquilegia coerulea
  Intron number 1 from transcript AcoGoldSmith_v1.007795m (l ocus AcoGoldSmith_v1.007795m.g) derived from phytozome v7. 0 (chr-ID scaffold_17; pos 2285709 to 2286646)
ccaaaacagttgttgaagttaaagctcttgaaaaggtgttttttttctacccatttacttccctttgcttaatttatactcttttgattctatgaacgagttttatgaagctttttgttgaatttatccctcaattcgatttttcatgtgggttttcgaaacattttcatgaacatttcaatgattctgtagaagttcttaatgggcatgaacagggtttgctgtattctttaagaaatttcataatttttgtttatgataaaaagaaaaaagaagttctgtctttactggattttaaattggcatagcttgatgagttgagcaacagacattttcgcttcacgaaatgccttatactaagcaaaaatcactcatagattccaacaacattgacatatgggaaacaccatttttttgcgtataaaaacaaaacatctttcatcagacatatctactctcaaagaaaaaaaaccccgcttgtatagtgatttgcttagtatacccaattgataagagatgtgacaacatggaattatattgagaagagagaagtaatcaatccctaaacttacaaaattttgctgtttttgtgttaaaaagattggttactttaggcaatgactgaggacgcgtgttaaaccagattctcaatcaagtgtgtatatggcaatatccagcttacaacagtttgaatatcttctaataaataattaaatataggggtgtgcagtaagagtagtaatccataatcaacaaatgccacacgaacttctgttatggaaatgtatgtattgctatctggatgatgaatgtgtaggattaatataatttgtaaattacttctttcaatttgcaagtattgattaattgataactgattcactctatacctctacataaaaggctttagaagaagttgaaaagaactttcttgccat

SEQ ID NO: 106174 - DNA, 869 bp, Aquilegia coerulea
  Intron number 1 from transcript AcoGoldSmith_v1.019803m (l ocus AcoGoldSmith_v1.019803m.g) derived from phytozome v7. 0 (chr-ID scaffold_4; pos 4836273 to 4837141)
cacgtaggaaggatcacaagttcagtgagctttgacagggctgggaccaccttttcagtttgaccaacaatgaagggatacagaacagcagcaggtttttgattcagacacagttcgtcagagggatagtttgtaaactgagcatggtgctatattatgttttcacctgacctgacatgacctgctgtataggtccgtaaaaaatgtaaactgtaatgtgtgctttttagctttcatcaataaaaattttatttcatcaaaaaaatcgtcataatacggtgattctttctgtatactgtaaagttccatcagatttgaaaccaataaacattttcttatatagcaaatagtacattttcttatatagcaaaaaatgtcgcaacatttttacgaggattgtagttgcgacattggtaaaagatctctggtggtgtcctttccttgctgctgctgcaactatccaaaccataaagcaaaagttctgctgaagaatgtcattgtgggttgtgtgcttggagccttggatccatcatagtctagcccatcaacagcaatttcttggaaactgtaaaacaaaacaaacttgtgtcatgagacaagtttaatctagaaacacaaatccttactactcctagttcatgtttgcttcagattaaaatctaaaagcggttgttaatgtgtataaatattcattgaacctcaagttctcaatcacaagttctaagacgtactcaagcaacctgcagtcggttatcaacaattttgcattgcttcttcaatttatggcgtcaaggtatttttcatcatcttctcttttatgttttattcttctagtttcaagtttttcagttctacttcatcctactctt

SEQ ID NO: 106175 - DNA, 143 bp, Aquilegia coerulea
  Intron number 1 from transcript AcoGoldSmith_v1.025807m (l ocus AcoGoldSmith_v1.025807m.g) derived from phytozome v7. 0 (chr-ID scaffold_14; pos 2119505 to 2119647 reverse stra nd)
cagcaagctttcaatctaatcgcttagcttttcatgtaatctcttaaaccctaactctaacactaatcttctctctctttctgtctctttgattgattattagtttttttatttttcaattgtgtttcttcagattagttcag

SEQ ID NO: 106176 - DNA, 539 bp, Aquilegia coerulea
  Intron number 1 from transcript AcoGoldSmith_v1.000048m (l ocus AcoGoldSmith_v1.000048m.g) derived from phytozome v7. 0 (chr-ID scaffold_14; pos 5586073 to 5586611 reverse stra nd)
agttgaatctagtaaccctagagttgcttatttatgtaagtattttttctccatttttagatttcagtgatttcgaagtaaagattccattattttttccaatttggctattttgaatattaggaaattagtggggttcttgacttcttggttcagtaagaaaacaaattaaacaagtgaagtggtttgagcattcaataaactgttgctagtactaaatgataatgctaaagtagcttgtttaagttaaatttattagacctattatgcatacatttaatgcttatttatgaagattttaggggttttaaactattggatattcattcaccctgcctagatgcatatctttgttgggttgattccgttgcgtcttttattgtagaaacactttcttaactaagagtttccagagtttttgtttaaattaatgctgttagctaggttcattccttctggataatttgcgtgcttggttcttattaatgtgggtgttggaaacaggtcgattctacgccttcgagaaagcacacaggttg

SEQ ID NO: 106177 - DNA, 838 bp, Aquilegia coerulea
  Intron number 3 from transcript AcoGoldSmith_v1.025233m (l ocus AcoGoldSmith_v1.025233m.g) derived from phytozome v7. 0 (chr-ID scaffold_66; pos 1301019 to 1301856 reverse stra nd)
attgatattgtatcacttgctatacaagtaagtcatttttccacgttgggtaaatacagtgcccaacccaaccaaaggatcttactgtcagcattgtcaggcagttcaggtaacctgcaccggccggcagggatcaacccagacctaaaatagcctcctcaatgttgggcaggcagtgggccaccttgaaacacggcgcagcactaactgcacgtctgaagctaaagatttttagtactagtgctctgttttgttctgttatttagaaaaccctctctccataaaaaaataaaaataaaaataaaaaccttgtgcacctaaagtcatgcaaaaagtcgagctaataggaagttatggttttccaccgctcctcaaagcaaataccatagaccttctgcccatctggttttggttattccaaatgatctaatcatctaaatcacaccataagaaactaaatcaagatttgaatcttcattatttgcatctttccgatgcatccatccatatatggttgtgaccctgcactgattagcttaatttgtataaaaatcagctccctaggtcatgtatggatcagagatatcagtaccactaccaactcttcttgggaaaccttcctcaaacataaaagcaacttaagcaatacttctcagaattatattgttataacttataaggaaaaggttttctctcttatatgtataggaagccactagccaggatgcatggtgtatatggtgatgcttacaggcacttgctgtcacctaatcagtaatttgagatgcttatattgtatgcagacactttatcaggaaggagcaaaaacaatttggat

SEQ ID NO: 106178 - DNA, 1022 bp, Aquilegia coerulea
  Intron number 1 from transcript AcoGoldSmith_v1.022138m (l ocus AcoGoldSmith_v1.022138m.g) derived from phytozome v7. 0 (chr-ID scaffold_4; pos 3560700 to 3561721 reverse stran d)
gtaataatctccctttcttcaatcttctttgaatctcgcttcttctagatctgtttaagtttgctctgtgttttgctttactgatttcgttgcttcgaaaagttttacttaatagatctaattgttattcgttcttttcaaagaaactatcaattgtttgttttatagactttaaaatgaatattgtgtattgtttgtttcccaagtttgtgttttttgttttgtttttggtgtttgattgttatcttgaaattcatttagtgaattggaatcattaatagtacaattggaatgctcaactgtgaattgaaaaaaaaaaaattaaaaaaattgtgtagaatttttttttcaaaatacccttttcttttctatatgataatatggttttgttaaagcttaaaactctttgaccaagaattctgatgttatttacatttaagtacactgcaatgttgtgtttttgaaatacccaagtcaacttaaacctagtgtaacaaaatgaaacaacctctattaaaatctgatacactagtattgactagaatttcacatttgcaatgtttccaaatcgagactgttttgtattcacctagaaggagcagttattactccttataatcgttcttagtttaatgtgtattacttaacaagtttttcattaattgttaaatgttgtatgctttctgttggaaaatgatgttcttgattttatgatagttttaaataggcacaacaacaatgtataaggattttaaaaagacctgagtgatgctacctcatgaactgtcagtctgtcattgtttttatgtattttgcaaaatagagttataagtatgtatttacctgttatatgctcgaaacacgaagacactatcaccatttttgtcttgtgtcaattttaagtatgcaccatgtcatcttattctatgtgaaatataatctgaattgttattaattccttttggatttgtttgatgtgttccacagtcgaagaagaagaccagagagccaaagaccgagaa

SEQ ID NO: 106179 - DNA, 917 bp, Aquilegia coerulea
  Intron number 1 from transcript AcoGoldSmith_v1.008604m (l ocus AcoGoldSmith_v1.008604m.g) derived from phytozome v7. 0 (chr-ID scaffold_76; pos 428548 to 429464)
tttctttcaaactcgttttctttctcgctcttgctgtaagctttttcttcatctgaattcaaatcatatctagctagtttttctataattaaagtgtagcatgtagagttttgctcattaaattgaagatttacagtttaaatttgaatgagaaatgataagttttagtggatttggtcttctttttctactaaatttagattgaattataactaaaagaagtgagtttagttctgtttgacttggatctatggtgttgttaaagttttcattaattcgtgtaaaaaagttcgattaagaaattgtgattagaatacaatgcagaagattagtggttatttcatgatgatatactgatggaaaaaacttcatttataaatgaatttccatacagcaattttgtttttaatatatgacaatgcgagttagagctttcaagaagagtttaaatgaatgggacaaagacatatattttcacatattcatatctatttctgtagtatttggcattctgtgagatcaatatataattatgtgcaaaactgactgttctgcgaacccttttagcaaaggtagagaattaacagtaatgtcattttgataagaatgaacgaggagattttgatgctatttgccttgaaatgaatatattcagtaatttgttttaacaagcaaaccatcgttatggtcttattgctttctttctaaagataaccatctgtgacattttcattgttataggcagtctcttttttttttttgtgtgtgttcaagaaggaaaaacacgagcgtctttgatgtttacattcattacatatttacatgaaatgtttttagcatcctaatatcttgaaatcgttgttctcttttagtccttgatttttcttcttttgataattgttcttctggtgcaggat

SEQ ID NO: 106180 - DNA, 709 bp, Aquilegia coerulea
  Intron number 1 from transcript AcoGoldSmith_v1.014325m (l ocus AcoGoldSmith_v1.014325m.g) derived from phytozome v7. 0 (chr-ID scaffold_38; pos 553259 to 553967 reverse strand )
acatagtacaaaatatcgcgatatatcacgatatatcgcgatatttatcggttttcaaagaaaacgatacgatatattcccgaaattttcgccttaaagtatctgtaaaatatcggccgatatttttcgatatattccgatatattcgatatattccgatatttactgatattttccgaaattttctggaaatattattttttttcaaattttttttttttggaaataatttgtttattctatttttagtagatatgatgttttttaggtaaatactatgaaaatatacttccaaatttgattttatatatattttgtataacaaattgatatattagtcgatacattccatgtaaaatatccaccgatagattccaatatatcccgatatatctattttttggagatcgatacattagtcgataacgatattttgtactatggtatatgatggttctagttgttctcataaggcatcttaaaaatgcagtgattgcggttggatccatatctatctggtgagaatgagcttcgtcattcttctagaaaatttactctcaatttgaatattatacgctctctaatgaaaacttcagtcaccgaaaacttgctaccttaaagttcattttctctcgaatgaacaaacattctgtattttaccaaaaatatttaagtgctcacagttctgtgttttattgtttctgtttca

SEQ ID NO: 106181 - DNA, 550 bp, Aquilegia coerulea
  Intron number 1 from transcript AcoGoldSmith_v1.017195m (l ocus AcoGoldSmith_v1.017195m.g) derived from phytozome v7. 0 (chr-ID scaffold_82; pos 168444 to 168993 reverse strand )
agaaaaagcttttcaggtgcgtgaacatattattcgaaatgcacagttattttatgtcattgactcacactcactgatactattttagttttccttaatccttgtagttaaggcaaatagatgaccttcaatttttcaaagaaaatcttgtgattttatttttaacctgacctcaggatgatggtataaccagggtcgagcgattatagtaatcaattgaattgtttcagaccatgagtgggatggagggaaacatttgtccctttgagcacaaaagtctttagttttcattatctgtttgccacatagaaactgtcaaactggtagcttacctactatcctgaattgtactgcatacgtggagcgaaaattacgaacacaaatgaaaactgtatataattgatgtttagtttggacttccttctaatgtcttcatttgatattaattcaaacctgtaagacttgaagtgaactcttacattcaaacacgtaaaaccgcagttttaatgttgtgtattatttgcagaaaggcaggcgagttttagaatcg

SEQ ID NO: 106182 - DNA, 711 bp, Aquilegia coerulea
  Intron number 2 from transcript AcoGoldSmith_v1.005754m (l ocus AcoGoldSmith_v1.005754m.g) derived from phytozome v7. 0 (chr-ID scaffold_42; pos 1575480 to 1576190)
ttatcaagattcttaaacctgttaagaagaagaaggtaaacaaaaaaaaaaatctcatttttttatagctacactacttaacctatttatttttattttgcggggggtggaaattagtagggtttgttcgactattaatttgaatcgtgttaaacagaaatgtaaaaattttaggaaaaaaatatggttcattacagatacatttaccatttgtataaaatgtaatagctctgtgtttagacacttgacacttgttgcttcttgatccccaactttctttttgactcccattggtctaacattctagtttcttattggccaggaactccatctcaatctttagtaatttatagcatatttatatcgatcaagcaatttgttatcataatcaaacaacggagtacgtttaggcctgtagccattagctaacaactaaagactcatcccttcttccaattggtccctacttgaaagcacattgtttttatctatagttgtgtgattgtatcatacaagtttgttctacatagtggtgagactggtttatctacgtgtattttgttattgtagaatgtccttttgtgatttctgtttctatttgttgttgtattatgtcctttatgtcacattgggattatgactgctaattttgtttcatgcttcaatgttcgtgcagattaagagagaaataaaaatactgcagaacctttg

SEQ ID NO: 106183 - DNA, 852 bp, Aquilegia coerulea
  Intron number 3 from transcript AcoGoldSmith_v1.019619m (l ocus AcoGoldSmith_v1.019619m.g) derived from phytozome v7. 0 (chr-ID scaffold_23; pos 3850757 to 3851608 reverse stra nd)
atctggcaccaatcccttctcacctttgtgcagaggtatatttattttattctatttttggtttgcctgtttgggagatttaatcaattatcctttatatagatatcaaatttaaaatgttggtcctttatgtatgagtttgaatacttctataccagtatactcgggaagaagagagtttcatattttaaatcgagatttgtttctgaccaaactagtaatgtgcattgaatgcgttccataaaggtcctcttacctccaacagtgaaaggccagatttaaattctaagaaaaacagccctgcaagtcttcactgtcatggaggtgtaattacaggagatgttctatagtcacctcttactgtctttgtgctccagtgtgcttgagaagaactgaccctggtagaaagcgttaatgtgaagaacaaatgactaaacactgaaactcacatgacttttgattttagattattctgttctttgtttcttgtaatttctggtcctgcgtgtgttttggtcttaataaaatgctaaatcatcacaaataaaatggaaagccctcacatggttttgtgctaaactgctaattgtttttatcttaataaaagatgatgttacattatgaatgagtttactaaagtgtgactcctgtagctattcatgacatgtgaagctgtctcacttatgttcaaagcggttagaaaatcaagagaacttccatatgtttcttgaatttttatttggttcttgcacttttgtttacatcatgccatgtctactataaaaaacttgttgtttagtgaacttccaatttattcttctcatcacttgtttttattatacaggtacaaaa

SEQ ID NO: 106184 - DNA, 921 bp, Aquilegia coerulea
  Intron number 2 from transcript AcoGoldSmith_v1.011376m (l ocus AcoGoldSmith_v1.011376m.g) derived from phytozome v7. 0 (chr-ID scaffold_14; pos 5150715 to 5151635 reverse stra nd)
gaagacctcttggtgacattactgctgttgttgatgtaagtatttaatcatgcttttttatttaattaagaaatgagggttttattaatattaattaaattttcaatttattaaatactggtcatcagatttgcttaatttgttgaacaattttgagggttttattggttaatgcttctgtgaaattaggaatgtttattgtcaccacactctttaatgaggtctataagttttgtgcttcagtcagtttcatggttaatgagattttcagtgagatgttgatttcgacagatatcaatctgattagtatgatttgtaatattagtttgagaataaatttaatttcatttaagaattgctttgattagtaatctaccacaaatttaaatgggattatgggaagaagactacttgcgaaatctcaaaattgagacattgagggttgccttagcataggatactatgatccgtacatagaatggggatggtttgcttgatggtgtatggctagttttggaattaggggttgttagcattggccttatgtgaagaaatttggtttggtgatagggatttttattaatccaattttaataaattctatccaaatacatgtcaccacaatttaattggcattataacatgtttaagttttagacattgctactatatatgatgtggcacttacaatgtgactcgagtgtttgatatttgattatcatatatccacaaacatgcgtaatagtcgtaactcagaatacctttcccctcctaaatatgtgctgaatatgtgacttataaagtttcagtgtctgaatatctgtaccatgcaaggtatcttcatttgtcttaaatttctaatcagtagttttgttcatgtacttaggcaattgaaaggagaagaagccgcctgagagaggc

SEQ ID NO: 106185 - DNA, 624 bp, Aquilegia coerulea
  Intron number 3 from transcript AcoGoldSmith_v1.022827m (l ocus AcoGoldSmith_v1.022827m.g) derived from phytozome v7. 0 (chr-ID scaffold_20; pos 2739736 to 2740359 reverse stra nd)
atacttcactcatacaagaggttctaagtgaaaaggtatgtatatattgtttatcaaaacaaaacaatcttcatgaagtctttatgactcgacgcaatattataaagaaaaagcgtctgatttataatgagtgcatggttaactatcatagtgacgaatcgagatcagattcatgtggtactgtggtagggttttcatgcttagaaatttgctggaaaggcgagtgagttatctccactctggtatctgtctgatattcttgattctttaatgtcaatactagtaaaagccttcatcaggatgccttaaacaatagtggacatttgcaaacataataaaaatgcaaaaagacagtactttgattctctgctaaaatgtttaaaagaataacattttttatgttttttcagccttctgggtatgtcagtaaaatcatatttctgtttggtatcatgtaaaaactgcactgctaaagttcccctgtttaagtcagtaactcatgttatcatcgccatcgggtctttcgaccttgcggccttcattttttaagcaattcgattgtcgagcagtatgttctgaaggatagcttgaaccttttctgttttgcaggtgcccttattttta

SEQ ID NO: 106186 - DNA, 948 bp, Aquilegia coerulea
  Intron number 2 from transcript AcoGoldSmith_v1.007532m (l ocus AcoGoldSmith_v1.007532m.g) derived from phytozome v7. 0 (chr-ID scaffold_41; pos 915219 to 916166 reverse strand )
ttctatcagcaggattaccacgtgagttggtctgtttgcttgttcttatactttcatatatgtgcttgatgtggctctttgtattacttgtttgctgctcatctacacttgaattgttaatgggacacactgcaaggaaattgtttgcaggaaaatataaggttccatagttcattgtagtttctggtctccagaatgatcaagtgtcaaactcacaaaccttctgtacatgtgataaacaaatcttaataaaaggttccatgcattcgtgggtaggatattgtgaatcacattaaactatcttaggaagtagagtgtccttattacgtcttaagtatgattatttgtagaaactttgttactatctaatagaaatatcgatctggatttaataaactgtaattcttcaaaagatgttataaatgaaaattgtgttacactcaaacgtacaagattgtttctcaaccaggttggtgtagattagtagttgttgtaggttaaacacaaggataatattcctatttttcatatcttaaaattgtaactattttacggagatgaaagcaacgtcttagcggttggttggtcatgtaccttagaagaccttgtaggattcagtttgaatttgaacaataataatgggtgatttaaggataacagaatactggatgaagcagtggtcttgtctataatgaaactcgttcacttcattcttgattacccgaaatctgttgcctatattggttaccgtaatgattcgacataacttcagctctaagagtatgtcttttctttagttattaaagactataagtttttgtgatatctgtcgtctttcgatgatggtaaagtcacatttattcctgctgcacttagaaatttgtactattttgttgaacatggttcttatatctagtcttgatactattttctgatatttgcagttgg

SEQ ID NO: 106187 - DNA, 986 bp, Aquilegia coerulea
  Intron number 2 from transcript AcoGoldSmith_v1.007481m (l ocus AcoGoldSmith_v1.007481m.g) derived from phytozome v7. 0 (chr-ID scaffold_5; pos 7346032 to 7347017 reverse stran d)
ctgattacacggctggtgttgtcgttgctttctatgtaagtttctttttcaaaaaaaatttctattatcaattttgatgataattctgacacgattctcgagaatatcgattggttttttgttgttgtttcaatggaagctgagccggtgctctgtttctgtttttttttttcttacttttcattttgtttttatcaataaatctagatgaatttttgtataaaaagactaaactacccttctggagatgaggagattgttcttgtcttcttgaagaaatacttccgttctgattttttgaccgttaggtttgtctcgagaattgtgtcttaaacagtaattttagccaatatattctctttcaaataacaaatctttagcccaaattagaatttatttgaatgttattttccccattttagaagtagtttatttttaattttgattttgggatttaatagaagtttgggacttgaggaaaattcatatgcccaatttccaatttatgctaataaaaatgttttttttttttaattgtgaaatgattactagtttgagaattgggaatgattgttatgttaacctaactgttctcgcatacttacctttttgtaattttaattgttagattaaattagaatttatatagttgaatattttcggagaaggaaaaactgttgttgggggtgggtccaagcaaatcccctttaagagaatgttgtacagaaatttctaaggtcccatgttgtccacaacctgttttgctttgttgaacaagtggaagaaataatttgttttctaaaataaataaacgccaattgaagataatcatgtaggagtagcccatacagaattttggttggattatgtcattatctggtgggtatcatgtctgatgtcacttttttgccataaacttattacaatcttagttgtcgtcgttttcattattgttattgttattgatgtttcgttcgattatacag

SEQ ID NO: 106188 - DNA, 694 bp, Aquilegia coerulea
  Intron number 1 from transcript AcoGoldSmith_v1.003918m (l ocus AcoGoldSmith_v1.003918m.g) derived from phytozome v7. 0 (chr-ID scaffold_14; pos 813078 to 813771)
aattgattttggattatccgtgttttataagccaggtttgatttttcttattggattttgcattaattagatttcattcttacaattttagtatgtttgatctgtaatcttccttatgttaatgctgtttaagaggtttctttttttgtaatatgattctacatgtggtaataaccgcgaaagattggtccttgatttcatgttcagatacaagaaataaattttctattaaagagctcagtttaataataatggtgcttcatttcgaatgttgatatagcaatatagctttgttgttgattaagtattatttactagataattggccaggcaatcagctcttaagtactgattattcccatttggcaagtttccacatctccaaaaccggtattcaacacttaattactcagttcttcaaataataccacaataaatgtatttgttgccgccgctgttttcttagtttaatctattcatatggaagcactagtcattaaataaattggcaatttgctttaaccatctatactgtttagttatgctacttgatagtatatatatatgacataaaagactaaacttaagatggtagaagtttgtgatttgagcaaagcttagtcttattgctttttttttctgtgggaaattttgagagctgactcatttctcttttcagaggacacattttctg

SEQ ID NO: 106189 - DNA, 587 bp, Aquilegia coerulea
  Intron number 1 from transcript AcoGoldSmith_v1.012009m (l ocus AcoGoldSmith_v1.012009m.g) derived from phytozome v7. 0 (chr-ID scaffold_20; pos 2027245 to 2027831)
gaagtgtttttaatttgacacaaaaggtagctttcttcattttgttacaaaaaatttatgttatatttttacttcttttgaatatttgctagtattagttcattgttttagacttttaggtttttgagtgatttagtagtattgtagatcttgtaggtttttttttactttttgcatctgtagatcttgtagttttttttttttttttttttaatttgaaaggattaagcagataaccataaacaaatgattcattgaagtatagatcttgtaggttttttttttaatttgaaagggttgctttctatatgatagggctgtgttgttagactgttatgtattgatctatgtgatgcaaacactggatttggtgttggtatataaaatatttagcttcttaactataaaaaattaaaaattagctgatgcttgtacttttccttcacttcctgttgattatttttttctaaattacttttttctcatggagtttcgtagtactatcaaagtatcaagcatctttctgaaaccattatctttgttattttgaagtgtgtttactgtaggaagaaaggatttctgaaatt

SEQ ID NO: 106190 - DNA, 434 bp, Aquilegia coerulea
  Intron number 1 from transcript AcoGoldSmith_v1.008394m (l ocus AcoGoldSmith_v1.008394m.g) derived from phytozome v7. 0 (chr-ID scaffold_20; pos 951563 to 951996 reverse strand )
cttctcgatttctcgtattaggtaagaacatttcatcaaaaactgctacattttaggttatatgaagaagaattgatttagattgaagattgtttctgtttgatttgttttatttaatgttgagatcttgtttttcttgttatttgattgagagagagagagagagagaatttgaaattttcttttggatcttttatgattttgagaagcgtagtagattaggttagattcttgttggttatttcattattatagatcttaaattcattgacgaaacttcgcttagtgcaagaatgtttagtttatatgtaatttgattatttgagtaagcaactgaatgtcgagattgtatgttgttgggtgaagggatttgaattctttcattttttgtttgaataggtttaccaagatatttgatttggaggaggcaagta

SEQ ID NO: 106191 - DNA, 823 bp, Aquilegia coerulea
  Intron number 1 from transcript AcoGoldSmith_v1.024561m (l ocus AcoGoldSmith_v1.024561m.g) derived from phytozome v7. 0 (chr-ID scaffold_23; pos 3858942 to 3859764)
gtatcttttcaacctttcgattctcctgttccttggtaattttcttttcttttatttgaaatttatattttgcattatgtatttggaaatagtggatttttttttttttttttatcaattgatgatttgatcaaatttgaatttgttgaagaattagggcactgtatagagaaattaaaacaaaaagactttatttgggagttgggattgtatgattttagcctatttcctgctttttaccaacaaaaacttttaaaattgtatcttttactaatagatcaaaatctataaataatttggattagaatgctagatgtattttagatgatcaagaatttgtatattataagcagatttaaagaaactgatgtatgaagttgagatggaagtgaaatctactaaaccttcttcatgtcagaaccaaattctttgcaattttgatttggtggtgatgaaattttttaccagtctaaaatgtatttagggttttctgaagaaactgctgtatgtagttgagatggaagtgaaaaacgaacacatctatccaagtttatgacttccagttttgattgctacaaagtattttagttacttccttggtaactaagacataatattcaccctgaccaaattcagtccatgtgttgcaccccttttacgagagaaatgatcaccaaactcttgagtcttgtcttcatgcatggaggggcccatagttacttcttatgtcttgagcttcaaaattttgggagtaacttttttcttttctgtttgccatatatacacaggttcatatataccactcttgctcttggtgtttctt

SEQ ID NO: 106192 - DNA, 280 bp, Aquilegia coerulea
  Intron number 2 from transcript AcoGoldSmith_v1.024561m (l ocus AcoGoldSmith_v1.024561m.g) derived from phytozome v7. 0 (chr-ID scaffold_23; pos 3859792 to 3860071)
ttgcggcagaaactgcaaatgttcattgtctctcttgtgtatccttttgacggacatatcaatacattaatttctctatatttctgtattctgttataaggtaaatgtgcagcgacttgcattttgattgtagatgttgcacctttattgtacagttatttacctttttctgtatcgtacaaatcattactgataagaagcttgattttttactgtcacttataactgtgttcctaagtaggatatactttgtttttcttgacttaaaatgccatagtac

SEQ ID NO: 106193 - DNA, 774 bp, Aquilegia coerulea
  Intron number 2 from transcript AcoGoldSmith_v1.014966m (l ocus AcoGoldSmith_v1.014966m.g) derived from phytozome v7. 0 (chr-ID scaffold_4; pos 2695515 to 2696288 reverse stran d)
gcgagtaagtaatttcatttacttaaaacgaaaagtattgtagtcggttagtggtaatgtcaatcaggatgatttggatttataaaattatggcagtatataatatatatagatgctagttcactggaattatttgtgacatatgtagattgtcaatgtcaagaagtcttaataaggatgaggcatcagatgactcatctcttaccagatatccattgggctcaagttgagctaagaatatctttgaaacagttgaacattttttttgataatgaaaacagatgaactaatgataatctaggtaacggctaaaatgatgaattgctgattgaatgccagacttagttagagtgtggtcatgctccattagatctgatcaacagatgaattaagactaccaatatgatcaaacttatagacttgggacatatgagaagtttcatttgaaggaataactaaaataagaattttatgaccattaattagataacacaaacttggccatgataactctttttgctgaatattgtatctgctcttttgcctatggagagacgatccctagggtcacccttaattttaatattggaaaaaacaagcccgtattatggcagaaaagcaagcttgttatccttatccaatctctcaatttattctttatggccttttggtggtttgaatatgtattttcagaatattgtgatgtttattgttgtattttatacattggcatttataggctatcttcgcgagatttgatagagaccgtagtgg

SEQ ID NO: 106194 - DNA, 744 bp, Aquilegia coerulea
  Intron number 1 from transcript AcoGoldSmith_v1.019128m (l ocus AcoGoldSmith_v1.019128m.g) derived from phytozome v7. 0 (chr-ID scaffold_85; pos 211412 to 212155 reverse strand )
gacaaccgtggacgtttcccttttcgggttttaccacgttaaaaatttctgtgtgttatttactttctgcatattgtttgattgtttgtttgaatattcaattgttatattagcactatttgtagtttctcaatattctgattacaaaaccatcaaactgctaggccagggttcctattttaatatggataatttgatttctaatgtaccaattttattgaaaaaaattattgcataatttcattttattctcattgttcacttattagtatgtcgtaaacacagggatacatggctgaaatcgttgctgcaattggatctctcctgacttgcttttgtacacaaaatagtgtaaatacaccaatttttgttcaatgcaagcacatgataaatccaaagaaagatattcagaaattgataaagataaagacagacttgattgccttgatggatgatgtaaatgacaagttacgcactgctaagatcaaccaaggggtggttcctacacatgttgtgcgaaaatggctaaacgatgtccaatgtgctttggatgagacacatcacattgaagataaagtcaaaacaacaaagatgtactcaaattctttattgcctaaatgtcatgcaaatttaattttggggcaacgtatctctgagttgatcaaagagggtactatacttactcttacaggtagtgaattactaaaagacactaacatcacacgtggaaacgattggactgga

SEQ ID NO: 106195 - DNA, 768 bp, Aquilegia coerulea
  Intron number 1 from transcript AcoGoldSmith_v1.005953m (l ocus AcoGoldSmith_v1.005953m.g) derived from phytozome v7. 0 (chr-ID scaffold_17; pos 1914268 to 1915035 reverse stra nd)
ggggtatgcaaaaccctaatcttaccttcttcttctgtaaattttttttttttaattttttaattttgaatttattttgtagaaattaaagtttttttattgattagatctgtgattaaggttttaatgatttctgaaagttataggatctataaaacagtgtagttgaatctaggttaaacacgttcagttctgtaattgattctggatctgaaactagtactagcatatcgtttttgttaaatttattaattttaatttatatttgtaacattagaagtgagatttaacatatttttgtaatagataactgtatcatttatgagttcagtttgaatttgcttttgaaatattgctctagacattttgtattaatattgaaaaggatgctattttcgtatatacatatacagactggtaaaattctctgtgggaaataatcgatgttaaaatcaattagctagattttgaaagtttgtcatttaattcacatactatcagtgtgttttgtacgatagggcttcggaatctgttttttttttttttgtagatttcatcagcttggtcaataactcaatactaatgttccgctccctttattgtactcaatccattcactaagaattttggagagatcaaaagggaaaaaagaaaagaaaatatacttttcctttatttttctgttgaacttatttatacaactctgtagtagtaatagctaaactactagtttctaaattttctctcttttcaattacagtgagcagg

SEQ ID NO: 106196 - DNA, 979 bp, Aquilegia coerulea
  Intron number 1 from transcript AcoGoldSmith_v1.012218m (l ocus AcoGoldSmith_v1.012218m.g) derived from phytozome v7. 0 (chr-ID scaffold_17; pos 1348639 to 1349617)
tgaagattggttcttctatcaatctgattaacaaggttagattctctctacagatccaaaaaatttcatctagggttattaatttgggttgaatctttgaatgtaatgagttttgattgagttcaatttgctttattttcatattctatttcttgaattgatgttttcagaaaataaccaactatatatcatttttatatatatataattggttttgcaataacaatctttggttcattcatgagtatttcgaattagattgttttggcctgcttcaaagatactatttactggtgcttatatcatacctatggcagactgacagaagcataaacctcgtaaatcagtatatgttttagaagcaaatggctgactaggaaattttgtcagccttgctttccagttttgcaagacccattaaaaggaagaacaatagaaacattagcagagacacctttgaaataataaataccactcacacattgatagtaatgattgctctgcggagtgtaatatttttgaaatcctggtagatgttgttggttatgaaatcacttttttctttaagatacctcatgtggttcatagcctgttccagatatgtacacatctggtactgtcaaaaaagtatacataaatcccagcttcttctcagttgggacttgggagccaatagctgttatgaaatttagttctgtgaaagccctgtgattaatgtgttgttttctttgttaacgagtcatgtggacatgaattttagttctgacatctttcttgtgctctacataaatattttcatctttgcaaactatagttcatgtcatattctcacattgaattcttgatatctttagtctttacatgtaaattggacaatctgcacatattgtctctttttttcttttcgggtgcagtttacttaattaggtgtatggctcatgcaggattttcagaggtgaaggcaaacaaagcaagatta

SEQ ID NO: 106197 - DNA, 629 bp, Aquilegia coerulea
  Intron number 1 from transcript AcoGoldSmith_v1.006690m (l ocus AcoGoldSmith_v1.006690m.g) derived from phytozome v7. 0 (chr-ID scaffold_5; pos 5017219 to 5017847)
cttctgaattctctcgagcttttttttcttaaaaggtatgaatatgaagattcttctttctttctttttaatgttcctttagatcatatacgtggtttgtttgtttttctgtttttgatttagatctttgtattcattttattgatttctatgaaaaaaattcaattgatttttagatctgtgtaattctatagatttgcatcgttttcattttagatctgcgtagttaggttcttgattgttgataataagttctattgattatgatcgatttcgattttgatcgtttttgttttagatcagcgtagttaagtttgtttgtttgtttgataaattctatcgattatcatcgatttcaaagtctccatcattttaaaagatctctgtcttgtttttatagaatttggttttagaggcaatctacctttatgaattatgatgatttgagttaaaagttcttttatgtttttgttgatgaatctatcttctccattttagctatataatttgccaaattttttacaagtttttgaaatctagtttctgttgaaatttaaaacctcttttgtttaattgatatttacttactttttcccatatctaatcatgtttataattatattcaacag

SEQ ID NO: 106198 - DNA, 995 bp, Aquilegia coerulea
  Intron number 1 from transcript AcoGoldSmith_v1.015272m (l ocus AcoGoldSmith_v1.015272m.g) derived from phytozome v7. 0 (chr-ID scaffold_45; pos 1139818 to 1140812)
agctcctagggatacgaggagctgcgcaagaaacggtacacttatttattatactcattcattagctgcctcatttatacatttcaaatgcttattatgtttttaattcttattcaagattattacttctaacataacatcagcacacacttttgcgattaatttagcaattttagtagatagaaaagaaatcaaaatgatacattactatgagagaaaaatggaagagttgtaaaggattgtcagaccttttgctcacggcatttatcaaacaaatttaattctagaaatatattaacaatttatttatccaatgacaatgtctaaagaacatttaattggtaaattagattagtgtaacttgcactaagggtagagtcgagaatattctgtcctgtgggatcacataagtgatcgaagaatgttctagaggctgcagcttatttggtatacacagtatagtcttagtttttaatggttcttacgttctagtatgtcagtcttcatcattatcttttgcaaatgtttcagttggcaacatgaatgctacttcgccaaccaaatttgtgaatcgtgaagtgtcttttaatatgtcaccatcttatttacctctctcacttcctgggatgataaaaacgtaatgttagttctaattcaagattctggatggattgcttcatttcgtcgagtttatttgggagttgagatcaatctgccataatcaaacgttctgtactttgcaactggatatttaaataatcattacatgatactgatatatttggtagtctctttgaaatatccagtgtattaaattccaaaccatctgtttgattaagtggttagcaaacatgcatatcttatgcaaataataattgcttgcagtttatatggtgagtactgagtagtttcttgctagaaaatcagctgattgttgcacaagcatatgtatatgtctaaaattctgattgtaaaatgtatggcgcacaggaaaa

SEQ ID NO: 106199 - DNA, 823 bp, Aquilegia coerulea
  Intron number 1 from transcript AcoGoldSmith_v1.019003m (l ocus AcoGoldSmith_v1.019003m.g) derived from phytozome v7. 0 (chr-ID scaffold_20; pos 1155253 to 1156075 reverse stra nd)
accctccatacacacgtatgtagctttgtcaaccatttggctcgtctttaagggtttaaactagtaatttgtctcacatagggataactatagcgtccaacattgtttgacgccatggtgtgcattgatgcttatatcgaacacataaaatgttcacttatagtatcaagttaattaatataagattgtctttctttctttctttctttctttctttttttcttattatgagtgagcttcaattcaaggtctgttaggtgacacaatttttaggtgcgtagaatgtcaaaataccttccttttttctgtaaatatttttctcaattcatatagttattttcaagtgaagtggggtggggaagaatatagttattttcaagtgaagtggggtggggaagaaattagttacaaagataaaccctaattagtaactaccaaacaatgaaataattgatatgctgtgtctctgtggactgtgaccaatacatgtatataatttgatttactattctccacactggggagaccaattcatctatgggagggagtaaaaattgcaagagatccgtttgtgttagacacacattgttcgccaattagtaaatacatgggaattctggttggtctgggatattgttagcctatcaatgaaggagccaactttaataccactccctcaaatttgtgatcttacatgtgtgtttacggaaagtttttagcatgagatttaaggaaccacacccagtagtattaccaaagagtaattaatcaaggtatagagttactgaccttttttttttccctttattaatgcagccaccaa

SEQ ID NO: 106200 - DNA, 629 bp, Aquilegia coerulea
  Intron number 1 from transcript AcoGoldSmith_v1.017838m (l ocus AcoGoldSmith_v1.017838m.g) derived from phytozome v7. 0 (chr-ID scaffold_14; pos 1255093 to 1255721)
gaaaccaccgtaaagattgcattagtgtttgtatgtgattgcaatgagattgttagggttttggtttatgaaattcgatcgtgatcgtgatcgtgatcctgatttttttttttttttttttattgaaggatgatcatacaattaatattccagttccaaaaagatatcaacttgaggagccagtatgtatcctccttttctcatatctaatcttctttttctataaattttttaacttggcctcagttttgaaatatatatatacaatacaaacatgcctgaaatttgaggttgttgcaaacttatgattgtttgattgatttgtacgtagttagaagtgctaatgatttaaacatcttatgattgttttgaaggatgatacaagtgatattccaagaccagaagaatatttctctaagccggctaactcttttggggtaactatctaatcttatcgtccaaatttttagtaaatattcatatatatatatatatccaggaggaggaggaggagagacttgctttctagttgagtttgttgcacattatattactagtcatcaacatttctatcatagaatatcaatgatttgacaaaaatgctaattcttttacttactttcaggttc

SEQ ID NO: 106201 - DNA, 611 bp, Aquilegia coerulea
  Intron number 2 from transcript AcoGoldSmith_v1.009727m (l ocus AcoGoldSmith_v1.009727m.g) derived from phytozome v7. 0 (chr-ID scaffold_20; pos 784306 to 784916 reverse strand )
gttgttcaaacacctgttgtggaggaagtcatagagtatgtaccttcacttatctgtgtacatgataagtgttagacttaagaaaattatacttctggttctgtcacttggataacaagcaattacatataggatattagttgtcataattttgtactggttattagttcattgatataaaaagcttagtggttatcttcccacgtaaggaagacaagtgatgcctatgttacaggaaaaaaaaaaaaagacaagtgatgcctatgttacagaacatgccgccatatagcaatcataagtcttttaagtctatatacctgcaaaagcttaattgtttggactgtctagtgtttacggcttgccaactgtgcctcattttagttagcaaagtaatagtagtatggatagaagaaaattaatataaatcaaacggagtatgtcacaaagtacgttttgatatgatgctaaatatataactttatattttagtttctaatggaaaccttgtggagggttcggtggatcccttccagttttatgttaatgctgaaatctatttggtaagttcttgatgagtttttttccctgtgtgtcaggttttcgcttcctac

SEQ ID NO: 106202 - DNA, 807 bp, Aquilegia coerulea
  Intron number 1 from transcript AcoGoldSmith_v1.018451m (l ocus AcoGoldSmith_v1.018451m.g) derived from phytozome v7. 0 (chr-ID scaffold_4; pos 8682090 to 8682896)
gtcaggttgtcgtcatcaaacgtgcaaagaaggtaatcacttgtgctcatccttgctatatacagtatagacgtatcagtagtcctattctgatggtgtcaaaattactatggtcatttttcttaccttcgtgaagctgcgtgtgttttaagttaggcgtgttttacgacttcctctgggatgttgtagtttccccaattgtctttgacctatatttgaagaagtgcaagtaggcttgggatataagccccatatttcaagaagtgcaagtattgtcatctacaaatagtccgatgtagcgtatttgtctcaaaatgagctagcttttggggtcagggtcgctcagttgtgtatctccagagccatttcttttcttcaattagaaattacggattatctgcaaaagtaaatacttcaggtagcatagtgcaagttatatgaaaatgctctggcagagattaacctaatgggataacctcttgattatatatgtttgtatctttttgtgcaaagtgtagaggtaactggtttatttgaataagacctacgataggaacgggattccattatttgcagactgttaatatctgggattcttctttaatccaacagtacataagttgaaaataatcaacaagttcaaaggaactaagcaaagcacaaataaccaatcataaatttgtcttgagtacaatggactttatataattatatgaggatgctttcaaaaactctctctcacacatgtcgaatgcgtgaagccatgatgacacgatgactgtgtgcaggaacatatcagcactctac

SEQ ID NO: 106203 - DNA, 145 bp, Aquilegia coerulea
  Intron number 1 from transcript AcoGoldSmith_v1.007863m (l ocus AcoGoldSmith_v1.006579m.g) derived from phytozome v7. 0 (chr-ID scaffold_5; pos 2865284 to 2865428 reverse stran d)
ctacttacagttaagtccatttcttctttcttgatcattagggtttttttaatttaattttatgttatttaatgttttccccaaattttgattatgtttttttttaatagcttacaccactgatcaagtggaagaattgagtaag

SEQ ID NO: 106204 - DNA, 722 bp, Aquilegia coerulea
  Intron number 1 from transcript AcoGoldSmith_v1.017324m (l ocus AcoGoldSmith_v1.017324m.g) derived from phytozome v7. 0 (chr-ID scaffold_4; pos 6800113 to 6800834)
gtaagtaagttttcaaacttggaaatgtgattgcattgcaacccctagaatcccagatgcccaatggtactatattgaggatatgccagtcaggcagtcactgatactcattactcatatggacatggacaggaactcagggcccaacagggtcaattggccaatacaccccctttttgtgtcacgtttggccaatacatcccattagtccaagaattaggaaacccacccttttaacactttgagactcttaaaaatcacagtcaacttttattgacccagtcagacccctaaaattacaaaaataccctcatattttaaaatactaaaaactatccttaatttcatccaaaacccaaactcaaatgcttaaatttctgtaagtttgaatccccattactactttttaaccatcatcaacaccaaaaacatctaaacccaccctttatttcaacttctgattctattactcctatttacaacaacattcatcaaggtcaaaatttggtattttattcaccaacttctgtttttaaacccaaattagaagaagaccaaccaccaacatcaaaattgcaaacatctccaccaccaccattatcaagattgcaaagagaaaaaaaccaaaactaagcttattccaccacttatttcaacctttccaccaccatcaccaccacaatcaagattgcaaacatcaaaaatatcgtggagtgagacaa

SEQ ID NO: 106205 - DNA, 658 bp, Aquilegia coerulea
  Intron number 2 from transcript AcoGoldSmith_v1.017853m (l ocus AcoGoldSmith_v1.017853m.g) derived from phytozome v7. 0 (chr-ID scaffold_65; pos 779416 to 780073 reverse strand )
acgccaatccctccgaagtcagaaggatatttacggtcaaataactaaaaatgacaacaatgtttgcaacaattttcacttttaacaatatattgcaaatcataacaaccaagtgaactttcattacactcgataacaactatgttttcttccggtaccagaagtcggtgaccgatccacgtggtaattgtataagctgatatgtcaataacaaattaaaaaaaaaatacacgtaatcaaataaaatacattatatcaaggaaaataataaaacattatatattgttaagccccaaatcataccattttattatcaaattagttattatgagtaaagtatgtaaatcctttatgtaaatttgggcatttttaattataatattatattaacgaaattgattctctcaagtacaataataaatcattatacaattttatgacctaaatcatactattgattatgtgtttttcttattgataggtcaattctacaattgccacatggacaggtcatcggcttcagctaccagagcaaaacatggttgttatcgggtgtaacggaaattcacttggttgtcaagatctgcaatacattgttaaaagtgaaaatcgttgcaaacattgttgttattttcagttatttgaccggatatttacc

SEQ ID NO: 106206 - DNA, 587 bp, Aquilegia coerulea
  Intron number 1 from transcript AcoGoldSmith_v1.027221m (l ocus AcoGoldSmith_v1.027221m.g) derived from phytozome v7. 0 (chr-ID scaffold_5; pos 7619690 to 7620276)
agcgtgacaaatcatcatcgcctcgttgtaatccggtacctcttttgtcttttctttcccttttaatttccatttcttgtcttcttgattgattgttaatctttttttttacaattttgtttaattgtgaaaatgaaaataaaatctattgagagaagtttaaaaagtcattattgattgtttcactggagcactcttccattagaatgttgttaattatgtattgatataatgattgcagtccatgacgtctaaacgagaaaatatatatatgtggaattgtggaaggaaggttaactaataacaaacttgtgctcaagtttgttataatctagtaaagcaattggaatgagcttcacaattgtttttttttttttttttttaaaaagactagtcatcagtcaagttagttcattaggaaaatattccattggtgtttgatttcattgatccaggcttgttaattgttatgttgacatgtgtattagtcccataggtagcaacaagctgtatgatggagctttacaactttttccattatattcttttcagattgagattttgaaacgattgcaacgagaagcatt

SEQ ID NO: 106207 - DNA, 995 bp, Aquilegia coerulea
  Intron number 1 from transcript AcoGoldSmith_v1.002373m (l ocus AcoGoldSmith_v1.002372m.g) derived from phytozome v7. 0 (chr-ID scaffold_20; pos 2323870 to 2324864)
tcttaaaccctagttcttcaaagcgcttttctgaggtaaaactctttcatgttatcatcaattttagatctaaagttttgagttccagagtttgtagctgaaatgaaatgttttcaaggctttttttcaatggttttatcattcattttggtgtttgttatcgctttagggttaagaaacatttcaaatgagaattaattgtttgaaatgttgaatttgtattgaaagtagttaataattatcaagaaattggaatttgcttgttatttaaatgtttgacaggttcgttgtattggtagtgctgttgtaatggattattgttgtttaattgtaaattcttcacagaatttattagatatgttgatataatgtgtcagaaatgggtatgagctgagtttcaagcatcagaaatggcacaaaatgttggatatgaaaaattagtaatggatttggtatgcttaaggatgtgtttagtataaaaattcaactggaatggaatttctgaaaagaaaaacgtttaaagtttgatatgtgataatcaatttttgaggtgaaaaagaagaaaaattaaaaatgaggtggaacgcaagagtccattttaataagcgttattactacatcgtcatgagttgttgtcataagttttagtgtaccattagataaaattaagcttatgatagatacttggtttaatgtaaaatttagagattcatgtgcgttcttagtcgtatcgtaagtaagaaagttcagaatgatgaattctactaatgaactttggccctctgtgagtggttaatagaaatcttgataaagtgcaaccgattttgggcgttgacatgttttatggctaaattttgattcttagactgtttcttttcttaagtttatggatgtgtatgtttttcaaatgtatatatctagttttgcgttgttggtgttgcactggatgaaataattagctaacatatttgaaactgccaggtgcatcaaattag

SEQ ID NO: 106208 - DNA, 1023 bp, Aquilegia coerulea
  Intron number 1 from transcript AcoGoldSmith_v1.008629m (l ocus AcoGoldSmith_v1.008631m.g) derived from phytozome v7. 0 (chr-ID scaffold_20; pos 3538830 to 3539852 reverse stra nd)
gcaacctcgattacttttctggtaaaagcaacagcaattctcaatttaatatttttttctattcccgtaatgcccttgttaattattcaaattttccaattattatcactggaactaccaccatttctgttgttgttgctgtggcaggcgaacatgagcggtagctcatcttgtaattccttctctcgagttgccacaacacaggtcagttaattttggtatttcaatctaaacttcaattgttattttgatttagggttgtgttaactaaatttaattcgaatttagagttactgcattggtttccttcagtagttatgaatttatgattatgaaaattgcaaagcagaagatagtgaaaaaaaaaaaagattatggaggctatatgttgactaaattctcaatttaatatattttttttatatcacattaatgcccttgttaattattcaaaatttccgattattattgtattaaccatttttgtgaggttggtcaatacattaatgaaagatgatgatgtgtaaatgatatgaacaataataataaagtagagacatgaacaccattgtttacgtggttcggcaattgtgcctacatccacggagagggagaaagaagtttattatagtagtggtggtgatacaaaatgggagctcgataatggagagagctcaagagagagatgagacctgagaggtgaggtctcatgagagagtgttgaggtcttgtgtatgattcacaatgagaccatgagaagatgagtagtttgcctttatatttataggctacaatgtaactccattcttagcatttaatgaggtaatgatgagagaatatctttgtagtaattggctttaactttgtaacttgtgacatcaagagagagcccattagatgttgacatgtggcaccatgatggacggtagagatggtgccacatgtatgttgtatgtagtacccctacaattatcactggaactaccaccatttgtgttgttgttgttgttgttgcaggcgaac

SEQ ID NO: 106209 - DNA, 599 bp, Aquilegia coerulea
  Intron number 1 from transcript AcoGoldSmith_v1.015789m (l ocus AcoGoldSmith_v1.015789m.g) derived from phytozome v7. 0 (chr-ID scaffold_4; pos 7486763 to 7487361)
agcattgctgatttactagctgacggactattactgtaagttcttgaaaactagcagacactttgagtctttgatgtataaagtttagcctctcgcacaaaaattaattaaattggatggttaatgtattttagtatcataatagtcacgctatgcatatgcaatctggagtggactttcaacacatggatatttgcagagcattttttttttccagaacaacatctgattaactagcaaatagcatgaatttttgcagaatgctcacttatatgtttctacatgaacgcatattctttatttttgtatatctatgattttttaattttctgcgatatttattgaatatcaaacgataccttaaatcagatgtaaggaagatgctattgagaaataccaacctggagacacgaccccccccccccccctcttttcattccttccttccttgcttgtgcaagaaattacatacacatcttaggccaatatggaatatcgcaagtgaaacacagtgtgggttttgattcatgctcaaaattgcttatagtttacgtttggttttgtcttataggttcgaagtatctaaggtaatctggaaa

SEQ ID NO: 106210 - DNA, 664 bp, Aquilegia coerulea
  Intron number 2 from transcript AcoGoldSmith_v1.015789m (l ocus AcoGoldSmith_v1.015789m.g) derived from phytozome v7. 0 (chr-ID scaffold_4; pos 7487462 to 7488125)
ttgactcatttctcaaggtaagatacattatcttagtttgattgccattctctctactttgttttttttataataaaaaattggtatattttcattgattggtgattttaaatgagggcaaaatgctggtcctctaccaacaactctgaattaactatcaaatagtaatacggaaattgcactgaaattcaccgatcatttctcagtatatattgtatagaactcttataaatctatttccccgtctacatttcaaaaagaaaaagaacaagattgttcgaagatccttcaagtagtgcattttctggattggacttttgattatctaaaagtcattatgtgtggtatattgtgatctgtggcattaaaatatcttgctaaggcttgttacgaacttaagtcagcaagtttcacttcgcctcattttttacgaagaaacaagttatgcaagtcttagcttcttagggtacaatctaccttttctgtgatctcatgtaggtctaaaaaactttagtccctgacaacaagttgttactcatttggttatttttgtcttatttattgaaaatccttcattgatattactcaaagcaacttctgaacactgttttcccttcccttatttatagatttgccaagtcttgggtttgactagcatcgatct

SEQ ID NO: 106211 - DNA, 649 bp, Aquilegia coerulea
  Intron number 1 from transcript AcoGoldSmith_v1.016269m (l ocus AcoGoldSmith_v1.016269m.g) derived from phytozome v7. 0 (chr-ID scaffold_38; pos 1247338 to 1247986 reverse stra nd)
gaaaaaggctttgaaaactgtttctggagttgaaggtataatcaccaattcaccatagtaccttctattaaatttcagtcatttattgaagttgattcaagcaacacattatcaacaaattaatttggactagttgttgatatgtaattgggataacagtcacattcaataatctcccaatctagtcatctatcaacgactcagtatagttacaggtagttttcttttcataaaggcatgatcatgatgtgttagtacaattaaagaccattattcaacaaatatcctcattcaaagcaattttattgtaatgcatatttacttgaatttaggaattaatatcaatcagaatttaagaattacagtagttgatttaaatatgcgagtgcttctatgcacatttgcaaaatactgtatatcatgtgaattgggattgcatcttgggtgggtctagttcgagccacatgagctccaatgtagtctgtgatctccaaaaggttttgagttatggatgaatcttgagaaacatattgtgttttcattagaaggacaccattaataagattataagagtgcattattgagatttcaagcaatgttaatctgatcttcttcttccgtataatttgcagggattgattctattgcc

SEQ ID NO: 106212 - DNA, 722 bp, Aquilegia coerulea
  Intron number 3 from transcript AcoGoldSmith_v1.013919m (l ocus AcoGoldSmith_v1.013919m.g) derived from phytozome v7. 0 (chr-ID scaffold_114; pos 335918 to 336639)
ataccctgtgtacccaggttggtttgctgatccttattattgtatataaatgtttcttttttcaataacatattttttgcatgtgttgagtatcatttcattcctttggttcatctctcgatgcaattagatatttaagtgatgtagagaaatgaataaatagactcgttttttatcgatggattttccttatacattctgttgaatctgattagtacctgctatcttattatttgtgtgtttttttttcatttgttgctttttctagtagtagtttttatacgtaagtaggaagtacttgttgaattcattccttggaattcataccaaattaatgcattatagcatgcaaagatgctagatgaagaagagcctcagatttggcatgttatgatattagataatatcataattttaatgtattgcttgttttctatcaatgatattcatttgacaagacctgagtggtgtgagtaatttgggaagtctgcaagctattgctactgttgatgttgtctatagaagtagctatttgatttggcatctccatagtatcaattatcattgtttttcagcatgttgaattctcacttgtatattcgtctgatctctaaatagtagctatatgattctgttaaagtagctagtgttgaattttcacttctccctctcacaattttttctctctattttaatatttcatttgaaaatgcagatcatag

SEQ ID NO: 106213 - DNA, 650 bp, Aquilegia coerulea
  Intron number 2 from transcript AcoGoldSmith_v1.007513m (l ocus AcoGoldSmith_v1.007513m.g) derived from phytozome v7. 0 (chr-ID scaffold_45; pos 1906948 to 1907597 reverse stra nd)
aaggaaagtaagtaattatcattgattcatttctttttctttatatttctttttgctgttaaaattgagttgggacatagtggttgttcacttgttgttgcgaaaaattatctgttttggagttttcattgaagccaagattgttgacttacaagtatgcaacatgttagattcgcttacaagtattgcttttacaatttttttttaagatgtaattgtttgattctctctatttaaaatgagtttgcttgatatgccggctactgatatgagtagaaaactgtatttaagatatgtaaatgttaaagtattccccccctatcggcatacaacattcacttaggttttgctcttacttatctacttggtttaacgctttaagctatatcttcttaatttatggagacttactttttgaaatagtttctctatttagcctatcccctgcttctgtaaaatgagtttttattacttgataaaccggctactgtactctaggaaccatggatagtaccttgtaaccaagttgtgtgcttatattcaaagcatttcttactgctgtgtttatgttgttacttctgttttgttttagttattagatgtttattccttcagatatcgcgatcaggttgttgcggtcaaggttctga

SEQ ID NO: 106214 - DNA, 594 bp, Aquilegia coerulea
  Intron number 1 from transcript AcoGoldSmith_v1.007513m (l ocus AcoGoldSmith_v1.007513m.g) derived from phytozome v7. 0 (chr-ID scaffold_45; pos 1907613 to 1908206 reverse stra nd)
tttgaaggtaaaatgtttttttttttttttttttcacatagaaaaagtttttagtttggtggttttttgaactttgaagttgattttatgatgtttacaggaggtatttggattgaaaagaagtagaattctgtggaagaaaaggagtgagttgggaattctttgtccatgtttaatttaaaagttgttggaaattaaaagagaaaattttaggaatttcaagaacacatataggtgtggtggtgagaacgtgagttgagttgagagatgttgctatcgatgagtcagaacgcaacaaagaaggtcttttttttttatatatggttttagataagcatagatataatatatagttttaagggattgtttgagattgcaatatcaatatgagttgtggtgaagagaataaagaaagttcagaagaaggaggaggaattaagtggataagaacgaataactcttctgtttatattgagaacaattctttaacaacacagaatggttcagtttcaatatcacagtttagaattgatgacaaacttcttattgatcctaaattattgtctgttcgatcgaagattggagaaggagctc

SEQ ID NO: 106215 - DNA, 384 bp, Aquilegia coerulea
  Intron number 1 from transcript AcoGoldSmith_v1.018892m (l ocus AcoGoldSmith_v1.018892m.g) derived from phytozome v7. 0 (chr-ID scaffold_38; pos 1711666 to 1712049 reverse stra nd)
attaatcaagaacagttggaggaaaaagataggtgaggtggaaattagtccacaacccccatttttgaaaaaaatttaatgaagaacagttcaagttgggccccctgtcaaactatataacatgatggatcttaacctgaccctaggcctaaaatccacctatttaaagatcctctgaagcagaactgcagaaacagtagtctacattccaaagaacatagcagagtgaacatagcagaggagcgaagatggaaggaggaagaagaagtataacatttctttttcttccttcaaaaatcaaagaagatgatagatctattgttttgtacttttgttttcttgaaaataggatcagtgatctaccagatagtttccagaaattgt

SEQ ID NO: 106216 - DNA, 1025 bp, Aquilegia coerulea
  Intron number 1 from transcript AcoGoldSmith_v1.011911m (l ocus AcoGoldSmith_v1.011911m.g) derived from phytozome v7. 0 (chr-ID scaffold_5; pos 7627100 to 7628124)
aatcaactggtcatcgaagagctcaaagtgcagtggtaagctaattaagaatcattactacccctttttcatcactttgatttcatcttcttgattgctttttgagtcatgggtgttcaattttttgcttttctagttgattttacatgacccctttgaatttagaccaatattaatctcctttgaatcttattgaaatttttttattcatgaattttgggttttaggccttttttcttctaataagtttgtgcttgttcttatgtttatatgtgggttcattatttttcttcctatcttatggaagtctcttactcttttatgaaaaaaacatttcattatctgtcctcatttcataaactggtgaatctgtgagcatcaagggcaaggtatatcaatgaggtgcactgtgtactcacatgtatttaggaacattcaattgctttatttgaaattagttaggctgtttaggtcctaaatttggtttaatgggaaactgtcacttttgattaaaattagcttgactttgttattttttcctagatgggtttgttgtgatttggcacgcgaattgatcttgtttggaatttcatcatgtcattcatacatttttatatttactggatttggcttgttgtatacaagtccaatgctcaagtattttcctgaattaatatttaggaatttttgctgatctgaagcgcctgtattatatttcaatgtttgatttgtacactctgatggttttattatttaaagaaattgtaataatgtttacactatcttgtgaacaacagtaggccataactatcttttctctttcattcaaatagactgcttttgtctgctacaatttgtcattaacctgatctcaaggcaattgggagtaattgtgtgtagttatcataatttccactcgattgcaagatctggtgtgtgtattttcacctttaatgaacaggttggttgtgttgacattttaaagggatttgtggaccaggatcaaagggaagttttgccgcaaa

SEQ ID NO: 106217 - DNA, 672 bp, Aquilegia coerulea
  Intron number 1 from transcript AcoGoldSmith_v1.009219m (l ocus AcoGoldSmith_v1.009219m.g) derived from phytozome v7. 0 (chr-ID scaffold_14; pos 5352669 to 5353340 reverse stra nd)
gtggtttcaagagaaataagcaaggttcgtttcttcttctccttttagctgttttgtattactttgaagttgttttagggtttcttgaaaactagaatttcttagagtgaaatcttttctatttgtatagagtagtgatttgtaatttttggggatacttagggtttatatgttcttgttttttataaagtttgttctttttatgttcatagctgcccaaacatattttatgcacagattcagatctgttatcttttcatttttgcgacaccaaccctaattccccaagttatagttaagataaaattgtccttcattgtcattatatatcaagttctgatatgcaagtattgaaatacccttttaaggaattttcctttttgacaattcttgcgttttaattgctggtttaaagtctggttgtattttaccccaataaaacaaccccccacactaaaccagtttaaaatcttgttataagcactttttattccacaatatgtactaaagacttttacttgaaaataatttttgatgagattttgtcatttaaaaacaatgttttcaactgtgttcttaatggtagtctaagcaatgggttttgaagctactcagattaataacttggttagattataactgagaaagcgtaattaatgttttgcaacagaa

SEQ ID NO: 106218 - DNA, 987 bp, Aquilegia coerulea
  Intron number 1 from transcript AcoGoldSmith_v1.013601m (l ocus AcoGoldSmith_v1.013601m.g) derived from phytozome v7. 0 (chr-ID scaffold_14; pos 665667 to 666653)
tccttgtcaagcgaattgttcgcactggttctgcagtaagttagaacaaaatgttatttcttttgacgatttattgagggcattgttcgttcattagtttgcattttgcattagattagtttgcaaaaaagttgttttagtggagaaacggttcaacttctgcaagattattttattgaaagaaatttcagctaaaaaaacaaagaactagggaaaatatgatgatcaatttcaatcggtaagctataatattaggaatattgtttattttttggtcaatttggtcaattagagcttttatatatgtgtttgaggaagatattaacatgaaaaccttaattatttgaaaaacaatctttcttgatcacgtactaatggagctagacctggtagaataagtttcttatcacctgatattatcctttttatagttgtttatcgaaggaaggcattagcaagtaagacaattaggggtagacttccacagtccctgccttagttgtcacatttattgtagtatatgggaaactgagagacgtcttatgcatgttgttctttcacttacaaatttgaagtctatttgacccaattggatgggtggttaaatgcattcttgttcgaatgtttcagtccgatgagatgacattcttatggaagcctatcaattgttatttttaggagtgagttaaaacggtttaggtgtagaatatagaacaatgtgtgtgtgtgtgtttcaaatacacaaatagacatcatgtgtttgctctttgctggtcagttataacacaggttggtggccctgaaaattcaggtgagaggagggcttacttatatggttatacctctcctaatcatcgtattgcaccaaattcgttgactcgtaatttgccatgcatgactaaattcaaaagttgtttcttcatttatcatgcaaattttaacaacaatcttctttatcaggcaactgtatattgggtgtctggcatc

SEQ ID NO: 106219 - DNA, 375 bp, Aquilegia coerulea
  Intron number 2 from transcript AcoGoldSmith_v1.027269m (l ocus AcoGoldSmith_v1.027269m.g) derived from phytozome v7. 0 (chr-ID scaffold_4; pos 5942636 to 5943010)
ttgaggtatagtataatatcacacatcatctcatctaatttgtttgttttttttttctgtattcttcgttgaatttaactatgttttttcttctgatctagttagttttaatagattcaaagaatcaatttaaattaaaattattgcaattgaataaattaacctgacgagttcattagaattaaatctatcttctacttttgtcaactcaagcaggttagttaactgctagttatgttcatatacttgtccaaataatgaaaccatgctgtttcgttcaacttatgtcatggaatgtcatgtaagctgtggttagtactcaagtactgattttgtgttgattgttttgttattagagttgtttggctttaaggt

SEQ ID NO: 106220 - DNA, 842 bp, Aquilegia coerulea
  Intron number 3 from transcript AcoGoldSmith_v1.027269m (l ocus AcoGoldSmith_v1.027269m.g) derived from phytozome v7. 0 (chr-ID scaffold_4; pos 5943113 to 5943954)
gattttattccattgccataaaggtaaaaaaacaactcacttgtggatatttaaatgcttctgtagatacaatacaatctgtattgggtgtgtctgtgtgtatgtggtgactgacatccaaactgttatggggactcttacttgttgaagacaactggggatttgagtgcaccagaaaaattacttgtactggaccgagaccttgaacctcttaatgcgaggagaaacatgagtagtattcatgatatctatacatgcatagctaagaaaatgatccacatccactaaataagcaattggtatttgttaagttcttaccttggcaaaagaatgctgagagcacctttgttagtttacattatatggcatggacaaagcagctgaagaaaagctcgtactagcatagctttagattgctcttcaaagggataactgctcattgaattcactatgagaacaaactagccaattgccagcaactctatttgtttcctgtgcatgtgcttgaaactacttcttgtcgaggtatatagcataaaacataatccaacactttggtcttacatgtaaccatttatcaattcacaagcaattcatgtttcttttgaaaccaaacccacgagtctttgacgttttgaattgaatgcctatcaagctatcaaataaaactgccctgagatctgtaatccatagttccatactatattatagtttcatttggacttactcccaataacttggagtgcactttttgaatttttagtgatgctatgtgctagatgtaatgtatgcatttatcttctcatcacttgtgtcttcctacattttgtagggttgtgaaa

SEQ ID NO: 106221 - DNA, 303 bp, Aquilegia coerulea
  Intron number 1 from transcript AcoGoldSmith_v1.004969m (l ocus AcoGoldSmith_v1.004969m.g) derived from phytozome v7. 0 (chr-ID scaffold_5; pos 2954672 to 2954974)
gattcatttaatctaaaatattaattaataataaggtatattgaattttgaatttctctctgtttttttttcttctaataattatcgaattcttacgtgatttataagatctgatttgatttcgaaaaattttgaattctgtataattaggttcacgaagatctttacttgtttaatttgattttgttgttatgttttgatttagttattattattattataaagtataattgattagtttgtttgtttgattgatttgtgtgataaggtgtgtgatagatagaatagtgaagttgattcaac

SEQ ID NO: 106222 - DNA, 948 bp, Aquilegia coerulea
  Intron number 5 from transcript AcoGoldSmith_v1.009757m (l ocus AcoGoldSmith_v1.007321m.g) derived from phytozome v7. 0 (chr-ID scaffold_14; pos 5598228 to 5599175)
gacacttggttaatttgaatttgagtggctgccaggtatataatctgtactttgaacaaggaatttgtcaatgatacactcctattggtgttagaaaccatcctttctttattatttattatcatctttaacttatctaaaaaaaaaaaaaatctttaacttttcattgttattgctactggcaccatacagatatcttgatgtgggctaacagccgtttttgctttattctttgtttttgtaatacaaaacacttttttgtgtgagtgtgttcatcgccatcaagtttttctccttagcaccatattaacgaaattcagaattttgtgtccttgtgaactagacaataagagaagaaagacacaagtaacagttttaactctcaaaaagagctggttttcatgcataagtgaattgttgccaaagtttgattttcatgcataactttcaacgatagctggtttgtatatttattctcatccaattaacacaacttaaagaataccaataaatatcaaaattgtaaataaacaaccaattctccaacagttttgaaagtggagacgtggagttctatgcaatttgttttggacagtcaccttcaacatccctttttgagttgtttttttttttttttttttgaaatgcccataaatctggcttgacaaaagagtgcattcccaattcactgcaaatacttgtgcagtcagaagccatatttttataccacatccagaatctgaagtttatatatttgtgcagtcccttgtatttgaagctttttttttaatatgaaactgctattattttgtttgtgtgtgtgtgtatttgggggtgggtgggtggtgtaaagaggtatgtgggtatgtcatttcttgcattttgtttatctttcatgattattccttaatacatttcctttgctcttgcaatcgcagagtattacag

SEQ ID NO: 106223 - DNA, 696 bp, Aquilegia coerulea
  Intron number 1 from transcript AcoGoldSmith_v1.011384m (l ocus AcoGoldSmith_v1.011377m.g) derived from phytozome v7. 0 (chr-ID scaffold_53; pos 1007863 to 1008558 reverse stra nd)
atatatctactttaacgtaagtacctgctttgttctatacatcattttgtaccaactaattttcatgatattacgtgttagtaagtatttacactttttttttctattgagatcttgttgagtcgttgtgcaaacaaaattatccttttaccagattagattttaccggacaggaattcgactcaacttgttgaatttgtttccaacgtacatttcttctccaaacaccaaaatttgaaatcttttctctgctggcatcactgtctttcatgccatctatgctctacctttcaggattatagaaccctttatcgttttatagatgattttctaaagtaaacttaaccacaggatgcccatattgaatgaatgttaacatctcttttacctttcaagggaatgcattacaattgaatcctttgtgaccgtgttgatatttagccaattagccctgtatatgttagtaggccgtaatgctgtatgatgtggttgcggttttcttcaatattgggatccatatttctattatatagttaaggatggtattaattagttttgttacttggtagatttttacattatattagtagactggatgatgtgggtgaggctgtgctctttctggcttcttacataaattcaaacttctaagtttgggtagtttctacaggccacctaacttgtacaaggatcctg

SEQ ID NO: 106224 - DNA, 485 bp, Aquilegia coerulea
  Intron number 1 from transcript AcoGoldSmith_v1.008502m (l ocus AcoGoldSmith_v1.008502m.g) derived from phytozome v7. 0 (chr-ID scaffold_45; pos 720514 to 720998 reverse strand )
aagaacaaaagatcaagaagctaactgtatggtgactatggtcttttctctacatcccttgcaatttgatatttatttgttttaatcttaatactatcggtagttttcgatttgattctaattttatggttgaatcaacttataagtgaagacttgtttacttttttagaaaaccatgatagatagttgtttttccaagtttggaaacagggcacttgatgaaaatcgcgcgccatagtgagttttatatatgaattatgaacatgatgttctataggctatagatgagggagttcttgctataattgtttagctatttcattttttacggttcgtgttgtatttcttaactacaacagtcctgcttgtaagcctgtaatgtgtttgttcatactgctgattgttcttaaatttcttttctctctgacagtgtgtatacatgcctgtgttttgatgacttgatgtgcaggttgttcttgacttgg

SEQ ID NO: 106225 - DNA, 946 bp, Aquilegia coerulea
  Intron number 1 from transcript AcoGoldSmith_v1.003303m (l ocus AcoGoldSmith_v1.003303m.g) derived from phytozome v7. 0 (chr-ID scaffold_14; pos 1381196 to 1382141)
caaactcttagacttgagttctacaggtactcttatattttctccattgaataacttttatatactgtaattgatttcttcactgctaaagaattccttttaattcacaaaatgtacactcttcttcctcttttgttttcattgtcattcaaagcgagttgatttgcttccagtttggactttgaattctattgaagaaagcccaagtccaatagtccatcagatttcataatgaacttgtttagtcattagtggtcaactggtcatgctacattggcacattgctacctttgacgatcgaagtgcgttacaacttacaacacgttaggttaagagagagacagtcgagagttttaaaacaaaagagtttacttgttgtttttggtcaggatattaaacaggtagtttgtttgttgcaccaattccacctacgtacgtaattagctaaccatgaatacaaaactagtaatattatacacacaattgttggatttactgtactagaatttttgtcgaaaaagaacaagttttgcaagacatagattacacttaacccaaaaacatacattttgtgctcaatcataattaattaattttagcttaaagtgaactcaaccaattagattatagtacaccgaatcatatcaaatcaaatcaaatcaaatcaaagatgtttcccactaaaaattgcgggaactatgaattgaaatataaattagtattatttactgtatgcaattattatcagatatggatatacacgtcaaatagcactatttgatgtgaaataataataattgcttgctatatgcttataaatatctatcttagtcacaataacagagaatccaaattctctgacaattcttgtttctgacttgttttgttctctctctttttctcgcctgcagcaatattagctatttcttttctaataagaataagc

SEQ ID NO: 106226 - DNA, 683 bp, Aquilegia coerulea
  Intron number 2 from transcript AcoGoldSmith_v1.003688m (l ocus AcoGoldSmith_v1.003688m.g) derived from phytozome v7. 0 (chr-ID scaffold_17; pos 342059 to 342741 reverse strand )
ttcaagataaatcttttcatcttcacaaggtaattaaatctcattggtacattctgtttttttcttttgatctaatgagatcacttcttgttctattacatttctgtatatggaaaaaaaaaaaaagttggaaaattaagaaaaacaaaatatatgatgaaaagacgttcacatttgattacattcgaacactgaaaaaaacgttattttcattttctactttatgatgatcataataagttgattggactgaaaacattcctactggtaatatttttgacaaattcattatgttatttgtcttcttttcataatgctagtaggctagctataattatgttaattttcagagaaagaaaagaactgatgatcagcataagagtgaatgccattgtagtgttttttacatttactattaatacattacattagtttgattttcaattatttgtacttttttcaccaagagaattgtgttatttcaacaaaattgcccaaatgaaatttacgtataacagtaagaaaaaaatgttcttgtaacgtatgttaccatatgtttgggactttgggttatacagatgagagtggtagttataagaattaatgacaaattcaggggcatttattacatttacattcttttcataggattctctgatagcaaaaagtggctacctcaaacg

SEQ ID NO: 106227 - DNA, 648 bp, Aquilegia coerulea
  Intron number 2 from transcript AcoGoldSmith_v1.022715m (l ocus AcoGoldSmith_v1.022715m.g) derived from phytozome v7. 0 (chr-ID scaffold_94; pos 494020 to 494667 reverse strand )
tgtttcggtcagctggtgaaaagtttctccatcttgtatgcatacacaatcttttcatccaccaaaaaacttacagtacaatgtttttacattcttttttaatcatgaattcacgatgcattgaattttatggcatgtagatagcactttgagtttgtaacgcttctcattattctgaaaaaagaacctttgtgtttctaaagagtgggctcgggagtaagcacggaattaagctgtgttttttcagtattgttttcttttttcagtttaattttacaaatggtttgtattgaaattgactcaggttttcgcacaaatttaatgtgaattgttgaggttttctcgatcatagttaagcaaagttttccctgttgatttgtacaaaatatcaaagttatttaattaatgcaagcaggttgtaccataatttaggtctgaattaattgaattatagtcaaattcataataaaaaaaaattatagtcaaatgattcacattatcatggttttgtcccgaattttgcgtaaactaatataattcaatagtgattttcccccttcattaaattctcatcagtgtttgcaagcttttttaattttcccaaaatttgtatgagaacctgatttgaagagactctttctctgtagt

SEQ ID NO: 106228 - DNA, 955 bp, Aquilegia coerulea
  Intron number 1 from transcript AcoGoldSmith_v1.025350m (l ocus AcoGoldSmith_v1.025350m.g) derived from phytozome v7. 0 (chr-ID scaffold_76; pos 28805 to 29759 reverse strand)
ggtaaggtattgatgttattgttttagacttaagtggtagcttcatatttaaatacctgcatttgacacatttaacacatttggcattgtctttgaaatttactaacacatactgtagtggatctgcacatatatgttctgcttgatatgcaaaattctaaaactatctctaaattatatcttgttcgtatgatggcatggttggtcagttctttttacagtataggaaatgtttagttctaaagtattctttttttgatttgcaagtcaaccatgtaatggttccaaaatttattcatagtttggtctgttatggtgtgcataggacaaaggaatatgctaccttcatgtcgaaagaaattttcaattatctacacccctacctctgcactctttgttcttccacaattaatatgtgtcatatatatatatatttattcactggggtctattggaaagtaatgagtagtagcatataaatgaccttttacgagtagatgtgaacatacctttataatggagataatccatctatagttcaaacttcaaactgatttcgttaaggacctcactcttcatatcatgttaaaccaaattctttagctttgaccatcctaacatgcacctcgcctattgaatgccaatggtaaggatgtgttagtttgttgtctgtgtgatctggaataggattcctcacaaatggactctagttcgtcacatataccgtagcctaatttctgcttaattatgacttttgatcctactacaagtgccctgctttgagaaagcctggtcgaatcataaacttacttaggctgaagtcaaaacacttccttaacagaacactagaattgcactttgcattgaactgcagtttcaacttgatatttaatggtattaatcctaagtaatttctttgcgatatttaaaaacagttattgtcagagtggattat

SEQ ID NO: 106229 - DNA, 301 bp, Aquilegia coerulea
  Intron number 1 from transcript AcoGoldSmith_v1.004978m (l ocus AcoGoldSmith_v1.004978m.g) derived from phytozome v7. 0 (chr-ID scaffold_17; pos 2339628 to 2339928)
gctacttttacacgaacgtaagtgtaattcatttttaggttttgattagttcttctgtttgtttgttttacttatcaaatgactgttgttgtgtttaatttgattacaaatcaagattaccctagaaatgttgaatttgtgcatcatttaatagttattagaacctactaagtactaattactgagattacttgttaaataaccctatttagtggcataagtcaacttatatgaatgcatgtttgatggttactgcaaattgattaatatgtatactttttactttgttataggaaacctc

SEQ ID NO: 106230 - DNA, 900 bp, Aquilegia coerulea
  Intron number 1 from transcript AcoGoldSmith_v1.012732m (l ocus AcoGoldSmith_v1.012732m.g) derived from phytozome v7. 0 (chr-ID scaffold_14; pos 633604 to 634503)
gctgacagttttgtttgagacaaaaatctcattgaaatcatttttatttataaatcgacattgaggattgggtatttgggtgtgtgtgttttttgtgacatgaatttggatccttggagaaatccctttaatgtgccaatacatagacattagactagttcatctaatgtgagctcaagaagtatggtcacttcacaattccattttgtatgaaagctgaagtagtacataactacatataaataccacaactttttatcaataaaacagcttaataaaaataaaacgaccattataacaatgtgtacgcattcaatatttcaatgggtcatgccatatattgagaacacaaaaaagaagtatccatggcccatttaagagagatcgattttagatggcccagatctaaagcttaaaagaccaggctttgttagtccggcccatttaaattcgatctctttgaaattggaatggaaaatataaaaggaaaaaccgaaaaagaaaagaaaatagagagggaaaaaataaaaataaaaataaaatcaagtataaccgccattcttcttccggccagttgttttacctgacattcatcgccagcacatatcaacatctctctcttttctaattgcttgttatctacgcttcttcaacaactttcttagagttaattgattaggttttgaattactcgatgatcgcgttttcgtctaactattcaaattcaactttctttctttcctcttcttcttcttcttcttcttcatttcaaaattctagggttttcagaagaacaacgagttgttaattgatctgtgaaattgctttggaatcgtcttttaatggaggattccaaagcaaatcgcacggcgagttcttatgaaattgaagaaccttcta

SEQ ID NO: 106231 - DNA, 710 bp, Aquilegia coerulea
  Intron number 1 from transcript AcoGoldSmith_v1.006361m (l ocus AcoGoldSmith_v1.006361m.g) derived from phytozome v7. 0 (chr-ID scaffold_17; pos 4459498 to 4460207 reverse stra nd)
tcaaggaatccatctcatttcaaatagcattccaggtaataagggtttatcttcttttccttactcagttgctagggtttttactttttcgcctgtgagttcatgcttagtcttcagctcaatgtttccaaattgtaattctgtgttttgtgctgtttctcgacatgggtattctctataatcacattttgacagatttctattatttttttcctgcatttagtggaatattgttgattcagtgttttttttttttttcttaatttttcatttctattgggattaggatttgagattggggttcattatactatccagtgaaataattatattaagtttgatttttttaaaaatacatgaaaaaggaaagatttcagagttttttttttcccagagtgttgataatgctaaaatccataatcaatgaaatactaagcataaagcagcttattacattaactcacagtggaagggtctggaagttgttgaggtggcccagtcttttgatgaaaattagcacaaggaaaattttataattgttaagaagttggtctaacattattattggatatgttggataaagtaggcagttaatttgaatcgcagtatgattgtaacgtggaagttggatgctcattttgaatccggtagaagctgcatacttttcagatattgcaatgatggaatttctcttattctctctgcaggtt

SEQ ID NO: 106232 - DNA, 371 bp, Aquilegia coerulea
  Intron number 2 from transcript AcoGoldSmith_v1.005421m (l ocus AcoGoldSmith_v1.005421m.g) derived from phytozome v7. 0 (chr-ID scaffold_17; pos 2971778 to 2972148 reverse stra nd)
gcgttgcataagcactgtgtaagtttggtttgcttaaacttgttgcctcatattactgggagaaaaataattgttctcttttatcatttccttttcaattgacaaaacacttacataatgagatcacccgaataaatgatcctaacaagggctcatgacaaacccaattccatatcgtggtggtgtcgttgctaccgggaagatgttcactactaactgaacataaaaaattactgctctaactccacgttctagaacgaggttgtttctagttctgtttctgttttttttttttttttttttgtcttcttatctttgatttcaaaaattgtttaggattgctgaaaagcgagtgagtgccgtggctataa

SEQ ID NO: 106233 - DNA, 389 bp, Aquilegia coerulea
  Intron number 1 from transcript AcoGoldSmith_v1.024669m (l ocus AcoGoldSmith_v1.024669m.g) derived from phytozome v7. 0 (chr-ID scaffold_5; pos 1828179 to 1828567)
gtcatcttgtaagtatatcttatgcatccctcttcttgtgtcactgtgatttagtattggatgactacttctttgttctgaacctcttattgtcatgcataatgatgaaatcaggaaactatatagagaactatgagaactgccatatacaatatattttgatgtcttgtcttgatatgtggtttactcttttcgacgtttttttctgtcacattttaaattttgtgtgttgctatacaactccgtccgagaggtttaaatcaatgaagtctggatcattaaaatttttgttttccatgaacattttagaatactatgtatgtaaattgttattatcatatccttgttgagcattttgtaggagttgccaagtgagtttgtgggtgaac

SEQ ID NO: 106234 - DNA, 1031 bp, Aquilegia coerulea
  Intron number 1 from transcript AcoGoldSmith_v1.015650m (l ocus AcoGoldSmith_v1.015650m.g) derived from phytozome v7. 0 (chr-ID scaffold_42; pos 874533 to 875563 reverse strand )
gcttggatctcagattatccagagggatagcacgggtaaaatattattacaacatcttacaattttctttttgatttgtattttatatgtattcataagatggagttgtttataaatgaacaattataacaaatcacatgctaaaaagtaaatgatatggaatggaacctgaggcattttcagggaggagggcgcgatgtggcgcatcctattcttgaatgaaagaactcttgttccgatggtgcaagtgatgggatgacttcaggagtcagggctatccgtttgcagccttcgttttctcttggataatatgaacaaggagtttagtcttgattattttttgatgagcgttattgcataaaacggaatagggaaaacattgcaacattctttgaccacagtgatagataattgtctgactggaacccctaaaagcttacataaactcataaagccaacccgatcatagaagccctccactacccctttacattatgttcagtctgggaatagctgatttcccagttgaatactatgtcgctgaatctggtaccatgtctttcctccctgttggatactcagtgcctaaatagatattgttgagggagtctttactgtagtaaggattagggactcttgattttttttttgtctcttttgcgacttctcgtcccccgtattcttgtatgatattgtttgcttactattatattgattgtttacctgaataataaaatattgctaagagtaaatgttgcctgggtacggcagagatttggctgggggtatgctgtgaaaccggtacttcactaagtgaagtgttcaacctggttatggcatccatctcaactgtccaggactccaggtaacatagacaaaaagtgctatttacattaaggaactctttatgagttgtgactattttacggcatgatagttgaatcataatagaatatgtttgtcctgttggctacctacaagtatagtttcttttcaaccattttgacttaaaaactcccttttgcaggtta

SEQ ID NO: 106235 - DNA, 900 bp, Aquilegia coerulea
  Intron number 1 from transcript AcoGoldSmith_v1.009923m (l ocus AcoGoldSmith_v1.009928m.g) derived from phytozome v7. 0 (chr-ID scaffold_23; pos 2218922 to 2219821 reverse stra nd)
gcatctacttcaacttgaccttcattgttttacgagtgagttaagcttccactttattgtaccaaattgatctctgcgatctgcattgctttctgttatatgcattctattctattatttgtaaacagtttgtaacaatgatgcaatagaatagtaagagagtcgattctttgacttagtatgctaccatttgcagtgtgattaagttatcacgattcttgagaataaatgtgtaagtacagccgaagtctttcaatactactttattcttgggattatagtatttagattgattttagaaagaatcacactgcaaaaggatgttggactcttgttatcaaaatatgtatgattctgtatataggtttcattatgaataaaattaacttaatccttttggaatgaagaacacaccatgccttcttattaatgtaatttatttcctgacattaattctattgtaagtaccattttacaatgtaagattggagtaagaaaaacaaccatcttttgtatatttgttggaatacttgacactttccataatatattaggtaatataattatttagctctagtaatatatatgtagctatatatattatatgtagtttttagtcaagtaacatgagctgtctgtaacccaaaataatgtccacatgacaacttgtgttataaaaatggcagttcttaactaacgattgacttcgaaggtcatttgtgcttgcaataaacaattgctaacttgttcccattgcgttgtatataatatattcaagccataggcttcttctgttttgtttggttgcaagtgttgatttcctggatgttaagtagagaactaaacgaagctacgttttccccagttttcgccagtctctacgagtcattcgaaacagag

SEQ ID NO: 106236 - DNA, 930 bp, Aquilegia coerulea
  Intron number 1 from transcript AcoGoldSmith_v1.004536m (l ocus AcoGoldSmith_v1.004536m.g) derived from phytozome v7. 0 (chr-ID scaffold_14; pos 986217 to 987146)
ccatcattcaaaaatctaatcaataccctttacaggtacatcttttcttaacaatgggtttttctcatttttgaatttcatagagtttgctttgtttaattaggggttttttgtaattgggattttctgtaaagttatgttctttattatgaacttagtgtgagttaagtgaacactattaagcttgtggttctaaagttttgagcatgaatcgatgttctttgcgagcattatctgtaaaattatgaaattagagtatgaattatgtctgattgggtcgtccctctttgcacattcaggtctagatcaatttacacttatttgattaatctgttgccaaacttttaagtctgcttttatagatttggtcacatttacaagttgctaatcataatctgtcacaattaatctatctgaagactgttagtgtgtcgctgataaatcagactctcaaaaaatttagacgttctaataaagaatcacgacaggactttccttctttataagatgttatgttcattttttttttgtccttctaattggtacgtgcataagtgcataacaaacaatttgagctacattaatattatgcaatttgggagttctactaacaatcactactagttgatcgttatacctctcgtcgttgcatgttgagtttcaagagtataatctttttttccccttgtggaaacttttgatgtgagatgagaacatgataaaagtattttctagttcttttcacttgtaagtcttttatttaatgtaagtttcaaggttgatttgctaggaggacaagccataatttcattaacaatttgcaatagtgtaaatatgaacaatggtgccatgagaaagctacttcagttataaataaatgggtcattctctgtaggttgctaagcgcttagagaagttcaagacgacgat

SEQ ID NO: 106237 - DNA, 1037 bp, Aquilegia coerulea
  Intron number 1 from transcript AcoGoldSmith_v1.016990m (l ocus AcoGoldSmith_v1.016990m.g) derived from phytozome v7. 0 (chr-ID scaffold_20; pos 2178092 to 2179128 reverse stra nd)
cgaacgtctttgtgctgagtttccttctgaggttcatctttgtcatcttctttttttttttttttttctgtcattaatttggtttattgagtttgaataatttatatgtaacaagttgtttgttgagtgatttggttgagctcatgtttgtcgatctgttcatttttcttcaataatttgttagggtttttggttaatgttaatctgcactgttagtagagaaattttgagaaatttgttttgaaattaatgaattagtgacttagaagtttttgtatgtcattattaggaataggttattggtgtttgtggattgttgaatgaagcttcatttgaaaatggaatcttagtgctgaacgttttgccaaatttgtgttgttgttgcccttagtggaggttggagaaggtatacaatacgaatgcatagttagcatgagagcatcccactgacgattgtttttgacaagcatgaacaacgtatgaaacttatatttagaacttaatgcatgtatagaacttgcatttggtaatgtgtttggaatccatttatcattttatgggaaactgtttgtattgtgtattccatcacataggtagtaggataggctcagttttttgttaattttggacaatctacatatgtctgtataattccagcacaagagagcataagatgaataaaaggacaagagatcgtatgataatacatagagcactatcatcaacaagtaatctgaataagctgacgagtttgaggttaatttgacgattgtggtggctaatttaaagataaacttagtttgcttagctgactgcactgcgcttgattcacttcaacaatgcatacttattttcttaaatatatttccaatggatttggaattatctttgctttcagtatttttataccatatctccatgtaattggtagttatgtatattagctgtatttaatgtaattgtaaatttacttggtttcctaacagtcagtccaaaatgcagttaaattcacagttattggcaagttgttacttgca

SEQ ID NO: 106238 - DNA, 913 bp, Aquilegia coerulea
  Intron number 3 from transcript AcoGoldSmith_v1.011107m (l ocus AcoGoldSmith_v1.009339m.g) derived from phytozome v7. 0 (chr-ID scaffold_14; pos 119670 to 120582)
ctcaaggtgtcaaggaactcgacaaggttcgttaccataataccatatcatttctatttctactcccttttcatccagtatcatcattttttttcaattccacaaccaccattatatattatattatgtctgcttttcttacaatttccaacctaaaaaaaaaaaacaaacaagccatcaaccatgaatcttgccaactacgtcaatttttaattgctatctgccttagtaaagaaacatcccagagctaaacatacaactacaaaacaaccgtaaaactgtaggataacaactacccctagttgcttaacatgacattcttaccaatgaaacattatatcacttatcatctttacagggatggaaattccactaacaaccatcacacttgctacatgtataatgtatttggccttgaacgcattaggaatggatattactactatctgttgtttaactgtattttgcttaactggttgctttcttttccagttatctcacttgtctggaacacattttaggtgctcctatcggcccctccccctcctctctgtctgtaacacattttagagattcttagtgtcactccccatgtttttgtcttagcaaaagacaatacccctcatttttgtaacttttatgggattgagtcccactccttccctttcccgcatccaatcgggcagtaggagatcccataatttctgtccaagcaaggtcagtctgagctagtcaaaagatcatatattgtttttttacatgtaattccttaatatgaagagaggcttaatcttcaagtgtgataggtttattcgattatcacttggttttattttcctcatttacaagtattgaagttcatttaattgttaacataggccttggaccttgggagaggtgcgaatcccaagag

SEQ ID NO: 106239 - DNA, 786 bp, Aquilegia coerulea
  Intron number 1 from transcript AcoGoldSmith_v1.018149m (l ocus AcoGoldSmith_v1.018149m.g) derived from phytozome v7. 0 (chr-ID scaffold_1007; pos 3485 to 4270)
caactacctgcaatcactgcgagttgacactccaggttatctctaacaccttgacttcaccagagtaccttgatgtacgcacaagacactcgacttcttgatgaacacacaagaagactcgaagccgaactatgaaaaaaacttacaccagagttacttgatgaacacacaaggatactcgacttcttgataaacacacaaaaagactcgaagctaaatcaatataaacaataataggagctaaatcaatataaacaataataggaagatgaattggggaatgatagaagatagaagtacacaaagatcaattgaggaagaagatgatctttgtggaagagccaacaaacaaactagggttctatgaaggctaggttggaaatcttgcctttcacataacaccaacgacctatttatagcctagggttaagaaacaaagcaatatgggccgaaaacaaaaaatccatatgatgacgtacgtacgccctaactaggtacgtacgtccctgaaccaaaagaagatctgttgaactcaacgtacgtacgtcctaactaggtacgtacgtcctaacacaaaggaaaacttctgtctaactctacgtacgtacgtcctaactaggtacgtacgtcctggaataaacaacaacctgacagactatgaacaagagtaagaagacacgggacgacgctcacacatcaaagtacttcctaataatgacgtcaaggcgagataacctcagacactcctaacctagtcacaaaagtccttacaacacttcacagcat

SEQ ID NO: 106240 - DNA, 795 bp, Aquilegia coerulea
  Intron number 1 from transcript AcoGoldSmith_v1.024716m (l ocus AcoGoldSmith_v1.024716m.g) derived from phytozome v7. 0 (chr-ID scaffold_14; pos 959310 to 960104)
cacttccagctttagatcttagtcaattatttgaggtaattccatttcttctttattgttgtttgattcctatgatgatatattttaaaatatgttactagtgaagaagatgaaaattacattttttaacaaatgcgcaaacgccaaggggttttgttttgtgtgttcttttagttgtaacttaatttttaatagagagaaagaacaaatgtttgtatttgcgaggctgaggttgttattccagcatatttagcattatttagcaggtgtaggagtataaaactgacatggtgctgatggttaagacatacattattgcggttggtggttttaccagaccaccaccactgtatcaaagaagttgcaaacacaatttactttttgctgccattttacttatccgggaatatgggagtgtttgcagcttctttgaaacagaatttggtgtttggacaaatacctgtagacaccggctttagttttattttattctaaatctgcagggatgtcaagctgggtgataatgtaattgtttttggttttgttcccgagtcattgcgattgagtacctataaacacattccctatttgcgggagtgacaatcttttgatttatatctgttgaaattgtgtgttcaccttgacctgaaagattgttgttacttgtaacaactatacaaaacagcacttcattctctgcttctttgtttattaaagagtgccatcatccgtgaatgatataatgatcatcaattatcctttttcttgtacaccaggaaaactacaagcagttga

SEQ ID NO: 106241 - DNA, 256 bp, Aquilegia coerulea
  Intron number 2 from transcript AcoGoldSmith_v1.014996m (l ocus AcoGoldSmith_v1.014996m.g) derived from phytozome v7. 0 (chr-ID scaffold_14; pos 1778865 to 1779120)
gctgaaatctgttcttcattcccggtctgttcccaccttcttctcgcattttatcaatttcttaagctacttttactgagactatgtaatgcaaacttcaaattttgattgttcatgcgcgaatttcagttttgaatattactgcaaggttgtcttttagacgtttctgcttgttgcttttcaagacagcaaataaactcttggctatcatgtctaaacagactactggctccctttacttttgggcggcacattt

SEQ ID NO: 106242 - DNA, 785 bp, Aquilegia coerulea
  Intron number 1 from transcript AcoGoldSmith_v1.027491m (l ocus AcoGoldSmith_v1.027491m.g) derived from phytozome v7. 0 (chr-ID scaffold_17; pos 4650425 to 4651209)
tcaaattctactttctgttaagtaaggcgggtcttgtatgctgtacctgggtcgttttgtgtgtaatttgaatcctagttgagagttcccttgctaaataccaacataaaaacactagagagttgtcatactccaagaacaatggctttcatgaacttactttaacttcagtaagtgcgcttctttttatatgtatcttctgattgtaggatgcaatcaagtcaccaatatactataagatgttaggaacagtgggcaacagtgaggaaatttagtgactactatagtctgacaaaaaaaattatttttaactctgtttggtttaagcctgacataaaattctgtttgtggcacgtttcaaattttttatggctatgttaggatgcttgattaaaaggatgtagtgggtgatacatgatatttgaagtagttgagttagccttataatttgttgaatatctttaaccacaacaaacaatggcacacttcaaatttattggattttttctgtgcttcaaaagttttgagctttaatatttttaacacttgttatcatcaagaaaataagtaatgttcttgttcatcttcttgctttttttctcccctttaattattccatatttcaatcttaacatgttattataattcacttgtatttcagaaagaagatgtgatggagcaatcaaaaaactatgatccttttcaatacaatgccacggagaataaaaatgatggacttagcacttcaaaccagagatttctgcaggacccatcaagctccataa

SEQ ID NO: 106243 - DNA, 961 bp, Aquilegia coerulea
  Intron number 2 from transcript AcoGoldSmith_v1.005915m (l ocus AcoGoldSmith_v1.005894m.g) derived from phytozome v7. 0 (chr-ID scaffold_29; pos 196822 to 197782 reverse strand )
cattcttgatttggacggtacactacttaacacaggttggttcaaatctcttttggtttagttccttgtaatgcttttcaagctcattgattaggaaacacatgacccatgccatacacatatttcacaaggtaattaaaattctagttcattatttatgccgagtagcggtgagccgaaatgttcattattacatatacccacttggccacttgactcacatcaaaacaagttttattcagctaataaggaaaaacatacccacttgactccttggcctttgttcttctggctgtaaattaccacaacaatacttaccattctaagtcgaggaaagtcagagaatgccttcatcagcagatgccaactgagctcaattggtaaacctctgggcgatgataccagaggtctggggttcgattccaggcagtgcaactgcatctttgagtcgttaaaaaacaggcttgccaataaaagaaaaaaaaaagaaaaagaacaaaaaaaaaaaaagaaagaatgccttcgtcagtccaccattcatgccattaatccatttcctatcttaaaacactaattgtttttttcttgtacatggtgatatttatttgttgctggttcgttgttttatcaaaattgatgtacttatattttttttcttggcataaattaaattcataataataacgaatgacctcatgtatttagatgacacactctttaaagccagtttctttttctgaaatcccaactgatgtcaaagttcggatcacccaatatttcacagtcgccatcctgaaggagaaaataggtctctgtcctacacaatctgaactctgaagctccaatactgtcttagtttgttttaataaatgaaccattcactgatgaaaaacgatttcatacaaagcaatagacccttttaataagatactaaaagaaattatttgtgatttcatgacag

SEQ ID NO: 106244 - DNA, 519 bp, Aquilegia coerulea
  Intron number 3 from transcript AcoGoldSmith_v1.021786m (l ocus AcoGoldSmith_v1.021786m.g) derived from phytozome v7. 0 (chr-ID scaffold_4; pos 4889912 to 4890430 reverse stran d)
aaaggttaaacttttttttttttcgtttaattcattagtaatgtgcaagtacactgctgtactagcaataatgcatggcaggtgcccaagtatagcaaattaggcaggtgcctaaggccctcacttaattgttgggctacatattttctatttaagcatttatttcttcattttttaggtgtttttttttaaataaaactctaaatattaaagagttctctagaaaaaacaaagaattttggggtcacatcatttttgttcaaattccaatactttccaaagttaaatttaataacaattagtataactcttctagaataaaactaaaatcaaattaaattgcatttagtacaataaaataaaactatcctacggtttttcttcaaaatattttctgatttctacttcaaggactggtttgcctaaggcatctcttgagccggccctgatcagagcccatcaaaaccattaaaattttctcaactatgtataatttgttggtttaaaatttcagctttg

SEQ ID NO: 106245 - DNA, 417 bp, Aquilegia coerulea
  Intron number 1 from transcript AcoGoldSmith_v1.021786m (l ocus AcoGoldSmith_v1.021786m.g) derived from phytozome v7. 0 (chr-ID scaffold_4; pos 4890818 to 4891234 reverse stran d)
cctaataactggtgccactggttttctagcaaaaggtacagtctagatataaccttaacatgtgtttatgaatctggctttcttatacagaagtaagtactttggttatgttgctttctaaacctgacctgtttttgactttaatatgaagattcaactagggtttgatctttgagtaggtggaagttgaagtctgtttgaccaagttttgaactggtcaactcaacttgccaacttaattaaggccatttatcacctaaactagaacaattctatatagtagcaaagttttttccctgattttcttttacgctaaaacgaatggttcaagtttaattatatgttttgttttaatatattatgggaactttcttttgcgcagttctgattgagaagattctaaggactgtacctgat

SEQ ID NO: 106246 - DNA, 574 bp, Aquilegia coerulea
  Intron number 1 from transcript AcoGoldSmith_v1.002907m (l ocus AcoGoldSmith_v1.002907m.g) derived from phytozome v7. 0 (chr-ID scaffold_4; pos 6982282 to 6982855 reverse stran d)
gattcactcaaacaggtatttgaattagatttattggattatttttaatctttttttatgtattttattgagttctatatataaatgggagatatcatgttgtatgaattatgtatttgctgttttattttgtggttttcactagtttgatctgatgttattatgatggaaggtttaataagggtattttgtgaagtaaagggttgtaagttttcttgtaagtcataataaacagatttttgtaaaggcattgaatgtaatggaattcctgattttaattaaaaaatagtcacttgagtagttcgaagtttgaacttacaattgttgcaagcaaaataacgcaaatctggtattaaggtttgtagctgttaattgaacttgagatgcatgcaattatggttgatacaaaattgtttcagttctatgtttctgagaagttacaaacatggagtaaattaattcatgttactcatgtcgatactggtttattccattgttttgaagattgatatatatgtattctcttactgatgtgtatttttttattttttacactaaagggtgcacccgagaa

SEQ ID NO: 106247 - DNA, 623 bp, Aquilegia coerulea
  Intron number 1 from transcript AcoGoldSmith_v1.005070m (l ocus AcoGoldSmith_v1.005070m.g) derived from phytozome v7. 0 (chr-ID scaffold_4; pos 6118122 to 6118744 reverse stran d)
catttcgacaagtaacaaaccacagcacattccaggttggtttcttttcaatttgtaggatttaaagcttgtttagaacgaatcaataaaatgttgaatggtgaacttaaagttaaaattgagtattgtgaagttacattagttcagctttgtcgaatagaatagtcgaatgtgaattctattacttttataattaaatgggtggtgaggtttgttgtctttttttttttgatccctttgatttgtttttatgagtattagttgggttttcaaatttttagccaatctgcataatgtactgtacatgcgtccctaaaacattgtagacattttcgaattattcctattgagttttgaataagtgtatgctatgatcttatgtttactttaattgttatccaccaccttcattcttatccttcttaggttacctgatgttgtaattaaagatcacagtttatttagtttaatataatgagttgtgctgagttgccttcatcttttatttgatgatttgatctgtttaactttatttcgtatatatatatatattttctcttggattactctgatgggcattacttgctttttcacattttagctaatttggacagattcactac

SEQ ID NO: 106248 - DNA, 568 bp, Aquilegia coerulea
  Intron number 1 from transcript AcoGoldSmith_v1.005229m (l ocus AcoGoldSmith_v1.005229m.g) derived from phytozome v7. 0 (chr-ID scaffold_14; pos 3230989 to 3231556)
tgactgtttaatctgttttcttcatagtttccaaggtaatttcattattttcaattgattttgtgatcgaattcgttcttttagcgatcaattcgtgaagaatttaccaaataacgatatttttgttgtattctgctatgagaacgaacgtttttttggatttctgaaccattttgttgttttcgaaccttttgattgtcataatttatttcttgcttctaattagtttctgatcttctatttcatcatttgtctgatgtatgtttgttgatttgcttaaattacttcattttctagtaatttgatgcaaatttgtactgttttgctctgatcgtcaacttggcgccaataattggtgaagtttttggatcttttctaactaatctactttttccatgtgggatttagcttttgctagagttttccttaattaaaatattgctgttttttttttattattcaatttgattttattaggtgataaatatccatttggccaatttgtccttttgtgtgagcacatctgtcatcttctcagttagaacataatcctttgaattgtaggtta

SEQ ID NO: 106249 - DNA, 572 bp, Aquilegia coerulea
  Intron number 1 from transcript AcoGoldSmith_v1.018937m (l ocus AcoGoldSmith_v1.018937m.g) derived from phytozome v7. 0 (chr-ID scaffold_5; pos 8822774 to 8823345)
ccctcttggtatgtttcaggttgctaagtaggaattgcttgcttttctgagacctttggttagcagctagcattgaaggaaaggtcacattgcaagagaagcaccactaatactaggtatacttatctatgcttcttatactaataataagaagtagatttgtttttgtatctgattgtatatatattaatgtttcagccaagttaagcatgcttgtattcaaatgaaacttgtgtattgctttatcacattccagtttgtagaattggatattgaaaaatagaactttaaagacctggttacaacattatcaaaaacaaaattatgtctctgacatattgacaagtgctaatcaacaaacctttagtagaatacataatttaatcttgtcttggaaattcattgagttcttgagttttgtaatggtggcatgatcatccggttttcttcaagaaaaaacttatctgacagctgagtggtagatgaacttatcttcattcattaatgcagtaaaatgacacacgctatagcgagcagttccttgcaaggtttatcaagttcaagctcaagtg

SEQ ID NO: 106250 - DNA, 906 bp, Aquilegia coerulea
  Intron number 1 from transcript AcoGoldSmith_v1.027311m (l ocus AcoGoldSmith_v1.027311m.g) derived from phytozome v7. 0 (chr-ID scaffold_4; pos 8624039 to 8624944)
tctgataactggtgcgactggtttcttagccaaaggtatagatcactgaattaattttcttaagatgttttgcttttatttttctgttacataattgtagtacatttatttttctgaagctttttttttatttcctaaaatgccatcatacatagatttctttattgcgatatttaatgatgtgccgaatttaccaattgcaaatatcgtacaatatcgcgatattttgatacttactcatcaactactagaaagcaaagcagctatgaaagcttctttgaaactctctgtataaacgataattccatctcaaaaacccatttttcttcgtaccctttcctaattttcaactacccaactcgtctctttcgtcaaatttcatgaacataacaaaatttaatccaagtttatatttttttttcccaaaaattcaactaaattgaaaaatccattggtgaaaaaagtgaatttgtagaagaagagaggaattttttttttttttttttattaatattcaaattctaagtgactcttgatcacggtgagaaaattccaaatgctaagaaggttttgggtatgggaatgggatagaaatgaagagaaatggcaagtgtttgatgataagtgggttttttcatcaaagttctttcctcaaacactagtaagtatggttccttggtaagtctggtttttcgatttcgtattatttattttttttgtcgtaaatttcccttaagagtatatctctgcaaaaatctatgtgctttaatattcttgaactttttatattctgtataaaatataaatagatagagagtgttgcatatagttgtttgttttggtcttgatttatttttattcaattttgcagttcttgtcgagaagattttaaggactgtgcctgat

SEQ ID NO: 106251 - DNA, 570 bp, Aquilegia coerulea
  Intron number 2 from transcript AcoGoldSmith_v1.011787m (l ocus AcoGoldSmith_v1.011787m.g) derived from phytozome v7. 0 (chr-ID scaffold_5; pos 6296881 to 6297450 reverse stran d)
ccggttacaagtatgtatttgttctactacaattatgaaagtttgcatcttcttttttttataacaaggcatctgatatcgattaagattaatcgcttaagcaggaatcaatctcaaaacatttagttaattcagtactaattttaatatatcgtgtttcaggaatgtctgttgtataaacataaacatactgagtgtgaattggggatctttgtttctctatctatgatgattttttttttttttgctgcaacactaaagttttatttattttattataaaatatagatgtcttctacagtactcaaaatgttagacagttcactcgaggctgaatgattcaaagactacttagcgaattcattagcaactgtattacagcgattgacctaaataaatgaaacatactcaaactgactaactctaaaacaaattagaaaatggaattttattctattaagtgtatggattatatcaggtgcattgattccattcctcttcaaacacaatggaattaactagatgtctgttacaggcaatatcggatcagaaggcagaccctggaaaccc

SEQ ID NO: 106252 - DNA, 684 bp, Aquilegia coerulea
  Intron number 5 from transcript AcoGoldSmith_v1.008268m (l ocus AcoGoldSmith_v1.008268m.g) derived from phytozome v7. 0 (chr-ID scaffold_14; pos 1017320 to 1018003 reverse stra nd)
aaatacttcaggtatattatacatcatgtatagtggcatataaaagttttatgcaccaaatgattttcattggcatcagtcaattctgatgattgttctctatatctgaagcctaagtgacgtttttgctagttacatgcaaaaaagatcaaattcctgaatatttgatacataactactcattgaggatctgacacctgatctcatctacctttatttattcttattgcaccatttaattgtttaacattgctaaaacccttgtgctgttcaatttggtttggaataatctttgtggctggtctattgataaactggcttattagactgacaagaggttttccagaactgttagaagaaaaggaaaacaaaaaaggtgattgaagaaagatattgaggttcaataatttttcttggtgaatagaaatatgatttatttcattggttcatattcatacttctattcacccgccttataaaggaaagacctggactgtattttatgtgagaatggtttctgattgccaacaaaaaagtacatattgcaatgattattgtattttcataattttgatatcttttgtagctgttatataagtttatttgtcacatattattatgatttgtcagtttgccttgtgactagttttaagctgtaccactgtttttgaaggttccattggg

SEQ ID NO: 106253 - DNA, 625 bp, Aquilegia coerulea
  Intron number 2 from transcript AcoGoldSmith_v1.008712m (l ocus AcoGoldSmith_v1.008712m.g) derived from phytozome v7. 0 (chr-ID scaffold_53; pos 917036 to 917660 reverse strand )
tttatttttacataaactccactggcacaaccaaggtcagttcagttgtgcttcctctcatctgccttaaaattcgactggaataattgagctcaattcacttccttctttactactgcatataaaatagatgttagaatatttagataatgatcatcattactgataagatcaagttatactcgtcaaattgtgaactacgctatttgtaaacgttgtattgttgtgtgaatgagcctgtggctcaatggtagcacccctctcacaaagtggtaaggttgtgggttcgaaacacggcaacagctgattgttgatataagtttccacacgtaatttaaaaggggtaggggtcccctcaaccctgcttgccaatcaaaaaaaaaaaaaaaaacaacaacaacaacgttgtattgtgttacctcccctgaatactatttcggttattctattgacgaaatattgtccttattattctatcaatatcttcccatatattaggttcatacacagaaaatatttcattatttcgttactccattttattcagttgagagtggcattttctttcgtttgtggagggcggttcaacaagaaagttgatttctttctttcttatttccccaga

SEQ ID NO: 106254 - DNA, 535 bp, Aquilegia coerulea
  Intron number 1 from transcript AcoGoldSmith_v1.021646m (l ocus AcoGoldSmith_v1.021646m.g) derived from phytozome v7. 0 (chr-ID scaffold_14; pos 1734635 to 1735169 reverse stra nd)
ggtagcaaacttaccattccagagaatatttaattgtctgaaaacctttgagattcggaactttcaaggttttgagattgagttgaaatttcttgagtttttacttcagagagctgtagctctagaggacgtgattatcaatacaagtcggccatgcttattggttgagaggttgcaatcattgtcgcgagcctcttcaagtgcatccatatggtttaagagtagaggtgcgcagctacaaaaaccagaattcaatcagaagaatgacaaagaaataagcattgttgatactactgctagtggactaggaaataaaatttcagctgacgttatttcagaggaaactgctttggaggcttgtgtgaggcaaacggcaagcaaccctgatggtgaaaagagtttaagagatgaggcagatagcttcaattttgagttccgtgacccaacaatttccttagatggatatgaaactcaccagcctgggtttgaaggcacaaatcaaagagagttgccacttaaagttgattctgaaaca

SEQ ID NO: 106255 - DNA, 259 bp, Aquilegia coerulea
  Intron number 1 from transcript AcoGoldSmith_v1.013319m (l ocus AcoGoldSmith_v1.013319m.g) derived from phytozome v7. 0 (chr-ID scaffold_42; pos 2309541 to 2309799 reverse stra nd)
atcttatcacactgtcttcactaacgccaaagcaggtttgtgtttttcgcgctaacgaactgaacaaatcaactttttaactcaaattgtttgatgtttatagataatttatgaattcaaggttgatatactgcttaattgattgatttataaagaagattgttatgaaattactgtttaaatgtttatatttgaaatctagggttttgaggaattaaaggaattgtaatggtttattgttgtgttaatgaatttagga

SEQ ID NO: 106256 - DNA, 555 bp, Aquilegia coerulea
  Intron number 2 from transcript AcoGoldSmith_v1.023485m (l ocus AcoGoldSmith_v1.023485m.g) derived from phytozome v7. 0 (chr-ID scaffold_4; pos 5085159 to 5085713 reverse stran d)
cccttgctaccatcgttggatcggtgcttttctctgtatgtcttttatgcaccaccttgtgcttttacacatgtcaggcatcttatacttcaatattcagtatgatggagcatttggacggttggcccttgtattttccttcattgaagttgtgatgttcaattaggagaagaaaagggattaacagaaagatattatttatggaataatgtttaaattttttaaggattgcacttaagaatgcttaagcatgaaaattggggtatttgatattagaaacaggtcagcagattacatcatttcttaaatgacggaactagtgaaagcagttatgatattatgaaaacataaatgtccccataactccttgcccctttacaaaggaaggaatgatggggacaatcttatattggatagacagctactttttactccattctgaaagtatttttggactttatttattgctgctacaattctactggtattcatttttctatcttcttgacattgtatacagatatttggtggtgttggtattgcttgcctgccgtt

SEQ ID NO: 106257 - DNA, 602 bp, Aquilegia coerulea
  Intron number 2 from transcript AcoGoldSmith_v1.011998m (l ocus AcoGoldSmith_v1.011915m.g) derived from phytozome v7. 0 (chr-ID scaffold_76; pos 178688 to 179289 reverse strand )
attggttagtttttcatttgttgcatttttttagtataatgttttcatattttttcagttaatttgttcatagatcagtttgaatatagaacaagaaaataaatattttccttattctgatctatatgatttgatgttggacttgaatgaacctgaacaagaacaatccaaaaaagatgccaagtgctgaaatgattattggatcaaacatatttgaaaaatcaaatgacagtaatccattcatctgtactggcttagattgcaattgaccgatcccacaatccaaactattttgatcccaaaagtccggcaaaatgatggatctagacaaaagtatgtgtataaaaatataagatcgatatagttgatgacttgatgaggttatgttttacggcaaaatgatatgtatattttgtttgtagtaatatggtgaaaaatgatgaagatgataacaattaatacgcttttattattaattaataaataaaagcatcgcaccgatggtgtgagatctatgatttattcgttacaatccactagaaaattttcattaattataatgaattgtattgcagggttgtgataagtgctctcgaccgttg

SEQ ID NO: 106258 - DNA, 780 bp, Aquilegia coerulea
  Intron number 1 from transcript AcoGoldSmith_v1.019070m (l ocus AcoGoldSmith_v1.019070m.g) derived from phytozome v7. 0 (chr-ID scaffold_33; pos 2680184 to 2680963 reverse stra nd)
tgctctactatattcgcagatccataacagaacaggtatacaaccctcttgggaagtcatatcgttgcacggataacagaaaatacaagatatatggaagtcataaattccaaaccaactgcacagagagattgctatacttatgaaaaaaaaagttagaaatactatggcacaactgggatatcttactaaaagaaagtacttacaattttctctcttagctgcagaaagctaattctctctgaagtatgctttgcaacctgttcaccacggttattcttgttttgttgagacatgacctgcatatataatatattccgtgataaaatagttaatacatattttaaaaattggtacattcaaaattaaatgcaactaatttgtactttatgttcttcagtgtcccaaaactccgtgagattaactcattcatgccgtgacagctgctcgggtttgttgtccatacgctcttcataagtggtatagcaagaataacgattcttttttcatttgcctttcttattcctaaatagctccgagcaaagtgtagtaagagtatatttttttctgttgtcatcaacctcccaataatcctgaaaccaatcaagtaataatgaagaaaaatagtatatgaaattatcaattatatccaccaaaacaaattacataacagatttaccttaattttcccaaaaaaaagtccacctggtctgaaaccatggccttttcttggcaatttacacagcttgttccctcccacatatatctcttcacttatta

SEQ ID NO: 106259 - DNA, 793 bp, Aquilegia coerulea
  Intron number 1 from transcript AcoGoldSmith_v1.009778m (l ocus AcoGoldSmith_v1.009778m.g) derived from phytozome v7. 0 (chr-ID scaffold_17; pos 2413915 to 2414707)
ttattacagcttgctttactttgcctattgaaaaggttggtttctccatattagacttgtttgtgtttttgttttgtttgattggttgttgaatgaatttataagatctttagtggtgtttttcaatttcttagtagatcaatttaggggaattatgaatttgagatctgaactctgaaatcaccattgcttatgaaattaatgaccttctatgtatattatctagatcaagttcagcagttcaacacttcaacctaatatcgataacatattgaagctgctatataaaaaatattgacctgagtagctcaagttcagactccactagatgcttctttgattagtttctttcaaccaatcgcgctgtttgcataattcccacaatatgcccttcaactctttaacttcaaattaataaatgtttttttgtgaaagaggcaccttattaggagacaactcccaaaatcgaaaatcagggaaatgcaaatattacagtgataaataagattccatacttctatgctgtgctttacttgctaactctgttttgttttctttttggtcacttgaaaagaaaattgttgagtattcattacttttcctatactcagttaggaggttgctattagaaataccagacaatttaggaagttgctattagaaataccagacaattgtttgtcatttcttgtggatttagtggcatctttgtcgttgttatttatatccatatgttaaaagggtacttatgtatgcagatattgaaggattttctgttgtggattgatcagaa

SEQ ID NO: 106260 - DNA, 781 bp, Aquilegia coerulea
  Intron number 2 from transcript AcoGoldSmith_v1.009778m (l ocus AcoGoldSmith_v1.009778m.g) derived from phytozome v7. 0 (chr-ID scaffold_17; pos 2414700 to 2415480)
gatcagaacctggggcgttggggtcctcttgtattgtgagtatacagaagtttatctcttacattgtatgactgcagtattttctttttgttggtgtcacatgctttgcatttccctttaacaccattatgatttatgtctagcttctctttcccttttcttgtcagaaaggggtaaaagagcaaaggaaaaataaagaaaagatcgaacatggttgaatttagtgatgtttgattttcactttttgggtctctcctcagaatcttagactttctatttattcttattgcatttatcggttctgagtcatatacagttctattctgtaaactgttcatactccctgccctggctcaaatataactagaccaatggtgaactacgcatctcagcagttgctcttaaaactgagattgcacccaaattagcaaatgtggacttcggtctcaagttgagcaggtttcttgctgttggagcacatatccaaagacacaagcatttttggctggtgttaaggcttcaactgctacctggtgtttttacactttctttgtccaaattttgatgagtaatcaaaaacatcttatgaagctttttgcgaatgttttgatgagtaattaaaatcaactgtctatgtcttgctatatgaaaccttatgaagccttttgggatcacatacccaaattatctattcatattcaaagaagaaagttttgtgactcattaagtaattctgaattgtgcagggctattgcttacatacctttgacggttctagcag

SEQ ID NO: 106261 - DNA, 555 bp, Aquilegia coerulea
  Intron number 2 from transcript AcoGoldSmith_v1.003138m (l ocus AcoGoldSmith_v1.003138m.g) derived from phytozome v7. 0 (chr-ID scaffold_14; pos 1333537 to 1334091 reverse stra nd)
gccagataagcaggttattttatactatggctcaatttttacagtttataacatattatagtttagtcagtgcttatgttgttcataatggaataaaaaatgtgggaagttgcttattttgaattgcttatcatgaattattaacagaagttgcaaacgacatgtattactgtatgttttgtttcagtagagcattagttatatcaagttgcagttcagcagttcgttttaagctgcaaattctctatcactgcattgcgcagccaactagccaagcatgctagagcgccatgctgtgaaaagttgttcttccaatgcatctaggccaaggctttacttctgttgaatgtgcatttatgttagttttgacaatcatatttgataacctagtcattgaaattcagtactgtgctttcgttgcgacatgtgtttttcttttaaattgttttggtgtaaagaagatgatatctttatgatgttagtcggttagtcctgacatctatgtaatacttggttacagaagccacgaatttgcatattaggtggtggatttgg

SEQ ID NO: 106262 - DNA, 703 bp, Aquilegia coerulea
  Intron number 1 from transcript AcoGoldSmith_v1.027524m (l ocus AcoGoldSmith_v1.027524m.g) derived from phytozome v7. 0 (chr-ID scaffold_14; pos 4366297 to 4366999)
aagccttttaaatagtgcagattatattactcaatgttaacaggaaaaatacagtaacctttattatctgtatcaagtagatggcttcaatcaacattcttttctgtaagccgattccctcaaatcaggggtaaggcttcctacgattttattgaagcagatatcaaatcaagattttaaccaatttaatttaatagccttggatgtcatggatgtttttagttgttgtatagctcaatgcctcaatgcacacatgcatgaactgaagtgctactgcacagaaggaatgcttatgcaaaaatgtgtattaacgagataaataattcattaaatttaccattttatttaagttgtagatcaaacttcatagctaggctcttaaaataatgattctttttttagttgattggcaatgtttcttttggtcagtggacaaaagcataacaatctcagtggcataggcagcatatattcacaccaagagaatagaaaaccaagtttctctctgatcaaactaaggaaaaaatcacattttaggtccaatgctattgacacaacaaaagctgcagttatcccaggtgaagattgatttcattaatttctcattgtcataatacattcatttttgaaaaatcttgaaaagctgacttgcaatagtaatgatgcagcacctactattatcacagaaaaaaaattatcctca

SEQ ID NO: 106263 - DNA, 780 bp, Aquilegia coerulea
  Intron number 1 from transcript AcoGoldSmith_v1.004187m (l ocus AcoGoldSmith_v1.004187m.g) derived from phytozome v7. 0 (chr-ID scaffold_17; pos 1366028 to 1366807)
cccattgaaggttctcttctcaagtgaattttaaggtttgtcagactatttcacttatttttttatttttttattcatatttagttctgttgtatactcttgattgtttatgattgattttaatctggagtagaactataggattgcttaaaataaattacataagtttaacaaatttccaaatggcaatcttgttaatttaaggattaaggttgttggtcaactgaaaagcagattattgtttgagcaatgccgaagttactaatttattctgattcattcttaatctggagtagaactattagcattgtccacaaacttttttaatattcttgattaatccgcaaatgacaaggttgttaattcaaactatttaatttaggttgttggtccactgaatacataatattgtttgagcaatgttaaatttaagtttaaactcgaatggaaagaagattattgtttgagcaatgccaaatttagctttttctgtaagcaacttattgttttttttttttttatatagtttccaaaacactctgtaacggaagaaacttggcttatgctgtccatgtgtgccttttaatataatcacatcatcgtagttataattgtttcttttttctctacccttatctttgccaatgtttattgttctgaaattgagaaagtgaacaagcaaagttgaggtgcttaaatcacataggcactaaaaaagaaatcaacttgttcttctttgcagaagaaagttagtcaaatccgtgccactagctggaagaa

SEQ ID NO: 106264 - DNA, 956 bp, Aquilegia coerulea
  Intron number 4 from transcript AcoGoldSmith_v1.010386m (l ocus AcoGoldSmith_v1.010386m.g) derived from phytozome v7. 0 (chr-ID scaffold_46; pos 825599 to 826554)
gaggacctgaagttccttttcaccctggaagacaggtttgttatttctttaactaaacttttatgcattttttatattaaaagtggtttatcctgtctagtttacaagttgtggttctttagggtaaagtagacgatgatttgtgtatgtaatttggtaatattcaccttagaccaaaaggaaatgatgttgatgtggcttttgtagattgggcttcttatgtaaatcacttcaattatattattagaattagttaatacatgtttttcacgtccaaatttattagttgtgttaattatatttttgttttgcttggtttgatttatttccagcagaaataaaataatccattaataaaaaaataataattaaaagtctgagaggggatggatcctttttttggtgaacaaggttaactggttaagactgggctctgaaacttattaaagaaggtgcatgctatgatttgcttttggctatctcaaccttcatagccttaagtcaaaagttcaaatatgaaaggagctcttgtagtctaagtctcagtggggatacgtctatacttactgtactcaacacatggaagaagatactctgagcaaatgacgagatgaattgatatcttctgacatttatatgaagccgaatatatcgagctttttaatgctgatgcttagttgtgcctcttgttagtatggaactgaatggtaaatgattagttgtgcctcttgttgcattggtgatttcgtagtttgtttttgcatattagatctatatgtgtcatttcaatcataggctttttattaaatttgtgttccagaacttctttggtgtctcttaaagttctttgcatttcttctatcatatatgttttttactttgaatttgtcatctaatgatcgcccttttttattatcttaggacaagcccgagccaccaccggaaggccgcctacc

SEQ ID NO: 106265 - DNA, 731 bp, Aquilegia coerulea
  Intron number 1 from transcript AcoGoldSmith_v1.004718m (l ocus AcoGoldSmith_v1.004718m.g) derived from phytozome v7. 0 (chr-ID scaffold_41; pos 1190282 to 1191012 reverse stra nd)
tgaactattctatttgaaaccctagatagcaacaggtaaatatgttttctttgtgttggtttttgatctttgattgattgattattagtttttatttaagtaatgcatgcacttaaatttgattgttagatcaatagaaaattcaattaagctaagctgagctgactgttatatttgcccattatatatgatgcatttagaatgtttaaatgctgtagaatgttgcgaaactggaatcttgttatctcagctctgaagttaacgttgtaattctgggattggtttatgtaatgaaaatatcattttattttatttttcaattcgttagtgttagttatgagtgagtttctgcaggagtatccagttataaggatggaaattgggcaagattcataattcatatttgaagagaacaaaattgacacaagaactctaaaatttggctcgggatattttgacccaaatatttgagaatctttacgattatagtttaaataatcatgtttaccctgtcgttaatgcatgaccagtataactcatatagattcaaatgcaacctataaataagtatttccgttcctttctcagaaacagtctgtgcaatcagttttatatgtaatgctagtttgtgtagtttgtgtatatctagcaatggtgtgttttctgaaagagctgatactgttgctcttgatgcagcttaaacagtgcatctgttgctcatacttcattat

SEQ ID NO: 106266 - DNA, 902 bp, Aquilegia coerulea
  Intron number 6 from transcript AcoGoldSmith_v1.009115m (l ocus AcoGoldSmith_v1.009117m.g) derived from phytozome v7. 0 (chr-ID scaffold_17; pos 4199180 to 4200081 reverse stra nd)
gcatatctggtatcggttgctatctcatctattctttgatttaattttagaattgtacaaagcatccaaagattgattctgtgtatggatgtatttgtatctagtctactctttgctgaggaatttacatgtcattagtgtacttgagattgtcacagaaacttatagcctcaataagttctgttcttagtaattcatcatgtgacatttggtattttttcctgatataataatttttttttagaacttttaatatgtttctgtttatgttatatcttagtccccctacttctttgaggcttgccttgagccccaatgatgtgctaaacctcaaggttcaaaaatgttttcttacataatgttgacactttagggttatagttcaaagctgaatgagtgagtttttagatggatggaggcagaggtaaggcatcctaatatacttcgtaatctcataatgtcttaatgtggagcatgtgcattgtaaaatattcccttgttaatatgagtagtagatgaggaatccatgtaattgagcaaaaaaagaagaaaaataattcaatgatgtgtccatgatgcaattatatttcgaattctgatattatgaactaggtgtctatttggaaaaagactaatactttagggtgaaaagtcctttgcgttccttgatagaggagatccttattagatgactattccatattgccaaactgaagaaaacaaaggtccaaatctgataaagcaaatgtcatgtgaaaagccgtcccgatcctgtttaataaaatgtattgttaaaatcagctgacctaattagctcctcgttcttcttatgacaagatatgtttccttgatgggatgacaaaaaactatattttgtgtcttgtaggacatatactgtctag

SEQ ID NO: 106267 - DNA, 801 bp, Aquilegia coerulea
  Intron number 1 from transcript AcoGoldSmith_v1.009115m (l ocus AcoGoldSmith_v1.009117m.g) derived from phytozome v7. 0 (chr-ID scaffold_17; pos 4201059 to 4201859 reverse stra nd)
tgaacagaagaacattcaacaatctcgaagaacaggtaataacaatacctcctttatagaaaaagcttttatactttcttcttctttttcttctttcatttttcaaaactgaacatttgattagggttttcacttaagaaaccctaggcgaacagaaaccagaaatatatttctttcttttttttcacattgaaaacttaaatcgattaaaactcattcgaaattgttacaagttgagaaaaagcacaatacttgcagatttctgtataacttcatcttataagttatatatatacagtagttgtttatacagttatacatgtacttggtacattatatcaagtgtttgaactattcctgttaatgaaagcacagggcaatgaattagtttttttttttttccccaacattgtcatgaaaaacaggattcttatttctgagcttgtaaagtaatgttgaaattgatttttttttttttttttgggataatttttgtccaatttgtggaatagattttaggagattaatttcccctgatttttatatttgatatttcttccaagtagatgaatatgtttatatatatatatatgtaccgtatttgtgaaatgtgaactaattaagaggtgtagttttagttgataaatgtcttctcattttcccccaaaaaacttgttacatattactatgtttcctttagtcaatgatttattgcatatttgtaatcttgcctgttcatttatgtatatatactaattgcatctcttgtgatacaaagtgttggataaacgtgaagataga

SEQ ID NO: 106268 - DNA, 1021 bp, Aquilegia coerulea
  Intron number 1 from transcript AcoGoldSmith_v1.017156m (l ocus AcoGoldSmith_v1.017156m.g) derived from phytozome v7. 0 (chr-ID scaffold_5; pos 4611624 to 4612644)
accaagccgtaacattcggtacaagcttttcaagggtatgtactcatctggtatagatccactcatagtacaaaatatcgttatcgactaatgtatcgatctccaaaaaatagatatatcgggatatattggaatctatcggtggatattttacatggaatgtatcgactaatatatcaatttgttatacaaaatatatttaaaatcaaatttggaagtatattttcatagtatttacctaaaaaacatcatatctactaaaaatagaataaacaaattatttctaaaaaaaaaaaatttgaaaaaaaaaaatatttccagaaaatttcggaaaatatcagtaaatatcggaaaatatcgaaaatatcggaatatatcgaaaaatatcggtcgatattttacagatactttaaggcgaaaatttcggaaatatatcgtatcgttttctttgaaaaccgataaatatcacaatatatcgtgatatatcgcgatattttgtactatggatccactaacccagtaacattgggtcctcttatttttggcctaaatccaccccacaccaagggtaggtaaagtaaattacaatctatttttattgccagattgagatatacatatttgatttttaatttcattctttaatacaattggtattatgtgtatctttaatttgcagaggacttaaagtatgcaactgtactcaactggaattttgagtacttaaacactagctcctacacaattctaaagcctgatacatttacaatttgcagggcaaaacaccaactcatcaaagaccattgtcatagtagtttcttcagtaatagcagcattactcctatcaaccattgcaatctacttaggtttatgcagaaggaagcaaacagagatagtttacggtagtatgctatgattattactctttaagaatacacacacaaattttatatggtagatatacaaatttctaggtattacgaatttgtagcatgataattattggtttccatagacaaag

SEQ ID NO: 106269 - DNA, 861 bp, Aquilegia coerulea
  Intron number 1 from transcript AcoGoldSmith_v1.008494m (l ocus AcoGoldSmith_v1.008454m.g) derived from phytozome v7. 0 (chr-ID scaffold_4; pos 9399750 to 9400610)
tttatattgcaagttttactaaatcgtgttcagaagtaagtagtctttctagagatttctctactttcttctagttttgtgcaatgatcactagttaattagttgaatttctattcattaataataatttgtttttagtctatgatttcaaacattacagtaatcatgtcaaggatgtgaaatttgttgaattattagtttgagtactaatagaaggttaatctttgttcacaatgctaaatgccccagttgttgaagaggggaagattaataacttaataagatcattaaaaatgttgcgttttattagaaacccaagctataactttatcattatgcctattgttaattcaaattctgttcattaagtaagaggaatccaaccattcatttgtaaacgaaactttgatctatgtcaagcaaggccaaacaactcatttgggtttgtatatataatgtatttgtggttgatttctttcattttatctttctcaaccttaccctccttactccttagtctttgacatgtacatggtggtagtcttcatcgtattaccccctctactgtaatgtgcggcattttgttggaaacaaatacatgacatttcgagtggttgaggcctctatagaggatgttgattatgtggttttaaaggattgctacacgtttttttattttaagaaatatttcctttagacactgtgtgttagaagtgtgaatggggttctattatgcaagggtataatatttctttgttttttttcttgagttgtttaaactttatttctgataggttaatttgccattttggtatcatttttgcagtatagataaaggtgttgagttagactgtcattctg

SEQ ID NO: 106270 - DNA, 513 bp, Aquilegia coerulea
  Intron number 1 from transcript AcoGoldSmith_v1.024793m (l ocus AcoGoldSmith_v1.024793m.g) derived from phytozome v7. 0 (chr-ID scaffold_4; pos 7367455 to 7367967 reverse stran d)
ttgcaggtaaactaatttatctttaaattcaatatctttttagtacactctatatacagtttctcagtcataacgtgcgttattggatcttaaccaaggatctaaacttaaaaccatttggagtcagcattgggataatgtgatttttcacttaatttagtatttttagaatattagcatgaagattatgtactgagaagggtacttaaatttgtgtgtattgccctagcaaagttgttgttctgtagcagttctgtctcaaggtacaatttatcaatttagattataattttgatttttgaccactaaacattggagtaatagatctaatggcctcttttcggtcgggttcagataatttctgaatcaaacatacagtgaaaggtttaatacatattcaacttagtattcccaattaatgataatatataagcattgtttaatggattactgaagaattaagggggtggtggtgcagctgcagcactcctatctctaaagaatcattgggag

SEQ ID NO: 106271 - DNA, 982 bp, Aquilegia coerulea
  Intron number 1 from transcript AcoGoldSmith_v1.012266m (l ocus AcoGoldSmith_v1.012266m.g) derived from phytozome v7. 0 (chr-ID scaffold_4; pos 8814643 to 8815624)
cgttcgttctcttcttcgtgtctgcaactcaaaaggtatgagttttcttttcttctcttctgtagggtttttcttcaaagatttttttcgttttaaacttgatttagggttcttaattacatcttctagtgtttttatttcgaaatttcttcctgtattttgcttttttatgtttactatagttggaatttagttataaaattagggttttgctgctttcgttgaattagggttttgaaaagttagtatcttgatcatgatagcttagggtttaagattccagttatttaacttagtattggtggattgtgattcttcaaagtatgaattcagctgaaaattttgggttttattttattgtttgattttttgaattgggggttttgagtgtttgagcttggtttttggtttttatacttaaatgggaggacttttgttcatagatttctgggtttgatcgaggctatagactgcaggttactgattacgatgttagggtttgtgtttactgttgatttattgttcaattgggttgcttctggagtagagggagtatgggatagatacatatccactcaagtaacttgcgtaactgtttggatacatagtccacttgttaattatgtttagtttgatagtatgtacttcattgattatatgatgaaacgcatggtggaaatacataatagtcgaaatgaatcacaataacatattattcctgatgtaggaacagtatgttttagttatgattttcatgtatgttgtaaatggcttttatggtaggcttaatttgactactaatgactactaaatgatcttatatagaatctactaattaaattacgttgattataagtgattaatgggaacagcacactatcagagggtttttgtagtatgttatgtttcatgttctctatcacttattgatttctctacatgttggaacagttattcagaaggaaaggattcaagtttaacc

SEQ ID NO: 106272 - DNA, 656 bp, Aquilegia coerulea
  Intron number 1 from transcript AcoGoldSmith_v1.022221m (l ocus AcoGoldSmith_v1.022221m.g) derived from phytozome v7. 0 (chr-ID scaffold_14; pos 2642360 to 2643015 reverse stra nd)
attataaataaagattttcaggtatgaataaattgagtgatttttcatttcttccatgtttttttctctgttcttcagcattgttgttggcttgttgaatataggttgggtagaaatttaaaatgtattggttggtcactaacattataagaaaagttagtaatattagatccagttagatattagctatgtctttgatagttccgtagagtcttgtctttgtcatgtaaagagtaataaagacaccactcagagaaagattaacagtctaataatttgtatcaattggaaaataggcagcagcagtagttgagaaaatgattctgagagctatatatctattattgatattttagtctcatgcatccctttcaaggtctaatttcatatattcagcaatattaatattaattgcgtgatgcacaatgaaaattgttaccaatttttccgctggattttttatcattgttgccctaccacatttatacttacaaagtcatctatatgatttatttttatttttatgtaatttgtaaaccgggatactacgcaaggccaagagtgatgtacagtactttgattacaatccctacatcttcttctcttgaaatattatgacttagctgtaaattttgttgcaaaaattttggcaggct

SEQ ID NO: 106273 - DNA, 740 bp, Aquilegia coerulea
  Intron number 1 from transcript AcoGoldSmith_v1.003408m (l ocus AcoGoldSmith_v1.003408m.g) derived from phytozome v7. 0 (chr-ID scaffold_17; pos 677352 to 678091)
ttgctggtgctgctcttgcttatacgcttggaaaggtaataaacctaggaattttcatctcaaagttgcctagattgtctgatttatcgaggatgaattgttaattgtgattgagttcgtggtgaattctcattgatttgatgtttctgaggatcttttatctttgaagatgaatattatgaatctgattttcatgaaatcaagtttttgtaggcaaacttgaaaaggaaattagtagttcaacatgttttatgtattaattattaattttccacttttaggtttgtttttggtgtattggtcataatttgtgttggtagatgctacagaatcgatatgacatggagtcaatgcaaaacacatgtagtcatgtctggtactctggtctcaatctagatttcagtttctaaaatttaatctccttgatcaaacagagtaactttgcatttgtcgtatttgaaacttcatagtggtggactggtggttgcctcagttaagttattcaaattaagtttggaagtaatttgagatttttatccataattgtagtttttggataaaattgaataagtttttctctcctgctgttgtgaataggagctggatgtagtgatttatgtaaattaattttgtcgtagccatcatcatgaaattttctgcttatacatatttgtgaaaacgtttagttacatattcaaagaatttcaactgtgaccttatacaatgcaattgttttcagg

SEQ ID NO: 106274 - DNA, 456 bp, Aquilegia coerulea
  Intron number 2 from transcript AcoGoldSmith_v1.002043m (l ocus AcoGoldSmith_v1.002043m.g) derived from phytozome v7. 0 (chr-ID scaffold_5; pos 7682571 to 7683026 reverse stran d)
tggaggtaagtaatggtattgttctatgttttaggatttttgtcaaaaagaatgttctcaggcatgatggtgtaggactaaaagataaattgaatgttaaaaggttcattgcagtatttagttccattttggcaacagatggtttagatacatttcttccaaggttcaatccaacagtacgggtaaatgtcagtctatcataattcataaccagtccttattgacgtaaaatgattgatttaagatgacaagattgctatacatctgtattattgatgaatgtttataaatttgtcatgatatatttgatttttgaaccatgcatcacatcattaacactttttagcgagcaaactaccttttctgtggttcttattgtttgttatcctatttcagtacagaattccaaacttgcaaattctgtctttactcactccttgtatgctctaattgcag

SEQ ID NO: 106275 - DNA, 233 bp, Aquilegia coerulea
  Intron number 3 from transcript AcoGoldSmith_v1.015934m (l ocus AcoGoldSmith_v1.015934m.g) derived from phytozome v7. 0 (chr-ID scaffold_33; pos 2389784 to 2390016)
gtctatcaagtaagttatattacaatttacaaatatgataaatgtggctttttagtttaagagttatttttatggttattttgattgctttaatgtattactagttactttgattttattttcttccacatttttttccacctctcaattaatttcgttttttctactgtttctgttgaaatgcctgtaattaccgagtttaacacattttgactactttcagggacttgtcg

SEQ ID NO: 106276 - DNA, 761 bp, Aquilegia coerulea
  Intron number 1 from transcript AcoGoldSmith_v1.012694m (l ocus AcoGoldSmith_v1.012694m.g) derived from phytozome v7. 0 (chr-ID scaffold_4; pos 3697262 to 3698022 reverse stran d)
gtcctgaaccaaacattcttgaccctgtaagcaaattatacttgttgggttttctttctttttcttttgattcatgttttcttgcaccaatcaaactattcatgaggttttgttgtgatttcatatttatatatgtggggttaatgggttttgctttgtttgaaatcttatggtctttgttggattattagatgaattcttaataaaacttgggtttggggtttgttctattttttttttaagttatttatgatactttatttggggtttagagtgtttagtttagtttagttttgtctgataatatatttttagggatttggttgaggagatagattgagaaagaagaaaagggaaactggaaggagtgattgttttaccttttctctaatataacactaataagctagtttagaatgttgaaccacactagaattgtagtatacaacttgtgaggctcaattacatcttgaaaacatagatgtttttgatgccatgaatttctttctagggagtactagaaacaaacatgagacatttgttcgattatcattttttcggatttcctatcatgtataaataagtagccaaatagggtgcctcatcaatggacatgtaggaaaatgctaaagaagcatataggatgagtggaagtatgttctaaggtaaaggagactttttctgtaatttcaccctccatctgctacattaattaagatatggaatccacttctgttgttgctggctccatcaacaagaaa

SEQ ID NO: 106277 - DNA, 553 bp, Aquilegia coerulea
  Intron number 1 from transcript AcoGoldSmith_v1.017110m (l ocus AcoGoldSmith_v1.017110m.g) derived from phytozome v7. 0 (chr-ID scaffold_4; pos 4300689 to 4301241 reverse stran d)
attttcttctccgttttgagaagggcttacgaaatgtgatgggagtaagaaatgatgttcaacaataatacaaagggagagtgtgtcattgttgttgttgagatcgttgtttttttgttgttttgttagtgttaaaaataatactcatgtccccctcagggtgtttgtgtcatctcagttgttgagatcgttgtttgtgtgttgttttgttagtgtcaaaaaataatagtcatttcctcctcggggtgtttatctcatctcaattgttgagatcattgtttgagtgttgtttttttagtgtgaaaaacaatactcatgtccctgcaggtttctattacttattttttttttgcaattctatgtaaaagctcccttttgtgtcatgtgatatatttctgaatcaagaaaacatgtatacaaagaatctaaatgcgattaatggtatttttctcattttaagtaagaattgtatttctgaatcaagaaaacatgtatgcaaagaatctaaataaatgttatctagactataaatttagtcttaacaaatccctaa

SEQ ID NO: 106278 - DNA, 879 bp, Aquilegia coerulea
  Intron number 3 from transcript AcoGoldSmith_v1.010719m (l ocus AcoGoldSmith_v1.010719m.g) derived from phytozome v7. 0 (chr-ID scaffold_76; pos 539043 to 539921)
ggttatcttgacgcaatcacagattaaagatctaggtaattcaataatttggacatctgtattatgaatttgtgattatggtgttttataaatacttgccaccaccgcaccacgtttcgtctatatgttgttactacttcatatgtcatatacatattaatctagtgacaatgtacatatgtatatggtggaattatgccgcttctatttctacactgaggaaacacttgcaactttggagaatggttgatcggtaattttcagttgtaatgtattagtgatggctttacatggttgctgtatgtgcactcgttgattagcccgttgatggtgtcacattagtaggtgttctaagaagtaagaacatgcttgatgttgttgtgtccgtagcacacaaacagtttgttgttttgcataagtgaactattatcatagttattagcaagcggcacaaaagtattcttcaaccttcaaaatgtgtatgttaaacagatgaaagtaatgattaatgcatctttgactgttcaaaactcaaaagtgctctccagtccagtttcatggctaattttatcactctttctcctcatttcattaccttgacttcatgatgattctgctgctttcaatcttagcctctttggatgaagtgtaggacattattcaaaagtttcacttgtatccttgtttttgtttgtaattcttgatgatttgtacttcttttcattgtcctcgtgtaatgtttactttcctgacatacaagccttttggtttttctctttagggaaaacccaaggaatgtaaggtttgtgttttatctaaaccctaaagttgtgtgtctgtgcagggaaaacactggaaggtgatcaaccacaatttgct

SEQ ID NO: 106279 - DNA, 912 bp, Aquilegia coerulea
  Intron number 3 from transcript AcoGoldSmith_v1.010953m (l ocus AcoGoldSmith_v1.010953m.g) derived from phytozome v7. 0 (chr-ID scaffold_4; pos 7496478 to 7497389 reverse stran d)
gaaagatttattaagtttattaggtactccatttaacccttttaatgatttttccttgtcttctttctcattgttgttgctttaactctaatatctctgaatctaaatatcttaaataacgactgcgttgtattcaatagaattaatatatattacagaagatgtatttgtcagttatactgcctttatgttgaaatattggggatccattggatttctttttagaacctattagaaactattaaataaatgtgtaaattttgaaatttcaaacatgcattggaatttaccataatttatgtgtcagtatatttcattctgtgttgctttcaaggatggaaaatttctatgctgtgttttcaccttgttgaagcccaggcacttgataccgtgacaataacaaaattgagaaataatggttatgcaaatattttagtctaagcctctaaggttcggttagagaaaaaaaaagacttttcattaggctaaagaatcgatggactcaatcaaatttaaacaataattgactggattggagttaatactcaataatgaagaccctgttccttttttattcttctcttgcgtgaatagccagtgcttcaagatcagaggtgtctgtagaggtagtggtaaaggacgagttttcgactgtggggttgcctttcattgaataaacttagtgctcactatattatatacgtgcatatcaatttagtatcacctattttattcctcttcttttctatagatgcaggaattattaaattataaaagtattcaagaatgatttgtagataatctggaatataagagcaaagtttcacatgcctcgggacgcagtgtatgttttctctaattggtatcgtttttacagtgaggtctttgcaaattctcccttcttcatttcag

SEQ ID NO: 106280 - DNA, 885 bp, Aquilegia coerulea
  Intron number 2 from transcript AcoGoldSmith_v1.008879m (l ocus AcoGoldSmith_v1.008879m.g) derived from phytozome v7. 0 (chr-ID scaffold_17; pos 1835780 to 1836664)
tcttcaggaaggaggctgccctgcaacaaagggaggtaagtatgattgacaccctcttctcttttcgaacatgtatggaagattcatgctcacttgaataatcatcatggaattgaaatacgaacacaatgacgaagagaaatttggaagggaccttgtctccttaagaaaatttcaaggataaggtatgcctggtggctaaattccggattacactcttttcaccctggaaatgaacaaggctagtcctccattaaggcagacaaggccccatattatgtcacacaaagtatcaagtacttagttatatatagcagcttagcatattatatgtctttacccaatctgactgaaatagcatatcatagatatatggcatttcgtctgcagttggtgaaaatactatgttgtacaaattacaacaaatcagaaaatttgtaaaacttctagaatatcaggagatagcattatatattggaagttcctgcaacttcaggtaatttgtagaccaaattgagacaccttggatatgtaaaatccacattggagtatattgtcaatgtaaaattgaaatatatgaacaagaccgttttaaactttcagtcacataatgccagcaatttttgcagatgtttttttgaattccgtttttatccttaaaataaaatttcaaaaaaaaaaacaaaaatccatattcatcattgaatcacaatataccatagcttaatgaatgtccgattaattggattgattcaatgttttgacttttaaccaccaagcactgtatgcatatatttatcccagcaaaaagattcaagattaaagcttcgttgctatgttttcccctcatgttacaggctgctttgaaagctgcaacacaaaccc

SEQ ID NO: 106281 - DNA, 447 bp, Aquilegia coerulea
  Intron number 4 from transcript AcoGoldSmith_v1.007467m (l ocus AcoGoldSmith_v1.005924m.g) derived from phytozome v7. 0 (chr-ID scaffold_17; pos 1711789 to 1712235)
tgctcgcgtgggagctgttgactgtatgttaagcacctcaaactgacaattaatctctttgaagaaagtgaatatgatttacgatgcataagatctacaatattctccagtcattttttcacatgtcccagttttgtagttgttagtacctttataatttttgaacgtacattattctacattcaacttgttagtcatattagttgggttttaatcgtgttaagtgttaactcatgtctgcaattatgctaatgcatctgactgactcctgaagttcagctgtttgtatcttattcttaagtcataacatattttgatttgaataggacgtcatgacatttatcagattctgatattatgtatgtgcatgtaagattagttgggtgattcctttttaacctccattataacaagcttttgtgttgtgtatacaggtaagaaggcttt

SEQ ID NO: 106282 - DNA, 437 bp, Aquilegia coerulea
  Intron number 1 from transcript AcoGoldSmith_v1.009748m (l ocus AcoGoldSmith_v1.009748m.g) derived from phytozome v7. 0 (chr-ID scaffold_17; pos 4376782 to 4377218)
tgtttcaaaaagattctcagcggaacaagttctaagtaagtatttttcagaatgttcttccatgttttttaggtttttggtttcaatttatacaaattattagagtcagaatgttgtcacttagatctttcaatcatataggttcaaaagacatattctttgaggttaattgcaattttcattaacagtagtggtataaatttttccacaattgaaatgtgaaaacgcaaaattgcaatgtatttgcaaatttgtgtaattatttattgtattttgtctagattcattgaggttttaacatcgcaattaaatctattttgagcttgaaatccagaatcttttagaatttccatattcaatgttcttagtacattttcatttgagagatactttgatttagtaactcacaaacgtctcctttgatttacagggcatcc

SEQ ID NO: 106283 - DNA, 414 bp, Aquilegia coerulea
  Intron number 3 from transcript AcoGoldSmith_v1.004902m (l ocus AcoGoldSmith_v1.004902m.g) derived from phytozome v7. 0 (chr-ID scaffold_20; pos 1745598 to 1746011 reverse stra nd)
gagatttaaggtatgcttcaattttatttattcctaatatagtaaaatgtttgactttattattatgatatacaaggatcactgtttctcccctttactatttttaacaagtggtgaaaatataagctataataaaaccataatatgcttgtatgaagttgtcagaatatcataaatatgaataccctttcgaaaggcataattttcaatgctttttatctgagtctaaggccgtgtttggtagtcctttatgaatcactgttctaacacactacaaatttgcatagttgggaaatgtgtaactgtacatggatcactatctcgtttatcttcaaactgatcatggttgccaatgtatgttttactctttattctccaggttttgctgtttctcatctggggttttagttgctg

SEQ ID NO: 106284 - DNA, 541 bp, Aquilegia coerulea
  Intron number 1 from transcript AcoGoldSmith_v1.002079m (l ocus AcoGoldSmith_v1.002079m.g) derived from phytozome v7. 0 (chr-ID scaffold_76; pos 767232 to 767772)
gaaagaactgaaacaaagaataatcgattcgacaggtaaggatcatgttcatctcaagctcaatctgtttgtaaatttttttattcaatttgactattctttcattttaaacacttgttttcaacggaatcttgttttggagttgatctgcattgcttgttagttctgttttcgttcttctgaaatggttcttttctctctctatactccgattctaaacacttttttcgtgattgtgaatttcatttctgttcacttatagaattaaggaaagcggtttcgttttataaatatggaatctaaattcctgggccgattgtaaattagtactcctataagtaaatagtacttgtatacccctttcttcccctttcaaattccgggaaccaaacacagcatttgatcatttaggttttgtgatcgtgttattagtactctttcttagattctatgatgttgttcaatatcttaactaatacttattgtgtgattgggactggttgcagataggtgttaaaatttcgaaggagtctctaccttc

SEQ ID NO: 106285 - DNA, 1035 bp, Aquilegia coerulea
  Intron number 2 from transcript AcoGoldSmith_v1.002079m (l ocus AcoGoldSmith_v1.002079m.g) derived from phytozome v7. 0 (chr-ID scaffold_76; pos 767754 to 768788)
cgaaggagtctctaccttcagctccaattgaaaaggtatattaattattgacaagaatgaaaattttatagtgttatatagcttgcgaacctctgtgttacatgatattattgaagttatcatgttgtcagcgtgaactgattatggaaaggaacaacgttatttaaatgaactaaagaaatgttggttgtaaaactaaagaaacacggtttctttttctagttgtaagatacatttcctttttgcatttattataattttgcaacataaatagaaactttttctttgccttagcgttaaatgcaaactcgacttatctttggttgttatattaggtgttatatccttgatgttgcattaatgcagaaggacagttgacgtctttttgttataattaaggtttgttgccggtttattgataaaacaaagtacaacatttaggaggatggttgtaggctcgtagcatagaaccaacggtgtatacatgccccatattgaaattgcaaccgaattttaaattgtttaatttatgtcttatgactctttgtggtcaaagagacattttaaatcaaacgtttcctgtattttgcacaaaagatgtttctagggtttggttcagtgcaacaatttttattttctagaatcaatatatacaatgtcgtaaacggttttgtgtggtataactctgtgttagattcctttgaaattcttagagtttcgtgcattttttatgtttatgtatttagttttaactctttcaagcatgctaattttagacttaaatagtgttgaaatcagttttgaactgctaacattctagatcattgtccttctattagctacagttgacatatcagcatcatggttctttccttcccttccatccttatcaggaacttttcaactttatcccttttttgtgtgatattctatctcaatttttttaataattaaaaaatgataaaactgtattaccaatcaaaatatttatatcactgtgttaatctgtcttcagttggttagaagctgctagga

SEQ ID NO: 106286 - DNA, 921 bp, Aquilegia coerulea
  Intron number 1 from transcript AcoGoldSmith_v1.008832m (l ocus AcoGoldSmith_v1.008832m.g) derived from phytozome v7. 0 (chr-ID scaffold_4; pos 9104456 to 9105376)
tctcctttacaaggggtttcgatttatcacttcaggtattcattaatctctctctctctctttctctgtgcacattttttttttctcttaatttgttgatttaatacattgtgaggaaggaatttaacccaaaaattgaagggttttgttttgttttgattttgggttttgagtatatttagttgtatgtaatgttgatatgatttttatgctagtattgatcactctgcataatgtcattatatgtgttcactctgattgcattgtggataaaaaacatttcttttcgatatggctggcgagtggcgatagtgaatttttcctataatactgcttactctcagtctttttaggataatttaagccttgtgccccagcgcaaaaattggatttcggctaaatttcaacgattacacaaaaatataataataataatattcggaatttggaaagtaattttgaagctttatcgaaacttattacctatatcttgttttagggtttataacgtcaatacttttggaattttagtgttaaactagtacaaaaagcttagcattttcacctgggattggttattttcatgtataaatcctgttctgataaagtttgaatctaaattatcgatgcatatacatgcggaatattgtaatgcatgcctctgtcacattgacatataggaaaggcatgggtcatgattcaggcataccgcatactgaattgaaaatcaagttattcatggataaatgttgtaagcacatttagagggatataattttgtgtttctttgtgtggttgagcaatgccaataggcatgataaattttttggtatagataattgttatttttttatttttaatattctgccctgcttgcttttgaaagctcacttaagatctgctgaatatttctttcgaagt

SEQ ID NO: 106287 - DNA, 383 bp, Aquilegia coerulea
  Intron number 1 from transcript AcoGoldSmith_v1.007156m (l ocus AcoGoldSmith_v1.004586m.g) derived from phytozome v7. 0 (chr-ID scaffold_5; pos 2616852 to 2617234)
aatcggtgagttctttttcatgcatttggtttgctcttttttcttcttgatttttttttttgataaaattttattattttcattagggttagagatattattttttctacttatttaaactgttgaatcaatcaaaaatcaaaataatcactagaagtttcatacataaaaatttgggtcatttcacatacattgaaataaaatgtgaattacactaggaagaaatatatagcaacttttgctagctttttttttcttttttttttgtaaaggttggttgaagcgccgacacttaaattgcttgactgtatgtagcaaaaaaattatgttgtttgttttttcgtgcaggaatttgcagcgttagggtaaactaaactatatag

SEQ ID NO: 106288 - DNA, 845 bp, Aquilegia coerulea
  Intron number 2 from transcript AcoGoldSmith_v1.015506m (l ocus AcoGoldSmith_v1.015506m.g) derived from phytozome v7. 0 (chr-ID scaffold_17; pos 2715349 to 2716193 reverse stra nd)
ggatacagtattttttcttcactttctacctttttatattgatttcagaataatataattttctataaattcaacattctagcaaagttttcccacaattacaattttttttttttctaataagtaggcattttccaatttttactcttcaattgcccaaaacctgtaaactttgagtttcttgtgaattttggagattgagataatgggaggtgatggataatataaaatgtaagaaccccagaacctcaatttccccgattcttggttgatagttttgggttggaaagtgttatgttgtgcttagactgaaatttgaaacagatggttttaaattttccagacatttgttttttcaaccttccaaaatgggatgcccatgttctttaaggatcagggcataagctttatataaactagacaaggacctgaatggtagagtaacattcatccaatttcccacgagaaactcaaatctactcatttaatgcttatacaacaattggagatagcaacttagcaagtttagttataggttgtggaaactaccacgattttaaaaggtaatctgacagtatgccaaaaaaaaataaaaaaaaatgttgtggtggcttcgtaaactacatcttttcttattgtgattctattctaatgattattgccttattattgaaagaatttttttttttacttttttctatataattagatttggtttcatttagttcatcattatcagttctatcttttcccaataaagtacacttctttagcttggcacaattgttagtggcccatcaatggtaaattgatgcttgctttcttgtcttcaattgattgtagta

SEQ ID NO: 106289 - DNA, 438 bp, Aquilegia coerulea
  Intron number 3 from transcript AcoGoldSmith_v1.011114m (l ocus AcoGoldSmith_v1.011114m.g) derived from phytozome v7. 0 (chr-ID scaffold_17; pos 2767761 to 2768198)
cttattttcttacaggtgattgttgcatttatttttttcaactttttttttcttcttgtatccagtaagaacatgtctagaaaaaatatattggttcttccaagtattgctcgatttttttttttatttaaagctaatagtggcatcataataacttttttttccccatctacagctcatgaatttgaattataacttataagaatagtaaatatgcaatgacattcttattccttatttaatttctcctatcaatttctaatccataactgatgcttcaatttcagactcttattgaatgtttatttacaatttattagctgaccagttggtaattatacaagtaatatttatgttgttcgaagctttatatgctggtataaaccaggtaatgctgaattttgttttatgcattagggaatttcacatcgtcaattt

SEQ ID NO: 106290 - DNA, 1002 bp, Aquilegia coerulea
  Intron number 2 from transcript AcoGoldSmith_v1.005132m (l ocus AcoGoldSmith_v1.004010m.g) derived from phytozome v7. 0 (chr-ID scaffold_38; pos 139129 to 140130)
ttgtaagtattttgcatttcatgaatagaattatactgtacatgtcacttttgggcatgggcataaatcttatattccactatgaagtgaattctggatttttgtacatattcaccaattttttattttttattttttattataaatcaaattttattgataagctcaacgaattacacaaaagtagaggacaaacgcactacaaactgtgcggcaagtcctttctggatagcaaacccgattctcctaaatacatattcgttcgaacctgcagtcatcacgttgctatccattatcttctgcactctcctgaggagctcaactgcttctgagcctagcaatccaaatgtgtcgattaacagagattcattttttgtttctcgataaaatcggtggataaatttcttttttttttctctagtaaactgatttattttagtttggtaactttatcaaaaaagagaaaaaagaattctcagcatagggagtgaagatcacagcagtgattttggatgagcgtggcaatcaaaacgtaagcatcatgggcccaataggtttctcatagctctgcagcccattcggaaaccacaagaacctggcccacaatccatagttaatacctattacctaggagataaaatttcgtaaaattcatccgtttgtacggaagagtgtcgtatcgaaaatgtatcgatataaagtgaaatttcgatatatgtcgatatttaagaattcttactatggatcgacaataacatcctcgagatcaaagtcatcatcttgtgtcttcgtaatgaccagaagatttcagaatctcatatctcttgctttattattaggcccatttgggaatattttgtgtttttgtttttttttgttttgttttttttttttttttttcatttttcttgatattgattgattttaatccaaacaagaagaagaataatcagaaatgaatatattattgtgttacgttgcagcttggaatattggtgctac

SEQ ID NO: 106291 - DNA, 726 bp, Aquilegia coerulea
  Intron number 2 from transcript AcoGoldSmith_v1.025477m (l ocus AcoGoldSmith_v1.025477m.g) derived from phytozome v7. 0 (chr-ID scaffold_5; pos 676788 to 677513)
tgggaagtaatgcaaaaacacattttagacaaagtctgattacagtagactttgtttgagctttattttggtactgtacttgaagaatttgatctaacaacctcaacctaacttatatatcttgattaagtaaaagtcctaggagggtgtgtaggacatatttatgtccatcccattaatagtaagaataatattattattatttagtacaaggtctgcttgctgactacatactaaacttgtccgctaactaagaatgtagctaaattcaatttctcagtatatatgacaacaatatatatatcaacccatcaaactagatagacagtacctaccagtctttcttcttctattgtgcatcaattcaacatccaatgaatatatgacatgtgtacttacattttgttttgaaaaatagctcctcaaccaccagtattttttccctagctacttataaataccaaacttgcaaatagtgaatattgcattcaatcaacaactaactttacttgaaaactcctcaagtattttacttagtgaaaatttaagatgggtttgttgttcaagcactcttgtgaagattctatggattctacaagtatgtagtcctttcaaacaaagcaactttctgtttagtgtttaattacctttttttttgtcagttctaagaaaatatagtctaatgagatttacatgtttatatttcagggcaaacaagtctggaag

SEQ ID NO: 106292 - DNA, 678 bp, Aquilegia coerulea
  Intron number 2 from transcript AcoGoldSmith_v1.009019m (l ocus AcoGoldSmith_v1.009019m.g) derived from phytozome v7. 0 (chr-ID scaffold_20; pos 64144 to 64821 reverse strand)
ttgaattccactcagaagaatcaccgtttcatcctgtaagttacataatctatgtgttcttgagtgcttggacttggtttgtttgtgtgaatctcattttgttgtgtgagtgcatgcatccatttccagttcagcttctttacctgacatctgtgttgcaattcttggtgagataatagtcttgaatatgaaaatagagtattgcttcaatatatgaaatatatatatttcactagctcaaagaaacttttatgtcttgaaattattgaaagtttagtggtctatctaatttggttctgcaagagagtgtaagtattagacatactctacacagagactaactcactgttctaccagtccaacacaaaactgagttgaagaaaattttagatgatctaggttgttgacgagggatctttgggagacaattgagacatttgtatgtgttttagctgtgtgtttgttagcgctttttttttttttgcttagtatagctagaaaattacccaggtccatctgtcgtgcctttgggtttttgccttgttctgaaaaataaaatatagtttctctcttagtctatctgttttgctttggtgaagctttataccaggacatggcgaccatttttttttatcagattttatgacaaaaaattgaaggcagaactgattttgcagg

SEQ ID NO: 106293 - DNA, 577 bp, Aquilegia coerulea
  Intron number 1 from transcript AcoGoldSmith_v1.009019m (l ocus AcoGoldSmith_v1.009019m.g) derived from phytozome v7. 0 (chr-ID scaffold_20; pos 64840 to 65416 reverse strand)
caggtaatttcatcttgctattgttgtttgttatacactcttgttacttgaaaattcttaaaatttaattaattatatagtatatttacagctgaataacagtcaaattaaactcaatttctttttctgtttttatttttatttatattgaagtattattgagtgggtgagattgcatatttgcaaagtattgttaaataagcaaaattggcattcgattatttcgaatttaaataagtaagaattgttgatttgttaaataaaagtaaggtggccaggttctgttcaaattctcaaattatgtaatgaaggaatgaaggggttggagtgtggttgttttcgttgcatcgcacactggaggctgatatttgattgaagtttctagcttgggtaatggcagcataaatttgagtttgaatgaatgaacacctagcacgacctgatgtcgatgaccaactctcccataacactttcttcagaaaaaaaaaaaaaaatttgttatcaaactgatgtttttgtcctaattatttttgtaatgatttttaatgagcaggtggagcctttggtcgcagttctc

SEQ ID NO: 106294 - DNA, 612 bp, Aquilegia coerulea
  Intron number 1 from transcript AcoGoldSmith_v1.004567m (l ocus AcoGoldSmith_v1.003744m.g) derived from phytozome v7. 0 (chr-ID scaffold_45; pos 231438 to 232049)
ctcgttcacaaaatctcccgcttcactaaatcctggtaagtagttttcttttgcattattggtttcaataattcgtgaaatcttttttgatagcaacagtacatttctacttttattttattttaaggtagtaataagtttgaaatagtcaaatatatacaaattattaactctaaacgaattaaattaaggttgtagaaacgaatcatcaatcaatcataattcaggtggtggctggcgacgaataataagcgtggtaaacatggtcatttttatactgtaatcttttacgcagtttgaagtgaaagataacgcggaaagacagataatttagattataaatcggattaaataaatctcctttcattttctaaacgttacaatcaagaaaattaattggtctcaactgggataagctggatatatatatatatatatttttatatacatatagtgagatacatttaaacctgatttcttggcttcagtgtattctacttctacacaaagaaacaaaggtcttctattcatttaaaattgaaattaagatttgttttcttggttagatttaatttataatttactgtattgtccattagaacagagagatcg

SEQ ID NO: 106295 - DNA, 763 bp, Aquilegia coerulea
  Intron number 4 from transcript AcoGoldSmith_v1.004567m (l ocus AcoGoldSmith_v1.003744m.g) derived from phytozome v7. 0 (chr-ID scaffold_45; pos 232651 to 233413)
ctgagtctgccagctccaattattgtggtgccaaggttcgatatgtgtcttttcatgcttttgtcatttttattattgttatctcttcaggacttgtttttatcacctgttacttacaggtcacaaacattgtctttgttcacaccttattttattgttatggtttgaatattgatctccaccaataatattttccgatgacccgacccactaataaacttaatttgaaaataaatacaatcgggttgacaataagtgcgttgatatagtgtttgcacaatactgataaaaattctgtttaggtctcctatgcttttactacggatccaacttgcaataatctttttctgtttatgtccaaatgcattgctcttcttgtattggatacctcaattcttattggccattttggttgaacctctaataatggaaattgaagttgttcagttacttgttttttctttccattactgaagaacctagaatgtctactttcttcccttctcagggcaaggttccactgttgtctctggaggcattacaccatcttcacatattcatctttgtgttagcaattgtccatgtggctttctgcgctctaactatactttttggtggagccaaggttagttggcagttggcaccaaaataattcatctagtagtatatctggctctgctccctcagtttctttagaccatgattctaatgtgggttcttcagtgttctgaatttgacatctttggcatggttagatacgtca

SEQ ID NO: 106296 - DNA, 443 bp, Aquilegia coerulea
  Intron number 1 from transcript AcoGoldSmith_v1.023098m (l ocus AcoGoldSmith_v1.023098m.g) derived from phytozome v7. 0 (chr-ID scaffold_14; pos 213517 to 213959 reverse strand )
gcccaagtaagtaaggagtatattaatatattatgttcttctcttttccttctttcccttttgtctatcttcattgtaatataataatacccttttgaattttgaactcaacttgttgtaatttaatgttggttattgttaggtcatacatcatactgtattttgattttgaggctgaaaacccaaatctcaaatcccttaccctgcagttgcacaacagcacaagtgacaagctacctaccttaattaggccaatcaccaaccaattaaatcagaggagtacaagtagtggagtgtgttctgactgtgtctttcatcctttgaatctataacttaaaacccaccacaccacacaagcatttgtgtttttttcttttctttacttttcatcaccaactgatcctggggacttctttgtatattgttggcaataataggtgggg

SEQ ID NO: 106297 - DNA, 731 bp, Aquilegia coerulea
  Intron number 1 from transcript AcoGoldSmith_v1.025207m (l ocus AcoGoldSmith_v1.025207m.g) derived from phytozome v7. 0 (chr-ID scaffold_14; pos 2787621 to 2788351)
ccttgaggtttgtttttttctatctaattcttcttgtattttgattcatgggatttttttttttatgtagttgtttggttgtgaatgaattaccaaattttgattcatctgtattgctagtcgaaagcatataattgttgcgctgaattaaaacccagtatagaaatgtagttgatattgctagaaatggagaaggtatccaattcctatacatctttcaatatggtgaaagactggaatagcaatctgcgtgtaagggttcattgttcctgtccaatatagcttatacagcctttagttgacagtcttatctgattttggtgagaatggattcgtgctctttattagagactattctgtggacatcagaaggagctaaatgatgaggatgatctccacgcatttgataccataacactcaaatccaagatatatatatatatttctgtgtaaagagacattcaatctaaagtatttcttgtccatatcaaagatgacctgaaagtctgaaactcgtattgttttttttttttaagactcgtacggttatgatgttggatgacaatctattctgtttgaatgcatatgcttccactacacaattttttgtttgaaactctgattactcaagaaattaggtaattgcaggattaattagtccgttagatatgatatatgtgacacaactagtttgactgatccaaattaccttctttcaggtgttcaggtgg

SEQ ID NO: 106298 - DNA, 724 bp, Aquilegia coerulea
  Intron number 2 from transcript AcoGoldSmith_v1.003065m (l ocus AcoGoldSmith_v1.003065m.g) derived from phytozome v7. 0 (chr-ID scaffold_53; pos 1607508 to 1608231 reverse stra nd)
atcaatttcaagattatcttggccgcgttatagtggtaaacatccattcatcatatctaaattgttcttaaattggattagctagataccgcaccatattacacacacacacatttatttcaatgccctcaattaatcatgatgataataaactaagttgtgaaataaaactcaaaatataatgagtaatttttctggaaattcaattcttgaagttccatcgaagaaaaagttcataaatgaggcttttgatcgatctttcggttaagttgaaagaagactctggcctataatattgttcaatttcaatgtgtattggcaaacatgcttttgcatttaactaaaattgataaagtcaatatagatgaataagaaaaatggaacacttaaccaaatctgaaaaactaaataagactgtcaagtttcaaccttgtttaagactaacaagtttttcaaatattcaaaatatcaatccctatacctgtatttgaagtgaaccattccttttcaatccaagcattagaattagatcactagtcactcaaataaggccatagactttgctctttggaccaattcattcaaaatatcacatttacatgacccaccaaaagagcactttttcacatacaaactagtgctactctgccttgtattttctcttgtccatatatagctaattcaaaatttgaaatgtcttgcattccaggagatacaagtaggc

SEQ ID NO: 106299 - DNA, 593 bp, Aquilegia coerulea
  Intron number 1 from transcript AcoGoldSmith_v1.002246m (l ocus AcoGoldSmith_v1.002246m.g) derived from phytozome v7. 0 (chr-ID scaffold_20; pos 2979848 to 2980440)
ttttatcctttcaacaggtattctatttgtgttgtgtttttttctatttccctttgtttttttttttgcatatatgcccatgattactgtacagtagttaaaagaattttatatgtaacactaataattgtatagaatgaaagtttgtttctactctaaggaattaatgggtttttaacaatatttgttcacaaactatgtactgtagtcataattataactgtttaaatgggctaattagcagtatggttgcactgtttagactactaagtagttgccactaaatgcttagacaactgattcaaagaaaatttgaaaacccttaaacaaatagtaataccactccatatacctataagtctataaccaaaggatcggagtaggggaccaacagaacataatggggaagttttgaattctgaacaaaaactttgagtttgttttactagtactagtattaagaagaacaaggtgtcagtgtcaagcataaacaatactcacttggtatgtctaattgagttttgattaaatgtaacattagattattacagacgttgtctcttggcttttgacaattatgtttcttctttcag

SEQ ID NO: 106300 - DNA, 989 bp, Aquilegia coerulea
  Intron number 1 from transcript AcoGoldSmith_v1.016472m (l ocus AcoGoldSmith_v1.016472m.g) derived from phytozome v7. 0 (chr-ID scaffold_1939; pos 1217 to 2205 reverse strand)
acgaaaactcatctacccacatccaaacattgcaggtgctctttctttcttcccatattttcctttttttttgttgacgttggattctactttgtttttgttctttttttctcaactatttggatctaatttgcttttaacataaccgaaaaaggttgaatttttgtggggtttttgaagcatggattgttttagataggtttctaatttttataatttggattgttattcgagaaagaagaagagggaaagggagcagggtaggagtccaatagggaaggctagagggagcagggaaattctttagttttaaagccagacagaccaattgatgttttcatccacccctaccaatacaactaagttttttgtgtcaacagaattaaaggaccaagttggtcaatatcttcccagtattatcaatttaaatcaacattgttattttgaacgatactagtgtaccacgatgtggcaaaaggaggcgtaggaggggagagctgtaaatgggtcgtggtataagcttacacttttccttttgtttaattattttgggtttagttgtatgccacttgatgttgaggcttctacacgatttgctatacgttgcaaccttgtctccactgcatagcaataaaaaacaacaactggctgacatgttgctatatgataatgttagagaacagtatattcttttttagagagggagtggggggggggggatgtgttattttatcgtataactgttaatatgaagtgttatcatatctattcctcttcattatcttgactattgagctagtatatacaattatacagtactcttaagatttagtctgtagagttggacttcttttcagatgtaacattgcttatacaatttcatcagtcatttctaaggccagatgatggatttttggtgatttacaacttaccaatttatatgcatattagcaggatttaataccaacagtgaaatcccagtacaagtc

SEQ ID NO: 106301 - DNA, 590 bp, Aquilegia coerulea
  Intron number 5 from transcript AcoGoldSmith_v1.010312m (l ocus AcoGoldSmith_v1.008616m.g) derived from phytozome v7. 0 (chr-ID scaffold_4; pos 7301768 to 7302357 reverse stran d)
tgtcattggctaaggagggagtcgataaggggaaggtgtgtgttttaataaatgaagtattgttgcaccttttgtaggaaaagttaataatgaacctgattttgcattgtcgaaatacacaaagattactttagaacaagacatcccccaagtgtcttatcttggtttggacttcactgaaaccttatgtttaatcttgatatctgggttgaattgtatattagataacctttgactcggacatttgataatgataatgcaaaattcaaacccttttgcataaatcttttgcctattggatgatgcatcattgtgacatgaagaacggtagaatttaaaacaacttttctacaattgtatgattactgtgatggttgctgtttaaaaccagagagtcggtcagtctctgactattgctgaatctcgttgagttttgattttatgttttttgttgatccaaatagaacatgaccccaacagttcacctcaagtacttaatggtgctgttcagggtacgaatgaactcggtagtctcatatacataggcctcacatcctaatctttttttaccaggtagtagcgattggtga

SEQ ID NO: 106302 - DNA, 919 bp, Aquilegia coerulea
  Intron number 1 from transcript AcoGoldSmith_v1.022759m (l ocus AcoGoldSmith_v1.022759m.g) derived from phytozome v7. 0 (chr-ID scaffold_5; pos 1888567 to 1889485 reverse stran d)
gagcatgatcgagatactgtccaaaatatttacacacaacatagatgtcaacatgacatctaatatttaatttttttcttatttgattagataaaaatactcttaaaccaaacttaattataagtttctaactataaatcaaactagcaattgaagttactaagttccagttgttttggaacagaccacagacaacagagtagaaaaagacagagcaagagggtgaagtagtagtagagtctgggattttcattccatagcgttaacggcacatttactaaaaacatctaatctgaaaaagaccaccttatggcacattttaatttatatactactgtatgtatatatgagaaatgagacaatggcccgtatcaaatttttaggcaaattaatattaatgtcacatgtcattcactccaaattcaacctaacattctacttgaattacttcccctaattaatatgatttgattttggattaatgagaaaacaaaacctctctctctaatctctataacgtagtactgtttaatagttatcactttcatcactgtatgacacatagtttgtccttcttgaaccctttttttttcgtttcacatgtagttttaatttatattcactctttgtgtttaattgcatggttatataacacaagtaccagcaacaataataatcaacaatcaacaacaacctttgtgttcttgattaaaattgttggccaaccagtgaccaccaattttctgtttgagtgtcacataacttataaatcttcgatcttctgtattaatagccaccattactatctctccaacttttgttaaacagtcgtagtagtaatataatactcctttttctttctttgatctcttcgggaaaaaaaaacccgacacaatatgcatagttcatcaactcttca

SEQ ID NO: 106303 - DNA, 369 bp, Aquilegia coerulea
  Intron number 1 from transcript AcoGoldSmith_v1.006676m (l ocus AcoGoldSmith_v1.006676m.g) derived from phytozome v7. 0 (chr-ID scaffold_45; pos 1151190 to 1151558)
gagattctaaacaggttagcagtagtttttacctcaattaaggtttttttttttttttaataagtttcaaattttcgaggagattcttaataattctaaattaaaattaacctcaatttgaatttttcttattagaataagaacttgaaactttaagatgtcattgaatcaatatagatcaaataagggaaatttttttttagcgaaatagagctgaaatcatttttatctggaatcgcaattgtgtttgtaagaggggaattattgtataaatgatgtagaagtatataattgcaaaatatgttattgagtagtttggttctaaatttcttctctgtatgtaattgcaggcattttttggtgtttttg

SEQ ID NO: 106304 - DNA, 695 bp, Aquilegia coerulea
  Intron number 1 from transcript AcoGoldSmith_v1.020021m (l ocus AcoGoldSmith_v1.020021m.g) derived from phytozome v7. 0 (chr-ID scaffold_5; pos 2485393 to 2486087 reverse stran d)
tgaagcttaagcagacgttgctgacattcaccaaagtaaatccttgggcggaaatatatgtttcatgggaaatactcgaacgttgttgattcatattgcattgtctgattgtcctagctgtcttttgaatcattttgtcatgaattttaagctacgtattaagaatagattgctatcactgtatcttttaatgctccatatgtttttgtcaatagatcgagtacgttgatccttttaaattttcagcatgttagtgtaataacctatgtgtaggccttgtttctcattcttcattttaaggcattactttgggttcctcaggtcgcagaaactacagtacacaaggttttgatatggaaagattgttttcataatttcatttctgttgaactattatattatgatcttaacaattatttagtgtgcatttgggcgactacgttaagatatcatagtttgtttagccatgcagattgcagagtgccctgacttctacatccttaaccgtgcacctaagaccagttattctttcacgccggcattttgcttaaaccgcagagttggctccatttttaatagtcctgctactgaaagcaaatcctgtcactttgacaatcataaatattggaaagcggacatatcttgacatttctggagattttgccattttcagaatcgatattttatcaggatcg

SEQ ID NO: 106305 - DNA, 596 bp, Aquilegia coerulea
  Intron number 1 from transcript AcoGoldSmith_v1.011743m (l ocus AcoGoldSmith_v1.011548m.g) derived from phytozome v7. 0 (chr-ID scaffold_29; pos 2214574 to 2215169 reverse stra nd)
ctttcttctgaaatcaaagctaagctaagctaaaggtaagaagatttcacgatcatttgtttctttaacatgtttgaatttgagatttttaaatttcatattttcttgtttatattttcaatttaagaacaaattaattgtttgaatgaatgcaacaatggttgattttggagaaccttcatttttattatagggattcagtttttaaaaataaatgtctaccaatggatctgtggtttccgtcaatatgttgtgttgtgtttaggtttattcaattactattgtgtgtaggatgtggattattaatataggaacagctttgcataccaccagtagtgactagtgacaaacatattttatgcaacttgtttttaaaaccaaacatgggaaacaagcttttttttcttttcaggttaaacaaacacaactaactgactttccctcattcaaccaaacacaccctaagttattcacaatcaatttcatagtttttttgcttttttgttgatcacaatcggaattatttttttctctgtatcatttcttttgttattttttcaggaaaacaaagaaacttaaggtggtgtggttggtgt

SEQ ID NO: 106306 - DNA, 289 bp, Aquilegia coerulea
  Intron number 2 from transcript AcoGoldSmith_v1.026569m (l ocus AcoGoldSmith_v1.026569m.g) derived from phytozome v7. 0 (chr-ID scaffold_38; pos 327010 to 327298)
caaagatccagggggataattctttgctattcaaggtacaataattgcttaattcaatcaaattcttcttcaattctagaattgaacaaaactatatacactataattcagtttcttcttgttgtgttttattatttatataataggcgatgtcgagtacagaagtggaaaatatgaaagtttctaaggagaggtcattgaggacgctccctcctagtacctataacttatctctggtattttcacatggaaagaaataccgtgatcaaacattttgtactctatttga

SEQ ID NO: 106307 - DNA, 787 bp, Aquilegia coerulea
  Intron number 1 from transcript AcoGoldSmith_v1.020510m (l ocus AcoGoldSmith_v1.020510m.g) derived from phytozome v7. 0 (chr-ID scaffold_17; pos 4775424 to 4776210)
gaaggcttgttcttttgttgttggtatatatcactcttcactcttcacttatctcttaactcctttttcttcttctctcttttctgtggttgtgctgctccaagttcttagtcctatctcatgatttgttggctcatatcccattttatatttcatagtaatatatagttttgtccatactccatatgcatcacagtacataatatgatcatcttctttcatttgttgtcactctcaaatcttgttgtgccctgaatctttgtttctgacatattgctgaaagttgaaaccaagtacctagaccattttacaggagtttgaactttgaagtgtttggagaatatttgatggaactagaaaaattaatgaactaataccaaaaccgtttggtagaagagtttgatcaccattcttctttcattttagtgtgctatcaccaggattttctatatacacgttaacacgacaatttgccatatatgattatattctatgcatgaactcatcaccattttttcaatcaaaatagaaaatttaccttaatcatcacgaattagagagcaactagaattaagaattgataatggaatttatttattaattatattacaatgaaagaaacatctcatgtgcgtcgtatatgttcacatacaattcttcaacaccctgaccttatccactcacatttatgatactgttgtactgatgatccaatatgcattcatggcttttctttgtaaatgaacctaatcatattttctttccttttttccaatatatatagtat

SEQ ID NO: 106308 - DNA, 731 bp, Aquilegia coerulea
  Intron number 3 from transcript AcoGoldSmith_v1.004806m (l ocus AcoGoldSmith_v1.003733m.g) derived from phytozome v7. 0 (chr-ID scaffold_76; pos 413470 to 414200 reverse strand )
gaaaaatacttccagaaggaattggggaagttcaggtatgatttcttaataagatttagatatcttttaggtacttgatcggaattgttgatggtttgattctctttttcattatgagtttgttgttactttgattgggatagggagttacttgttcgaattctctatgttggaccatttccatgcaaattcggcatgtggttcccagattcataatgcacggacaaagatctactattagaggatccctcataggggatctactaggttgaattcttaggcctccttttttcaacttttgagattaagcaagattcagtatccactgtttgctaccgatatatgacctcggttatttttacctttcaaattcttcccagataatttttaaggtgcagtaaatgtattctacattcaccaaaactttctcaaactgtcttgcatactggaatctggatttacttaatatgaaagtatctaggaaccaaggtatgagtgggacgagtaaaaatttggggagcgggttgcggtccaaaactgtgttccgattcattatgtaactactgacatgatatgatgatcatgttccctcacaagagtacaagactgtgtttttctttaaaatcagttgtggcatcaatcagttatcaaataaaatatgctacttttgttctgtaattcagtcatccctgagaaacatactattcttttgttgacaggaaatcattgac

SEQ ID NO: 106309 - DNA, 680 bp, Aquilegia coerulea
  Intron number 2 from transcript AcoGoldSmith_v1.004806m (l ocus AcoGoldSmith_v1.003733m.g) derived from phytozome v7. 0 (chr-ID scaffold_76; pos 414263 to 414942 reverse strand )
caggtgagattttctttaggaacctgtgtatatcattttagggaggtaatcggggagagagagagagactggggtgaaggagtggatgtttaattcatgtattgaataattttcatccatctgctcttttttctctatttgcttagtaatagttaaattaggactgtcttagccagaactgggcttacttcatcttcaattagatgcaaattttatagacttggggtttgtcctaagatatctgtggagacttgtgtttcagttactgacttcgtgtttatacccaaatctaatactgtaaaaggaaatcttcattccaactattgtacggttgtaccttcttcaactgtctggtttttctttttctgctgaacttctgtatttcgaatattgaaatatcttatgtgttctgtttttagattttctgataataagtaggtttgatgtgcgacattgatgcctaactatattgaccacatcctttgttctttgacttttgcatacttaattgtgttttttgttggctgattcagtgttgttttttgagttaccaaacaattctgttgaatttcaatctaatatcaaggtcaagtattacactatccaatatgttttctcataataattggttttatcctttctcaggttcctgccccaaagagaggtgagattgttagaca

SEQ ID NO: 106310 - DNA, 654 bp, Aquilegia coerulea
  Intron number 1 from transcript AcoGoldSmith_v1.018490m (l ocus AcoGoldSmith_v1.018490m.g) derived from phytozome v7. 0 (chr-ID scaffold_4; pos 4654110 to 4654763)
gtccattcctaaactgactgtaagtaacataccaggtatgatttacagcctttctttgataaggaactgaaaagggttatgtaacaagaagatatcatatagttgagaccatgaaaaaaactttgtactcatagaaactttaaatttgcaactagtctctacattctttacataagagcaggacttaatattacatgaagagtagactaacctgttctcactatgtgatatcatacaaagtcattgtatggactgtaggaaagtgattcatgtgttgttcagaaggacaagtccttgccccagatactttaaatccctgctagattttcaacattaaaagtacttttaacgcttatacaatggaaaaattgtaatcaaatactatagcttgacaataatatggaaattgaagaaaagccaaaaaataaattccactggtcaagataatatcagattctgagagcgctttagtagtttttttagtttctttatattcttgttcttttgatggaaatgtataagttgatactttctcctttaagaagtgcagacatcatttcccttggcacaaggcatccaactagtttatctaaaactatactttatgcatatgttgcagtgctaccttgcttctatatctatccccaggaggag

SEQ ID NO: 106311 - DNA, 794 bp, Aquilegia coerulea
  Intron number 1 from transcript AcoGoldSmith_v1.010948m (l ocus AcoGoldSmith_v1.010948m.g) derived from phytozome v7. 0 (chr-ID scaffold_4; pos 3268006 to 3268799)
gaaagtctcttttagctcttcgcacgagacaattggtaagataacaccaccaccaccaccatcaccatcatcttctctcttatctttctctttctattgatctcaacaaaccttaccataaacttctttcttttttattgattcacttcacttctctctccttgaatcaatttgtgaatttttttgatgatttgttgtatcttatatcaagttttaggctaaagagaaatgtagatactgagattcatacaacagctaaagttaggtttggggttaggttaacaatggtgattaattatgggaaattggatttagattctttcaaattgtaacaacctatctaattttcccccaatcctggtattcaacatacccaggaaaattttgatttgcaatgttttgatttattatttgtactaaatgtggatattcttttggattttggtgtatattgagttcaatgggtagtatgtagtggtataatggattacaatttcatttcccggaatttatgttatggttatttactttgaggttgcacattctcgaactgttaatggttttgtatgtttgtttctttaactctttaaggaatcaagattccttttattagattgattattttgtgtggtttttgggttcctttcggttggatgagcttgttgaattttatatggcgcatgtatttgatttttcttatgtttaaattatttgttttaaggagaaaaaacaagatttagtatgtaaaatatggaagtttgatagtttcttccttttcttacagactgcagggc

SEQ ID NO: 106312 - DNA, 574 bp, Aquilegia coerulea
  Intron number 1 from transcript AcoGoldSmith_v1.000801m (l ocus AcoGoldSmith_v1.000616m.g) derived from phytozome v7. 0 (chr-ID scaffold_17; pos 2623774 to 2624347 reverse stra nd)
gaagctgtagttcctggaacgtaattctgttttccctctctttctagatgtttatattatgatttctctgtgaattgtattgatttgatcttcattcttagtaatgctgaattctgttattgatagaatgattttgacttatgtgaattgtgttgatcacttgatctggtgttcttgttttgtataaagtttgttttgtattaatgagtttgaaatctaaaaatgtgaattgtagctaaatgtaatcattctatcatataaagatatcagaacatttatctgaaagtgaaacactttattaagatgcaacaacatccttttggagaaggaaagaaaacaaatctcaattttcaggcatgcaaacaatgttatctgtgaaatgggtgttaaagatcttcaatttaaggtgttttgttaaaagttaccgtgaattgttgtaaacaatgcagaaagaatctacacgaagatccctgatgatagctgctttgtacatttgaataaaatttatgtaattgagctgattgcaaccatgttttcagtgttctagggaccttattgaagaacaaacttgtgc

SEQ ID NO: 106313 - DNA, 440 bp, Aquilegia coerulea
  Intron number 1 from transcript AcoGoldSmith_v1.007279m (l ocus AcoGoldSmith_v1.007279m.g) derived from phytozome v7. 0 (chr-ID scaffold_17; pos 186306 to 186745 reverse strand )
agtagtgagcttttgcaacaagttcgtttacctaggtcagttttttttctgttaattttaattattttttgtgagtactaattagggtttttcttcaaatttcaaaagagggttttttattttgttttgtaatttattgatttaattgttgttttgattagttacaacgtaattgagattgaaattttgattttgagagttgaatttttgtttttaggtgaaggattttgacttttgagggtttattgatcaattgaacttattgaagagagttttgagctcaatttcgatttgggttttgatcaattgctttgaaatttgagtattcggagtgaattgcttgtgaattgttgaaagttagggttttttgaaatttggatagagaaggggtagtttcaggttttgggtttgttggtgatttgtaaaggagagttagtttg

SEQ ID NO: 106314 - DNA, 652 bp, Aquilegia coerulea
  Intron number 1 from transcript AcoGoldSmith_v1.021236m (l ocus AcoGoldSmith_v1.021236m.g) derived from phytozome v7. 0 (chr-ID scaffold_14; pos 255983 to 256634)
ggttttattactcacgtctcttcttttcctcttaagtaagtagtaattaagtttctatattgcctacaagtatttcttttgtttgaaatcctactaaagtccaaagtaatgatttttttattttcttggattcagaaatataacaattcttattggtatatttggaggggagtttgagattggtattttataaatttaaatttatctgaatccaagaccatgaatgactaatgaggtgtgtgtagcatttttagtttttcttttccttatttgaatattgcttacaaaagctgcaatgtgtttctgccctctccatttaattactactcatttactctgcacagctagtagctttctatctgaattgtccatgctataaacaaaatcttactactagtaaaaaaaataatacggagtaataaggattttcacttttcagtgctaatatttctgactaatatatgtgtcagtaatgtaaaatttttggactatacagcttctcaatgatttaagtatttaatttcaatctgctgcttaacctaatatgttttttcctctagcattaagaaaatgtgttcattgagagactaatctattcttcttgtttaatattgcagttcgcttgttgaagcgctaatctgataccattgtc

SEQ ID NO: 106315 - DNA, 453 bp, Aquilegia coerulea
  Intron number 1 from transcript AcoGoldSmith_v1.008083m (l ocus AcoGoldSmith_v1.008083m.g) derived from phytozome v7. 0 (chr-ID scaffold_14; pos 3926643 to 3927095 reverse stra nd)
tttcaacttggtccaggtttccctaagcgtctgaggtattattattattattattgttcttgttgattttatttatttctttctttctctatgatgtatgatgtagtacgatgttgatagtgaactcaaaaacaagtattaacagtcaattctttcttgtttaagatctccaaaaacggttggttattccatagttttttaactttttttactcggttgggtttgggtttgggtttgggtttgggtttgggtttgggtttgggtttgggttcctcgggagaattaagatctcttggaaagaatcccaattgaatcaaacagaccctcagagttttaaaattgaaatttagagatttagcacatattgtttctttctgattttaccaatttcaataaatagtttgtattcttctctgccccttttataattgttggttttcttcttttgcagat

SEQ ID NO: 106316 - DNA, 811 bp, Aquilegia coerulea
  Intron number 2 from transcript AcoGoldSmith_v1.001309m (l ocus AcoGoldSmith_v1.001309m.g) derived from phytozome v7. 0 (chr-ID scaffold_4; pos 5735674 to 5736484 reverse stran d)
atttatttgtgtctaaatttgtaagtttcggtaattataatcctgagttcactgtttattatagactaaactatgcaactgacgctgaaagcagactttgttgtgtccatagtaacgaatcttattcgatagtagttcatcaagggaaaagaatcaataattcttggaacatgagagtatataattattggatacatggaaaatcatatgaaagcatagtcatagcatatgtgagtttgctcataaaagtaatacatgtaaaatgtcaaaagaaggatgaagcattttaagaaatggtcaaatgccttgtgtagttcatgggcatcatcgtcattgcttttaaattgtccagatcataagttttccttgtgaataaatttgccatatcttaactgtttgatacaccataatgttggtggttttctctaatgaagctctcaaatatcaaatagaaaaatagatcctgatgtaataatttaatatttgttatttggaaagctattatcatctctacatacagagacagatgttcatgcgtagttgcacatacatacattgtacaggtaaatagtacatgcgtatgtgcatgcatacaatttttgttgaaatgcacacatctagtgtagactctactttatattgcacctgatagctgtacttctattggttgattaatttaaaaccaataatgcaatatgatcatctacttatagattgttttggatcacttttattctagtcatttcagattttgatatgtgtgtttcacattgaaggcattctgctcagtggacttatcaactggctcttt

SEQ ID NO: 106317 - DNA, 343 bp, Aquilegia coerulea
  Intron number 1 from transcript AcoGoldSmith_v1.002428m (l ocus AcoGoldSmith_v1.002428m.g) derived from phytozome v7. 0 (chr-ID scaffold_14; pos 5595842 to 5596184 reverse stra nd)
cttccattaccttctaattctctcgaatcatctgtgtaagcttttctttacttattacaaatagctgagtttattgttttgatttcaattattttgcaacgttcagctgatttgctcttctaagatatctcattgcaataaattagggaaaaagaaagaaaggaaatgattttttttttttttttaaattattattaacaaagttacagtaagctttttagtctatttgaagattgtgtttgttaaaagtcgatgtgactcagaggggattttgttagtaagttctctaagaataaaagttttcgttgttttagggttttgacagaagcatctagaatttttg

SEQ ID NO: 106318 - DNA, 944 bp, Aquilegia coerulea
  Intron number 2 from transcript AcoGoldSmith_v1.012155m (l ocus AcoGoldSmith_v1.012155m.g) derived from phytozome v7. 0 (chr-ID scaffold_20; pos 1378940 to 1379883)
caaggtcagtctcctcacaaattgtatccaattgtttgctcattggagcacttatctttgttacattaaggctctgctgactaaaccaaaaactcaaatgacgtaattttctctatattttggaatttattgatttgaatgcatactatttcactttatattttgtaataacattgtgttttaggccacaggatagtttttcttaaggttgtactctagtgtctcttcaccaatttcagaaaagaaaaaaaaaagacccatctctattgcatgtctcatatccccattttagattcttgaacattgtttctctatcatataatacagtttcttatggacctgttgttttgataatagtggtaactatcccaaatcgtgatttgattcgagtggttcacttttaaagacagattcgtatcatgttcggaaatctaatttcagaatggaccagttcagtcatcacaaatggctgattggttcaaattataaaactaagatgctagctttacataaatatgagttggtacaagatttttataacatctattttctttcttatttttctaccaaggtgtgaagttggtttctggactgctgtaattttcaatttttttttttttttaggaagcagcaatttccatttgaatccttcagggtgatatttgtgtttctttaacaagataatatgatctatttgtatcttacttatatggaaatttagtgagaggattataggacattctattccactagatattgatgaaagctttgtagcatgggcattggtattggcggtgtccaacttgtatacagagtttgagattcagataaaacttaacaatataggatgtattattatataagttttgtagcatagatgcatataacaaatttgatgataccagatgtgtgtgtgtgtttagcagcagagaaaatctgaaagt

SEQ ID NO: 106319 - DNA, 799 bp, Aquilegia coerulea
  Intron number 1 from transcript AcoGoldSmith_v1.001557m (l ocus AcoGoldSmith_v1.001557m.g) derived from phytozome v7. 0 (chr-ID scaffold_82; pos 430993 to 431791)
ctggccaagatcgtcttttgaaggtcaattttatttaatttttgaataggtttttaatttaatttcacaagttttatcttgttaatccaaatatactactgtaattgttgcttaccaaagaaattagtaatgcgccaaaatgataacaacacaaggttatcagttacagtagcgcaaacctttatcaaaatttcaaatgacagcttatgtcctttgttaaaagaaagtgtaatttttgtaatacactttgtttatctcttcatggtatccattgggagtgtgatttttgtgcataaattgattcttttgtgtcattcatttcaaagtattttcatataagatattgagcattctactcaaaaattaggtcgggccctgcttggttatcccgcaaaaatttgcatgaaatttagcctaatttaatatgctcgaaactcttgacaattggatttatgaacaaattttatgtaaaaatttggtgttatttcaaaagtgcaaagatttcacatctttttctaataaacttagtaggggaccacctatggttatctcatacttacctaagatttagttgtgggaccaagctagattagttgggggaccattcaaatcaaagagtaaatttgtgagggaccactctaatcatagataggtaaagatttgcctttttttgcagcccaaacaagcagggccttagcaataaattttgccgtttttcttaatgtctttttgtgtttaaggttgatattttggtggaaatacaggttcctatctcaaatatcagaaatttcagcattat

SEQ ID NO: 106320 - DNA, 890 bp, Aquilegia coerulea
  Intron number 1 from transcript AcoGoldSmith_v1.000580m (l ocus AcoGoldSmith_v1.000580m.g) derived from phytozome v7. 0 (chr-ID scaffold_76; pos 515996 to 516885 reverse strand )
acggtaactctcttcttcttcttcttcttcttcttcttctcaaaggggtttctttaaaaataaagtgcaatttctcctacccatttttcccaatctctcctattgcacaatgtgggttgctttgttttacaaagttcccattttttttttgttgcaactgtttgattgatgtataagttttggttttcatagagaaatttctcctaattatttgatgtttgaagtacgatagaaaggctttgacttgctctgttactagtcttcattctttaagtgcaatagtaagcagaagttgctaaaatcaccaacactgttggaaagcttggggttttagtagttggaaattggaattaataaacaattgagatgatttgagaaagggagacaagaagaagtttattaatagagaaataatgaaacttttgtagaatagagatgattaaaataatgaaaactacagattattttaagtttagtatcttcacttgtttagttcatagcagtatgactatgaggaagcttttttcttccatttaggcaggaattaagtagtaaactatacagcaatttcatctagaatacagcgcattccaacttataaatttttcgtctatgtagtagtattagaaactagaaagagtgctctttgggaaacagtgatgaagtattttatgtctagggtgtggatttcattctctttctccccatcttgcgaatttccttcctctcttcttttgtactgtcttgccttactctcacaatgaaaaaacaaaatgttaattaagttctagtttaatcttctatggttacagtcattgccatcattagtcatctaatctagatttttgttgaacaattctcactatgttaatttcttcaatttaaaggga

SEQ ID NO: 106321 - DNA, 504 bp, Aquilegia coerulea
  Intron number 1 from transcript AcoGoldSmith_v1.015550m (l ocus AcoGoldSmith_v1.015550m.g) derived from phytozome v7. 0 (chr-ID scaffold_94; pos 427713 to 428216)
attggtgctgtccagtggcgtagccaggattttcggtgagggggagcacccaacctgtataggtattcataggattacaaaaaaaaaaaaaaaatactccataattgaatccaaaaataaaagacttccaaatatcaaaattatcaaattatgatgggataatgtagtagcaaagtaaaattaagtagtaacctagattccttaaataaaagtaacaattatttaggcatgaattaaggaaataaaatacaaaatatccataatatccttcctatgaatgttaattcctattacttagttacttatattaagagttaagctactaaaaacaaaaagaaaaatcaaacaaattaatatttttttttggtgtacgcaatatacatgtaggtatttccaaaaagttgagggggagcacttgcgcaccctcaacccactctggctccgccactggtgctgtctgtaagttatggtcttctatttttatctaggcaacttcctgtgctt

SEQ ID NO: 106322 - DNA, 484 bp, Aquilegia coerulea
  Intron number 1 from transcript AcoGoldSmith_v1.004673m (l ocus AcoGoldSmith_v1.004673m.g) derived from phytozome v7. 0 (chr-ID scaffold_41; pos 1482228 to 1482711 reverse stra nd)
tttccatccggacttcagtggttagttgttgttgattttttctctctttctttctttctttctttctttcttcactttttatgtttgatttttaaagtatgttgagaggaacaaagagattcatctttcaacaacaagtgaaaaccattcatcaacaagtaatcatacataataccaaatcctctttcttttattattattatttgttgcttgccttgcccatctttcatctttgttttgtatctactatatctactactactacttcaataattcaattgtgactatcttccttcatttgtttttcaatccaattccccaaattgtattacaacttgggtatcataatttaatttctttctttgcttatttgatatgatttgctactacagtattgtcttagttgcccaattgatcttttccatttttttttttttttttcaatttagaaattgagcaacaccactgaagccaagcagcatca

SEQ ID NO: 106323 - DNA, 638 bp, Aquilegia coerulea
  Intron number 1 from transcript AcoGoldSmith_v1.003793m (l ocus AcoGoldSmith_v1.003793m.g) derived from phytozome v7. 0 (chr-ID scaffold_5; pos 4653259 to 4653896)
tcttgctccaccacaaaatacagtcaccaccaggggtaagtgtactatcttcaattatttcatacatttgatgcaagcttttccaatatttgaatttgatcttcaattatttgaatttccaatactagacctgatcaaactagtgttaaggaaattcttttatatatttgtaatagttagtatccaacatcagatgggtcttcagttttctataggggttccaagaaataatcatacagagtatttggcttgaaatatatgtttaggtaaccagggcatttttaaattttaattggcctaatcatcatccatttgtaggccatttccaagacagtatattccttgaggatatcctggtaacaagcccaaattaattcaagggagggcatgacttgcgcaatcagaaaagattagggagtgcaaaggattagaggttttcccttgccaggtgccatagaatatccaggggtggtcagcggtgtactcacattgaacatttctgcatggcatatgccttttcactgagattgagttaacaaactgcctgtatattttgtatatctgagcttacatacatgtaatatttagactttaaaatttagatatgtacatgacactattttgtggaattccaggga

SEQ ID NO: 106324 - DNA, 933 bp, Aquilegia coerulea
  Intron number 1 from transcript AcoGoldSmith_v1.026361m (l ocus AcoGoldSmith_v1.026361m.g) derived from phytozome v7. 0 (chr-ID scaffold_14; pos 611681 to 612613 reverse strand )
ccgtccggttctaccacccacaggtggatttgaaggtggattctcccaccttcaaatccacctgtgggcagccacttttcaaaatccacctccccttgggacattgttttaggtttcaaggtggatttatccaccccaccccccaaatccaccttgcattgggaatgctcttagagcatttcacctgacagtacaatctgtacgctgatcaagatgtaaaactttgattggaactacgaataaaattactatttcatcaaaaaaaaaaaaaaaaaataaaaaaaaattggcagattctagtctaggtgcaaatcagtgaatttaagcaggatttgacagtaataatgttgggccctctaggctcgtagggagactgaatttttgtttgtaattttgaacaaagttatatttcctcttaatttttgtttgagtaaaatttgtgtagtacaaatttttacatacattttccactttttttttttttccatattgcgtgtctgcacagagaaattaatagggctgaaaatagcctgagccaacgttaagcaaaatcttcaaattcccaaacagaccctaataatattgcataagttttctttcttcttcttcttcttctgctattcgaaacattttcttctctggttattcagattacagtagttcagtttacagtaaagttgcaatcttggagatttttttttctcttacatgatagctaagagtactaaaaggtctctcattaccccaaactcttattctccattacttcttctcatcaacataataagaccatttactacttgtactacttcatcttctcttccaattccaattgataccctcaaatcttcttctttttcttcttctaaacatgaaagtctctgtttttctttagcagaccagcttattactcgtggtttaataccctctgca

SEQ ID NO: 106325 - DNA, 787 bp, Aquilegia coerulea
  Intron number 1 from transcript AcoGoldSmith_v1.018089m (l ocus AcoGoldSmith_v1.018089m.g) derived from phytozome v7. 0 (chr-ID scaffold_5; pos 4773749 to 4774535 reverse stran d)
aacaggtttttaccaaggagctaaacctaccgcaggtacataaattctttttaggaatcagatcttgtttgattatatattttgtgtgtgggtgagtggggttcattgatcaaacattgtgaaaataatgaaatgaatgagaagcttgtcagtggattcacgagagtcctgggatacacaatcgggtttctttaataattttatcacatcttatcaaacaagtatcaaatatatatgattcaaattagatcagcttcattttcatttcagggtttagggttacctgaaatgattatatgaaagtcagaaagtctaatgaaccaagttttcactgtattttactgtcgcaagaatgtttccctattttctgtttggaaggagacttgatgactttacatttattggcattgtatttttcttttaaaatggcacaagcatacgtttattccatacatcgtacacacgcacgaagactagggaggtaaccaagaaggaatacatgtcggagcacaagtattgcttgtcagacatttacacctgctcccctacgtgtatccatcaggtacccttgttgcataaaagagcttctagcttgacattaaactcatacatttgagtaaacgtatgttgttgattcacatggtaatggtgcattgtctggttttatattgctaaatccgtgaacttatggtttttagattcacattatacattgtgcggttatatattgttaaatccatctttccaatctgcagcaggggtttcctactttgaaagagtttgagat

SEQ ID NO: 106326 - DNA, 398 bp, Aquilegia coerulea
  Intron number 1 from transcript AcoGoldSmith_v1.021364m (l ocus AcoGoldSmith_v1.021364m.g) derived from phytozome v7. 0 (chr-ID scaffold_14; pos 377390 to 377787)
gagataactacacaggtaaaaaacaacatcaagctataatttaaatttgtctttattttgattttttttgtttgttatagattttcatttcgatatgatgtggttcccaattgttgtgaagaaaccagcattttggagtaatgggcttgcagaaattggctaaatagtattgatttgaaatggttgcattagttacatctttgggttctgtgtgttttgtttgatatagtggtgagagttgcaaaatttggcaatagacttttaagtgactatgaacccaatttagatattagaacttagttaggatccgtcttctgcatttcttatatgtttttaactggtacatgcataccttttctcaattattgattggtctttgttattgcaatggtatatag

SEQ ID NO: 106327 - DNA, 744 bp, Aquilegia coerulea
  Intron number 1 from transcript AcoGoldSmith_v1.016853m (l ocus AcoGoldSmith_v1.016853m.g) derived from phytozome v7. 0 (chr-ID scaffold_41; pos 338891 to 339634 reverse strand )
taaagcaaatttgcaaattgttccctcagcgacgggtaagtttttaagatgttttgaatgtctttcaataaattatatcgttatgcacacacatggaagacagcatccaccagcagatcatgtttagaggtaaacgatcaattcattaatacgagaagaagttaaaaagcataaattgccaagggatgatatattgctgtctctggaaggtctagttccactccagccagattccccagagtattgtggaatgtagtgcattaaattgattcagacacaaacactcactcatgtgcacccattacactattgggttttttaagcttgcaattttctacacgaaggttgaatagttgcattgttgaatgatgagattttcagactattaaccttcacgtgtaaaatttgtgatacaccccaaatatacagaaacacgaattttatcaaaaataattaaataattatattgcaatttctttcgtgtggtttgtggtttgtggttttgtccgttgttggtttgtccacatatttttttaagggtggataggtatgtcaaatttcacagctgttttggggctaagtcttaaaacctcttttttattcaggaccgtcaaatgttatgtttgctgactttgacctttcatagcactaagcttgtgcaaggagtttattattttttcttagagattgattaagttggtgctctcaggtcattgttgacggggacaggaaagacggatctaa

SEQ ID NO: 106328 - DNA, 658 bp, Aquilegia coerulea
  Intron number 1 from transcript AcoGoldSmith_v1.010300m (l ocus AcoGoldSmith_v1.010300m.g) derived from phytozome v7. 0 (chr-ID scaffold_5; pos 1420229 to 1420886 reverse stran d)
atgtaatttcttaaccccttttatcatttctatttgagcttgtgattgatctataaaaatgtatttcccttaacatgttatagatgtaattacaaagcctgtttttgctgttttcattacatacatttcaaaaacccgtactaaatcatttttttataaatttttatttctattgttagattttcacaatatattgataaataacaaattcacaatacccttttaagatgctagagtgaaattaatttttttctgaaaaataaacacacacactttgatgcagatgcaatacctataacagtagttttcaacatgttagcaacagccataaagtttaaatggtcttgactcagatttaaatatgtctccttaggcctttcattcattattttcatgctactctcctgatcttccttattaggtgaacatttttaaaatactaacctgacagacgtttacccagtttgcgatgagtctcatccccatagtatatgcatttatttaatcaactaatgtactttacatgactttaggagatttacttgttttagcatatcatttacaatacatgtgtataagctttgattaaaacatgaaatttatcttcttcttttttatgccagtatcatttgggaagaggtcacattggtgtatccat

SEQ ID NO: 106329 - DNA, 376 bp, Aquilegia coerulea
  Intron number 1 from transcript AcoGoldSmith_v1.002393m (l ocus AcoGoldSmith_v1.002393m.g) derived from phytozome v7. 0 (chr-ID scaffold_4; pos 5156911 to 5157286)
tctctgaagatcttaattcttcaattaagtctcaggtattattattattttttgattcttctttttagtcttgccttttttagattaatttatgatttgatatacaattgaatgtagacaatattttcaataaaacagtaaaaatgttcaactaattaaggtattgatcgattcaattcattatgaatttttgcaagattggattgatagattacaacgaaacagacttcccttttttgtgtcaattgactttaatcacattattaaatcatttgtgtggtgggagtggaaaagcttgttgatcgatgtggagtgtgaagtaatactacttggggttgttaacttgatttttttcggttttcaggttcaccaagat

SEQ ID NO: 106330 - DNA, 792 bp, Aquilegia coerulea
  Intron number 3 from transcript AcoGoldSmith_v1.000944m (l ocus AcoGoldSmith_v1.000944m.g) derived from phytozome v7. 0 (chr-ID scaffold_41; pos 1312667 to 1313458 reverse stra nd)
tctgtgattgcccacgttgaccgtatgcaaatgataatatttgtctgtgttttgattatttgtgcacatcttgttaatatgcaatgaactttgatttacaaaaacaattgaacgagccttcactggatgaacaagccttaactggataatattttcttaagactcaagatttacagactctatttctctctttcattgtttggattccctatttgttaactatattttatattagctcagccttgcatttgaatgttttcccaatcatatctgtagttagtctgctgtaggatgttaggaatgtgtcgagctattttgaaaaacatactgagtgaattggttagtgatgaattcctgtgatttatgctattcacaaaatataaggtgttatagctaggctgtgctattaatataagtctctttgcttagctagggtctgcatttgaatgttatccatatcatataagccgtttatccaatacaaaatcataggacattcattgagctgcctttggaaaagatgtgtgttgaaacttgttaatattttatatcatgtgatttcttctattaatggaatgcaaggaccgaggagtcattgctagactgcacaattgcttaagtaaactggtattcaatcggaagtctgtctgtatggggacatagatagggttcttgtatcttgatgcttcaacatttcatttctttatgataccgtagatgatatttttgtgctaatgtttctccatgaactcgacaggaaaatctactctcaccgactctctggtggctgct

SEQ ID NO: 106331 - DNA, 1053 bp, Aquilegia coerulea
  Intron number 3 from transcript AcoGoldSmith_v1.000415m (l ocus AcoGoldSmith_v1.000415m.g) derived from phytozome v7. 0 (chr-ID scaffold_23; pos 472469 to 473521 reverse strand )
cggcaaggggacattctgtcaagaaaattagcaaggtaaggaatatagtcttaggtactgaggattctgtactataactgtttcactgctcctaataattggactaattcttcaaagtttcgtacaagtttggttttgttggacgtaattgtgcgcgtaacatgttttgagttttttggccagagctactctactgaatttcagttagtttgacttctgaagtctagttttagcttgattagttaaattaagatagttaatagcactttcatcaagattgaatatgactaggccttgattcttcaagaatgttgctccaaattatataattacgtcagctagtagaagattcaaatgaaatacaaacctgtaggctatatctatcctggaacttgttggtacgcttttttctccaagaaagtcgacgggaccatagactatacagtatacacatatgcagtcttgtcttttatggcaaacaaaatcaggggtgcaacttaaagctggtttagagggcctaaaccaatattacctggagtcgggaatgcttatcttcacaatacgagaatgggaagtagaatgttagttgtcccggaacgtggtacggggtatagagatgtgtgtttgtaaatagaccctacagaatctgtgttgtttataaccaggcatagattatagtatatggagttagaaaatatggatggacaccctaaatttctaaaacatatatataccataagcacttcttgtgagcaattatagttccaggcaatgagacgttattatgaaaattgaagattttttattcgctgttctttttgtgggtattcctggctgtgatgtggaaataccgatacttgcaaggtttttattggttaccctaaaatgatatttgttaaatacatttcctttcctttcgatatctttcctttctttttgtgtgcatctatgtaggtggaaggttttacaagtaaaatcagtatgcgtgtatttaactttaatttgttgtgttgtttaggtgctggaggcagttcttgagatcaagaaagacca

SEQ ID NO: 106332 - DNA, 369 bp, Aquilegia coerulea
  Intron number 1 from transcript AcoGoldSmith_v1.010137m (l ocus AcoGoldSmith_v1.010142m.g) derived from phytozome v7. 0 (chr-ID scaffold_4; pos 7262691 to 7263059 reverse stran d)
ttcttcttcattacttctctcgaagtttgtagaaggtatgttctacatattaatcattttttcacacgtgttaactttctatccaagtaaacagacttaacagacgtgtggttccaaaacaagaattctttctttcattaatgattaatcaatctctttagtttaattctttctttgatttcatgttttagttgctacgtttcttcaaatataccttctattccaacttgtcttttcgaaagatttcaaactgcaattcttgtttttaagtaagaattcatccatgtttcttgttgttgattcttataagctttctttcttattgaaatcctagggtttttgttcactttctgtgttagtactgtttgc

SEQ ID NO: 106333 - DNA, 773 bp, Aquilegia coerulea
  Intron number 1 from transcript AcoGoldSmith_v1.007654m (l ocus AcoGoldSmith_v1.007654m.g) derived from phytozome v7. 0 (chr-ID scaffold_4; pos 4718725 to 4719497)
atatcttttcaaacttcttcttctttaactccaaggtaattctcattcttttatggtttcttgttatagtgtaataattctgatttagaaccctagatcttggatagttggatctagattagtttagttttcattagttaatcaaactatgttagttcttggttattagtttcagtttgttttcagttaatttgtaactgaaagaatttcacctttaggaagatttgagataaaatatttggaatattagtaatctgtaaatgtattttaattgaaataatggtttgttcatatcaattggagaatgaagttgatgatttgtgttctttttagagatggggaatgagattacaatggggtggagtcaaactttcgccaaattttcaaacacaagacctcatttaatttgcaaacacggaaatctaaaaaaaaaaaaaaaaaattgaacacaatgtttggcatcactttaactttaggctgattttattctatgtttgtagtttacaactttacactcatctggtcattggttcttgtttctaaactcaacaagtgaattaatgctagaaaataatgagtacaagtgaagaattttttatcagcccttccacaatcgatacccaccctcatcgtcaaaatagacactcttctcgttcatttatggagattctcaatcattttgctaaagtcaatcatgtggattctcacccattttgtttgatttatctatttatacaggaaaggatacactctcttgattaacacttggaaaa

SEQ ID NO: 106334 - DNA, 615 bp, Aquilegia coerulea
  Intron number 1 from transcript AcoGoldSmith_v1.004224m (l ocus AcoGoldSmith_v1.004219m.g) derived from phytozome v7. 0 (chr-ID scaffold_45; pos 215330 to 215944)
agaattttactcattttggtaggttatactaacaggtgagaaatactaatgagtttgctttaattgttttggaaattgagttgttttcgtgttgatgagattcgacaacacgccgttcttgtttttaaagaaaaacagagtagtgccgttttattcagagaagaaaaaaaaggggcggaattaattgtttttacggctgagttgttgtaaaaagatttgaaaacagagttttgtaattataactggcatttaaagctcgttggaactgtgaattcaacaaaagctttctttataagtttatcttttctttcttttctctgttgttctggttttgctctgctttagcttgaacactcatccaatgtgtgtaattcaactactaaaataacccctttcaagcatttcatcaaacaccaacaacttattacttattgtagttttcataataaagatatctttttttttttttaacattagttctaaaggtattatagatctggggatatatttcaatccctttcaattagttctataagtttgattgaattttgtctcatttcttgtctgttttatgtttcagatctaaacaaaaaagaatctgttagatataacgga

SEQ ID NO: 106335 - DNA, 458 bp, Aquilegia coerulea
  Intron number 3 from transcript AcoGoldSmith_v1.003508m (l ocus AcoGoldSmith_v1.002547m.g) derived from phytozome v7. 0 (chr-ID scaffold_5; pos 4490931 to 4491388 reverse stran d)
aagggtgggtgtttccaggaatcggagaatttcaggtgaatctgcttacttaatcaaggattgctgtttttcagtaagcaaattttagtccagcaagtaataggtcgagttcctccgtccagtgatttaaagaaacaaaattgggatacttgtttttgagttgagggacacaaggagtctttcttgcactcttctcacattttcctgtacaacaaaaaacgcttggctgcaattttgcagaacggaacatagatttcttgttgacagcctctagtagttcgatcaattagaaatatgtgttatttttcttattatgcccaaccacacattgatagtccatttcacgacgtctggatgcatggtgatcacgtgcaccaaatatctctaggcgtttttcattatgacctatgatcattcaaggtaagggtgtattgacaatacctataacatgcagtgct

SEQ ID NO: 106336 - DNA, 652 bp, Aquilegia coerulea
  Intron number 1 from transcript AcoGoldSmith_v1.021485m (l ocus AcoGoldSmith_v1.021485m.g) derived from phytozome v7. 0 (chr-ID scaffold_33; pos 2838668 to 2839319 reverse stra nd)
tgaattacttggctcaccaacaacaaacatcacaagttagttttaataaatataaatgggtgttacagttatatacaactttaagttatataaaaagagagagggagagagagataaaccttcataagaagcaacgtcgaagcattttaaagtagctcagtttgacaaccaagataaaactccaattctttccataccatacttacataaatatcttctaagattaaactttgctgcaatgccaaggtaatttaatgtttagaacattcgaaagtagcgtactctaaattcatttttagatgtcaaagaataaaaaaaaatacagaaaaaaaaaaaacaaaaacaaaaaaataaaaaaattataattgctttagtactgatttgattagtctatagaatcacataataaatgaggtttcattcactgtgaacaaataacaatcaaaaaccaatgctcacgagtcaccaaaaaaaaaaaaatgttcagaatcaaatacatacccaaaatccgacgatagggatcgtgaattctcagaagattgaagtttatcattccgcacacatccgagtttacaatatcgcaaatccctaaaattctactttgcctcacaacaaagctttcccatttcattttcttctccttactttcaat

SEQ ID NO: 106337 - DNA, 384 bp, Aquilegia coerulea
  Intron number 2 from transcript AcoGoldSmith_v1.025209m (l ocus AcoGoldSmith_v1.025209m.g) derived from phytozome v7. 0 (chr-ID scaffold_4; pos 6899652 to 6900035 reverse stran d)
tagttgcaattatttctagctcctctgttcttcctgtagagtgtcctcatctttgatttttcatttataattactacaaattttcaatttttaggaaaatggtacatatttttagttgataattgtgtaaaagattaggagtccacattacatgtattccatacctagtacattccacataagatgctaactctacttatgtgacaggatcattatcactaaaagatggaggtggataggaaacggaaaagatccgaagaacatataaaagttacagagatgaagaatgtgatcaagggaaaaaaaacagaaagattatgttctcagtgatgaaattataatgtacgagattcttccttggctacctataaaaacattactcag

SEQ ID NO: 106338 - DNA, 777 bp, Aquilegia coerulea
  Intron number 4 from transcript AcoGoldSmith_v1.011208m (l ocus AcoGoldSmith_v1.011208m.g) derived from phytozome v7. 0 (chr-ID scaffold_41; pos 1200892 to 1201668)
aagctgtgtcccaaggctctgaaaacaaaaaggtattgcgccttttttcagtctgcagtttacaagaattaaaatagtaaaccccgcctaacaataaacctatcaagaaacagggtagggacctctgtaacaacccgcttgccaaccaaaaataaaaatataaagaaacttatctagaaaccaacttgctttgaattattttcagcataaaaataatgtattttagtgttttcgtcttctccccttacaacatgcagtggacaaaacaatagctggtagtttactctactccatcccagatgacatagtaaaagtttacatattatgcagcatttgtcaccttattcatcaaagtaatagataaccaacttcaagtaaaaatattagaactctttttctgatcacaccatttatggttatcaatacgaaaattgctagataatgctggagatgacagtcagtcttttgttcaacttgactctgcagcatatctgtttcattgtgcatctggacggatgctgtttgtgtctccagggactaactagaaaacaacttatttagtgatgtactgagagtaaagaacatgtacgtataagtccatgtttcaggttctctcttctagttgcaatccttcgtagtcatagctcaattccttgctttattttgatggttttgctttaagacagtcttttgaagataaaggaaaaaaaacataaaaaatttcaggtcgtgacgctaattgttgcttttcgtctctttatcaggctgcatcaagta

SEQ ID NO: 106339 - DNA, 710 bp, Aquilegia coerulea
  Intron number 3 from transcript AcoGoldSmith_v1.022267m (l ocus AcoGoldSmith_v1.022267m.g) derived from phytozome v7. 0 (chr-ID scaffold_45; pos 136529 to 137238 reverse strand )
gcataatcatttgcgccccgatatcaaggtctctctcttcatatttatagaacagccattattttaatttaattttgttcatatatagttcttgtgatatctttgatagttatagaagttcaatctgcggcctacctcgcaggaacctcatctcttgtagttgtaatttagggtttaaattcttaaatagcaactgcgcttctctatacttagggtttgatggttttgaagaaagacttaattgatagtccatgtgtaagaatttgtgcttccttttcggatttcttgcggtgtttgtgtttttcgcaaaaaacaaaaaaaaatcctaactttccatttcgattcttcgtattgaactgtacaattgtaaacttatcgatctgtatagatctttagattgtacctcctactaatcccatttttcttcaaatcaatctagggttttgtttttggtattacatttgttctttaatatgtgaaacaagtgagtctctctgtgcatttctcacaatatgtcaatatccttaattgctttcgtgcctatgtaatctaaagtagtttttgtacctaaaaaaaaaagccttttatcatgatgagcacatacatttggttcctgtatctggctggggaacccttacatacatcaacacatttaaattcctttcatcatttttccatctcctgtttgatttctttccacagaaggattc

SEQ ID NO: 106340 - DNA, 857 bp, Aquilegia coerulea
  Intron number 1 from transcript AcoGoldSmith_v1.010075m (l ocus AcoGoldSmith_v1.010075m.g) derived from phytozome v7. 0 (chr-ID scaffold_14; pos 269839 to 270695)
gaatcagacctgagatcgctgaagctgttaaaaaggtttctattttatcacacacgccatcttctttttatctgtactgatgatctgattgaattttttttttttttttttttttatgattgattgattgtagggttagtagactttatttctttttctctctctctctgtgtttttatttatttatgttttttaaatttttatatgaaggatttgttaaaagaaattagaatcatgttcattgagtgcaattcatttatttgataaaattgttgaagcaacacatagaccatcatatcatatcatataggcaatctaagctgttctattaggatctcaccacatcggcactcatgtggactatattttgaatgtctttgatggtgggtgtggatttcaaaagtaggtaacataccatagctacttgctatatacatacccattacaacactactactacttcccattaattacaccttcagttcagtttttaaatagaaatacctttctgtttgattggtttaatgtgttgtaatatcttctttgttccaaactctaattgatggatcacttaatttggttgttgtggtaaatttgacccttttgaggatttatttaaatcaccttaatcttctagctgcttttcatctctttacaacattggtttgtgtatgtactatgtattcaatggaaacttgctatcagtctataagtacaagccacacatcttagaggataaaattgttctcatttgcggttgagttctacttttcaaattatacgaatatctggctatccttaatattgtctttatgatattgtttttaggtactggccacggctgaagtgcccataga

SEQ ID NO: 106341 - DNA, 522 bp, Aquilegia coerulea
  Intron number 1 from transcript AcoGoldSmith_v1.002775m (l ocus AcoGoldSmith_v1.002775m.g) derived from phytozome v7. 0 (chr-ID scaffold_20; pos 296067 to 296588)
ggaaccttgggatttaccaagtaagaatttttctctcttttgttgaaattgggaaaatgggtattgagatttgggttaatttgatgtatgggttttggattttgagcttaatttggtaaaaaactgttcatttttctaattgaagttgtcttaatatggataattattggttttttagctaaaattgggtgttattttggaaattttttatgggttttgacttttgaccttgatctccaattagcttgaactgatcactatgttttcttttatagctttatttgtcatgtaattgttgtaatttgttgatttagggttcttatttagatattgttattgttcatttggagaaaatttggtttgatcttgatcctttgcttcactaggttctaatttagttttggagcttatgaacttcactgcccagttagaaaactgtttccctaaattcttttccctcattctcaattttcctgactttgaacacttttggattgcttgcaggtttatcagtgattaaaa

SEQ ID NO: 106342 - DNA, 656 bp, Aquilegia coerulea
  Intron number 1 from transcript AcoGoldSmith_v1.005025m (l ocus AcoGoldSmith_v1.005025m.g) derived from phytozome v7. 0 (chr-ID scaffold_20; pos 4261131 to 4261786 reverse stra nd)
aagatcatctcatcttcatctttctttacaatcaggtaactactttttacgtttttttttttacttataaattcaagaagaaattattcaaaatgaacatctatctatctatctatctatctatctatctatctctatttttattttaattaaatgaaatcccccaattccattccatcccatccatccttcccgatgcatccatcgagactaggaagctgtttgtttgtttcaccagatctgttttgactgatgaataatctcaggctattgcatttgttcttccgtttcattcattttcggatctgttctcatcttttatacatacagtagtagtagtagtacattattctgttttaatgcccagtgccatgcaatagatccaacataataatataaataaattaataacccacctcttgtaactcttttaagattcaattccttccccctccccctcccccaataactcttcaatcaaacaaacaaacaaacaacaatctgttctccgttctccactactacaatctttccttatttttagtgtaactgttgtacagaaccaataactgctgtattttggattttaattaattaaccaattaaaattactcttctcctgttaatgacacttatcttctatataactgttgcag

SEQ ID NO: 106343 - DNA, 714 bp, Aquilegia coerulea
  Intron number 1 from transcript AcoGoldSmith_v1.009125m (l ocus AcoGoldSmith_v1.009125m.g) derived from phytozome v7. 0 (chr-ID scaffold_14; pos 704336 to 705049)
agacctccttcttctccttctttagatcgcgaaaggtttattatttttattttttttatgtctctgttattttttacttgtatttatgtatctatgtgtcgatagatggatgaatgaattgatggacaaagtgttattgatgcttcaattctaattgcaatataatttaatttgatcatattgattcttgaattagatagatattttgatttctttctacttgatttgatctgtattactcgatttacttttagttccactaaaaaagttcaatttttttttcactgttctaagttctgatatgtatgtaattgatattttgatggatgaatgtcatagtcactctgttttaattcttttaactcttttaaaactatagagtggacttagtaatcttgattccatacaatttatgatggaatcacattctttgcactttagaatgtttcaagtacttgagttgcgtcaagttgggaactgatgtgaactctccacactcaatctgtagtacttggaaatacaatatcaatgtcaaattttaatctttgttattgttttcctaagacactaactacttttcgaatcagttttacacatcaaattatgtgtgctgttttggcacaccaccaaatacccatctttatagtgctttgtttaaaacataataccttcttgatcatgatttggctatgtttgtacagcaacggaaggtat

SEQ ID NO: 106344 - DNA, 906 bp, Aquilegia coerulea
  Intron number 1 from transcript AcoGoldSmith_v1.009409m (l ocus AcoGoldSmith_v1.006561m.g) derived from phytozome v7. 0 (chr-ID scaffold_14; pos 3274991 to 3275896 reverse stra nd)
cttttgctcttcatctccgaattaagtaagttttttttttaattcttgatttgcttgaaagatcttaggtatttcgatcgatattttgaagtaaattatgtgtttctttgttgatttggattgttttgatgttgaaattattcaaaattctgttggatcaaaattttactgatttcggataaaaatgttgaaatttgttgttaggaggttgtttcgtcattcgtaaacatggaaatggagacaaagtaatgtagtcagacaattctttgaaaatgatagtcaagttttttttttcttattagggtgaagttttatacatgttagcatgttgatgatattgtaattcttacatgacaaattgatgttactatctaattttttacttcaattataggtttagacaagcttatttgtcattgtaatgtgttacatacctattatatgttgaaacctggactatttttttggagaaattatcgtattattatacagttatatcagcgttagttccaagttagtccaccctttctaaagaaacaacaaaaaagaaataaaaaaattaggtgatctgtccatgtttttttcttcttgtcatcaactttccaagtgtttgacatttactaagtgactttcttaaagcaaagttatgtttccagtattaggatgacaatacctctactaatgtaatatttgttctagatataggccatgctggtaaacttcaccaaattatggactttataatttgtttttgcgaaatcctagttcaaatttctcatcttgctgatttacagatatttatttaatgagttcagtacctgtttatccaatgattcaagcctttgatttaagtctttttactactttgcaggcttataccttcacgccgttactgaaacacagctt

SEQ ID NO: 106345 - DNA, 413 bp, Aquilegia coerulea
  Intron number 1 from transcript AcoGoldSmith_v1.008135m (l ocus AcoGoldSmith_v1.008135m.g) derived from phytozome v7. 0 (chr-ID scaffold_89; pos 495579 to 495991)
ctggtgcaattggtattcttagactccctgattgggtttgtacacttcttcttctttcttttaaaagtaattcatttgattttcttcaataattatcatgttatctattagttctattttagctatatattgttatctatgtttgtttcaacaacaaataataatttttttactacaaccctttagcaatttgtggtggaataacaaggaagacatcaatagttcatgaataaggattggtgttgttgtcttgtgattttaaacttgaattaagaagactagtgaagtttgctataagtcacatgtcaaattcaggccaagcttgtttattacaattgttttttaatgtattacttatccttacggaattatttatcgtgacactttcttttttttgtaggagtgtccagatt

SEQ ID NO: 106346 - DNA, 515 bp, Aquilegia coerulea
  Intron number 1 from transcript AcoGoldSmith_v1.002631m (l ocus AcoGoldSmith_v1.002631m.g) derived from phytozome v7. 0 (chr-ID scaffold_42; pos 177457 to 177971)
aacttcgttgctttcaaaccatcacttgtgctcaggtaaaaagttgtttctcttaagtaaaccccatcacttcttttgttgaattactagctgtgttgataattctgtgagttgggtatttgggaatttggtcattacttgtttagaacttcactaaaatcattttgcaatgggttttagggattgtgatgttttactgtattagtatgttctcattggtcattttcttgatggattatttgattaattttattttagccggaaagatgcaatggtgttactgtattagtgttttttgtgttgggttgggtaataataatttgctaggttgtaagacttgaaatggtttgaattgaagaaaatatgatggaatggttacgcagtatatactagcatctgatacattttagtgtgaattgtttgtagttgaagaaattcagaatgctgttagttctgtttgaatttaatttgctagtgtttattaatgtgacaggttgttgtaaataatttggaag

SEQ ID NO: 106347 - DNA, 553 bp, Aquilegia coerulea
  Intron number 1 from transcript AcoGoldSmith_v1.007264m (l ocus AcoGoldSmith_v1.007264m.g) derived from phytozome v7. 0 (chr-ID scaffold_5; pos 3312912 to 3313464 reverse stran d)
tctctttggtgttttcagcatttcatctgcagcaggtaattgtgttttcatttgattcaatgttaatgtaaatgtgctgctgaatatatttttttctcttttcttttgttattataatttataatcatcccaattaattctgatatccccatacaaaatttggcatattaaatcatatttaggcaaatagataatgtgctaggcagtgttaaaaaacatacccatcagaagaactgaagaattaattaggttcatcctcctgtagagtagaatcttcaagttgacggggcatgcttctttaggatttataagaaacgcaaaaagaagaagtttgtttattcccatcctcctttattcaaacattttgagctttttaagcttatttcctagtgagacagactgaaccgcttctttgtgcttaagatttattacttgaaaagaaaactaaacaaggaactcatattaataatcgttaaatttggttaaactgaaatgataaggtcttcttattgtttcagtaaacaaggtgggagctgcaaggcactttattact

SEQ ID NO: 106348 - DNA, 378 bp, Aquilegia coerulea
  Intron number 1 from transcript AcoGoldSmith_v1.013343m (l ocus AcoGoldSmith_v1.013343m.g) derived from phytozome v7. 0 (chr-ID scaffold_29; pos 862036 to 862413)
ccttagaggttgaatcatcagacacaatcgacaatgtgaaagctaagatccattaaccattgtgttgattttcaatgaatcagtgttttctttgactttgaatagaacaatgtgttcaattgtttgactcattttgactgttgatgaagagtaggttttagtggagaaagagagttgtttgtttggttttggtttcagaagagaaggtttgttggatttgaagagagagaaagaagaagtcaagttgaaatgtggatttgttaatcgtaaacacatcatcgtcatctctttgatcttaaaactgtgctgaaatgaaaggtgagaataacatccaggcatccagccaccagatcaacaacgattgatttttgctggaaa

SEQ ID NO: 106349 - DNA, 347 bp, Aquilegia coerulea
  Intron number 3 from transcript AcoGoldSmith_v1.020319m (l ocus AcoGoldSmith_v1.020319m.g) derived from phytozome v7. 0 (chr-ID scaffold_14; pos 5239865 to 5240211 reverse stra nd)
aaacactaggagaagaatactgtgatattactcaggtccacaatctttacttttatgccatgcatgtcttatttcagtaatcattgaataccactatagcagaaatggttcgcagtaggtaattaccataattttcctgtttttccgatcttctatattgtataccaaacttctgcttctgttagcttttcaacacctatgcatttttctatttcatctacactgttaatattcattttgattgaacgaatgaaagcataattgaagattttctgtatggaatggatcattccagcacttcaactttgagtgacgtttggatttgtttttgtaggttgccagtacat

SEQ ID NO: 106350 - DNA, 344 bp, Aquilegia coerulea
  Intron number 1 from transcript AcoGoldSmith_v1.020319m (l ocus AcoGoldSmith_v1.020319m.g) derived from phytozome v7. 0 (chr-ID scaffold_14; pos 5240635 to 5240978 reverse stra nd)
tgaagcttgtcgtgacgcctttcgacatttatttggtttgtaatcttcttctttttcttcttcactcagaagtcataaccaccacctttgtttgtagttttaaaatgttgataagttgtgtaatttagatggaatttgagctatagagaaattaattttttttattgaaaattacttgaatttgagttacagttgcaatgctaggaatagagattgagctggaatttgtgctctattgcaatttttttttttttattattaaaataagttggaaaattgagttctaaatgaaatttgctttgttttcaggtacaagagttgctgttgctcaccagagtgaggtt

SEQ ID NO: 106351 - DNA, 869 bp, Aquilegia coerulea
  Intron number 1 from transcript AcoGoldSmith_v1.005269m (l ocus AcoGoldSmith_v1.005269m.g) derived from phytozome v7. 0 (chr-ID scaffold_20; pos 790472 to 791340)
ttgatcgtgatcttcagattgctaggtaagatattattgtgcattttacagcttctttttttttctcttgaaaactttcatatttttatttgtggtggatttatctatgaatttaaaatatgctgttattaacatgaattagtaaaaatgatcattattttttgaataaacgacaattttgatacattttacacaaacatttattgagtcctttcttgtttacgaagatattgggtcccttcttgcttatcaacactccaaaataagtaatcaggttctcgtttttttgtttctaacatctcgtcattagttaatgaggaaagctgaagccacgaaaacttttctgccactttaactgcaaagtaatcctagttcttgctttatcatatggtatccaaaacattgcctggtaaacaaggaaggcctgagtgtttagctttttatatatcataatctataatctacgcttctggttgctcgagcatgccgcagtccacctccctatgttaagtcaactgtataaacaaactcgaggccatttaacatgcctacagaagtagcttgcatggtttcagcgcatcagcacatgcgtctgataccccctatgttggatctgttcatctttattgtgtatacatacggatttattttattcatttattgagtttggagttgctttacaaacataccatttttttcataaaccaagtcgctcatatgtattactactcaaaattgtgccagactatatttgtttgcagaacaattctgtatccttttttgtttgatggttaagactttttattaaataagacttggaatttttttttgtctaaaggaaaacaggaaaggacaatctgttcaagtgt

SEQ ID NO: 106352 - DNA, 535 bp, Aquilegia coerulea
  Intron number 1 from transcript AcoGoldSmith_v1.006953m (l ocus AcoGoldSmith_v1.006953m.g) derived from phytozome v7. 0 (chr-ID scaffold_14; pos 4451100 to 4451634)
tagtcctgcttttgctgttcaagtaccacttggtaagttccatctttatcccctcctattcctaccattttgatttttgttgttctttatcttcatgtgatctgatgagtgtatttgttcataaatctacattttcaaagcattttggttattttcaaagacttgggctttatcacattggtgtatctttgggttttctgatctgttctaagattatttttagtatatactgtaaataaatttctctcatgtgcattttggggtttctgttttaagtgttctgatctgtttagagagttgagtggttcagattttccttcattttgttacttctcttgtccattttggtctaaccagtcttgatatattggatgttaaacctccttttgtgcatatttatccatttgggtttaagatattgattttgtttgatgttgttggcattcgtcaagcatttttttttttgtgttctgaatgagtctatgattagtccctttaactcatttatactttgttttatcaggatttattccta

SEQ ID NO: 106353 - DNA, 1003 bp, Aquilegia coerulea
  Intron number 1 from transcript AcoGoldSmith_v1.022533m (l ocus AcoGoldSmith_v1.022533m.g) derived from phytozome v7. 0 (chr-ID scaffold_4; pos 208733 to 209735)
caagaaatccaagccgaggagaaactagaagtgagttgattccctttcttttactatagtatacaataataagggtagaatctagaactatggactcactcaataatcaatgtcctgaactgtaacatggtgtactctttagtctttactatccactatcaataatctacattattgttggaatgcaaattttcattttatgcctcatagcataggctcttttttcttctttttctttgcacagcataggaaatactcattgttccttgcgtggtatgctgatatcattagccaataattgatgtgtagaatgtagatggctataatcatttcatacatttcagaagcttaaaaggaattgttatatatatagttgaggaactaaagctatgtaggctcttatgatgattgaaacaaaccagtacagaatagtttggaatttgtttatctttaactgctaagtgttattgtatagaaatgtggagaggatgtcgatgaaaaaaattcattgcactggttgtgacacatcttgcaccaatttccttagtgttcatgacgtgggttatgacttatcacacaaagtgtgttaatgtagaggcatggtctgtgtattaccaaattttgtttgctttatattgtctactagtctatggtgacaatctaaattattgtcagtcagaaagcctttagttggactaaattcaattaccatatcattggagctactgccgaaataatcagctccacataatcatacttccaccaattagcctgcatgatggttactttaaaatcatgatctggttaaggatcatttgggcacatgcttccaaactgagagaactgattcaaattattaagctctcttgctttgacttttctccttcacctacatagtggagactcttttgactcgttttacctttaagtttttgaagtttattgctaccactgaaatgcatgtgtctgttctaaaagagacaacgtcggatagaagcaatta

SEQ ID NO: 106354 - DNA, 604 bp, Aquilegia coerulea
  Intron number 1 from transcript AcoGoldSmith_v1.024668m (l ocus AcoGoldSmith_v1.024668m.g) derived from phytozome v7. 0 (chr-ID scaffold_17; pos 933932 to 934535)
tacaagtgagtccatcagtagtagtctagcttagatcttatatatatatagttttataaagtttcaatttttatggaaaaccctttaaattaattaattatttttcttgaaaaacaaatctttcaagtaaaatcctgtttttcctttaaaagttgtttttgcaactaactagcttcctacataaagatttaattttttattagtgcatatcaaaagtgttatagattaatttatatatgaacaagcagctactgcattcaagttcagatcttagattattagtgcatggtttagtgtttttctcgattaaaaattcagttttttcgatcacttcaatatatttcgtaatatgttgcttaattacacaatgttagtagtagaagtaaatcaataaataaacccttaattcatttttcaagttcgtaataagttgctttaatgagattttgttcatgaagattcagtgcatggtatagtgtgtttcaatcataccccacatcttatgttcatcttttttgagttaatttagtgagatttggttaataattttatttttattttttttcatttatttatttgcagtggggatcgagctttttgtagt

SEQ ID NO: 106355 - DNA, 548 bp, Aquilegia coerulea
  Intron number 1 from transcript AcoGoldSmith_v1.026834m (l ocus AcoGoldSmith_v1.026834m.g) derived from phytozome v7. 0 (chr-ID scaffold_14; pos 4852421 to 4852968 reverse stra nd)
atagaaggtcagcttgtttatctaggcttccgtaatttgtttaatgtgttttatggataagagtcttctcgttgtgtgagttcttggttaagaacattggttgtcgaatccaaaaaattgtcgtagttcttgaattcggttcaaagttcatatctttatgcacgactgcatcaatatgacatcccatgggaattcagatctgggaataaatcaggaaatcctaagatataggcgtctttacagttcttccactatggtcacattcgcttctatgaatatgcttaaatcatttcattgaattcatccatgatacttgcctgggagactatgttcatttatgaataagtatatctagcaagtagttctagctattaaaatatcagacgcctctagaatcagaatgtgcagataaacttttgtggtttgacttctgttgcttgaatggtattaattactgttgtatctcttttaatatgtgatgtttattggcttttaattctgaagatagaaaaatgacatggtaagtgaattctttcagggaaggcttg

SEQ ID NO: 106356 - DNA, 811 bp, Aquilegia coerulea
  Intron number 7 from transcript AcoGoldSmith_v1.006381m (l ocus AcoGoldSmith_v1.006381m.g) derived from phytozome v7. 0 (chr-ID scaffold_17; pos 2096310 to 2097120 reverse stra nd)
tcattgctgcaactggtatcgagaaaattagacaggtacaattccccatccattcacatgcatatttaggagcctaggttgagcctagggaatagacaaagccacaccccatgcattatatactcctggagacctatgcaccctttttgatgtatgaatttattattccattagttatcccatgatattgttaatttgaattcattatttcttaaatatttataaagtcatcggtggacatgtcctacatcgtaaggggaatttgttcccgcacctctttcatttttctccctatattttattgcctcattgtagagtagatgacctggtggcggagccatggaataaatcgtaaatttttcaaggaaactgtttatttttttttcttagtagcctttagccagtagctacacaatcaatttttagatgtacatcccagtagtgatgtaggttttgcctgtcagttttgcctgtttattttgattttttttttcttgatttttttgatgccgccagttggtgtcattactcattaaatagtgtgggcatgtaatagggatatagttgtagggtggtatttatacttttgatactaaatgttggaaacttgtgatgcatgtggttggaagaaagtaatgcatatttatatattgctccttagagcttgtctgtttatacaagagttcactattattcaaaattttcatttttgcatctgtcaagtcatggagtgattctgatatcctgtttcacattgtttttgatgttttgagtaggcatacatcgaaaaagaggacagtaagaagttgaa

SEQ ID NO: 106357 - DNA, 452 bp, Aquilegia coerulea
  Intron number 1 from transcript AcoGoldSmith_v1.006196m (l ocus AcoGoldSmith_v1.006196m.g) derived from phytozome v7. 0 (chr-ID scaffold_14; pos 4513079 to 4513530 reverse stra nd)
aagtttggaattttcttcaaatttcttatcaccaggtaacatttttacttctttttgtttattaattttagtttcaacaatgggatctgaagatcttaatgtttttgtttttttttttttatctctgttctatagattttcttacccttttgcttgtttttctgcattttcttagttacttatttggatttttttttttttttttccattttcaagttaaatggagctatgggtcgtgtttagtttatttattcaagcttcgtttccttaagaacataacactctgcttttctgtattattaatgtctttttcgaaaaatgagaatattggttttgtttctttcatttattttttaataaactttgatggttttgtcctttttattggcttaattgtaatctgatcttttctttctttagggctaatacttgatccagaaagagatttgttg

SEQ ID NO: 106358 - DNA, 635 bp, Aquilegia coerulea
  Intron number 1 from transcript AcoGoldSmith_v1.008598m (l ocus AcoGoldSmith_v1.008598m.g) derived from phytozome v7. 0 (chr-ID scaffold_14; pos 1299407 to 1300041 reverse stra nd)
gcttcaggtaaattaacgaaccaaaccagatgttaaatttatagtttttgtttaataagaagaaatgatatcaaagtatgtaattttaagtaaagatcatttttttttttttttttttatcaaactttggaattcatcatttttgccaactgggtttctatcgattcaatcaattatgtttaatttttcatttttatacaatacccactttgaatttcagtgaaaactatcgatttatgtactttttaacacatatggatgctgctttgaagaattgatcatatctcatttcactttgtagaattgaaatttatcgtttttaacaacttggtatggattaatactcttaattatgtcatagttttagctgttacatgattactgtttcttaataatgtaaagattttactttatgaaattttcgacatatagatatactgggtttatcatttcaaattatgtatttttggtgtttggtaatggttttgtcgttaattattcgtcttctataatctttatgttgttatgaaaccaaatttgtataatactcagtaactgattttttttatgttgttttgttcattattgaatttttgtcaattaagggagactttgcatttttgatttgtgcagaa

SEQ ID NO: 106359 - DNA, 651 bp, Aquilegia coerulea
  Intron number 2 from transcript AcoGoldSmith_v1.006330m (l ocus AcoGoldSmith_v1.005823m.g) derived from phytozome v7. 0 (chr-ID scaffold_14; pos 714063 to 714713 reverse strand )
gctttggtaagtttctcacatcgttgaatccgctttatttttacagttcaattatgaggttaattgaatttattctcaactccaattgttattagggtttgaaactgattaacttttgtagatatttaaataaataaaattgctttgaagaacaaatccttataaaataggtaacgatgctttgagatatacactactgtcttcagattgaccttacagacaacagtgtgtatggtatcattttttattgagtaatcttatctcttctgcaaatttaggcagagaggttttgtccacttaatattgcttgaagtgtttgtggctgttgtgaaccatttctgtgttttgatttgttatatctgatctcttacaaccattactaagatagttagaaggtaaataatggtatattctcttgctagtgcattggtgcctacaagtgatggcttttgtggttagttgcattctatgctttcgcattgctcgaggttgattgtctgtcctattctagacacttgtttttataatttaactctgtgaatgcaagaaaaaagtggtgacattatagaagaagtaaaccagataaaatagtgcctttagagtgttcattggtagtgtttatattgaattttatttctttgcaggttttgc

SEQ ID NO: 106360 - DNA, 275 bp, Aquilegia coerulea
  Intron number 1 from transcript AcoGoldSmith_v1.006197m (l ocus AcoGoldSmith_v1.006197m.g) derived from phytozome v7. 0 (chr-ID scaffold_82; pos 530445 to 530719)
agaagaaagttgaaggttgtaatttgggtttctttgtaagtattcaatttcacttgggtttttcattttttagccttaaatgattgataacccaatgttttttattttattttttcatttttcttttctctgataattgaaactgactagattattttgtctgtttcttggggttttctcctttttttttttgatttaatttattttttttctttttgccttttttcttttcttttgcagttatatagttttggactagtttgtatacagagttg

SEQ ID NO: 106361 - DNA, 1002 bp, Aquilegia coerulea
  Intron number 2 from transcript AcoGoldSmith_v1.006197m (l ocus AcoGoldSmith_v1.006197m.g) derived from phytozome v7. 0 (chr-ID scaffold_82; pos 530779 to 531780)
ttgtcattgtggaattacaagtgagtctgttttcctttatctatttgttcttcaatatgtttgttctcgctgtttataacttaatcaggagtcgaaattctgaatggtgtttattgaaagcacagctagtgggtctgaaatggattgagcaatgcctcttattgtctacttacgaaaagctttaaagagttctaaaattgagttcaagtgccataagagaatctggttcttggctaaaaccttccatttgtcgaaatgtattacgcagtgtatctgtttgttttattgcctagttgacatttgagattggttggagtgctactagaagaatgtcctattgacatgccaccaatttgcattttagggaagctataatacaagacgtgtagtttatgtctggcttgctttaccctgtccaatggatgttgttattgttttgttaatgtcaatgaaaactctatgattctatggttagtacgccaatagaagagtaaaatgagacgaggtttaggtggattgctatcatttgttagcaatccttatataccagttaattctgtttttttaatcatttatatcaaagttacattgcttatcatggtagatagacattgatacggtgttataaactgaacctgagcctccaatctgctctatatcttctaaattcgtgaagggtggactgttagttgcgttattaacttattgcttccacgatcttttgaactggtaattcagctgaacagtatatattattatatactgtaatgatattcttgctcaactcgagcataaattccttacctgattcgctaaatattttgttgttgaatagaatcatacataagagagtaacctaacttagtttttgatacattgtgctaataattgtgcttatttttcgtaagggatgctattggaggctactaaattgtctccatggttttcctatttacatttgctgatgatagtcccatgacacaggcactccactttggagga

SEQ ID NO: 106362 - DNA, 814 bp, Aquilegia coerulea
  Intron number 1 from transcript AcoGoldSmith_v1.009148m (l ocus AcoGoldSmith_v1.009148m.g) derived from phytozome v7. 0 (chr-ID scaffold_41; pos 1343551 to 1344364 reverse stra nd)
tcaacctccacaaccaaaacctcgtcaaccttctcgtaactttcaatctcatgcgaacccttttacattttagtcttatgaaatcttttttttttaataataattgacaaaattcacaatcaattacaactttagttttggttttctcagtttgtttaattagagtaatgttggttattttttgggatttttttctatagaaatttatctgggttttttttaatgtgtttttggggttttggaagaaatctagtctatgatagtatatgtatgtgaattaatgtcttatgaagattattgaaatgttaaaacactactttaatattgtatcacctagtagtaaaaattgttaagagttccaagttacaataatctgcaatttccattaaaagttggtaaaagttccttttttgtttgattgattttcccatacatgctatttatttgttatctccccgtcgagtcgggtcgctgcgtcgcatctcatttatgtgtgatcaattgcgttgttattcgatgactttaaaatgtgttgttattcagttaattttgactatatgatgtcttaggcagtgtgaatcttcattaacttttgagcttatatttaggatacttttattcaatacgtatattttggttatttgtagtaattgttgcctgaattgctacagatttgttgcgttcgtaaaatatatatacatgttctaaatatattgttgtttgtttacgtggaagagcgttggcctgttcggtttatatgcttgaaactcttaacggtttttattactaaacttttgtttggtgtatctatcag

SEQ ID NO: 106363 - DNA, 524 bp, Aquilegia coerulea
  Intron number 1 from transcript AcoGoldSmith_v1.003876m (l ocus AcoGoldSmith_v1.003876m.g) derived from phytozome v7. 0 (chr-ID scaffold_42; pos 354078 to 354601)
aaatcatcaaaggccttattgaggtaactatcaatataccttctgcatttgtttatatacaaaagaactccatatcttgatgaaaattatgaaaccataccatatcattcttggtaagattagtccaatagataattttgttctgtaaatgttttggtgattttcttcgtaatgacaatccattgaaagttatatcacatcatgttatgttgaattctattttgtattgttttaataagttgtgaaagaattgactaatatacaatagtggacaagatcacaagataatgatcttattgttttatctatggaacactatatgtatttagatttacatgaacacaatgggctggaatagtgttttatgttgaaacttttgagtcatttaaggccaataggggcaaacacagtctgttagagcaaaactaagactatctttatggtccaacccaaattctgattagtgttatattgttgtgtcatgtgtagacattactatcagcaggaactgatacatcgtcttc

SEQ ID NO: 106364 - DNA, 790 bp, Aquilegia coerulea
  Intron number 1 from transcript AcoGoldSmith_v1.018803m (l ocus AcoGoldSmith_v1.018803m.g) derived from phytozome v7. 0 (chr-ID scaffold_14; pos 2549659 to 2550448 reverse stra nd)
gtgaaccaaaggtctgcttttttttcttctatttcattgttttttttttttttggatatttctttatttattattaattaatgtaggattattagctacatttaacaatattctcatttgttgaaaatttaaggaaaatgttggttttaaattgaatgttaaattaattgtttgttggccaagaagacaaatgagaaggtgtaggattttttttttatcggcattgtaaggcttaagcttcttgggatagttcaggaacgacgtgctcgagacaccttggatatgcatgggtttaatgactttaatcaacaacttagactcacctaccacttgttttgggtgcaactcattataatttgtattgggattgtttaggaaacgagtagcatttttgcaaaggattaggcatttaggccctaggctcctgttggtacactaattggtataggagaaagctttcatgtggattgaagattcatagtaaatgtgtaattttaatgactttttttatctccattgtgatgagattcttaataagtagatcattttgaatgaaacacggtcattcttgtagtcaatgaccaatgatgtaataaccaccgaagatttgcagctttcaatagcttatgtactgagaagaggtttgagcttgtatcgttttgatatggatgtttgttagtttatgagtagttgtttggtctcctcaaaattctcagataaagtttttcattttatttcaccttttatgattgcaggattccttggtcagtccaataacaaaaatccttgt

SEQ ID NO: 106365 - DNA, 1034 bp, Aquilegia coerulea
  Intron number 1 from transcript AcoGoldSmith_v1.001432m (l ocus AcoGoldSmith_v1.001432m.g) derived from phytozome v7. 0 (chr-ID scaffold_73; pos 915035 to 916068 reverse strand )
gttggaattttaaagtttcttatcatcacggtgagtaatgggtttgctgaatcatatttcctctcgttacattttaatacgttgtaaaagaatcctgcttatcaccccctaataataaattcctaattttgatttatttatttaatattttggaaaagatattttcattcagataacttcattacgagcaaaaaagctacgcatatttatttctgtcaagaaacttattatctaaaggcctggagcctaatagattatgtaagaatttatttatttttattttattttatttttttttttgtaaaaaaaaacccaaacaaattttattgataaaaattcaaggaattatacaaagttagaggacaagggcgctacaaatattttttattgaatggaaaggctgagctgctgagtaagttacagctttaaggttttaggtattttagggcaaaaccatgcagagccttttgtcaaaatagccttactttgcataatagatcttagttggaatggtataggcattagagaacatggtcctcttcacacaaacttctgagaaaaacgattgcctattggggaacttgattgattgcaatttatttttgtaagtcacatttttttttgttgtaatcagctttgctggctttttaaaatggaaaggcttagctgctgagtaagtcacagctctaagtttaaggtattttaggacaaaatcatgcaaaacattttgtcaaaatggccttactacaagagtttatacttcaaatgggattagcagttaaaaacatggtccccttcacagatcgctggggaaatctattcgatgattgagcgcaattcacaaatgatattgattcctatattattattgtaaccagtatctttattataaatgattaatccttccttgaattcccttgttcactatatattttggtttgaatgctattgtgtgattctgataaaaagcaaacttgttttaatgttgtacaatatcagggtgtaacggctttagcagcgttttttgtcagctt

SEQ ID NO: 106366 - DNA, 809 bp, Aquilegia coerulea
  Intron number 1 from transcript AcoGoldSmith_v1.001594m (l ocus AcoGoldSmith_v1.001594m.g) derived from phytozome v7. 0 (chr-ID scaffold_20; pos 1575827 to 1576635 reverse stra nd)
caactatctatcagatttcttcttcttacttaaaggtacctcttctttttttttttgcaatttttttcgaatttttttgttgattatttcatcaattaagtatgattattgaaaaaactcatctacccattatttattttgattgtttaaatattgggttttgtttaatttcatgaatctgttaatgggtattgctgttttagttgattcaagttttaatttttatttattgatttattgattaagtttatttgttttagattatagtttaaagttgttgtattagattcaattgattggattttagatgcccaagtttcagggtagtcaagattgagtcttgaattttaattagagttattaattattagtatgttttgtggattggattttgatattagttaaatggtatataggattgagttttagcttgattggggatcttcttagagatttggatgtgtaaaggagataaagttctgaacttggtagatattggattatatcacaaattaataaacttagattataaattgttattttacatcaccagtgggttcatgtacgcttacttcttcaagcattagagccagtttggaattgaaatgggtgatgggttctttcatttatcagtcattgttattgaaatgtatgtgatcggaacaacttgagttattatgggtttgatatattcattttattttgggtgagttgattttttatgtatatatatgtgtcattttagagtctcattccttttttttttttttgaagttccagggaacattaggaggggacaaccaatttgt

SEQ ID NO: 106367 - DNA, 488 bp, Aquilegia coerulea
  Intron number 2 from transcript AcoGoldSmith_v1.009465m (l ocus AcoGoldSmith_v1.006588m.g) derived from phytozome v7. 0 (chr-ID scaffold_14; pos 1477591 to 1478078 reverse stra nd)
agcttagagctgctggatttggttacaggttgggtttccttctttttgtttagctgcattttattttcattgattcttctgtattattgcttattagccacttgtttgcaaaccaagttagattgatttagaatttaagctgttttggtctacagttagataaagtcttctggtaaataagtattgtgattatggataccatatggcacaacataacaatatatgtcaataaaagcttgctgtcacgggattcagcttttgtcctgttcactaagactcccattacacctttacctgcaatccagttcccaatcccaaagccgcttaaattatttcttgtttttattccatctgcagtcgttaagacttcatctttgagttacttccgtgcttctaataaccctgactttgcttttaccatttgttcttttggttcctgcaattgacgagcagggcaaagtacatagttggcacagttaaggctttgc

SEQ ID NO: 106368 - DNA, 382 bp, Aquilegia coerulea
  Intron number 1 from transcript AcoGoldSmith_v1.009465m (l ocus AcoGoldSmith_v1.006588m.g) derived from phytozome v7. 0 (chr-ID scaffold_14; pos 1478125 to 1478506 reverse stra nd)
gaaacaaactggggtttttcaattcacaggtgttgtgaaatcccatcttgtttcactcaaacaacttgataatggtaatggtgatgttgtcttttttgttcataagagtaatgatgaattcaaagctagggaagttttgaatgattttttgaatgtgggcatttcacttagtgaaatgtgggcaacattttcagcttctgatttaaggttttcggaggttgcgtcgtgtttaggtggtgctcgtgttcttagacaagatcctgttgagtgtcttatgcagtttctttgttcttcaaataataatattgggagaattactaagatggttgattttatttcgtcgttaggcgagtatttggggactgttgaagggtttgatttt

SEQ ID NO: 106369 - DNA, 906 bp, Aquilegia coerulea
  Intron number 2 from transcript AcoGoldSmith_v1.007350m (l ocus AcoGoldSmith_v1.007350m.g) derived from phytozome v7. 0 (chr-ID scaffold_45; pos 492530 to 493435 reverse strand )
tgttaaggattttatattacctgcaggtttcccaggtaagaacttatgatttaaagtcaattacaagtttttcaaactactcagctatgctcaaaagctcaacagaatgatgttattccaccttctgagatgaaaatgaaaagtttctagtttctagtagtgaaggtgcttttgactggttgaaggagatgaaaagactgcattatttataatttatatagcttaagaagaaatgtcaggaagtctaaggatataggggaaatgtcagtatagtagtaccttaaatatgaatgtatactgtatagcttaagaagaaatttgattaaagtacatgtatcatggggctgcatttggtaggtcttaataagctgttatatacaacattagatacttcatataacaaagtatttaatatggatcactgaaagtatcatacattttattcttaaggttgttaatgacgactttaaatttacaaattttatttaaggatgtaaagccgttaaggttgagagcttcagtgatgctgatatgtgatagtgcatgtggtagtgtggtgttcttagatattgatttattaggatgtgttttgtatgttgaacacttactcaaatatgatgatatcacataagatgactgttacagttaaaacattgtatttaatagtttggatgtacataaaataaaggtaatgagacattaatgaaataacacgtcagctttttagcacatgcaaagaacctacacgcccacatgttatttattacctcgttcagtcttgttctatgtgtgtttctattttatttttcctctaaattatatgtttagggtacacaatcgctctgtcttgctatgaatgaatgttttcgtcttatttcttgctatgtgcttcaggctctgtctcag

SEQ ID NO: 106370 - DNA, 693 bp, Aquilegia coerulea
  Intron number 2 from transcript AcoGoldSmith_v1.024683m (l ocus AcoGoldSmith_v1.024683m.g) derived from phytozome v7. 0 (chr-ID scaffold_4; pos 5837446 to 5838138 reverse stran d)
tacatttggaagaactttactattgttatacaattgttgctgacaaaaaaaaaaaaaaaaaactactagctggactgcgcatctgtccattataaattctgttggaaggtccaaagggaagctaaaagtcggagcaagtactgtacaatacacattgtcagctacattactgagggtggctcaaataatatacatacaatccatgctcagacataattccaaagtcaactgaggaaaagaagaacttgattcatacagggtggatgttcattaaagaaagactacaatggtctttgaaaccaatcagatcctataaattctcaaaagtcagtagcaattaccttcactaaatcaattcctaatgcttcggtcttgagtctagacggttgtgaacatacatgtatccctcaaatatcacactaaacggttgaaatttgagagcaaaaggttaaggttttgaaatagttggatctgttaatgcactggttgtcgtccacctcacaattctgcagcaacttacaaatttcccagggaaaagaaatgaaggctaccaccaagtaaaaaagaagctgaacaaggctccttatcttcagcttcgaaactctatgagaaccacatcctagaaaacaatctgttgcatagaaaaaccattaatccctatgctaattcctacatcaaatcaatattagtgca

SEQ ID NO: 106371 - DNA, 947 bp, Aquilegia coerulea
  Intron number 1 from transcript AcoGoldSmith_v1.026558m (l ocus AcoGoldSmith_v1.026558m.g) derived from phytozome v7. 0 (chr-ID scaffold_14; pos 4937659 to 4938605 reverse stra nd)
cgcaggtgaaagctgtacagatgtataaagacgatattttattaagcgtgtcttgcagaaaattattcctttataatttccaactgggtactttcagaagagttgtgaaaaaatggagagattggaatatggatatgttagtgtctccggtatgtcatgttaatatagtgcagtccaaactatataaatggccccataatctgtaccttttaagacatttcttaaaagcttctacagtactatatatcaaaagatcaataaacaatggagtagataggtggttaaaatttccaaagatattggatactgatcatttacagaattacagtaggttattaaggttttcttttgcattatatacgactcaccttggttctgttgaataaatgtactacttccttttaccacatgaagtttatgaaaataccattcaagaaaaagaatgcatctggaattttcttaactttaaagcccaaccaacgaaagccagagtttgtttgagttgcagtcggccgactttacttccaataatccgacacgtgcaaatctagactacttcttccgttcttcctctgtttttgttctctctttggtttctctcaagtgtcatcagaactaaacttatgcaacaactaagcgtcaaagaattggtaagtaaactatgcctcactttttttttctctccataattattagttgtgatgtatacttagattcttccatggaatttcagttagtagtaattcagtaaattaagtagtaattagttgtgaatttgttaagtaaatttttgtttataagttttatatgctctattacaaatataagggcatctctaatggttcggcaaatttggtggtccacgtatacagatttgatgatattttgatgaaagttttgattcaaaaatgtgctccttctaatggttcggcgaattaaagcggcta

SEQ ID NO: 106372 - DNA, 257 bp, Aquilegia coerulea
  Intron number 2 from transcript AcoGoldSmith_v1.008332m (l ocus AcoGoldSmith_v1.008332m.g) derived from phytozome v7. 0 (chr-ID scaffold_4; pos 7145463 to 7145719 reverse stran d)
gtgcttggaaggtatgttatctaagtcaatatgatactagtcttttccttttggttcaaatgctctacatattcattcatacaatcatacgagcctcagtttcctataggtcttctttttagctgttcttgcctaaatgtcaattcagtatatttagtagttcaagcagcatggtagtcataaatataataatgggaagtaactgaatcaaaagcctgttttaatagttaaaagaggataccgaaggataccgagtt

SEQ ID NO: 106373 - DNA, 652 bp, Aquilegia coerulea
  Intron number 2 from transcript AcoGoldSmith_v1.019233m (l ocus AcoGoldSmith_v1.019233m.g) derived from phytozome v7. 0 (chr-ID scaffold_5; pos 8100116 to 8100767 reverse stran d)
ttgccattgtcaatccttcccttcgatctgtagtatatgatgagggagctactgaatttcgcatatatgttccaaaattgttggaattagtgtgcaattattgggcgatgcctaagattgggaaggatacattggcatctttaacagatgctacatttgactttgttttgagaaacgatgacgttgatgatctgtttattgcagttgcttttgctggtgccaagaaaatcttgactggttgaagaatgcgagaacattaagtttcaattctatttttattgaggtttgatataaattttttattttatttatgttttaaatgaattttatttataagtcatttaggagtaatcggttgtatggtttatatgcagtatctttgttggggggaagaaactttggtgtcaatgttgcctctaagcatttgtaatgtcagatatttatgtttagagttattcaaaagttataaacattgtgaagtgttgaaacttctgatcaagagttatcctgatgtgaagatgttggaaactactgttgttgatagggtatgaaaatatattattgcaatgttcttggtatgtatgttttgttgaagtggaacaaaatataagtgatttgattttattgatattaattttttgcaggaacatcc

SEQ ID NO: 106374 - DNA, 514 bp, Aquilegia coerulea
  Intron number 3 from transcript AcoGoldSmith_v1.007969m (l ocus AcoGoldSmith_v1.007884m.g) derived from phytozome v7. 0 (chr-ID scaffold_14; pos 852744 to 853257)
caagctttatcaaggtataaagtttgtgtccttttctccaacattttaatctatggtattttgaaatgtatactgtagtgtgatgagaaagtgagcaataagaaaagatggagggagagggagttggagaggaggaggaggaggaggagggcaaagagatagcaaggaagtaagagggaatagaagaatgagagataatatgaggagagggaagaggcaaagaatatttgttttttactggaggaattaatcataagctatctcctttgatatttgttggtgtgagtggtgagaagtatgttttttaatcccttttacttactgcaataatatacttgtgttcattggttaaaaaactttaattatattatgtccggtagttgtatcgtctgaagtttctcgcttactattttttctgtccattaaaaatgaaagattgtacgtattatatgaacatcaaatgtactattcaaatataggttgattcctctgaaagagtttcggagtttttagc

SEQ ID NO: 106375 - DNA, 371 bp, Aquilegia coerulea
  Intron number 2 from transcript AcoGoldSmith_v1.025449m (l ocus AcoGoldSmith_v1.025449m.g) derived from phytozome v7. 0 (chr-ID scaffold_5; pos 3608091 to 3608461 reverse stran d)
ctggtaatttcacttcttgtatatatctaaatatattaaactctataatgtccttttatttttaaaatagtaggtattttggtattcatgttgaggtttttttcttcttctgttgcatatcgatcaaaatgtactactcagtttgataagttttcatgaaaattatttaaatgaatgtgatttggccgatcgttttaagagaataaaatcttatttatccaaaaaattggcacaatttgtaaagtaggaattcagaatttgtttttaagagttgagctttgatcttacaactttttggtacagtgctaatataggtgtattgtcttgtgaacgcagtttcagagttggatcatagtgactctagccgcaac

SEQ ID NO: 106376 - DNA, 888 bp, Aquilegia coerulea
  Intron number 3 from transcript AcoGoldSmith_v1.008594m (l ocus AcoGoldSmith_v1.008594m.g) derived from phytozome v7. 0 (chr-ID scaffold_42; pos 498484 to 499371 reverse strand )
cttgctggtcggatatagaatattgccatacaaaggtaattagccaaataatcaatacgccaattttatcaattaggaacatattttgtcagggccggatatgcatgtaggcgaagtaggcggtcgattaaggccacaaaacgtaacagggccgaaataaacaaacttaaactcacttcttatctttgtctgtaattctgtatctttcgtcatcttcctctcattaatgttcactagtacgtattgatttatattgttttattaagtttttaatatattttttaagtaattatgatagtgaaatgaataaatttaattgaaattgtttattggttttttttttttctctgtaaggaattattcattgttgaaattgtatatatttgaatttgtttttttttctcactattaaatattgctaggggaagtgaaaaaaaaaatctatacaaacaaaacagcaaaaaaaaaaatttctttacatttttggtgttaagagaggcctcatattagaaagtcgattaaggccaccaaaaccccagaaccggccttgaacatactagaactgttaatctgttatttccagtgattctgacctgaaagaagaccacatgcttgcattattcttcatcaactctgtagtttttatagtgcatcttgtatgctacaacttcttttgtagattgtttctcgaattctgttatcagatggaaatatgtcctttagtcctgcagattgtgaaaataatccatcatatgcctctcataaatgcaaccacaactcaacaaggcgcattgcgcttacacctacacacacgacacctaatgatatagattggagatgcagaaacagtatgatggaatttttccccccagtgcagactgggctcaa

SEQ ID NO: 106377 - DNA, 1009 bp, Aquilegia coerulea
  Intron number 2 from transcript AcoGoldSmith_v1.011484m (l ocus AcoGoldSmith_v1.010572m.g) derived from phytozome v7. 0 (chr-ID scaffold_135; pos 69890 to 70898 reverse strand)
agaaaattgattttctagaaagcttgtctggaaaggtaatagcctttttacaacttgaattgttcatatttgagttggattttctgtaattgttgtcataaatttgctttgtattaaagactagtatgctctaaaatccatttaatggccttgtcgtaaaatcttaaagtgattacctgactagttaccaatttcactacttgagtttagttggtaagtggatcaacatgattggagagcacttaattatgagatttttgcttgttttatcttatctacgacatatgccattggtattttagttgcgattaatcatttgtgaacagcagcttattggttgtgagaggtgttaaatatttaagatcatttaatatgggttttgaaattagaagaagggtgaagtttctccttctttcgacccttaacattcatggattatatggtcgtcgtttaaatctacagaacaccttgtcattatgttgaaatacttgaataaaacacttatccttacatgcattctcccagattcctcacaatttgaaggacggagtatgatgttggattgaatctgtagagtacctaccaactgagcactccatacgtataattactgactgttgaatgctaaggttatgattatgttgcctggtaggcaagaaactgtttgtaatgtgatgtcatgacatgtgatatcagattagtggcatagatacttaaaatagaacttttcagaagttggattgagttctttgacaaataaagtcagactatcagtgtctatagtctaccacactcgctaaaaactggggaagttgactggtgacccgaagcacattagtcatcagctaatgagttattcgtcaatttatttatgtaacatgccctatctagatgatatagtaaaactgatagatgttgctgatagttgtatacttgtatgtgaaattcatttaattatatgcagttgatgtatccacttattacaggttagcaatcggcggtctcgtag

SEQ ID NO: 106378 - DNA, 627 bp, Aquilegia coerulea
  Intron number 1 from transcript AcoGoldSmith_v1.014538m (l ocus AcoGoldSmith_v1.014538m.g) derived from phytozome v7. 0 (chr-ID scaffold_33; pos 443685 to 444311)
gtgaatttaagaagatatacaattggtctcgttagtatgtgagtaatcttcatgtattgctgcggattgtagcttcaaatcaataaagaaaaaaacaagattgtattagcaaataaaagtgtctattatatgctatttttattgttatgtaaatgattattgtggtaccaaaatccaacattagatctttgttttaacatattagcaaattagtgtaaactataaacaattacttttggatcagttttattttttctttggttcgcaaatgtttagctacccttgttttgtaaaacatcaataggttatccccgtgttacaaatccctttgtagccaatgaagaaatcatttatcacaagaacatagaattaaaactaaaaaaaattaagatttttggacataccccatttgaaagtcgaaatttgagatacccctttcaagacagtagagatttacagccttagctgctgtaaatcacatcttgaaatggacggctaagataacaccacatgaaatggggggcatctcaaaaaaaattcaaatcgggggtatctcaaatttttactttcaaattgggggtatgtccaaaaaatctcaaaaaattttcataagaagttggaaggtaa

SEQ ID NO: 106379 - DNA, 705 bp, Aquilegia coerulea
  Intron number 2 from transcript AcoGoldSmith_v1.010457m (l ocus AcoGoldSmith_v1.010457m.g) derived from phytozome v7. 0 (chr-ID scaffold_45; pos 1864998 to 1865702 reverse stra nd)
taccgagctggaattgttcctgtttccttcagaaggtaaaacaatattactcacttcctcattacttgaattagattttcttccttggctttgtgcaaattgggattgttactgttactattttaatacattatattttgtttgatactaacctcctaaaacaaaattaaataaataaaatttagcgatcgacaaatatacacgtgtttgcaaggtattaaacgtattctaggactgttttctataatttttgtttgaatactggtacttttggaatcatgccaaacattaacaaagagtcaaagtgccaaacacaaacaaagggtttagttcagctaggttacagagactaattgcaagttcaaaccgatttccctgcgcattttgaaagtattctaagcacttgaggcggtattatactacagccaaatcacatgcatcctaggagatgaaatcagcctcggctccctctcagttcattacaaaatcaacttctttaatgtcgtgcgagtgatgtcaatactttgaaaattacccaaagtgtcgagtgatgtcacacaacactagtaggttttatggtagtagaaccaaagagaattgaacttcattttgtaggacatgatagtgagaaaatggcattttattttcgtttgtagcataactaaatataacactgacatttttgtatgtttcagggtgccttgt

SEQ ID NO: 106380 - DNA, 556 bp, Aquilegia coerulea
  Intron number 1 from transcript AcoGoldSmith_v1.008791m (l ocus AcoGoldSmith_v1.008791m.g) derived from phytozome v7. 0 (chr-ID scaffold_45; pos 1475717 to 1476272)
gttttcttaaattgttttggggttcaggtaatttttaatttcgatttcttttaatttgtttgtgtttttggtgttagaattcttgaattgtggtgatctttctttgaatttaaattgtttttcataatttttttttattaagttagggtgtttatgtgcatttagctaatgccaatgaattagacaacatagtagtaaatcatgtttatttttcatcaactgattgatgggtaggattagacagcgtatgtaatcaactctatgtatactgcaatttactacatattccgattatctcttttcaaatcttctgtgggcatgagaccctaggaaaataatgactttagttcattatcgattatttagtactgtgcatgtaggaaggtaggaagagggcatggggagggtattgtgacgaaacgtctcttttcttgcttcactttcgcacaaataattgagtttaattaatatatatattattctcaatgtattatggttgtttactgtgcattgtgctgtagctgaaacctagttggaagtggaagttcagtaccta

SEQ ID NO: 106381 - DNA, 1019 bp, Aquilegia coerulea
  Intron number 3 from transcript AcoGoldSmith_v1.007927m (l ocus AcoGoldSmith_v1.007927m.g) derived from phytozome v7. 0 (chr-ID scaffold_17; pos 233486 to 234504 reverse strand )
cggcaggttctttcttcaaacctaattaaaaaaacaaaatgcaagtagtccatacaaattaaagacttaagtaaaatacaaatgattatgtacagtactaaatcatctcctcttgataactatgatttacaagtgtttaggctctttgttgccaaaccccgtggtccttttgatatacattgcctctttccatcagatcggtcttctggagtatggtggttgttaacatgggtatggtattgtataagattttgagaggttgtgtgttcaagaccctagtttggcactagcttttttggttgttgttaactagagtcttcttggccatgtacctacccattttgacccaaggtgttactacgtaagtactttaccttttaaaattgtgatgaagcatgcctaagtacctcactacacccaaagaggaggaggagggggctttcaaatagatgtggttttcttgtctgtccatcctgtcaaaatctcattttacatcctactactactacttaaaactgaatgacaaggtcctcatctctcttacatagtgattggcttgaaaacttcagtcaaatctgatgcgagctttttacaatttatggttggtttagtaaatcacgatttgtcagcttccttgaattagattccgattacaagtttgtgcttacttttgggtgaaatcttttgcttcaagaaattccttataagaatattgtacaatagatgaaagatgtattaacattttaataaaagtgcactgcttgaattgcatccaatcaatggacacctctacaagtcgtttgtttctatctgcaaggagtgaatcaacgcaatgcaataatatatatttgcatttgcatgtgcttgcagtttgtaattcattgattcaaatcaagcagggccttaaagaattcttatgtttgctcctatgtatatatcattctttgtaagtgatctttatgtatttgcaatgtgtgtatttaggacaagtgataaccggaagttgggacaaaactgtg

SEQ ID NO: 106382 - DNA, 865 bp, Aquilegia coerulea
  Intron number 2 from transcript AcoGoldSmith_v1.009773m (l ocus AcoGoldSmith_v1.006646m.g) derived from phytozome v7. 0 (chr-ID scaffold_125; pos 208741 to 209605 reverse stran d)
catcagttgctggatttaaacaaggattcattaaggtggtattctatttatttatattgctttttctatccccctctaacttcaccattacttctattttgtttattattgtgtttcatatataacttcaaatctgagctctctctctctctctctctctctctctctctctctctctctcagaatcagctaatgtcccatccaagtttattagttttattttggacttattttgttgatgttaatacatgttttgttttcttcgggtggggtgggatgccctttatacccaaaccgtgtttccgataactggatctgttcttattattcatacaagagtttgcatctttggattgtcataacactttgtaacattttcaaagtcaaactcattactgaaaatatctttaaccatgatattaacatggttagcaacacaacaatttcatctcgaatccttttgcattccattgcttattagcatgatttggttttggcttgcctaccttagaaatcaaacacatttgacattggactatttggagtttgcatacatggatctttttattcttttccatgctcagggtttgttttaataccttacatctcatttgtgttatctctttgtgttcgtctttatgtgttttctattgtcagtagtcattttcaagtttcaccacatattgttaattttttcttaaatgaaccatcaataactatcggttaatataatccaaaccattatctccaattatttcttatttgctttaggtgctttcaataaagtttactatctcacaatttctgtgatatatatcttaaaatggcagactcaaagtttaaggtttcaatacccatcagggat

SEQ ID NO: 106383 - DNA, 151 bp, Aquilegia coerulea
  Intron number 1 from transcript AcoGoldSmith_v1.001437m (l ocus AcoGoldSmith_v1.001437m.g) derived from phytozome v7. 0 (chr-ID scaffold_17; pos 152030 to 152180 reverse strand )
gttcaaaccctcttaaggtaatttcttcaaacaaacaatttctcaaagaaaagttctgtttttatttgttttttttatgtttattttgtttgaattattggtaattttgtgaataggtattgagaagaacgtcacagattgtagttggact

SEQ ID NO: 106384 - DNA, 922 bp, Aquilegia coerulea
  Intron number 1 from transcript AcoGoldSmith_v1.001244m (l ocus AcoGoldSmith_v1.001244m.g) derived from phytozome v7. 0 (chr-ID scaffold_14; pos 4024089 to 4025010 reverse stra nd)
gacaatattttccattagctgctgttgttgggcaggtgatattttttcttaattttctgtattttatgaattagtagtgtttaaaaagtccaatttagtaaagtgtgatttgtttttttagtgcattttgatcttatcacttttctactagaaggggttttaataaaatgtttcgacaatctcagaagcgacatttctatattcaattgatagaacaaacacattggtattttaagtttgaattctttatgcgactacatggatctcttttgttagagcatctgtttgattgaatatgtaatggaggaatgttacaatcaactaagattgtatgatagattgggtttattaaggacccgtgacctctgatttgattctactgagggaatcacctctaaatcagactagaaagcctaacttcaaacaataaattcattccataatccaaatgttaattacaatgcctttatatagcttacataatgaaaaaataaaactacccactaactcacccactaactacaaacactagaccactttctatacccactaacccataaccttgttacataacaaggaacaaaatgcagacaaccacagtcaattagatttattaatttcaattatactaggatagatggtactttcgtagacgttgcgacataagaaaacaatagaatattgtaatatcaatttcttcttgtgttaagtatgcacgattgtgtggacgcatgtctgtgaaactatagatatatcaaactttattggtgagaaaatagttttgttggttggtcctttgaacaagcatagaattagttccatcaattaaatcaattcttgtaacttgtaagactgctatttttaagattcattacaatttatcttatatcagtaatttatttaaaagcaactacattatagg

SEQ ID NO: 106385 - DNA, 765 bp, Aquilegia coerulea
  Intron number 1 from transcript AcoGoldSmith_v1.003451m (l ocus AcoGoldSmith_v1.003451m.g) derived from phytozome v7. 0 (chr-ID scaffold_17; pos 1302428 to 1303192)
gatttttcatctggggttttgttttacaagccaaggtaagatggggttttgttattttctatgttctattaagttttgaggtatggtgtcgtgtttggttttttttttttcttaataataatcttatgtttgtttagcatgatgggtatttctgcaatttgtattaatcattttttattttagtataagtaacattgctataatatgaagctgatttttttttttctcttctgatggaatagagcaaaattcaggatttgtaattttaataatttatacctaattattaagttaagatttgtattgatttgctgtttttgttggagtctaatacaaagcgatgatgttcacatcagttgttgtgatttatgaataccaagtattcaacattatgagaaaattctttagaagaagtacttatgcataagcaatgccaaaagtctaatttgatcttgtttctttttatggtcgataaactatttataaaagaatttatagcagtaggtaacaaattcttgtgagaagaagattgtggggagtgactaacccctctattttaagttttcatttctcgtttattgtgacctttttctacttcgattgggcttgagatgtattggtaggaaattcattgctctcatttgattggttagttgatttataattgacgggaaaagacaatgatctacaagattcaaaaatgccttcttgactctttacattaaattaagcaacaatgtttttgttctgcttcagttattcagc

SEQ ID NO: 106386 - DNA, 973 bp, Aquilegia coerulea
  Intron number 1 from transcript AcoGoldSmith_v1.023474m (l ocus AcoGoldSmith_v1.023474m.g) derived from phytozome v7. 0 (chr-ID scaffold_4; pos 9110992 to 9111964 reverse stran d)
acttctcaagctttgttaggcagctcaacacttatgtgagtggttcaaattctaattctttcccatttccatttaattgccaataactcatcagtacttttgaaggtttgtaatgacttacttatgattcttctttcattttaatcatatctttaattattttgattcaaagatcattttcattcattcatgtcttgataattggagtgaaaagctagtgttcttaatttcatacatggagatcttttgaaaaatgtttatgatctatccttgtatgtccatgatcattataaagctttgtgatatgttcaaagatcctctcatatattattgtgcccctcatggatttaatatgtctgattaagtctactaagctagttcaatgtaatgctagctctctcagctctcttttgtttatacatggtttctgatgttgcttcttctttttagttcatagctagtagcaaggaagaaagttccattaaagtcttcaaatttattcaccagtatctttgtcttttgttgttggatttattgttatcttctctcctctctcttttttaacttcttcagaaatggactaaaataagtaccctaattaaatatataaccaaaaagggatatttcttttctatatgtttactgtcatcatgtgttgccttgcattggtctaatgaactagtatcagtgtgttttgtgtctcactccataatcccatgttgtgcatatattgaaaattgaaacttccacttgggttttgtgttgttttcttctatatctaaaggggtgcagtgcctcaaactccaagcacttttgagtatattgtatgaaacattccattaagctggctcatgaattgagtcttgtagctttcactaatctgacatgaaggcctctctttgttgtttttgtgtttttgttccttttcttatttattgaatctgcagggatttaagaagactgtttcagatag

SEQ ID NO: 106387 - DNA, 241 bp, Aquilegia coerulea
  Intron number 2 from transcript AcoGoldSmith_v1.003518m (l ocus AcoGoldSmith_v1.003518m.g) derived from phytozome v7. 0 (chr-ID scaffold_76; pos 382149 to 382389)
tgtccaagagcatatcacagaaagtgcttgcctaggtactctgtaattttctgctctatgtgtatttttttcatctataaaaatacgtatatgttggtaaacatcatagagaaaagaaaattcatcattctctgcaagacaatgtttattttaatggtaggtagggattttttgttttttgataacaacacctaagaatctttgatcagggatattgtttttgaagatatagaggaggaag

SEQ ID NO: 106388 - DNA, 783 bp, Aquilegia coerulea
  Intron number 1 from transcript AcoGoldSmith_v1.005188m (l ocus AcoGoldSmith_v1.005188m.g) derived from phytozome v7. 0 (chr-ID scaffold_41; pos 689883 to 690665 reverse strand )
aatttgcatctgtgagtatgatcttgataatggtgcaaattagaggcttttattgttatttagcaaaaatgattgatagttagctgcattgttcactctgttgctattatttatttttagagaaaagatctgataccatcttataacaattgtatattaattgattcatcgtttcggttttctgactggttagattgttaataagaaacatcaaagattacttaaaagcaaatgtaagatacagaatgtcagaaatgccaaaatatgaataactaataatactctctttgctttaccttacctggacaatgggcatccaccaccaagtggactagtgagagagaaattgatatgcatatgtttctgtgaatcaaccctcaccttaaaaaatggaatgttgaccatcctacagcttcgaagcctgataggcatatacaaacgtatgaagatgatgttcaaggaagttttcaattgttaaagccaggaaataacttagttattatgactcgcatccaaagccaatcctattcattttacgggaaagagttgaattatattaagttacaagctggtagattgccgtgatcttgaagacttgaaagaagacgtaccttacttatatatttgagccttatccgagtttttgttgaatgtgttattgctaaaaatcatcggctcactagatttttcacgtgtaagaaaattgatctttttcatttttatatgtttaagttgtttgttcttatttttctatttgcgatgaaggttagggcaggagttgag

SEQ ID NO: 106389 - DNA, 844 bp, Aquilegia coerulea
  Intron number 1 from transcript AcoGoldSmith_v1.003093m (l ocus AcoGoldSmith_v1.003093m.g) derived from phytozome v7. 0 (chr-ID scaffold_4; pos 7681180 to 7682023 reverse stran d)
ttctaacattactcgaacttctcttggtcctagtgagtttctaactctgatttcagttgatttattatgaaacatagtttctgatttcgtcatctctacagtgtttttgctgattatgagtttttggatattaatactttgtttttgaaactctaggtttagtaaatctagcaatttattagggttttggattgttaggttatgttttatttgggaaaattaacttttaagtgattagaaggtaagaaatgttgagatcgtaaatcatagaattaacacaatgaaggttacagactgttttagatttttgaatgcaaagaaagagttttaatgaagtggactgaagttgtatttaatgaaaaaaggtctctctgtgaaatgatagttgtggttcatttgtttaagtccatgtgcatagttggaaatgtaatttttaggatagcaagttgtgcttggtgctgacatgaagaattactttcatacattgatggaagattagttatgattcctctctttgagttgaaattgttggaatttggatacatcttaagtaatggacgattaagtactaatttatttgtctgctttgttggtagttgtcgcaccctgttatcagcagtctgtttaattggtttggtccaggttgttttcaactgtcattttgtattttggacatttgagcttaatggtcttttgtttatgacgttgattgtgcatttgttcgataggctcttttctttattcatttgctttattcatgatgttcatggtttaaacactcatttgatctgaatggttggatattaacttaaatctattccaataacattcaggtaggaataag

SEQ ID NO: 106390 - DNA, 890 bp, Aquilegia coerulea
  Intron number 2 from transcript AcoGoldSmith_v1.015518m (l ocus AcoGoldSmith_v1.015518m.g) derived from phytozome v7. 0 (chr-ID scaffold_38; pos 1322505 to 1323394)
ggtgtttattctggggacgaggtacatgtgcaaattttacaatagcattgtgtataaaagtttgcaactcttagtttaggcttgagaatattcttatgctggtctagaccacttccatgagcaataaagccctcaaggttaatgaggagtttagaagctcgattaagcgtcagtgcacttaaacttgttctttttatttagtctgtttaagttggcatggacattatctctcccttcatcttttgtatcaccagaatcaaatagtgaaacacatcatacgtaaagctgccaagtccagtaattaatttgaggaacacatacactttctctcatgaaattgtaaactcgcatatgattcctgctcctctcttttcattcttcaaatgcttcttgagagccttcagagtaggaactgctgaggcttttggtaaaaaaaaatgtagctattatgcctgttccttcagtactggagtaaaaatatatgaatatatgatagggattttagtggcctatacatttaatctcttttcctcaatcattgctaaaaaaaggtcagcaatttattggtcctcataatttgtacttccttttcaataacaacacacttttaagaaaccacaggagttagaattgatcatttgcgctcagaaggggtaaatttccattgctttaacaattttgaggctttggatgtatcttctgttgtcatgaagtcgcacttcataatcaatgttgattattttaattcataagttaaggaaaagaatcttttcgtgacatctggtctgataggggacttccatttagcttcagttttattcctttgtttcgaaaaaatcataaataacaacctttgttcctttgcaggtgtccttcgggaaggttgtgcg

SEQ ID NO: 106391 - DNA, 926 bp, Aquilegia coerulea
  Intron number 3 from transcript AcoGoldSmith_v1.021222m (l ocus AcoGoldSmith_v1.021222m.g) derived from phytozome v7. 0 (chr-ID scaffold_29; pos 2434987 to 2435912)
tggggttaatattatccctgatatagatttgcaaccaaaatcttcctcattggagggtgatccatcaacctgtctacatgcagtcgaggaagagttggtgtccctgtcaaaggaggactctatgaggtacagtactacattattcatttgtggctgatgcccaagcacgaagatgatgtctttattttgagaattttcaaaaggatgttaattagattctgggcatttgttttctatctcgtgttatttgtagtgctaaatctttatgaaccaaaatttggcagttattaatgatcattattgtaattttaacctacaaaactattttttcttctttctttgaatgactaaaaactttaaagtctaaactactaaaactagttaaaaagaccattaatgacaaaacaattcgattagttattcagcgagttcgaaggacttggttttcaaatgattattgatactagggtcttattgcaccgcttcttattaggaaagtattggaggactatgaagaaatgtgcatacaggcagctgttattcagataaagtatattctttgggtttgtcgtgccaatagggtagtttaatgacaattgaaagtgtgcataggtttggtctgtaatctgaaagtttgttggttcagaacacaacttaaggtaaatgggttagaatttgtctggtacggccatacggtgttaatctcttgttatgctggcatactctctcacatctttcattgaacatgtatctcagtgtcgagttttctttgtgacagtagttagagagaatttcacactagcttttgatgttgcaattctgctttctgtttctttatgtcttcttgaattgaagtgcatgttgacaattgagtgtgcggaagtgttgcaggtagatctagctaagcgccattgctttcctgttta

SEQ ID NO: 106392 - DNA, 783 bp, Aquilegia coerulea
  Intron number 1 from transcript AcoGoldSmith_v1.025192m (l ocus AcoGoldSmith_v1.025192m.g) derived from phytozome v7. 0 (chr-ID scaffold_20; pos 1268781 to 1269563)
tacgaacgctacaagctgttactgaagctaaacgggtaaacttaccactaacttcttacttttcaatatgttagaactatctgaaacactccatgctaaatcattagcaggagaagtagaaactgtgacagtaaaaatcctagacattatatctagtcttctgcagagtgtcagtttgtctgactcttaaaaattatatgtataagtttagcttgataaatttaaccaagcttagcccatagtttgtagcattaccaaaggaagtcacataaattcttccaggatctaagcacatattctagggttcttaaaataaaatctagaatgcatgttctccagtttgatgtgttggatgcaatttttccttttcttccttccctaaccacacttcattggaatgacaaccgtggcagtctgacttgtgactaacttgtgacaattgtccttacaaatttgactaacttgcttacttcttgttgaggatccgtgatctgtcaatttcaataggtactcacgtttttatttttgacttggccaagagattgaaaagatatagatgtcaatgctcctagatatactaaaccaagcattcaagcttgtatcaaatcatcaaatgtatgcagtcttaattaccattttgtttcttacttgaccaatagttgagatactgggtagactgatttaatcaaggctgtgtctaatcaaacaatattgtatgcagtcttccaaaattgtagtttttgtttgctgaccatgtgtttactttgccattttagaaaaaat

SEQ ID NO: 106393 - DNA, 425 bp, Aquilegia coerulea
  Intron number 2 from transcript AcoGoldSmith_v1.012136m (l ocus AcoGoldSmith_v1.012134m.g) derived from phytozome v7. 0 (chr-ID scaffold_50; pos 1430213 to 1430637 reverse stra nd)
ctgttctttggttaagttctggatatctaataaaggtaatttaaagttttattacttgattctttgtaatttctgaaaattatatgatctttgttggtttggtttaaatttttcttcttcttcttcatccaattgttctttgtctgaaaacaagatctctgattttgattttctagagaacttggttacttgccccatttaactataatcatacttagatcccaaatgattttaaacttttaggaaaacaaaactcttgtgtaacctggtgtgcaagacagaaattatagtcgagcaaatgtgtttttttttttttttttgacaagaagaaattattaagatattcgagaattttacaatctgaacagcatggctggggataacaccaataacgttgtatcacgacttttagcaaacgttctttg

SEQ ID NO: 106394 - DNA, 890 bp, Aquilegia coerulea
  Intron number 2 from transcript AcoGoldSmith_v1.002719m (l ocus AcoGoldSmith_v1.002719m.g) derived from phytozome v7. 0 (chr-ID scaffold_17; pos 3841387 to 3842276 reverse stra nd)
caattcgatctcttggctacaacatcaaagatgtatgtagttttctaatcttctgaatttatttatggtatttgtcagatttttgttctagaaatggataatttaagtcatataaccctaatgtgatcaaattatattcgatgatgctcgttcatctagctgttcagctatagtttcagttcactattataattgttacacttgatatgacaattttgtctcctggtttgattgttggactcaatgttcaagttgtgcaaataggaaatactcaatgctactgtaacacaagtattttttttccccagcttaactcataagagacctcctacataggtcaataatgtgaaaaagtcgtgtctaaatgaagttataattttcttgatttaaatgtatttttgagaacctgtgctacaacaaagtatcttagacataaatgaattattacttatttcgatcatatccatttgggataaactcattgtagaaaatgtacattggtttcatattcgctaatttagacattaatcacattattctgttctttctttatatcaatatatttgttccagttcattgatcaaagctgtatagcaaaataaaacctcatttgtcactatgaggattattattttgaagtgggctctactttccagtataacaattccaatttaatgaaatttcactatatatgtttttaatgcccactgattgtctattattggtagtaaaaaaatggatatgatgttatgacgtgttgtcgaactggaatacaggtttatagtaaggtctatgacgtctttcgaaaacccatatacatacatggcgtgtttatggatttttatatacttttaacctgttgtaggttcaaaaaccagaagacattctca

SEQ ID NO: 106395 - DNA, 538 bp, Aquilegia coerulea
  Intron number 1 from transcript AcoGoldSmith_v1.011749m (l ocus AcoGoldSmith_v1.011749m.g) derived from phytozome v7. 0 (chr-ID scaffold_41; pos 1173130 to 1173667)
tctctcttagcaatcttcaactgtaatttcttcaggtaatttctctcttcttttctttctttccccttttttcatctaaaaacctaattcatgaacttgttttaaaattcaaaaagtcatttagatgaattttcaaactataacgtaaattcagcattagagagtagagattgcttgttatctgtttgatgaaatgaacccaatcatcatcgttgtattctaattttgtccttcttttccaatttttgcataaattgagcttcaatatagttaaatttatctttggtgtggctattctattatggggtttaaagttcttatggaaattgattggaatgggaatatgggaattgctggaaataattttatatccatgggtttatatcattctattttataagttaatgttatgatatctgttaagactctaacgaaaacctgttcaatagcatgtctggagtattacactcacgcgattctgtttgatatacacactgattgttttacagaaaattgcatacttgtgataattctgtgt

SEQ ID NO: 106396 - DNA, 961 bp, Aquilegia coerulea
  Intron number 2 from transcript AcoGoldSmith_v1.017783m (l ocus AcoGoldSmith_v1.017783m.g) derived from phytozome v7. 0 (chr-ID scaffold_23; pos 3338775 to 3339735 reverse stra nd)
tgatatagtacaagaaaataaaaagctcatacttggtaagttcaattcagatcgaagtaattcttttctgatattatagacaccctatttaatagctggtaattattcttttatgagtatcaatcaattatcattccaagtagaaattacagcataatacatacgcaatgtgcttacttacaagaaccacacgcaaagaaacctttctactacaaagagaataaagtgcttatttaataaaaaaaaatcttttttttttttaaattttactacatcagaagtaaagaagttattaatgaagatatcaaccactaattgaaatcaaagcatccatcataattagactatttgtttacgataaaaataattgttccttacaggtattctaatagggagtacgtgtacacagtaacatatttggtagattgagctggaagtcgaaagctcaaacccaaaaattgttatctgtagcagagattatacttatcatctcactcttttaatatatgttaaaatcaaatatgtaggtagaaatcacaaaatatttgcaacaaagaataacgttcattgtgcaagaggatgtttactacctgttacatggatcgttaattgaattttttcttgctttcttttggcttggccattcaattggagacctaggctagaacattcttcgcagaatcatgttcaagtgcacaatgagatgcacttatttactcacgaaagaactccatctaacatcacctgatttagttcacaatatgaatttgtattctaatatgatttacttctttaggctctttcaagttatatggggttttggattagcaatgtgcttattcaacttctaaagatgttaagatatgccggaataatttgatatgattagtcatactgctgaactgtctttcttctaccatgattaggcaacattttgcacattgggtgccatatacgcaat

SEQ ID NO: 106397 - DNA, 650 bp, Aquilegia coerulea
  Intron number 1 from transcript AcoGoldSmith_v1.008074m (l ocus AcoGoldSmith_v1.006427m.g) derived from phytozome v7. 0 (chr-ID scaffold_17; pos 2023031 to 2023680 reverse stra nd)
atttctgctgtgatcgacccaaccctattttacaggttttttcttttctttattattcaatttcttctcactactattcctgttaatttcatttgaattggcatctttgaaatttttgcattaaaaatatccactttgtgcaaatggttattttgagtcttggcctattgggggttgttcattttttgttgatatttatgcttgaatgaattcttttacctgagaaaaactgagtctttctatgtttaccttgagtctggtcattaatttccatgaattgagctctatagaccctttttggtgtctgaaatattcatagttatgttaaagaaaagaaacacgactatcgtatattgaagtgtaactatagctattatgctagtggaacattggaactactttatacatatcaagcattatacaacgcgacctagttgtattaccttacatagtaattgtgtgtggagatagctatatgtgatgaaatagtataagtatagctagtgaactgtgtagtctatgctgcattgattttttcagtttaatccttgatttttgcggatacagcaactgaaactatgtgcacccctgattttttttttttttcactcccagataatatacctggcaataattggagtaacttatta

SEQ ID NO: 106398 - DNA, 894 bp, Aquilegia coerulea
  Intron number 3 from transcript AcoGoldSmith_v1.009081m (l ocus AcoGoldSmith_v1.009081m.g) derived from phytozome v7. 0 (chr-ID scaffold_14; pos 2091736 to 2092629)
caggtggaatttgctcaagaagtgctgatattaaggtgaataacaaagtgacagaactttatataacaatgtatcaaaaaataatgtctttcaggaaaaaaatgcaatgcaaaaatcatcattttgcagcaccagcttttactttattctttcttattctaatgccaagacctataccttttgtgtgggtgggtgagggatttaattatatgtttctgttttgatggagggcgttacaattgtgattggtctttggttacatgactactatacgtgtgtgcagtacatttttttccacctccactgggtatgttgaactagagaattggagggttctagacttctagggctttgttacaattgtgaaatgaagattcagttccttcatcccttgaggttgtgataaatcagagcaacccctttgcctttgagtgagagattctacctcaagtagagattgtagaaaacgaacattgtatagaatgaaatagcatgaccacaactccacaacttatccttgggtaaaaagttgtgagtgttgttgctttacgttttttttccttctaattcgtgggatctcatcccaagtacactgcatttttctcacttcctggaaggaagttgttattttaccttttgaaattgggggcaggtgacaacagattattgaaatagtatattgagaatgttgcaaggacacgatgatagttgtgagttgtgacttgtgattgagctgcttctagtagtttatggttttcattatccctaactatctcttttgtgtcaaggtcactttgtgattgcatatttgtgcattgagagagcatgtagttactatttcagattttagtcatgtgtattgtttatttaattgcaggaaggttcgacatagaa

SEQ ID NO: 106399 - DNA, 624 bp, Aquilegia coerulea
  Intron number 2 from transcript AcoGoldSmith_v1.023384m (l ocus AcoGoldSmith_v1.023384m.g) derived from phytozome v7. 0 (chr-ID scaffold_45; pos 534763 to 535386 reverse strand )
gaaaattgctcatctacaaaatcgacattgaagctgtaagttccgtttctaatcctttttttagtctagttgttgataatctttgccggacttggattcgacttggattccaaatccggctgaaaattaggtacgtagtctttgacagacacgacctaggcctaaatgctgacaagttatatgttagcatttaggccgtttcaaaaacaaactacgccaaaaaattttgaactattgcctatgtcaatttcaaatttttctatagaaaggccaagcagattagcagaccaagtgggtgtgtaggtcccaaaataatggcttagttgaaaacgcgcaagaaacacgcagtggccagtgggaggaatggacattgctggcatgttatgctggtaggtccgaataattggttggaaatcagttgacgttatacaacacatccctatcaaaaacgattcttccttcaacttgaagaaaagaatatcaagaaaattatattagcccaatttcttataatttaattaagtttttctaaatttgtatataacgcacacgctacaacttacaggtcactattgcaggattaatgttaagcattgttgttaatgtgtgcaaacaggtttcagc

SEQ ID NO: 106400 - DNA, 438 bp, Aquilegia coerulea
  Intron number 1 from transcript AcoGoldSmith_v1.001464m (l ocus AcoGoldSmith_v1.001464m.g) derived from phytozome v7. 0 (chr-ID scaffold_20; pos 2286350 to 2286787)
tcattgggttcttcgaatccattcaattggtatgttttaattaaattttattgttttttagtgttataagttcactgaacatcaatcggcatagttgcattagtgttttagattcacagaacaacaatgggagtagttgcattttgtgtgtttgagtgttgctttactcattatcactatttgtttctcatttttttcaagcaaatttgctcgccttagagaagagtctggcttccatacaaacactcaaaagcattagtcgagtaattatcaaaacataatctgtaattggttatagtaggataatacacacgatgtttaagtggaaactagtattgcggaaactagtattgcgacccttaatgcgaattgagctgtttactcgtgttgcttcctcaaatatactaacattttggaaccatcaggtggcagcatatt

SEQ ID NO: 106401 - DNA, 557 bp, Aquilegia coerulea
  Intron number 1 from transcript AcoGoldSmith_v1.005049m (l ocus AcoGoldSmith_v1.005049m.g) derived from phytozome v7. 0 (chr-ID scaffold_4; pos 8388025 to 8388581 reverse stran d)
atcggaaaagagtcgaatctcactgatctttactggtatatctccgatctaagtttttctttctataatcaactgaatatctttgtttagttgctttgtttacttgtttttgcgaaaattgttcaaatgtctgttgatttgttctgaaatgatatgaaattattgcaaaacagtgagatgcatgtttgatttgatgaaaaccgagtgagaatcttcacattctttgttctttgtactgtttttcttgtgaaataaattgatttttgctgaaattgttcaaatgtctgttgacttgttgtgaaatgagtgaaactcttgcaaaatagtgagatgcatgtttgatttgatggaaaaagagttaaaatctttacattctttgtttcttttactgatttgtttgtgaaataagttgatttgtttgcaatgtaatgaaaatctcggttagatctgatggaaaatatgagaatttgttcacatttatgttcattttgcttgagattgtagattgacctaattttctgcatattgatagtaatgtttgtttgattggatagaaa

SEQ ID NO: 106402 - DNA, 1017 bp, Aquilegia coerulea
  Intron number 1 from transcript AcoGoldSmith_v1.000865m (l ocus AcoGoldSmith_v1.000690m.g) derived from phytozome v7. 0 (chr-ID scaffold_5; pos 3618979 to 3619995)
aaagttcttggaggtggataaagttctcccatgcgctgcttgtcttcttatttgatgatgaatcttcacataaataattgattttcctgaaaatggtttggtggaatacaattctttctgccacatcatttccttgaaaattcatattcttcagtgactggcagattaatatgctccacagttgggatgtacatgttgaaaatttaaggaacaagggtagtttaaagatgatatcaccttcatttttgggggaagatttgaaggaactttagttagatgtatttgatggaatgcatgatggaacaagtttattcagatgaccacaaacctctagggtgaggcctatgttttgttgatttggatcttctggtagtacttttatatcaggaaacatgagaattttttcctttccattatatatgtttatgtttatcatgctaaaatgtcattgctgagttactgaacttttgtttggattaatactttgatattgattaggggattagacaggtcttttaatgctatgtttttgtttttatttcttgagtttttttttctatccttgttcaaacaatataaattcttactggcttcctgctgtctggcatcaatttccttgatcaggtaaagatatgggaggaccgtaaagctttacctcttgcagtattgaggccacatgatggtcaaccagtcaattcagctacattcttgactgcccctcacagccctgagcatatcgttcttgtcacagcagtaagtcttttgttttgatgttttcttatatcctgtttttttatggatgttttgatcatgcttcttcttttgtttcttttatgataatattgtgttggtataagaggtaactgggtaatattattgcttcaggtgaatttcattagaaacttgtgttaattatctagcccaaaatagtatcatatactgattacaaaaggcttacaaatttcagggcccacttaatcgggaagtgaaaatttgggtttcagcaagtgaagaagg

SEQ ID NO: 106403 - DNA, 1038 bp, Aquilegia coerulea
  Intron number 1 from transcript AcoGoldSmith_v1.003543m (l ocus AcoGoldSmith_v1.003543m.g) derived from phytozome v7. 0 (chr-ID scaffold_17; pos 1445449 to 1446486 reverse stra nd)
gaattagtagagtgagttcaggtaattttgggttttttttttattgtttttttttagtttattttgtgatgattttttttttgtcatgtataattgaatttgagtaaattaaattaggttttgattttttttgaaattatgaatgttgtgatctgatccctttgaatttgtttaaattgagtttcttgctgatttaagttttggtatagtcattgttggagttcattattttagtccaagtattattaatatcggcttatctgtttagttgctttggaaaaaaaaattgcgttaggactgtgtgacttgatcttgtctaactggatttaattgaatagaattgtttgttgaattgggatcttgtatctcttactgttgggatttgtaagtaagtttttgttttaattttggtgttaaatattgtaagtcagcattgttgtaaaaacatacttgtgaattgtaattaaaagggagacttggtttcctaaaatgtgtaaaccatgctaagagcttgatgattattgtgatttgaattatttaatcgaggaaggaaggttttgaagttgtgtcgttttagtggattagatgcacaagtgcttttttcttaaaagtttaaagcatatgccacgagttacaatttcccttgctagtttggagaaatgtaaattagttgccttcgaaggcaatcagcagaagcatcaacaagacagtttgtagtaaaacttgttaaccctgtattttggactttgaagatacacaaactacattggagattatgtattacattgacccttctgagaaaagaagcacatatataattttgagtattgccgaatgtagcattttggtgttagggtgtgtggtagtagtgccaaaactcacaactgcataatgtattataaagatgtcaaagtgttatgttattgcaacatttcagtttctcttcacttacatgattttttttaattcttccatttttcctttccttcatgctggtactaatttgagaaagtgatgcagacaaatccaaatctcgaa

SEQ ID NO: 106404 - DNA, 760 bp, Aquilegia coerulea
  Intron number 2 from transcript AcoGoldSmith_v1.026481m (l ocus AcoGoldSmith_v1.026481m.g) derived from phytozome v7. 0 (chr-ID scaffold_17; pos 475208 to 475967 reverse strand )
agaagggtaattgtctgttttaggaattttataattttgaatgcgtttattctacttatatctattcgtaattgtctgtgacttctatttttctaatactagactttgagaacaccagattctatcttatttctttatgcacttgaggtatagtgattaaaattagaagtttacagttaatatgatttgataaagctacaatgttatagttgatggtcgtttgaagataaaagtcaatttcatctcccagttcaaaaatacactgtgtttattaaattatagaatttataactctactttgcatttcatgctcttttgagctatactagaaacaccattttaggagaaataaatagttcaacatagagtaatattttttgcggtaacatctgagtttatactttattaatttgccatatcttgtattgtttttatagaaataaaatgatatgtgagtgactgtcctgaactagtaacaaagtttgtcacagttggaggtttggagcatggttaactatttccataatacttatgcttctgtccacgtagttagcactagatcatggacttgcagtggtcagtgggttatgcatttgaattcaacagggtggttcttttttctttcttttttctgggaagaatctaatggtgccttgatatagtaaattatcacctggaatgttaactaattaatacatctatgttatcattattgtttttgtcaggtacccaggttaaagctatagtagaatattcccct

SEQ ID NO: 106405 - DNA, 915 bp, Aquilegia coerulea
  Intron number 2 from transcript AcoGoldSmith_v1.024758m (l ocus AcoGoldSmith_v1.024758m.g) derived from phytozome v7. 0 (chr-ID scaffold_4; pos 6822538 to 6823452 reverse stran d)
ttttagacgtaaatttcttcataccctctctctctctctctctctctctctctctctctctctctcatttcattacaaataattacgccattatgcatgcaatctgtagcaaatcatcatgtagtatatataagcagttttggcattagggccagcagtcagcagatgcatgtgagtggggatgggagtgggaatgaagtgggagtaagtagtactgctacaatgtaataaacgcactgatgtgctaaaaagtctaaacaaaaaggttcttcttcttcttcaattccactcccagttgtactctttgttttatagtagagtatgtatggcagagaagactatttaggataaaaatcaaagctggttcaacatttcaatgatttttggcgttttgggtaccaatggatgtgatgttacaaccaactttagatgacctcaaagagatatgatatttttttatgagttatgacatccagcacattcatctttgtcacttcctatgtcccatctcatgaccatatcatctgagttgtgaccagaattttaggtcacagtgacatacacaccagaatcttctgaccaccctcttcatgagctctactgctcagaagtctgaacctctgagaccatctgactacatcacacattcacacttgagtagtcttaagattctaccacacgtccacagcccaacgtaaagtccaatgggtgaaggcccattagggcccacattcatgttggcttttcaatgttagaagataaggctaaggcccaaaaattggcttagtcagaccatgttacggcccaataataattatttacaagctttgcatgcactttggtcatctctgcatttcacaatatgattgcatgttatcaatacacagggtgttccagatctgtctgagtttggag

SEQ ID NO: 106406 - DNA, 572 bp, Aquilegia coerulea
  Intron number 2 from transcript AcoGoldSmith_v1.016350m (l ocus AcoGoldSmith_v1.016350m.g) derived from phytozome v7. 0 (chr-ID scaffold_45; pos 129861 to 130432 reverse strand )
ttttaccaggtactatatgccttcatcctcaacaatgaatttatgtttacttgtctattttaatgaaccttgtaacttcatagttattcgaggattgtgaaactttggagttgggtcatctgcagaatagtgtcttcttgtcataaaatagaggcaattgtgctgcctggccagagttaccagccgtcctacttattacttttgtagttgtgtgtggtatgtttagttgcagagttgaaaagaaacgaatgtatatgaccccctcccccccttttctacccttctcttccccccaccacacacacacacaaaagaaaaaaaaagtgaaaagaaaaaaaaaaaaaaaatcaaatgacaatgtttggcaagtcaaatggaagttggattattgtttgaagcttcctacagaatggtcttatagtggatttgacgtacaagatccttttagaaaatctcttgaacttattttattcaaactgaatctacctagaaatatagctcttacggaagctaattatattttcttatatgctgcagaatttgatcagcgttgcagttgttattatactgag

SEQ ID NO: 106407 - DNA, 843 bp, Aquilegia coerulea
  Intron number 1 from transcript AcoGoldSmith_v1.000662m (l ocus AcoGoldSmith_v1.000662m.g) derived from phytozome v7. 0 (chr-ID scaffold_4; pos 9414341 to 9415183)
catcaaaggagcttgttcaacgtctttacaagaaggtatttttttttgttttttgttagagtagaatggaatttcgtcatgctttcattcaaactagcattttgtttaaattataacatgcacatatatcatattgtagtttgaagaagttacaaactggagaaaggtaatgttattcattctcattagtgttgaatgtggaaagggaatggagttactgaactgatatttcacattatgatgaataaactattattttgaaagaaggcctattggttcacaaggatgggtggctcctaatatattatatttatttatccagggtgtaattacaactttgttatccattaaaaaacgagacattgtaacatagttgatttgtttcatacaagtgtgccgttgttttgctttttaattactttgactgaaagcaacaaatgacatcatagtgtctcatatttaggggttgaatgaatttagggtttttaatgaagttttctgtaatattgtatttattcttgcatctgtgataaatctaattttcattattatgtatacctctgattgcaaccttgcagtttgaaaagtaaccttattattgtttattttatagttttcttaaacttcattgcctagagatgacacttttaagcttacaaacttccacaatacgctaatctgtcattctgatgtcaatcattgataaactattgctggtttatatatgatgaaaatgggtgctaattggaaatagtacttcacatatgatattttgactagtaattaattgaaccttgtgttttcacagaatattgagttggagaacaagcgccgtaagtcagc

SEQ ID NO: 106408 - DNA, 803 bp, Aquilegia coerulea
  Intron number 1 from transcript AcoGoldSmith_v1.000081m (l ocus AcoGoldSmith_v1.000081m.g) derived from phytozome v7. 0 (chr-ID scaffold_5; pos 295655 to 296457)
gcatcatctccatcacaaagaggttagtcaatctttgtattacttgtcaattttgaataactttcttgttttcttcgatcataatttgatgatttcgatcgataaatagtttctatagattcatgatctcaatatcttcattcctgattatgaaatctatcaattagagtaaacaatgtgattgaaactttagtttatttcaattcttgttgaatttcattaatgatttgttctcaaattacgatttaaaacaacaatgtgaataggttgttgattaaagtaattgagattaacaatctatttgtataattcacgcatagaagtgacatgacatctgaactgagattcttaagactattaattgaggagtttggagtgcatagcttattaggtcttatgtttattagaactgtaattcttctagctcacccgctatgaaacaatagcgtgttacaattttagcttgtcttattttattctgttgtgcattaaattacttaatctctgtactgtatatctgagttttatttccacttgtttgcatttcatacccttgtttgcttaaaattgcactatgaagttttgttatcttgattttggttgaaatagttactgtttgcatccaactaaacgatttttatatgcttctattgatctacacatttacggaactgatatttttataattatctttgtttcttggttttgtattcatgcagatggttgtttacgggatacatctgttgttgttgttacattggatactagtgaagtgtatattattgttagtttgtctactacga

SEQ ID NO: 106409 - DNA, 964 bp, Aquilegia coerulea
  Intron number 1 from transcript AcoGoldSmith_v1.000196m (l ocus AcoGoldSmith_v1.000079m.g) derived from phytozome v7. 0 (chr-ID scaffold_41; pos 1997163 to 1998126 reverse stra nd)
gaggcgtggatcagttgctccaaggtagatgcaagacatttctattatctttgatgaattgttactaccaaggtgacaagaaattttcctgcaattgcttttatcatttataccatttcgagcaataaacttcagagaatgaaaccatgtttctattggtactaacatggttagatcgatcaagaggagaaaacatgttaaaattataaaactttcatgagtttgcagcttctcttgcactgtctctataatctgttgtataggatgcaaacaagaaagaacataagctttttaagctattgtggagtatataccttaaaaacaacaaaaatgtcttcaaacttcactaaagctactttttattagctacatcaagtccataataattcagatataatcctgttatttgcgctttaaaatctacctaatgtttttcaacagtgatgttaactttgatacaatgcattttatcgaaggtataaatgcagttatgcaataaataggggagtggattgtcttttcgaaaaatgggttgatatgatccaaaaattaaaaccatcaaaactgaagtgacatggctatatgctatgtgcttgtccgtgacctttgcaaatgaagttttttcatttgtgatcgagtgttatcttttttttttttcactcagtgaaacaatataaagagtatcacacaacaccaagtttacataacgtcactcggaatattgcaagattagttctctccatgaaatcaacctagctagtagcataattttttgcaagtgctgtgctgttgttgattcaaaatatgcatccgaacatattcaaacccttggaacatctcatttacttatttccaaactaaattaatttcatatttttcggaatagtctttcccacattagtatttaagaaatttttatgttattgcagtgtgcttctatcaatattgggacccagtattccgt

SEQ ID NO: 106410 - DNA, 1010 bp, Aquilegia coerulea
  Intron number 1 from transcript AcoGoldSmith_v1.017605m (l ocus AcoGoldSmith_v1.017605m.g) derived from phytozome v7. 0 (chr-ID scaffold_14; pos 3374081 to 3375090 reverse stra nd)
ttgagttgcagagggatttgaatggatcatggacgttcggtatactgattactgagttccaaatagtttccaagtccctacataagacagagatgtatctttcaagtgagcaaccataataagtaatcttcaactgttttaagtctatttctcaaccaccttcacttgatttctttatacaaaaaggtgcatattggcatattatataaggttgtacaaaaagtctccttcaagttctttgcatttagagactttgtatatgtttcacatgtttccctatcaaaatctgttttattttaatcttaattactttgtcaacaaaatctcacatgcattatatgcattatattatgatgattgtgatagtttatccactaaacataatttctaaacctacttaatatttaaattattataaacctacacatttttcatccgaaggaaaacgtagcagatcaaaggagaaaaaaccaaaaataaaaaatttaggggtctttcaattattgtgtatactaatttgtatggcaagtgtgtatccgcgtaatcgcgtatcacccattttaatgtcactaagatatttggcccccaaatttttttcccacatttcaaatacttttacctattttatttaaatttaagctaatcttagtcctttcctaatcaaaactaatattatgcaaattacagttcacaaagtctaataataaacacatgatgtagagcaaattcaaaggcggcttcatttgaacaccgacctaaatacttataaccaaaacaaattaatgtggactttttcatatttagtcaataaacacaatccaacttgtcagctttctgttccatatatagccaagtctccttcttcttctcaacaacaactcacaatacaacacatataactaacatctctttgatttcttcctggttcttcttcttcaatgggcaattcattatctccctgttgtcaacctcaagtattaagatcatcatcagtgaagttaatcttttgg

SEQ ID NO: 106411 - DNA, 606 bp, Aquilegia coerulea
  Intron number 1 from transcript AcoGoldSmith_v1.005833m (l ocus AcoGoldSmith_v1.005833m.g) derived from phytozome v7. 0 (chr-ID scaffold_45; pos 297501 to 298106)
attgcacttcgattacacaggtatcaaatatttgttttgtttttgtttgaaagatctctattttctaactctgttgtttatactaataattgatcagttgtgctatttcaattttcaactatgttagtataagtttttgtttcttgttcttgataatacatttcttctaattaattagctatattattattcaagtttcgttatcactgccatgtgttttttcttgaattgatcctctttttccctttatatgtaaagctttatatatacttgatcttcttgttggtactttattcttattcttttcttctcatcttgttcttcttgatattattattgctttttcatattggtttgaatcttgaaatcccttctctttatgtaatttctttcattttaagaatattaaatctagtggattttaatcacgaaaaatgtgcaattataatgcttaatgctccacataccataagcaatagtttctctcggcgatgatgcaatatacaactttaaatttatcagatttctagcatcattagaatagaagatatataccttcaaaagatctagtctaatacaaatgcattcattattacatgtaggcaa

SEQ ID NO: 106412 - DNA, 562 bp, Aquilegia coerulea
  Intron number 3 from transcript AcoGoldSmith_v1.007452m (l ocus AcoGoldSmith_v1.007452m.g) derived from phytozome v7. 0 (chr-ID scaffold_14; pos 1323334 to 1323895)
agtctgcgcaacagctcccaaaggtcccgacccaggtctgtgtttttgctctttttatttttacaagtatttcaacaaaagtattgcatataagattatttatttattgcgttgtaattgtaatggtaataacaattatagggacttaaaaaatagtgtcgaatgctgcataggtttccaggtagtttgcaagtaatgttttacatcaggatgagaagtaacaaaatcaaatagttagataagtacgatatgttcaatagttactagcaggtccaaacaatagcaaggtagtatttttctccttgaactattattgtgcaagtttgttgttggcaccttagaaggcctaccaataaggctcttagtttttaggcacagttgctttctgttgtggttacctttcaaagcaccttggcacgaatgttgtaaagtcgttttgagatgcaccttctttcttatccattttatttttaagaagttgtgtttgtatcgtaggatgagtgttgtaccgttgtttatgctatacttctgttttgcagacttggttgcaattgcagagaga

SEQ ID NO: 106413 - DNA, 967 bp, Aquilegia coerulea
  Intron number 1 from transcript AcoGoldSmith_v1.013097m (l ocus AcoGoldSmith_v1.013097m.g) derived from phytozome v7. 0 (chr-ID scaffold_20; pos 3143746 to 3144712)
ccattattcttccacctctttccttcaagcttaaagtatgttaatgttcgttcgtctttttcatcatttctagattttgggggtttgatccattgttttgaatctccttctatcattgctttataaataaacaaatactaacaaattgggggttgttttttttcttgagatttaatgcgtttatgtatataaatggaaccaacaacataattaagacttaagagtgggttttcatttataatcagagaagatattctaatttggggtagttttaggagttttccaagatagattgggaatttagtgttttgtgttttggggtttgtgggtaagtgggttgcggatactagtattttgaaaatcatggtttattattgtttcactttcacattggcaagtagccaaagttctcattgtaatttggttaaagctttaaatttcatatggaatgatctgtccatgtaattttttttgagtagtttgctgttgacgtcattattcgtctataactgtataaaatgttttaaagtctaaagggtttcaaaataatcataatggagtataacttgagtagaaatgtaccacgagaacgagatgatgttatccctgtgaaaacaatggatatgaagctcctatattgtaatcacctaatatcttgaagctacatacagagctttggctgaattgatttctgaagaaacatgactcattcagatgcctcaaatatttagatgcttcttgcttgtgctttctgcatttgtatattccctgtaccaataatctaactttgtgatgctggatttgactttatccggtactttacaagtcttcacatattgttatgtagctttgtgattgatagtcatttatgtttaatatctactagaaatatagtttattatacaatctggtgtattgcaaacttgctaactagtcattgtacatgtcttttaggtgataagagctt

SEQ ID NO: 106414 - DNA, 966 bp, Aquilegia coerulea
  Intron number 1 from transcript AcoGoldSmith_v1.005621m (l ocus AcoGoldSmith_v1.005621m.g) derived from phytozome v7. 0 (chr-ID scaffold_38; pos 1197298 to 1198263 reverse stra nd)
gcgtttccttacttagaagctgttgttggtatgtgggatttctctagaaccttctcttttcaatttttttcttggtgttttatttcttcaatatcttattttggatcttttgtgtaaagttaatctgtgttcttgagttgttttcttagtgatttgaatctaatttcgtgttaaaaatgggattttgttggttttctgatttgggttttgttttttcttttctgttttgcgtttaaacttgtataaagttcattttttttcttatttcagtttaaatataacaaagctttatttgagtttttgaaaaaggactttgtattagctcttctttaatctggtatttataacatgtatacacaaatttaagtgttgtagtaaccatgaacatagagttttccagttagtttctgcactactaggcattattcacaatactgtttcgcagttttgatgttatgtgtaaaaaactaaaaatcatagttgtatggcaagttggcaacaaaataatgacaagtatctatagtcgtaggttcatacttgctatgaagtacgaagtacatcatttaaaatagaatccaaggaggagattttattgtttccctgttagtaatgatttggagttaaagacatgatgttaatcaaatggataagcaacatattatatggttatgccaatttagccatctggatgagagtagaatacggtgacacaaatatggtaccgttttataagactacatgtatgttgttgaagtagataaattacacctaaatgatatgtagtttacattttggcgcagtttcgtttttgacaagatgtatactaaaacaccagtggatacacataagatttccaatctcacattaatgtagtatttgagttcgaactaaggcgattatctgcccattatctgcatttcttttgagccaataataatgaacttttttttgtctttttcaggattt

SEQ ID NO: 106415 - DNA, 348 bp, Aquilegia coerulea
  Intron number 1 from transcript AcoGoldSmith_v1.027741m (l ocus AcoGoldSmith_v1.027741m.g) derived from phytozome v7. 0 (chr-ID scaffold_53; pos 992446 to 992793)
ccttggaacactgtcgtaaatttctttgtcttaactctttttttcttcatgttgtgtttagtgtacgtattacatgtatttttgcatagttggtagttttcacccaaaactggttgtggtttttgtgtgttttgcaagctggtttaattttgttctgaatttaggatttgtatgttttgatattagatctttgtctagatattagggttttgtttcttctatttggccaaaccctaaataatctggtggcaaagaagatttgtatgttggataacattgtcgattgtcgcattgaataatttgtcatatactaataagttttgcaatgcttaatctgttcaggataca

SEQ ID NO: 106416 - DNA, 418 bp, Aquilegia coerulea
  Intron number 4 from transcript AcoGoldSmith_v1.009443m (l ocus AcoGoldSmith_v1.009443m.g) derived from phytozome v7. 0 (chr-ID scaffold_14; pos 508914 to 509331)
atataccatcttctggtatcaacaatagcaagagtgtgagtgccttaaatcacaccttagtgttggaatttttaatgttggcaatgagtgcaacattttgatttttcttcagttttgccttccattgatgcgtgaattggttttcccacttaatgtatatgcaagcaagctaccttaacatatgctatgatgttgtaaagacagtatgatttgtttctatgcaccttcatgttcaatgtataaactcgctttattgtagctaatgaacttaaatcatagccgctatatgccagtcaaaggattgtgttgttccaacatttgaagtttgaacttcacgatgcaaatttactaactatagtatgatttctacaacttttgtttttaaagaggaaagtttttgtatttttctcaggattcc

SEQ ID NO: 106417 - DNA, 646 bp, Aquilegia coerulea
  Intron number 1 from transcript AcoGoldSmith_v1.009506m (l ocus AcoGoldSmith_v1.009506m.g) derived from phytozome v7. 0 (chr-ID scaffold_20; pos 3190887 to 3191532)
gtccattcctaaactgaccgaaagtaacataccaggtatgatttacagcctttctttgataaggaactgaaaagggttatgtaacaagaaaatatcatatagttgagaccatgaaaaaactctgtactcatagaaactctaaatttgcaactagtctctacataggagcaggacttaatattacatgaagagtagactgacctgtttctcactatgtgatatcatacaaagtcattgtatggatggcataggaaagtgattcatgtgttgttcagaaggacaagtccttgccccagatactttaaatccctgctagattttcaacattaaaagtactcttaacgcttatacaatggaaaaactgtaatcaaatactatagcttgacaatattatggaaattggagaaaagccaaaaaaagttccactggtcaagataatatcagattccgagagcgctttagtagtttttttaagcttctttatattcttgttcttttgatggaaatgtataagttgatactttctcctttaagaagtgcagacatcatttcccttgacacaaggcatccaactagtttatctgaaactatactttatccatatgttgcagtgctgccttgcttctatatctatccccaggaggag

SEQ ID NO: 106418 - DNA, 941 bp, Aquilegia coerulea
  Intron number 1 from transcript AcoGoldSmith_v1.002679m (l ocus AcoGoldSmith_v1.002679m.g) derived from phytozome v7. 0 (chr-ID scaffold_17; pos 1935106 to 1936046)
gattagctgccattgctgcaaattgcaggtttgtttagttttccttctcttcatttattgttaattttaactggaatgagctgaaattctgaattttattgatgtttttggatactgaagcatttaattgatttaagtttgttagttgtttattgaaacctagttcagattgtgatttggtaaagaaatttgttttattatcttcttttttaattactcaaacaaagatctaaagaggaatttgtgtctgaatgagtaatgttgaaagtcaagtcaatattgtttagtggattcttgcttgtctttgacaaagatctagttcaagataatggtttgaatggttgtagtggagaatctagtcagagacatattgttgcttctttttgttgtggacttcagtgatgtgggttccttttcatgttttggatgtttgtttcttggacaatattgctcttttcttgattctctgattggattcactgcaatatattttgatctaatctgtttgcaaactaaataatattttgttggtttcctagggtattaattgagatttttctattttggtaattgacgtgcaacattgttttatttgtgtttattctctattaatttctgattgaacatgtgtcaactacaaacattcaaaagaaatttggaaccgaatgaaaataatcttgttcggaaatctaagagtattgaaattcttggcatgtcttcctgaaaatttggtgtttcaaaggacctacagtgggagtaaaaattgggaaggggttgttaatttattgatttgcacacatggtgtattctatttcagggctacacatttttttgttctctacttgtcggtatcttttgagtttgttagtccattcatcccatcttcatatggttaatgctgttatctaattcaggaatctgagagagcttgatttgcggga

SEQ ID NO: 106419 - DNA, 718 bp, Aquilegia coerulea
  Intron number 1 from transcript AcoGoldSmith_v1.024846m (l ocus AcoGoldSmith_v1.024846m.g) derived from phytozome v7. 0 (chr-ID scaffold_4; pos 9237284 to 9238001)
ccaataagagacgctgtgaagacaagtactgttggtaacgatatgcgtgaactcataaaataacacatgaatatcattgtaatacacattacaaaattaattctactaaataataaaactcaaaagaatttatactcaataaactcaaaaataaataaacacttactacacttttcgcataaagatttggagaaggaaatgaactgaggcttgccgaagcaattttcttaagacaatattacgtccctgctatggtgcaaacagtctatggacgattggtcccccaagatacaacagttcttcactctactaaactgcactataatagtagagtactagcgaacgaatatgaagaacccttcgaattattgtagagaaatgaaaaagactttgtcttatttattgtatactaattggccagattagcacactatttatagtcacataagtgtctcttcataggtgtcttctcacatacatacaccttttacaaaaaggtgataagttgtttcaaagtaccttttcacaaataggcacctattgtagactaacggaaaaggcatgtcttttcataaagaattatgaaattacactgaatttggtcacaccaattcctaaaaggtattatccaatggatgcaccttttctcattcattttcactcataacaaaatattttattagaaaatatatttccaacaagtacgttatcaactaga

SEQ ID NO: 106420 - DNA, 784 bp, Aquilegia coerulea
  Intron number 2 from transcript AcoGoldSmith_v1.019935m (l ocus AcoGoldSmith_v1.019935m.g) derived from phytozome v7. 0 (chr-ID scaffold_20; pos 698244 to 699027 reverse strand )
caatcacctaaggagggtggaggagcgatttcgtatgaatgttatggggctctctttagtttgtttatttgttctctattttcgttagtattattttggtgagtgagttgcaattagtttcaattctatattcggaaactaagaaaccagaaaccgaattgattgagttgattatttcgtttgatttcatccacatttgttctaaaaatttccctattatcctaatcatcatattggctatttgcattgtctcttccgaaaggcgacttagttgtcttggtatatcaacctttttttttttttttttggtaaagttatatcaacctttgaaacttttttgactttgcaaaacatgtctaattgtttctgatccccctccccatttattggttgtttttttaatgtaagttatcgaatagcatttgtttgttataggggtttttcctttattcccctcaaactgaaatttcttcataccaaacaaaacagctaaaaaaattgtgttattgatgcatattctgcacaaacaatggaaaccatgtcataatatatgatcgtcatgttttcctcatgatgttggccccaaaggcactagttctcacattggaataacagcgtaaccaatgtccacaccattatacctctgttaaggttttcttagttagttgttttatttattgtcttgttgtgtatactgctggaaatttatttaattgtgtttaagatgaaatgtttgtactgaactctgagtatgcaggtcacacgtgtgggggcatttctgctt

SEQ ID NO: 106421 - DNA, 797 bp, Aquilegia coerulea
  Intron number 1 from transcript AcoGoldSmith_v1.001418m (l ocus AcoGoldSmith_v1.001418m.g) derived from phytozome v7. 0 (chr-ID scaffold_17; pos 4716246 to 4717042)
aggttggtttcgcaaaatcttcttttttagtaactttatcaactaactagccgtccgatttctgtgaaatacacatcaaactttatgcatggactgacagatccctaattattctcaatgtgctaatatattcaggagatgttcatacatattttgaaatcatcatagaacttaagtccacacatgaaagctggtctgttttttcccagtcaggttgatctcatgtccatgcataaagacctggtggtttattccctggtcagattggcctttgggactgtaagcatttcatgttacatttatataggacattattacgcattgaatgttaaactttaaagacaatattatgaatctatgatttgaagtgtggcgtcttttacagaagaaactttggtaagtgtatatttatataagtttctaattaatacacataatgaaacaaattagctattttctttaccgtttataaagacacttaaaaatggtaggctaccaatttatgccatcataagtgaatgaagggtcgaggtatgtataagtcatgcacgtggaatatatgaaaagagagtaaaaacagcaagccaatgactattgatgcgaaattttatcccagctatgaggtgtggcgtattagtatcattaatacgacagtgcttacatatggaatgtttgtcagcacacctcttcgaatttacgaatcttgatcattttgtaatagcttagagctcattgtaatgcttagagacttggaatttgtaggaagcaagagcattgttaggaaggctggagtatca

SEQ ID NO: 106422 - DNA, 606 bp, Aquilegia coerulea
  Intron number 1 from transcript AcoGoldSmith_v1.000875m (l ocus AcoGoldSmith_v1.000875m.g) derived from phytozome v7. 0 (chr-ID scaffold_17; pos 2202072 to 2202677 reverse stra nd)
ttttcgatcaaattaaacaatacttaaaacatcaggtacacctcgttcgatcagatcaatactaatgaacatatctaattgatttggatctatttaatcaatagattttgatcaaatttcaatcttttttattggattcttcattcttttattgaaattatggttttttcgatttggggttgttgattttagattcattttgatgtttattgtattgtatcaatgaattcagctcgttttgatatctttgtgaccatttcatcaactttttattgattttttgatttcgggtatctttattttgatcgatatgagtgtttttaatgtaagaatcaatcaaatttcaatagttttgatgttaaaggtgtgatttttaagcattcctctctgtttttgatgtattatatggtcaattatggattggatatttggatcatattgctttttttcgctagtgagaaataatccttttttgctatgtttgttaatgaatatgtctcttcttttttattatcttattactttgatacattggtttttaatctgatcattgtagtgatgtatataagaaaagtttaagaatttgttattgtgtattgcagaata

SEQ ID NO: 106423 - DNA, 589 bp, Aquilegia coerulea
  Intron number 2 from transcript AcoGoldSmith_v1.000657m (l ocus AcoGoldSmith_v1.000657m.g) derived from phytozome v7. 0 (chr-ID scaffold_4; pos 6270640 to 6271228 reverse stran d)
catttgcaatttcatctgcgcaggtttgtttgttgcattgcttccttgtttcttcatagtcttaatgtcagtagacatttcttactttaaatatgattgttcattcaaggtttctgtttctatgtatgtgagaaagaggatctttacgtaaggtttcagagatgccatataaataactccaatggggaaattttgcctgattgctacaagcagactgtttcagatacgtttagagggttttgatttgcaataatgcatcttcttctgagaattgagtttatgtgaggatttggttggttttcatgatttaacttctgtaaattttatcctgactcaaattgtcttaagtcctggccgaggaagtttaattaaatggttagacacgtatcatatatagtccattacacctatattttttttcctttcttagcgcattttagcaccattccttttcacctaagcatgtaaagtaggaaattctaacagatactgatctgctggaaacatgcatgacatctttttttgggagtcttacatttctctatttggtataggtttattcaaatactcctgctgattttgactttaa

SEQ ID NO: 106424 - DNA, 825 bp, Aquilegia coerulea
  Intron number 1 from transcript AcoGoldSmith_v1.022187m (l ocus AcoGoldSmith_v1.022187m.g) derived from phytozome v7. 0 (chr-ID scaffold_20; pos 1656723 to 1657547)
aaccacttggacagatcaggcttaattgttcgcgagttgcttaagaagttttacacttcaatgtgcatggcatctactattagaactactattttgttgtttgagaaagtgtgaaatgttttgagatgggttgttgtttttgttcagcttagcattactagatagtgtacacactttacataaaattgggaatatatgttgtagaaactggctggtcctttcaccgaaagaacttcttttcccttttcaagagattctgtgtatttctgcaagctacagaacaacagcattgtttacagtaaagaaatggtgttgatttaattcattgaagaagaaaattatggctgaagaaaagttgttataatggcaaaacattagttaaccctgcattacaagggaacttttgagtgagaccatatttcaacttcacaaagtgcgatcgaaaaaattagttaaccctgcattgtggtcgcggctcttccttgaagtcttttactggttcacctgttgttgtttatgggtgtattgctgatttcactattctcggctactatttcaggcttcagcaagatgcttccaaagaatagttctagaagtttgttttggttattggaatattacagcagaaatcttacctaaactaataatactaatacataatcagtttggattcggatttagaaattcaatagtttggattctataaattcggttgcaactcttataaaagtttggattctataattcaagagtttccatcttttttcttaagttttgaaataatccgcagaattttctttgtccttctctatttggttcttttgc

SEQ ID NO: 106425 - DNA, 799 bp, Aquilegia coerulea
  Intron number 1 from transcript AcoGoldSmith_v1.011519m (l ocus AcoGoldSmith_v1.011519m.g) derived from phytozome v7. 0 (chr-ID scaffold_20; pos 893716 to 894514)
atatcccttgcaacttttgcaatattattcttgcggtatacatgaataatcatctttcttgtttctattttgaatcttagatctatcaatatatatatgtttttgttattatttttatttttctcaattatcttgttgttagagctagtcaggtctccatcttgagactatctttttcttcatattttgctttcaaggacaagtcatacctggattgacagatcagtgtgctagagactactcatgatttagtcattacaacaatattattattgtacccagagaccagagagatcagagcagaaaaagataattagaattgtttgttgttaaaatcttggtgatcagatcataacaactctcatattgatcgagatgagggtgtcttcatatcttgggaatcaaagtgatctatttttgcttgtaattttcatccacttaagatcataagatatgcttatcttcttaatatttcatttccccagaaattaaagagttttcttcttatcttctgctaaccatctaggtattcttttctattttttttttttttttttcaatttcaaaataaagatctttgtataactgggaaaatgattccactgagattctcaaattttttttttttttttttttgttttaaatcaaaagggtgtgtaattatattgattctaagtaaaaaaatggaatgtttaaccccaaccctgatctagggtttcttcttctttctggttcatgaacattgttcttggggtaatttgtaagtttgtttggttaatgttgtgcaggtgagtgttcc

SEQ ID NO: 106426 - DNA, 523 bp, Aquilegia coerulea
  Intron number 2 from transcript AcoGoldSmith_v1.011519m (l ocus AcoGoldSmith_v1.011519m.g) derived from phytozome v7. 0 (chr-ID scaffold_20; pos 894589 to 895111)
ccgctttgcagtctctctcttggcaagatctccaggtatgttatactttaaaaactagctatatagctagctagagaatctccatctcattaaattaaaacaactacatactactatttctccatagcttctgaaaactaggttttcttttctttatagctcaaatcaaagtcaactctgatcttcaattcaatcactttatacaagttgatttctcttctaaaccaacactgtagactgtaacagccgccataatctccttcacctctccataacctatttttgcttttagtagacctgtctgtttgtttttgtttacaccttagctttgctttatacaactgtcattcaggtttcttttcaaaaagataactgtttcagtcacctcacaagtcacaaccctttctctctttggactttggagtttggaatataccctttaagtctaagatttacttttatatgttgttcatgttggttattttcagacacaaagcttccctttacaagatcacaagattga

SEQ ID NO: 106427 - DNA, 315 bp, Aquilegia coerulea
  Intron number 1 from transcript AcoGoldSmith_v1.009139m (l ocus AcoGoldSmith_v1.009139m.g) derived from phytozome v7. 0 (chr-ID scaffold_14; pos 231200 to 231514 reverse strand )
ccaatttatctacttacaaacagcagctccatcaggtatatgtcttctcttctcttctcttctctatttagggttttgcttaattttgaatattttttattggatgaagaaatcaaaacaaattacatgttatcaatcttcaaagtaaattaaataattaacaagaatggatggatggatgataactatgaaaattctgttgttttgtttttttgatacagtatctatcactgtctgatttctttctttctttcttttaacacctgctgatatactatgtatatgtgatataataggttcgtaaactattggagg

SEQ ID NO: 106428 - DNA, 334 bp, Aquilegia coerulea
  Intron number 1 from transcript AcoGoldSmith_v1.011601m (l ocus AcoGoldSmith_v1.011601m.g) derived from phytozome v7. 0 (chr-ID scaffold_14; pos 4042596 to 4042929 reverse stra nd)
gccaaaactgttgattcccaatctgtacttaaaaggtactccatatttttaacatcgaattcaatctgtttgtataatttcctatatgggttttcttcaattgtcatgtaaatcaatttatttcttttgggtatttgttgaaatcataaaaagtttgattctttacatgttttatctagtaatttgtgttaattattcaaaggggttttctttgaatctccccaagtaatgaaattgatcaatctttatgttaatccctcaaaggggtttgacagatttcaatcaaattgactaatttgatttgttttcttggaacagattgcagtctgaactg

SEQ ID NO: 106429 - DNA, 1008 bp, Aquilegia coerulea
  Intron number 1 from transcript AcoGoldSmith_v1.009635m (l ocus AcoGoldSmith_v1.009646m.g) derived from phytozome v7. 0 (chr-ID scaffold_17; pos 2539079 to 2540086 reverse stra nd)
gtctcgaccatcagaaagtttctggatccgttccagtaagtagtaactctctctctctctctttctctctctctctcttcagatctcactcattaataactctgaaggaagaatgtgtagaggcaaaagaactgaataataaaggaagagcattgaaattgcttggaagagattcttgtatgtaataataaataaaagctcggacagacttggagaagttcctgaacatctgtaagttgacccttgatagtgttacttgtcttgagctgatcttcatttgatccatgctgtgcattaactcttgtatgcagtgatggtcaaattactgtgatcccctcacgtagtgctgtaaaggtctaaatgaggatatatccatgtaactcattactaaacgtcccacttaaaagtgtagcactagcacagcatgtgtaagctgtctaaactctaaaccatttcgctgttgttgtagtgatggagcagctctaagactgcatggcatttgatctgctattactaccccccacaaagtcacaaactactgttgcttttatagtcttttacaaattttttttttttggtaaagtattttacagatttgtatacgggtccagccccaaaaactgacactcttcggtccaggcccgtttaaccggcaggggaaaacgaatcaaagcgttcattttacgtaagaagaccaatttttttgttttcgccggtaaatacgaaaaaacaaataatctggcaagagagagaaagagagagttaacgaaagaagaaacacagtgaaagaggaataagaaagaaatcatcagtgactcagttctaattcgtcattaaagatgatgtcgagcggcggttacaccagtctcgaccatcagaaagtttctggatccgttccagtaagtagtaactctctctctctttctctctctctctcttcagatctcactcattaatttattcaattgtgcaggcagtctcagatccaggtcatacgtctgttaaatt

SEQ ID NO: 106430 - DNA, 820 bp, Aquilegia coerulea
  Intron number 4 from transcript AcoGoldSmith_v1.009451m (l ocus AcoGoldSmith_v1.009451m.g) derived from phytozome v7. 0 (chr-ID scaffold_20; pos 2451470 to 2452289 reverse stra nd)
cgctggaaggggaaagcctaaagttgagaagaaaggtaaatttcattcttgtaattctttgatttatattgtgatattcttgttgcgcatttttcgtttctgatttcgtaggttgtttatcttttttattgttgtaatttagtttagttaagttatagtttggtttttgttgtagtctagttttgtattaatcagattggcaactgtggaagaagtctgagcagatcacatatgcattcgactttccacatttattatttaataatttaataccaatgttcattttccatccaagtttttatgtgtgcatgtgtttaatggaggtgggggtgagattctgaactcttcgaatagagcatttagaggtctaaagtgctgattacgtatgaattagatgttaaattctattcagtaggttttgagaattcattatatcatatttaaatggtttagcaaatttcagcgttacacgtcttgttatgaaaacatttgtggtttctgacttctgaatatatgactaaaagaaaaaagactgaaacagtcttaacactgtatcacgtctaaaacatgtaaaactggtgatgataaatgatactgacatggtactttggcaagttgagatcttttatttgggagtatagttcaaatattatgaatctatgatacattatcataatgtatcagtcatacatgtattttccagaattttaagtatgcctgttcaatctcaaatatatttatttattgaaattgtatttttttctggctcttttgaatttccacagctgcgccagttcaagttgcatttggtcagagcagt

SEQ ID NO: 106431 - DNA, 833 bp, Aquilegia coerulea
  Intron number 1 from transcript AcoGoldSmith_v1.005069m (l ocus AcoGoldSmith_v1.005069m.g) derived from phytozome v7. 0 (chr-ID scaffold_45; pos 494400 to 495232)
tctcgattcctgcagtatcaacaatcaatcgacacgtaaggttcttctttcgagtttgatgaaatgtttgattttcttacttgtttggtcgattcaatgcaattgtttgatcgaagttgagaaacatttcgttcacagttgatttttcttatagatttgtaatgttcggaattagaaatcaatgttaatagcaacttttagaattgaatttggtaggagaagctagattaaattaacgctttaagctaaattttaagattaagacatctcaaccaggtttgcattatggagtaaactagcgaggcacaaagtgtagctacatgtctactcatagaatggaattgctatacacaatacactatgttattacttattaattgatgtctgggagacctaaacattgggttactcgcggcttatgaaagaacaacttcttgatgttgttagtgaggtaccccagtgctggattataatacatctaggcatacaaatgatgtaggggtatggaaaaaatacgcagggatgaagtgtttgaagagttacattgtattaatattgtagaggtatgggtaaaaatattaagggtttgaagttcattccatttaagcttgattgttttgtctcttgtttggaaaacatagcttaccacttataaatttcttgtaatatttatagtgtgattttatgtaatatttttacttttccttgatattcatattacttggagttctggacattaatattcatgtactttggagttctggacaatttggtttacttcgtttcaatattcccatggtctgagaattatctctgttatgaaattgtacagt

SEQ ID NO: 106432 - DNA, 846 bp, Aquilegia coerulea
  Intron number 1 from transcript AcoGoldSmith_v1.002721m (l ocus AcoGoldSmith_v1.002721m.g) derived from phytozome v7. 0 (chr-ID scaffold_17; pos 2947516 to 2948361 reverse stra nd)
aagaaggtgatcttcattcaattcaattcaattgttctgatattatttgtttatttacttcttttttttaattattgagttaaactgattttagcttatgcgcttgtggttgaaatcttatccactggaattagtgattattattgattaaaccatttgttgctaaataagtggatgtgggtggaatttagagggaaatttatgtatgtttaatcaagtataaacacagatcatacattccttagtaagtacattaaattgaaaatgaaatcacgcaatatgttttgtagaatgagagtttctcgttttagctgatagtgatagtggacactggcaatgggcactttgtttggttcaaaatatactttcgcagtactaagattctacgatattcttgtttacatttttaaagtctgggtaagaaacaattcttgagggggtttagaagtgaatagatttcaatgatttgaactctttcagacgctgacattttgacatatctgtcattgtgatatagtttgaagggatgtgtttattgatggtcgacttagatagtttgatcctagataaacaagatctttgcaataaaaatttagcagtacatcgagcatgtgtgtttctatatataattgatacatcccttaaccctttatatgcttacatcaaaatgtatttgtcattagcgaaagaaattacacaactgttctttagtctttgcctattcttagtcaacttacatatctactctcactctcattggaatcatgaatactacttggcggatttgagattttattgattgttgatgtaggtgatccttcatcaagaaaccaagtaattgtggag

SEQ ID NO: 106433 - DNA, 920 bp, Aquilegia coerulea
  Intron number 2 from transcript AcoGoldSmith_v1.001371m (l ocus AcoGoldSmith_v1.001371m.g) derived from phytozome v7. 0 (chr-ID scaffold_4; pos 234497 to 235416)
ctaccccttcctcaggtacttttttgtcgtggatttagattcaagggactctacttattcttttttgtgtgttttaattttctctttttgacatttttactttgcaaacaagttattcgtttttgcacacttatttcttagatggtaaagtttgttatcacaaagccatatctttattaaatggctagaggtcccaataacatgtttcttacaagaaggaattatcttatttgccaacattgatcttactttgagctttggcggtcgtaaatttagataggtgccaactttcttagtttctcaaaaaattgggaacttgcatgtcatgaatttccagctttctcttaccttatctatttatgaagggccccgaactcccgaaggagccgcccttgaaaaggccggtctacatagaacataaaataatttaattgttcttagccccgtgatattggaatattaaattagatttctcttaaatcaaataaataattaaatcagaggcacaatctaccgagggttgagaatctgcaataataatcaatggagtctatgctcagatgccaaattatatgactcatatggccaccaattggaaacctatctatcagccgtgagccaacagttgctatgttcttgtccaaagtgccacagaattatcaggtgttccgtaaccaaggaagaatgcagagtgtcatttattgtgcattttatgattcttccatagaaacataactttcaaatttggtcttcagttagatgcattacagggagatggtattagtttcattttacatttgttcttcatgatttttttttatttattttttttttcaattttgatcatcaagggttaccatttgtgagaatggatagtaagctgacagttttttatctttattgtttgtgcagattgttat

SEQ ID NO: 106434 - DNA, 562 bp, Aquilegia coerulea
  Intron number 3 from transcript AcoGoldSmith_v1.016440m (l ocus AcoGoldSmith_v1.016440m.g) derived from phytozome v7. 0 (chr-ID scaffold_45; pos 1837803 to 1838364 reverse stra nd)
ttcattgacacttgggtactcctactggagtgcaggttagtaccgaaacctgttaaggcatgctccaatacattatatatgtagaactgttacaaattgcatttcctagacagaatttaggttgatgttcgttattcctttaaaaaatgcagcatacttttttattacaaatgcaaacttgtgctttatatagaatgattatttttcatatttgtaccttttcttcagatgtgtttcttaacactagcttattgttctttttctagaccaaatcttaaagcaaatactaccccctggagtggatgtaccttcttcatttgagacaatagttaagtactctctcatattccccatcttttgttgtgtttccctcctctcttttttttttccttttcttgccactgttgtgcgcttgtatatttccaacaagtctagtaatcattgcacttatggcattttaattcaggttcgtatacagtattttgagtttctcagcttttggaaacaaactaacataatataatttcatcatcaggtcatattgctcatttgaatattggtg

SEQ ID NO: 106435 - DNA, 390 bp, Aquilegia coerulea
  Intron number 1 from transcript AcoGoldSmith_v1.027751m (l ocus AcoGoldSmith_v1.027751m.g) derived from phytozome v7. 0 (chr-ID scaffold_53; pos 107493 to 107882 reverse strand )
ctcttgaggtaaaacaaaaatccttcttcttttgatctattagttgctaagtatgtttttttttttttttttttcgaaaaataataataatggagtttttaaaattttaaatgtagaagatgggaagtttttttttgtaaaattggagtttatttagagatgggattgttgtttttttatcgaatggaatgttgatatttgtcattattgttgcgggtttttgcaaaaccccttattcatttatttgttgttgcgaacgaggtttagaaaaactagaaatatagtataccatggatttaatcaaaatagatgttgaaaaattcgtctaggcgaggttgtcccttgaagaactctttacaaatctagtgtagtgtttttgtagatatctca

SEQ ID NO: 106436 - DNA, 928 bp, Aquilegia coerulea
  Intron number 1 from transcript AcoGoldSmith_v1.006209m (l ocus AcoGoldSmith_v1.006209m.g) derived from phytozome v7. 0 (chr-ID scaffold_20; pos 2588400 to 2589327 reverse stra nd)
aaagattagataaggtctgcactctgcactctctatttctaactagatgcaatgtcatttctccctcttcctgaaatttcctttctttataccttctttttctttttcttttaagctttttctttaatttacattattacataaaaatcatattaccccgttactaagccaaacttaattcagaatatttcccatgcaagtattttaaggattttatttaatgtatagataccatgtgtagtatctgcttttaaacccatttgctcggccttcttaaactaaattgttaacatgtatgacaagctaataacacggggtctgctatattgttttcttcatgtttggctatttttatttatcgctgatcaggattgtgtttgggatggtcggacattaataaccagcaaaatttaaaactaaggacttgtagagcagtttgtaacataagtgaaaaaattgcaaaaattcgtgaatatatatccgtttttttagaaatcagatatcaaaatatttgcaagatgaattgtaatgtataattacttttgtagtgtcgaaattttgggtacatccattttctcagaaattagatatccacgtaaaatcaatattttcaactatggtttgtagcgctttagttctcaataatattttttagtgaccaatggttacgcagagcgattttgtggacatacagttttttctgtccacaagacagcgttatattattggtccacctcataaaaactttcacatcagtattttttgtttcttaattttgttttgttttattttttactttaacgctgatgtggaagtttttatgaggtggaccagtaatataactctgtattgtggacagaaaaaaaactgtatgtccacaaaatcgcactcatggttacatattgttgtttcaggtaaacttaagtgg

SEQ ID NO: 106437 - DNA, 1026 bp, Aquilegia coerulea
  Intron number 2 from transcript AcoGoldSmith_v1.002184m (l ocus AcoGoldSmith_v1.002184m.g) derived from phytozome v7. 0 (chr-ID scaffold_20; pos 55950 to 56975)
aacgatctagtcgtcttgatcgaatccggttagtataatttaattttcttctttgggttattagatatattgatttttgtttatattaatgtttagtataattgtggtaatggattattctttgcagtttttatgatgaatttggcatatttaggatcactggaaatagacttggttgtcgtgtggagatagacttttcagtgacttgaccactcacagtattgcttttacaatgcctgcggaatagtcttagttattatcaaatttttcgaaaactaatccaatatttggagtctgagtattgaggcctgtcatatggagttacatttcaatgatacgaataccaaaatcagaatggagaagacgaagatattgtgatcaaaaccaagctagggtttttgtggggcaatgccattctggtcataaaataaaatggtcgtcctgcaaatcactatgtcctctgtatgaggattttgtggtggttggaatagaggcatgtttggttgtttggtgggaggtaaaccttatgataagagtgacacggatgaggaagcaaacactttagggaaacatatgtatgtctgcccatatgatgccatttttctccaaaatttggtctctttttatcgaaggagatgaaagatgcataagtcttaggggaggtatacgccttttgcagcactgtgtgcatcttatggatgttttccatgtctgaatcattctcacaacttccttgttgctaaactactctattcttttacatgtacaattaggcactatgtatattagataattattaataaaaatttgatagatattacaacggaggaattatacttagattactagaagtcaaaaatgcttttatattcccgaggagaacacatgttgggtctattattatttttccgaatgccctctgcattacttgtttgaagaatgacatattgctgggtttttttcttttaagtcttgcttaaaaccatgatatgaacagggctgctactgaagcattaaccagaaggc

SEQ ID NO: 106438 - DNA, 697 bp, Aquilegia coerulea
  Intron number 1 from transcript AcoGoldSmith_v1.010204m (l ocus AcoGoldSmith_v1.009801m.g) derived from phytozome v7. 0 (chr-ID scaffold_76; pos 673892 to 674588)
gagaatttaaaagttaaaggttggacttagcaatagttatttacaaatttgcagaactaatgaaggtcattttgttcttgaattatataatttttagaggaattagaagattcagaattatttatatgaatttcaaagcttgtatcacagtgaatttcatcgagttgaatggagaggctgaaatttgaattcaatttcgtattcatgaaagtgatttgagttttatttaagtttgagttttacaattcttctcttatgagtttctgaaaatatcacgatagagaagaaaaaaaagtttttatttttttgattaattaaatggtgaggtggactaattataaacgtggaccaatgagaaactattgtcttgtggacacacatttatggtatgtccacaaaatcgcactcgttttctctttatatacagtcttgcaaagtgcagaatttgagccttaatgggctacttttggatctttgtaagcccattaaaagcctacactttttgcaacaacagacttcagatttggcccaaagcaaaacctaggaccttttattagggtttagcatagttaatcctgtccgtcgatatacaaacatttcgctttaaaaggtagagatagacttcagatcacactctctcctaaactcactgaaacagttagggtttcttcgctatatagctgcgaagaacctcttt

SEQ ID NO: 106439 - DNA, 366 bp, Aquilegia coerulea
  Intron number 2 from transcript AcoGoldSmith_v1.003498m (l ocus AcoGoldSmith_v1.003498m.g) derived from phytozome v7. 0 (chr-ID scaffold_14; pos 1757724 to 1758089 reverse stra nd)
gccgagatttgttcttcctttccggtttgtgatttctcgaacttgaatatgaagttaatttgattgcaatttaactaaaatgttaatctgataaagaattaattatgacttgaaaatttaaaaattgttctttctttactgttttaatcatatatgttttttccacatatgacataccattcattttatgcatgaagaaagattcatttccttagaactttagaattagtgtgtatttggttctttgtagtttttttctgttattggcattggtttgtttatttgaaaacaaatcatgttattgagttgctgttggtgtaaaattgaacagacaactggttccttatacttttgggctgctcacct

SEQ ID NO: 106440 - DNA, 689 bp, Aquilegia coerulea
  Intron number 1 from transcript AcoGoldSmith_v1.002362m (l ocus AcoGoldSmith_v1.002362m.g) derived from phytozome v7. 0 (chr-ID scaffold_14; pos 224253 to 224941)
taaaacccttggtgccaggttaggacatgttgttttcaaattgcctccttactactctttgttcatttattgtgaaataaacaaccccaaccacaaaataaaatctctattggaaaatgaaaaataaccgtgtacaacctattggaagcgaatagatgaatccatggagtttaaatttaagcatgattatatttgtcaatagtcttaggactataataagtgcttgataatcctgattaaccttacaaatatcgaggaacaacccttctggtgttttagatggaattttaagttctttaaacgaaggatagagatgcttactgggaattggttttgatcctattaataatatatataaaactcagcttacaaaatttccaaagaacgtgcataattttatttgttcgggacaagaagggacatgttctatatatgaagggacaattctgaagatgttatgaccatatatgactttacatggagtctataatgatttgcgttaaccatctataatgataacttgtttgcatattgacttcatatttaaggaattacataattgtagacatctgcttctttcagttgttaccatggttcagtattgtataaacaacttgctgcatttattaaataaattcgtattggttttaagacgtctttaattattattattcaggaagatcagtgta

SEQ ID NO: 106441 - DNA, 813 bp, Aquilegia coerulea
  Intron number 2 from transcript AcoGoldSmith_v1.004338m (l ocus AcoGoldSmith_v1.004338m.g) derived from phytozome v7. 0 (chr-ID scaffold_5; pos 1905982 to 1906794)
aagcacttgctaaaaagttgcctggagatctcaatgtaattttcttatcttatcttgattgatttttttttgttgagttttcactaatttttgtatctgaagttttttgtgtttttttttttttaataccaatataccatgtatctgaagatttaaacaaggaaaaaaatgtgcagaaaaggaatatttgttttagagaaatttagattaatatttgttaattaacttcctagtttatcacttaggggttaggtactacaacttaattgtgtttaattgacatttgatgtttaccaccttatattgttgtgggcccacacatatgaaattgacatcttggctctgatgttttgttggggggggggccactaaagaagcgtaatatgcccattggcatacaatttggttcagcgtctcgaaacgagggagttgagcaagtgtatttatgtatagttctgcttattctgataatttataggacttttaggagcatagattgaaattttgatttgagtcagtgttctgttattctcataagtcggaatatactttaaaatcaacaatattctgagaatttttttttttttttttctttaaattcttagaatattctgattctaattctgatttatgaaaaatgtggttagattgccaacacttccaaagttacatgacagtatgccctattgtataattaaacatttatcttcactcaaatagtcaattaattgcggttgatatgctttcatgctaaatccaaagtttgatggaatggtaggttgtgttctttacgaactctgggacagaagcaaa

SEQ ID NO: 106442 - DNA, 988 bp, Aquilegia coerulea
  Intron number 1 from transcript AcoGoldSmith_v1.006355m (l ocus AcoGoldSmith_v1.006355m.g) derived from phytozome v7. 0 (chr-ID scaffold_14; pos 214884 to 215871)
cttactgattcaaatcaccatcaaaaccaattaaggtaagcctattttgtttttaattagttgaacacttgaaccaataactatatatatatatatgtacccatttgcatgataagtactaactgattcaaggcagttttctgaatccttgctccatctttaggatttaaactgaatttagagatcatcataattaatgttttcgttctacctctagtagactagtagtaggtagtactctttttcaattaagtggcatgagatatgtctcgtgatcacatggtatgctgattgctgaatatcaattacaaattcactctattgatatcagtgccagtcgaatctcaatagtaaactaatagtactaattactgccattaatattgattacccaaaatatatatcactaatacatactactgtactggcattttgtgcaatcaaaaggccatcatgtgattttaatgtatatgatcttctttttttgatgaaattttaatgtatatgatcaccaatcaatcaagatgattttgtttctactttgtagtactgctttggagaaaattatgtagcgggccgtttatttggtcatcaactcatatatatttcacgtacctagtatcagtatgtacatatgtatactgtacattaaatgattattattaaaagagaaatcaaaatccttatgatgagttcacacacgtctttttttctttctaatcagtaatcactattcactattcactaattcgtttctattttgtttggttttcattaaattcaagcgtttaacaaacaccatcctgcattcctgcctctataactaagtatatgttcatgctgttttatccttcccctctatcaacctaaattgtgtgtcttttatttattccttttttcattctcttacaaaataaacctaccttatgtgatcaatgactgtaaatgagaagccaccacaggcagacaagaaatttgtgattgcaat

SEQ ID NO: 106443 - DNA, 135 bp, Aquilegia coerulea
  Intron number 3 from transcript AcoGoldSmith_v1.005557m (l ocus AcoGoldSmith_v1.005557m.g) derived from phytozome v7. 0 (chr-ID scaffold_4; pos 8811287 to 8811421)
aaagtggtcatcaggtaataaaagcaaaaacacaatcaaaagagagaaaaaaaaagacctctttttcttcttgctttttttctttatgtacttaattattaatcatctttttatctttcttttgatgtgattagc

SEQ ID NO: 106444 - DNA, 563 bp, Aquilegia coerulea
  Intron number 2 from transcript AcoGoldSmith_v1.004109m (l ocus AcoGoldSmith_v1.004109m.g) derived from phytozome v7. 0 (chr-ID scaffold_45; pos 351535 to 352097 reverse strand )
cacagaactgttggtgataagaacgattataactggtaatgtagtatgtgaagttattttgatttgaatgtggtttgatatgtatgattcaagtctgattgataaattgattcatggataaaagtataccaagtatgaaggcaagttgaaacaaattcctgcaattgatagacgcgttttcccttattgtgatagtaattgttagagacttcattgtacatttcaaagtggttaagtacttagaaagtatgaagtatgaactcccttgggaaagcaattgaaaataaagtttctgttattactgagtctttcaattacttcagtgcactttctgacccccttatcgcccttccaatcaaaattaagtttgtatctgccaattgagagaacagttttgcttgttttttgttttccagagttgttttctgcgattatttgaattttggatataatgatttctgttaatcaagtttgtaaaccatatgcatcttttttttggtatttagcaatgttcttttcttgatgtaggcttttaacaccacctggtgctccttttatttctc

SEQ ID NO: 106445 - DNA, 994 bp, Aquilegia coerulea
  Intron number 4 from transcript AcoGoldSmith_v1.006907m (l ocus AcoGoldSmith_v1.006907m.g) derived from phytozome v7. 0 (chr-ID scaffold_20; pos 3647193 to 3648186 reverse stra nd)
atttaaagcggattcgattcaggtactactattctctattattccttaattcattcatttaacatataagaaatggattgttgatatatgaatttccatagtttagaatttagattaaagaaatcaaaagttccaattgtgattccaaaatgagtttcttttgacttggtgtagtgggctaggtagactatttagtgttgagtagtaaagtatttagagtgtgcttttggtcatgttttggtgcttttttatatgtttaagcaaaatgatggtgtttaattactgttttctcttgagtgcttattgttattgcccatcaacagatcaattggataaatctttgttgaactgttgaagaccaactataagcggataaacaggacagatgcacatgcggttataatggcccactataacagcagcatgggaccagtaataggaccatgttggtcaaaattcacccaaacaaattgattatgattgtcaggccttttataactttgtagtcccagggccatagtatctaataagagtcactagtcacaactattcatgtccctttctaccagtacttcactacttcatgtaactgctgcataattaaacatgattcctgaattttgtttttggccgacccaagcatatggcaataaatcttttctttctcttttggttatttggcacaggagatatacctttttgtttgttggctgtactttttgatataaggacataaatgtgtgctttttggatagtgatttgatattgttagttgataagcctttgcccagaagttctcatctgttggacaatctttattataaaaatacggaaaaagaaaaattctcttcaacattttcatctactggaaagtcttgtgtattggccaattattttgaagattgtattgtgcaattcattaaatggttatatcttccatgtacatactagattaaaggcactgactggtagcttctttcttcttagtcgggag

SEQ ID NO: 106446 - DNA, 931 bp, Aquilegia coerulea
  Intron number 1 from transcript AcoGoldSmith_v1.000187m (l ocus AcoGoldSmith_v1.000187m.g) derived from phytozome v7. 0 (chr-ID scaffold_20; pos 3426690 to 3427620 reverse stra nd)
tgggaattattccaattgcagaaaaagttcacgaggtaagaagaatttaatttcattgaattgggtatctttgtttttggtttaaagtttaattaattagttagttttcttagttgaattgttagtgatggaagtaaacaacctttaaacaacagatattttatgagatagtagttcttgtagtgtttgatgcacaagctatactgagaatttagagattttttaaataattagagcagagcagagcagcatagatcaattgatatgcttctggttcaaaattgggttctcgacatctcgtttgatagtgtgtatttttgcttaaaagtaatgtaataatatttgatttgattcagtagatggttagggttttaatatagtttacatatgcaccacaattccgagtctaatcatcacgtaaatgtgtctgaactctgaagcctgtttactttgttgctagtactgtacatataatgttttctccatgtctttataactaaacaatgcttgagagtgagacccgagtatatagtaatatgtcagagtaatgtgttcgtgtttttacttggtggaatattatggaccatacatagttattgaccaagcattacaggtactacctatgactgggaaatttccaaaggttaaaactgtgtcgaagtgattggattattcaaaaattttgacatttttgtggttattttgatattttttaaattattggaaggagtgtatatttctgtatcctattttttctatcgttgttcgaatgtgttgagctgaccaaggagacctaggagtttcttatttgatatacctatggagtctacccaaacagcgtagttttactttttttgccaattagaatttagaggtttattttgacaattatggtcgccacctgatggtgttatcatgccacatctgcagg

SEQ ID NO: 106447 - DNA, 998 bp, Aquilegia coerulea
  Intron number 1 from transcript AcoGoldSmith_v1.022528m (l ocus AcoGoldSmith_v1.022528m.g) derived from phytozome v7. 0 (chr-ID scaffold_5; pos 7467416 to 7468413 reverse stran d)
ctaaagtggcacatctgtatctaattctaacaaaggtacttatttgaaatttgctaacttttatcattatgtttttttatataaaggtccagtgtgatttatatctatccccgaagtgttattaataagcaatggcatgtgagtaagtcacttctaatcaatatcattccatgaatatcgactgaactaacactcgacacttgctctgcctttggctgtgaccatgtgccttgctagtggatatcaagtttctattattaagtttagtctagttgttctgtactggttgtgataggttttttattaataggttcccttttgtttaatcattcacatgcttataatttattgaccatgtcactgagtgggaaaattccatccctattaatgtgtggttcattctcagccttcatctataaatgtctttgcttcttgttgtatagcttacttgcttttgtttgaccattcagatgctttgatttttataattgtgtcattgaaaggagaaataaaatcttatccccacatttgaatgcatgaaatagacatcttgagaatgtgtgatttgatcttcagccaccattaaagattcatttttgtttcttattatatagataacttcgaagtttgtacataaaatgctttacttctttttgtttggattgtaaagaagttgaaaagtaaaatgataataataaccaacgaacatatgtttgacgctgattaaggatctgatcaaccttgacttagttatattcaagtcagcaatagggtgatgtgacaacattttgaaattatattatagagaagattttgcggtaacattcttcctgaatttcttccaacatcgacaacacagaaaaataatgtattgctactaatttggttcatcaatatatagataaataaagaactttaatatgttatatacatgcacacctaggaaaaaaattaaatttacaaagtgacatttttcttgtctcatttgcagataaata

SEQ ID NO: 106448 - DNA, 991 bp, Aquilegia coerulea
  Intron number 1 from transcript AcoGoldSmith_v1.009296m (l ocus AcoGoldSmith_v1.009296m.g) derived from phytozome v7. 0 (chr-ID scaffold_17; pos 2387419 to 2388409)
tcagcttctgctcctaagagaatcaaaactgaaaggttaaatttcgaacttttttgttttcttctttgattaacactgcaaaatctagttttggttttctttctgctttctttagagtggttttaagctagctttccatgcaagctttactttgcattgattataaaatctctaaatatttcatctttttatatttttaaaccttttcttactatgggtgctataaattttcatcctttctctgtttttcttgttctgttttgctttggtttgtaattattttgctctagagtctctgttctgagcttgatttgtaatggggattgtttgtagtttttgctattacaaaaccctaacctagaccttgacacatttttatggtaaatgtgtaatggaaacctaaatgttgtgttcaggtgttagtgaacatccgcaattccgcatttagtatcttaacatccccaccatgcttggtgtagcttaggtgggatcttaagttcttaacaactcatcgcccttccttatgctactaatggtcctttgctacctggggtggagagtggagaattgaaccctgagggaggctttttttgctcatggttagaccaaacactcataattggtagactgtagacacaaatgttttgtatcacattgacatggttaaatctaggggttgacatgaaaataaacaaataaatgaacaaattttgtcaaacttggactgtgccattatgaatacaattgcagcaatggtgttgttagaatatctattcactggtacaatggtatatctttctcattcctatggcatgccacacgtttgagatatgctattttgatcaagaatgttgacgggcattcttaagtttgaatctcaatatccatcagaatcaagtgtatcagggatatgtattatcaagcgtctttttcttttcttgttaaaaactggacagcagatgccttacccttttgatattgacaggtacaa

SEQ ID NO: 106449 - DNA, 625 bp, Aquilegia coerulea
  Intron number 1 from transcript AcoGoldSmith_v1.022869m (l ocus AcoGoldSmith_v1.022869m.g) derived from phytozome v7. 0 (chr-ID scaffold_17; pos 1097940 to 1098564 reverse stra nd)
cacggtcgagatagactatccctgtaagaacggtaagtcgttttactcatcattgtgattttgtcgctatataagcactactctactgactacctatactgaactcttcccccttctcgttgtttacatgaatcacagatgatggatatggtcagtccttcaataaggtgggcaaagggaagcaagttacttaaggacagaagcccttggtgtctgcagcagtgtctccattcaagtctagatatcatttctttaaaattaagctctcttcgatctacgcacagagaatatctggtaaacttccaaactaaaatttgctccaaatctaagtggagttgttttcaagattttattttcttcccaaacatatttttccatctacgagtacaagacatcatatattacatgtttaaacaaaccattttagcgtggcatgagcatcggaaataactagcttcacagtttaaggaactctagtctgaagtctgaacaaagtaatggaaaccatgaaatgtaacagatgctcaaagtaattatacgaataatagctcagttgaccacgagttatttttaattctaaatactttccagtagtgagaaactaatttaagtttgatgtacttag

SEQ ID NO: 106450 - DNA, 659 bp, Aquilegia coerulea
  Intron number 3 from transcript AcoGoldSmith_v1.010778m (l ocus AcoGoldSmith_v1.010778m.g) derived from phytozome v7. 0 (chr-ID scaffold_5; pos 2886231 to 2886889 reverse stran d)
ctgtatccaaattacaataaaattttgtttcctcttacttcagcatactatattctcatgattatactagaatagatacatgatgagaatatggttgtcaatttaaccatccttactattctcgtgattatactagatacaaatatgtattactaagtattcacttgctaataaccacccttattattcagtcagaattttaggttctatcatttgcagatcgtcagtactataaaaagataagaatatggtcgtcattttttatggcagttttactttcagtttaactagcggaggtcttatgtatcatgtttattggttttattggtgtcagactattgtattatatgtattaagctttttgtgatttttttcaagactactttgaaaatgaacctccattacctctctgcgacttatatatggcatacatacagagggaagacacattatacagttggatacatcttagattcatatttacgattatatgatcttctctaggcttatatgttcatgtggtcccccacacgcatgcacagatgcacatgcattgttagatggtttggtcagttaattaataagactaaagcttgtcagagtagtgcattgcagtctagaaactttgatttccttgacaaaatgaacagaaaacaaaa

SEQ ID NO: 106451 - DNA, 908 bp, Aquilegia coerulea
  Intron number 1 from transcript AcoGoldSmith_v1.022857m (l ocus AcoGoldSmith_v1.022857m.g) derived from phytozome v7. 0 (chr-ID scaffold_17; pos 2554892 to 2555799)
gggtgtgtttgattggtaagaataattatttgtgagaatttttatagttaaaagtattctcacataaaataattgccaccaataggttgtttgattggacataaaataggaggaagattttagttgtttgattaaacaaaaaaaatattccctacaagtctgggaatttttttttagggattaaaaagaaaattcatgaaaaatatttttatcatggaattcttacacaacccaactaactttatcaataaagcatctgggaatttctggggtaatgtttgacatgggaatttttcccactaccaatcaaacggacccatgatttcatccctcaggaggacaaaagttgttagtataaaagtaaatattttccctagaaataataacagtaaaaattctattttacccatgtaaaatttttggacgaggaaaggaatctgaccattagatgtaatgacatgtagaacacaaatcccaatacatcccaataatcaagcaaaactgctaaagttacaaacacacatggcagcccatacaaagtttaaaattcgcttcaccgtccaacacttccgatcaaactctcaacaaaatgcaacaccgcgtgaagtgtagtgatttaaacatttacaaaccaacaattagccatttatagccgttgattacgtcgaccaagcgccgaattcttttttaattgtttgaaaacacccatcttcaccttttccctctctctctctctctctctctctctctctctcttcgtttctcgaaatgaaacaaaacaaaaaccctaaatttctctgaaaagttcaaattaatcatcaagaaaccctagatcttctaattaaagaacaattaagatagaaatgatccaagatatcttcggatcagttcgtcgatctttagtattt

SEQ ID NO: 106452 - DNA, 513 bp, Aquilegia coerulea
  Intron number 2 from transcript AcoGoldSmith_v1.007518m (l ocus AcoGoldSmith_v1.007518m.g) derived from phytozome v7. 0 (chr-ID scaffold_20; pos 1605620 to 1606132)
ctctgttcatcagttatcgcataggagtttcaaaggtattagtaattcaaatttgaaattgtttcgtttttctaattcaaataaagttattgcttgtttttgtttatatatatagaattttcaattttagtaattcaattcaaataaaattatttttttgttttacttcaattcaattcaattcaaataaaattattgtttattttactaaaattcaaaaaaaaaaaaaaaaaattgcttcttcaattcataagtagttttcgaaatcctttagtttttcttcaattcaaataaaattattgcttgtcatatttttattatcgatgctgccaaattggtctgaattgcctgaagaacttgtaagtattatatcagaaaaatttaatttttatgaagattacttaaggtttagttcagtttgtcattcatggagatctgttactcttaataatcataaacgccatagtcaatttctcaaatattttccttggctcatgcttcctgctgatgaag

SEQ ID NO: 106453 - DNA, 600 bp, Aquilegia coerulea
  Intron number 1 from transcript AcoGoldSmith_v1.003464m (l ocus AcoGoldSmith_v1.003464m.g) derived from phytozome v7. 0 (chr-ID scaffold_4; pos 4559815 to 4560414 reverse stran d)
cgtattgcactctttgttgagccttctccgtttgcgtaagtgtttaactagcaatgaacttggtttcttttgttctaaattgaaagaaagtacatttttctttttttttatttatcaattgttttatggtataaatttcaatggttttgctgattcaattcattaagtcaactaatgtttttagtttttacagagtgctatatgcctatatttttaatgaacaacatgaatgttcttcttttctcattagaatatgtgcatgttaaagtgaaggatgtgagctcattaattgtttagggtagaatttaatgggcgcaagatactcaatatcaccccacttttgtgacacaacaaatgaataggatgaatccatttacgcaaaagcacctaatcatatttggatgagtcttttgaatgattcttgttattaaataatcgttgtcatagttgtaccatttcaaaatctatgctatgcttgtctgctttggagatacataaatcatgctcaatctttagtattgtatatctgattctaagattatgttcatgacacctattgacattgctatcgtttgattctcaatttctcatattgcagat

SEQ ID NO: 106454 - DNA, 393 bp, Aquilegia coerulea
  Intron number 2 from transcript AcoGoldSmith_v1.023957m (l ocus AcoGoldSmith_v1.023957m.g) derived from phytozome v7. 0 (chr-ID scaffold_5; pos 1020862 to 1021254)
tctattataaccttacttaaggtattattatcataatctgcttcttcttcttcagttcatttggtgcatctttgatctcttacccactttctcagattcagaaacaactttgaactttctgtgtactttctttctttcttcttcttcttctacttctccacgtgctataaaaaaaataaattatattggccgtgcatggtatgggccccatttttcaataattcagtctgtgtttaatcccaataggccaaacaaaactatcattttgaacaaaatatcttggggcaaaacaatttatattttaatgtaggtaatttttatcctatggtttgtctccatgcatttgttattgatcatcaatatttatttttgatttgattgaattcagaagcg

SEQ ID NO: 106455 - DNA, 585 bp, Aquilegia coerulea
  Intron number 2 from transcript AcoGoldSmith_v1.027171m (l ocus AcoGoldSmith_v1.027171m.g) derived from phytozome v7. 0 (chr-ID scaffold_20; pos 180378 to 180962 reverse strand )
gaggtcagtcgctttgcccggcattgctatgagactctgcacaaatagttgttggagcaagtgatgaagcaattattctccgttgattatatctcagggggttgggtaaaactggaaagagcaaagaaaaagaaaacaacttgatattctcttattagctcgtcttggtcatacctttgtacgtactgctactgcttgtaggtattgagattggcaaacaatgatagtatgctgataagtctgaccttccttgggcattagctagcgagaccttccaccagttctcagccctggatgtagttattctgtttgcgggccatcattgaattgaacaagaaatgaagaattctataagactagatctagctatggggtgcaagatccctcctcaaagttattttgacacttgcgacaaaacaaagagggaaatattcttttacatattgttcacttgaaatttatttttgtggtttctgactgttttctcgaaaggaggaattaaataggaggcctcagacaattaagttgactggaaaaccgctccttacagctgctgctagtgattctgctggttctcatcgtgac

SEQ ID NO: 106456 - DNA, 580 bp, Aquilegia coerulea
  Intron number 2 from transcript AcoGoldSmith_v1.015747m (l ocus AcoGoldSmith_v1.015747m.g) derived from phytozome v7. 0 (chr-ID scaffold_14; pos 2192922 to 2193501 reverse stra nd)
accttttattgctctcgagggagaaggtaattaattgttttgatatggtgattgaattgtttctcattgatgttcataaatatgtagttgttcgtataattctgattaataagtttttgtgctgtgattgtggtatactctctctcacgcacccacacccacacccacacacacaccagagaggggtagagccgtagaggggatgtgagtagagtatttagataaataaaaaacagtaacagatagtaggtgagcagctgggaatttctctattaaaagtgaaggttaaatccacaagttcccttgcagagagtcatagatcaactatgaagtttttctaatttcactctatttatcattttttgttctctcggatgaaatttgtaaaacttttgttgcttcttatcatttgttgcttcttatcatttgtgctcaatctatttatcactcatatcctttgtttggagtgctcaatctaattgtaaaaaatgggtggatatgacttgggttcaacatgttataatatttctggttcttgctgctgctgtgcagtttcaagggtcaacaatacctagtgcat

SEQ ID NO: 106457 - DNA, 1013 bp, Aquilegia coerulea
  Intron number 2 from transcript AcoGoldSmith_v1.006374m (l ocus AcoGoldSmith_v1.006374m.g) derived from phytozome v7. 0 (chr-ID scaffold_14; pos 5356257 to 5357269)
aggtgttcttcctggattgccaattgaccttagaggttagaaaccatccttctttgtttcagaatttgaaataaatgtgattaatttatttggtaatgttttgaagagaattatgaaattatggcttcttaaataaatttgcttagattgactatattgggatacttgaatcaataagatcaagttaggatgtggaaagacttctagaaaaccacttttgcgaaattcgggtttaaggtgtcagactctaattaaggtttaagattcatcttcctctcaagtaatgccatggttgccaaagccaaaaattttagtgggagtggattagtggaatccaaaattttattgaatttacaataaacatcatcctatataaagcttttggtagagagatcgtcatcatcatcctttacttaattactttcaacacgaccaccatcttttgctatataccaagagaagccacagtaaaaaaaattatctttggtttgattggaataactatttcctattatcagccccttgactataaatcctcccccttccctggggaaggtgggaattgattttagaccttgaactcttgaagcgcaacccctgatcaaagaaatgcaatagcacacacaaatagagaaacaatataccagtagaataaaaaaccaaatgttttggcaagtttcctactcgatgagaataaatttcacattgtagcccaacccttgaaggtttgatcaaagaaatgcaataacacacactaacagagaaacagtactgtttgttcatatgtgtgcgcgcgtgtgtgtgtgcgcgtgtgtgtgtgtgtccttgagtgcagtactgtatgttttggcaagtttcctacttgatgagaataaattcaccaccttgcaggtttgacatatccttgagcgtagtagtgtattttcatgtgtgtgtgtgtttacctgttatcatgcagctgatatcatgtatcttatttgaaggtaaaagagcatttatcgctggtgtggctg

SEQ ID NO: 106458 - DNA, 693 bp, Aquilegia coerulea
  Intron number 1 from transcript AcoGoldSmith_v1.001838m (l ocus AcoGoldSmith_v1.001838m.g) derived from phytozome v7. 0 (chr-ID scaffold_42; pos 490710 to 491402)
attgattgaaagtcaatcaagctgctcaggtagattcttttctttaattttgatttcttcttcttattattattatttatcatcaaagatatccaattctttgtgtggtgcttgttgtaattgttttcaatcatatttacttatgttttaacaacttggggttgattgattttgaaggattaattgatgattttatatgggattttgaatattatttagttttagctaattatctttagggccccttatctttaatttaactaaagtatcaacaactatgtgtttatgtggtttgcccccattaatttgattagctaagtatctttcccttgtttttatgagtatcggaagttgccacttattaattattattgtatatggtggggggttgtggttaaggggattgattatcttttaatataatataaattttcttcattcccttatccaagcatttcatttctgtgtagatggtgggggtgggggtgggggtgggtggtgcttgtaaacggggttgaattttttttctcctttggaagtgtatggggaagcaggttgaggttgatttgcttgttaacaggttattcatatgatccaactaataatacttaaattaattatattttttctttgtcattatggctattctgcagtacagttgatcgttagtgagttagtgtatcacagtactct

SEQ ID NO: 106459 - DNA, 680 bp, Aquilegia coerulea
  Intron number 2 from transcript AcoGoldSmith_v1.001838m (l ocus AcoGoldSmith_v1.001838m.g) derived from phytozome v7. 0 (chr-ID scaffold_42; pos 491478 to 492157)
tcaatctcagcatttggtgtcataactagaacttggtgagtttgtgtttgctttctacgggttgatctctttttattagcatttgaagctcgttacaccatctaagaatttaaaatatgaattttagcatacttattgtctactttctttgatagtttaatttgttgagttctgtagtgactcattgtcatctttgagtaatacttgtttgttatctgataggatacccttcatattcgataatcatcacagacattagttatggagccatatcacaatgaaatagtttatgtataaaggggaattataagtccctttctgtttttggtagaattctggttgaaactgctgaaattgatgtgttgggcgaggattttaatttgtaaaagtgaaaaacttgcagaactttttgacacatccttcatttcataatatgttttccttctgcagttccccttcatttcagtagttattctttccacatttgctttgtcgtttcatatttgcttactgcagctattttatgaatcataaaacgtttaaaacttatgttgatgaacatgtcattctcttctgatttgtgaatcaatattaatcttgaaagtctctttgtgtaactttgtttctatgtcattatacctgcaggtctataaaagacgagttgggttcaattccaactt

SEQ ID NO: 106460 - DNA, 429 bp, Aquilegia coerulea
  Intron number 2 from transcript AcoGoldSmith_v1.005008m (l ocus AcoGoldSmith_v1.005008m.g) derived from phytozome v7. 0 (chr-ID scaffold_14; pos 373370 to 373798 reverse strand )
caataagagcaattaggtactatctctgtcttcatactcaaataaaaaaaatattatagggcatagtatggtagctttcatttatatttgtagtatattataaatagacatttgctggtggataatgattagaagttgaagcatgccgaactacttaattctagttgttcaaatcaccattaaaaggtcaaattttttaagtttgttctccataacttaccttaatgatgatattcttttaggatcattttttaagtctcaagccataccatgttaggcccttgtgaagtgtcaatctaagataatatattactttcatttcaatcaaaactttttgtcagtgcgcttttctttggctgatctgcaagtaattacttcattgctccttgtgcaacaggtcagcttctcagcattcccgggcagcgagca

SEQ ID NO: 106461 - DNA, 907 bp, Aquilegia coerulea
  Intron number 1 from transcript AcoGoldSmith_v1.000211m (l ocus AcoGoldSmith_v1.000211m.g) derived from phytozome v7. 0 (chr-ID scaffold_4; pos 7549008 to 7549914 reverse stran d)
aagtgtatccatctgagagattggagattacaggagaaagtggagataaatgttgctgtgacagagtagtactaatttagggaagtctagagatgtggagaagaatatatcatcgaaggaaaacagaagaaaggactttagcccaatataaagtccacataacgaaattagtactcgtggaatggcaagtttcatactccttttagaaacttgtgattccatgtaaattgaggatttgtagtaaaggttgactcggcattgtgcttctaaaagctgcaagtctaatgctgataatatatattaattcagacttcaaggtcggggttttccaaatgcctccttcctgaaaatattaattcccctccatccagtaaccatctggacttttcccaggactccattggacttttaagcatcgttatcttgtagaagcatatatatatatatatatatatatttggcttgtttctttcatcttttctttgaataatggtgtggagcaaacattatttttacgttcatacacataaaagtgccagtaatgtcgtcgtaagtttttttgcagttggaagttcttgtcagtgtcattttatagtgtaaattcctgtttcactcatataaattaaagggaaaaaaaatcttgagcaaaaagagaaaaatgagcagtgcgttttaaccttaggtttggtttaaaaaatctagttgttgtttactcattcttttgtgggaattgaggaaacaggggagtgtatattacatgcaaaaaatgaattttaattattttgtgaaattaaatgttctgacttatgagaagaatgaatgtcattaacattttgttgtttatcatccagtttttgattgctgcttttctacggatggtttggaagacgaagactataaagtttac

SEQ ID NO: 106462 - DNA, 457 bp, Aquilegia coerulea
  Intron number 1 from transcript AcoGoldSmith_v1.000111m (l ocus AcoGoldSmith_v1.000111m.g) derived from phytozome v7. 0 (chr-ID scaffold_20; pos 2403482 to 2403938)
gcgaatttccaaggtactactctcattcatcttcacttcaatatcatttctatcgccgaaagactataaactaggataaatttatatgatgctatcattagagaactcgtgtggttttctgataaaagctattatcccctgtttggttttcactcattaatttcggtatatttgttttgttttctggtttttttggaatttaatacattattatgcttccttcgtccacttcctctccattcaatttgttttgtttgtgatataactatataagtattctcgtttggattttttttcttttgcacatacataagttctttataaagtaatgactctgtttcactcattctgtactaagtcaaagtgttaacagcatcagaaaaaaattcattcgttctagaatatggattggattattaacttgtatctccgtacaattcatatgcaggggccttcc

SEQ ID NO: 106463 - DNA, 820 bp, Aquilegia coerulea
  Intron number 1 from transcript AcoGoldSmith_v1.006006m (l ocus AcoGoldSmith_v1.006006m.g) derived from phytozome v7. 0 (chr-ID scaffold_66; pos 85267 to 86086)
tctcttcttctctattttatttttttaactctcaggtatctgcatttctctttcagtaatttaatcaaacatattacgtgctatgattgtttcattatgtatacttcattgaatcattttgattttgtttctagactgatttagtgatagatctaataacattgtctcacatcgtatatgattcttttgtttcttttatagaataagagatctgtatgtctacttgaatacttatatattaatatatctgctctgatttcattgttcttcagttctctgctaccccatgtctttatttttgtgttaagactggttatgacaacttatatgaatattcagataccttttttagatctcaatagatttatggattactgtttttatttaagcaaattgtatatgatttctttttcatgattccttgaaaaatattggattaagtgtattctataatcaagaactttaaagcaataatggcttgtatgatttgatcaaaaatttattttcttgggaaatgcatttgcacaacgtaaatatctggaaaaatagaattcacaaacgaactttagtattttgttgacattggaacagttggctaatcacttaattatactttcattgagacttcgttagggtgaggccctgtcctgctttatctgctcaaacatggaaaatagtgattttccgatcttctggactctaatcaaactgacctaagttgttttagcatattcatagagacccatataatgagcattagtccttatcttacatttgatggtgcaatgtcattttcagatcaatccttctttaaattagg

SEQ ID NO: 106464 - DNA, 979 bp, Aquilegia coerulea
  Intron number 2 from transcript AcoGoldSmith_v1.006006m (l ocus AcoGoldSmith_v1.006006m.g) derived from phytozome v7. 0 (chr-ID scaffold_66; pos 86625 to 87603)
agaggtctctactggccctgcaggtatattattaatttttgctttgtttgtgatgttttatttgtttttcataatgtcaaatctcaattagaacattctggtagtccactcagattctgaaacacatttcaggaatctcaaatcttaagatctatattttctcgtgaatgaatgcattagtcatatacttggcatgataaccaccgatccagcagtctgttcttgttttttccataagtattggtactaccatttcattcaatgctaataattgaatgtatgttttatagaacaggttcgggcagttcagtatggtggttagtttaggcccttatgaatttacatgggcggggactatcctccgcaagactgtcaactcatagtatttcttgactttaacacatcacaccaaataagtgccctcattagaatcaacatttgaagtcaggacactgacaaatgtatttagaatcttttgttgatatttcttgcaaattcatgacagtcattcttacttgttcgatatgtcgctatttttttctttttaaaaactacacttttgtttgtttgaaaactagaatcccaagtaatccttataaatataggcttgatccaagggaacatcttctcttatgtgtgctcttcggaaatatatatacatatatataaatttgatggatatataaattgttgggtttttatgtctattcaggaagacagaagaactgagccaaatccttttaagtaggttatcaattggccagggctgtcagtcctgtttaagttttcttgattcactgagtttaaggacactcctaattgtcagtgctgtcactactttgtttttggatttatttgtccttatcttcttattgggttgtttcttactaagagatttagcgtatataacataaagagaaagtttcatgaatgttctgatgcagggccctcttgctgcaccagttcttcagcatttgac

SEQ ID NO: 106465 - DNA, 980 bp, Aquilegia coerulea
  Intron number 2 from transcript AcoGoldSmith_v1.013582m (l ocus AcoGoldSmith_v1.013582m.g) derived from phytozome v7. 0 (chr-ID scaffold_17; pos 3364112 to 3365091 reverse stra nd)
acctgcgattcccaaatccggaacgtataccaaaggtaaatttgcaattggttgtgattacaataggaatgtgtttactccataagcttgtttcaaagctggttacatctacctaatttttatttaaagctaagcaagagagcatcttttctacattcttgggctcgaggcaatgaacagatgattatttgtatctttgatgttaataacctcctcagcagaggaccaaacaacatacaatcaaaatggtagaggtattctggcatttgctaccttagtctaagagaattgtatcaccacctactttgcatgtatgaagaactgaatagtgacccaaatgtctgtcagactgtcagtgctactatgtattcaaacttgtataagaaatcgtcgactaggattgtaagagaagatataaatataaaaaggtctgaattttttgtttgtaataaacttcaatatcctagcgtgttcttttgataccttggtcaagagtattggatcaccatttattttgtacgtgtggatagctaaatgatgacacaaatttttgtcagtgcaactaaaggcgctatacaaaatatgaatataataggaggtatatttttgaatgtattggatttcgatataatgtttacctgtgaggctgtgacgacctgcttgtccctctgataggctgaatgggtatagaattggtgctcgagtaggttatcatagtagtggcatgtttttcactcacattcacctaaaatggcagtagaggtttagttttaccaccaaagagttaggttgttattgcagatattttagaataaagtatccatattttttgtagtcatttttacttgagtacatatgcttgcagttacaatatttgctatcttgaaccagtagcctacgataatgcttcaagcaatacaaatgtgaggcatgaaccttactttagtttctttggggttgttttgcaggtaaggaagtcg

SEQ ID NO: 106466 - DNA, 383 bp, Aquilegia coerulea
  Intron number 2 from transcript AcoGoldSmith_v1.004424m (l ocus AcoGoldSmith_v1.004424m.g) derived from phytozome v7. 0 (chr-ID scaffold_5; pos 1397635 to 1398017 reverse stran d)
ctattcacatgtaagtggttgttttgttagttcacgatgaattgaattttaaccaatcaattgcataatgatggttgtcgtagctatagcctattatattctgtttcattatgaattcaaactctcatttcaaaaaccaggcccatatatacttcctgtaaaacaatttcctattttgcttggctgggttgatttatattccttaacagttaacacacaatattcaggaagatttggcatatttctgattattccttataagtcaacaacgaattctttttgtttttcacctccgtaagcatgatcctctaaacttgggcatggaatttcctttgacatctggataaacctcgtttgaatgtaggtacactgctaacaaatcc

SEQ ID NO: 106467 - DNA, 382 bp, Aquilegia coerulea
  Intron number 1 from transcript AcoGoldSmith_v1.025193m (l ocus AcoGoldSmith_v1.025193m.g) derived from phytozome v7. 0 (chr-ID scaffold_33; pos 1922530 to 1922911)
atcttgttgtaatcatttacagcacaggtagttgctcctctgatatgatcttcagaaaagattgtatcatcacccccatgaagggagacaataggattatggggaccaagaagacaactcatcttagagaaaggtcttcaatatttcgtttggtttttgtctgtgattgaatgcatatatatagacagcacagttttgaggtgttgtcattaatcgtcgttcgtcttcaattcataaaattgaatctggtgagcgaaaaagaaaaaaacacggaaggtaaatctgtcagagttgtagaaattaagttaggacaacttaattatctcctacctcccatgttgatgcagaggagagaaattggttggaccttccagaccttcct

SEQ ID NO: 106468 - DNA, 814 bp, Aquilegia coerulea
  Intron number 1 from transcript AcoGoldSmith_v1.018268m (l ocus AcoGoldSmith_v1.018268m.g) derived from phytozome v7. 0 (chr-ID scaffold_14; pos 2070563 to 2071376 reverse stra nd)
gctttcttggctcctcttgctttcttcttggagaggttatattctttattacttttactttgaatatattattgctgataattattttgattcatgtttatgtgtatttttttcaggaagagcagacctaagttaacctggatgattctattccaagcatttctatgtggtttatttgggtaagtcatcagaactatgaaaggaatatttcctatttattatcacatattcttgttataatgtagcattaatgtagtagatttttttattgagtctgtcaataaaaaaaatgaatgatcaagtaagctgtctaccttaatatattcccaaggtcatttaaatttggcacagaaaatgaataacttgtcacagaaaagaaaacatgacagaccataacatagccatggaagacacttcacgctttcttttgctgcaccaggacagttggaatcctgtgaagctgaaagtgatcagtaatttcccaactacataacaccaactttttcttcttcccaacatgagattaattaaactttgattatatgtcaataattagagaaatcataacaattatttgtgtcattattctttgttaggggttctttggctcagaatctatacgtgatgagcttgaatttaacctcggcaactttcgctactgctatgaacaatctcattccagctattaccttcaccatggctgttacttttgggtaatttatctgcttaatattctctggctcattgaaggtaccttgatggctcaatagttattatgtgactaatgactattaccttattcaggttggagaaa

SEQ ID NO: 106469 - DNA, 835 bp, Aquilegia coerulea
  Intron number 1 from transcript AcoGoldSmith_v1.010338m (l ocus AcoGoldSmith_v1.010338m.g) derived from phytozome v7. 0 (chr-ID scaffold_14; pos 5021079 to 5021913)
gcatctctgaaaaccctaatctcattacttctcaggtaaatttgatctacctcttcccgatttaacgtttatgatttctatgacctaatttgattgttaatgcattcgattcaaccaattcaaggagaaatgttgagtaaaagctggtttttgtgtcatttcttacatgttttgttagcttcgattgattgtaatttgggttttagtttattcgattattcataattcatttgatattgattagaatgtgtatagtatgaaggattgagaaaaattggtgttttttttgggaaggggagcagggtttgatgaaaactgttgtgaagtgaatatctcaatttagagcattttaagctataggcaatcaattggtgtatattacattcgatatttgattaatgctagtagagggttttattttttattcatttgtactgtggaacaactgattatgaattgttttttatccacttttgttgctaagaagataaaatagttatgttttggaccttagtgggcttaaccatttacattcattatccccaacttattttactttgaagagttaatttcatgctacatactaaggattatggctcgagagaaataaaaatattatgcgagggtgaagctgcctctgtggttcagattatcaataacttaaaggccattgtttgtgcttctgggaagacatcatatttcttgtacactattttatttttgcctgtaaccatgctaatcttttgttaatggattcttcttttactggcaaaagaaagccacctttatctggttgtaaaatgactgtttcttttattgcagtcttcgaggaact

SEQ ID NO: 106470 - DNA, 972 bp, Aquilegia coerulea
  Intron number 1 from transcript AcoGoldSmith_v1.012267m (l ocus AcoGoldSmith_v1.012267m.g) derived from phytozome v7. 0 (chr-ID scaffold_4; pos 833498 to 834469 reverse strand)
tctcaggtactatctcactactcatattattatgttttgatgcatttgattccaatttcttcaaagattttgattgctaaatatataattaatattgatttttgcttagttattaaggttcattttcttagggtaatcttagtgttgggtatttattcattacaaattgtattatggttttatttttttggaagattggttggcttgtgataatcttagtatttgcataatcgtatgattgataggatttttcattatatttgtataagtgaaataataaattttacgggtttttcgcaattggatcttttcaccaattgtacccaagtgataaccatgtctgttacttgttcatgatttcaaaacttttataagaaaataaaatatatattagggtagtttgtgctctttgggaatctaattaaaccactggtcaactagtgcaattttgcgaatgtatttgaattcttcagacctattagagcaagattgacctttgggtgattataaaaaaagagtttctgcttaacatgtccttacttagtaaaatactttgccatttgtcctctgtattttttattacgacatttctacaacattatgcaatatctctttttatatgagctatgtttgatgtggttgtaaattgagtcgaacttattcattatctctctgcctttctcttatgttatgttgtaaattatttactactgcacctgctgccgttgtacaatttgtctgtatccaacggtttaccagcaggagaagatacattattctgaattggtcttttaatgttgcgttttggactgcatattctatgattttggtgtttcttctttctttcatgttaaaatgtttttgagacagaattataaccttgcaaacgtaaattgtcgaaattggtagcatccactctagctgaaacttattaatgatttcaatttgcagacagtggtgctcaaggttggt

SEQ ID NO: 106471 - DNA, 551 bp, Aquilegia coerulea
  Intron number 2 from transcript AcoGoldSmith_v1.010261m (l ocus AcoGoldSmith_v1.010261m.g) derived from phytozome v7. 0 (chr-ID scaffold_17; pos 1219147 to 1219697 reverse stra nd)
ttcgaaacaggttttcaattctctacttgttaatctttttcttttctataacttttagttgatttctgatcttttttgtgtcttttttttacttgctaagagtaattaatctgtgaaaatcaagatccaatttataaacaactagtgtttttctataaaaaaaaaaaaaacaaaaaaaaactgtagtgtttttttccatttttttttttttttaacctatttcaacgcccttagcttgttgttgaactggatttgaaccaatgatggagtatgcatttacttgaatacaaaaacatacaatagtgaaatccaatatccttatgaatttatcagctgctaattccaattttcgaaatttaagaatttattcatgtaatctgtataagcattctgatccccaagtatttggagtgctttggcttgcaaaattagccttaaaccctgaaattagcctcactttccatatttgaatgttcattacttaagctaatttgttttatttgaaattgtccattttcttcaggtacaggccagacgtaattaaaggagat

SEQ ID NO: 106472 - DNA, 849 bp, Aquilegia coerulea
  Intron number 1 from transcript AcoGoldSmith_v1.000223m (l ocus AcoGoldSmith_v1.000223m.g) derived from phytozome v7. 0 (chr-ID scaffold_41; pos 362206 to 363054 reverse strand )
aggtcagttttatcttttatttgaatggttttgtttcattttgactttcaagtttgagatctatagagtttgatggttgtatggtgtcacttttatttaaattggaataagaatcggggtaaagttagtagtgtggtttagattgaaggagtttttggttttggtagagaagtgagatatgaactactaattgtaattttttgtggttttttttcactgattcgattttgttatatatggtagattcacattaaagtctgtttaggtttagaaaagcacgtaaaatgatgtattaatgatgcaagtagccttgaaaaggttgctaatttacctgtttttgtttatggaaacccttatgaatttgctcgtgtagtttccgtctaagttcacttggtacaattgttgccctagtaaggttgtttttgtttccgttctttagcaattgaagagaatgtacctgaccgtagagaatatgttctattagtgatgttgtacgattagtgattttgttctaactttttgaatattctatatcatttatttggacaagttggtatcttttaactatcgctgttcagtcatataatttatccggaaaagactaatggttgcaaaactcaaaagtatggacataaggttaacttctactggtcttcatcttaaaatccttcgagagattagatactaacagaagaagcaggaacacgaaatccccttgtatataaaacttctgattgcctctgacattcgtatgatgtatatgcatatatcttttttgttaggttgttaacattgcatctttatgcaactgcaggttatatttcccgcgcttgatatacgtgtcaagaa

SEQ ID NO: 106473 - DNA, 581 bp, Aquilegia coerulea
  Intron number 4 from transcript AcoGoldSmith_v1.001772m (l ocus AcoGoldSmith_v1.001772m.g) derived from phytozome v7. 0 (chr-ID scaffold_5; pos 433485 to 434065 reverse strand)
aattggagaatgtaaggtttgaatgctatcttatctagaacatgttttgtaaggtttgaatgctattttacctagaacatgttttgtttcagtaacagacgtttgtatcaactatcgaaatatttatttgacttactctacacctgctttactaaagaacgaacaccataaccctatttccttactctactgtcttttaatctgtttttaagacacatgcttgatactgaaattttaatatttgggattatcgatatcaaatctctgtatggttggctcgttgcaaaagcctttagatacatgcaaaaataagggatttttttttttttttttttttttttttaaatatctgcatggataaatttaaagttctacatatgtgacagcaagagggtgttagttaatgacaaccggtttctttgcatattcagtctggatggatcattggatcctatcctttttttcttgtttattgctgaccatttgaatccttctcttaagttaaattaccatgtggacacgatgttatcttatggataatgtatcttgtgcaggttgccactaatttctattctccaaac

SEQ ID NO: 106474 - DNA, 511 bp, Aquilegia coerulea
  Intron number 1 from transcript AcoGoldSmith_v1.001316m (l ocus AcoGoldSmith_v1.001316m.g) derived from phytozome v7. 0 (chr-ID scaffold_20; pos 3362744 to 3363254 reverse stra nd)
tactcttcttgttgtggttcctgccattagttcaggtaatttgttttttctttactcttctagttgtggtttgtatgaatgataaatgtgattattatgtcttgttcttcaactatgtctatgaattgtttgattcaagggttcagttctccatatttgaattacttttgattttggaataaaaatgatgctgtatatacatccaaacagtttctgctttgggcattcttgtgaaacacttgttatccaaagagtttgaacagcaggaaacatttgacgacactgaattctagtttgtggatgttcagtatttgtttatgtaatgttataatacctggggatcagctattattggtgtttgtttcaatcttttgtgccttttcctttttggtggtcattttcttttgtcggtccaaacgcatatgtcttcaattttagtgtctatcaatttgttagcaagtcttgctgttgattgatgggagagctttgtttattgtacaggtaaaaaact

SEQ ID NO: 106475 - DNA, 727 bp, Aquilegia coerulea
  Intron number 2 from transcript AcoGoldSmith_v1.005692m (l ocus AcoGoldSmith_v1.005692m.g) derived from phytozome v7. 0 (chr-ID scaffold_62; pos 982248 to 982974 reverse strand )
ggtaaccatcttcattcaccttccattttattataggttcatgtcttgaacactatagagtagactaatagaaaattctttttattaatctattccaatttatcctaaaatctgtgtcctttcaattaagtacgaaatatttaattgttttgtcaggcattatagttttatccgtccttgggttctttgtgattttgccgaaaaaactattgtcactcatttcagatgagatatttgtgtgccgattagagattttggttgttaaatctatatgttggcaagtttttttctgttttctttattgtttgattagcaaaatagtactgtaaatatttatatgaatgattatggacatgtgaaggtgggtttcataccaaacacctcccaattcccaattcacatggtgaatcaactcaacatcaaactgttaatctcgtatgtttgggcgatgattattgcggcaaccaagcccaaagtggaagctttgtccttttttgagcttctgcatactgcctatcttcccttcaaatattctgctttctttccaaatactcaaattacaggatgaaaccaaaccttccagcacaaattcccagctgcagatagaataggacagctccacctcctactatcatgctccttattgttaattgaaatgttgttaaatagtcttgattgtcatttctttttttctgttgttccttttgcagcaactgaggggagctta

SEQ ID NO: 106476 - DNA, 371 bp, Aquilegia coerulea
  Intron number 1 from transcript AcoGoldSmith_v1.000340m (l ocus AcoGoldSmith_v1.000312m.g) derived from phytozome v7. 0 (chr-ID scaffold_20; pos 85865 to 86235)
tgtgttgaagcttaaatctaaaggaatctatctctgtaagtatgtaaagctaagaactttgttttttttttttcttcaatcttatcttaaactttgctttatttgtaattttagtcttgttcgaatctttgatttcgttgttttaaagttattttttcttcttttatgcatctgatcttacaaaaaccctaatttttgatgtcggttttatcatttctatttcggtttttggcggtttgttgttgatttttctgatcttgtgggtattttgggtattttagctataattattgattaatagattatgaaattaattgttgattatgttttgtgtagatctgttgtttaatttctacaatttgaagttagtt

SEQ ID NO: 106477 - DNA, 856 bp, Aquilegia coerulea
  Intron number 2 from transcript AcoGoldSmith_v1.027139m (l ocus AcoGoldSmith_v1.027139m.g) derived from phytozome v7. 0 (chr-ID scaffold_53; pos 1138637 to 1139492 reverse stra nd)
ctttgaggcatccaaacattgttagattcaaggaggtaagcattttgtatgcgaggtaactcatttagattaaatactagtgttattcgcacttttgttgaatttgttcattgctatctattttagttctattttgagttttgcttagcctttgcaaggaccaaaagtgggtattttttttccccctagacacatgcttggttttcaaccactcaactctgttttgaccttatgttcaatttatttcccgccttcctccttaccatcttcttggtaaaacaaaaaaatcaataagtctaggttaaagatgccaaatacagtcatttagtaggaaagcttctgcccagacatatgacacctcaccaaatatttgcaatagaaaaaagggtaatacactaaactctttaacatatctaacctgtatcctgctttgcaactttatgctttgtaccggcaggtgctttcaaggcttcgatttgctcttacttattcctcaacaatgctatattcattaccttctgtttgcctgtttgtatgtaaaccatccacaaaccatcattttatcctctctatactcagtctataagcatgttggatgtgattggctggttgccgaactattatgagtttagaaaataaacttatgtgtttaagaaaatagtttatagctaaaggaagtttttctggatggtgatgttatcaacttaggcaactacttattcaccaatcgtgcacagtactgagtttatttatgtactgtatctatctatttacatgagcattctgaggctaggtttatgtcttctttaactgctgttttaaacatgtcaattcaattccatgtattgttatgcag

SEQ ID NO: 106478 - DNA, 761 bp, Aquilegia coerulea
  Intron number 1 from transcript AcoGoldSmith_v1.005360m (l ocus AcoGoldSmith_v1.005360m.g) derived from phytozome v7. 0 (chr-ID scaffold_14; pos 4374487 to 4375247)
gatcttgttcgttgttcttcagtctgcaagtcgtttgtcttcttccttctttccctttctcttctctttcaattaaagcatgttatatgtatagaatgaaaatttcgaaaatagaatgaaacaactgaccctttgaagagtgactgaatgagtgcgggaattgctttgttttgtgccatttgaattaataaagtttggatttttaattacaacaatggttcaaaattaactaattagcagattctacagaaacccaaagtggagagagagagagagaatatttgtatggtgataaacatgactctatctcaagtttcattttaatatgttaaacattagctttcttaagaaagcacaagataacacaattttacgagttatattgttttagtaattgaggacatattacattaggcttagaggaaggaagaaacgacattctgtggtgaatttgtattattttgcttttagtatttgaggaagtttgacagtttatatattgaatagtggggtaaggaaatggatttggtggtggttgtatatgttttattgattcgggtggctcttattagctaaaaactgcactacctttttataatcggaatgaacaagtagcctatgtgcttcaataatgggcaaaataattttgaaataattcggtaatgtcgagttgtggactggtagtcaatatgaaatagaatggattgttagttcattgagtaataaaggaatttatatgatctgttaatattcacacaggt

SEQ ID NO: 106479 - DNA, 840 bp, Aquilegia coerulea
  Intron number 4 from transcript AcoGoldSmith_v1.019439m (l ocus AcoGoldSmith_v1.019439m.g) derived from phytozome v7. 0 (chr-ID scaffold_14; pos 2531202 to 2532041 reverse stra nd)
agtttctcaagcaggtatccttgcttccaactttttgtgtttgttgttcctcctgaagtaattgaataatttgatgttaattgttgcggcagtggtatattagtttctccatctagtgctgagttatatactagattaaagtgctatagaacactcgggcaaaatgattgcataatacatatttacatctttgcttatttggggtaatataacatacacattaaagtgtaatagaacacttttgtgagatgcttttacagtacatattctgactatctttgagaactaaaatacacgatatgttgttttcaccacaagatgttacttaactggttttgttctttacttctcttaccctgctagacgtgtcagtcaaactagtgatgcgagtttagattcaatacggattgtgccacatgttttgaggttcatcagtcttacccgtctaattagtgaagataatgatgttttgtctttgtttattctttttgcgctctaaagaaaggaaaattgcttgcgtagtgcatatgtctgttcttctactgctttctagttttcttagtaaatcagaacatttatcttggatgatcgtttttctttcctatccataattttattttgaactgatattatgtgatctccactttagaagcttaaatcatttgtcaagaagattaagtttattcagattgtacacaactgttctcatgcctattctggctaccatggggaaactttctgccatttagttttattttttgagtgtttgatatgcattttgactttttgtattgattcatgccaggcaaatccagtggaccccagctcattcccatttat

SEQ ID NO: 106480 - DNA, 766 bp, Aquilegia coerulea
  Intron number 2 from transcript AcoGoldSmith_v1.008755m (l ocus AcoGoldSmith_v1.008755m.g) derived from phytozome v7. 0 (chr-ID scaffold_14; pos 3595326 to 3596091 reverse stra nd)
agtggaaacttctccttgctggacttatttttcaggtttattaattattattattatatcttcttattttgcattcaatgcgttttagaatctacattttcatgaattattattattgtttaaaatgtcgtttcttaaacaaatttccaagagttttaatgtcgttttggtgtctgatggtgttttaactaaaagtacatatttgtttagctgaattttattttcaaaatgatatctttgtgaaatctctctagcaagttgactatagctctaatatcaaaatgccgatttcaagcaaaatttcgaattctgataaaacggattttgccgagatttcaacactagaaaccaatgtgaaggccgaatatttatggatattcgtgtatccgattcctcaaaaatcggcataattcatgggatatccgaggatattctcggatattttgaactatgggctctaattacactagaatttgattgcatcctgtaaaagtcaccaacctttagttatcttctttttgaagtaactatggtttaaaaattaaaactatgcagatatcattaacatgatatacatgtttggaaatgactttatacgattagaatctgcacgctaatgtttggataggttctgctacttatatctggaaaaaaaaatatctttatatatattttaaggcccttgttattctccatgtcttaaaatgtctatagttgaaactgttatagacaatattgtaatcttatttctgttcatagtatattc

SEQ ID NO: 106481 - DNA, 574 bp, Aquilegia coerulea
  Intron number 1 from transcript AcoGoldSmith_v1.006324m (l ocus AcoGoldSmith_v1.006324m.g) derived from phytozome v7. 0 (chr-ID scaffold_76; pos 484451 to 485024)
ttggcttctggatttgtgccacctgttgagaacttgtaagtctcttgctatcaatgaatacttgatcttatctgcttgtagattggttttttgagtatcgtgagctcatagtttctgttgtcaaattagatacctttgttttcgttccattgttttcctagtagatgcccaatcaagtcagccttttacttacagtctcagagatgagtaatttactttccttaatcgttttaactgtccatctgggcgacgcttaagtaattatcttggatgaagctgttcccaaaacaccttattgtgtatgacattacgaaatctccatcaatggatgcattttaaagaagttgaacctacaatttaaatgtgaatatcctttgttttcttctaggcattatgaaattatggtgcaatggtactatggttgattttcagtttcatgatatcagtcattttgaagtacatatgtggtatacttggtacatttctatctaattttactcaatgttttacccttgttttttcttgttaatgaactgaagatccccgaaagtactatctgcatcgttggagaact

SEQ ID NO: 106482 - DNA, 798 bp, Aquilegia coerulea
  Intron number 3 from transcript AcoGoldSmith_v1.001925m (l ocus AcoGoldSmith_v1.001925m.g) derived from phytozome v7. 0 (chr-ID scaffold_14; pos 3656491 to 3657288 reverse stra nd)
gattctacctactacacaaggtgcgatctttccgtgggatgttttaaatcagttgtgtgtgaatgtgtgatgctttagttcaataaattgattaaaagtgttaaaggagattaattttgaataatactagcttgcagttacttgactatattatgtatatgtgaccttaataacttgacacaaacaaatgtcatctcaagatatataaaagcttaaacttattcttggaaggtaaaactgtggtgctaaagtggaagtagtgtcgcattttttgtaaggataataacaacaattaatatgatagttataaataaactttagagaagaaatttaccattagtaggaagatgattgtagtagaacttgcaatagggagattcaaatgaacaaaggacacgaaattgaggaggatttatttttactgagagctgctgagtttggggatgaaggatacatgatctatttcgcctactagatacatggacattatgttcgctagctagttcctgaaacacatggtatgcatctgtgtttttttcttgagtttatattctcttattgtgtgtcttcatggatgtctttaatgagtcgctaacttctatagtagaatcttgcttaggccttcagtaatcacaaaattcttcttttaattgattatctgtttttctgggtttttttgtgtgtgtctttgttggactctaaacattagaggatgggacatatacatctgggttctctttaaatctttggtttttttttgtaggagtacggtgagatactcctgagaaggattcaata

SEQ ID NO: 106483 - DNA, 939 bp, Aquilegia coerulea
  Intron number 1 from transcript AcoGoldSmith_v1.001069m (l ocus AcoGoldSmith_v1.001069m.g) derived from phytozome v7. 0 (chr-ID scaffold_14; pos 1880042 to 1880980)
aaaacccaaaaagaattccactccatatatctcaggtttgcttaatttctccttccaacttcaatacaatcttctccattttttttttttttaattttaccatatacagtatatatatatatatatattgtacaaaaagcttagagagttagttggttactcatatttgttgggttctccttattttttgcttattgattatgacttttacctaaaaaaaaaaaaatgctcaatggcgccaaagcattcacatgtattttgttaggtgtcaagttgtgaactgtgaagtaacttcagttgtaccgcataattgacaatgttgagatgcattttaggactataaaagagtagagtagagtcttaaataatgtactatgaatatgtaggacaaattcaatggagatggtttactcatgtgccaaatatagatcatataagccacaattagagaaaattaatggattgaaggtttgttaaaatagaacacgataaaattgataaatgcatcattcagaggtttttgaattatcataaaagacaatttacgatagaagggaacaaatgttggaaaaacattaagtcaactgacgtttgacatttggctcatttgtgttaattcgttatttgtacattataatgtaactattatggcatccaaatttacaatgctacagaattttgctttagctttgatcaatcagtaccagatacagtatatgttcaaacaggttttggtgtcatttctttagcaatgatgttacaatttacttcttagtttggtctacgtatcttgtttctcgaatcttaatgttgatttcccccttttcccgataagattactgtggttgttcttcattaagtgacaagtatttagtatcatataatgcttatactggttctgtggtctattcagctatttcttcagaccctcgagtaaag

SEQ ID NO: 106484 - DNA, 697 bp, Aquilegia coerulea
  Intron number 1 from transcript AcoGoldSmith_v1.021461m (l ocus AcoGoldSmith_v1.021461m.g) derived from phytozome v7. 0 (chr-ID scaffold_20; pos 1235684 to 1236380)
tttcttctaatcatctttcaaatccctcttttcaggtactttcttcttcactataacttgtaaagttactatttttattcatgtttttttttttcttcaaatcaagcaaaatataaaaataataatcaaacttaattttcttcaagttctaagatttgggtatttgtcttcttatgatttgatatctttacaactcattaatctttggttgggaacttgtttttcttgtctgtttgtgaaatgggtatgttttgttttgaatttttatcacattgttgatcagtaatttcacaagtttagtgctttgaatgatatgaattcagctctcaaattcaatatttgggttttctttttgctgtgagattgggttttgtttctgtttcaataattcataagatttgggtagccttttgtctgtgaatttaaccacattattctatatcaacatctttgtgctttaaggggaaatctaatgtcttgcaaattatttttctatatgtggggaggatggttttgcggctttgtgttgatgtcttttaggtatacttagttgaatgctaacctctttaaggttttcatgtataataggaagaatgaacctgaagtgtctttgtttgggttatgaactccgtgaaaagataatgtagaccaagtattgtatacgctctttttttgcagggtcacttgtagatctggt

SEQ ID NO: 106485 - DNA, 796 bp, Aquilegia coerulea
  Intron number 1 from transcript AcoGoldSmith_v1.017165m (l ocus AcoGoldSmith_v1.017165m.g) derived from phytozome v7. 0 (chr-ID scaffold_14; pos 286553 to 287348)
ttccctggtaatactgtactaatacctaccctttttcttctttagcttatgttctgtttggttggtatcgattttttttattttttcattaattatttctgtttagtgtttaacagttgacacaatagcatttatcaaacccttagtctggtactctagtctgtttgttcatgttattgaatggaaatataatcaacacaaatgtctagctatgtctggaattaggaaaataaatatgagtatttgggtgcttaactagttttgtagcttgatgcactgaacccaattgcaataatggattgtcgaaagttttcataaaattttatacactgtgccacttgtagttctccattcctttttgctggttgtgtattaactattaaacctctagggctctagtctacaagtatggtatttctgttgacctggagacaaaagagtcttgtctctacggaacagaattgtagaagaggggttttgaatgaagaggacaaaatcattacctatctgcctatctagttcttctacttgtttttttagctttagtatttccacttttgcttaactcataatacattatatatgatccttggaaaatgttaaagctgcctagtggctatacttctagcataacaataattttccaaaaatgaaccattttgttttaagtaaatgggagcatggttccacttttgattgttttgtgccatcttagtcccattatgaaccctttctttctttttctttatatagttactaattcattaattgttactgcaggcatattgttaattgg

SEQ ID NO: 106486 - DNA, 890 bp, Aquilegia coerulea
  Intron number 1 from transcript AcoGoldSmith_v1.016455m (l ocus AcoGoldSmith_v1.016455m.g) derived from phytozome v7. 0 (chr-ID scaffold_23; pos 2054119 to 2055008 reverse stra nd)
tttttgtgcttactggtacgttttttttttttttttgtataggaatttagtagagtaatgatttttattgattacacatgaaacttttacaagcaatttttcttcattttttttgagattgtgtgtgatttatttgtataaatgggatgctttcctatgcaacaactgaatttttagagttccatgcttgttatgtttattgatggttgctatccatgtgaaacctttattgtataactttggtataattagtataccgccaaggtgaagcccgagtttaggttgagaaaagagagacggtgacttggggagatgagagataataaaaacttcaagcccgagtttatgttgcatgcacttttaggccttttgtataatgtaatggagccacccctttacactaggagacttgccaaggaggactgacagtgatcataaaattttaacaagggatctggctgaaacctgatccagacaataaaaaaaggggtactctcatgcctcagtaagttaaactttggtactggatgaattcaaatctttctattttaggccattgttggttctattacatactgtatgtaaaaacactgttgtactatatgggcgaaaatcaaagagtgttttacatttgttgttagttgtcttatattttgtaattttcccctggtggtgtttgatatactgccctatgccaaatgaccaaattgtttttagatagcgcccatttttcttcatcaagacttttctttcatgttgatttctttttgaaagtgtggcttttctcggcacctttcttttctgtaaaggcagttttatcatcttataaaaaacttttggattgtcaggttatgttaaacttgaagcattctttgacagacccagtcgcc

SEQ ID NO: 106487 - DNA, 1046 bp, Aquilegia coerulea
  Intron number 1 from transcript AcoGoldSmith_v1.002236m (l ocus AcoGoldSmith_v1.002236m.g) derived from phytozome v7. 0 (chr-ID scaffold_17; pos 4511203 to 4512248)
ttcagatcttttgaaaaatatcacattttgattaagtaagttcaattgcaactcaaattacactctaatgttctttcaattgcattctatatggtttgttatgtgtttttcattagatctgattgaaatttgagctgaaacttatacaaattttgagttcaaagcttgttttgtttgaaagtttgtactttaacaagatcttgttgcttctatatgtttattgattgtagtgaagctcattggattcgaattctttggtttttatattgaaatgcattcgaattagttgttttgtgtattttttttttgttcaagaagaactttcaaaatgtttatatgtttgttgattggtttgtgtttattatatctagatctggcatgtttagctcatttgtgattgaaaatatgcgaatttgtttacttttttttgcattcatgtacaacaaataaagaacattggtatgtttacaatttgtttcccaaacatgcattgctatatttgttgttgtctaaaaatgattatgagacacatcatcattgtgccagaaaagtttatatgattttacctgcgacagaggtttcttagctaagttctacaagcaacacagttggctttgtcatagtagcttaggaacttttgatggtctatttatgaattgtattttcttaaaactcataccgttcagatccaattgagcactgtggagcgtggattgtgagcatttatataacacctattcttgactagtatgtatcatgaattcaattgtttcctaaattagttggagaaaacagttttgtcttgctttcgtatactattgtttctttagtaaggttcattagtggtaagtagttgaacacaatttttcgttctttagttcgtcacctaatgatactttgactaacaaattctataatgaggcatgaattagtttacatggctggccttttccttatttttcttctgtgattgtataggggttgattcctttctttttctggtgtatgcagaaatttgaggaaatacctatctttccaaatacagt

SEQ ID NO: 106488 - DNA, 673 bp, Aquilegia coerulea
  Intron number 2 from transcript AcoGoldSmith_v1.003698m (l ocus AcoGoldSmith_v1.003698m.g) derived from phytozome v7. 0 (chr-ID scaffold_4; pos 4051324 to 4051996 reverse stran d)
ttcaccaacttcttcaacctcattcttgggcttgggtatgtttttatttaaattctttattttcaataactttgaatgtgtcgtaatctttcacttatgattgattaatccccaatttattttttttgttcaatttttaacagagttagatgtatgtacaatataatgggattcagttccgataaatccttatctaaatttgaacaaatttcttatactattattaaatattaacttactttcattgaaatcttctattcactatggaagtagttaaggtgattatttgaagatttcagattaattttgttagtattatgttgtccaaattttagaatctcattttcgaatgtccaagctttgattagttacaatccaatcaagttttatttaagttttttttttttttttctgttttctgattaatatcaaattttgcaaactacacttcaattttgcttgcattgggcagaataatagatgtccaactaagtcaagacttgtgatttttctttcaaaatcaaaatggatgcttttggatggaaatagacaaaagttaggcctgcaaaagatttgttctatcgtctgaatgattgtgttcatcgtaagaatttgaagtgggaaattatgcatttgtgctaaatttgtaagtttatttccatatttttcaggc

SEQ ID NO: 106489 - DNA, 724 bp, Aquilegia coerulea
  Intron number 2 from transcript AcoGoldSmith_v1.002483m (l ocus AcoGoldSmith_v1.002483m.g) derived from phytozome v7. 0 (chr-ID scaffold_4; pos 5958788 to 5959511 reverse stran d)
gatatcttggattttcggaatcttgaggtcttcatctattctttcgtggtttttttaggcattgatgttttcagaggctttaaattcactgatctttatatatttagtttcattttgttttgaatttttgatgaaacactaccattagctaaattgtccagaagtatttatttttgtagcttgtaggttttctggcttttacttcattttttcgctagaaggtacctattgtctttttcaatatcaaatatagttctgataaaaaggagatacttcttaaaacagtaatcatcataaagtgctcttgtgtttattttggaaaatgtatatttgaccaagtccatttatgctttgtgattctgggtgcattaaataattggttaacagatgagtttcggtcgggatacctgacaattagaaaatgaatgaaatatctgcagatcaatttgaaaccacaagaatagtttgcttaaacaccagttaatgccacaagaagacgatggaaactaactactgcaataaagttactactatatgtaactacaatcaagttcaatcaaaatgtaattctatgaaaaacccaagtacatgctacataattcaagcatgcatctactacggatgatatatgatttaccctcatattgattaaaattgtgaattatcttttatcttgttttgtggtacagatattgatcttagacgaagctgataggctattgga

SEQ ID NO: 106490 - DNA, 513 bp, Aquilegia coerulea
  Intron number 1 from transcript AcoGoldSmith_v1.026919m (l ocus AcoGoldSmith_v1.026919m.g) derived from phytozome v7. 0 (chr-ID scaffold_82; pos 593395 to 593907 reverse strand )
gcaagaaagtcaccagaggtcaaagcttgttttaggaatacgagttagtaactagcaaaatctcaattggattaaactaagaaagtatataagaatgtgagaattgagtcgtacatgcctggtatactgtagcctagatcgagaggccctgttaactggaatcaaaagatcttttcacttatctagagacattccattaatgtctgcagaatgttactaaacgtctaaaccaacaacataacattggcaggctgcaaccttttaagtttgattcactagctaggtttgaaaaaaaagaaattctagttgacacatctttgtatgtacttaacttgcttacagaaatctggacatcgttgttcttcatatggactcacttcttactcttagtttgtattttttttcttgcagttgtcatattagcaattacagtcatatgctttatctgcatgttatatttggttctaaagaagaggttactttcccagttaagaatgaactacttcctacaga

SEQ ID NO: 106491 - DNA, 980 bp, Aquilegia coerulea
  Intron number 2 from transcript AcoGoldSmith_v1.021729m (l ocus AcoGoldSmith_v1.021729m.g) derived from phytozome v7. 0 (chr-ID scaffold_17; pos 2591715 to 2592694)
ggagatactatcaggtgcttgtttattttctgtcaaatgttttctccggtcatcgtttttgggcctcccttgctctttgatattccttcgttgctttcgtttggttattatactacataatgtgatttgttaatatttatagattatagatgatgagaaaatgggggaaaaaaggcaaataagttttaagtatgagttgcccaaaattgacacccttatataagacaaatgtgataccggcgtccagctgctcgaagtcctttgcctcaagcatgcggactcaatctgtgtacttaaccaacaaaccaaaataaattcagggctcacaccaaaagaacatccgtcaatttgaagaaatggttaagaattcctgtgcataaactagttgagaacacaagttggtacaattataattctccacttgaaccacacatggaaataatgaccggtatgaacttatgctttgtgcagaagttttcaaaagaacagcaacagccaaagcaagtctgcatgatttagaatatcagaaaggagtggctttcctagtagaagcctcctttcttatatcaggagactatatatgtgttatcacttatgtgggtagaaccttctttgtgaaatgctttctaacttgcaacttggattttatggactctcaatttgatgccagttagatgtagtggtacccgcatggttggtgatttcaatgatcctaatgataaatctgactcgtgacatctgccaagtgccaacatttactgataaagaaagacatctgccaacatttgaaatgtgtgtgtgtgtgtgactgtgcttgtagatcttttagaggatggtgatccgcaacagtttctgtgatattatctgtctatagcaaacagaatttttccaaatgactgcattcttgtgatttttggaaaggagagaaaaatgttgttacaaaagctgttcactttgtacagggccaccaattgatacaa

SEQ ID NO: 106492 - DNA, 818 bp, Aquilegia coerulea
  Intron number 1 from transcript AcoGoldSmith_v1.001833m (l ocus AcoGoldSmith_v1.001833m.g) derived from phytozome v7. 0 (chr-ID scaffold_4; pos 6424604 to 6425421)
aggtatttgtataaaagagtcttcttggttgtgttcttccaaaataccctttgcttatagcttaatatgtgaattcccatatgtttatcgagccactggactcagacaatgccccatgtaataagtagcatgggacacatgagtcatgacacattatatgcaaataaactttcatagtttttttgctttataaaatcataaggtggggttaggcagatccctaccagtttccatcaatgtttaacttgtaaataaatcacatctaccttatccttgtcgaattaatcagaggatttcacatcataagtatgcaacgctattaaactttcatatgttgaccatttcatgtgtaagggaattgtttccttttctgatgtactgaattcagtcacatgcagctttacaagttgggtttaaccgtaaaagcaacaatatttttcttccaaaagctctatctattgactgaacaatagacaaagcgcctacagatgtatctgtttcatctgagctcaatactggcagctttataggagtatagtgtgtactatatggcatttgctttcttccgattaagtctatttggtcccctctttgaatcttaaaagtcattacttaccgcaactagtaaataaatgaaaaaactgtagataattgaaagacatgaccacttttccctcactatctgttttgatgaatcattcttggaactgaaagctaaatttagctgccctgtatctttctattctggatttcctttgctgacaaaaccattgtgtccagtaggggagcatcacaagttgttgaagaacttgacaaga

SEQ ID NO: 106493 - DNA, 314 bp, Aquilegia coerulea
  Intron number 1 from transcript AcoGoldSmith_v1.000881m (l ocus AcoGoldSmith_v1.000881m.g) derived from phytozome v7. 0 (chr-ID scaffold_20; pos 1561657 to 1561970 reverse stra nd)
tctcaaaccaactgggaagctgataaaatgtaagttttttcttcattttgggtttttttttttttacttgttttcaagtttgtagctggttttgtttgatactttgattgatttaagtaaaacacaactttgtttgctaaatcagctggttttgtgatttgggtacttgggtttttattctttctatcattgggttttggttttattaactactgggtattttgataaaaatcttgttttgagcttttaacagtagaagctgttaagtttatattcatgattattttgtcatttgattgggttttacaggttag

SEQ ID NO: 106494 - DNA, 429 bp, Aquilegia coerulea
  Intron number 4 from transcript AcoGoldSmith_v1.008096m (l ocus AcoGoldSmith_v1.008096m.g) derived from phytozome v7. 0 (chr-ID scaffold_5; pos 2575778 to 2576206 reverse stran d)
gtgggactgtgggggtatgtttgattctcaattggtctaacactgatgctttagttcatttttcgaactcttaatttaaactactcattgactgattcatctttgatgttcgcatgttgtatctgctagttgcagtgtcttgcttgtttaactggcctcttcaccttatggtatcttccatgaaattgtggtggatagaacattaccttatatccactatgctagcataaattcttttccactctccgagacaaagataatcataattttagtctattgtgaaaatgagttttttgtgtccctttcctcattggaaatcaattttgaatcaaacaagaagtattatttcatctgcagcacttctaatttgattgattcaaatatttacattctacatctgattggtgaagcagatcgttaccttggaag

SEQ ID NO: 106495 - DNA, 984 bp, Aquilegia coerulea
  Intron number 2 from transcript AcoGoldSmith_v1.010796m (l ocus AcoGoldSmith_v1.010796m.g) derived from phytozome v7. 0 (chr-ID scaffold_14; pos 5456455 to 5457438 reverse stra nd)
gtgcttgcaattattgttctcctgttcaggtacatcttttcaaaattggcctgtcttttatgtctgaaatggtttgtttaaatgtatttataaagtacgtgttgtgacaagaactcaaacattctgtgatgaataatttctgtgtttcttaccagtatctataattctgtctgactaaagattaatgtgaacccaaactaaatcatgtagttcgatgtgaaaagttcggtaaggtattgcccagaacattaaagaattttgtaaacctgctcaggctaaaaaatgtatcgtgtccggtaggttggtgtcgccctgctcaggctcttcgcaggttgttttgtcttcatggtcctccttctggcctttttcaaagagcatcattacctatacaattttgtagctatatccggttgcaatgtaaacaaggggactttaaagtgcatgcttaaagctaatgatagactatcttaaatgagtttacatctttgctttaagaaatggagggtcattggaggtctttttaagaattgctgtattcagttacgagtctagcactgttgtttttcgtatgagatttgttttgtttcaacttttcaagtcctattccctagtctgtagagactcctcatcccactttgatatattgcttctggattgataaaaagagaaacggtatacatgcatgcagaagctgttaaaagagtaaaggatgaatataaatcccatagcttgaccctacgtagttcctcactaacttggtaaagagcctatatcttataaaataaaaatactgcgaggatcatgaaaaagtaggttttgtttgaattctttgaaacgaagaagagtgagaacaaaggtgtcttcaataatttcacagatttactgttgcttattgtgattatcagaattgtctcagctcttgtttcctcttgtttaaataatagttaacaatggtataatattgtctgcagcactataactgtg

SEQ ID NO: 106496 - DNA, 1001 bp, Aquilegia coerulea
  Intron number 2 from transcript AcoGoldSmith_v1.024136m (l ocus AcoGoldSmith_v1.024136m.g) derived from phytozome v7. 0 (chr-ID scaffold_76; pos 728080 to 729080)
ggttaaacagagaaaagtagttagtactcctttccaccaagagaaattaaaggttctctcttcttatccaatttactctttttcacacattgtttgcatatttatgactttcctagaggagatactaaaagcatacttaaaggttttgatttgatgttaactttgacatttgtggcgattcttaagcagttgtgttactatattttcaagaaaaatgggatttggccggacccctaccagtttattaatgaaaataaaagacgaggaacattggtggtggtggtggtgggggggggggggggttgtttgacgtaatgagccttaccccccacaaaaaaaaaacatgcaaccaagtgctaggaaaaaaaacaagacaaaccccacttcatttataaacatgagttagggattacaaagcgatactctcttctaacccgaacgaaaattacatagcccaacttatctgcaaaaaactgccttctaaccaccctaggaagttgtgttactattaaacttgcactagagttgtcagggatttctctagtcatcctcatactatgagtgaagctcatgctattgttagtgttctcagggtctgctagctactctcctttgtgcatagtaaaagtttttgtagcataagcagggtatagcaaacaaatatggcagtagagtctacatatgaattgtacggaaaaatccatcaaaacatataccaagctgaaggaatttgaccactattatagtctgatcttgtatgctcccccccccgcgttaaagaaagatttacgtttttgtataggcctacaattggcggtcaagggacaagttctaatttttgatattataaatgaaacatgcttttcatatgtactcccagcccagctgcaactgcagaatctctatttgaagtccaataactaagagtaagcgaccatgtatgctctaggacaaatgtaaactattatcgataataactgtgtttctcttttatacagagg

SEQ ID NO: 106497 - DNA, 701 bp, Aquilegia coerulea
  Intron number 1 from transcript AcoGoldSmith_v1.026827m (l ocus AcoGoldSmith_v1.026827m.g) derived from phytozome v7. 0 (chr-ID scaffold_14; pos 4117779 to 4118479 reverse stra nd)
aagatctcaatacagaaagcaatcacaagcacctggtatgtttttgatctttttttttttttaatttaattgattgttttgttgttcttttaagtgaatcaaattgctaattcgtttagaaattggttttgtttaatgggtttttgttgaaattaaatgggtttggatagatttaatgtttagtgttttctcttgaagaaatttagaatttgttatgttagggtttttgagaggttatgaagttgaattgattggcttttagatggattgatgttgtttttatgtctattttggatggtgttttgattttgattgttattttttgttttgttgtttagaaattagaattgaatacaaacataatcatagtttaacttgtaagttgtgttgattactttgttttattggtgttgattgcagatagtcatgtttatgattagggttatgtttattttatcttatttgcgctgtttttccatatatgtaaaccacctgtagagaatttgatcgcattcattactgctttgtcgtattttacgctatttaatgttaatcaaagaatctaaatttattcaattgcgctgttttattttacattttcaaactaaggcaagtaattctgcaagaactcgaagactaatatagtgtttgtgtttatgtttacagattcttggcagactgatataccttcgtggcagcct

SEQ ID NO: 106498 - DNA, 432 bp, Aquilegia coerulea
  Intron number 1 from transcript AcoGoldSmith_v1.009168m (l ocus AcoGoldSmith_v1.005929m.g) derived from phytozome v7. 0 (chr-ID scaffold_14; pos 368217 to 368648)
ggggttcaccttcgccgtcgactcctctctcttcagtatgtctcatctttttctttctttctttgctttttaggggtttggtattatttttattttcaaaatttcaatgtttttgtgaattaacagtagaaatcagtttctccactatgaatgaattaggatattattgggatatttttggttcccagtgtgctgatctttgtatcaccccgtgaatatttgactgtatcatacacattcaaattgttttctgtttcaaacattttaaagatatgttttgtgaaattggctcatctgataattgtattctttgttaatcgcatatggattacaagatttcttaactcatctatagtcatttgggtgaaatttttttaatcttgattatatatcttaattaacagagaaactttagtaaaatcaggagaagat

SEQ ID NO: 106499 - DNA, 623 bp, Aquilegia coerulea
  Intron number 1 from transcript AcoGoldSmith_v1.016434m (l ocus AcoGoldSmith_v1.016434m.g) derived from phytozome v7. 0 (chr-ID scaffold_5; pos 8295486 to 8296108 reverse stran d)
cacgctcagtgtttggtgaatgttcttagagagctttataacgcaacaaccttgacagtttctgtttggcagtctttggtaagcctcttcctatcatttatttgaacattattaatttgagaaggtttgcattaatcacttaacatttcaaaaaatggatattgctgaattaaagatgttcccagcattgatgtatatagttggattttgatggaatgtaaatgaaaacatgtattttctgtatagagccttgtctgtgttactaaagggattgtaagacccatagctctttctagaacatgaacaaattgggaagagaagtcagaaactcagaaagttttgaatgttgtctggcatatactgaaggatgtgacttgaatacttatacagtaatacagttatacctattaggtttccttcctattgtctttcacagcttacagcttatgcattggaattatagtgtcgcttcgccatgcctaaatcctgataaacaatcaattgctacacagtgcagagtctcaatacaaaattgagaccattaccatataactaattgccagtgtggaagtaaaaaaattatgaaaggatattttattcttctaacattttaaccaagtgta

SEQ ID NO: 106500 - DNA, 464 bp, Aquilegia coerulea
  Intron number 1 from transcript AcoGoldSmith_v1.016731m (l ocus AcoGoldSmith_v1.016731m.g) derived from phytozome v7. 0 (chr-ID scaffold_73; pos 635429 to 635892 reverse strand )
tggtaatattaggtttctgcatttccattttgggactgaaaaggttgatcaagtcaaccagcttatttaggtctggattgggaagaaaatgttattacttgcaatgctctttgttgaatttgattttttcctgtaatgcgtttgtataagaagaatagactgctttatctggttggtcagtgtgtcagcattttatgttctggttggcaattaaactctctgttttgtttccaaaccccagagttattagtgattaccagatgtggttaatgtttctattatctaggaactcttggtttattagaagtaaatgaactacggtgcaataatacaaattacaaaatatgatgtgcttggtgttgtctatattttttgttttgggagaatttttttttttcttctaatacatcctagctttaactggctcacaaatactctacagggtccagatctggtgggttcca

SEQ ID NO: 106501 - DNA, 567 bp, Aquilegia coerulea
  Intron number 2 from transcript AcoGoldSmith_v1.015598m (l ocus AcoGoldSmith_v1.015598m.g) derived from phytozome v7. 0 (chr-ID scaffold_135; pos 19202 to 19768)
aggtaaaaatccccctttttttttctccaatttggtctgattcagtcttgattgtttgatgttaatatgtaagttgattgattgatagcctacctatgttgaaaagattcaatgacctgttaactgtacaggaatttgaatgcacaagagtgtttttattttattcagtgtaaaggtggatttttttttttttttcttcttctagcgacattgtctgcggaacagactttttcccatatacgaacacgatataattctaaataatgttgagtgcaagatactagaataagagagtaacggcaaatgttgagaaatgagataactcattaacaaatgttacacagactcatctgttcagtaaggttactagaacatctccatacaatgggaaaagccttgtgcacattctaaattcttaattttagtattttcaaattgtcagtgatgtatcatgttctatagtttttcagtttttcttttgctttttattgtttctttgctggctaggcttagtctctctatgtttgatttacaatcttattttggttggtgcaggttagcttaacg

SEQ ID NO: 106502 - DNA, 771 bp, Aquilegia coerulea
  Intron number 2 from transcript AcoGoldSmith_v1.024812m (l ocus AcoGoldSmith_v1.024812m.g) derived from phytozome v7. 0 (chr-ID scaffold_33; pos 909092 to 909862 reverse strand )
cctaggtacgctttacattccattcacttatccattggattattattttttgattcatccaatgtgattcgtagagtatatgatctatcccgtgcacgacatatataagttaaaccgtcagacatcacaagcattggaccatctttggatcttaaatgtttctatggttattagtaacaagaatttataatatacctttagatgaattttgtctacacttacagacactgtgagattttgtttctcatcccgagagcacctagcacgtaccatacagcctccggtatgccaatattgagcaatgtaacccttccgagtgcttcaaaccaaccaatcatgcttgttagtaatacgaatctatcgtaagcgttaactgatcttcaaaaccaagaaacatatttttgttccccctaagttagatcactactagattagtaaaaggagtatggcctaaataaaccgcacacaaaatcttaggatctgcataaagtccatacgggctataaatttttggcaagttgttttcgcttcgtgttacttataagctaatcgattttaataaactctaacttgaataactttgaattttgtaatgaaattatttgggattgataagaaattaattacaacaaagatcttctcaaatttagaaaatcttactttttttaattcagtacacaaatctaatgatgctaggtataagccctaacttctttgtgctagttgtaaatgaattttgatagattttctttatcaatgtggctaggtata

SEQ ID NO: 106503 - DNA, 1040 bp, Aquilegia coerulea
  Intron number 2 from transcript AcoGoldSmith_v1.024130m (l ocus AcoGoldSmith_v1.024130m.g) derived from phytozome v7. 0 (chr-ID scaffold_4; pos 7912116 to 7913155)
gagaaaagattgtatgttcttttatttctctctacacattttggccttactagatgaagaactgtacatatatattactgttatttttttctcattttcttttctatatgataattatcaagctcatgagaagaagaaagttttttttttttttatctacaatgatttatataaattcaagttcatttagattatataaatgagatatatatatatatataccaagctaagcaatggttgttttgatgatgataagatcatcacacctactagatactccgtatgaaagtgataagatcataatacaaattggattctctattatatggaccaccaaaaaattattaaatcactaacttatctatctttctatgctgtttgatggtgacttcattgtccaagatgtttgatagacctatgtttgaccatgatagttgtttattactaggtgtttagtttttttttgggtacagttgtttattactaggtgtttagttaatattatatcatttgaattattgaatatagtatagttcttcagaataatgtgccatggtcaaattttatttataagaaaataaacattttctagcgaaaaaagaaaagtaaacattattatcaaactcaattacccaactgtaccaacagttgaaatgcatgaatttttttcatgtttccactgagtaatgatctcagaagcattggatattaatcaatttgtactgcaaatccaacatcccattgtaggagacaaggctggttaagtttatgactggagcttttcaacaacaccaatttaatatgttaaccgaaacctactggtacattctgatgtttagtaagagaaagattcttaaattaaatgataccatgtggatgctaacgttgacgaaacctgtggaactcaccatcactatcaatttatatatcatgatatctggttgggtttcttaactttttatttcacgaaaaataatattaaccaatttgcttaattatatattcttgcaggttcaatattcacgtactccacaggcaac

SEQ ID NO: 106504 - DNA, 534 bp, Aquilegia coerulea
  Intron number 1 from transcript AcoGoldSmith_v1.007397m (l ocus AcoGoldSmith_v1.007397m.g) derived from phytozome v7. 0 (chr-ID scaffold_29; pos 2129046 to 2129579)
attattatcattccatttgcttatttccttgagtactaactactaactcattcttggtttatttagagatttcttgatcaacaacttaattataattatttagctttaaaatcttgttcaaatatatataattccgtagtcaatatgcatgtttcttcagttttagttttcgatcatcttggttatagttcttcaagctagctagtctttccatcaaatgagttctttcttgtttagtttgctttagttggctcacatggaccaatgaactggttggaataaaattattttcatttgatgtgtatattaatgtatggatcgcgacttctggtacatatatatttgagctatagcagagcattttcaatcatgttatcaaacttgtacaataaattaagaaaaatccggaaattttaggatgttctttttcccatatttagcataaagagaaaacaacgctgatggtttttgcaaactacattaagcgaaatatcatttctgagcttgtaatttttatctttttgcaggaaaaca

SEQ ID NO: 106505 - DNA, 427 bp, Aquilegia coerulea
  Intron number 2 from transcript AcoGoldSmith_v1.006659m (l ocus AcoGoldSmith_v1.006659m.g) derived from phytozome v7. 0 (chr-ID scaffold_4; pos 1984345 to 1984771 reverse stran d)
tccatcaaagtttcccattgaatttgctgtagcaggtagttattctacacttcaactccagtactattcttcagaaaaagaaaaaaaagttaaaaatgtatatgaaaaagggcccaaccgggttcgaaccggtgacctcttgatctgcagtcaaatgctctaccactgagctatggacccacttgttgtttagatatttgtaataatatattttaatactttgttagaaatggtaggataccacatttgttgaatttcaatcttgctttaagcaatagacaaacctgcaaccatgcttttcatcctgtgactccatcagtgtgtttcatttagcatatagtatgcatgaggccagtgttttgatgattctgttcacaataacaactttacaggcgatcttggacagacagagtggacagcttcaacc

SEQ ID NO: 106506 - DNA, 240 bp, Aquilegia coerulea
  Intron number 1 from transcript AcoGoldSmith_v1.007856m (l ocus AcoGoldSmith_v1.007856m.g) derived from phytozome v7. 0 (chr-ID scaffold_14; pos 3392783 to 3393022)
gatcagatttcttcttctctcattttcttctcaaggtaataatctttcttcttcttcttctttctcatctttgaatttctgtttcttttccaacatttttttttctttctcgaatctcattttcttgaagaaaagatcaaaatcacaatttttttatgaaaattagggtttgtagaatagaaaagatttgaaattgattgttgaaactgtttatttgattgttttgaaacacacaggcac

SEQ ID NO: 106507 - DNA, 778 bp, Aquilegia coerulea
  Intron number 2 from transcript AcoGoldSmith_v1.007856m (l ocus AcoGoldSmith_v1.007856m.g) derived from phytozome v7. 0 (chr-ID scaffold_14; pos 3393124 to 3393901)
ttccagtgaacgtgttgcaaatttggctctagcaggtacgtttttgatagtttaatttaatagtgttaatttgacttatttttattagaaattggtctgagaggtttgagtgtgaggttattactttgtatggatctcgcatcaaatttaataaattatatgcagtttttaatgttaaagatgtttaaaagccttaaaaatcaattgtttttccatctatttaaaccaaaacagtttttctaaacttgctggtatagtgtaagagaagcccaagttgcaaatttggatcaactttcgaaaggtatcatgggcatgttgtaatgtgttttgtataacaattttaagatccgaatggttcatggagttggaaatttgaggtttttacgaagcatggtataatattcctgttgctttactgcattcgacgtatacctgatcacatttacaccggacaagaaaataacaaactttgttaggggagcaatctcttgatggctttagagtgattggtaacatctgtgtgcttaatggatgattcccatggatttgtaaatatttgatggtgtaataaaaaagatggaaacaatattatccagttcacaattatacttgcggcaacaattgtaggagagactttagtttgatgaaaatttcaatctttaacagttgaatctaggtcagaattccacatataaatgtttaattactaaaatgacacaattctataaagctcatgcggttgcttttgcaggtttgacattggccccactggtcgtaa

SEQ ID NO: 106508 - DNA, 969 bp, Aquilegia coerulea
  Intron number 4 from transcript AcoGoldSmith_v1.007546m (l ocus AcoGoldSmith_v1.007546m.g) derived from phytozome v7. 0 (chr-ID scaffold_5; pos 1894486 to 1895454)
tcgaggaacgaagacgttttttcaaagaagggaatgtatgttcaatctttcctggaaagaccatgcatttgaatttcattttcatccttttaaatggttgagttgtgttatttaagattctttaatatatatttgattgttcgtttgtttttccatatttaagattgcaatcactggagtgtggtgcttttaggcacaattgccaagtctcactggtagacaatgcaattgacgtatagggaaactttaatgcatcaagtgaatgtattatattttcttgaaacagaaacatcactacatcgattagcccactgaacatctctttttagtttgtagtcacgattttatattcctcaaaaacttgatgtgtgttgagttaaagttaagaaactcatatatatcatatatgtaggtgcagctgcgaaaacttattgtaaagattgtttgagctttagtattgttctactatattccttataataataattataacagaaatcatcttgtaacctcaccgtgtgttattaacaaatataagatatctggaagaatctgaaatatcacacataaagataaaacaaaattggaaacttgccttagtatatgaacttaataatcaacataggatggaaacacaaaggagcattatcttggaaacacaaaggagcattatagataaaataagcaagttgaaactataactgtgtatcaagtttcaagaactaatatactcaatctttgttacttttgtagaatgactctttacacaagttttttatgcctattttggggccggatctcaaacctgtaaataatactgtaatgaaacctataggactgctctatatactattgtctctttcaggtcatgattgaaactagtcctttgtgttttccgttttttgttctaacagtttgaaaatgttgcctgcagaaacaaaatcagcttctatcaagatccaagcaaaa

SEQ ID NO: 106509 - DNA, 428 bp, Aquilegia coerulea
  Intron number 1 from transcript AcoGoldSmith_v1.004089m (l ocus AcoGoldSmith_v1.004089m.g) derived from phytozome v7. 0 (chr-ID scaffold_42; pos 600305 to 600732)
ctcttcctcatctcagtatcaaagacactcccattgtgagcttttctttattcttattgtcttttcattacttttcatttttaactttttttttattcccccaaatgttattgtttcaagtggcaatccaaatagggattttaagttagagaaattttgttgattttgtatttaatgatgattttgtctgtttttattttaatttagaaaatttgggattttttgatcttggggagctttatgactgatgatttgggttatgtgttttaattgaatatgggtatctgtaattacattttaactggatgaaaagaatttgtaaattgcgatttactgtgattaagagttgtgggaaagaggactgattcaatgcttggctgtgtttttttgcaggaaacatcatctgctcagtacatattgcagcagta

SEQ ID NO: 106510 - DNA, 910 bp, Aquilegia coerulea
  Intron number 2 from transcript AcoGoldSmith_v1.011019m (l ocus AcoGoldSmith_v1.011019m.g) derived from phytozome v7. 0 (chr-ID scaffold_17; pos 789765 to 790674 reverse strand )
ggaagctaagaggaagggacgtcactctggatgtaattgcttttctttttgttttaagtcatttcaatcttaatttatgaaatgctatgatgcgtcctttgtttatgttgtgatttagtttttatatgaattattcttgttatattattgatgctgatatataatttgttgatgggattttattgctttttaactgaagtttttatggttttattgttctcattgtgagataacaaactatagatagtatttaacttgtgtaagtttagaccaaccttagtgtcacatagctctgtatatttcatcaatatcttcttgatggttttattgtaacttatccttctgatcaacttaaatgttgctatgttggtgattcattctcatttttatctctactatacttaatgaacactaccaagtaataattattgtttatttgatgaattatgcttttgggttaatctctgctgggctttttatttacatgtataaattgtatggtcttttaatcccaccttcttgctggctaaagactgaatcagagaagaaatgtttaacgatcactattttctaatcttaatttatcttaagaagacaagtatgttttaaatctaattatgttggtaatttattgcttaatttataatcatatttttagagtaatattgttttgcttataaatctaaattgaatgtgttattatgataaatgtcttgtattggtcacatgttcatattgacatatagtaacttgagaactaggatgatttgttcatgataatcaaggtatgattttgtttgattactaaacagtaatattttatttgaactattgcttgagtggcttttgtaacatttctgtggaaattttcacaggtaagcgcaagggtaccagggaggccagacttccc

SEQ ID NO: 106511 - DNA, 664 bp, Aquilegia coerulea
  Intron number 2 from transcript AcoGoldSmith_v1.005464m (l ocus AcoGoldSmith_v1.005464m.g) derived from phytozome v7. 0 (chr-ID scaffold_14; pos 262383 to 263046)
agcccaaaagagcacaacttttagaggtgatgattaatgttccttcctttgtaccttttatatgaaattaaaccatttatgtacataattgtatcatgtcacttaaataataaccttttccccctccccatactaatacaataccatactatagtcaattattgtgtactgctcttccatcatacatatggggagccacagccatgagccatgctcatgtaatgtgttcatcattattacagtaattctggacatttgaatctgtagataatttataataatactgtatatggactggtattacgttgccataattaataacagatgactaagcatcccaattgcacatacaccaatctgattttgattttgagaagaatattgataattaccgaaaaaatgtatccacttctagaaaaaagtgatatatgatacctgatgtgcatctactttcttcgaaatagagttatttggttcgccatagcagtgtgcagatgtgaaatttgttatcattccagtatacaattgtcgcattggtacatcccacataaaaacaccaaaatgacatgattttttatcttgcaacaatcaattttgttattcttagccttttgtttctggtgcaataggttatattggatttgggtcgttatccagaagcacg

SEQ ID NO: 106512 - DNA, 604 bp, Aquilegia coerulea
  Intron number 1 from transcript AcoGoldSmith_v1.017615m (l ocus AcoGoldSmith_v1.017615m.g) derived from phytozome v7. 0 (chr-ID scaffold_42; pos 1522285 to 1522888)
agtaccaactttatcctgttccaaaacaattggaggtataaattgtgttactttgaatatttttcattttgtatttcttattcaaaagaactggtctgattattcttgcttggattggtgtacacagactgcgtgctggtttgtttgtaagctgtacaagtctgggagctttgtggaaatgcagcttaggactttattcagcttttaactgcaatgtaaccatcaatatgtgttaacaatattctacagttgattgaatttgtgggatcttcactaaaaaaagattaaatttgtggagtctatcttaggggtgctcaacttgccctgtgacccggacccgccccgttccccgccccgttttttatctccccgccccgccccaatatttgccccgccccgtatccgccccaatggggagcagggcagggatgggtttcattgtatagattgaaaccccgccccgtgccccgccccgttccccaccccgtatccctgcccagttccagccccgtatccctgtccaattccccgtccaaatccctaacagctaaagtgctaaacagcatcaggcattcagatcaaactcaagctcaaatttgccatc

SEQ ID NO: 106513 - DNA, 554 bp, Aquilegia coerulea
  Intron number 1 from transcript AcoGoldSmith_v1.006972m (l ocus AcoGoldSmith_v1.006972m.g) derived from phytozome v7. 0 (chr-ID scaffold_42; pos 525480 to 526033 reverse strand )
tgcataggcaggtaggcatatacattgtgtttttccttcttcctttaaaattataagagaaaaaatgatgttaacctaataaattggttgagatgtgtttttgtaaacttactttcaagaagaccaacattatctattcagaaagttagatctagctttctactgttttgcgaatcaaggtcttccattcctctctcaattgtccgtgtctctgtcaaatagaattttacttatcataaagtaaaagacataattacgtaagtcttccaacagttagttacttttgagtcttgattaaattttatttaaatgaagtgttaaactaaacttcgagacttgactgaattttgtttaaatgaagtaattaacttaggtttgagtcttgaccaaatttgcatttacatacccctttcctcttgatatttgataatatataatgctgtactaattactttttttatataataggatccaaaattccaaccagacttgtcaagcacttaccaacctgtaaaatgcagtttggactgtaattgcaacagcgaaaacacgca

SEQ ID NO: 106514 - DNA, 873 bp, Aquilegia coerulea
  Intron number 1 from transcript AcoGoldSmith_v1.024479m (l ocus AcoGoldSmith_v1.024479m.g) derived from phytozome v7. 0 (chr-ID scaffold_14; pos 1009122 to 1009994)
gtcttggttgctaccatttcaggtattatttagtcccttctttgagtgatctttaatggcgtgtattgcttaatttctgtatttacaatgtttaaaatatgaatctctgagtttaaatttttcatggtgagtttaatctgtttgatcaaacagtgattttcttactgtttaatgttattttcaaaaagttcttgtgttgccccaatggatgaagtagtttgaattttaatgcttaattagattcaaggcctaatagtctcaagacagtgctcgattagtttgaatcatttggatcagggatttatattgaatctttgcacttgacagaacaagttgattaggtctttgtctatttgaacttttttacttatcctgccatgtcttcctagagacccactacttttatgtttttgtcccaaatagttggaatcttgcttttgaagatgtattcatggttccttttagtcatttcgtgtctttcactctgaataaacctatatgtatttcatgcttcggctcttgaggaaattctttgttgcaatatgaagaattcagattgttttctaccttctacattctgttggaatgattttgttcaacatcaaagttgtctaaatcgttgatattgtcaatgagaatatctgcaaaaaatatgtaggatggttggatagtttgaacggaatttagtagattttgcctagattgaagatggtattggttaatgcacttgtttttgaactgatgtattcttaacgaaattgagttcattattttgaagaatggaaaatttgttttgtcatgttacaatacttatcattgtggcaagcagagaatgaactagtctactgataatatgatggattttttttagaa

SEQ ID NO: 106515 - DNA, 847 bp, Aquilegia coerulea
  Intron number 4 from transcript AcoGoldSmith_v1.005041m (l ocus AcoGoldSmith_v1.005041m.g) derived from phytozome v7. 0 (chr-ID scaffold_14; pos 1185201 to 1186047)
cgaaggtttggattcttgtcattactcattacacaaaatcaagtttcgttgcttagaattgatgatgtctagtgaagatggaggaaaataaatggtgggataaaatgtggataaagattttctattgttaaacttgttctcattactccaatgcctcttgacaaccataagtagagatgaacaatttgattgattgtagggactgaattctagttcatacatactcacaggataacttatgttaatattgagttctgtactaataaacctagctattgtaccatcttgagtgagtgagtgagtgacatcttcccatttccatctccgttgccttctctctttcaattatatattcttggctagcagatccctcactgttcatgcttggtttgttttgaatgtaactcaacagaatttctcaagttgcttattaaactggctttgatggcaagccatagtagtttctctctctcctttttttcccctagcttaatggtgttttattcttttgatgttcttggtattgtgtttgttgtattaccgtactatatattgtttccattaatatagattgctgttcaaatcgtgaattgaagttgccttcgtatacgcactatctagtagaggccagctagcttagttgattaagtaccttccagcaccatatagaaccctattatcaaaaattattcaaagtttgaaaatatacattcgttatgggtgcaatatataattttatacttcagcatataaaagtactgatcttcaatcttctaagttgtgcgtgttcctttgaatatcttttcttgcagatttccactgctgattacacactggcacaaagtgc

SEQ ID NO: 106516 - DNA, 390 bp, Aquilegia coerulea
  Intron number 2 from transcript AcoGoldSmith_v1.001335m (l ocus AcoGoldSmith_v1.001335m.g) derived from phytozome v7. 0 (chr-ID scaffold_4; pos 6172278 to 6172667)
gagttcatctcgttgcttgcggtactccacttgaggtatccttttgaatgttacaatgctatatccaatggatgctttaataaggttgatgaaatgtcctagactcctagtttgtcaatttcactcaatttcatttttctttcttttttaatgtctccctacattctgtttgtctatgaaaagttgtattcaaaacatctggcattcgtaaagaaaggcatctcttccattccatctcacaattttataccactcctacatttccaatgtcgtcctttatgtagtcagtctggttgcatgaatctgtcaatcaaatgcttgactctaatacatttgtatattctcgactaattaggttttgagaactgttcaagctgaaggtatccgtgg

SEQ ID NO: 106517 - DNA, 1008 bp, Aquilegia coerulea
  Intron number 1 from transcript AcoGoldSmith_v1.002960m (l ocus AcoGoldSmith_v1.002960m.g) derived from phytozome v7. 0 (chr-ID scaffold_23; pos 808275 to 809282 reverse strand )
aactcactgaagtaaggcattctggttaggactttatgttttcacttataagtatttcggtagagaagaattatgttttgtttttttcatgctttgttctattgattttatgttatatttcttatatgtatttttaattgtatccccgaataagctacgttttggcagaatccaacttgaattgatcgtaaaaaactcttacaacagctaaaaaaggaggaagggtgagagagaacgaaatacaaacttccaactactgtgttatgaagcattgaactagaaaaacaccttttgagtggaatttactaaacaagcacctttttggccttttaacaattaagagtacaattctatcatattacttacagataaaaagtcacatcactataaaaacttttagtttttgctgccacatcatatatatgcattaaatggctacagaatccttgattactccctaaccaatggatgaaaaaggtaaacatcttctgatctttggattacacttaaaaaaaatcagtatcatttgtctgctaccagttaaacacataaatcacggctgtcgtctgctattgaataactaccaaattgtttctagatacaacccccaattttttaataaagatttgcttgctagtcaagcaatctttgagttgacaacttagattcctataatactaaaatcgttcagttcccctgtctcttttccccctaatatgtaaaggcctaaagggacatatttgggatcattacacttccatcactagcaattttctccataaaaagataacatttttaaaacaatttcttattaagaagcaagttatgcaactaagatacagcagttacatattgtgtttctgaacatacctgtaaagaccatgaagtcatattgtaacgtagagagtatgaaagcatgttaatgctctgtggtcatcttcagtctacaaaactttgcactctggaaggcaatatcttactttatgagctccttccttgcaggcattt

SEQ ID NO: 106518 - DNA, 977 bp, Aquilegia coerulea
  Intron number 1 from transcript AcoGoldSmith_v1.004951m (l ocus AcoGoldSmith_v1.004951m.g) derived from phytozome v7. 0 (chr-ID scaffold_5; pos 2045741 to 2046717 reverse stran d)
tcttggcagcttgattatctatctcattataattggtatgtacatctgttcatttctagtgttctttaattagttctagctttttaaaatcgcgcgtttttaaggattttaagtactgtatggtggatcatacatgttaaaatttaattatagacttgaggagttggtgctatatatatagctcattgtagttgtatatgcatcatttttgggactttgttgactaagtgcataacacaaaatgtcgcgacatttcattccaatttgtcaggaatggaaaatcgctacaattagtgtggcaagtttgagaatttttgagtttatgtttataatgaacttagaccataatacttgaatcagaagtcagaacaaaattagaccattttgtttaggtatcaacttgacagattgatttattagcttgattttttttttttttttggaaagaacataagcatgggataatattaccatatgtacaacccatctataaatgcagagataatatttagtgacattaataaagaagagaatgcagaaggataatgttcataagagaatgcagagattataaaatctagattcaataataaataagaaaatgcagaaggataatgttatcacattccttggtataatacatatggattgagatcagaaaatatgcatgtttcacaccctgccaactaaattatacaaattttgaaaaaaaaaaattaatttatttctcttggcttatatatgttgatctagactccaaaaaaacatggaatgcatcaatgcaacaccaaatttgcagtttataaacttcgttaaaaagaatctcatgtctgtagaaatttattagctgcagtttgattagcatcaacaagttggcgttacgccttttacaataagaaatttgaattaccccttcaaaaaaactttaatagtctgaatacaatcaaattatacgtcttgaaattgtttggcaggtg

SEQ ID NO: 106519 - DNA, 523 bp, Aquilegia coerulea
  Intron number 3 from transcript AcoGoldSmith_v1.012526m (l ocus AcoGoldSmith_v1.012526m.g) derived from phytozome v7. 0 (chr-ID scaffold_65; pos 1140126 to 1140648)
aggtaagatagtagcatttcctttcaattctgtcaaatgatagtcattaagaaactctgatgatcccttgcaacttttctaaatgtgtatgagccatgataaagcatgccacaaaatatattataccaatagaatgacaatttgctggtagtctatcttttgatgaagaagaaaaaaattatctagaagacagacagaagaagttcaatttgcagaagctttcctttatcccaacccacactctgataacatgtattttatcgtatttgagaaaaagctaacctttttaattcatcggtttgcttattgacaagccctaatattgttatatatttgaaagctacaaaggggttgcctcaaatttcttgcttatgttttaagttcaaagtcaattctaactttttgtttgattccccttgttatgctagcttactattattttaaatttcgatttaattatattggaactggtgtgtacacttatttaggtgcaaggctggatcaagagtggcttgagagattt

SEQ ID NO: 106520 - DNA, 534 bp, Aquilegia coerulea
  Intron number 2 from transcript AcoGoldSmith_v1.021648m (l ocus AcoGoldSmith_v1.021648m.g) derived from phytozome v7. 0 (chr-ID scaffold_17; pos 2464210 to 2464743)
acgtggtaattctctttcaggcgttttttttttttttttttctattaatatgttatttttctctttttattgatatattaatcgattgaagtttgagttgaaattgtttagtgacgtcaattttatataataaattcttagttagtttgatcatgaataaaaagatgtcaattttatcaaattgattacattttttggggaattcatcactattgaatcctgagtggtgggcataatcatagaaatttagtaactttgggaactttttgttataagggtaccacgaaaggtgattttatttatacaattaagtgtatatgatttgtaatctgaaatagttgtacattctgaacctaagcaagatagttaattatcagttctgacactcttcattattgttacattctctttatatttgaaggtgtcgtaatggtttagtaatatttggatcacgtatgaagttaactttctgttttctgtattccttttccgtatacaggttggtttaacattgaatatatcagcagatctgca

SEQ ID NO: 106521 - DNA, 574 bp, Aquilegia coerulea
  Intron number 1 from transcript AcoGoldSmith_v1.009687m (l ocus AcoGoldSmith_v1.009687m.g) derived from phytozome v7. 0 (chr-ID scaffold_4; pos 5984483 to 5985056)
ggtattgttcttttatcttacttaatcaatttaaacatttgggtattaattagttttgatttttgttcattattttgagaattcaatttgagtctttgaggtattttcatgtaaaaaatgcccaaatctcggtctgtagttgttgaatatgattttgattttctaataattattaccaagattgaattgacaattgaccatgtaagtgtgaagacccttaatgcgaaaatgcgcatagggtccttcaattgtgtatcaaacaccagtcgagatctttctttaaaatttgagctgaattatttcaccaaattgcggtaccaagtattagatgcagcttaggtttgtgttttttcctactacatttgatattaagtattagatgcagcttaggtttgtgtttgccctactaggtttgagtcattctttcaaaatccgtatccttaatatttcagttaactgggtctataatgtgtgatttttgaagattacagtctagggatagaaatttttctataacaattctcatttaaaaaatcttatgctatctttcacagattttacaaagtagcagaaa

SEQ ID NO: 106522 - DNA, 879 bp, Aquilegia coerulea
  Intron number 1 from transcript AcoGoldSmith_v1.010969m (l ocus AcoGoldSmith_v1.010969m.g) derived from phytozome v7. 0 (chr-ID scaffold_14; pos 3183116 to 3183994 reverse stra nd)
ataatccacctaagatatttgaatctttctggacagtaagttcatccttttcttcttactattccttcattcttttagtattctttgatgaaacaatttcttttctctcttttgtttattgacttcaaagattgtaactaacgcacatagcacatgagcatgtggctcaacggttgcatccctctcacaaagtggagaggtcgtgggttcgaaacacgtcaacagctgattgtttgatataagtttcctcacgtaatttaaaggggtgggggtcccctcaaccccgcttgccaataaaaaagttaatgcacataaaagatctaagttacaagcataagaacagtggaattgtatgccttgtcaacttctcattgtaaaaagtgtaattcaacttattcatttacagtaccagaggttattcaggatgtgtacctcatgggagatctcgtatatgcattctatgggtcttattattgtttcctttgcaatgggtgatttgtaaaccatgtcaatagaattttgctgataggcttttggattaagatattttcttcattgccagtgtttaggatcattcttgtgtcagactagaggattgttaatttctgtggtgttgaattcattttctttatcattaaaaccttgtgtaatatttgatggaacttttgctttgcgtatttgttgtctaatactatctcatgatagtgaaagataattaattgacatcttgtgaaggtgctacccatcttgtacttcaattgtatagctgctcgtgtttgtgttattgttgcattgcttgcatctatcagctttgttagaacttaacaaatatttgttactgcaggtggtgaaaccttttttagagcccaagacatacag

SEQ ID NO: 106523 - DNA, 698 bp, Aquilegia coerulea
  Intron number 1 from transcript AcoGoldSmith_v1.012380m (l ocus AcoGoldSmith_v1.012380m.g) derived from phytozome v7. 0 (chr-ID scaffold_17; pos 3495759 to 3496456 reverse stra nd)
ggcaaagtaagtgttttttccttgattttttatttttttatacgaaattagagtgttatttgagaaaattgaaacattagaattatagaaatactcatgaactcaaatactgtatatatatatagaaattaatttgcatattcacatgtaaatgtaagagaattttgtgtcaaagggtataagtagcacagtccaattgaaaccattgttataaaccctttgctcatggtttatagtgtgtttgagtactgttttgttgtttgggtgaagtacattctgttcgtaggccctttgtcagattcttatatatatgagcgtggatatcagtggatgaacatatgataaattgataagaagtatatatattctatagcctgttttcaaaataaaatataccttttgatctctgatttgaagagattatggtccaagtgattctgaaactaccaagagcagaacacagagacacattttaaaggttcaacatgcttccgcaaactctgtgttacaacatagcttacctctgaaaggcatatgaacattaattgacattgaaaaccttttttggttatattcatgaatatgtttataattgtcagtttgtcactgacttgaaataaaagcctttcaacatattccctacttcagttcaattttttaatttttctacattattttctgtgccgtgcagcattcct

SEQ ID NO: 106524 - DNA, 761 bp, Aquilegia coerulea
  Intron number 1 from transcript AcoGoldSmith_v1.011162m (l ocus AcoGoldSmith_v1.011162m.g) derived from phytozome v7. 0 (chr-ID scaffold_14; pos 2821195 to 2821955 reverse stra nd)
ggcttggaggatttcgcccttcagagcttctaaaggtgatgtgtttcatgattacaagaatatgtatctctgtatttctttgcgtaatttttcttctttttggcttgataagatttcatctgccgtcatttgaataaaatgtagatataatggtaccttttctcatatcttacagcggaaaacaaaagtggtttctggctgaaaataacaataaattgtaaatagagtatggcctaacaaaccacggatatgatttttttaagtagaatcagcaaaaacctaagtacgtttagatgcaacccataatcaacttcaagattcacagacagggttgtgagtcttagaatccaaaaggcatgttgaggaacatgaaggcatgcaaaaatgtactgtcgggcaccacataaagtatagctaagcacgtgtatcagttgtaaagatccaaatttcctttatcctctggtttgatattcaacaaaagtcagagcatcccacctttttgaagctcttggattcaatttttttgtgcaattaggttaatttagggttatctaaccaagcctgcctgaaactttgcatataagattcctctctccattataaatgattaaacatgagctttcgtcatatattctcattcgaaatactatgtcattcattagatgtgtgatcaacaccataagcttatagcatctaaaggactaaatgttatgctgctggttacaggttcttaggccacaacttgacacattgacagagca

SEQ ID NO: 106525 - DNA, 232 bp, Aquilegia coerulea
  Intron number 2 from transcript AcoGoldSmith_v1.015781m (l ocus AcoGoldSmith_v1.015781m.g) derived from phytozome v7. 0 (chr-ID scaffold_90; pos 511289 to 511520)
gctactcgttatacagcagggtatgtctttgagtttcctatatcctttcttatccttttctatttagaatatgttaggggtgaaggcacacctcaacctgcattcaagtcaaaatcttacataattttttgcatgtcctccttatcttagtatatatatgtacgtaagacatcctttggatttttgatgatcattaggctaccaaaaaagtggagttactgtacgaagtgtt

SEQ ID NO: 106526 - DNA, 700 bp, Aquilegia coerulea
  Intron number 2 from transcript AcoGoldSmith_v1.011451m (l ocus AcoGoldSmith_v1.011451m.g) derived from phytozome v7. 0 (chr-ID scaffold_5; pos 6744439 to 6745138 reverse stran d)
tgaagtcccatttacaggtaaagaaaagcttctcaatctttcactgatcttaattggatttttgatctaagaagatctctctttctttcactctccttctcgatctcactctctttctctcatttgttttattcctttgagctacagtatgttagtgtagttctttgtatctatgtatttcttttgaaatacattgcaaataccaaggcttcttcttcttctctacatttgggtctctcaaacccatccaaaataatcttattttctttctaattgaaatttgtgcatgttaacaaccagctttttgtttgtaagaagagaaagaaaccagtactgtaaccaagagagagagagagatgaatcatgaccaaagatagtgtgtttctttttctttttcagagaaatggcaaagaagcaagtacagtacactattatttctcaatgatttcttcttcccttgggtattgtagccacacctatattatcatactatcacacatacatacattggtgcagacatgcatatgaagtgtcccataaatggcctacatatattggtattagcagttactgtgctacattttagttcaacccataaccattaagcaatgtacactaaaattcaatttttttctctctttcatatttacaaatttgtaatgcagttgcactattgttaatttcttttgttatatggcag

SEQ ID NO: 106527 - DNA, 949 bp, Aquilegia coerulea
  Intron number 1 from transcript AcoGoldSmith_v1.027523m (l ocus AcoGoldSmith_v1.027523m.g) derived from phytozome v7. 0 (chr-ID scaffold_14; pos 4306907 to 4307855 reverse stra nd)
agaagtatgttgttttttcatatttatttttagtgaagtatgtgtaagataggactttgctgttcaatctttatatcttggccataattataattttaatcaaagtgttgtagatttctattgagacttcaacaattattatgagattgactccaagagttattcacacgtgaaataacatatttacttcatctaagttcacatggtttccgtattgtacatgcgacaagttgcagctaataatgcccatagttacgagtatagtactataatgtgctcaagtttcttctcagatagtttatttcacacatcatgactcaccatatgcacatgagcacatctgtagttttcataataatgagcaaggaggatttttctcccactcaatatatacacaaatgcttccctgaaaatttctgtggcatagtacaaaattcccaagcagggggggccaatgaggaggccacttaggtagatgcctggggcctcatgtgacagtacatgcaataagtgctagccatgtcatacagatacatgcgccccaaagaaacttttttcgtttggtgtatcatttcgaaacttcaatcgttgaaaacaaatggtaaaaatgtaatctacaaactgaaatcatgtatatggttttagcttgttaatgaattaagaagagtgataatatataaatttcataacacatagttgatactattcaatctatttttggaatgtggaaggccccatctcagatttagcgttagccttccatttgcatgattctggactgtaagagaagtgtacatattgtaagtgccctggtcaataggcacgtggatgcgtgtctgcttaactttttgggcctatgctttagttgtaaaccaattgtattgtttgttacttacatttatttgaattgctagctgttgcgaaggcattaagaagggtagcggaaggt

SEQ ID NO: 106528 - DNA, 243 bp, Aquilegia coerulea
  Intron number 1 from transcript AcoGoldSmith_v1.006938m (l ocus AcoGoldSmith_v1.006938m.g) derived from phytozome v7. 0 (chr-ID scaffold_17; pos 1269722 to 1269964)
ctcgaattcatcagaagtacagaagtaaatcatttgtaagttgttatcttcttgttcttcatttgaattgatcaaagaatgatacttatgcatagcatagcataccatctgtttgataaaatgtatttcttaccacaaaatattattaatttcatctgttttataagcttgtagaaagaaaaacttgtttcttgttctttatttctcattttcttgctctttacaggttctttgctcatcaag

SEQ ID NO: 106529 - DNA, 613 bp, Aquilegia coerulea
  Intron number 4 from transcript AcoGoldSmith_v1.000258m (l ocus AcoGoldSmith_v1.000258m.g) derived from phytozome v7. 0 (chr-ID scaffold_5; pos 4936246 to 4936858)
ctgataaggtaagatgcttatgaatggttttggtttatatatgaattacttagatagttagatttctatgttcttataatctaaactttattatttatatgcctctggtgattgttggtgttaatcaacttattcttaatataattggatttcttataaatgaaatgccccacgagttattaaatgttacattgttacttaatgccctaatcaatttacacctcacactgcccggaaacctcaaagaaaatgattgatgctgtgtttaatggaaaacaagaaaaatatgttagtcttcaagatgaatttatatacctataataacagtcatatacctttgaaggaccagttgttgttggttgtcagtcacagttaagctaggttgatttatgacttcaactactgcaaccttcttaaatagacaaacacatggtgcacccacaaaaaccttgactctgtttttgattataagttaacaatgctccatactcgtcttagagttgttagaaacagaatgctactttttctctatcaagaatgtataattagtttgtaattttcgtattgattacaaaagcaaaaatttgattcggtttatgctcttagattgcag

SEQ ID NO: 106530 - DNA, 1006 bp, Aquilegia coerulea
  Intron number 1 from transcript AcoGoldSmith_v1.010530m (l ocus AcoGoldSmith_v1.010530m.g) derived from phytozome v7. 0 (chr-ID scaffold_23; pos 3463575 to 3464580 reverse stra nd)
atagtatggattcttatttagttcttcatataatgtcttttttacttctggatgagatctttttatgagtttaggtttgaatgtctatggctggacactgtgtcttcttcttgtttcttcgtgttccttgttacctctacgaccttcttctcttccctatttcagtgttgttaactaacaacaaactctctctctctctacgccaagtcgccaatagtagggtttttttataaaccctaattagaattcgaaatatgttataaatattgaaacaattgttgatccattcccatccagaagtaagcatttataagcatttatagatgctttgatttgatttcaacgtttatttgatgtttttcttagtaaagtttttttttttttttttttttctcttttctctttgttatgaattgattgattgaataattgaagaataattagtgataacttttttgtgtagtgtggtaatgcattttaactgtttgatgaattgtctgaatggaatttgtgtttctattttataatcattagtcacttcataacatgaattccgctttaatatttcatgatattgttaaaaattaagtaatataatgaacacttagatggtctaattacaatctaactatagcttcatcccttttaggaactagaagcacctttaataattctgtggaaactcaactgctgataattctcaactttatctgttgttttctcatatgtcgttatctgtaaattagtaaagtcatgggattgggctaaactatctctatttctaacaaatgcaatttattagaaaccaattcattaagaactagacatacacttgtagatagaattctcaacttttttttttttcttgaacttctgaacaagatagtatggattcttatttagttcttcatataatgtcctttttatgagtctaggtttgaatgtctatgtctactatctgatccggtctttcttcttttccatcagggtaattttctttctgaaa

SEQ ID NO: 106531 - DNA, 728 bp, Aquilegia coerulea
  Intron number 1 from transcript AcoGoldSmith_v1.025985m (l ocus AcoGoldSmith_v1.025985m.g) derived from phytozome v7. 0 (chr-ID scaffold_23; pos 2513649 to 2514376)
tcaccactggttcaggtactttcaccagtacttaagccagcacctagctatgccgatgtcgtagcttctgcggctacgagaaacctccggaccccagctatggaaaaggatcttttattgtccatgccctagccgttgcttccgctggatcaatgggatcccaatctcgatttcctaggtatgcttgccctgttcagaaactgaagctactttttctctttcactacaccaaaccaaacccacgaactttcacccaaacgcatacagttgattccattccacaggtaccgcgggcacgctactaatgcctgttggactttgcaaaacggatttccttacccactggaggaagtaaataataacttagctgtcgacaatctccacctgagaatattcaaggacccgttaccgggcagggtaaaaccaacagcacagaggctctgcagcaacaggagccacaaagacgattgtagaaggatacctggattatactcaaacaatagcagcggtactctccgaagtaagccctgaaaagaaaggtgctacactaattgtagtaaccagaacagggcctcggccccagatgctatggaagacctttccttcctttccaagggcagctgctcgaccaagcaagacaagaaaaatgggatattaattgatgaaataacttttttgaaaacagggattctcttctctacaatgacactgtagaccaattgaaagga

SEQ ID NO: 106532 - DNA, 770 bp, Aquilegia coerulea
  Intron number 1 from transcript AcoGoldSmith_v1.003801m (l ocus AcoGoldSmith_v1.003801m.g) derived from phytozome v7. 0 (chr-ID scaffold_42; pos 337093 to 337862)
atacggggttttacttgggtaagagttttttgttctgcatattcagttctttttctggttctgcatattcttttttttttcatatatcaacttgcaatctagatatagagggtgacatcggcattaacgactgtctgtaggacgcttgttctcaacacttgttatagttggcatgacatacttctgtcacgccatgttttggcacataacaacctttttgtgtttataatttatacgttctcttgtttgatatcagtttatacgttaagaaaacacgttaatacactcgatttctgagatatacgtactagaaatggtaagtactcttgtaatactacaaattcaaacagatactctaaccctttcctttgcgttttgaagccattcttaggtttactaaatggtgagttcaatctaagtggaagagcattctctggaacatatattagctatcaagtggtttgttgattgttttactaatggtacttaaaagtttcagtgcaacagatgactaaaattcaagagttgctaatgtgcttttgatcctatatgttagaaatcaatccagttcactgattaaataaagtgttttcaatatgctccttgtcctgatatattatatgtcagaatggttcaacaattcactgactgtaaaccttttcttgaagtatatttgtggtaatggtactcaaatcaattcaccattgaactgtaagaccctttacaggtatatgaattttcttttactaaatcgagtgtttatgtaggtt

SEQ ID NO: 106533 - DNA, 640 bp, Aquilegia coerulea
  Intron number 1 from transcript AcoGoldSmith_v1.010138m (l ocus AcoGoldSmith_v1.010138m.g) derived from phytozome v7. 0 (chr-ID scaffold_4; pos 8015424 to 8016063 reverse stran d)
gtcctccggtaatgtttcttcgacgaaaataactaatttagttttaatttagaattaatttattaaaaatttactttcaaatgatcagatgatgtgcagaatgtttattttagtatacttgttacctctaggctctagcatagtcatacgatttatgagtgtggttaatcggctaaacaaataatgtactttctaggtattatattgattgcagtaatgtggttatctaacatggacagtggtactgtgtcagacttcgacacgttgattgacaacagatttgcatgatgtcttctaatatctcatggatgatatatagaacatactatgatacatataaaaaaatctagtttgaaacacaaagttatttgttataattgttgtgaagatattctcaattttaaacgaaaaatacaatgaagttaatcaatatcctacaatttaggaaggacaatacaaaagaagaaagtgtgtcatagcctacaaactacaaacaaatcttttgaaatgtctttccttcaatttatattctgtattactttgatgttagtatgggaacgtattattaccattgacactgattgatcttagctacaaatgtacaggtgaacactgtcaagaaggcgtgtgcagctgttta

SEQ ID NO: 106534 - DNA, 993 bp, Aquilegia coerulea
  Intron number 2 from transcript AcoGoldSmith_v1.007724m (l ocus AcoGoldSmith_v1.007724m.g) derived from phytozome v7. 0 (chr-ID scaffold_14; pos 3674642 to 3675634 reverse stra nd)
atttcatgttagtatattgaaatgatttgtgttatttctaatgtcgataatacaagattcaaattacaactaatgttgcatccaatctaatggattgatagtctgttattcatgtatcagatatctcgataactgaattttaatgtcaattccttaattttgttaatgttaatttttgttgcgcatgtggtgtattatttagtagtgtatcctgtttttgcatgatttcagccaacaaccattgtctcgtcatagaccaattgaaacagcaatcgagcttcatgtatgaagactttgaagtcaatccgattcctaaacaagtaatttctttcgagagaaaaaattcaatatgaccagttttggtgttgccgcttgtattcaacctttttcagatgtgaagcctacttttattccttcaaattgtaaatcaaatacttaaaagagtgtattccagaaacatccccacctccctccctgagcggagtagccaaggatagagtgggctaggtgcagatgtagggaactgaatatggtcacacaatttccatgatattcccctgggaggtagatgaggatgtacagggaatacgttaaggtttgggaactttgagtatggacagcgagactggataagctgtcagtactgtcacccacacataaatggaaaagtagtggaaaactaattatgcttagtaagaaatccaataaaaaaatagtaagaaaagagtttagaaatagattcgttatgaaacgaacttaaaaacaataaaagaagtttgattaagatgagtggaccatgtcttttgaattgctatctaagactgggaaaaatttatctctacttatttatttgccatgtttataagaatgacgaatctgaattccatcatgatttgtctcccttacactaactcaatacatcgtttcatggtctcttgttatctggtatccgaatcagtgataattggggaggttgccaattttgttgcttat

SEQ ID NO: 106535 - DNA, 994 bp, Aquilegia coerulea
  Intron number 1 from transcript AcoGoldSmith_v1.000715m (l ocus AcoGoldSmith_v1.000715m.g) derived from phytozome v7. 0 (chr-ID scaffold_23; pos 648552 to 649545)
tttcagaaagtggttatcatcgctataatctccaggtatcatatgttggtaatttgttttgaaatagatttgttgttttgattccagcttatttcccaattatgctagcaacgtaaaccgatgctagttgaggcactttcggttttgagtggagttgtagtcttaatgtttaaaaaagagtaggaagtaaatttggagaaagtgcaaggaaacattagtgttgaacaagtacacagtataagtcatttggctaatggcctgatggaagcaaagttggctttcacaccataggtcgcagaatcttgttgaggtcaggtatggtgtcatgaaaaagtcatttggctaatggtattgtaatttacctctcatagctgtaaatagtaattggggtcactctaaatatattttaatcagggtgcttatccaaaaaatagtaacagggtccatgaaggaaagtcagacactaaaggatgaccagccactagaaggaaatatcaatgtagcctagtcatagagccattcatagctaggcaatttttgcctataaaacattatagcaagtgagagtttcggaaacgaagcactcagagacgaatgactatttttgtgcaagagaaactaggatttaggagattctacattttccttcccaaaagtttgtcaaacatgaaatcagctttatctgacatgtaaccttgtaatttttgcctataaaacattatagcaagtgagagtttcggaaacgaagcactcagagaagaatgactatttttgtgcaagagaaactaggatttaggagattctacattttccttcccaaaagtttgtcaaacatgaaatcagctttatctgacatgtaaccttgtttattaattaactattaaccacactaaagctgcaagcctctgccccccacatgccttttagtacattggatgagctagaattttgtgtttaatccataatggttacgtggtgatacagattattgggg

SEQ ID NO: 106536 - DNA, 964 bp, Aquilegia coerulea
  Intron number 1 from transcript AcoGoldSmith_v1.023467m (l ocus AcoGoldSmith_v1.023467m.g) derived from phytozome v7. 0 (chr-ID scaffold_17; pos 3529658 to 3530621)
aggaggacatcgccattgtattgattagccaatacgtaagttgttttcctgatcctcaaagtaatgttttccacgtctcgactggaatcatagtctgacccaacactcttacttttaaaatgaaatgatccaacatttgcaacagcctcagcttatacaaattattttgtatttggtccattaactatctagtatctatgtcatatgttaaaatttacaagttacaagagtcgttttttactacctatttctagcattaaccccagaatacagttttctttagattttagattataccatttttttcaccccttgttgccttctttaaacattaagtgtacttgctagagatgttgtattctgagattaaaagaggaccttactttcttagtgagaagtgaaggggtgattttgtaaactgacacgggtatgtgacacagacatggatacattaacacagatgtgaagtgcggatacgttagagtaaaataaatgtctagatacatttaacatacatatgggaccagcctacatgccttaatattccattttctcctgaattctttatctatttagggatattgcccaaaagagatgagaaggctttggagttcaaagttttaaggctatagatcgagaaatgtttgtttaagaaagaacaccacaatgtaataagcttgtactaaaaagttgtcaagctatgcacacaaatctcgttgtcctgaacatgtacaacacatactttcatttgaaatatgctgtgtccttgttatatagttcgttactaataacttatttctgaatgtaaacactgaaactctgaaagcttaggtgatcttagatggttaccctgaagagtttgttcatttgggtcaacttagcattgaagacatttacagttttgatttgtcacttgcaaattgcaatacatatttttatgttctgtgttttgcaggttgctaac

SEQ ID NO: 106537 - DNA, 633 bp, Aquilegia coerulea
  Intron number 1 from transcript AcoGoldSmith_v1.024384m (l ocus AcoGoldSmith_v1.024384m.g) derived from phytozome v7. 0 (chr-ID scaffold_14; pos 3065903 to 3066535)
gtgcctcagttgtagctcctccgccaatattccaggtaattaacattgccaccaatcattaatttataaaacattgagaggaaaaaaaaaaaaaaaaacaagttcaaattataattgttgtttgattgatggggaaatatattatcaaatttttttttattgattttggtatctttcaatgatttatggcttcttctgagcttattagtcgaaatttctcggcatctttggcataacatcatttcactaaagaatgtgtactgtaatttaaacattctttgttcataattttgagtttaattatttaatttgaagaaaatgaaaattaaacataattatctaaatcagaaattgaggaaaacagcactatagtcaagttgtgataaaccatgatcatgaagtgggtcaaaagattttgaattatgatttggtcacacattaagcaagtccatgatggaaatgatgatggtgtgaggatgacaaattatcgacgtatgatgatgacataatttccatatctaccattatactgagaaaattgacttttattttgctcatatgcatgtatgtgttgtgttgtggtgtggtgtggctatttgaaattttggttactggtgggtgcaggaggtggtt

SEQ ID NO: 106538 - DNA, 692 bp, Aquilegia coerulea
  Intron number 4 from transcript AcoGoldSmith_v1.011762m (l ocus AcoGoldSmith_v1.011762m.g) derived from phytozome v7. 0 (chr-ID scaffold_38; pos 2266157 to 2266848 reverse stra nd)
ttcatctcgtcgttgtaagctcttcctatgcttacttattttggactcagacatgtaattgccaattaagactacagataattcaactctctgtcgtcaaaaagccctaccggaggtggtttttgagattcatgtgtgttaagaacatgggtcggatgccatgtcagacagctctttgctccatcacttcatcagatatggaataatattttgaacagttgtatctgacatggcatctgactcgtgactgtagggcttatgcaccttagcattgggaaaaagcggtaccctcgtggggttgactatgtttatttaaacggaaattaaatagtagttggactgtcaagattcagatcaacttaattaatcatacaaagttaaccaattcaaattattttctcgtttaaagattagtaagaggcaatctataaatgcaatcaaaaaagattctgcaagtagtagttaattacctgtcataaaactctggaaccacacatccctgcagtcagtagccatgacttcagtaataattataagttaccgtgtggggtggggggctgaaacattgaatggctaatgtcgtggtatcagtaaaaccttcctctacgattctcttaattcacatgtctaatgggtttgtgcatggatattgtgaaggcttgtcaaggtggtggccgatcacttcttgcatc

SEQ ID NO: 106539 - DNA, 882 bp, Aquilegia coerulea
  Intron number 1 from transcript AcoGoldSmith_v1.009350m (l ocus AcoGoldSmith_v1.009350m.g) derived from phytozome v7. 0 (chr-ID scaffold_5; pos 7182808 to 7183689 reverse stran d)
cagtaagtaacagtctttgaatatgttatatagtatagagtatataaatctttcatgtataagaaatattgttatcttttgctatgatgtttctgtgcatgggggtatatatacttcactttcaatgttcctcatcaggtttccatttactacatattttttggaatccaaatgcttgggggacactagaatgtttactgcagtttattctagtaaactagaatggttacttcagtttattttcaccatatttttattttctaatgattattttatgtggaacatatacttgcggagtcatgaaaggctacgtgaagacattgttctcgaccgaaaaaagtagatagaaaaaaaaaaaaaaaaaatcttgtaggactcaagtgtaagggtagatttttgagacaaaaaataccttgaagtctcttcttttttaatatttattggacagactataattatgacaattgacaaactactttgtttattaaagactgttaaaaggtttagcaatggaatatcaaagataatgttttgttttcaaattcagggttggatgttttagcctttaggtaggggtgtgcttgatagaatgataggtgtgtgaccgtgctttccaaccaatcaaccatatcgaaggtaagttgataagacgacaatatgagaacctataccatggggattatttgttgagcaatttctttttctcgtaaacaaagtccgcatataataaagctgtgcatattcatttttataatactattgttaagtatattaaataactgatatttaccatttgatttcactattctttggtcacacccttgttaattaatatttaatttctcttatgtaaggttgttcaaagtggacatcccagagcag

SEQ ID NO: 106540 - DNA, 965 bp, Aquilegia coerulea
  Intron number 1 from transcript AcoGoldSmith_v1.003172m (l ocus AcoGoldSmith_v1.003172m.g) derived from phytozome v7. 0 (chr-ID scaffold_14; pos 5636267 to 5637231 reverse stra nd)
aaacttactcggaaagatcgcgagcctcctgtcaagtaattatgctcttgcctgttaattttattttattttattttatttttcattttatttggttaatgggatttcacattacaaagcatatgataaagtcattgaatggtcataggtacgaaatataaattgttgcaggtatagtactttggtaaaacattttttttgttaaagataacagatgccaccatatgtctcaaatgttttcaatcaaaggttacacctacttatattctaaacttgatacgagtagaaaggaaagggataaaagcttgatgataagacacaattatcatacatgccacacaattgtctgtttggagtatctaactagtgtgtccaatacaagggtgccactatttccaaaatgtccatgttacacagcggatagaccttgttgacattatcattgttatgttattgtttccatttgcttgttctctaatttgcttgatacgttctctctacctatgttctacttatagtgtggatcctttgtctttgcatgatttaaaatatgttgtggtcatcaaactattgcacacatgtgggttttttcatttcaagagttctctggctcttattctaggcgtggttttactactactatgtattttgtcactgtgctttttacttcttcaatgtatctagttactcccaataaaacatctcaacacttcggttatgagtccttgttatgactctgaagcctgaaagaatccactgtaactatggagcatacatgatttggatgacatatgtccaacaattaagttttttactttctgcatttctttgtcttcagacaaattttcgatttattgtctaattacactggttgttaatatgttatgttagttgttaatttctttgtatttttgtgtttgatataattaggtctgtgttctgggctctgtttggagctatatatt

SEQ ID NO: 106541 - DNA, 993 bp, Aquilegia coerulea
  Intron number 1 from transcript AcoGoldSmith_v1.000551m (l ocus AcoGoldSmith_v1.000551m.g) derived from phytozome v7. 0 (chr-ID scaffold_17; pos 1149538 to 1150530 reverse stra nd)
agatctcttcaaggcttcaagcacaaggtgatagagtgagtactctatctgcaactacttctttgtttttaattagtattggatcatgtttctttaatcaaggagaaaaatagtagtagtttaaaaatacatcttgattttttaatttcatgctgacaagtgacatctagtattgctgaattctgaatgactttaatgttaagaacatgaagtgcaattaatgtttttatagaaagtttgttgataaagaaacaaacccatcatcaagaatgaaggtttggttctttaggtgacaggaaacaaggcttaatttgtttttctaattacatgtcttcttcttcttcttcttcttcttcttcttcttcttggctcacttctctatcatgttcaagcttgatcatccaagaaaatgataattcatctttctcaatcatacttcaatggttaagattcattttcttatctccttgtcctcaacgtgctttacttgcttccattgatttgtttttcttgctcttacttattgccttttcgatcataaagtttatctctagaagaaacacttttaatgatagaagtaatagaaatcaagttagaacttcactatggttcaaactcatcttgtttctaagtgctctgttagctatcagttacacagttctttcaatcttagctttcactaaagtagcccaatcttcatgggagttaatcgaagcaatctttcgattgttacaagcaataagtcatattgcaattactatattagtagctcatgagaagagatttcatgctgtttctcatcctactactcttcgaatatattggatcgcgaactttgttgtggtcacattattttcaacttcagctatcataagattaagttctgtggaagaaacaaaagattttgaattgaacgtggatgatatatactcattgatttctttaccaatatctgcagttcttcttgtcgcagcgcttagaggatccactgga

SEQ ID NO: 106542 - DNA, 1059 bp, Aquilegia coerulea
  Intron number 1 from transcript AcoGoldSmith_v1.006316m (l ocus AcoGoldSmith_v1.006317m.g) derived from phytozome v7. 0 (chr-ID scaffold_20; pos 838357 to 839415 reverse strand )
gtttcttatcctctacttcattgcctctagcagtactcttctttcccttttctgatttattagtagctttgatgattctctttagtatttataacttgtattgagttaatttgctattgtaaagatctttttgtgtctggggcatgcataattatccttggattaccaatttctgacttacataagtgacccagatgtgtttatttgcgataaaaagttatgtttttcttgtggaatttacagtaattgttggttcaattttgaggttaaactgtgatggtgatcactcagtattctgaatctaatgtggttcataccattctataactggatcaatctaatttttctaattaatatatagtttgattgacttgtatatctgttttattaaatttttaacaatcactactaatcttcttcgaaatatactatactaggaagtacctaggttgctgtatgtctgtcagatcaatagaatgctagtgtattaatgaagtgatttcaattaatcatgcatttggaaagtcacaattgggacttcttttttttaatcaagttcatagaaagtttcgatcttccatttttgatatgttctccagcatgtgccagcatgatcttgcatcgttatttgctgtttatattattttgttataggtgtccttatttgctgttgtatgcatcttgctgttaacctttatttttcaaatgttaatatatgaattattcttatacatcctaagaagctatataggactcctctgctttagtgaacccttcttttatatttcaagctatataaaaagctgctttgatttgcactaaaattggaggatgttgtagtactatatattactttctcattttgcactattaagcttcttactggtgtcaatttttcctttattccgaagtccaaacatattaataagttcccttctgctaagaacatatgtacgtcttcattctgttcaaaagatatactgcacttagatgaagctcctttacatgtgtatgtattttgcaggccttgtgacagttcaagcattcactggatcctat

SEQ ID NO: 106543 - DNA, 1034 bp, Aquilegia coerulea
  Intron number 3 from transcript AcoGoldSmith_v1.006697m (l ocus AcoGoldSmith_v1.003802m.g) derived from phytozome v7. 0 (chr-ID scaffold_23; pos 3792836 to 3793869 reverse stra nd)
acagtcttttaaaggctggtgttctcggattgaaggtaactatgtcaggtggtctatcaatctgatcctgtaatatttgctaatgttctaatctttacttagctaataatattttagcatatccgctgcacatctttgaatatcttggtctttcggccaggtgtggaacaattttaagtgttgaattggtattattcatgaaaaagctactcttctttgatgacataagtgtgatttaattaacgccagtgtttttaaaggaacatagataaattgaattccgttgtgtattttaaaacttcagttatttcttaagtaacgctttcttgaatttagcatagatttagatttagaccacataagttcgtatttctatgtatgcttactttttggcagactgcctgtaaccacctaacaacatttgaattttgaccagcatatgtactttctctgaaataattttaccaaaacttaagaagaatggatctgtaagaaatataaatatttctctaacagttctcgattttcttaccttatttgaaccgtaattgaattcaaaccatatgaatcagatcttacaaaggatccccaccaacaaaaatggagtatgcatttggctagtacaccatctgcccaatctgcatagttaattagctattttagtcaaaggatgatatttttttgataaaggatattattgttatatttccgtattactatgataatgagtaatgtattccctatttccagagctgttcagttattaaaacttcaccataagtgtcttgagatttggtctttttgatgcactaccaaacacttgcacatattaaagacattacactacctctacgacattacactatctccgtttacttcttattataaaataagatccttctcatgcgcccttcattcattaatactgagatattcatcttgcttgttatatctaactttgcttttggattcatagttgatcctgtttatctgacaagttttctttcttttgatctgtgtttatctagtccttt

SEQ ID NO: 106544 - DNA, 651 bp, Aquilegia coerulea
  Intron number 1 from transcript AcoGoldSmith_v1.006697m (l ocus AcoGoldSmith_v1.003802m.g) derived from phytozome v7. 0 (chr-ID scaffold_23; pos 3794013 to 3794663 reverse stra nd)
aggattttcctctgggactaaagcagcagccgccggtatgcttctattaggtgtactttatatgaacacccacatttatatcgacaatgtgggacagaataccaattaggttccctttcagattagttttaacagatgtttagtctctttaattccctgagatgaacactactgtagacatatctacagtcatcctttacttttgttgcaacttttgacaccttccgctcatctgaccccaagcttaagtaacaattttgtgcagactggcatgtgtgctctgcccattaatttcatacagtcagtatactcaacagttgactaactgttaactactttctcacaggtggtataacaacattgattgacatgcctcttaatagtgaaccctcgacagtgtctgttgaaactttaaaactaaaggtttgattcttcagtccctttttgttcactattcttgctctatcttccttatacattttgattcaatagatttttaggttttttgggtgcctattgtgattttattgattcgtaattatatgtgtggttgttttcttctcctagctcatgtaaaattttatggtaattgctaatatcattttttttgcgtattcatctgataggttgaggctgcagaagagaaaatct

SEQ ID NO: 106545 - DNA, 380 bp, Aquilegia coerulea
  Intron number 1 from transcript AcoGoldSmith_v1.017714m (l ocus AcoGoldSmith_v1.017714m.g) derived from phytozome v7. 0 (chr-ID scaffold_50; pos 446663 to 447042)
ggattctttctcttggggctgggtatgtgttatatattgcctatccattatgacaatattttcgctttcaaacaactgtgggatcatgggaattacttttgcctgtgtttcacttaaaggcgcggttaaaatcacaaatggtatggtcatcccttctgcttgtggcgtgcattacgtaaccgaagaagaacgaaaattggatatgagactattcattctgtctgtatatattctcagtcaaagatatctttttagtccattattttgtgtggcgattctgtgttatgtagtttctgatgttactttttactagactttgttattattactcgtctttatccatttgacttggataaatctttgtttagggaacccaaagt

SEQ ID NO: 106546 - DNA, 848 bp, Aquilegia coerulea
  Intron number 2 from transcript AcoGoldSmith_v1.003921m (l ocus AcoGoldSmith_v1.003921m.g) derived from phytozome v7. 0 (chr-ID scaffold_17; pos 4834619 to 4835466 reverse stra nd)
gttatccatcggtaatttcaaatccccatcttgagaaaatttgatttttggtatttttttcgtttttttttttttaattattgttgttgatgattgaattgggtactctttaatttttgatgatatatagatagtctggttgatttgtttctgctttattgtagtcttgtagaagttaggtttgattctgcgtcttttttgtttaaaaatttaaaatttgccatacccaatttgttgtatacttttaatgtggattttgatcaaagagcttgattttttttgttcccttacatgatcgattttactgaaataaaatgataatttggcaatataccggtttttgagtttttttatttgatttatttgtggtgttttggacttacacttggattaatccgaattggggattttttatgtcaatggagaaattctctgatttcatttaagcatgaattataaggttcagttttgcagtaccgacttttcatttttataccatatttgagctatcttgatctccaatgttttgtaaaacagttctggatggagataattttctactagtgttaaggttctatgacgtgttttttctaatcttcacgacttttaagttaaaaacccttctatttgtgaaacacattattattattccatttcgtaggagatataaagttagaaacagatccatagcacaatttctactctcacattgcatgacatttttcagtttacaatgataattccaggcacccaatttaagataattttgttctgtttaaaatctcttccccggttttcaatagggagctctcttatctttgtaatagtgtttgtttccttttgcacag

SEQ ID NO: 106547 - DNA, 288 bp, Aquilegia coerulea
  Intron number 1 from transcript AcoGoldSmith_v1.019503m (l ocus AcoGoldSmith_v1.019503m.g) derived from phytozome v7. 0 (chr-ID scaffold_45; pos 609967 to 610254)
caggtattattccttcttcttcttcttctgtttctatttggtttatcaagaaaatatttagttactattaaatatgatgattatatctgtatatctaatggaaaatgccctacattagttaactgttatactgtaagtatgaatttgaatttgttgtacatgcagtctatgaagtgtcaggttatgtaagtagttttcggtatggctttaatcttagtttgttacacgaaattcattttttgaactttattgtttcctcgactaaagttgggtttcttactatttcag

SEQ ID NO: 106548 - DNA, 769 bp, Aquilegia coerulea
  Intron number 1 from transcript AcoGoldSmith_v1.007852m (l ocus AcoGoldSmith_v1.007852m.g) derived from phytozome v7. 0 (chr-ID scaffold_17; pos 1125447 to 1126215)
ctcttcctcctcaacttgtcctcaccagtgcccaggtacaaatttctaatgaaaatgtcattttgatgagattttatattcattttgatatagaaaacatcgattttgatgatatttctttgttttttggattattttgcaaattaaatttgatgggttaatttgttttctgatttcatgctggaatgtgggattaacaaatgtttggaagttattcaaagtagtcgtttcttcgatcatgtaaaaagtacttttttggctaaatattatgagaaaagtaggccctgaagttgccaaaatagactatttctctgtctatgttaagttttaaacaacaaaattcaattaagcttggattttattgcaaggtttgtttttgaattgaaacagactccatatgactatagtaatcaaatcagtttgttttattttctgattttattgatgtattaaatttactttcaatagtgaaatctaataaaatgaagaagaaattatttcctccatgcttatattgcaatttgtataatcatttctctgtctctgggttttacctttccctgatctagaagagcctctcagaaaaaaaaattgatcgttattgtggccattggtcgttattggttattactattccaaagcgttactcctatcacttgcatcgatgttactaatgtataatcagattttaccatcctcatttctaaaaatatatgtatcaacttcatttgtagtgtgcgacgggaccttcttctcgtcccttctcaat

SEQ ID NO: 106549 - DNA, 492 bp, Aquilegia coerulea
  Intron number 1 from transcript AcoGoldSmith_v1.027088m (l ocus AcoGoldSmith_v1.027088m.g) derived from phytozome v7. 0 (chr-ID scaffold_41; pos 36086 to 36577 reverse strand)
tggttatcttcaagctgcatctctcgcttcttctcgtaagccacgcccactataaatatttgattttttttgttagtgttcttacttacttcttttagtatttctcttgcaattcttcatgttatttagtttagatgaaaataagagtttgttaaattttaactgagggttgcttgtcttctgatgaaatttatcttgagtttttatgaaatctgatgatcttgaagactgaagaagtgaattatttattcaataatctgtaaaaagtagtttgtgcaaccaaacagggctgtagactgtagagtattatgttggtcaactaaagcttgatgttcaagtgtttgagaaaaggtcaattattccttgtattgggattattcaggactatgtatgatagtgatattgaagtggataagatctggcacaagttagtattaatcttttatttgcttgacagctccagaattgctaagaactgtccaagaacaacaa

SEQ ID NO: 106550 - DNA, 831 bp, Aquilegia coerulea
  Intron number 4 from transcript AcoGoldSmith_v1.011932m (l ocus AcoGoldSmith_v1.011932m.g) derived from phytozome v7. 0 (chr-ID scaffold_23; pos 3219757 to 3220587 reverse stra nd)
ttaaagccagatcttgtacgagccattggagaaaggtatactgctatacctctcattgtcatcttttaaagctctttgatcttattagagttattaatttattgaaaatgatgtatttggagttcattgccttgaaagagaaatttttgtgtagtttgataacatacattgtcaaaagaaaaaaacttaaccattttgaactatgaacaatttactaaggagcttgagatattctatttgtagaatttgtactgctcctgaataggaggaacacacaaattaggtattactaggagacacgcataggctcatttttatcctctgtccttgtcctcttcgctataagatcttttatatgttgagtagactagaagagcaacttcagtttgatatatatatatatatagcgtataagagtagtcctggagatgaccgaattaattgcctatctagtcaagtggcgtcttatgaacactttgattaggatgaaatactattctcataatgaggtgatgatgatgaaactttaggtgggggcaagatcaagtaatcaacttgcttacaagaggaaacaggaacaaatatataacattttcccatcaaaagtttcctatgccaattgaaacacagctatatattttctttactgaatgcagtaatgcttgttcaaacacattttcttttctgttggtgaaatctggactctgatagtttgactgtctaggctctttttattaaccagttgagattaagctaagttgagtattgaaattaattaaattttaatgtcttgcagggacaaggtttttcaacaacaaaaaatatagtatc

SEQ ID NO: 106551 - DNA, 409 bp, Aquilegia coerulea
  Intron number 2 from transcript AcoGoldSmith_v1.011932m (l ocus AcoGoldSmith_v1.011932m.g) derived from phytozome v7. 0 (chr-ID scaffold_23; pos 3223462 to 3223870 reverse stra nd)
aattatattatcagcaacaaaagtcctcaaaacctgtatgttatgttctctctcaatttttaatattgttgattaatgtttcctccactacgacttgcatgttaactataattcttggaataatttttgttaatttaatttagtgattgtcaactgtgttgttgtgtgagttcgacgtttgctattgagctttcgctggggtgttttattggtggataattttgtagaattgggtgataacataagaagctgtattttgttccttctatcattgtcttctgattttcgtctacaattgtttcagtttttgttcctaatactttatttgatttgacagaaatttgattttatcatgtttctgtactatgttgcaggtgctctacttcagagttcagtccttagtccttac

SEQ ID NO: 106552 - DNA, 915 bp, Aquilegia coerulea
  Intron number 2 from transcript AcoGoldSmith_v1.024221m (l ocus AcoGoldSmith_v1.024221m.g) derived from phytozome v7. 0 (chr-ID scaffold_14; pos 1931676 to 1932590)
atttcatccccgtaacacttatttcaaattataatattgtatttttatttttgcaggtattgttagatgtatgattgtcctgatggttttaaacatacgtatttggctgtgaagtacatttacagaataacgtttaatggcttcattcatttgtgtacatgatgaacacattataagacactcatagtttgttctttgtttatccacattatgaaaacaaagtagatggctaattggctggtgaatctgtaataggccctgtgcagtatcatttactatgctgccttttccaaatcctctttttattgacaaccttataccaggagccatgcgaacataccgacgacttcttggattcagtactcagtctgggagacagtggcacacacacacacacacacacaccccttaatcttcattgataggttttattattatttataattgatttcattggaaccaaaggagtaagtctttatcatgaagagatcaccatttttttccaattgctgaggcttccacctgtcattgaattcgacttgtaaaacttgagttctcttagtgaggacattttccactaaactcctatccaatttattttgagtcaaacttaattgtcaacatcagtatgctgtaggagaaaacatattggcttcccctgcctctctacctgccagctctctctccactttttcttggtgccaatttaaacttgggtggaatagatgtaattttcttttgttaaccatgctaaaatgttcccccttggaaaaaaagtggggcgtaaattaccaaaaaacaggtctctcattttttgatgtttgaagttggtcctcatgtagattccgctttgttcataaatttaaatgctacttttggattattgaaacagataggagattttggtcttgcaaa

SEQ ID NO: 106553 - DNA, 563 bp, Aquilegia coerulea
  Intron number 3 from transcript AcoGoldSmith_v1.014792m (l ocus AcoGoldSmith_v1.014792m.g) derived from phytozome v7. 0 (chr-ID scaffold_5; pos 2819829 to 2820391)
cacctcacaaaagtgatcacccttatcaagttacggttagtactaacaattgtagactacttttcttgtctactttgagacatttgaatttgttttttttaccataatgcatagaggcatatttttgtatcttatttgtccttcgaattataatgaccatgttattaatttatgctcataactcataataatatttcatgcagacttctcatctagttcatgtaaaaaagcactcagctaaatttgctcaaacagtgatcctttgatttgaatctcgaatcagagaagttgactagggatcattgttgacgccttagaaatcaagaactttattttacttttctttcttccaactttatgttctcacgggtttactcctattttttcctcttattcactttatctcctacaatgccaatcggcctacttatctgcacctttttcgttcctagttataatgactatgatgatatgaaaaaaaatctctgtacgtttttagtaaggttgaaatttttttatggacaccaggacgatttgtcatttccccttttaagtccagattg

SEQ ID NO: 106554 - DNA, 920 bp, Aquilegia coerulea
  Intron number 1 from transcript AcoGoldSmith_v1.011081m (l ocus AcoGoldSmith_v1.011081m.g) derived from phytozome v7. 0 (chr-ID scaffold_4; pos 2420811 to 2421730)
aggtaatttcagttctttatcactataaatctcaaaccttgcttatgttgtatagtgatttttctttgtgtaatttgataggaacatgtttttcttgtttgtttgattatatgtatgaaatagctgacacttctgaaggtgtgtgttgcttctttgttttcttcaaatgaaaagatacaaaatataaagtgtccgaaagtttaacatattaaaaagaaaataaaaactctgaatgtgcggataatccacttagttaataattaaaatagcatgtaagattgaaagaagaaccttttcaacttgagcagtagctttggcagatttcccatataattctcccttcaactttttatctttcaatttctgcatatatgagcatttttatcatgtatatagagagataagattggtcatacccgggataacgaaacattagtcaagttctctcaagtttcagtctatacctccaaattagcaccatcacgtggaagatattttttcacttttgggtctaattcatttctattattatcctgcatgtacaaacaacagtacaatacaagtatgttgagtatgataagtacatacagtataaaaaaaaaaaaaagtgaagaatgagcatatatcattgcaaaccctattattctaacaatatagaattgatttttaaataaactcttgctaaaagctatcaaaattcattaataaaccctattattctatcaatatagaatgaatcaatcgatcaaaacgaagcaactttttagcacattcagtttaatttgattctgaacatgtttttcttgtttgattagacatgttatcttatacaatttgactatcaagaaaactaaagacatattatcttctactacaattaatgagttttatgtggttcctctgcagtaagcttcagagtg

SEQ ID NO: 106555 - DNA, 337 bp, Aquilegia coerulea
  Intron number 1 from transcript AcoGoldSmith_v1.023213m (l ocus AcoGoldSmith_v1.023213m.g) derived from phytozome v7. 0 (chr-ID scaffold_14; pos 2350529 to 2350865 reverse stra nd)
ccaaaatcatcaagtactagtaatccgtaaagttttcatatttttttaagcaatgttatagacttatagttgttttattcaagaataaattatacatgattgattgattgattattagctttttttttttttttaattttaattcaatttacaatactcaatgcactcaaactttacaatcataccaagcttcttttgatacttttcatcatttcatgcataaattaagtattgggccaagaaattttttcccccccccccccccccccttcttgtcttatctctttaaagagattacttttgtttttattttctgaagttttcatgattttaggcc

SEQ ID NO: 106556 - DNA, 358 bp, Aquilegia coerulea
  Intron number 1 from transcript AcoGoldSmith_v1.017108m (l ocus AcoGoldSmith_v1.017108m.g) derived from phytozome v7. 0 (chr-ID scaffold_41; pos 1331662 to 1332019 reverse stra nd)
ttcggtggcatcatcatcatcatcgcacaattaaggtactaaaacagcctctactctatctttacctaatttctttctttttacacataaatattattattctactttataaatatgtacgtattaaagaaaagaagggtatcaatcaaatcattttactttttattttcttatttctgcttcttccttaatatatatacaaacacaacaacaacaactactacaacaagaggaagaagaagatgatgatgatgatgttatttttttatcatctcgctaatttaacattatgttatatttattccttattccaacattgccaggttgcttttgcataccagcagacagccagtctcgt

SEQ ID NO: 106557 - DNA, 1013 bp, Aquilegia coerulea
  Intron number 2 from transcript AcoGoldSmith_v1.008305m (l ocus AcoGoldSmith_v1.008305m.g) derived from phytozome v7. 0 (chr-ID scaffold_42; pos 1052491 to 1053503 reverse stra nd)
ccggtgagtaaggaaatcttgtttttttcatttcagctgttgattcaagttaaaatttctgagtttctggatataaattgattatttggaggtaaagagttgaactatatatagtatctgtaatgttgttgatgttcaatcagtatggagagttgaaagttgaaaccatgcttcgagcatccctaacgtgcaaggtataatgctaaaattccaattagggattttttttgctttgcaattctgactcaaattttttgtgccacctcacgtgctatatctgacgtgtatcctatgtggtgtgcaaattttgccttgtgcattagagatgctctcctaaaaagtgtgtaaattttatgaagaatagttccttactttttttttccccaataagaaaaagaaccttattttgtgcatgtgtgtgtgagttgactttacatggagattttgtatggaacttcttgattgttaaactaccaaatatgatatattcgaatatatctaatatctttatattatttctccaactctacgaccatggctccttcatttaacttatttatctttgacttctaagggcgggggaagctccagactggtattttatatttatgatttcaataattcaaacttgttcccttgagctttgattttttttttttttatataattttgaattattttgtgcagagtttaaaggttcaaattgtgcaacttcaaatgtgttttgattgttcattagtcttgattaagaaaaccattgacctttagaagatgacttatgactagtgatatatttccatgtgagactcccggacgtataattgattagttctaactcatcagccacacaacttttaagttttgcaacttatttgtatatctcatatatttcttcatgtgtaaacaactaaacgtaagctctattattatctggtatgaatgtgtaagtgacactttatagtttgtgttattaaacagggatccaggctgaattagttctcggtacaattgca

SEQ ID NO: 106558 - DNA, 468 bp, Aquilegia coerulea
  Intron number 1 from transcript AcoGoldSmith_v1.008305m (l ocus AcoGoldSmith_v1.008305m.g) derived from phytozome v7. 0 (chr-ID scaffold_42; pos 1053781 to 1054248 reverse stra nd)
ctctctctattgctcttcggttcagagcttctgaggttagttttttttcacttgttttaaggtttttggtgttttctgaataagggtttttttcttttacttgagaaaaaaaaactaatttaatgttaattcttctgtaaaatgtaattgttaatggatttttgtgaaaagatggaatcattagtgttattttgatgcttttttgctttggggttaccttttttaatctaaattctgatagtaaggaaacaatatttgttgatatgattttaattagagaaaattaaaggaacttgaattaagaaaatttaatatatatacaaacaaagtttataattagtttgaagttctgcaacttacatttttgacttcaatatcagtattttgcatatgttaaaactgagacagaatagagatttgaatagtttttcaattgtgaaaacattacattgttgtgtttgcagcaaa

SEQ ID NO: 106559 - DNA, 678 bp, Aquilegia coerulea
  Intron number 1 from transcript AcoGoldSmith_v1.025142m (l ocus AcoGoldSmith_v1.025142m.g) derived from phytozome v7. 0 (chr-ID scaffold_5; pos 4590005 to 4590682)
tgctcaattacaggtaacaacccgatgaagaattttttatttggttcgagtattcattatagtactagcaattgaaagatacacgcaggtgtcagttctccggtgttacacatttgacttcagtcaatgatgagttgatgacctttcttccgaaagaatccatgtttaatgatatctaactcctatcttttcaacttgcaccaaacttttattattttgaaacatggacctttgaaacactatcacaaataaagctacctcaatgggtttgtttggattgttcttcttagttttctcttctaaactagtactagtacaacccagtatcaacccttctgaaacacaatctgtttgattcgagtccgggaaatagatttttcgggaaatctcaatttcccatgtttgattaaatggaaaataagtggtaaaatatttaaaacgaaatgataagttaaaatgttggaatatattggagctcaattttgtcgagctctcgctacaaacatatttaaattattttccaatgtttttcatgatcaatataacactataaccattttatcaaaattttatttcacggatatttgcacatggtaaatatatttcccggtaaattaattcttttcccgcccaaatcaaacagaccattttagttataatttctgtttcggggggaat

SEQ ID NO: 106560 - DNA, 856 bp, Aquilegia coerulea
  Intron number 1 from transcript AcoGoldSmith_v1.005516m (l ocus AcoGoldSmith_v1.005516m.g) derived from phytozome v7. 0 (chr-ID scaffold_76; pos 32063 to 32918)
ctctaattttgctcctaaatttgtctgttcacaaagtaagtagtttctaattgattataattttgattagtttctaatttgttttagttctgttgtttctaattgtttcttatctgattcaagtctgcttcaactgcttgttttcaaattttaactaaaattttgtttttaatccaataagttcatagtaatgtacagttcagtccgattgattctggatttcttgtaaaactcgaaaaaaaaattatgagaattgggaatattttctagctattttttttcttgttaactatttgactttttagctttcattatataagatttcatttttaattatattggattttgaggatttcagttagatttccctttttccatttaactttaatcagcaagatcaatcttatgaaaaatagatttgatctttattattttttagcttttgtgttgtgttcaagtatcctttagtgcctttgctggaggacttattatcttttgtgagtccttggggcttaaatgatcagttatattggaaaatattagaataaatgatcagtatgggaaggatgtttgaccttatggcagaaatgaaagcttaaccgcattgcaaaacaagattcttgtagatatagatataataaaaacttcttgttatgttttccctttctacattgtttacgagcttatttgttggatatcttgtctaaaatgaataaatatttcaaataaacagtaatgtggtagttctttagtcataaactcataatcaactgctaaagattatttttttctataatttcttatatatggtttgtgctccgtgtgaaatcagaaagagtttctgctgtggaagcga

SEQ ID NO: 106561 - DNA, 470 bp, Aquilegia coerulea
  Intron number 2 from transcript AcoGoldSmith_v1.004232m (l ocus AcoGoldSmith_v1.004232m.g) derived from phytozome v7. 0 (chr-ID scaffold_76; pos 58982 to 59451 reverse strand)
acaagtctaccaacactttgagaaattattgccaggtgcataccttctgcttatagtttctttttattgttagactttacttggcataaactgtttttagtggtcctaaataaagtcagaaagctcacagaaccttcattatactctagctttaataagcggaagagagttgttattaaactataggggactcccttaggaggactaaccctgacgcatacttttgccttgatcatagttggtacttgtgttacaaaatttattttgggattggagatagaaaaatgaactggttattaaaatattggaagtctctttgggatttttgtgcattggctaatttagtttaatgtttaaaagaaaaatgtgtgtaatgcactaacacatcgaatacatgtgtgacctttgattatgacgtttccttggaatggacaggttgctagactgaatcccgagaaatccataccatt

SEQ ID NO: 106562 - DNA, 552 bp, Aquilegia coerulea
  Intron number 1 from transcript AcoGoldSmith_v1.004232m (l ocus AcoGoldSmith_v1.004232m.g) derived from phytozome v7. 0 (chr-ID scaffold_76; pos 60292 to 60843 reverse strand)
gattctgagtatcgaaacaagacgaaagctttcaggttattccaacgccctaatcatttgatcggagcaaaactgtattatagatttatgaaatctagagtttgcatgtttagaaatccctaattttgatttctatttattgaattgatgcatgattttttttttttgataaaaacttgatattgatagaaaaattatgactttatgatcgttttatttttgttttatttttttcggattttttagggtttttatgaatgagtttatgcttattgttgatgaaattcagtatcttttcaatgttacatcctgaacttcatgctgccaaattgcgattgatgaagtgctttttttttctcataaaaatttaatttgtcggcaaaaattcattttcttaatgcttttatttagttgtagggaagtttaattgggtgcctggtggttgttgattgatgagaagattgatttcctcatgctatcttttgttactgactaaattatttggtgtaaactgcagttgtggattgttcgctgtttgatattattgtatat

SEQ ID NO: 106563 - DNA, 1015 bp, Aquilegia coerulea
  Intron number 1 from transcript AcoGoldSmith_v1.010233m (l ocus AcoGoldSmith_v1.010233m.g) derived from phytozome v7. 0 (chr-ID scaffold_20; pos 1879190 to 1880204)
tctgctcaacttgccagtaaagaggtaatcaataatataaaaactatatttttttttttttttttctatttatgtaattcgtttttatggattttggataaaccccaatttctatttttggataatatttgggggttttgatgggtttttggtataccctttgctttgtttgatcagttggaaaaaaaaccatttctgtatttcatggttgaagttgtttgtttggttgattgattatgaatttcccttgattttggattctgacttttgttgaaaatctttttcattcattgcttttgtaaacaatttgaattcccccccttgaaccttatcattttcacacttttcaatccccttaaatgctgaattttattagtagtttaaagggttttgttctaaacctactaaatatgaatttagctttgtttgttgttttaccaatttgtatgttaaatggctgttatgcgcatggtattgtcttgttcacttgattgccatattgaatctcttgctaatattttggaagcattgtagactgaagaaatatataacgggtcaaggaatagacccagacacatataaatttcaggtgtgacagagaggactgacttttgctgatattccatttcctatatgagctgatttttagtatggatataatgggggtgcaaacatccatacattacggaacatagtttcatcaccttttatatagactaagcatatgaattaaggagtaattaattccgaacaaatcttttttgagcatttgaaaatatttgttggtttagtacatcttctttatgtaaatgttagcagaaaccaatacattacttaaactggtacataaaatcttagtgaaatttgtttccttgtctgtggggttatgacatgatggctaaagtgaacaattcgttgaaaactgagatccttgaaatggcaataaggttggattaatgttatcagttattaccatgcaggctttcggaaaagttgttcagagctgggcttccaa

SEQ ID NO: 106564 - DNA, 648 bp, Aquilegia coerulea
  Intron number 1 from transcript AcoGoldSmith_v1.011769m (l ocus AcoGoldSmith_v1.011769m.g) derived from phytozome v7. 0 (chr-ID scaffold_4; pos 1991929 to 1992576)
agcttagacaacatttccaagatttgataaattaggtaaaaataacattcccatcatcaatggaaactctgcgttctttttcacgcttaatttaaatttaatattttaacatttttttttttttttaggtgcggtttgttaatttgggataatattgagtttattgatttttgttgcatttttgtgatttggataagaatttatgaattttttgggatatttaagagttgggataattgcttgtgatctgggtaaagagggtttaaggggcttaagcgtataaggtgattgcatggaatatttcttgtgggtattatgttcaatagatttgattgtttgcgtggtacaagcttttttcatatattgtagtgctgagaaattagttttgatggttgggagtctggagaaatgactgaatgagatttttttttttgtggaattctatcatcatttgtatatatgggtcatgctgaaaattattggccattaattgtttgataaaatgctacacatggaattccttgttattttggtgtacaaggatatttatatttggtttatttgatgcgtgaagttgtattgttctgattgttgcattgatatgtttttgcagagtcataccactaatttgttagggttactgtgtac

SEQ ID NO: 106565 - DNA, 390 bp, Aquilegia coerulea
  Intron number 2 from transcript AcoGoldSmith_v1.007672m (l ocus AcoGoldSmith_v1.004996m.g) derived from phytozome v7. 0 (chr-ID scaffold_17; pos 1532480 to 1532869 reverse stra nd)
ggtgtaggtttaaccaccctcgcaatcgtagtcaggtaatttactttgattttaacttacataattaggtgagattgtaatttgtagggttttgttggggttttctgcattataaagctaattactgggtacggtgcaattttggttaataggataatgtatatgttttgtcatagttttggatgttagtatagatgttggtttttattatgaagcaagatgtatgtcatcgttgtgttttgtgttttggttaagttatagatcatcgggtttccagttctgtttcatacatattccagcatggtttgtttgtttttgcaagatttagtggtatattcttcttttgtttgttcaggttgctgctggacttgcaagagaaggagttgagta

SEQ ID NO: 106566 - DNA, 560 bp, Aquilegia coerulea
  Intron number 2 from transcript AcoGoldSmith_v1.013729m (l ocus AcoGoldSmith_v1.013729m.g) derived from phytozome v7. 0 (chr-ID scaffold_20; pos 334847 to 335406)
cctttcatcagtaagattatcaacatttccattagttcatatcaatagcttaattagcatctctggaagacactgtttggtgttaagtaagcatctttgtatctatgtatgtgtggtccttctaggcatccagatgttcttctccatcgtatgtggcagactttgtgggtctagacctgtaatacttgtccacacttttatcagtttttgatttaaaagtttctattctatctatatcacacaattggcagtttggcacatagcacataagagatttcaaagtatgaagtatgtgaactacaaccaccattttaattgagtgcagtgagtcaaaaagagcaactgtgttaatctttatctctgacttctacatttagtaactgaacccatagattatgtacaattacccattccctaggtattttggagtatatataacataaggtggttgaccttctaagaatgctaaaaaattctaaaggatttatataggttattatatttataatatatgtcttgttaaggctaatgttgatggttttattaggagtcatattgaa

SEQ ID NO: 106567 - DNA, 209 bp, Aquilegia coerulea
  Intron number 1 from transcript AcoGoldSmith_v1.008450m (l ocus AcoGoldSmith_v1.008450m.g) derived from phytozome v7. 0 (chr-ID scaffold_17; pos 894366 to 894574)
ttattgctctaattgacactcttggtattgatcaggtaacaaaattagatatacccttttcaaatttagtctcatttcagttgttttagggttctaattactttgtacagcaaattgaattgagggttttgaataaaccaaattgaattgtttggtttgttttttaatggaagaataattttaatttgtttaggtgtttctggttgggc

SEQ ID NO: 106568 - DNA, 677 bp, Aquilegia coerulea
  Intron number 5 from transcript AcoGoldSmith_v1.011423m (l ocus AcoGoldSmith_v1.011423m.g) derived from phytozome v7. 0 (chr-ID scaffold_20; pos 2708439 to 2709115 reverse stra nd)
aacaagtaagttctgattcttacgcactgaatatatacccaaaagcatatttttccatagtgtttgccaatgaacttaggctgcttacatcttaggaggcacatgtttttgggtacctcttatgctaaagtatgagttattacgccagtctaaatatcagttgagtaatgtataaaattgctgttttgtcatgaagaaaaatagatttttgccttctgcgggaatagtaaaagactaaaaaccaacttagttgtaaaattgtttgaggattcctttgcttaagaaaagatctggatgtagaatgaaccaaatagaaaagtttctaatggacacattctaacattcagtaatactgcatgatcattcagtaatatatgtataagatttcattagtttcaattgaaggagattgcgacctgattaaacatatctcagtctactctctctaatttttgaggttatgaggtaactgatcaaactcctaggattgtgagacagaccccagattatgcttaattatgtttcatcatggttgggcacttttgcgctgtcttgattttcttgctactctagaaattttcttaaatttctaaactaaactgtgtagtcaaatggagttgggagagatgctttcagtttgactaaattctgattctcctttgtctatgtttgaagga

SEQ ID NO: 106569 - DNA, 795 bp, Aquilegia coerulea
  Intron number 1 from transcript AcoGoldSmith_v1.009411m (l ocus AcoGoldSmith_v1.009411m.g) derived from phytozome v7. 0 (chr-ID scaffold_5; pos 4186908 to 4187702 reverse stran d)
ctggtaaatacccttgattcatgatttgtatagttggtgttcattatcattttcttttatgtctgttttcagttttgtggtttatctcatcatgtcgatttatttttattttatccacttaagttgtctgattgaataggattataggagggattgatttgccttttctgtctagagtaggttgagctatcttgttattgtggttcctcatgagtcgtgaatcgggaatggtactcatagtatttccacatttgaagacccttccttctatttacaaaatagtttcgactgagctttcatttacactgtcatatttggggaagaatactcttctaatagttcagtttatctaaatgagctcaattttgtaatgtgttgtttcttttatttatcagtcaactgagcttcagttcttggatttattttatctagtaaatgttgtcaggtgattgtaaaagttgcacagcgaaacaatgattttttgttgttgttgatgcacacatttcaaaagattcccatacagcctaatgaggttaagagctggtcttgtacatcaggccttaatctacattttcctatgattatcttaattgcacagagctgggtatcttaattgcacagagctgggtatcttaattgcacagagctgggtatctattcgtaactactagactagaacctttgtttgttttttcctcgtttgatttggattatcttcgtttcttagcgatcattcatgcttcttccaattattttgcagttactgaacttgtcgaaggagattcatctcgcaaa

SEQ ID NO: 106570 - DNA, 888 bp, Aquilegia coerulea
  Intron number 2 from transcript AcoGoldSmith_v1.001291m (l ocus AcoGoldSmith_v1.001291m.g) derived from phytozome v7. 0 (chr-ID scaffold_45; pos 1347246 to 1348133 reverse stra nd)
aatcttctaaccgaacttgggttcgagtttgtcaggtttgttttgtgtatttgtttcagtgatcagaacatgtttgatgaaatatctcacttggttcatagagttatgtgatgggttacttagcactttgataatggtataccggtagagtagaaaaagtccaaagagaatggtttgattaatatcagttgctttgcttgtgtgtttgaatgttgtacttggatgctttaaattggtttatttgggattctaagtcacttgtattactccctacctgacatatttgttgcttggatagttgtcgtttctaatttatttttttccctgcaaaagcaagctcgtgttatgcagaccggaccccttccagtttatagataaaaaatgttttacacctttaagcacatttcctctctagcacggggaatggtcctgtaaggacacttaggggctcatccctattacaaaaaagaagcaaggtaatctgcacatcgattaatctccctgtagatgtgcactaacattacagtctcaaagtcttcaatggtcttctgtgctgcattgattcttctctgtgctctccatgttagcctgtagtttcctttcacacactcaactgcatagcttgagtctgatcgcaccatgatcttcatgtatcctcgtttgtaaactttggtgcaccaatccattaagtaattagcattaaggctctgcttaagtgaagtttgaatgtatatgcagttacgatcatgtaaaattttgttctggaaccccctaggagtatagactgagaccaatcccagacggtttttttggagttgatgataagaagaatgttatttacatgttcttacttttcaattttgtttgatttataggatactattgcaa

SEQ ID NO: 106571 - DNA, 633 bp, Aquilegia coerulea
  Intron number 1 from transcript AcoGoldSmith_v1.016233m (l ocus AcoGoldSmith_v1.016233m.g) derived from phytozome v7. 0 (chr-ID scaffold_41; pos 2112896 to 2113528 reverse stra nd)
tccaattttttgctgctcagattctcaagcgaaaggtattagtttctttccaccctttttttcctattgttattgttattatttactaatacctccttactcttctttccattccattgagtgtttctgtcactgcttactatttgattattaggttattacgtttgtattatggttattagtaggagtgatgcttttataatactatcatcatcattttattacactggaagagaagacttgaaatgattttttttttttttttttattataaatattcattttattcctttcctttatgaaattattataaaaatcctggttcatgtgctgacacacacacacacacatatatatatatatatatccattattacttcttgtagatccagaatgaaggatataatttgcattatgattcaaaggaagctttgctaaatgctcttcttctcgctgcaaaaaagtttagtctgggaccttcacaggttactactatttatctttgacaatgctatctatattcatatactatatatatgatctatatttcgggctgctttgggtattgatggttacattttttttctgtccattacagattttaacccagatctgtcttgcactatcagcact

SEQ ID NO: 106572 - DNA, 692 bp, Aquilegia coerulea
  Intron number 3 from transcript AcoGoldSmith_v1.017608m (l ocus AcoGoldSmith_v1.017608m.g) derived from phytozome v7. 0 (chr-ID scaffold_33; pos 1271413 to 1272104)
agggaggaacatcttataggaactttgatatattggttaaagagctgctcaaaatcaaacactttgcctctttaatcatttatttgtgcgcaaatgtatttctgtaaggactacttgcttcaaatccattatcatctctttcattatatcaaagatattaaaagcagccatgccagtatttataaagaaaatatttgatttcctcaagtagattaggagaaaaatatattttcttgcttttaagactgttgagctatatgaggggccaaatgcgtcttcgctaaagaagccaaacccagccagaacaacaacaatgggcgcctcaaatacttcttttcatgcatgtcttatgttttctatgatcatcttattttgtggatgttcagttgtctctagtacattattgtcccctttcaaacgtgtagagttgtggaacgatctgttgccaaattcaacattggcaacctattgcggatcaactggtgtcaaatatggtcaccagttggtttattttggcgaaaattttgattggagtttcctagttgattctgataccgactccatatttgtgtgcaacttgcagtgggaggagcctgcaacaaagcgtttgtttcgtgcagatattacagcatataagcctggaaatgaagaagtgaatcaatgtaataaatgcatttggtatgctagaaaag

SEQ ID NO: 106573 - DNA, 789 bp, Aquilegia coerulea
  Intron number 1 from transcript AcoGoldSmith_v1.008324m (l ocus AcoGoldSmith_v1.008294m.g) derived from phytozome v7. 0 (chr-ID scaffold_125; pos 204380 to 205168 reverse stran d)
tcattcttcattcctcattcaatcaatcttatcaggtaaatcatcattcttctcttagattaattaatcttctttttttttttttattgcgatttataaatcaatcaatctatctatctatctcagcattaccagtcattagattagattagaatttagattactttgtatattgctttttgtctttcatcgctcacccatcattccatttccatggatctatctaaaatttcaaatttcaattcccccaccttcactttcacctttcacctttcaccaaaccacacaatccaattcaaaaccaaaccatctctcaattcaattacacacacatatatcaaacataacaatatacgctacctcatcctcatcctcataatcttcatttttctcttttccctttcaactctatagactggactctcattttttttcccaaaattaaattttaaactttactttcaacctctgccaatattgccttttcccacaacgtgtatcattacatagtcttctttataaacaatatatgtctgtctccactctccactctccactcatattcaattttgaactttggaattcagatctattgacaaagttgacttttcttaacatatgaaacctctattgttttaataactccattcattatcttttccttcccttttctgtttctgtctttattcttcacgaaatgttttcatcttaaatttcaactctaaaagggtttcttttttgttttcttcttattattatcgcagtcttgttagagcttacctctgttgg

SEQ ID NO: 106574 - DNA, 995 bp, Aquilegia coerulea
  Intron number 1 from transcript AcoGoldSmith_v1.008820m (l ocus AcoGoldSmith_v1.008820m.g) derived from phytozome v7. 0 (chr-ID scaffold_17; pos 2118559 to 2119553 reverse stra nd)
gtggatttcagtttttctccgaaaacgaaaacgtaagtgaaaccttcttctctcatcctagctatttcaccattaggaattagggttttgtttattagatcttctgactgaataaattcgtagcaattaaggttttgttctgtttcgatttcttaaacttttttcaatctgatgttattttgctaattgaattaatttcttattggtctgatgtttggttaaatcgtattcatatagattattgttgtttgatttgcttatctgtttttgttgtttattctgatttatattataagcataaaatcaatatgtattatgcgttcttttggtgtaattgtcgtgaattggcgacatgattgttgccataataattgtgctgcctatatgtgatttgatccttgcaaaggaatgtataagttcgtatacagacagattgattcgtgtaatttaagcttcttttgttttccattcatcgagaaatattagtaagttctagtaacgtgtctatattacgcaattccaatgatatggttaccgaggcaaatgaaatcaatggtaatactcacttcaagttaactgttacaacagatttcgtatgttactctcgttttaagaattatgtattttcatgttcactggcgttttaggtaaccatgttgcttcacagagtatagcatgctcatctatgcaggcacccttaacactttttaaataacataagcaggtctacatagctttaattttctattagaaaaagaaaatagactaaattacctctaaatctaattgattgttgatgttgaaaaggcttcctttgttgttaaatatttgttacttaagttcttggggtttcctgtcatagttgaaatgtacttatcttacttttgataatctgttatacttatgtgatttttatgcttgggattgctgaacatgttcctttacgttgggtttttgcagtcttcacttgcagctgccagagcagacaattttta

SEQ ID NO: 106575 - DNA, 538 bp, Aquilegia coerulea
  Intron number 1 from transcript AcoGoldSmith_v1.010169m (l ocus AcoGoldSmith_v1.010169m.g) derived from phytozome v7. 0 (chr-ID scaffold_5; pos 729224 to 729761)
ttcgtgaaatctattcataaataaatcttaatcaggtaaatttcttcaattttcttgtgatttgattgtttattgaatctgtttttgattgttgaatctttggggtaattgtaatttgtaatcaaacaagtggtgatttagtcttcaacttcttgattatcaatttaaccttaaggtttgtagattttgcttctttgatttgatcttagttagatatattagggtacatatatgatctttgtttagggtttttccctaatttttgttttcaattaattgatttttagaactagcttaaatgttatagtaagtttcaattaattaattattatttatgaatttcactaattagaatcaattgaattgagattactttgacgctcaattgaattaaagtgctgtttagatataatttaagattttcttgggtttgatggagagtattttgttttggttttatgggtttaagaagatatggttttatggatagatatataatttcatgttattgtgggttttttttttttcagcagtaaat

SEQ ID NO: 106576 - DNA, 729 bp, Aquilegia coerulea
  Intron number 3 from transcript AcoGoldSmith_v1.008269m (l ocus AcoGoldSmith_v1.005494m.g) derived from phytozome v7. 0 (chr-ID scaffold_41; pos 112183 to 112911 reverse strand )
agtttgaggccttgtgtggcttcgttagtctccaggtaatgaacttgtctgggttaggtcatgaactgtatatttggcattgtttttttggggggaaagagtagcttgtttcaagattgtcctcatctatgaaattttgtttagagatgatatatttgatataaacctagattgaatattatttttccatatgcagctggtagttaattattgctggaattcatataacgctttggagagtactgcattgttagatcataaatagaacctgattgatgacagactgtgaatgcatatatactctatgttgtattttgattgatgagacactttcagtggttatttggttgatctggacttgttaatgaggaactgaaggtgttggatgaagaatgtgagaacctatattgatgaccccacgacttatactatagcttatcatccttggtccttactgaacttctttcccatatttcaatttgtatgcatacattggtatttctttaattagaaatcattgaagattaccaacatattctgcaacttaagattggtgttcttgacgaatgtcaatgcttgactttagtttttaatgataccattatatttatgtggataacctggtttagttcccatcatatctcatgtgaatggacaggatgctctttttaaacctcgtcagatattaagtgttcctatgttttgctttatcattccaggaattcaagg

SEQ ID NO: 106577 - DNA, 680 bp, Aquilegia coerulea
  Intron number 3 from transcript AcoGoldSmith_v1.026325m (l ocus AcoGoldSmith_v1.026325m.g) derived from phytozome v7. 0 (chr-ID scaffold_23; pos 641844 to 642523)
gctttaatcaatattgaagatattgacctttttctgtaattcatcttccctcgcctggttcttttactttttgattctagctctctgtgctgctacttatttgaagctaaggtgttatacggttatacctagttggtgcttacgagtttcaaaattttcagtgaaaaaaaagataaatttccatcagagttggaaaccttaatttatgagccattcactaaaatatggctcaaatgtatattagtggagtgccctaatggtcacaaacttgggactgcgaagagactgacagttaaattacttgaggatcgagatatagttcaagattggaggaattagttggtggtttctctatagccagtcagatgatgtcgctagtaggcaaccatgcaataatggtggttatgtaaatgatttttcactccagattctatacctcttggtatatatatatatccttttttatataaagtttgatcttctaacaacgggctgcgactcactgaaattagatatcctgtatatctgctttgtgtgtttgtgtgtgcatgtgtaacttaagaacataaatatcatttcacaagatattatccataattttttcttatgtttctgtgcttcaaattgtcttgaaatgttattgatgtacaccttttactatccactgtaggttagttgac

SEQ ID NO: 106578 - DNA, 314 bp, Aquilegia coerulea
  Intron number 1 from transcript AcoGoldSmith_v1.011934m (l ocus AcoGoldSmith_v1.011934m.g) derived from phytozome v7. 0 (chr-ID scaffold_29; pos 368666 to 368979 reverse strand )
ctgccattactacttactagtgaagctgttttgctgtaagtctttatcttaatttttttaaaaaaaattgtttctgattaaattcatctttatttatttattattaatattgtatttcagttttataaaattagggtttttatttgttatttgaatgttttaggttttctttgattattttcttcttttagcttttaatttaattgtggttatttattgagaatagaattactttctttattttgtttatttcagctataaattcactctatttcgttacttggtttattaggtttaggtttccagatccagat

SEQ ID NO: 106579 - DNA, 796 bp, Aquilegia coerulea
  Intron number 1 from transcript AcoGoldSmith_v1.005545m (l ocus AcoGoldSmith_v1.005545m.g) derived from phytozome v7. 0 (chr-ID scaffold_23; pos 3072103 to 3072898)
aggttttttgttaccttatttgtgatacttttaaggtacagatctctgtttcacttcatttatacataaatttggaaactgttcaagtataagaagaaataatcaagatctatactttttcattatcttgtcagattttctcggtcaaatagtaagatttcacctgaatttttgttgctactttgatttcttcaaacttattgggaaaaattccatttttttcttcattttattttttgggaaatttttaaatattttgatgcctttttttaaaaaaaaattatcttcaagttttaatttctagagcttggtcttcatgtctttgcgcactatttccttaaaattcggtaacaatcttcttttaatcccaatttctatggccttgtagttacagttatttcaaagtgcaagttagattcttttcttacatcaccctctaactatataaaaaggtttcattttgttacaataaaactgattctaaagatttttccttgaaaagttatacaagtttgagtcttgtaagagttttctgctttcaggttatttctattatccctcatacttcctaattcagatatttttgataatttgatgtatatgaacaaaaatacaaattacccatttctcttgtaagcttcagaagcctagaagtattattgtttttaaggatttggggtgttatttatattcaatttgtaattgcttctcttctctttctctttttaatctttactttgttgctaagctttgcaccagtcaactgaatcaacttttgtttcttttttgcagtaaa

SEQ ID NO: 106580 - DNA, 245 bp, Aquilegia coerulea
  Intron number 2 from transcript AcoGoldSmith_v1.006337m (l ocus AcoGoldSmith_v1.006337m.g) derived from phytozome v7. 0 (chr-ID scaffold_20; pos 2854251 to 2854495 reverse stra nd)
agcaagctgaagaacacgaacgatttatcaataaggtatgtgtttttcttcccaatttccaatgttttggattatgggcaatgttttcctttgattttgattattttttttattaatgggtatcctaattcctacatttacattaatttcatcttgttgtgttgttgtttcattgattttggtcaattgattgcttctttgtgattacaggtgactcatctttgtggggttcttagcttcggcgc

SEQ ID NO: 106581 - DNA, 174 bp, Aquilegia coerulea
  Intron number 1 from transcript AcoGoldSmith_v1.006337m (l ocus AcoGoldSmith_v1.006337m.g) derived from phytozome v7. 0 (chr-ID scaffold_20; pos 2854525 to 2854698 reverse stra nd)
gaagggtcaaagagagattcaaagaccgaaccgtaattaaacccaagatcaaaactgggttttcattaatctcttcatctctttttctttctttcgttgtgttgtgatttgggttttatttgttttgtttatttaatagaaagttaaggaaactaaggagaaaacaaaagagat

SEQ ID NO: 106582 - DNA, 731 bp, Aquilegia coerulea
  Intron number 1 from transcript AcoGoldSmith_v1.002269m (l ocus AcoGoldSmith_v1.002269m.g) derived from phytozome v7. 0 (chr-ID scaffold_17; pos 3168120 to 3168850)
cgttgattgattcaattgagctttcttcagttcaggtaatcttttcttgtttacttcaattaagcacattattgtgatccacagctattgtgtttgtttaactgtatttcttcaaatagttttgaaaatgtacttattttgagtgatgtttgaagataaaatatgtagtcattttgaacaaaatttatgattttgatcttaaaaacatgtttgatttcttgcaaaacctaaacttgtgtgatttctttagttctgaaggaaatctgtgtttttcttagtacaaaatctgtgctaaaataaactgagaatttttaaccaagtttactttttagtttagagttaagttattattaagtcttttttttcgtgaatgttggtaaaaattgctcacttttttgttcacatatgtttctcatggttctgaattagtgaatcggggaaatttgtactggttgttcttgtgcattatcagttatctttttataatttgagaatcatgctggttacactgttgattttttagtcattattgcaaaaaattgtgaattctggagtaaattgctaaggtatatagaactatagaagctatattgtaacctatattttgaagtagtaaatttgactattatctcggttgttatattgttttgtcattcattgaggtttgattgtaaatttgtaattaagttgttgctgttgaatttgaagtggaagaaagagtatactccaga

SEQ ID NO: 106583 - DNA, 771 bp, Aquilegia coerulea
  Intron number 4 from transcript AcoGoldSmith_v1.002269m (l ocus AcoGoldSmith_v1.002269m.g) derived from phytozome v7. 0 (chr-ID scaffold_17; pos 3169320 to 3170090)
tcatagtggagtacaaagattcgtgggttgagaaggtgtgtatactactatacttttaaccatattgtaatgttttttgcttgagtgcgtttattttgttcaacattgtttttttagcaaaatttttgtttagagctgaagaatataatctaattttcaggcttcagtttgatccttcttcttatgcataatttataccctttcagacttttatgccaaaagaaatgctttacaagttttcaataaaccagccacttcaaacgtatgaatttttatgaatgttctctttaattacatctgtcaaaattatttaaacttcaaattcgtaactttatgtataaactttgcattatattttttgactactaggtgtgttcattatattttaaatctaaatgccccctctatttatgactacggcataaatgtcagaactgagaaccatcaaccttacaaatattggatcattttgtatgtattgtttttaagataagacagatttagatctggatccatgtatttcttgatatataagttcgattgatccatactacctgttttctaatagggaagccctgtatttcttgacatacaacatagggaatagatttccagtttttgtagttgtacatttgccccagtagaggtcgacctgggagtatttatttgcgttttcatctacattgggccttgttttcttctatattttcggacacggttcaaattcttcatttgatactatcaatatctctatttccagggttgctacgt

SEQ ID NO: 106584 - DNA, 813 bp, Aquilegia coerulea
  Intron number 1 from transcript AcoGoldSmith_v1.004097m (l ocus AcoGoldSmith_v1.004097m.g) derived from phytozome v7. 0 (chr-ID scaffold_20; pos 2012997 to 2013809)
cagtgtcactaattccgaagatagtcctactaaaggtttttaaccttcgttccatttattattttcttttgctcatttctagaagtgaattttcttttgctcaagggatcatactgtgcttaagctctatattttgttgctagttgcctagttccatgaacaatgtagatgtttgtgttattacacatctgcacaggtagacatcaagctttcaattggcattgtgtaaatcatcaggctgcccttaagtagaattcattcaatattatcatatgaattttttatcttactttggattacacaattagcagtgttaataacttagtgctggaagttctctttaagaagcttttgctgattgttttttatgatagcatttgcacttttccatagaagtgccattgttcttttgttcccttaatattcttaagtaagtgcttagggcgtgtatttcattgagtggtttctatattagaattgagaatggtaagtagtatatattgatttattttttatttttttaataaaactcgaaattttattgattcactcaagaaagtacagaagtataatttttttttcttagggtgtgtccattgttctatatttcctttgttcatggcttagaagcatgaattagtggtttgattccattcaagcaaagtgacaataatatggtttaaattatattaaaaatgagatttcttcattatttatcaacacttccagaaaatgcatctctgcctccaagtttgatttaactgtgtatttaatgcagctagtatatccccagctcttgtaaagatccttcgt

SEQ ID NO: 106585 - DNA, 754 bp, Aquilegia coerulea
  Intron number 6 from transcript AcoGoldSmith_v1.011833m (l ocus AcoGoldSmith_v1.011833m.g) derived from phytozome v7. 0 (chr-ID scaffold_17; pos 1846538 to 1847291)
atctcggaaagggtaattcaatatgttattccattttaatcaagttctttcaatgaaatgtcaactgtgtatcttgttgtataactgacatgagaaagaaattgctagataaaagcacaataagttactcaaaaatatatgtttagaactacagctttaactataaagttaaatataacagttggaagatttttagatggtcattttatcaccctaattctgttcttataatgaatatcttcatagttacttgcatttgtctatgatgctggggttttaggacaaaaggcaagttaagtgaaagcatgccaatgaaacaaacataacagagacaccaatcacatgaaaaatggttggatgtttgctattgttaacgcacaaaaagtccaggaagtggcaagttgcattcatcgctgattgacttgaacagggttctttattgaaggagttttgtttctaattacaatttgtatgcttttcttctttgatctgctaaaatctggagtgaattaaatttctgagcaattggatgatgtttctgactaatgatgaaggggaattgttcgcattatagtgattccgttttacctttgcttatgctgaattcaacatatttaaccgccatttttctcatttttattttctttgcaattttgatttgctttcctcctttcccacttaaacctttctctaaagctaatactgtcttttttttttttttcaggaggacacgaactcagcaagagcactggaa

SEQ ID NO: 106586 - DNA, 954 bp, Aquilegia coerulea
  Intron number 2 from transcript AcoGoldSmith_v1.007035m (l ocus AcoGoldSmith_v1.007035m.g) derived from phytozome v7. 0 (chr-ID scaffold_4; pos 3325688 to 3326641)
ctcattccaaaggtgcaaatatcattctcattcaggtacaagtttttaaagcttggtctctaatctatacttttatacttgaattacattgagcttctttaatggtcctttgcgtgggaaatgtttgttcatatgtcagatggtatcttttttttgtaataggcacttatagtatggttgtacaaactcctggggaggtttgcacgctgtgttgctgtccattttttgattgtcaatagttgagtcaatgactagagacggcatcttaatttttacttttagacgtgttgcaacttattattctttgcatcaggacatgctcatgaaggctctgaaatatttagttttgaggctacagaattgagtttcacttacgtacaaggaaccttaggtgttaatgtgtcatgtttagatgtgaagtagtggtacatactcgttaagctgaagattctgaaatatatgtagttataagggtgctgagttgaacttgatccaccacattatcacagaagtttaggtgtcataccttgagcaaaatttgtgacacttaaaagaaaggtggtaaagaagctcaaccatcaaagtagctttggactaactatttgaaggcctattcaaagtttaggtgtacgttaacactcccgagccccatcaactaaatttgacaaaagtccatgttgcaaaaatgttgtagtttttgaaaagagatgaggaaagcagtccctttgattcaaaggcaggcaactgacataagtttccgattgttttcttgcttctgtaggaggctatatcctaattactttcttatataaattatcggtaaattagttttcattgattcattgtatttatcatgtccgaacttcaattattgaaattgttttatttttgacatttacctcttcttcggtttgttcaggaactatttgagggatactatttctgtcaggcaca

SEQ ID NO: 106587 - DNA, 990 bp, Aquilegia coerulea
  Intron number 1 from transcript AcoGoldSmith_v1.010656m (l ocus AcoGoldSmith_v1.010656m.g) derived from phytozome v7. 0 (chr-ID scaffold_122; pos 260385 to 261374)
cttcttctaattctattagatctgatatcagcatagtaagtttcttcttcttcttctcatttcgattttcatttctgtaaagtttgttaatttaattgtgaaattgaatgacatggctttatctttgtttattgaattattggtagaatgtttgtagttctgaaatgtctacttttttggttaagacaagattaatgtgtgctaacagtatattatatgagttttcttcaaattgaatgcatgtatctgtatggaaagaaacccctttaatcgaaacaatgaaacaactctatacttcacactcatcatatatttcggggtgtctgtgttgtgtgtatggatcaattgcaatatgccaatatggcatcataatcatatagatttaagggttatatcattttttattttttattgtagttagtgagggctagttctatgtattttccgtatgatttcttagtcttgcatgtttcaagtaatgagtttccctaagcataccaagtatggagagcccgcaatggaaattatacgaccttattacagtcttatgtgatcccctgcttttgcccaaataccaaatattgtatggttgcctgtgtagtctcattctatgcgtgtttgatcagttggtgggtcttttgataatatttatagctaatttttgttgaattgttttacttccaaaattaatgtttatgccgtctatttcattctattatgtttattggagtttaagatcttaacatctgatgcctgcgtgttctagcacgaccttgttaaaggaaattgacttaaactcgatcattgttccctttatttaatttaaaatacttttcgtttataataaatactctttaagtttggcacccctaccaatgtttaacaatggcacccaaaaattatgttgcaacttgtaagtaagatctctcatctttactatttgcttactggttgtttaacctttaatgaaacagtttgaacgtgggattc

SEQ ID NO: 106588 - DNA, 749 bp, Aquilegia coerulea
  Intron number 1 from transcript AcoGoldSmith_v1.002609m (l ocus AcoGoldSmith_v1.002609m.g) derived from phytozome v7. 0 (chr-ID scaffold_4; pos 8558094 to 8558842)
tctaataactggtgctactggtttcttggcaaaaggtaataatcttaacattttgaaaccaccatatacgtactctttgataatctgattacatttttttctcttttttttttagttgttacatggtgctataccaattgtccttttcattttctattttagaaagaaaaaagtttttctataggacatataagttgaattaatatataagccaaagaaggatatgtcaatatacaactcaaatacttaaaaaatgcaaatacctgaacataaatgcaacatatagtataatgtcaatcctttgggatgttgcaataatatatatgtcaagaccttggaatgtcgggcatgattgagtggttcaggtgtcttgatctcgagctgatgatatgtactaattatgatgttcacaaaattccattcaatttaattagaatggacagtagtcgacccgttagaactgactctgtcgccattatcttcatcttgtaaattctttagtggtcattgtaccaatttatccagccttttcttggtcagatatgaattcgggttggatctgcctaatagtaatgccgaaactagttattaacacttcatattttaactgaagcggataattaaagttaatgcaaagaaaatgaaagttggtttgtcatatttttatggttttacataatagaagctcaaagtagttatttttcatttctgcagttttgattgagaagattttaaggactgtacctgat

SEQ ID NO: 106589 - DNA, 452 bp, Aquilegia coerulea
  Intron number 2 from transcript AcoGoldSmith_v1.008936m (l ocus AcoGoldSmith_v1.008907m.g) derived from phytozome v7. 0 (chr-ID scaffold_17; pos 2962878 to 2963329 reverse stra nd)
gatcttgggcaggggaaagacatttacatctacaggttagtttcattttgtatattaatacttccttagaaacttttgtttgtcgagatgtagaatgtacatgtatcacacaattgctttcttcttataagatcttaatgatattctagtgatgaaaattacatattcttgaattcataatttttttagtactttggtgctcaagtatatctttggaatcctcttttgttgtctgtttctttgatctctcacatatactgtataatactgtagttatgagttaataatgttaaaaattgctatcaagttttggtgttctaagccatctattgttggttagggtcgcttaatagtatttgttgatctcccttttcattccaacgaacataattttacttaaatccttacttccactattgtttcagaggtgaaaaggcattctgtagtcgtga

SEQ ID NO: 106590 - DNA, 913 bp, Aquilegia coerulea
  Intron number 1 from transcript AcoGoldSmith_v1.018886m (l ocus AcoGoldSmith_v1.018886m.g) derived from phytozome v7. 0 (chr-ID scaffold_4; pos 8955258 to 8956170 reverse stran d)
aaggttagcttctgatttatttttcaccttttgtgtgtattttaaaatttaatatgtagaccatatattctaaaggacagtataagatacaagcaaaacaactagataaacaagaacaaggaacaaggaacaacattcaacaaagagccatccaaaagagatggatcaatcattgtttccccatcctgttacaagatacacactaacatggtcaccttttgtatgtttcatacaagtaagctcctttagttgtaggcgtccaagaactacagaacattctactaccatcttgctagcaggacattgtcactattaaaacatttagactaattataatgcaggtttcattcagaagatcttcttgatcttaaaatactcacacaagatattcctgactattcaactaatagtactttttcaactatcaaaatataatagaagggaaagatttaaaaatttgaattatcagattgatccccattaggaaccatttacttccaccctccggcagttttcttctttggcagattcacttcctcgagaaatgtagtcaatcctctgtaatagtggcaggattcagaaactatgttaattgtgaattagttacgtgattacaattcttgttgtgtcacaaatggataaaattatcatttatcaactcacgacgccttgacgaataaatgaatgaaagtggcactatgagatatttatgttctttgtataaaagaaaatgtcttatcttttagttttgatgcgcgcacatatatattgttagtttgttctctggattgctgttacagcattgcatacatgttttacaaccagctaattcgctaattctcttgttctttttccatgacaatgtgacttttcaacagttcccagagtttctcacttcattcttttctcggct

SEQ ID NO: 106591 - DNA, 662 bp, Aquilegia coerulea
  Intron number 1 from transcript AcoGoldSmith_v1.002513m (l ocus AcoGoldSmith_v1.002513m.g) derived from phytozome v7. 0 (chr-ID scaffold_17; pos 3378261 to 3378922 reverse stra nd)
gtgactgaagaaaaaggtaataaagcttttattcactaatttccatagtttcatgaattaaattgatgtctcagaactttgattttagttaaaaatcatgagaacaatagaaacatgagaagattgttagagaatttttaaataagttacatgagaattataggttctgattgaaatgtatgaactagtcaatatgatgagcgtaacaatggctgacaaggacatatacattacgtttccctgccatgatgcaaatcctttttcacatcataatcatagaattgaaggaaagcaagtcagagtatgtgatttagactctttagtagagacttgaagcttgattgcatcatgatattgctgctagagcctagatggttatgttttattctggtatacagtgtttttacaagataataggtttattggtaatcaaattctaataagcacagatctacattttatgaaatcaacattattcacattggaaggtcaacatctgatctgaatatggattttttttgtgtggtgtttttgtgtccatggctacttgacgaggataattgttacgttgaacattattcatgtctttcctgtaccaattagtttgttttattaaatttattttgtgttctatcttacttgatcagggaccccgggagagg

SEQ ID NO: 106592 - DNA, 743 bp, Aquilegia coerulea
  Intron number 3 from transcript AcoGoldSmith_v1.009827m (l ocus AcoGoldSmith_v1.009824m.g) derived from phytozome v7. 0 (chr-ID scaffold_14; pos 3668909 to 3669651 reverse stra nd)
tggttattttctcagtgaaaccacaagttggtaatttcactactccctcttcaatcaaatttttttttttaacattgattatagacattttgcaatgttacccaagtttctcatgtaatttgtcaaaggctattttataatttttcttccatgtatgctaagtttagagttagtgtgcactgccactcccacaaccacaattcagtgtgtccagtctttcacatcataaaccacacggaaaactataatatagaaccgtgagacggtgggagaccgactttagaagaaaaattggagagggacaaagagaagaaggagaattaagagagagaagaaagacgaagagaagaaggagaattggtgaagagaggtttttttttttttttttttttgaagtggacggagggacactattttttcccccacctgaagtataatggacctcctaaagtcggtcgataatgctgagaaactccttattgaacgtaatcactgtcattatattgtggggtacttttttgataattatatgagtgaatgcttttttgccatactgcgcgtctgcgcatcacatgaaaaatggttaggccttaattgtatcattcaaaagtgttaattctaaaaataagtgtttgtattcatatatcatgagtaccatttgagtatttatgcacatatttctcttactacggattgctgccattgcagttcaaaaggtggtttcccaattaaagcctctgctt

SEQ ID NO: 106593 - DNA, 994 bp, Aquilegia coerulea
  Intron number 1 from transcript AcoGoldSmith_v1.009827m (l ocus AcoGoldSmith_v1.009824m.g) derived from phytozome v7. 0 (chr-ID scaffold_14; pos 3670117 to 3671110 reverse stra nd)
caaagctttgaatccaacatacttcagtaattcaggtatacttttaaatttaaaaattagttttagactttaagctttaaattttttttcttgattttattctttactgttaagtgttaaaaatttaaaaatacattttgttagttgtatcaatttaattttagaacattgttaatattttagaaaagaaaatagataattttatattgtagaaaaactggttgtttggtttgttggatatttggaattttggattgattgttaaaaatatctaatttgcataattgtcaagtgtaacaaccctgttacttgattcaacaattaaaccagaaaagaaacataaatctcaagttcattatgaacaagagcctaatcttatagttcaaagaactagagcctcaaaacttcattaattttctgaataatccttcttacaatctattatgcctttttatctctcatctcccactaactccctacccctctgatgtagtgacacttgtcactatctcctacattctatctcctacattcttattacaatgacaaatactaatatacccctactcaacatagtcatgtatgggacatgacatcaagttattgatatttgtatatgtaatttttttttaatgttatttcatatgatcaccgagggcctcattggtatgtgtcgttaagtacatataaaaataatctggggccaccaaaatctcagatacggcactgcccttgcatcactctctgctagtctctactagactcgtaattgagttgggtttttttcactttctttacttgtttgaaatgacgataataaccttaaatcatcacactttaatgacgagaatacccttttccctccaaaagtatttatcctctcttccctctttctagctaggatctatttctacctgacgagttattttttgttatggggtggtgtgtacaaagggcagggacgtagtcaaatcgagctgacgagttatactta

SEQ ID NO: 106594 - DNA, 423 bp, Aquilegia coerulea
  Intron number 1 from transcript AcoGoldSmith_v1.006054m (l ocus AcoGoldSmith_v1.006054m.g) derived from phytozome v7. 0 (chr-ID scaffold_4; pos 6705084 to 6705506 reverse stran d)
tttctctagatcctgtaatcctttcaaactcacctctcaccaatctctccttcatttaacttttctgcattttttttttttttttacaatttatttatcaatttcatgatttagtatattattttaatgggttattaatgttttttaattatctataatggggttgttttagtttaggtaatttcaatatctatgttctctgcaatttgataactagtgaagtatgatttactgggatttattagtttcaatagaaatttggtggcgggaatcaaatgaattatgtagttccttttttgtaaatttgggtatacagtttgatagaagagataatgttacattgcttatgtgtttgacgacctgtgttgaaattgtataattgatttttgtagcaaaaagtttctgtggaaagtgttgaagcaa

SEQ ID NO: 106595 - DNA, 721 bp, Aquilegia coerulea
  Intron number 3 from transcript AcoGoldSmith_v1.008576m (l ocus AcoGoldSmith_v1.008576m.g) derived from phytozome v7. 0 (chr-ID scaffold_76; pos 705840 to 706560)
cctcaaaggtaaattttcaacatgttgtgcaattcaactagtgcatgactggaatttttgtgaagtgttcataccataagaattttttctgtatgagaggtttagtaagtggaataagatatgaatgtcctgtcacatgtgtgtattttttatatagactttattcttaacattcttctacaatgatggcctaataggacacttgactcttgtagtgaaagaggtgttgtttggcatccttttatgtggtttcattatttttcctggtgatgcatttcttacttgaattgattttaggtgctactttggcttgtactgaatgagctttggtccggttgactgtttcttgaatcgagagtttaatgacttctaaaacattattgcctgacttgtagcatgaaataggatggttatgaatacatcgataaaagaaagctatgacacttttattgttataattttattttcagattgtttttgacttgatacttggcaagaagaaggctatcctttgctgtctataacattgttcagtgaacttttgatcttgaattttggtttaccatttgacattttattttggccctcgtaataaattgttctaatttgacatgattccccactttgtgattgttttaaagtcattttttatacaatctcattcctggtttgttgacatggtttagagtgagggtcatcgccaaatattgacaaaggagct

SEQ ID NO: 106596 - DNA, 813 bp, Aquilegia coerulea
  Intron number 1 from transcript AcoGoldSmith_v1.002698m (l ocus AcoGoldSmith_v1.002698m.g) derived from phytozome v7. 0 (chr-ID scaffold_5; pos 2252382 to 2253194 reverse stran d)
tcatcaaaaagaggtcgaagaagggattcaattctgtaagggtaacttcagttatattatattgtctttgttcttatcatcaaaaagaggtcgattgatatgttattaagaaacttgatcttgctcattgttttgttggtttagttccattttgttaatacagtttatatctattcttttcggtaatgtttcagtttcagattcttcaaagttttagattagattaaatgaaacttagatcaacatgatgtgattttttttgatagtgatatagaactatataattttttagtgtaaaaaatttcttgtttttttttttttttttttttttcggtttgttcattctgcgaattttcaaacaattatttttatttttgttattttaggttatggtatctatgccatgttgactcctaagaatctatctcaatgctactaatttgttattgcattcttttggattgtggacaagattgttttttttttttttttgttctttgtagtaatgctccattactttttgatcatgttatagaactatataattttttgttagtgtaaaaaactttcctgtttttttcagtttgttcattctacgaattttcaaacaattatatttataatttgttattttaggttatggtatctatgccatgttgacacctaagaattaatctatctcaatgctaataatttgttattgcatttctttggattgtggattagaattttgtttgttctttatagtaatgctccattacttttgatcatgatgcaggtgacttagaacccttctgcgttcctcattaccag

SEQ ID NO: 106597 - DNA, 847 bp, Aquilegia coerulea
  Intron number 1 from transcript AcoGoldSmith_v1.006706m (l ocus AcoGoldSmith_v1.006567m.g) derived from phytozome v7. 0 (chr-ID scaffold_5; pos 5005231 to 5006077)
aaacctaagtattctttcaacctttctctctcaaggtatgaaacaatttttattttcaagatcttgtttatgtttatctttagatcgaatcttgttttagatctgtgtattccatgttgttcttgatttgaattaagttttatagatttgtatagatttgatgatagatctgtgttgttatgatcatgatccatgttcaattctgtagaatttgttcgttttcgtttcagatttgtgtagctagaattttgattattgttaggttcaggttgatttgattagatattgcatatttcgatttcatctgtagttctaaagtttattatgaatctatgtactccgatccagctgatttatgtgattttttgagtaatttaatgattttgttgattggattctttttcaaaccatgtaattttttgcaaattttcttttaaaattatttgttatctataaatttctatttaaagttttagtcttttgaagatttgttttagtgtttgattattgttcgatttcatgtgttctttaatacctctaatctgcagttctaaagtttatacctttttataattggtttgattatggatgaatctatgtactctgatccagctgatttatgtcaacttctttgatttcataaagtaatttgatattttgttgattgggatttttttttcaaaccatgtaatttgcaaattttctttcaaaatttaaaattatttgttatctataaatttctgttttaagttttagtctttggaacatttgtttgttagattagtgtttgatttcttgtaagtaattgtttcagatccctaatcttgtttggttttttgtttaacag

SEQ ID NO: 106598 - DNA, 759 bp, Aquilegia coerulea
  Intron number 4 from transcript AcoGoldSmith_v1.000429m (l ocus AcoGoldSmith_v1.000429m.g) derived from phytozome v7. 0 (chr-ID scaffold_4; pos 9167335 to 9168093 reverse stran d)
tgatctcgcattgagtctgccttcttttgcgacaggtaactatgaacagttaacaaaaaaaaacctcataatgagatgttgttcaatttcacgattaaatcaattgttcagaatgtttaattttgaattattcttatgataaattgagaaattgaacgtgctttagtgtatgtgtggggtcatctgtgtggtgtcaacaaggattgccgttctataaagttgttacctaatccacatgttttatcattttatccaacaaaaaattcatctctgtagctcaatcctgcatggggcataaatttgtttctattttggctacttctattgatcatttttctttctttatttaagtgattaagttgtcgtggccatgtatatatcccttaaaagtagaagcacacaattagcaggattaagagatgtattcattggggttggggtgtttggtgttaatagcaatgttagaaattttgttaactagtgtaagagggacagtgagaattgacaaagtacttataaattttaatatggactaagcacttgatgattcatgagcgcaatttttatgaccatggagaaaacaaagattgatataacgagataaatggagaagagaaactgagaaaggcattaacttttgtgacatggatgcctgtaaaaactgtgatctcatgccgtttatagtatcactaatcaaatgtaattagcatatgctgacccatttcatttaattttcaaatcttatgccaggtattacag

SEQ ID NO: 106599 - DNA, 941 bp, Aquilegia coerulea
  Intron number 1 from transcript AcoGoldSmith_v1.002700m (l ocus AcoGoldSmith_v1.002700m.g) derived from phytozome v7. 0 (chr-ID scaffold_20; pos 3563737 to 3564677)
cgattcaatttcacttctaatcgagcttcgtaaaggtactactataattcaactctgttcatatcatcagatctgtttgtcatctattgaatatgtagtttaatcatatttagatctttgaatcaattgtttgaatctgaagtcgttattgttttatatgtactttggtttacttgtagatttgagctgattattgtttttgttatgattagatttacttgttaagtttttcgtttgagtttgaaaagattacaaataattatggataaggttttttttttttttgtgtgtgaaaatcttgtggttttatagatgcatgttagttttattgcaatgtaattgtttttttttttttttttatgttactctgcttgtattaaattgtttgtaatattagagctggttatatggattgtataggttcagttgacttgtggttttaagatgtctgagatttggtttgagtttgcaagactagaaaatattatggataacgatttcatattgctttgtaattgcttttgagtgaaaattgatgttgtttctcattttgtagttatcagttctagttttaactttggcgttacattttgaagatgttctactctgcatctttttaagtcaatacgcattctttttgagagggaaacaagccagatgagtttttgctaagaaatgcatccacaaaatgattgtctatatgttgtacacttcattttctgtcttagtgtattttcacttatgccgatttcgtatattttctttttgtaatttcattaaagtctcatatcatatatgatagtagctatctatctatttggataaagctggcttgtagtgcgtagttcaggaacgagagctaaataatttcctgttgagttggccttatttttatttatattgtaggtttgggataatacttgctggaattccctttttcc

SEQ ID NO: 106600 - DNA, 899 bp, Aquilegia coerulea
  Intron number 3 from transcript AcoGoldSmith_v1.026498m (l ocus AcoGoldSmith_v1.026498m.g) derived from phytozome v7. 0 (chr-ID scaffold_17; pos 515084 to 515982 reverse strand )
ggaagaagcaaattatgtaagttccattgaagactcttttctttgtgttgcttccctaatcctttgaaatgagttttagtgattatgtatagaacatagatattttaaaatcaaaacaaaagtaatctagtgattgcatttagtctaaacataaacttcgcttagatgcattacttgcatttcattccttgtacactttgttgttttctaaagcttatgatttcacattcatatggatacatggtgaatatattgatcatcttccatgattattgctttcttaagcaggaaccttcaagcatcactgccacaatgatgctagcatttctcttatgttatgttggataataatccatgctaagagtgtagggtaaatatgagacacaagtttggccattactacaattgaggttcttagataagtcttccttgtgaaggattttgtctgaagaccttagcttttctgggagaaacttaaaaatcagatacacagagtttccagggacattattctttttttcattcatgttgcccgaaccagttcttgaagatagaagggaatgaggaggaggaggaggaagaggaggagagaggggggaggacactacactaactagaagctaatagacacaccagccccttcttgttttgatatcataatcatgaacttagtattttcatatctaacctatattgggtgaagtgtgagaaagtagtgatacccgacttatcgcataatcatgtgaaaaacgtagtagtttgctcctccttttttatcagaatatttatgtgtaatttggtttttgtgacgaaatagatatcttcttgcattagctgcttcatttatcaggtgttagattgggtatgttaatgacatatttatgtaccacaaaacagtt

SEQ ID NO: 106601 - DNA, 252 bp, Aquilegia coerulea
  Intron number 1 from transcript AcoGoldSmith_v1.026498m (l ocus AcoGoldSmith_v1.026498m.g) derived from phytozome v7. 0 (chr-ID scaffold_17; pos 516225 to 516476 reverse strand )
atcttgtttttcctcaaccctttgttggacgtaaggttaattcttttatcttgtattcaaattactaaaatcaaagatacataatattaaaattttgcattaattgatgtgtttcttctggaaaaattgttggaaaagaaaagtttttaagtttaaataaacatttcatctttgatttttttttcgtctaaatattctgtttggactttatgagcaggcaatcttagaattctttaagaaattcactgattc

SEQ ID NO: 106602 - DNA, 939 bp, Aquilegia coerulea
  Intron number 1 from transcript AcoGoldSmith_v1.000054m (l ocus AcoGoldSmith_v1.000054m.g) derived from phytozome v7. 0 (chr-ID scaffold_14; pos 5564438 to 5565376 reverse stra nd)
ttgctagaatacgtaagttaattttttcttcttagctcagaacacacttcattgtattttttagtttctgtattagtagttttgattgctgaatttgcttttaagactagctaagtgagtatttaaagtggaaccactaaattttgaactcaagtaatcacttgaacaaaggagtgtaagaaggtagctgtgttgaattagcatacacaatattaccctaataggttaggatacttggtatgtgaaagaaatcctgactcgagtgaatactcaatagcatttttgagtttgaaattcgaacatatcctattttcggaaggttgtctggtgaggggaaggtttttatattgtttttgtaggttttatatctccctgtaattgttggttatctcaacatacattcatgatttttttttgtatgtccctattttttccctagatgcaacaacttcatatcagatattggataatatgcaaaccgtttcgtgagcttttatgaaacttgctaatatctgatggctggttttaatattttataatatttcagaatttaatcgttgtttatttttgttggtaaatggtaattactatctgctaatgtttcttgagatttaaagacatgctttgaatacaaaggtttattatacataaaaaacaaatttacgtgttaatatcaaatcagatgtcgctgatacagatataatattcaattctgaatcttataaaactttgctggttacagtaacgatagttaaggtggatacaattaagaaccttgcttgacatattcgataacctagcaccaaactgcctgcaaatactgtatagatatttgtgtggatttgatctcatctaccagcgttattctttttctcgttcatttctatatatatatatatatatatatatatattaactgagatcttttatacttgtagt

SEQ ID NO: 106603 - DNA, 260 bp, Aquilegia coerulea
  Intron number 1 from transcript AcoGoldSmith_v1.002556m (l ocus AcoGoldSmith_v1.002556m.g) derived from phytozome v7. 0 (chr-ID scaffold_23; pos 1629942 to 1630201 reverse stra nd)
tttctggtacaattactaaatactaattcaatctttattcttgatctttactttttctatttgtttttggttgagttttttttttggcttttgcagtgttggattatggaagtcagactaaggaagaaagctacatttatgtaaaaattttcttttttggattaatcaactttttgattcaagtttatgtttaaaatgaagtgcaattagtaatgtgctcaattaatcagttgattctgtttgctacttatttagacttt

SEQ ID NO: 106604 - DNA, 973 bp, Aquilegia coerulea
  Intron number 1 from transcript AcoGoldSmith_v1.019167m (l ocus AcoGoldSmith_v1.019167m.g) derived from phytozome v7. 0 (chr-ID scaffold_14; pos 242753 to 243725)
ggacttgcaaggtacgtaggtgcctagccgccacaaacatatatagttggtcttaatttgttctccagtttttctagctagctagtctttcatttgtataatgcaaaaccacctaattaaccaataacagtgtattcataagccaaaaaggattacaagcctgatcagcatgtatagtaatgtctatacaccatcaggtaatacaaccatgatttacagaaactcagacacacaaccctcacaaagcacctgactgcaacagcattttgtcttaacgcgattattagtttgcaccctctctcgtcgaaatttaatatgtatttcttttacagttatactcctatttttatctaatactgatttttagtttgtgtacttggtaagagaaatcatatcttgatttacattctgtacacgaggaattgggcgtgagaagctagataatcgctaactaaaatggacaataatacataatgaacagatttagctgacgatactattttttctgtttgaagaattaattgataatattattataaaatatactgtaattcttaacattgaggctaattgcttggatctatatccttaatttctaactagcagttcagaaattattatacctcatagcattagaagagaggaaagctaaatagtgatttttagtttctagtcctctagttctttcaaacatcaaacattcatactagcaaggatgccatatttatgctcacactgctctgcttaatacggaatctgataaacacggaaaaattaggcagaaattaactgaaaccacctatatatactattcagcatttgttaagacaattaagatggaatgatatcaaaatttatcagctgctgatacttaatttcgactgtttatatctatattggtatgcatgcagtgagtcgactgttgagtatttatataaatgtgcgtctttcttgtttcttatttcacagagag

SEQ ID NO: 106605 - DNA, 537 bp, Aquilegia coerulea
  Intron number 4 from transcript AcoGoldSmith_v1.018472m (l ocus AcoGoldSmith_v1.018472m.g) derived from phytozome v7. 0 (chr-ID scaffold_17; pos 1155261 to 1155797)
aaggtaatgaatcttctttacatatatctaaatatagattaatgaaatgcaatgggcatggcatctggtccttgataactagaaaagtttggtttgattgctagagcttctgcagttcatttatatatttaaaaccttttcttttcattctttctttctttcttctgctgggggttgtcgggagtggggggaataatacctgcatatgtcagctcactctatcatgctaagttgctaacaagtgagatggattagtattacttggataatggttacaaggtacaaaggctatcgcatttaagttccataaagtctttcacaaaactttttattcttttggaagctcactacaagcctcataaaaagagacttttactgatgcttcaatatgtcaaagagatatatattgccctgttgatatatggactcgttgatacacgtgtgttaagttttgttgttgtcaagtgcataaatcgatgattctcttcatctatttctgcttgtgtttattttcagagcaagaagctgagaagcaag

SEQ ID NO: 106606 - DNA, 868 bp, Aquilegia coerulea
  Intron number 1 from transcript AcoGoldSmith_v1.025897m (l ocus AcoGoldSmith_v1.025897m.g) derived from phytozome v7. 0 (chr-ID scaffold_53; pos 347745 to 348612)
ggattacgtatgtgtttcttctatattcagttttttgcgttttctgttcttatgttcttgtcctgttttattaaagtaattatttatttattttacttgtttaatctcggttgaaaagaaacttgaagatgttattaaaccttagaacagggaaaaggaaccaaataatgctaaactccgttaattaattttttcttaaagtgtatggtttcaatccagccatactacctatatgatagtagatgacattaaactttaaagagtgttacctcttagagtgagtgcttatgtgccactcccacaatgctatcaattatttcattgttccctttgcgatccagatcatgttagttacgtgaaaaaaaataaaaaataaaaaaaatcaaatcaccaggttcaaaatggcaaatcttttgcatctcttacagctatccaaaatggcatttctcaaattagatagggtggcattagctggaaatatgaaagttatccttttcggctttctattagcttcccccgcaattggatatccatctcgcaatgcagtatcactgtctgtttctttccatgaccaacaatttgaggctatcagttcccttgcacatggaagttcattatgaatgttgacattttagtagacaaaaattcatgcccccaatatatagcgctgagtcaaatttccatatattgttcttttgctttcttcaacctggggcagttaagtttaggctattaagttgatgtattttgttccttagtacataattcacctctcataattcagattggagtgtaattggaaatattggcacttattcacattcatggtacagaaatcctagttgtaattgcagccactctaggactg

SEQ ID NO: 106607 - DNA, 689 bp, Aquilegia coerulea
  Intron number 1 from transcript AcoGoldSmith_v1.005914m (l ocus AcoGoldSmith_v1.005914m.g) derived from phytozome v7. 0 (chr-ID scaffold_14; pos 4061596 to 4062284)
tgtttccaaggaagacaagaacaagaaagaattgggtaagtctctctcgctctcttcagtatctttgttaaatatacacaatagtaatgaacttgcttgtttatcttatacattttgatgagaatttgaagcttgagtgtttgatatttattagatattgaatgcatttgaaagaatttagttgtaatttcactaggttctttgatgagaaaaaagaataactaaacagtaaacaggtttctgtttatatttcacatatagcaacctcaattagtagtgattaaccttttcactttgaaacataattttgaatgtacaagagaaatgaagattttctatgttagttaactcgcaaattgccattgcatttaaaaacaaaacacacattcaagccaacatgacccggactgctttaacagttaccatatattgtagttattttctaggatggaaaatgtgtaaggtactagagctttcttcgttgttcttctgttcacttgtataagtcattttaaccagaatgtaataagctctcttttttaaagtaatttatcaatgctaatatcgatgaagaatgtgttcataagaatcacaagagctaagagttacataattcttataatggaagaggaacctaatatctttgttatctgggctttcagctttattttcgttgaaaaagaagattg

SEQ ID NO: 106608 - DNA, 460 bp, Aquilegia coerulea
  Intron number 2 from transcript AcoGoldSmith_v1.012291m (l ocus AcoGoldSmith_v1.012291m.g) derived from phytozome v7. 0 (chr-ID scaffold_45; pos 943300 to 943759 reverse strand )
aaaaattcaaaggcaagtatcagtttgtcctagattttgcatttaaacttggtttaaattacgatacatgattggaatgaattatatgttttgtatactggtaagacagggttgtttgagataaaataaataaataaagaaactgtatagagtgtaaagaataataagaattgaagtgaatctaaatatctaatgttggtgcacttgaccttggtacttaactaactgggagtttaattttataaagaaaagttgtcataaaatgagctcacatatttcctcttcattgttggtatcaatcattttgatcgtttgtgctctcttcatattggtatcaactgcaatacttaatggtgtatttgggaaactcttgacactttacttacaatttctaacaacattgtttgaaatattttgattttcagatttctatatataatataagtgacctgccggctga

SEQ ID NO: 106609 - DNA, 364 bp, Aquilegia coerulea
  Intron number 5 from transcript AcoGoldSmith_v1.006143m (l ocus AcoGoldSmith_v1.006151m.g) derived from phytozome v7. 0 (chr-ID scaffold_65; pos 1210493 to 1210856)
gttgacaagtagcctaagtttaaaggttagaaaattttagccataattgttgtattgacaagtagcctaactttatcagccagaatgttttcaaggttctgctatattttcttatctgaaatgatgtgtttgttgctcgactatgatgttgtttgtcgcttatacatgggactcatcaatcaacataagtcaaagattctaaacctttttattcactaaaaccaaaataataatattgttagagtacatattcatatggtctgtcactttgcactcttagattttccagcttgcagaagtctgccagtcttgcagtaaagctataattctaatgttgtgttcaatgtccattttcagcctgaac

SEQ ID NO: 106610 - DNA, 853 bp, Aquilegia coerulea
  Intron number 1 from transcript AcoGoldSmith_v1.014910m (l ocus AcoGoldSmith_v1.014910m.g) derived from phytozome v7. 0 (chr-ID scaffold_42; pos 1399276 to 1400128)
aaggagtgtgcagatcactttaaggaagttctgaggtataacaatttaaaaggggtaggggtcccctcaacctcgcttgccaaccaaaaaaaaaaaaaaaaaaaatttcccatctctgatgcacttttctctctcagcatagttcataaggtgaaataatattattctggaattggagaacagatggctgagtattcaccaaattaactgtcaatctgcaattgcctaaactttgaatatttctacttccaagattacaaagatttgagtttcattgcatttggtactgctgaagcttataagctacttcagagtatgtgacatttgctgcaatcaaaccagtccatcttattttggatatgtatgaatttgcagtattgagagtctgtctctaaaatgctgctgattgctttcaatgattgcagatttatatttattagcattgtagttacactcaagcaaaaatactttcatttaagcatatgcaatctactacattatataggtgtgaaatgttgctgatgctgtcatactgtataagactgctcaacagaaatcatgtacttatgtactttagcagcagaagatatccaagttttgtgtctgggagctggtaaaattaggtctctctgataagctctcgaagacccacatgcatttatgttgattgcaacgttatggtgctcagattaggttttgtcttgactgaacaaagtacagcatagaataaaaacacaagtagcagctgttagtgccatgttaaagcttatttaacaactaatccaactcttcgtgtaaatgattttcgtgtttaacagtgcaaatcctgtacaagctggatcgcaagctgagt

SEQ ID NO: 106611 - DNA, 242 bp, Aquilegia coerulea
  Intron number 1 from transcript AcoGoldSmith_v1.000670m (l ocus AcoGoldSmith_v1.000670m.g) derived from phytozome v7. 0 (chr-ID scaffold_17; pos 572848 to 573089)
tgaagacaacaagaatccttcttctgataaggtagagtttttatttgccatgattgattacatttgtgtcaatttgagaagaaagttactagttgaatttttcgaggagttcacatatgaaaaaacaatacaattttgatattgtcaagattaaatgattaagtatatttgaaatgctatcttgatttatattttggttttttctaggttgaagttgatcctgggaaaccttcttcattgac

SEQ ID NO: 106612 - DNA, 748 bp, Aquilegia coerulea
  Intron number 1 from transcript AcoGoldSmith_v1.004799m (l ocus AcoGoldSmith_v1.004799m.g) derived from phytozome v7. 0 (chr-ID scaffold_17; pos 3532673 to 3533420)
tggatctagcttgtgctgctgttgctttgactcgggtatgtattggatttttctgatttacgctgtttcattcatctacatacatacttgttgcctatttgggggacttttgttttcaatttcaatttgatttgttttcctttagattcagtttcttctattcattgcttgaacattgcttgaaatgtttgatttttctgctaatgtcgttagtttcaacctatgtgtgacttgtgttagcatgcaaaatctgaatattcaattacatgtggagatttttgtctagaagataattaaacatggatttcaataatccttgctccctagattttggagcctacaccaatctgatagtttttagtaaatatttgtttttggcgcgtgggtggttcctgtagatacatattccactctctttctaaaagggaagtgtctgtagaagttcagtgagcaaagggagagtttgtggagagaagtcgagattcccactttcaaacataccgatgatttccttagttcatatagattgtatagaagaatgattcaccacaaattttagtttctatattgttaaaatatgaacctaattgaaggtttatacacgttaacttctaaatttcaatgttttttttttcacaaatgtttgttatgtacacatgggtctaagattgtgtgaatgaaaagctttctgatattgaatgtcatgtcaccaggcaacttctctaaaacctcaagattctgctccttt

SEQ ID NO: 106613 - DNA, 571 bp, Aquilegia coerulea
  Intron number 1 from transcript AcoGoldSmith_v1.009532m (l ocus AcoGoldSmith_v1.009532m.g) derived from phytozome v7. 0 (chr-ID scaffold_14; pos 1268466 to 1269036 reverse stra nd)
ctatcacaacttcgccgatcatcgtgtttttcttggtaattagattctctttcttcttttgctcacacacacattcatctcaagttttcattcatagttgatgaagttaggttttcgatttcattcatagttttatttggtgaaattagtaatattgctagggcttcaatttgaaacaaaagttttctgaaacgaaattagggtttttgaaattttagttggagagagagaaagtctttgcatagagtaaatagctttgtttaatttttacttaggttctattcctttgtttttacttaaaagttatactgtgaatatatagaatcgaattagttgtagatgattgattaccttgttaaggctttttcacctttgtgaataatgatcaaagaaagttgattttcttttggagttttgtttttccctttgtgtgattcacctttgttaagtctttagtctttaaatgtgtgatgactttattataatcggactacgatgtcttttgacttttgaatgattgacattcttatgtgacttcgggttattgatttttgtttcagggatacctaat

SEQ ID NO: 106614 - DNA, 506 bp, Aquilegia coerulea
  Intron number 1 from transcript AcoGoldSmith_v1.017525m (l ocus AcoGoldSmith_v1.017525m.g) derived from phytozome v7. 0 (chr-ID scaffold_38; pos 1710106 to 1710611 reverse stra nd)
gtggccaaagttggaggtaggatgtctacaattacttgcggttgtgcatcaaattatactatgaacacttaaatgtccttcaatggaagctgaattcatattgagtgtatccaacttttgggtagggttgcatcatattttgtgtttcacaagcctataaggtcaagcttgtgctctgatgtagtatttttgttttgaattattagtttccttgttgtagttgcagaaatactatcaaaaggacaatctgcaaaattgtactatttaattaccacagaaagtgtggtgccttgactgattgatgataaattgtacaatctgcaaaattggactatttctaaacattatttaaaaataattgaagtgtttgacgagtactaggggttggtgtattgattgatcaacctggttacaagaaaaaataatgaatttcagaaattgatcttcatgttcttcaatgttttcttgcagggtgagttctttgagagttttaccggactctctct

SEQ ID NO: 106615 - DNA, 947 bp, Aquilegia coerulea
  Intron number 1 from transcript AcoGoldSmith_v1.008785m (l ocus AcoGoldSmith_v1.008785m.g) derived from phytozome v7. 0 (chr-ID scaffold_20; pos 1845279 to 1846225)
tgtggaagagaggggatttcaaattgtctactaaggtaacaacaattttacagttttgttctttgtttttctttatgtgatttgaatcttgtatgtatatatgtttatatcattatggtggttggatgagcgaaagcagcggtataggttgacttttggtgataatctcatcaactagtttgtataaggggatttttttttttctttgatgatcatgtctacttcattcataaatgtcatctaactaagggaaaactagctgaatctgacaagtcaaagggataagattgttttaatttgaacagtggcatgattacctgggattttgtttgagttcttctgcttcattacctgagattttgtttgatgtttttaagaagttatgagatctattatcatttgactttggctatattagaagaagtggagaacagattgttcgtgttaaagttatctttgaagtgcacttccattagttaaaacagtaggaaatttcaggtgaaagagatgtccttcaatccttcatgatgaggaaatcattgcaaaaaatgatcccttatacgcttttaaactgtagaactatgaaagtacaaaggggtagagcttttcttgattcatgaatttgtatggcactctatagtatattcgtatctagcttctgataatagatagttataatatgtgtatttctttgatatttatacttcaccatggaaactgcaatgatataagtatcaagctacatctctcttgtacacgttatcacatgacttctccttatgaatatatgttagacatcatgttctgtgtcctaaaacaaaaaatttatccagctttacattggaaagacaaagtggtatgacaagtttcttcaagcaaactcactttattttgtcttttacttcattgtagttcactggcaaatctgttggcattattggattagg

SEQ ID NO: 106616 - DNA, 837 bp, Aquilegia coerulea
  Intron number 1 from transcript AcoGoldSmith_v1.026965m (l ocus AcoGoldSmith_v1.026965m.g) derived from phytozome v7. 0 (chr-ID scaffold_4; pos 256009 to 256845 reverse strand)
agctgttgttgtttcaaatgccgcagtggcatatgcatgtactttcaaacctctagatagcaactgtaacaattgctctatgtgatcgagctttttaccaatcatagtacatgcactacatactaccattacaagactaaaggttgggctagcttggacataccaatatcatccactatgtaaccagactacttgtacagtatttattccatctctcatggaattaaatttacaactagaattggtacttggcagtgtcaagattttaattaaacatcaaaatataggagtatttgttgtgatcaatcatcaattatataccaactagaattggtacaattggcagtgtcaagatttaagattttagaaaagatggacaatagatcaatagtactatgaatttcacaattagaaaagtgcaagataaatattccaattaaactttttgatatataattttgatagcttttatgggaaaagatacattaataaacctaatttgattatcacagtaaaactgtaagatttattatttaattaaagaaactgtaagatttatgaaatctttaaattatctcttgaagaccattttaattcattataaaagaaatatccctagtttcacaacccctcatcactaccacatagctagctagtagaagaacacatgaatatctctatcgatacaattctagtagttctacttgttgtattcaccacacaatgctcttctacctcaggtattttcatctaactattattattattattattttattttttttaagtcttgaatgtacctaaatattgttatatttgcaaattttcatcaagaac

SEQ ID NO: 106617 - DNA, 847 bp, Aquilegia coerulea
  Intron number 2 from transcript AcoGoldSmith_v1.001303m (l ocus AcoGoldSmith_v1.001303m.g) derived from phytozome v7. 0 (chr-ID scaffold_17; pos 4069555 to 4070401)
tatcttctggtccagatcgacctcctattatcgaggtaaattaagtttaatttttacaagatcatttaacatgatggaaaatttgtagttttacgtacactatcaaagatttaaaggtaagttctaaattaaggaatgctggtgaatttaagtttagccaacaaaagaagcataggggtccctagcttcaacctcgcttgccaatagtaaaaaagtaccacaataaaatttctcctactatcaaattaatttggcgcaaaagtaaatcattaaacattttcatttcagcacatagtaggacaaggaaaactgtagctgagaagaactcaagaaagtaacaacaacaataaaaatcagattcttatacggcattttgtagccatgtggtgttttgatttttgaacttttcttcgggcgcaattaactcaggctgagcccaattacgtcccaacactgtactgacatgggtctcacataataaccactgggcccaagctggggcattaccagcatttattatagtgcttgatagggcggtgggaaatacttttgaaattagttaatgttttttatattattgtcaagcgaagttgtgggaccctaccctttaaactacgaggaaactttttatcaaacaataagctactatatatgagtttcgaacccacaacctctccactttgtgggagggatgcaatcattgagccattggctcgcaatcaaatagacttcacgacaagcgtgttgattagtatattacgtgtattgacatatttattttggttttagggaaattagatttgctggacttgctgaccctgaattcgattatggcaggtcatacaaa

SEQ ID NO: 106618 - DNA, 758 bp, Aquilegia coerulea
  Intron number 1 from transcript AcoGoldSmith_v1.007632m (l ocus AcoGoldSmith_v1.007632m.g) derived from phytozome v7. 0 (chr-ID scaffold_17; pos 3093933 to 3094690 reverse stra nd)
agtgtcttattcattctcctcaactcattacaagagtaagtttctttctataagtctaactctaacccaactttttatcatttttccagtttggctttctttctctatggatttcttttgtgcgtttttcagttatttaaaattttttgattaattgtttacgaataaaaaatttggaattttcttgtaataattttttttaagtagggaataaaaatggggcgggtttgatccattaacatttaacagatttgtgaattgtacataaactttgcccgatcagccgacccatatcctggcatgctctctttcgttccggcctgtgtgttacaaaggaaaaaattgtatcaactttgaatttgggtgtggtgtgccttggacgaagaacatttggctgtttctatcagaagattttttgaaaaagaatgtagaaacttttttttttttttgattagcaagcgggattcagggacccctacccctttaaattacgtgaggaaacttatatcaaacaatcagctgctgacgtgtttcaaacccaggaccctctctactttgtgagagggccatggatgcaaccgttgagccacaagctcatgtgcaaaatgtagcaacttggaattgtcttggtgttgttttagtaaatagtatttcgcaacttgaatatgccatggtaacagcacatttgtagtgattcttgtttcttacctcttgattaaacaggtccatctagattatctggaagctggtgcaagtat

SEQ ID NO: 106619 - DNA, 777 bp, Aquilegia coerulea
  Intron number 1 from transcript AcoGoldSmith_v1.007052m (l ocus AcoGoldSmith_v1.007052m.g) derived from phytozome v7. 0 (chr-ID scaffold_4; pos 9230262 to 9231038 reverse stran d)
taatactctcgtcaggtgttattttgtacaacaaggtatcatatctctataatttactaaactaagatttgggataacaactagttgttaggtttacttatcttgtatgtaatatatcgctcttaattgcagtttattactatgatattgagaaaccttctaaacaatgtcatctgtacaatgtagcatcttttgtttttcttaatccattaggtttatcaaatgaatactgtggtcatcaaacatttcctgctttcttgctttgcatttattcagtttatgacaaacgcctacttttgaatgtgatgaccttagaaagatctagagatatgctacccatttaggataattctgaaaatgcaatgtgaaatagatacttccagtgccctctagaaaagattgtggatttcataaacttttttcatgggaaagaattctgagttcttaccttcaacagtaattatgtaatcaactgctcattaattctagtaaattatgtaaatcaaaatatcttccaactttccaggagattttcaattatattagcgtgtcttccacttggtcataatcttacctgctttgtcgtacacaattttatttgcagtttatagtttatttctttatattatgattgaggcttttttcccccttttttacaatttgtatgtaatgcttctccttttctcattccttctattttagcaaatgattaataagtaattctatttttcttcccttgcagtgggttttgtcaccaaaatacttcaacttttcatt

SEQ ID NO: 106620 - DNA, 772 bp, Aquilegia coerulea
  Intron number 1 from transcript AcoGoldSmith_v1.002244m (l ocus AcoGoldSmith_v1.002244m.g) derived from phytozome v7. 0 (chr-ID scaffold_14; pos 2372192 to 2372963 reverse stra nd)
gaaagtggtttacttctcaaaataaggtataacttcatagatctttcattcttgctaataccctttttttaattgttcttcatttttgtgtttttttaaggatttttgctatttttttttttttttttttttacagtgtgttttgagttttgggggttttgcagttttgggtttttctgagattgatctttctgagttttgctaaaacccttcctcctctattatatttgtgatttctgaggtttttacatcctggggtttttgagttttgggttgaaaggcctgtctttctttggttgatgaatggggatcggaagaactgcagaagtccctcatctctcatccctaacacaaacaccttcacacacagatctgctgctgctttgcccaccaccaatttgatctgattgcatgcattatgatatattgtgttgcattgtgctatcagagaaaaaccaccatgtaattgttaaggttattgcttctctttaaaagttttgctagattatttttttagtattagtgacagtttattacagaatcaagtttgctttcttttctcttttaaatcttattttgatgtgcaagtagtagttgtaatgtgcatgtttggaagaagtgtttgcttttgttttcatcatacaaattaatcattagaatgtcccttgcatgattcagaacagctgaagttttgaatcgtagttaatttttaatcaatctatgtgggtgtttttcaggaaacagaagttctcgcacaaaacgtagggagttt

SEQ ID NO: 106621 - DNA, 415 bp, Aquilegia coerulea
  Intron number 2 from transcript AcoGoldSmith_v1.010646m (l ocus AcoGoldSmith_v1.010646m.g) derived from phytozome v7. 0 (chr-ID scaffold_4; pos 4875948 to 4876362)
ggtatgccttactcctttatttaattactcaacagaaatagcatgttcctctgatattgaagtagcaaaatatttcataaaagcattttttctttctacttcgtggtctggagtagcagagatatggaaaccactggagatgggagttgtgcctccaatttttgtgcatgttggtttcttctcttcttcttcttcttcttcttcttcttcttctttaatgtctcatctttcaataacaaatcccttgatcaatatgaattacacaaacacaaaaccaaagcaagtctgttctctgtcctgcatatctagtctaggatgaggtttctcctattagatagtcttagttgtggtcaattaaaatgctttatcttcctgtatatacaaggctcagtttgactgttctggtgtgatagac

SEQ ID NO: 106622 - DNA, 1013 bp, Aquilegia coerulea
  Intron number 1 from transcript AcoGoldSmith_v1.003436m (l ocus AcoGoldSmith_v1.003425m.g) derived from phytozome v7. 0 (chr-ID scaffold_5; pos 555996 to 557008 reverse strand)
gcagaaccaaagatcaaatacgatcgacagcttaggtagtagtacttcttaattaacctttttttttttttttctcactttatttacttttttagtatttcttttctgggatttaaaccattggtttggttacatttgaattaacaacataattgttggatttattagttttaattttacatatttgtattgcgattcttctttaaaactgaaagaatataatggaatattgtgattcttgttgtaaactaaactaatatagttcgtctgtttcagtaatcattaatactggttgatagattagattagattagattgattgatgaatattgtaacaatgtctacatatctctattaacagcttaggtatgttatttaaatgttagactcattgattagtttagaagtgtttagccatttccgaactggggagtgagctactttagtgctctggatttatttcttggtgctggtggtaatgaccatatatctaagtgttctaaaaccttggccacttacgcctgttaacttgttgtcttattggttgggatgtatggtctgttggagatgttagtagaccttggctcttcaaagcctgccaatattcacataagtacataataacctagtttaggagagggaaaaaccaactttcacgaaacaagtacggaatagtaatctcacatgccggaggtaatcttgtctatcaggggatttttttttcttgtggagatgtggagtaaagttttgaagaagttttggatatttactctagtaatacatttagacacagatggttgttttttttttgttatgatttgtggattatctttgttgaagtgtctttttgattctcttaattgtaggttatgtcaacctactttttcctttattgatgaatttttattttcaccgagaatgggaaaaaaagaaaagaaaaaaaaggagaggaacataatggattacctgcaattgcaggatctggggagagcaaggacaggcagcccttgaga

SEQ ID NO: 106623 - DNA, 824 bp, Aquilegia coerulea
  Intron number 2 from transcript AcoGoldSmith_v1.013526m (l ocus AcoGoldSmith_v1.013526m.g) derived from phytozome v7. 0 (chr-ID scaffold_113; pos 50895 to 51718 reverse strand)
caaagaaactgatctatctttgtttctcaaaggaggtgagtgtttttttttttgatgtatatgaactccatttcattgtttctttttaatacaactttcacacaaattagcagctccatagtacaggatacaacctgtagcttttcatagttaccgattcccttggcaaggatgtcacagctgctaggatgagcagttgccccggtaagactgatgaacactgcttgactgccataggccagttggactccacacatccaaacatgaatgcaatcatatttgtcactttaatttcggtgaaacttgaattgagaaataaccaggagtgaaacaggatttaatgtcacagttagaaaaaaagcaaaaactaaaaccgcagcaggacctcctctgtcttcatgttgttttaacatgcaacagcttcccattctcacttcatttggttttcaaccgtaaaactaacgtctaaccatgttgtgaatcatgtttgttgtgttattgatgcacggttgttagacttttttgataaatataagtgagttcaattgttgtttaaattatttatacaggaggatcaagcaaaactttcattggagctatggtgggtggtcttgcctttcttttgtttgtggctgtcttcacattatggtttcaatttttgagaagaaagcctgcaaaggaaggtaacgattaatctcgttcttgaattaaagccattactttttgtgtcatttgcaatatcttcagttacataatacttgcttaatgaagaacaaatgcatttgacaggagacatattggtagcaacggagctaaggggccca

SEQ ID NO: 106624 - DNA, 713 bp, Aquilegia coerulea
  Intron number 3 from transcript AcoGoldSmith_v1.012636m (l ocus AcoGoldSmith_v1.012636m.g) derived from phytozome v7. 0 (chr-ID scaffold_94; pos 12510 to 13222)
tctctaacaccttgacttcaccagagtaccttgatgtacgcacaagacactcgacttcttgatgaacacacaagaagactcgaagccgaactatgaaaaaagcttacaccagagttacttgatgaacacacaaggatactcgatttcttgatgaacacacaaaaagactcgaagctaaatcaatataaacaataataggaagatgaattggggaaggatagaattacacaaagatcaattgaggaagaagaggatctttgtggaagagccaacaaacaaactagggttctatggaggctaggttcgaactcttgcctttcacataacaccaatgacctatttatagcctagggttaagaaagaaagcaatatgggccgaaaacaaaaaatccatacgacgacgtacgtatgccctaactaggtacgtacgtccctgaaccaaaagaagatctgttgaactcaaagtacgtacgtcctaactaggtacgtacgtcctaacacaaaggaaaacttctgtccaactgtacgtacgtacgtcctaactaggtacgtacgtcctggaataaacaacaacctgacagactatgaacaagagtaagaagacacgggacgacgctcacacatcaaggtacttcctaataatgacgtcaaggcgagataacctcagacactcctaacctagtcacaaaagtccttacaacacttcacagcat

SEQ ID NO: 106625 - DNA, 449 bp, Aquilegia coerulea
  Intron number 1 from transcript AcoGoldSmith_v1.024923m (l ocus AcoGoldSmith_v1.024923m.g) derived from phytozome v7. 0 (chr-ID scaffold_14; pos 5682451 to 5682899 reverse stra nd)
tcacttagtacgtaatactgcttcaacattatactgtatgtttagtttaatctagctgctaatcagctattgtgtttgattgatctgcatgttttcttttgttatgtgaaactctctgctaaaagaatttgctataacctgatcattaagtagaagtaaaacaatcgacttgtaattttgtcaaacgcatcccttgatcctaataatttgattggcaattcattgacaatatataaactgacagcatgaaaattcaagttttattcaagtgtgatcagaatactacttagagatagagaaattctacgctcatatttttttgcatgtatccagtgggagatttattacttgaagtgatttgtccagaacttcatgcatgcatccagtggaccaaatttttgcatgatttacattgtcaataattttttttttcttctcttccagataat

SEQ ID NO: 106626 - DNA, 931 bp, Aquilegia coerulea
  Intron number 1 from transcript AcoGoldSmith_v1.001689m (l ocus AcoGoldSmith_v1.001689m.g) derived from phytozome v7. 0 (chr-ID scaffold_14; pos 1241425 to 1242355)
ctcttttcttttccatcttttttttgaaatatcaggtaaaattacttctagaaaacaaaagaaaaaaaaaaaaaaaatacccatttcatattacttcttcttcttcattctctgcttcatctgacattccacatttttttagaattttttcttagtgtggtttaaatgctttatctctattagtttagtgattttttttctctctctgatctaaaagtgtaggttgaattgggtcctagtcaaaggtaattaatctgagtcagctttatttctctggttaattttaaataatattttatttgctgggtttcttcccatttttcatcgattttggggaaagtgagcttgtttgaaccttttgtatatgaagatttagttcaatatggaggttttatgaaatgggtatcatggtttttcagttgtatggtctttattctttcaaaaacatctcttctatttggaatttgttggtttggacttctggtgattaggtaggtatttcatgagatgggtattcatatattttcttgaagattttaaaacttgaatgaagtttatcaactgtttctagtattgggtatgtttgattagagtgaaacaacactattttatagtctatccattacttgttttttgttttatttttatttattgaaatgttttagcttttgggggggtttgaaaagttatatttttggtgacgtttggatggttttggggtggatttgaagcaaagctggggaaaatgaataatgaggagagtccccttttattgttgaagagttgaaaacccacttttagaacaaaaactagtttgtgttatggatgttttattctggttagcattgtttgattcgatttacgcttgacattagtgtataaacaaagtcatgttactaatctgtggacatttgttgggaatggtgtgcag

SEQ ID NO: 106627 - DNA, 983 bp, Aquilegia coerulea
  Intron number 2 from transcript AcoGoldSmith_v1.001689m (l ocus AcoGoldSmith_v1.001689m.g) derived from phytozome v7. 0 (chr-ID scaffold_14; pos 1242513 to 1243495)
atcaggtaggtgggctattcatatattagagttgtacttcaatcttttgtttggattctagattaaatattcttgttccatccagaatcttcatgatattgctatccttcttagcctgcctttctatcgaatttatttttaagatgattgtttaggacctcgtcagtttaccagaactatttgcgggctgcaaacatatgagagtgcagggatctgtaataccacaatgtgggacaatggagaagagtggtggcagaatcaatgagtaagatagattcctgggatttcaggagttcaaaatacatgtagtccaataataggagcctcatatgaatcataacataacaattataatagagagtagttgtagaatcaatgcatatgagattcttgtgattatattgggaaaaatgctctatttgatttacgtttaaaggattaaagttcatgtgctccaataatcaggcctcctggcgaaatgcagtaaggggtaaatagcttgtaatccccactaaaacatttcggataagttgttactgtttggaggagggggaaaaactcttagatgcagcatgtatgtggggatattggtgttaagcttggctgccattattctaggcttctagccctttcaaatgtctattaggctcaataaacacacaccaaaaggacaaagaggcggaggatgctacaggctacaactgtagtttaaaggtgtatatcctgcagagaagctacaacaacatacgtatcttattctaacccagtccccagccatgcatgagagtagcatttttttatatttggcattaatgttattatttttactatgagtcataatctcaagattcaggtctctatctatatcaattttccatgttagcatagattatcatttcgtttgatattgaaatagagcagttatggctgatctaattatgtaagtatgaagcaggagggctctaggggatctccaagtcata

SEQ ID NO: 106628 - DNA, 743 bp, Aquilegia coerulea
  Intron number 1 from transcript AcoGoldSmith_v1.009337m (l ocus AcoGoldSmith_v1.006875m.g) derived from phytozome v7. 0 (chr-ID scaffold_17; pos 3787946 to 3788688 reverse stra nd)
tagtgctctcatctggagttatattgtacaataaggtaaacatttcttcaatttattacttctttatgcattctttagtaatgtggagatttaaatttgatcaacactgttaatttatgttctagtttgaatgccgcgatcacattgactatagacatagatgttatttgatgaaagaagcctttatatttgttgtatactgaagaatgaggaacactatagatttgctttagattgtatcttatgttatgttttttttcagtaattttggcatattagtaataaatttattctctatttagaagttgtgagttggttgataatctttgttttttatggacatgattactaatggcaattgtgtatactgccttcccatttttgcgtgtccagtgaggctataactttgctgccccttacggctttagacaggtgttaatgatggcagacatagcctcttattattgtattgaagctatagtgtaagtgcaatcttatgtggaagcttgaggcgctcccattttcatattaacgccttgattgaacttgactcagtcatatatgcgtatctgttagtttttatagtatttttgcggaaaattggccttcagtacatagtttattgttgtgtctccttctattattctgtaatttttcatatctgagaagagcagattttgagcaatgtctattttctttttattgcagtgggttctatctccaaagtacttcaattttccatt

SEQ ID NO: 106629 - DNA, 909 bp, Aquilegia coerulea
  Intron number 1 from transcript AcoGoldSmith_v1.003952m (l ocus AcoGoldSmith_v1.003952m.g) derived from phytozome v7. 0 (chr-ID scaffold_14; pos 1367365 to 1368273)
catccgttcatcgttgttgagttttacgctccgtaacgtttctagtagttcttatttgtttacttgttatgtgattctattactttgaaattacttaattttgatcatttttgtttttaactcagatttgtatttgtgattgtttagatcttgaattttataaatttggattaatttgtacaaaaaggaattttgagtgaattgttttgtttgtgttatttaacattagttggatctatgatttataaattgaaattctggatgtaataatggtatacaactttgttaattttgatttgaatatttataagattgtttagagggattcgtgttgaaattttatttcaattgaaagagagtccatatatgtgatcatttgtatttatttcatactactgtaattgttatgtttcaatctgggatatgtaatcatgttcataatagagaactttgggttcaatttgtattgaaaacaagagtgtttttttcttagcttagagaggttaagaatgaaacagcactctgttttggactattttttctgacagtgatctgacatgtacacaaggtctgtgggacttgtgtgaataacttactagttacaaacacaataactatatgaaaatgtatgtttccaactttgtagttattgaatttgttgtataagttgttaatagactataatttggtataacttttcattttgatcttggcagtatttaagattgccacaataatttcttgcaatgcatgcacctttctgtaatgcacttctcaattgaaattcatatgtttacctgtaatgccatggattttggagtgcttatggttgaaacttgtgaaaacgatctactaactgcaatctcttggacaggtgtggacactgtaaaagccttgctcctgaggtaa

SEQ ID NO: 106630 - DNA, 750 bp, Aquilegia coerulea
  Intron number 1 from transcript AcoGoldSmith_v1.024876m (l ocus AcoGoldSmith_v1.024876m.g) derived from phytozome v7. 0 (chr-ID scaffold_237; pos 21314 to 22063 reverse strand)
gttcaaaatccattcaggtctggttttcatttcaattatgatcttcttttttttaagcaatttgattaaaaattgtaatcttaaccatttaatttgatccgaatttacaacaattaagaagatgatgaacatatgagattaattatttaaaattatgaattatacaatgcattgtattgttcttacatgagaacgagagcaatggctttggttccaagttcctaggtgcgaatagcttttttgtttttgttaatcgttggatgtagaagttagattaagagggaattttaggctcatttgtgagtatatgcaataatgtcctttactttccttagctatcaatgtgctttgtcataggcgagaaatggagaatcttcattatttaaaatcaaccagcttgttgatgtagtatgttgtttcaataacttctacaaattaaggcacatcaactttgaaatttctatgccaacttttggaagaaatgatctctttcacccctcctccgtattcattagagataaccaagaagttgaggtctaagctaaactaaactgaattcggatcacaattaatatctagatggatttatttcccttcctcattagggcataacatgacttaataacgggtagatcattttaattcattcatcttttctatgccttttcttcccccatcctttatcagttacacaatttctgtttttgatgtgcaggttgctttcaaaactggtgattttagacgacaagt

SEQ ID NO: 106631 - DNA, 642 bp, Aquilegia coerulea
  Intron number 1 from transcript AcoGoldSmith_v1.007578m (l ocus AcoGoldSmith_v1.007578m.g) derived from phytozome v7. 0 (chr-ID scaffold_41; pos 185167 to 185808 reverse strand )
gtggatttggtcctgtttttaaggtaagtttcatgtttttcttgactttgttgatatcattaaattagcaatgttctgcttctagtgtttctctgtctggtactactaatgtggtttttactttttactacttacttattgccgatcaatacccgtttaatcttccgttggattcaaataacgcaatctttctaatttcatgtcatgctccttaaacttaattcacaaaatcatatattcaggcatttcagaaatcctctgaacttttaagtgatttgaggccaaatgcccaattcctttgttcccccgacacttttagattacatatgctggaagcttatggacgtattgtgtccaattgtccacctatagtcacactaaaagttgttttgattttcaagttttacatgcatttaatcactcacaccagactgtgggcaagaaaatcattgagacaattataaccatctgtagtacctcattatactttcccgacttccctaaccagcaagacatgcctcaaatatatatacttttttgcctgagatcttcaatgcccatttacatatcatttgccacaattatgggtttgcattgactataattttcagtttgtaatgttcttatagggacttctaccaa

SEQ ID NO: 106632 - DNA, 596 bp, Aquilegia coerulea
  Intron number 1 from transcript AcoGoldSmith_v1.019317m (l ocus AcoGoldSmith_v1.019317m.g) derived from phytozome v7. 0 (chr-ID scaffold_17; pos 3206662 to 3207257)
gttacatagctgttgccccacaggttttttttttcagtcattaactcactagtcactccttaatattacactcagtcactcactaacatgcaggtttttttgtttagtaatgtatgctgatgatgaaacttcagtgaattgcccatccattggagcctatctctgacaacttctatatatggtttaattaagaagatccctgaagattaatactggttgcttgagtatatatataacaggaaggttgaaaagaagctagtacaacaagactttatcttaattgagcatcacttcgaatcagagcttcatgggacattaattttccattaattaaacatatcctcattcaagttatttttttgctaatcaagaaaactcaaaatcgtgttgttttttctgggtcatgttggtgacttccctaagtccaaaaaaaggacaggtttgacgtagattcatgatcgccctagaggaaatcccatattatcccttgaaattatgaacaaaaatgtgtacatcagttttctttattttctaacttcttgcaatgttgtatttttccagttatataccttgacgcccacaccaccttgctgggg

SEQ ID NO: 106633 - DNA, 493 bp, Aquilegia coerulea
  Intron number 2 from transcript AcoGoldSmith_v1.007464m (l ocus AcoGoldSmith_v1.007464m.g) derived from phytozome v7. 0 (chr-ID scaffold_17; pos 3300323 to 3300815 reverse stra nd)
gttgggaaggtaccatctcacttttaaatgtataatatgaaagtaaaaataacatcgtaagaaaataatatgacattcattggtttgtgttacttcctgatttgatttgatgcattccaggatagttaaattttttttaagagatgcagtgttgaaagcacataaaggattgtgaaagttgaatcactatatttttttaggtagatcataatgattgggaaaacacaaatgtatggctcagatgcaaaagaatattgttcctatattaagttctggaccttctcttgaggttttcggattgctgacatctttagttctttttttttaccctttaataattatcataacgatgtattgcttttcttcttaaactatttaactgctcttgtgatgtacttaaattccggttcttccacattgcttttcaattcaatatgcacgtaattctgaaattgtaggccttgaagcggttgcccagagacaaagttcagct

SEQ ID NO: 106634 - DNA, 612 bp, Aquilegia coerulea
  Intron number 1 from transcript AcoGoldSmith_v1.008171m (l ocus AcoGoldSmith_v1.008171m.g) derived from phytozome v7. 0 (chr-ID scaffold_20; pos 3325759 to 3326370)
tctgtcagcttaagtatactggtcgtggcaatcaggtgacttccccttatcaaaattttatttatttattttcttttattagtgttaaaattacagaggttttgattagctggtttgagggatttttgttaagcattttgtgtcggtgatttattcaaatacaaatctagagtttcttcttctagctaggtgtgcttaattgagatgccctatttttgggtaatgcagcagtgcacatttcaattacaatatgcatttctgtgtaatcgagcgctgacattaaacactttactctaaaatctcgaggtgatggagacaggcatagggggcacaccatgagtaaatatttacaccatgataaaaataaagtaaaatgtactgacactttggactgatgacatatgtataatataagatcgtgtaattaggatactttcatggaaatacaccatcttttatttgtggctttcttttcgtgtttcccagagaagtgtcaaatacacaatccttttggttatgatttatcagtatattgtttgtgttctacttatttatcggtaagtttggatttgtgcaggttgtggcgtttgccaccttttttagtcatcaggc

SEQ ID NO: 106635 - DNA, 721 bp, Aquilegia coerulea
  Intron number 2 from transcript AcoGoldSmith_v1.007751m (l ocus AcoGoldSmith_v1.007751m.g) derived from phytozome v7. 0 (chr-ID scaffold_76; pos 52706 to 53426)
tttctctaccactgcttctgcttcttatccttcttgtaaatgctcttttctcctctcttactcatatctctgaatctttaattttgcagctttacttgagtttctgttttattttcagaccaactactagtttttgttttcaatctatctgatatatttctgcttttagctcatcaatgtctgctttatctttaattgtttgcctaggtttctatggtttttaaataatttcttcctgtacttaatgattctttagagttcacttatattcttgttttcccaaaaaattctatggggtttttggattcaataatttatccttactttgattgattgaatataggtcatatcttcaattatctgatttggggttattttgattcttacatttgtccatctgctttctagattgatgtaaaaaatgtgtttcttttaccatggtccgattcgagcttttttgtttctttttttggttaatgtgtttgtttgatggaatatttttgggtttcaacttagtttattcaaatctttcaattgggattcatgggttcaatctcaacttaaggctgtaggaatttgatctcatttgctttaagtttctttgatgtgtttgcgcgcattcaataattaagttattgttttgttttgccatgatctaaagtgggtttgttttgttttttggttagtagtgggtaggggttcttgtttcaatttaaggctc

SEQ ID NO: 106636 - DNA, 690 bp, Aquilegia coerulea
  Intron number 1 from transcript AcoGoldSmith_v1.012408m (l ocus AcoGoldSmith_v1.012408m.g) derived from phytozome v7. 0 (chr-ID scaffold_17; pos 2724819 to 2725508)
tctgtgactctatcggttataggaggtaatttagtttttatggttaatttagggtttaattttaaattgtttatgaattatagctgaaatcagagtataattgttcatgtttatacaataatatccataattcacaagcattttagtatggttttcatcctgattacataatctggataaacattctattattgacaatttttttatgtaagaattaagatgcatgtactgtttattagcgaaatgccattcgcaagtttaattacatgcctactattggatagtgacctcattaatcaagatttgtttttagatttatcgtgtagatcaaaaccttaaataaacatatttcagcatttttcaactaagtgttcaagttgctaaatggcgacactttcttatttagcattttatgattgaaaaagaaaagaaaaaaacaagactaggactgagcccttgagcgtaaagtttcagttatcacaaaatgcctcaaacatcgagagcattatcataataccattaatctaatggtaaaaaaaatctatcaatgaggttttatttgttaagaaagacttcttaagtgtcctttttagctttctcgtgtttcctattaaatatatattttgaaatatttgagtggatattcgttcgtgtatagggagtattgacgacatcgacatatacaaaatc

SEQ ID NO: 106637 - DNA, 351 bp, Aquilegia coerulea
  Intron number 1 from transcript AcoGoldSmith_v1.011158m (l ocus AcoGoldSmith_v1.011158m.g) derived from phytozome v7. 0 (chr-ID scaffold_14; pos 3007756 to 3008106 reverse stra nd)
ttggcactgaagctcctcgtggtgaacttattgatgtaagttttttttattttcatttgaaatgtcaaatgtggttgtttatttcatgtgtaatttgaattttctcttgttcaagcttttcactttattgtattaaactgcaattaaaggaaatctaataaagggtttataaggttttctcgatttccttgatataaggaatgaaatatgagtatggaatgtgtcaatttttatttctttagaattgaaagagtacgtagactatgctttgttaaagtacagaagaaacatgattaattttctttgtaaaatataggttcattatacagcaaggtttgctgacgggacagt

SEQ ID NO: 106638 - DNA, 1039 bp, Aquilegia coerulea
  Intron number 2 from transcript AcoGoldSmith_v1.006282m (l ocus AcoGoldSmith_v1.006282m.g) derived from phytozome v7. 0 (chr-ID scaffold_4; pos 364725 to 365763)
ctgctgaaaggaaaggtagaattaaagctcaacaggtatatacttattcccgcatttttttttattcatttatatttaaagtgaaactgtgaatgaagtcttacaacttacttagtaaggtgccttggaattttccatgtgaaagccgtaggttaaaataaattagattatctgctattgagttccaaaaggagtaaaagaatttaatggataagttttaccttttgactcttaaataatcttcatctaactataattagctatttcatggttcttagtttcttacaaaataaaattatttcagtttaaaagagatgtttcggtaaacttctgttgattatcagctaataagcatgttttatcccctttttttgtgaaaattttggtgtcatttcctttcttgctcagacctgattcttggtgctatgcgtggtgacagaatttttttcgttgtggcagttaaggattttctcttctacgataatagtctttaaacccagagtgcggtatctgttacattggatatttggttgaaaaacaatagcagacaatttgagggtgtctcatgaattagaataggtgattatttctgtaaaaaattcttcacttgttgatagaatctccacattaccagtagggaaaaataatattataaccatttgatccatgtgcttaacacaattcctgagagcaaatagtagatgcaatcctcggcaaatataagcacaaatataaatgcagaaaaggctaaaatattaaatactttagaaactatattttttttttcaagttggtcatgtttcaacatagaatgaaagacacattgtataaatcaaattttactgttcttgtgtgtttatatgaatattaatacatatactatggaatgcccatgctaaacaccagctttgaggttgtatcgtacaatgcaaatatgcaagatgtatttttccaataaagtttttatataatataataacaaaaaaatcatctgatttaaacaggctgcaagaaaagccttgacacaaaataacactga

SEQ ID NO: 106639 - DNA, 149 bp, Aquilegia coerulea
  Intron number 1 from transcript AcoGoldSmith_v1.009183m (l ocus AcoGoldSmith_v1.009183m.g) derived from phytozome v7. 0 (chr-ID scaffold_14; pos 2180402 to 2180550)
tccacgtcacttcgtaatctcttcattcttgttatttcattttctctctcctagggtttagggtttattcataataatctgttaatctaattcttaattaaatgtgtgtttttgttttttgaattattatgtagggataactcaaagtt

SEQ ID NO: 106640 - DNA, 876 bp, Aquilegia coerulea
  Intron number 1 from transcript AcoGoldSmith_v1.007931m (l ocus AcoGoldSmith_v1.007931m.g) derived from phytozome v7. 0 (chr-ID scaffold_41; pos 1068618 to 1069493)
ctttctactggtgttcgagctgcatcagattataggtacatacttcatcttgctttcaagtctatgattcagattcactatttattttgtttaattgaagtattggttggaaacttgaaattggggaaaactttcaactcgagatcaattaggtcataaagtgtgattacatgttctggtgatgaatttatttgataatgatgatgattctacttggatttatacaaaagttttgttctggtgagcatttaggagagataataaatgggataaagttcaaagagggagtgaaatggaattgagagaacttaagacagacacatgtttctatctcaacatttctatgttctgttgttcattgtgactacactccagagtaaagtcgcatgctttaggaaaggcaaattgaactgggcatttcgaaaaacaatttttttttcatgttgatgtgaataaaacaaccaatacattttattaaggagtgtatattataatacgaaaccagtggttttgctgaaatatattcgattctatctattttgggaatttcatgaaatctcaccatttttattccaaatgctgaaagttggtgtcctcagccaaacattagaaatagcaacatgaatataaaccacggttgacttcagtttacaagatgggtggctggcaattggtttgaaatttaaatttggtatatggtcattatgcctgtcaagtattatgatgttattgtattaataacaatggaggggaagagagtgaactttactttattttagtgttgacccatcatagaatcattgggacagtgtcgagatgtaattttccattttttttgaattttttgtggaagcagttctgataaggaagcaccag

SEQ ID NO: 106641 - DNA, 770 bp, Aquilegia coerulea
  Intron number 1 from transcript AcoGoldSmith_v1.001625m (l ocus AcoGoldSmith_v1.001625m.g) derived from phytozome v7. 0 (chr-ID scaffold_20; pos 2150425 to 2151194 reverse stra nd)
gcttcgtggctcaaagttgcagaaggtattatgaatgtaactatgttagatttcgtttcgataatttgttttttgattatatttgttatgttcaattgatctcttctgtgctgttcagtttgcattttggtttgaaatgagtttagattctgatctgaggtttttgtttagatttagattagattaaattgatgatttggattagaaattgagcttaacaactcgatctcattcaattttgtgaagaaaacgattgtatattactaataggattataggttaagtaaggagacagcttgagctttgaagaatattgagcattgttagtatttaacatgaatattgaatttttgcatgaaggaatgggaatatgtaacttgattggctaatgttttatatttttcgaacaaaatgtttattgaggtcatatggaagaacagcagtagcatgtgggcgtgtggcattgccataactttaaacaaaaagttgtcaaaaagattgttatcctccaaattaaagatcttctatatatattcgcaatttggaaaccatatgatgtatgatggccattaaagagcagtattgttttaggtgtcaatcgtcaagtgatcatctaaaaatcagtctattggttttgagttaattgttattattttcattttcttattattgttattattgatttgttgaaattaaataaccatcaaatttttacttgttatattttggattcagacttgttagaagttgtagaccgacgagcaaaatcg

SEQ ID NO: 106642 - DNA, 595 bp, Aquilegia coerulea
  Intron number 1 from transcript AcoGoldSmith_v1.005097m (l ocus AcoGoldSmith_v1.005097m.g) derived from phytozome v7. 0 (chr-ID scaffold_17; pos 3867826 to 3868420 reverse stra nd)
agaaaaggggtattcgttctactgtctttgatactgtaagttatgctcttctttttttctttttgtgcaaataagtgatgtttttgtatcaaagattggatttttttttattaatgttaaaaatttaatgcataccccctttggataaaagcattatttaaaattcaattttaaaggtttgacaattgacatattgtacattgatcttagtggttgagttcttctgttaaaagcattatttatttatatttctcacgactttgtgataaggttgttggagagttgaactaactaactggaatcaattatcttcatggttgacaacaaggcggattattgaaaaaataaatgttctagcgtcatttgaaagtaactgatggtcgatagttcaacttctttcagtctttgtgaaatgatatttatctacaagataaccatatgtcattcatgtagtcttccttttgaaattttctcctatcattgtcaaaaacaatgtaggtgcaaaatgattctttttttttttggcttactttgattgcattgttcaggtttccttaaggttgcttattgtgtgtttctttactttagggtattc

SEQ ID NO: 106643 - DNA, 718 bp, Aquilegia coerulea
  Intron number 3 from transcript AcoGoldSmith_v1.025633m (l ocus AcoGoldSmith_v1.025633m.g) derived from phytozome v7. 0 (chr-ID scaffold_4; pos 2971360 to 2972077 reverse stran d)
aggcgttccaggttcatccctcgtcttttactttggttctttgaatataatctattaagttactacatctaactgtagaattttttgtaattgaaattagggaatcaatttaattaacatttctactgctttatctgtacaatggtacacatctacgcagtttacatctcaccgtatgatgggttccagcataggtgcttttctgttttgttaagaaaaaatcaaatatgattgggtttggttgacatgaatctagaatcctggagaattatattactttcctaaatttcaccaacaaaattcacggccaacaaaaatagggaaagcagtttaagttatactgataaagaaaccgttttcctggaaattagtatttatttcatctccattttatttccagtcttcttttattccctgtccctcacactgacgcttacctctctctcttcctctctttctagttttcagctggaaattagattccagggaaatacacaattatgaatctcaattgtcatgtacttgctgttctattttaactgtttgaaaaattagaaaaagataaatcctaaatcccttctattgcaatgtattatttttttctcttttctatcacaaattgtctttattcggatttttctgtcggtacgatgctaactattcttataactacatttttgcagcaaaatactgtccattactgtatcattttttacag

SEQ ID NO: 106644 - DNA, 828 bp, Aquilegia coerulea
  Intron number 2 from transcript AcoGoldSmith_v1.000362m (l ocus AcoGoldSmith_v1.000362m.g) derived from phytozome v7. 0 (chr-ID scaffold_17; pos 2949460 to 2950287)
actttgcacttgcatcggtttatccatcgcataaggttgtaaaagataagctatgcatataattttcttgttttttttttcttaacttcttttgagtggggaagaggagagcatgtttcttaacgaagagtggaatcattatcttctgttttttattgtaatgtgcattacttgtcacaaattaactgtgctttttaagtgcttgaaatggaatctacataaacttatctggtttaatgtgttaaaattattgtacgtattttccatgtactattatagctataggatttcttcccatatgttttcatatggacagactaagatccatgataagtataatagaaaatcctcttattagagcattctttttgctgaaatggttaacctccggcaaagctttaaatgctagaaaaattcaggacttctttttgtgtaattcttcctttcctttccttttttttttcttgagagagagagaggttaatgaacaatatatttatgtaatagatacaaagttcaagtacaaaaagatcacagggataagcaatctctatagcccgaaacaacaaagaaaagcaacaacaaaatgacactcaacaaggctaaacctctagcatcaagactttgccttttggttaggagttgcaaattttttgactttgctggcaggttcatgtgctttgttttcttgttcgcgtcacttttttgtggcttataattgtggttctttttcaaacctttgtttgtgtggtttaagtatttttttccaaaacaatgacatgtttttctataggttttaaagaacggagtgcgattgtcagggagcct

SEQ ID NO: 106645 - DNA, 986 bp, Aquilegia coerulea
  Intron number 2 from transcript AcoGoldSmith_v1.023869m (l ocus AcoGoldSmith_v1.023869m.g) derived from phytozome v7. 0 (chr-ID scaffold_62; pos 940930 to 941915)
tgatatagtacaagaaaataaaaagctcatacttggtaagttcaattcagttcgaagtgattcttttctgatattatagacaccctatttaatagctggtaattattcttttctgagtatcaatcaattatcattccaagtaaaaattacagcataatacatacgcaatgtgcttacttacaagaaccacacgcaaagaaacctttctactacaaagagaatagagtgcttatttaataaaaaaaaaatcttttttttttaaattttactacatcagaagtaaagaagttattgatgaagatatcaaccactaattgaaatcaaagcatccatcataattagactatttgtttacatcataattagactatttgtttacaataaaaataattgttccttacaggtattctaatagggagtacgtgtacacagtaacatatttggtagattgagctagaagtcgaaagctcaaacccaaaaattgtaatctgtagcagagattatacttaccatctcactcttttaatatatgttaaaatcaaatatgtaggtagaaatcacaaaaaatttgcaacaaagaataacgttcattgtgcaaaaggatgtttactacctgttacatggatcgttaattgaattatttttcttgctttcttttggcttggccattcaattggagacctagactagaacattcttcgcagaatcatgttcaagtgcacaatgagatccacttatttactcacgaaagaactccatctaacatcacctgatttagttcacaatatgaatttgtattctaatctgatttacttctttaggctctttcaagttatatggggttttggattagcaatgtgcttattcaacttctaaagatgttaagatatgccagaataatttgatatgattagtcatactgctgaaccgtctttcttctaccatgattaggcaacattttgcacattgggtgccatatacgcaat

SEQ ID NO: 106646 - DNA, 895 bp, Aquilegia coerulea
  Intron number 1 from transcript AcoGoldSmith_v1.024473m (l ocus AcoGoldSmith_v1.024473m.g) derived from phytozome v7. 0 (chr-ID scaffold_41; pos 570694 to 571588)
ccaacactaacggttacaattatttgggaaaattagacttaaccccccaagtaatggacctcttttgattaaacccccacatatttgaaaagtttgactttgcaccccaccgtctgtttctgtctagttttccatccaaactatatttttacttcccaaaatgcccctcattctcttattagctaaaacccccaatcttctccatcttaattcactccattgttaggattttggagcaaaagagtggagagaacttttcaactttacaaagtagatctacaccattttcacacaattttcacttcttttagcaacaatgattgtgattatatgttgcaattgcttcgatttcaaataaatttgagaagaagaagacattattcaaagaaatcatacatttacctaaaattgaccttccccattgttcattgttgtgattgcttcaatcttaaagttagatttgaaaagaaatagaacaagaagaaacaatcttgatcaagttgcaactcatcacaagagatataggaaaactggagttgcaactaaagggaatttagtttcttctcattttctaaccatatgtgagtgtgggtactttggggggttttagctaataagataatgaagggtatttgaggaagtaaaaataatgtttggatggaaaacttgacggaagcaaacagtggggtgtaaagtcaaacttttcaaatatgtgggggtttaatcaaaagaggtccattacttggggggttaagtctaaatttccccaattatttttggattgattacttaccaaataccatacctccgcctgatcttaccaaatgtcaagttagtatcgtagtgcctattctccaacatcttgtagacagctttttgtgctacaactttgtta

SEQ ID NO: 106647 - DNA, 750 bp, Aquilegia coerulea
  Intron number 1 from transcript AcoGoldSmith_v1.008272m (l ocus AcoGoldSmith_v1.008272m.g) derived from phytozome v7. 0 (chr-ID scaffold_135; pos 127267 to 128016 reverse stran d)
gttcaaaatccattcaggtctggttttcatttcaattatgatcttcttttttttaagcaatttgattaaaaattgtaatcttaaccatttcatttgatccgaatttacaacaattaagaagatgatgaacatatgagattaattatttaaaattatgaattatacaatgcattgtattgttcttacatgagaacgagagcaatggctttggttccaagttcctaggtgcgaatagcttttttgtttttgttaatcgttggatgtagaagttagattaagagggaattttaggctcatttgtgagtatatgcaataatgtcctttactttccttagctatcaatgtgctttgtcataggcgagaaatggagaatcttcattatttaaaatcaaccagcttgttgatgtagtatgttgtttcaataacttctacaaattaaggcacattaactttgaaatttctatgccaacttttggaagaaatgatctttttcacccctcctccgtattcattagagataaccaagaagttgaggtctcagctaaactaaactgaatttggatcacaattaatatttagatggatttatttcccttcctcattagggcataacatgacttaataacgggtagatcattttaattcattcatcttttctatgccttttcttcccccatcctttatcagttacacaatttctgtttttgatgtgcaggttgctttcaaaactggtgattttagacgacaagt

SEQ ID NO: 106648 - DNA, 895 bp, Aquilegia coerulea
  Intron number 1 from transcript AcoGoldSmith_v1.009538m (l ocus AcoGoldSmith_v1.007812m.g) derived from phytozome v7. 0 (chr-ID scaffold_82; pos 798514 to 799408 reverse strand )
ttgctccacttgagcgtgtcaagatcttgttccaagtatgtactatgtagtagtatgtactactccgtctccctctattggtatttgggattctttagttttctcattgatttcatctttaaacttgatttattaccaactctttacctgctttctaattaagttgctcttttgacttatcaacttacttcaattttttgtttctctaaattcaatcttctttactttgctttcgatttgtaatttttttggttagtgccaagaccgtctttaggggctttaattcatacaaattaagcttctgtttgtgtatacaaatgttaatttttaattaattgggaaaaaaaaaaacaatcaaacttgtgtttcactcatttggggctacatcttgttgcttgtttatatgtgtaatgccttttcttcttatacttttgcccgccttacagcttatgaccttgacgttaattaagctttccctactaaatataatgtttaatgtttactgtcagtgtcaatgaatactctgatattacatttatgtttagtggaaataatcctacactacactgttatcagtttttttttattattctgacactgtatctgctgtttcaaaactattaccgccctattaccctgccagttgctattattacgggtgtagttattttggtactatcctcttcatagtaaattatgtatgctgaatcaaaactcttatgttgtcatcttactacactggaaatgacatgctttttgttttcatttgaggtagagatctatatgttttcaagacatggaaatgtcatgcttttttttgttgttgttgtttgaatgactgacaagttatgattttgcagaccagacgagtagaatttcatagtgcagggttgtt

SEQ ID NO: 106649 - DNA, 488 bp, Aquilegia coerulea
  Intron number 1 from transcript AcoGoldSmith_v1.015794m (l ocus AcoGoldSmith_v1.015794m.g) derived from phytozome v7. 0 (chr-ID scaffold_73; pos 1092793 to 1093280 reverse stra nd)
accattcatctaaccgctcaacaacctgctcaactgtaagaagaagaagaagaagaagaagaaaaaaaaacatcaaaatatattcatttttattttgtttttttttagagattgattacatcttttatttatttcattttaatttcttcttttcttagatataaatctgtatatatttactgcatgcacacagtgttctctaatctctcttagaaagtttttgaaatagatagatagatagatagatagatagatagatacaaattattctctttaacatgcatcaaagtggggcattgggaatttgcaccatgaaacccttatgtagaagaatcttaattagttggcacgccagatcaatctttaattcccaaaattggtttgtagccattttattcataatttgtcgaaatttcaaactagattaactcaaaatcgtccttttcaaccttttcccttgcagggtttaggatttggacttgtaattc

SEQ ID NO: 106650 - DNA, 752 bp, Aquilegia coerulea
  Intron number 4 from transcript AcoGoldSmith_v1.008193m (l ocus AcoGoldSmith_v1.008193m.g) derived from phytozome v7. 0 (chr-ID scaffold_38; pos 390890 to 391641)
ttgattcacccatttaacgacgggcgtataataaggtaatttgctgtgtaatgacatttgagctgtacaatttaattcttatttgtttcttccttcccttttgttgttctacttgataaacaagtggcaaacttaggaaagacaatttgaccacccttttagtcgtgtttctaaggagaaccatagggtgcaagagtttggtttgggatatatattgtatgcaagcgcacttagtggaagtaatacatctattactaatagcaaggagcagttgaaatagaaatatataggttatacttaacgatatgcatggcatcatgcccaaacttttgactgttgcgtaggtagtggatccccgataaccattacaaatttacaatctcctatgcctctggtcagtagattggaatcagatacctggtaattaatggagatgcgtagacttgtccactgggttgtgtttcaggtgccttctacttactaaggccatttcatcaagcatttctagaatgtgacccgttcgaggactagttttgtttttgagacccttggctctattccatttttgttctctggctgcaccattttttacgcttatattggtaagaatagcaaaagtacgttgatgaacaacatttaccttttccattaaagtaatgaaatgctaatacatgcatatccccaaccatagcattcaaaactgtttttcttttgcagtggacagggtactatatctctagagttattggagc

SEQ ID NO: 106651 - DNA, 976 bp, Aquilegia coerulea
  Intron number 1 from transcript AcoGoldSmith_v1.011711m (l ocus AcoGoldSmith_v1.011711m.g) derived from phytozome v7. 0 (chr-ID scaffold_17; pos 1113269 to 1114244)
ttggtatatcaagatcttctcacaggtaatttttctttttcttctttcaattctaagtatagatttcaattgatttgaaattattctagagtattattagatctagggttttatttttatttgctttattcaactttaattagatctaaagtttgtgttttcatgtgtttttttgtgttaaaaaagggagattttgcttttaatcgaatttaaatctttagtgtgttgtaatttatagtatatttatgatttatgcttacctatacatcataaactagcttggatagagtttttgttttctacttgcccgcttgttaatatgctttttgttcaattcgagatttgtgagattgtgatatactcttttgcttgtttacatgattcatgaggctgtactaatagaggaatatttttgcaattgttgtcagaattatatgttgttgtgttggttaagggattagggatgtggtataatttgttttgctttaatttgaaattgtaaaactaccttattaatatgagagttactcttgtactctgttttataatgtctaggttttgtctctcatgttgtttgttgctgatgttttccctctagaactggatgcatcagttttttttttttgaaaagagtttaattgtaagcatacctagatgctttgggtttgagttattgttggttttaacatatgtatccatctttagtctggatttgaagcatggctcgggaacactttaatggagatgtttatgtaatgcatctttgagaaataatgttcataccatggttgtagttttttttaatgagattgtgttctgtctcttgcttttgtatgttacagatctgtttattgtttgtcttttgtatgttgtccttacatgcatacaataacataaaagcaatagttttctgattatatgcactattaattgatgttggtgcttattaaattcaattgtttgtgaatttcaggtg

SEQ ID NO: 106652 - DNA, 513 bp, Aquilegia coerulea
  Intron number 1 from transcript AcoGoldSmith_v1.009583m (l ocus AcoGoldSmith_v1.009583m.g) derived from phytozome v7. 0 (chr-ID scaffold_17; pos 500449 to 500961 reverse strand )
cgaagctaactcaggtaaatcatttcacctttacttatacttggactattcaaggttatgatggattccattttaaagatcaatgtaatagaaacaaaacctcacgggtcacgatcttcaaatcttcaacgtgaccataccattccgctgtttggccactttgtggactattatgcattcaccatttcacccagtattatgtatgactctctaatcttgttacaaactgtgtcactgctggaagttataggttttagttgtgaaaaattgtttttggaccattattacataagagaatataatctgaaagttacacattataaataagagtaatcttctcaggtttaattgaaggtttggtttgtcaaaaagaattgttacaagatctatgactcctgatttgtatatcagaatgagagttgccctacaatttgtgatgtatttacataatgaagttctcccatgacttcctttgaactaatttgacgaaaattcatgacactatttttcagg

SEQ ID NO: 106653 - DNA, 376 bp, Aquilegia coerulea
  Intron number 1 from transcript AcoGoldSmith_v1.017461m (l ocus AcoGoldSmith_v1.017461m.g) derived from phytozome v7. 0 (chr-ID scaffold_76; pos 572444 to 572819 reverse strand )
catccctttcttcaaccaaatagtacaaactcgtatgtaacacatcggccattttttttttcttccttattttgaattgaattgggctacttgcctacttttattcggcttgagctgtggttactaacttgctaacgttcaccataaacaaaattgcaagtgccgccaatcattaatagtttaaccaacgatgagaaggcagatattccctcaagaatgtaatgcttagatacttggagaaagttgctaatacagtctactttatactgtttagtgtagaactgcaatctcatttacataacaatatatgtattgctgatggtttctaaatggaaatacagggaagatctctctcttttggcttggaacaactcct

SEQ ID NO: 106654 - DNA, 970 bp, Aquilegia coerulea
  Intron number 2 from transcript AcoGoldSmith_v1.002061m (l ocus AcoGoldSmith_v1.002061m.g) derived from phytozome v7. 0 (chr-ID scaffold_14; pos 858907 to 859876)
ggtcagtgaagtatagaccagctgctgttgcaaaggtagtgttcaatcattgacaaattcattattgccgtttctaattgcttccctgaataatactgcttatatgtttatattgaaaccaattctgagagatattttagaatccctagtaacaaatcatatacacttatcatgtttttcttctaattttattgtaatagaaacttctagtttgattttgtaataatatgatgaagacttcggtcatgaaaagtgttgaattttcagcgattttttttgaaataacacatcctaaatcataggaaaactacttatgtgatacatagttctcacaagctattagaagaagatccattagatttttcaagatctattaattgtgtgatcacctcaggagtatttataaaacaatttagagaacttcgtaacttgtgaagacaaagaccaaaagtgtttgaaacttaaagagaaaaggaggataacctattgctgcttttctcgacatagaaccttgttatgacattccttcatgctatacttaggtagtgatatgtagcctaaagcaattcctgccctgatgtttgttataagtaacttatataaattattcaactgtcacatacatcgtgttgagtattttaaatattacaacttaacttttttcgttctttaagatatctcattcaaacctcaatataatttataagagactccatctgcacaagggactagggactacatctccaccatctcttcttttcgtttctcccctggcttgtttcctcatgtttttagctaagaacttggtgtgagcactttctacaccacttcttggtttctcaaatacatatcctcggcgatcctttgcttaaattctgttcattttgcaaggtttttctggtttcgtttttttatagtttcttattgcataacaggtttcagaagtgagcacgcgtttaggcagagctgg

SEQ ID NO: 106655 - DNA, 565 bp, Aquilegia coerulea
  Intron number 1 from transcript AcoGoldSmith_v1.005207m (l ocus AcoGoldSmith_v1.005207m.g) derived from phytozome v7. 0 (chr-ID scaffold_14; pos 5651411 to 5651975)
ggttctggtgagtctcaactatacttctcttttaagctccattattagggttttacgttatattcccgtttttttttttttgttctttttactactttcgatgaattgataaaaaagagaactttttagttgtgtttgtgtttgtgtttgattctatttttagttgtatttagatgattgattggggattatagaggtttagtgttttggaacaagttattatatactttgaatgatacaagtaatttttttcttttttctggctttaggttgaatctgtttatgacctaaactatcttctgttaatattttataaatttgattgttgaatttaattgattcggtatttggacattggttttgttgattgattgagaattgtagaggtttagggttttaggaaggagtataaaagttgtttatctactttattgtagtaatttttatatttttctggctttaggtcgaatctgtttatgacctaatttcttttgttattatatggtataaatttgagtgttggatttaattgattgggtatttggacattggttggtttgtttag

SEQ ID NO: 106656 - DNA, 671 bp, Aquilegia coerulea
  Intron number 1 from transcript AcoGoldSmith_v1.004143m (l ocus AcoGoldSmith_v1.004143m.g) derived from phytozome v7. 0 (chr-ID scaffold_41; pos 924243 to 924913)
ctggatttgacccaacaaagtaaacacattcttcgctttatattattgttgcttttatttattattgattgttctgtttcgttagtgatgaatatcgaatgtcatgttgtattattctggttttataaagaaatatgtaggttgagatcaagctatatagaaaagtattccatgatgccaagtcgagcatgatatatccatgaggaaggtttcattttaaacaatatgcattttgcccaatatgtctacattgaatatgcttcatgtctcaaaaataacacaccctttagcgccaaaaattgaatgtagggaaataaattaaaatgtgttatcagatccatgtgacgaaattgtctcatgatgtgtaatacagatttcgggcttgaaagctctgaaccggagttgtcaatacaatacttgtcaagaatacgcaatcaaaatggattgattttactttacttaaagaatctagaagattccatgttaaaaatagtttgagtataatattattcaaagcaaaatgtcaacaagttctgtatgattttcaaatcttcttctcccatcaatcaatgtttaatggtcatgttagttagctttaactgtttgatgtgaatgagtgcattatatggtttaacattcaacttaaattttgaagaccaggtgtatattta

SEQ ID NO: 106657 - DNA, 872 bp, Aquilegia coerulea
  Intron number 2 from transcript AcoGoldSmith_v1.000347m (l ocus AcoGoldSmith_v1.000347m.g) derived from phytozome v7. 0 (chr-ID scaffold_5; pos 4049805 to 4050676 reverse stran d)
gaaataaaaacagaccttcaagaggtttgattactgactttattcttcgttttgaactaagttaagcactctgataatcagtattttctttcctatggttgattcctttacttgtaagaactaagtggcacagtttcgtttttggggctttctttatagatagagtggaagctcatcactatttattggactgcatattagacgaaaagttgatttctgttcttgtcaagtgcaacatgttattctgtattatcatttattttaatgctttgtatatctttatattcttcttcttaaggttttgaagtgtgaatgtatgcttcaaaaccacgatttttcatttgaatttttttattttggtttataaaattcctattttatttccattattctatttcagctttccactgttctcttcggagcttaggttataacaaaactgccttttcagctgatacaacttaaattggaatttgtaaacccaaggaaatcagtgcctatataacattgaacttcacagtattagctttgcagttttatgctcataaagatgccaagtatatcttttctttgttatattccccataactttcttctcctcccttacccaattcagtttctgtggtaggaaaaaatcagtttgatgagtacaattctcttcagttttaaccatcattttaatgataattagtcctttttttgtgcattcacctcttgtgaaaaaatatatggtttctgtcaattatttaaagcatgctagaacaactttggagttgcatgagtagctattgagttgatgttgggatagggctaaatttgctcctgtaactgttttccttcaggtggttcaaagctgactgtaaaggacgaag

SEQ ID NO: 106658 - DNA, 593 bp, Aquilegia coerulea
  Intron number 1 from transcript AcoGoldSmith_v1.000347m (l ocus AcoGoldSmith_v1.000347m.g) derived from phytozome v7. 0 (chr-ID scaffold_5; pos 4050808 to 4051400 reverse stran d)
gttgttcttctcagttcactttcatcaatcgaaaggtttgtttcaatacccacttcatgttttagttatttattcatgttttcttcaatacccatatcgcaaaatctgatctttttcaaccccctttagagattagtgtgaggttatgttgaagttttggataaattgctcatgttacgtgattaatatacttgcttctgttaatcaatgttggcaagtttttcaaatgtccttattagctcttttacttttatctgaagtaatgaatagtattactaccaagtaccaactaatattttctaatcatcaaaaacaaaggtgggcattttcaatactgtatctaatgccagattaattctattaaatatcttgtttcaatgtgtactgcaaataaaatctcatttggtgtgtgttaatgtttacaacttccggctttgcttgaaatccaatctctggtctcgagctgacctattttttggtccagggaaaagaaaaaagtttagatgtagttacgaaagaaaaattatactcaaatttttttattcctaatatgtgaattttttacattgtggattttagcatcactgtcgaag

SEQ ID NO: 106659 - DNA, 851 bp, Aquilegia coerulea
  Intron number 1 from transcript AcoGoldSmith_v1.002950m (l ocus AcoGoldSmith_v1.002950m.g) derived from phytozome v7. 0 (chr-ID scaffold_73; pos 449168 to 450018)
ctttggaatctaacctaaccattgtttttatcgaggttcgaattctcttccttttcttctttcattcagatctggggtttagtttttggtgtttaaacttgtttggatcagcttgatctggcttgttgaattcaaagtcttgatacattttgtatgtttctgttaccctttgagctaatttaactatcccaacagaccccttaatgtatcttggtttgattttttaagttttaattgaacaagttttttttttttttatggcattttgcgttgaatattgtaattttagtctgtttttttttttttttgataaatttccttatatgatttgtagaagatgaattaaagtgtattaatttctaatttaatctgtttatgtttggataagattgacttgggaattatttataaatgtaaggtttaatgtatgttttagcctaaatgtaaatgccctaatgctaaatgtctcttgttttggttctagtagtcttttgtttttttttttgttttttctaaatactgtaatttatagtttttaatagttttttttaacatatataaacagagttctaagatgggtaattactagatatgccctttttctctgaagaaaacttgatcacaaacatgccttcattgtctcttcatttactcaaattttcctttggtagttaatgattagagtttattaatcttggagtttaatatgcttgtatctagatcaatgctataaatatagtcttttaatttctctggatgtttgagtatttgtgaggttactgtagatcatttcctcaaattgtataatttgttgccttcgtattagggggtgaaaaagagagcacataggt

SEQ ID NO: 106660 - DNA, 743 bp, Aquilegia coerulea
  Intron number 1 from transcript AcoGoldSmith_v1.010585m (l ocus AcoGoldSmith_v1.010585m.g) derived from phytozome v7. 0 (chr-ID scaffold_14; pos 2499070 to 2499812 reverse stra nd)
cttttacttcacgcttattgtccagatccaaacaggtttcatttcatttcatttcaatccaatcgcttttcgtttattcttcttgtttaatttgattttaaaaatgaatcaaattagggcttttgttttcttctatgagctagtttttgatgtttatagatgtaatttgattacttttggtgatcgaagctttgttttagggttaaatgttttgggaatttttggagaaattttaggaattatttattcagttagaagtaaaagaaaggaatttttgcaattagaatgtagaaatcaatgtatgttgtgttcattgacgtttaagatgaatttcataaatttgtgctttttgtatggttaaccaatgaaattgtgtgttcatgtagattttttttttttttattaaatctaataaaatttggacaattattatggtgttgctctttgtttggttttagtttctgtagcaatcttaaagcaatgtgggactctggcttattaaagcaatgtattttgtagtgtcattgtttagctgatcaattcactatttcgagtttatgttgtttttattcaaaaaaacaggaaattttctgtggtacttgtttgctgttaatcttcattgtataatttatttatttttttctgaacaaaacatgtattcattgccatttcatcgtaatattttattttattcgtatgattttgcagttgtcttcgggtcacatccttctacaacagcatca

SEQ ID NO: 106661 - DNA, 915 bp, Aquilegia coerulea
  Intron number 1 from transcript AcoGoldSmith_v1.021742m (l ocus AcoGoldSmith_v1.021742m.g) derived from phytozome v7. 0 (chr-ID scaffold_38; pos 1628051 to 1628965 reverse stra nd)
tggtagaaagcaacgtgcgacttgaaggacatgatcagttgtgggttcttacacccaccactttcttatataggaattttgaggtgctcgttggctcgacatagtttgttctgttctactctactggaatcttcgtttggttgggttttgggttaaagtaaatagtacatgatggagctcgagcggaaaaaatcaatttatttctcagaggtaagttctagggttaatgccaatcaataagttggaacaacttcgtaagcatatctttgatatagaaatggaaaagattccattctaacatctaacaaaagtttgtttttgaaacttttttgttggaattgggaaaactatttcgatcaaaagtgtatcacacgggaatcaatcgttcgtatcactcttcgacagtcaataaataacaaaagggatgttgctgccattttgaaacgattaaggatcaccaaagtaatgcctaaacccaatgattcaaaacaaggataaacgatcctggaacaagaaaacaccattttcaattgtctcaacaacttgagcagaataaaaaatgggttagagacggctcaataaaggaaatgccaaggacaaggactccggattttcctttgaactctttgagaattattcaacttgagttataagtacgaatgattttttttttggttttttcgttaaggaataagaaattcaattaaactagaaactaaactattgaatttcttatttttcttttatggattggatctatttatttgccttgccactctatacactatgacataaatgaaaatcattctttctcgagccgtacgaggagaaagcctcctatacgtttctaagggggggaattgctcatatatagatatctatcccaatgagccatctatcgaatcgttgcaattg

SEQ ID NO: 106662 - DNA, 720 bp, Aquilegia coerulea
  Intron number 2 from transcript AcoGoldSmith_v1.007477m (l ocus AcoGoldSmith_v1.007321m.g) derived from phytozome v7. 0 (chr-ID scaffold_14; pos 5597000 to 5597719)
ctggtgaccgactgattcgtgctcttaaactggtaatttcgaaattcaagcaaagcgtgacacttctttctttcaatttattcaatattgaagtttaattaccaaaacaaaacttatttgaataaaactctacaattttgtccaattaagtccaagaaaacatgtatcaaaagtatattcatacacttgcgtacaatacctaaaagacggtgttaattgcaatattctcttccagttcttttccatgttctgttggagcattctatgatattattgtatatatcctgcactattaatgcagtactggtgcatgtttgagttgaaactagcatcacttctacattagcattagtggctttatcgtattttcaaactccctatttacctattactattgcttacctgtgcgttatgtaggcatgcctgtatgtgaagtttgtataaagtggtttagattgaatgctcgttctagactctcgagatgcttatttttgtcatttttcgttggttcattcttaggggattcaatctggcatgtagttggtgatagaaagcatgtgaagaattgagaacaataggcacatgtgtccacaagacgagataatttgttaattattcttctacctaaatatcaaattgctttaatgttttgcttgcttttgtttatgaaaatgatgatcattttttggtgatgtatatatatgcagccgagataccacc

SEQ ID NO: 106663 - DNA, 841 bp, Aquilegia coerulea
  Intron number 2 from transcript AcoGoldSmith_v1.008555m (l ocus AcoGoldSmith_v1.008555m.g) derived from phytozome v7. 0 (chr-ID scaffold_53; pos 926034 to 926874)
acaatcattacagcagcagcagcataagctatcaggtaactttcaaagactataacttcgaaatttaattaaaccaatccgtataaaattttgtatgcataatatgaattttattttttattttttaagttacaagtgaataagattacataattttgccagtgcaaatatcaattcgatagtctttcctagcatcttcaactttaatgttagaagaatgcgtttatatacaaatttaagatttttatttctaagcattttcaactttttatgattctttaccggactggctttaaccatggatgtaaactgcagagcattttaattttttgtttatgccacccattctgttggtggttcagttgtttgattcatgagttcatagcacaaattttagctacactatgtaccaatttgacttcttaacttcaattatagtgtatgtctacagtatgcttcttgtttacctaataccagatttttcatcttttccatctgtaataagctatctgtctattttaccttttgtctttttgtgaaaacattactctctttctctgttgtttttttctgatcaaaatagcaacattacaactacattatctctaagactacattgaattttgttgctcttgcctatttcgatagtaacacattttgctagtaaatatttataacagtgtactattattttagttgtaattctataaaaaatatacagtctttagtattttatttttttgtttaggacatagattgtccttttgaaagatcacataactttggatgccaatattatttttcagaagctaagcaaggtgttacttctggtggtcaatct

SEQ ID NO: 106664 - DNA, 997 bp, Aquilegia coerulea
  Intron number 1 from transcript AcoGoldSmith_v1.015644m (l ocus AcoGoldSmith_v1.015644m.g) derived from phytozome v7. 0 (chr-ID scaffold_14; pos 3498580 to 3499576)
gcttcattagttgaagtgtgacaaaattgctgtagagcagggtcatagcaagctcaagtggatcggacttaagatgattcaccgctcttttaaaactatgcatagaaaggaaacaggactatcaaggagtcattgtggaatcactgtgaccaaccatatgattcgaccaatttagtgctactaaaaagttgggaagtaggagaatattaattgagtcaagtttcatgtcacttttgaatgatttgatgcctgagagcacaattttggtttattaaaaagagacaatgaatatattctttcagacttcacataagtgggtatccccatgaagatgctcttaagagcaaagaaacgaaagggagaacaataagagcaaatgttgaccccagtttgatggaaggtgctctcctctatatggtgatgtggaaaaatatacagggcaatttagtgaggagaatatataaaaaatttctcctagctcatgcctctattatgtagcctcgtgtatggatttcccttctctctaagactagttgaactttggggagcgaatgtggagttccagtgtgtgattccacgagaatcgccttaagacttagatgaagagagtgcagcttgtgattagttgacaccctccagaacttttaggagagagacttcttgttgagagagcagtctagaatatttatgggagagttcctgtggaaggtaaagttctcccatatatgatttttcactacaaaatggggttagaccagcaagcaagcaccatattatgatttgttctcctgcccaacaaactcgttgaacttgatttcctccttgcaatagataatatacttagagctacttaaataaattagtttggctatagactataactaagaccccatactgtaatagtttctgcctgcctgccatgtatatcaaaacattgctgacgttgtactgtgtgataacaggtacaaaatcttatagaacgctgtcttcaattata

SEQ ID NO: 106665 - DNA, 464 bp, Aquilegia coerulea
  Intron number 1 from transcript AcoGoldSmith_v1.001163m (l ocus AcoGoldSmith_v1.001143m.g) derived from phytozome v7. 0 (chr-ID scaffold_20; pos 3249105 to 3249568 reverse stra nd)
ctggatcaattcattatcctagaagcactcctgaggtaattcttcttcttttgaaatttcatcaagtttgcatttgtatttgaaatgggtatctctggtttcttgtttaatctgtcatgtttacaagtttcttcaaatgttgttttttattcaaaatgggtatctatgtttttattgttttttgaaaaaataaaaatctcatttcaatgtgtttgtctctttatggctaactctgctcttgcagagaatctttcttacttttgtcgaaattattcaaaaaatgggtacttgtcttttagttttttcaactctgacatatctaattccctgcaaattcattcaggtcttttcatgtctttggctgattactttttcattttttgaattttttgaatttaaatttttatttattttatttaaatgaaattattgattatattttgtggataaatattttgttgcag

SEQ ID NO: 106666 - DNA, 711 bp, Aquilegia coerulea
  Intron number 1 from transcript AcoGoldSmith_v1.001089m (l ocus AcoGoldSmith_v1.001088m.g) derived from phytozome v7. 0 (chr-ID scaffold_20; pos 3918415 to 3919125 reverse stra nd)
ttcattgttcaaagctactcttttttgtttacaaggtaagaagatttctttttttctgtttttttgtgaataattgctgaaaaaggaatatgccaaagaaatttctagctagtttgacttgtaattaagattccaatttcagataaaatctttacttatagtgaaaaaaattgatcagatttctatagatatggtaagaatatgttttgaatttgggttttcttggtgatgacgtatctatgattaaaaaggtcaaattactttctagatagtaatgatatgattggataaaagtttattgcttttaattagtgcaagaaatcacaaaagattcttttttacgataacttgagctaaaagaagttgcttttttcaattctatggttatctagagttcttctactactataaatacgtaagctaagaccacaatggtcctcactcgttttcagtttctggtctgaattcatcttggttggttgttttgttttcttagtgttttgattggtttctaacttcattgttgcttagttagtagttttgttcgtttagaattcttttgtgtttttggttttaaaagtttagttgacatctcttttggtcaattctatatattctctctttatgtagagtatttgatctgaagtcacttttcttgatttttttttttttgtagtttgagatactaaactttctgaaaaaaaaaagttc

SEQ ID NO: 106667 - DNA, 630 bp, Aquilegia coerulea
  Intron number 2 from transcript AcoGoldSmith_v1.021169m (l ocus AcoGoldSmith_v1.021169m.g) derived from phytozome v7. 0 (chr-ID scaffold_29; pos 1583456 to 1584085)
aagctgagatcaccgaacaagattctttgctactggtatatctacgataacaagatttctgtaccgatcgttcaaaatttctgttgttttataagttttttgaatttttcttcaaatcggatttcaggatctggagatttttcttagatcggattcatagatctttctagggcgatttgttgtgaatgagctcaatttctgacctaattatgcgtttaactgaaatttcgttgcaaatcttctctttctcgattgatttctgtgaaaattggagagagagagcttcagatgtatccgaagtttcagtagatctagctattgctcgctaaattttgaattccagttcattcatcaattatcatagtagttcgaacgaagtttctgatctgatgtattcgtagcttcactagattaaacgattatagctatcgtattcttaattttttgaaattataacctaattttggaatttcagatcaaatttatgctttatcgtctatttgttcaacattagatgcaaatttatagattgcttcgtatgttgaagtttggtttcgtacgaatctgacttttctgctctttacatgacgagcagactcgtaatttgcttcgtatagcaatattcaacat

SEQ ID NO: 106668 - DNA, 937 bp, Aquilegia coerulea
  Intron number 2 from transcript AcoGoldSmith_v1.009035m (l ocus AcoGoldSmith_v1.009039m.g) derived from phytozome v7. 0 (chr-ID scaffold_105; pos 67716 to 68652)
aaaaattctggtaaatttcttatcttctttgctaattttgttttaaattagttccatatcttcacagttttcagtttgatttctgtattgagagatatcttcaatatgatattatgattaatagagaacagcctaattaactattcaatgtgcacaaaccaatctagttatttgattttccccgtatttatcttacaagaaggggggaggatttgtggttttaattgatcatcctgtaatatcatatcaacaaagcttttgttaattagtttcataaaaacattttatgaggtgatcccgtggtaaccaatgagttcccagcgcattctatctccttggggatggggacccataaaaagcattgttataaggattctaaatatcagccttgcatactacttgtccaaaatcccaatgcatagatgactctttgctcacaaatgcaaaacagtagatgtgaggctctcaatatgttacaaggtatcatgcatcagggcttgggagttggaaaggaataaaaatccgaatgatatacaactgtgggtgcttttctttgttgcttgcaatggatatattgtgcagccattccatttttccgtaattaattgtggactatggagttaaaaataattactaatgttttaaacaaatatatatatggtagtctttctactttctagtctacggccaatatacacatgtttactattgtaaatttggaacccatcaagtcaattacttatttttattttttgaaattttaggaattgatgttataaacacagggaactaaacttgttaatatgatgcactttatgtaataaataccttgatttctaattctttactctgtattatatggtgtcaatcgattttggttgtacttattgtgttatatttgcaaataattgtctgatccttagttacaagttttcag

SEQ ID NO: 106669 - DNA, 496 bp, Aquilegia coerulea
  Intron number 2 from transcript AcoGoldSmith_v1.000449m (l ocus AcoGoldSmith_v1.000449m.g) derived from phytozome v7. 0 (chr-ID scaffold_20; pos 1595039 to 1595534 reverse stra nd)
caagtcattcaagagctgaaaagaaccaattacaggttatatatcattttttttttattatttaattagaagttgattccaaatattagtgcatttattttcctgtggtggggtaaatggttttgtatggttgtttagacacttcatagtttagactatagggccattaagtttttgataattaagataacaggtaattgttttcaccatgtaatgtttcgctagttttgttttattgaacaacttttgaatatggtgaaaattaaaagacttacactgctccgaatttaagatgtgattattgtatttaaaattgatattcgtaatggatatgtatgggagctgggttttatgttgtatataaatcattgacttttgaaaagctaaacatttttatttgatatgcagaatttgtgatatgatggtggctcatacagtttaaatttcttgtcaatttttgacatttttcttttatattggaacttgtaggcccaaa

SEQ ID NO: 106670 - DNA, 466 bp, Aquilegia coerulea
  Intron number 1 from transcript AcoGoldSmith_v1.000449m (l ocus AcoGoldSmith_v1.000449m.g) derived from phytozome v7. 0 (chr-ID scaffold_20; pos 1595758 to 1596223 reverse stra nd)
gagaaagttattcagtctttacaacaagtaagcattctcttattcaattcgttcttcaatatttatcaaaatctttttctaagtttttttcaagtttcaatttttatcataaattatctcattcaaacaaacccctaactccatttcattcaataaatttgtaattgtcactcaagatgttaattttatttgtaattactaatacaaatgatcttctcaaaaaaaaaccctaattttgaattattgttcaaatgattgaagcaaatgttcccaagtttttttctttttttttttttattttgtcgcaaatgttaactaattgtgtggactgtggaaaatgccataggtagtaattcttatgtgaaacgagtagactgaaataggctttaattacttttcttgttgttgacaagttggggtgtataattcgttgttgttgatttttggttgtttatttgttttagaa

SEQ ID NO: 106671 - DNA, 392 bp, Aquilegia coerulea
  Intron number 1 from transcript AcoGoldSmith_v1.008778m (l ocus AcoGoldSmith_v1.008778m.g) derived from phytozome v7. 0 (chr-ID scaffold_14; pos 2631586 to 2631977)
ttataagaattctccaagtgttgaaacacgaagtaattatttcatttcaatcttccttttttttttgtttttgttgaattgagattatttttttttgtgtagtgaagattaagaattttgctgctttgaattcatgatttgtaatataagattgttttcttgtggattaataagcatttagatgcgagaaaatgtttaggcatctaaagtagagttaaaattcttgtttgataagtatttagatgtgagaaaatgtttatgcatctaaaggaaataagtggatagataaaattctagtttaaatgttgtactatttgtcctgatcacggaaatatatatttacttgtatttgtgcagctccggcagtagaatctgaaacaaataatacttct

SEQ ID NO: 106672 - DNA, 971 bp, Aquilegia coerulea
  Intron number 2 from transcript AcoGoldSmith_v1.000838m (l ocus AcoGoldSmith_v1.000838m.g) derived from phytozome v7. 0 (chr-ID scaffold_14; pos 5667260 to 5668230 reverse stra nd)
tctgacgaggtggtgtttgcttacatgtagctagattaaacttgtgattttacctgccttacccttgtgatttttctagtttatactgtgaaaaggctttgaccttattctctgctggagctcattcaactattatttgatttttacaaagctaaaaatgtagtttctgattttgtattagtttataacttacccaggggttagtttatctcatgtttgtctttagggttgttttagaggcatttttcatttggctttaaccttttgacattgatgctgtaatggacaaaaaaatgtaaattgttgcttgtagcacattggcacttgagggggatattatgtgttaaatccaataaataaggattttagatgactgtgtttcaattacaatagcatcatgtgtttgaattatgcaaaatgtttaactattgccctgtttgcatcattcgttttaatttagcacctttgtatgttgtcatagtgcgcaagtgttgtgggcaagcctgtacaaaaagtagactcatgcaaatccatgcaagtttacttatctctgtaattgtttggttgtttttcaactttcctcgtatgatttatagttttatacaaatctcagatacgagcagtttcctcagtttcttcagaatcacttgttgttctaatcttgtatgaaatagttataattattgcattaccatctcttgcagaaatggtgattgtggaaatgtgtaaaaatattggagaaattttgctatttgctctgttttatttctttaatcaagacaacatctagctcattcattgtcttgttaaatcatcctggcgtttaaaagttgattttcgttacactttttgtattctttcaatttgagtagatatatatttattgttgcattgggttcattagaaatttaccttattgtagccttcttattgacactgtcattggtttatttgattcatttttttttcag

SEQ ID NO: 106673 - DNA, 268 bp, Aquilegia coerulea
  Intron number 2 from transcript AcoGoldSmith_v1.002636m (l ocus AcoGoldSmith_v1.002636m.g) derived from phytozome v7. 0 (chr-ID scaffold_17; pos 3904596 to 3904863)
gagtcggttggttccttctctttgtttttcttgttgaagaggtcgacattccttgaacattaataaaaaatcataatacttgattacaaaacatgaattccaaccataactgaattattaataaattgtgccatcggtccacaaggaatataaaaataaacaaatatccaatgtcaaaataataaacacaccacacataacaaacaataaccaataagcttccgagttccgagaaccaattctctctttctccgccattcttcttctt

SEQ ID NO: 106674 - DNA, 752 bp, Aquilegia coerulea
  Intron number 3 from transcript AcoGoldSmith_v1.002636m (l ocus AcoGoldSmith_v1.002636m.g) derived from phytozome v7. 0 (chr-ID scaffold_17; pos 3904881 to 3905632)
actttcttctctatttctctcttcttgtaaacttggtaagtaaaaagtttgcaactttttgaagtatttcgtatgattatttcccttagtttcctatatttttatgctctggttattgttcttcaatttgattttttttattactagttttgtagcttaacatcatcatgtttagtactaaagattcaatttttagttaataataaggattattttgaagatagatagttgagttacagtggaattaacggtttagggtttttgaaagcagggtattacttttttttttttagttgatggatttgggtgtttagatgcttgtgtatcttgagagtgggcgttgttttttaaacaactttatgatttttttttttttttcggttttgagccttaatttttgttcaattttgtgaggcgatttggatttgattatgtttgagctagggtttattagagatatagatatcgtcatgttttactacgtcgaaatgtagcttgaactgttttaagctgatgatgttgcaaccaaatgacttgactttattgggatagattgactactaattattgtgctttaaagttactacagaacagttcatggattcaaagttgtatattggcaaatttagaataattaggccctttgttttcatgccactttatgctatgttgctaaatgtgttgtgcagtagtattcataaaaaaagtatttatatgtatatcattcactgttgtgtgcagtggaacacatt

SEQ ID NO: 106675 - DNA, 586 bp, Aquilegia coerulea
  Intron number 3 from transcript AcoGoldSmith_v1.001157m (l ocus AcoGoldSmith_v1.001157m.g) derived from phytozome v7. 0 (chr-ID scaffold_14; pos 98528 to 99113 reverse strand)
gtctccacatttagccagatatttcaagtcaaaaggtactgtatatggactactaactacatggacttctcccctttacctcactaattcctgttttattacatctattgttggatttttaataacaaatattagtctcatattttggtggatgaaactttatacacaacagtaaagacatttataactgtgaacgagaacaatcatcagtttatataaataaagatatatacctatggagttatcatccattacaattgtaaacaccgtgttctctaaatctcaccctctagatctatctttccttcttttgaatatgtaagatttaattaatatatagctgctgtcatgctggatcgatcacttttaccctttttccatttcttccatataattgtaagttcacaccgccaataataaataatttcagttcacaatgttattagatggccactcttacctcttgcttctatttagagcacatttgcgtgggttttgttctttaaatttgtaacatcaggtcactaacctggatcacttttaattctcagctctttcatattggaattatcggcgcttcgttttg

SEQ ID NO: 106676 - DNA, 639 bp, Aquilegia coerulea
  Intron number 1 from transcript AcoGoldSmith_v1.025634m (l ocus AcoGoldSmith_v1.025634m.g) derived from phytozome v7. 0 (chr-ID scaffold_53; pos 725111 to 725749 reverse strand )
caaactcaggtgagttaattgttatgtttatgttttcgcgataaagcaaatttgattttttgttattattattattcttattattagtttggttaagttcattagttgttgaagagttgcataataggaaaattagttaaataattaaacttgattaggagatttgtaataaacaacaaatggagaagaactctattgggagattcatgtcgtttatttgattacagtgaaaatgttgtttgaatgtgacttatatttttctttatatatatccaatggacatggaggatttaaactacaaaaacggcaagcctttcccaatttaggcctcctgccagttgtgtatgaaggccatttgttgtgtattggaattctgccctacgcccctactagcactgtcgaagatgatgtaaactcaatcaaatttttctgccacaaccaaattgtaaaaatgttgatctgattttgcatccatgtcatggctttggtcggagtgagatctctttaaacttgataattaagataattagtcggaatgtgtgttttattttataccaagcacagccgtatagtggaaactttgtatttggatgtaactaacgagtatgcttattctcaggaacctgttataagaccact

SEQ ID NO: 106677 - DNA, 913 bp, Aquilegia coerulea
  Intron number 3 from transcript AcoGoldSmith_v1.008770m (l ocus AcoGoldSmith_v1.007590m.g) derived from phytozome v7. 0 (chr-ID scaffold_17; pos 75834 to 76746 reverse strand)
atctcgtccgatttaaatctatttcacaactggttcgttcgttttttttttctctctttcatcatcatgttttattacctttattgtaattgaattcgatctatgtgattagaaatttatttggtaatgtgggttttcaaacacttagattttaacaccaatgtagttcaaggagagatgcttgcagttcatgtaaatatgtcttttggtaatgtgaacgatgtcctcgtttaaaagttaaaaccaatatttatgatttacttgtgtaactcaatttaccaattctttgtgtgaaaacaccatgaatttgatttgcgaaaatgcaaaggcacaatgtaaaaatttgaaaatttaaattcccacataagaagtacattatggcattttattagaccacgaaataaaatatatgggcatgacatgtatacacccatataatctttgtgggaaactataatgaaatactataatgtagaaaactaggtacattgtgtacctaatctagtctggagaattgatttttatgtgtaaatttataagggcttcacaaaggtcgaggccagttaattttccacgtttatcaagctcgcgttatcaaatatgtgttttagaaagccaatattccaattcttatcaagcacaccctttcttcatctaggaagtaatatattaactttattgttagcagcatactaacatagcacattctataagaataagaaagagagagagctgataccggaaggtaaataaaggtctttatgttaacagtggatgttcctatgatagaacaatgtaggaggaattttagtgaattgctgatgcttgtatgtaaaatttgaatagtttttccagtgttacaatttttctatacacatctttcaggtgaacagattggaaagtgaaggttact

SEQ ID NO: 106678 - DNA, 678 bp, Aquilegia coerulea
  Intron number 1 from transcript AcoGoldSmith_v1.008770m (l ocus AcoGoldSmith_v1.007590m.g) derived from phytozome v7. 0 (chr-ID scaffold_17; pos 80609 to 81286 reverse strand)
ttctctggtaaacccaagtatttattctcttaaaggtatgaagaatatttttcatctttcttttctttttgatttctaatttcaacatcttatttatcttcatctttaaatgatttctataaaattctatagataatatatggtttcttcgatttctgtatgtttttaactttctgaaactctttattagggttttttttttttttttcctttttaaagattctgaacagatcagattgaagtattcttttcattttaaaagttttgattgatttgaaacttgtaaagctttagatttattcaaatctgattgtttgagtaaataacgaagagcttagtttgaattgatcgcttgttttcaattacagattgaaagattcttcatgtgtttgttcttattgtttgaactgttttgatcgattgagtttgagatttaagttgctttttagcttagaaatatagatttcgcatctgtttgaactgtgaaaattagaattttcttcaattctatagcaaatttggtggaaattttgaagttaatgaaagttgagaagtcagattttttggaatgtttgtaatgtagattgcttaggaattataaattaatattatctgattagaagtaatgttttgattaattcaggtaatttgaagttttactgcaaatctgtgagcaaa

SEQ ID NO: 106679 - DNA, 955 bp, Aquilegia coerulea
  Intron number 1 from transcript AcoGoldSmith_v1.005626m (l ocus AcoGoldSmith_v1.005626m.g) derived from phytozome v7. 0 (chr-ID scaffold_38; pos 251466 to 252420 reverse strand )
tcaaagagatctatttttctgaattattgaacaaggtatgcatctccacataaattttgattatttattttttaattaatctaagcatacttcttgatcgatttaagttacttaagagggacacctttaccacataaaaagagctggataggggggatgaattgagtagcaatgttgtctgttgtctagagattggtggactgcatatgttttttaactaattattaggttttttttctatttttctcacgttacttaattggtggcacaatatataggatttggagttttttctttaatgcttttaatttgctttcctcttcttttttcccccctgatattcagatgatatccgaggttgttgtttcaatgaccaagtcccaacggtgtcttcctcccacatatgctccttctctagtcttctctcatggaaaaggatacaatgaccagaccttttgcactctatctgatggatgctatcatgtcagaagtgttccacagatgcgtagaatgttttatttcacatcatcttatggttggttgatgttgcgaagttacgaatccttagactgctatcttttcaatcctgtctcgttagaaaaaattcatctaccatccttaatacacaattcatataatgaatgtgttttaacaactagcccaagtgacaccaactgtattgtaatgtgtattagcaatgcgaaaagatcgtatattttttgtcgcattggtgataacaaatggattgaacaacagttgagacctaaaaagcataatgatcacatactcatagaagggcatatctcagtcattgcttgcaaaggaaagatatatctattctttagccaaggggtagctgttattaattttcaagataacttttcttctattgagctacaaccgatgaactttcctgagtttgcttcaccatgggtttcgtgctttagatactatc

SEQ ID NO: 106680 - DNA, 935 bp, Aquilegia coerulea
  Intron number 2 from transcript AcoGoldSmith_v1.012097m (l ocus AcoGoldSmith_v1.012097m.g) derived from phytozome v7. 0 (chr-ID scaffold_5; pos 369502 to 370436 reverse strand)
ggccaaaagttccttcaagctagaacaccctctaggtttgttctcaattcttttgttttcttcttcatgttttctttattgggtattagtttttataaaacatgtttgtgattaaaacatgcaattcatctaatttatgaagttttatgaagttggtttcgattaattgttccttttaatcttaagatgttttgtcgttgtattgtaatggatattctttatttgtttaaaagggttttctctttactatcttatgatcatgtctttcgaaaaaaaagatcaatctgacgaagatgttagaaatattaccaattgaaataattgatcaatataaacaaattttcctttgttatcactaatagggtctatggatcataattttcgacttaaaatgtttttaaaccatgaaacaaagttgcttaatgaaagttaaaattagtgaacatagggataatttgataactggtatagttgtttactagcaataggcccaagctgaatgtcatgcttcatcctataatgtttacattgtaaattagtgaacatggggataatttttataagttgcactgaacaagagcttgttttattcttctctttgcaaagtatatttatatagttgagtttgatgtgtggttgaacacttcatttttgtgatcttgaagttggaatattggtcttgatatttgttattattattcttgtataatttttttatgtttgtgactgcatttttaacttgcctattctcttggagaaatagttgttttgctgaaaagtgcagtggtgtttgttctaattgtatgttttaaagtgtaaattttatttgctggtgcaatatcttccttacattcttaataattattatctaaactatcatgttatactttattatgtcagaaaggagacaagctgaagctgctcgcatcagagaa

SEQ ID NO: 106681 - DNA, 798 bp, Aquilegia coerulea
  Intron number 2 from transcript AcoGoldSmith_v1.003834m (l ocus AcoGoldSmith_v1.003834m.g) derived from phytozome v7. 0 (chr-ID scaffold_45; pos 1518509 to 1519306)
tcgcgtagccaaagcactctgtgaaggaaccagaggtaacctattacctatgtattatgattcattcttgccttcttgattgcttgctgcctgctatacatacatacatacatatgctaattggttgcttaattacttaattctcttgtgtcatcattgtcatcttatgaatcttaagaatgaatgatttcttcaatctcacacaccaatcatagatctgtttttcttcctcaccttcagtttcttatttacacttttgtgattcaattgcgttataaactgaacattttgtcactagactagaggtctaagattgtgaaacttcacttgtaggtgattccaactttgtattaaacacataacaagggaagacaatgggtgccaaaaacgcaacttctacattcagtaaaaggaatagttttaacatatttaattctcaaaacgtcctaatgttgtttcatcaagtggactgttgattaagttgatagttatgtcaaacaatttgcatagaagcatttttcttttttttaattgtaattcaggtttaaaattgtataattctatcattttcatctgctcaatgttttgcatttaaatatgtatatgtagctccatccatgttttgaatctaatgtttctttattaatatttgaaattggactttctaacatgctctccagtacgagtgttattatcctatatgtgtatacgaggctagtgttgtaactgtttttttttttttttttttttgttaccttgtcaggctacaggcaaaaagtaaaggatattgttcaaggt

SEQ ID NO: 106682 - DNA, 394 bp, Aquilegia coerulea
  Intron number 2 from transcript AcoGoldSmith_v1.021793m (l ocus AcoGoldSmith_v1.021793m.g) derived from phytozome v7. 0 (chr-ID scaffold_62; pos 854296 to 854689)
taagaagatcgtgaaatctgtcaaaaagttcaaaggtacttttactctctctctccctctctttctagatttgggtttttgtttattttcaaaccctagactttgtttgttttccctatttcatcttctaatgttttcatgttttaatcaaaaaccattattattgttcatcaatctcaatcaatttcaatcttctgattttgttcatcaatctctctctctctctctgagttattgggatttgaaacgtttttagaacagagcaaaacagagtatatttggtgtttttttttctctttctctgtgatttgatttgatttcaatcagcaaatagttatattctaatgttgtttgttgggtgttttgaatgaatgaatgattcaaggtgtggaga

SEQ ID NO: 106683 - DNA, 453 bp, Aquilegia coerulea
  Intron number 3 from transcript AcoGoldSmith_v1.021793m (l ocus AcoGoldSmith_v1.021793m.g) derived from phytozome v7. 0 (chr-ID scaffold_62; pos 854855 to 855307)
aaaaaggtggaggagacgacaagaagggcaaagaggtaattgtgttttactatcttctctgctgtgcttcttcaattctactgcatctctgtgtatcaaagtactagtacatgttgtataatggttgcacgcctatcttctttatgagtttttgttgttttcttcttcaccttcttcaactagtggaaattgcacctgtaaacttttctgtacagactacagaatgtgtttttttgtctctttggtccccacttatttggagtttggtgttaatttatctctttattagtttaagctgccaagtggttttattttgattattgaaatcatgatcaatgatggggggtttggagattagtgtaattggaattattattaaatccggtttctaatattattgttcttggttgttgtttagccttctgtgagtactgtggtgttcaagattcggtt

SEQ ID NO: 106684 - DNA, 747 bp, Aquilegia coerulea
  Intron number 2 from transcript AcoGoldSmith_v1.027243m (l ocus AcoGoldSmith_v1.027243m.g) derived from phytozome v7. 0 (chr-ID scaffold_41; pos 1107894 to 1108640 reverse stra nd)
taactacaggtatgatgtagggtgtctgtaggttatatactgcttatcattattcaaaagttatacatactgtatatgaaaaatggaaatctacaagtcagctttctctcaactctgtcaaggtttatataaaagtcatcatacaaatcggactagaataagtctccatctgggataacgtgatttatgttcaagcagcttttccacaaactcaaaaaccgtatagttctatgacgagtacttgcaatcatagcactgttgaaacctttttttttttttttttttgggatgttgaaatggttggaatctgctgatttggaagaaatcgatgtttaatttgtgctaatagaagagaaagttaatattgaatttaactataatcagcatttcccagtgtttttaggagtattttttggtagtagcagtggatgctttgagtcaaagcatatgatccgaatgaagtagttatacttaatatctcaaatttaatgtggaataagtttgataggtggtgaactggtattatctgcatgattctgcatccaagttagctttccttttgatgaacacaccgtggtattattgacatccaagtcagtatccttttgaataaccaaactacaacaagattctcttgttttttctttatgagagttaaaacaaataaaagagaaagaaaaacaaaacagagcaagtcgtttctatatctttggtcatgtctttgcagatcacaagtattactacaat

SEQ ID NO: 106685 - DNA, 752 bp, Aquilegia coerulea
  Intron number 1 from transcript AcoGoldSmith_v1.027243m (l ocus AcoGoldSmith_v1.027243m.g) derived from phytozome v7. 0 (chr-ID scaffold_41; pos 1108757 to 1109508 reverse stra nd)
ggtgagtgccagtttttatcaatgtttctgttttttcataataaagcagctccttattattgcaaatgttggcacactttagcacataagttaagatgagcaatttttttacgattggtttcagtgtttcatctgctttactcatcacagctcttgttttgcaatgttgctttagcgttatttcatgcatcttcgagaagaatagaattacctgagcaaatatgtttggcttttaatgtttagtcagctttaaattaaaaagaaataattttgttttggtgtgtaagtttttaatgttggtgcatatacgcgatcattactaaggtgtaggttactaacttactacttataaagaccataaatggaattcatattcctccttactaggttaaaatcagttcaaagagcacctcactgttgatgctatctatttttggtgtgcacttttaattctttttctgtcgtcttttttaagatgattgcatccgtacatgaactttgtgatatgtttgaatgaaccagtacaggagatggctatatttgacgtgtatgtataattctgctcacatgcttattatcttttttcatcactaggtttttgacattctaatattggtgttgcttgtaagatagatagaatctttatatgacatatatgctttctttttcttttttctcttgcggatatcagttctacgttttgactttctaatgcagaaggaagcaaaagacccttcaactggttctgttta

SEQ ID NO: 106686 - DNA, 604 bp, Aquilegia coerulea
  Intron number 2 from transcript AcoGoldSmith_v1.011353m (l ocus AcoGoldSmith_v1.011353m.g) derived from phytozome v7. 0 (chr-ID scaffold_42; pos 537002 to 537605)
gcagagaccggaacttgtggcaccttagccacgaggtaactaaagatttatttattttttgcttatgtaatttatttaaatttgagtggtgttcgctctcaatctttgccttgtgcctttgattatttttcattattctatatagccatatgtcagcccccatggatatatggctcattcttctataaaaccaacctctgagcctgataaaccaataatttgacctcaaattgacatgatcagtcgatgcagacttctgatttaagtgttcctagtgagtgtattgaatattgataggtcaaatattattctgctattggatcttctttgcactgattctgaaaagaaactaattcttacctttcccttgtttttggaaccttgactcattcttgaataaaacatacatctgagcctcttaaagcaatagtgtaacctcgacttaacatggtcattcgaatattgaatattgctagatcaaatattattttgctattgaagcttcttgacagtgattgactgattgtgaaaagaaactaattcttactacgtccttgtttgtttatgcttgtcatgaagggagacattctggaagaccctgcaa

SEQ ID NO: 106687 - DNA, 1007 bp, Aquilegia coerulea
  Intron number 1 from transcript AcoGoldSmith_v1.000284m (l ocus AcoGoldSmith_v1.000284m.g) derived from phytozome v7. 0 (chr-ID scaffold_5; pos 7336964 to 7337970)
ttgaagattcctgcagctgttctaagcccatataggtataattcttctctttcttatccctacttggttttgtaaatattattatactgctctataaactattaacattctatctctttctgtactctcatttgtttgatcatgattttcaatttttggctatgggattgttggattgaacaaatgtataattgagtcaggaatgtggatatggccaagtcaatctcttgtatatagtaactatcaatgagttaagttctgtagaatacgtctataacctggctgatcaacaactctgaatagtatattaaatacaaataactgacccaaactgagattcagatattcagggcctgtggataatatatcattgagaatgtttccttcaagcaaatttagtttattatgaaatatgactgtaagtttattgcttgttcgttctgtttgttatattgtgaaatactctctcctgaccatttagatgaaagtgaatcaccacttataacctttaagttttcactttacactcatagtttccatgtcctcaagatttcatactttgtttatttcgttatgtgtttttcaatgatcaataccaatgagtctctagtcatagtttgtaatttttactctttgtatgatttccttttggaatataattatatatttcattttggtgatttgcatacatatacgattgttttcattatgactccatgtggcatgtttgtaatgacagtttataatttcaaatcatgtaatagttttttttttttttttttcttttgctttgctcatctttatttaaattttggtgataatgtacggtaaatatgtgtcagataaacatgaatgtattagtataccttgacttttgttggttttgtaccatacaaagttatgaacaacatcatgccaaagttttgttagttatataatttactaaaagtcaaaattaatattccattgtttgcaaatttgtttacaggctcctaatctgtgttcgg

SEQ ID NO: 106688 - DNA, 891 bp, Aquilegia coerulea
  Intron number 1 from transcript AcoGoldSmith_v1.016618m (l ocus AcoGoldSmith_v1.016618m.g) derived from phytozome v7. 0 (chr-ID scaffold_23; pos 1079090 to 1079980 reverse stra nd)
agatctcagttacatcacaggtatatcctaaacaaaagattttttttttagcagaattcagaactgagttgatgatgtatactcagtatgcaaaatgatggtagcttttaggccttttttcataatcacggagacaaagctaatgtgtgttatacacacttagtacatataataatgcacttggttttcacgtaaaaaactttgttcagcattactaagagcaaagttgcagatgccagctgagctcagttggtaatacctctgggcgatcataccagaggtctggggttccatcccaggcactgcatctttgagtactgatctccttaaaaacaggtttgccaataaaaaaaaaaggagctaatgcctttttatgaggaacattcgaacatacttgactcagccaaaaacttcaaaaacaatgattttcacacgtgaaaggtggtttagtttgtgtgtgtgtgtgtgtgtgtgtggaggtggtgtgtgtgtgtgggggggggggggggggggaagctgtttggagggctctcaagatgcattaagtgaaatttaggtataatctaacattacagaggatgagacatatacttcctagaaaaagaaacattgcacatcaatcttccaataaaaattcaactgttgttaaattctcattactgttttaagaatctgtactttacattcagttcatcagaaaaatattctgaaaaaaatcttccactgtgatattaatcttgttatgtcagagtatttgttctcagttcttcaaatgtccccttcatcaaatcttctgcatgttgaatacatattagtccaaattcacgtcacatacgtaattattgaatctgagcttggttattggttacaggtccttcagaagaagtcacc

SEQ ID NO: 106689 - DNA, 879 bp, Aquilegia coerulea
  Intron number 1 from transcript AcoGoldSmith_v1.013719m (l ocus AcoGoldSmith_v1.013719m.g) derived from phytozome v7. 0 (chr-ID scaffold_1261; pos 1103 to 1981 reverse strand)
caatcgtgtcttttatcgaggttggcaggccgtaggtacgtctattcactctctcgtgcacacctgcttctttattttctccgtcactcgggattcttgtaaaattacagtattgacctcaaaacattttagcaacactgaatttattaaggttaaactcgtcattttgtcacaacaagaatgaaaacaagatttccatgaacaggatactttacatgtctcgcaatgggtattagtatactagtataatataagaaacttatttgtgaccatgtggctatcaaggtaggcgaagggcttctgtaaccttagactcgttatgctgctgttcgactgaactcgttggctctgcgtccaccattctgtaaatacaaattgtttaggctcattgtgatactactatgaaactatgaaagtaccaaacattacagttacaactcaatactgttaatagtaaattgttgatggagatattctgtgaatttgctaatgtagttattagtaagacaagaaaatgttcctagctgatttgtgttcgaaacaaaatttcccgttttacaatcaaaataaactttacagacattgcatttcattcaattctgtgattcatagttacttttagctttagatctctaactgccttcctctacagtctagacattaaactctgtttttaagtttgtttcaaattgggcaagctttttatgtactacttttttgccgtattagaggtgtatctgcctaatcatgaacaagttagacagttcaatggggaaatgacaattattcacattattgagctgacttgtgttgtttctgcatatttttttttttatgttcattgaatgtcagggtttacagaacaaataaaaaatcccc

SEQ ID NO: 106690 - DNA, 549 bp, Aquilegia coerulea
  Intron number 1 from transcript AcoGoldSmith_v1.003789m (l ocus AcoGoldSmith_v1.003789m.g) derived from phytozome v7. 0 (chr-ID scaffold_5; pos 3677684 to 3678232 reverse stran d)
ctagcaaagtaatcaatcttcttctctcttttttttttttttttcaatttgggtttttgatttagaatttagatccataattggataattatgtgatgtactttattgagctttttaaggttgcttgttttaaagtttactttttatttatttaactttcattagattttttaaaggacccttagtatgaagatcattatcagtttgatactgtaaccttactgggaaatttcgcaaattttttttggtattttgaattcaaagtattggcattttgaaatttaggacgttttgttttgaattaggatacaatgttcatataatatatcagttatcccaagggtttttttttttttttttttacgttacttctgtagctcaattagaattctcgcaatgttgatgctattacatataatcatttttttttcctttacttttttagtttgttgatgccaatttttttttaagctgtgatgattggagaaataattggttatgtaatttgatgcagagtgttcttggtattatacttgggggtggagctgg

SEQ ID NO: 106691 - DNA, 571 bp, Aquilegia coerulea
  Intron number 2 from transcript AcoGoldSmith_v1.015849m (l ocus AcoGoldSmith_v1.015849m.g) derived from phytozome v7. 0 (chr-ID scaffold_20; pos 1410950 to 1411520 reverse stra nd)
aggcaaaggtgagtacgaaatcgtttataattttgcaaagcaactgaaagtgagaagacataacctatctaatatacttcttacaatggggacatgtctaacgtgtctaatttggtaatggacagattgctgaatggttgtatttgtgtgtgtgtgtgtgtgtgaaagcggaattatatttgtaatattattcctttctgaatatgttgttaaaggattttcagttttatgtgacttctatttttactatagtgaatgtgcttcaactatccttagtatgtgaagtgcttctatatacgacaagtataataagtacattatcgtatgacaaaacaagttctctaaaattaaagatgttaggaacatgtcattcattatcttactttagtttatttttctggaaacttacttgcttttcttgagaatagggttagaacagagaactaattctttccatttccttttatatgtagcctttttctctagtgtcttcctgtttaatttgtgtttgattattgcctaaccatatccactctgagtttaagttcttccattatgcagaacaatatca

SEQ ID NO: 106692 - DNA, 822 bp, Aquilegia coerulea
  Intron number 3 from transcript AcoGoldSmith_v1.025304m (l ocus AcoGoldSmith_v1.025304m.g) derived from phytozome v7. 0 (chr-ID scaffold_17; pos 618101 to 618922)
ttgcaaaagctttcgtgaagactgcatccaaatcggtatgtatataaacaaattaacaaaaccctaatttctaatgtatgaattgttgaatcatgattgtaatctggtatgtgctatctaactgcaatttttgacaacaataactactactctgtgtttttcttactctggtctaactaagctatcctagttttattttcaaaaatgttttcttctaggttttattagcaaaatgttccaatgtatgaatgttatttctttcaagcaggacttttgattcaattctcctacattcttattcatcttttggggatcaaaataaaataaaattaagtgattaaagagatactgtatgtgtttgtttttttcttgtgggtatccttgaatactgtatcacttcaatgcagaaagcatggatgtttgttactttgtttataaataatactatagtcatgtttttagtttggtaaattgttctcaggaaaatgatactctttggaacaagacttctggtactataatcctacatttgttatccatctgatactattattctcgggggctgtttatttattttccccttgaagattcaatgaatagatagcaccttaatgaggaaagacatgtgtatatgagaaagaacattaatacattgatgtaaaaaaaaaaaaaaaaacagccttgactaaattaagcagaatttgaagcttgtaaattactttttgactttttgtaatcctgtacgtcttactttacatttcttatttgaaaaatccaagttttaaacataggcatataacatatagattaatactaaattac

SEQ ID NO: 106693 - DNA, 440 bp, Aquilegia coerulea
  Intron number 2 from transcript AcoGoldSmith_v1.010249m (l ocus AcoGoldSmith_v1.010249m.g) derived from phytozome v7. 0 (chr-ID scaffold_14; pos 1965704 to 1966143)
ctgctgctctgtttctctttcttgctcctgtgtaagttctataacacatactttctttctctcttctcatctcttacatcttcatacatagaagcttggttacatgttcatttctgatttcttcatcttatgtactctgtattctaaattttctccaaaaaaaattaatggggttttctgcttttcactaaaaacccaatattattgattttaagaatgattttagtgattttgatctaattcagccatttcaaacaaatttcttgatttcaacaagtgaagattaatgggtttctttcagattcttgaaataaatcctagattcagtagattgtttctttacaatcacttgttcatcttctcgatcagtagaagaagattcaaactttcttggtttctttgcagaataacatttcgaagaatcttgaagagcaaatcaa

SEQ ID NO: 106694 - DNA, 459 bp, Aquilegia coerulea
  Intron number 3 from transcript AcoGoldSmith_v1.010249m (l ocus AcoGoldSmith_v1.010249m.g) derived from phytozome v7. 0 (chr-ID scaffold_14; pos 1966179 to 1966637)
accttgctcaactgtcttctctctgcgtactattactatcttaccctcatccccttactcattttcccttcttttacattagaaaatacaggattattattgtcatttattttaatataagggatcagatggttccatggttttggttcttgtggctaaaacttggcacgtgttaaatttctttgttgagtaggcattgttgtgttgtctgcagtctgcacctggaccacaatcacacttcacaagtcctggtcccgtttaagtttatgtagcaattccggaattagtgtattacattttgactaatttctgctttaaaaacatacatgattttgattattattttagcaaaagttgctcatactttgtagtttaggcaatatgccgggatccatatgaatgtgatttgttagaagattggacctgttttgtataatatgctgatttatgaaaacaggt

SEQ ID NO: 106695 - DNA, 962 bp, Aquilegia coerulea
  Intron number 1 from transcript AcoGoldSmith_v1.004974m (l ocus AcoGoldSmith_v1.004984m.g) derived from phytozome v7. 0 (chr-ID scaffold_14; pos 1934975 to 1935936)
gaagattaacgatagttactcagacgattagcaaggtgattttctagcttcctactgtactagtactacacaaacaaggtgattgtatatcttctctttctttttctatatgacttcatcagataggatatcacatatcagtaatcctaccttaactcaaaacgtgcacggtctgagcagatgccgacatccaaccctgaacacactatttatcaattttgtttcacaaatttagtgttaagtcttagagtttttctttctgttgtattgcctagctattgttaattgaatagaatctatactacatgcaacagagatgaaatgaacattttagcaaatttttttaatcgttttttagcgaatttatgaacattttgacttgaaatgaacatgagatatgctacacaaattgcagaataaaatgggattacattatagaaagaaaggtcaagttgagtagtgaatatatgaagatagatccgaatacttattattgaccctacataaagaaccttccttgtcaaaattaaagcttttagtcccacttgaattattaaaaacctaaataataaacaatattctttcaaagattcttcaaagctagaacataatcaatcatctttgcagcaatccaataattctagtggtccaaaattaatttacagaacatggatatacataaaatggtagtccaagactacaagttgcctgaactatgttggatctgactttcagtcgatgttttcgaatctaataacactcatatacatacttggaagtgcattcatttttcctgaaatgagtgtaatctgtttgaaaatgaattgctgaaaacataaggtttttatcgataaattgttctcagtttttttttttccttcttcactatagttcatgttagtttatctgttcaacttttcaatctgatgtaggcagaagttaatttgtcttgttggtgttgg

SEQ ID NO: 106696 - DNA, 833 bp, Aquilegia coerulea
  Intron number 2 from transcript AcoGoldSmith_v1.000158m (l ocus AcoGoldSmith_v1.000158m.g) derived from phytozome v7. 0 (chr-ID scaffold_17; pos 1878081 to 1878913)
ttgataaatctcagaaacctaaggttcttcaagaagtaagatttctttcttcgttgaatttaatagattattagtgaattttttgctgaattgaggttaaaatttagggttaaatcgatgtttttgagctcaagagtattggtttgtcatgttttaagatttggagtatgtgttattgtgagaatttgttttaattacttctaattcaaatatcttcgatcttgttagtgcaattaagatctggagttattacatctagcgtagtttgagatgattagagaagtagtggatcaattgtcatagttctgagctaagattaagtgaaggatgggttagcttctgtaatggaattgagatttgttgactttgaccaaaataggtctgaggatagattgcttagctgaggaactacaaatctcatcgatccacaatatagtgagtcaacaatacatacacctaattatcattgttgccattttggtacgttggaggttctgcagatcacactaggggttagggctttgttaggttgtgttcactttttaaatttgttctttggttgtgatctatataagctatataataaattggcatttttgttttgatttgagtaaaatttccacggggttaaacactgggattggcccttcttttatgcctcccctttgtcttttgattatcctaagaaattgtagaacttgcaagagaactactaaaccttggccatcatatctttccttatgagacacatgtatcatggttttacttattatgtaatagttttctgattatattcacgcaggtacggatcctccactcattagatcatccaa

SEQ ID NO: 106697 - DNA, 808 bp, Aquilegia coerulea
  Intron number 1 from transcript AcoGoldSmith_v1.024837m (l ocus AcoGoldSmith_v1.024837m.g) derived from phytozome v7. 0 (chr-ID scaffold_45; pos 1424161 to 1424968 reverse stra nd)
aacattcatgtaagcaacaatataagagcagttgcatgcatattactccagctaattttatcacaaatttgatgagcatgtaagcaacaatcttaaagagaagttgcaactgaaaatctgcagttcatttgaatcagtcagctattccagggcattttattccggacagatacaccaagtctatttggcattttatttcttgagaaaaacaaaaactaaactgtgaaattctgataaatccaaaactgtctcattaagtgttgtgattgaatcaatggagtagttaagtgtaattctaattgcgatgggaaatcataaatattcatctctatcgcttaatctttcacttgcacagtgggatttgtccaactacatatattgctacaggcgtgcacaatggcgtgatgctgagcttatcctaacgtggatatgttataaagacaaatacatctttcattatcaatgccctaatttgtgttgctcatcacctcttgtaatgtgtccttctctgttgattataatgcactctcatgattatattgttgaagacttgaaataaatgatacagaacattctgtttgtatctataaaaagctcgacttctcctctatccaaatcccaaatttggcttcactatggaatctcattgaggacaaaatagctttcatatatagtctggtagtattagtagtactagtactgtagagttttgcatgttagaacattgttctgttacaaaactatcacagtacctacagagttgtagtttttactagaatggaaaaaaaggagattaaaatcagaagct

SEQ ID NO: 106698 - DNA, 826 bp, Aquilegia coerulea
  Intron number 1 from transcript AcoGoldSmith_v1.005458m (l ocus AcoGoldSmith_v1.005458m.g) derived from phytozome v7. 0 (chr-ID scaffold_14; pos 1055164 to 1055989)
cgtgcaaaactaagctttttcagagaccaagcagagtaagaactaaagaacatcatcatcacttcttctactttaccattttttttctcaatttctttttaagtattgtttagtgctttcaagtaaacctaattctcttcatcactcacttaaatctaaaacccttatttaataaacatcacacttttgataaaataaaatgtttgtagattcttgaaatgagatgttaattttgatttgaaaaggttaatcaattcatctcttacatttgaaaaagaaagaaactgctagtaattccattgatgttatgttctgaagaaaatactagaacaacaagcatactattcaaaatctcacacaattgactaattgaaagcttaattttgataattggcaaaaagcttagagtttttaaatactgtacagtgttgataatgtattttgccaatccttagaaaaccaattactttaattctttaaaacttccagtgagtgaccaaaatccaaatattaactatttgttctatcctcgtactatctcaagagttttaaaaggatttttttttcttggtttgttgtcgatttcatgcacactgtacaacttctaatgagtctgaagcaagaacaaaaattattttaaggggttcaaacaatctttcctggaccatgtaaaccatattggttgtttacatgtttaaccatttttaatagatttggattcctacgttccttactgatattcagtcattagaaaagttaccatctcttatatgtttctttttgtttcccagtttattgactcttgagggggttcgacgggaattag

SEQ ID NO: 106699 - DNA, 544 bp, Aquilegia coerulea
  Intron number 2 from transcript AcoGoldSmith_v1.008113m (l ocus AcoGoldSmith_v1.008113m.g) derived from phytozome v7. 0 (chr-ID scaffold_14; pos 1871242 to 1871785 reverse stra nd)
agagccaatcgtcatccagtgaagcagcaaaacaggtttgttttcttccaaaggttccctccatgtacagttttataatatgtgaggctttagatcctatcaatgctcagtgcctcaattgctttagcgttaattccaaactggtagttttgtctctttgcatgatactctgtaattccatcttttttagaaaaaaaattaatacccttacttttgagtttggtgactccttttatgagtgagctattgttttgtttatgttgatttagatcctgctgactgataagtgttacattttcttgctgacactcaaaaaaaaaattgtgctggtttctttctacctctagcaatgacacttccttatttaatttctgtattccacttttcaatgcatgtataccgtaattagtgaataagcttttaaagttacatacctagccttccacacccttttcaaacactgacaattctgtccctacccttgctaatgacaatcataattttggtcttgttttctttcctttctgtctgtagcaggcattag

SEQ ID NO: 106700 - DNA, 856 bp, Aquilegia coerulea
  Intron number 2 from transcript AcoGoldSmith_v1.022248m (l ocus AcoGoldSmith_v1.022248m.g) derived from phytozome v7. 0 (chr-ID scaffold_73; pos 414285 to 415140)
caagatcgtctggtatcaagctaactgaatcacaggtacatacattgatcatatcctgttcacttagacactgataagaaacaacacattatacttgttgtgaggtaggtccacgattaattgatctcccctagaggtcttctatgcgaaaattcagctagtacatggggatggattccttttgttgcatttctcctttagcacattaactttttagatatcaatgcgcaatttgatttaaaacaacacttacaattaaggtttataacaaagacttcatgtattgagtaataagaaaatgtaagtttgatttcccaagaagaagaaaggtaagctataacttagacaaactaatattttgcttttttttttttttctgcaagatccctcagcttagctaaagaggaaaaacattatcaaattcctaaatcactctgctaccgaaacagctaatgcatattagtgatctgaggcactaacaaattaatgtataggattcaggaaagacagttcaatatgtttctgcagttgatggcgctaaggtaaaaaatagtttggaaagtttgttggaatatgtaattgagcaactgtcatgtatctttatgatagatcaagcgctatcttcctgactagattcataaatctatttcagtccgttgctgagtgtgtgccaactctcgtgtgtattgttatgctttttgtcttacatgcatgtgccctatattttgtttaatatatgattttggtgcatcacatgacaatttggagagtttggtgtaactggctctcagtatagtcgatcttaacctcctgccagtgtcgtgacatggaagttcattctctttttccagattaa

SEQ ID NO: 106701 - DNA, 511 bp, Aquilegia coerulea
  Intron number 1 from transcript AcoGoldSmith_v1.023967m (l ocus AcoGoldSmith_v1.023967m.g) derived from phytozome v7. 0 (chr-ID scaffold_17; pos 211742 to 212252)
cttgtatgttttatgtaacttcttcttcttcttcttcttctgttcttttgtttgctatttaaactcttttagtgtttttgaaatctaactcttttaatgtaattttatttttatcaaagtgctcattttatatttttgtacccattactcatcttgtcatctctgagaccatgaccactttggcctgttggccacccctagctttctttgaaacttgtagcatttgtacttagtttttgttcattttgaaaaccatgaaagtttaaaaggattaaggtgacatatgtgggtatcagtatcagaatcattgggtggtccataataatggaaaagtgagcactttgttgaaatataagttggtatcttttagtccatgaacatagttgttaaacatactatatcaatcaatccatagtttcaatttctttctaaagtttgattcttcccttgaagttaacatagttgggtgcacttatgaatgaatatgcttttactatatcaggtagctgag

SEQ ID NO: 106702 - DNA, 664 bp, Aquilegia coerulea
  Intron number 1 from transcript AcoGoldSmith_v1.026270m (l ocus AcoGoldSmith_v1.026270m.g) derived from phytozome v7. 0 (chr-ID scaffold_14; pos 2953956 to 2954619 reverse stra nd)
gttttggaggaattgtattaaggtaaatccaaagtcatcttcaaaggttatctacatttgtagtaatacagtgtgaagcaaggaataatggacatcatcagttgctcccatatatctaactaaatcctaaaagctatctttcttttgtttctatcaattatttttaccattgtcattgcagagggatgcttggttaatgtttgaacttgaacgaaaatatttgctaagtgatttttggcactcagttacagcttcttttctgttttccatatactaggagaagctttgaaacgttgagaatgagagtattctgtcaggagttcaactcacagtccaaatatctgacactttctgaccaatccttctccaattacaactgtttttgtgtctttggggcttcgtttttgtggtgtttagaacaacacaatcctagtttttaatttaattctttgttgtattcttctgcattgatcctctagtaagtggattgatctatcagatggatgcacattttgcaattaaagacatccatttaagccattgtatttagtgataattttcttttgacctgaacgtcttctattttttatgattaatttaattaagatcaacattggtgtataacaatactaaactaaactgttggcagccctgttggaaaaca

SEQ ID NO: 106703 - DNA, 908 bp, Aquilegia coerulea
  Intron number 2 from transcript AcoGoldSmith_v1.017920m (l ocus AcoGoldSmith_v1.017920m.g) derived from phytozome v7. 0 (chr-ID scaffold_5; pos 7608786 to 7609693 reverse stran d)
gagctattgttttcaaacagatactaattcaaaaggtactgctatactttctttccttgagttagatttattctttcttgggtatgtaatattgtaatgaaagttgatgtgatccccaaatataaatcttccattattttttattgatttcaaactgcctctgacaagttccatgttgtcatactagatttcttttttagcccgtcactcataattttcagttttcacatttgatgaaatttcaaaaccaatcctacaattttctcactggggctagaattaaagcttctgcatagcaaagactccgaagtcagcaattattgtaaagaaaaatctgtatacagtacttagaatttgtgaactttaatgttacttgatgaataatgacagaatctggatatagatttccacaatcaacctgatatagctttgctgattaatgtttttgtattagtatggatgaactatactcatgttgtcatcatttctattagattttattatattgttcactacttatcataatcctcaaaatgcaaattttgaagaatggagagaccgtttaccttggtcaagtcactcaagggaaaggcccaaggaagaactgagactaccatttgctgaaattgaaagcttatgcataacttccttaagttagtaaaaaaatgacatctcatgctttattgataaacaattcactgagtataagaccataaactatcctttcatcttataactttctatattttgtttatatattaatatatcaacattacccggcatttcagtagtgacttatcagaatgcttttcagtagtgtcatattgatcttaatttggtggagtgtaaccctttgttttgtatcctacgtagattgaattttttgaccggtacaaggtgcgaacata

SEQ ID NO: 106704 - DNA, 956 bp, Aquilegia coerulea
  Intron number 1 from transcript AcoGoldSmith_v1.020024m (l ocus AcoGoldSmith_v1.020024m.g) derived from phytozome v7. 0 (chr-ID scaffold_17; pos 3717188 to 3718143)
actggctttcctttgagaattccgttccatagatatttggtctaaggaattgtttgtttgtcatagatattcatctaatatgctaaaggtcaaagtcatactaggcatgctgctgcagtgatcgtcactatttcaaatgcgaaagtgaatgcatattatcttaagccagccctccagaaacaagcagattcgatgaccaggagtgcaagatcatgccaaagttataatgcaatgtctctgttttcttttggtacttatctaaagtaccattattaggaacatcttgagatttttggacttttcaacatgtttacaaccagcagcagccacctattgttcaacagaaatgttcttttcagcaacggatttagtagggaattgaaatcaaagttcgaatattatgctcaccctaccattaccaacatagcaaaacctaggtatgtcatctgttgttttaaggtgctctacataagtacattctacatttgtctgatgtgcccccccccccccccccccccccccccttcaagataatcaattgttgacaaaacaaatgatgcattagcaggacatgtcaagttgataatgtcttccatatggtagaaaatcttatgcttccacaagaaaatatataacaacgtacgtgtataaaaaagtctttactttccagtttccacaataaaaaaaaagaaaaagtctttactttccacccaaatgtcattctatgattattgcatcacttcaccatgcttatctccaagactcaaacaatttgcatgtataatttggtaaaaccagcacaaagcctctcccagtctctttataaattgatgaacccctcttagatcactctaaccatatcttctcaataagcaaaaccaaaatgcctcttaaatattttcttgttgtttctgctatgtctcattgctggtgtccagagtgcttctaatagtcta

SEQ ID NO: 106705 - DNA, 1008 bp, Aquilegia coerulea
  Intron number 4 from transcript AcoGoldSmith_v1.003139m (l ocus AcoGoldSmith_v1.003139m.g) derived from phytozome v7. 0 (chr-ID scaffold_4; pos 4773351 to 4774358)
gtggccaggagcttaactctccaggtgctatccaggtagtctttttcttaattagttggaatatgttttgaaacatttcattggggtgatttagaacctgaaacacataccagtatcacttttgttgatagatgagtcatttaggaatcttgtggttttgagacctaagtttgtggtaacaaactaacaactctcacaagatgaaataactattagctatttgtcacagaccaacagtacgcatataaaatattcatttgggaaagaaacactgaaattcgagaaaaagagtaactcgaacctagaagaaaggaaaaaaaatcttcggaagacataactaaaatctcggatgaacaaaacaggcaagttgaacttccatttgatgatatttcttcattcattcccatccagtcaaaagatgtcctaaaaatgtaaacttgctgagaaactcttcaatggctctttatgttataagaaaacatagactggtcttgaacaaagttacaaatcctcaacatacatgatggagcgaatttatctttattgaggcgtgagaagggactgtgcaaagattcctcaagaagactcaatgagagttaatatgcggggaaacttgcatttacatatttcttacattgatctggtgagattcctcaagaagactcaactgatattaagacaattagttatagtatattctgaagtgagggtaagagccaaatttgcgttaaatcaaatttccagcattatcagaaatatcctttggcccattttgtctaaataagggtcgttaaaacattgggattctctttcagtggttcactaagttagtctaggttcattactaagtttatctcgcaatgttgtatatagaacaaaccttaatgcttttcatcgaacttgtcagttgtcatcaaaattccatttcagttatatcttgtcttcttttgaagcaaacatggttttcttagacttattccaattattattattttcctccttagcagg

SEQ ID NO: 106706 - DNA, 1055 bp, Aquilegia coerulea
  Intron number 1 from transcript AcoGoldSmith_v1.006193m (l ocus AcoGoldSmith_v1.006193m.g) derived from phytozome v7. 0 (chr-ID scaffold_14; pos 3204137 to 3205191)
attttagagattcttatttggctaaattctttagggtatgtgtttgaacattttcgtttttatgaaattttttttcttagaaatgatcaacttttaattgttattgatttgagaagactttttagaaacttaatcattgtaatcagaattcaaaattatggtgaagttagtttgcgagaactgaagttgactttcttataagtgaaaacacattctgcaatagcttgattggtatttctctaaattgagtttgtgagtaagagtcatgagtaggagtagtggagtacggtatgagaacgagttctttataaattataatcttcgttttttatttggtgaaatttcaaggaaggttaatgaaattattttcacatggaagtgatttaggagggatttgaatttgagagagttgggatttgaaggggatgtagagcttcgttttataaacatctaagcttactggggatcgggaatagttgctttttttgtgtttgagttgtaaatgatgggtcaaataaattcaaggctttgctatatgataccaaattctcgatactagtatcatttactcatttctctatattgtcatcatttccttacttttaaccttgttctcttgaaaattttcttctcatgggatagatatttgatctgtcagatatgctggctagttcctttctatacacacggctttcgtgttttgttaaatttgatatcataccatttgtgtttcagtatcatcttacttgaattacatatctaccatttcacccttttgatgcagtagcccaattcaataaattgagctttgttaaattctgctcagacacatatattgaaagagtaaacttatttctccacatcttgcaagttatgttcagcttcaagctttactatttgagttctgtgaaaactgaataagtctaactatatttatcttcatgtcttgcttgttcctttaatagatttctgtttttttttctccttttctttgactaacagaatttaatttactttttgtgaatcagaaatccttcgagaggcttaacccagat

SEQ ID NO: 106707 - DNA, 558 bp, Aquilegia coerulea
  Intron number 1 from transcript AcoGoldSmith_v1.022396m (l ocus AcoGoldSmith_v1.022396m.g) derived from phytozome v7. 0 (chr-ID scaffold_293; pos 450 to 1007)
gcatttggcataaaagaatatctacaccaggtacttagaagtcgctgtggtgttagcatttgttaaccatcagacactgtttttgctggtcctgaggaatgtgactgaattagaatttcattttatgtaatacagtgcacggtattaatccacctaatgactacaaaaattcaaaagtgtactgaagctaagaatcagctgttgaatttaagaaaaagatttaagtgcacactgttaattttttgtttcttgcagatcgaaatggaagctatcgtccattacaattaaggtcagttactaagttccatgcacttacaagggcagagtactttctgttttattttagaccctcttcaagtagtctaacctggactttgaattatcttcttctgtttgcagcaaaggtattgggtcttcttctgcattttggataaagccaaaagttgatatctgctattttggtgtagaaattgagattttcaagatagggtcttatacatttgctgttgctgaactttatcaggaatttctagtggagccattgctggcatttctatt

SEQ ID NO: 106708 - DNA, 269 bp, Aquilegia coerulea
  Intron number 2 from transcript AcoGoldSmith_v1.013786m (l ocus AcoGoldSmith_v1.013786m.g) derived from phytozome v7. 0 (chr-ID scaffold_4; pos 3724796 to 3725064 reverse stran d)
gtcattttaatcattacagtctgcatttgttacaggtattagtcaaattttctcttttaatcagcttttcttattcattcttatcttattgcttcaaaattttggttgttttcgttaacaacaagaactctgttttaataaagataaagctttgacttcaaaattgaaaagtttttctgcttttctattctaaatttgtctttgggtttttttcatatttgattttaaataaatttgttcttcaattttacagtacaaaggagagctca

SEQ ID NO: 106709 - DNA, 197 bp, Aquilegia coerulea
  Intron number 1 from transcript AcoGoldSmith_v1.025183m (l ocus AcoGoldSmith_v1.025183m.g) derived from phytozome v7. 0 (chr-ID scaffold_17; pos 470404 to 470600 reverse strand )
tacttctgaaagggaaagaacgagatattactcatgttagtttgcatcttctgtttcctcttctgttttgacttttcttttgtataaacaaattattttcaggaacatttctagtctaattttcttgcaacgaaacatctcgtagcaaattgttacacataatcaagtgacactacttataatgcttgtacagtcat

SEQ ID NO: 106710 - DNA, 734 bp, Aquilegia coerulea
  Intron number 1 from transcript AcoGoldSmith_v1.024911m (l ocus AcoGoldSmith_v1.024911m.g) derived from phytozome v7. 0 (chr-ID scaffold_5; pos 3001325 to 3002058)
cagaaaaaagtcggtttcaaaagtttctttaggattgatgtatcggagacttgtgataaatggtattatatctctgtcacgatggatagaaattctttaatgtgatgttagaagttggattatcaaacaaaacagataactttccagcaaggatgagattgacatttgtgactttgtgtgcaacttgcatgctttgcactgttaaaatattgctgtgagcctgtgatgctaagttcactaaaatggttgtggggagttgacacaatctcaatactattaggtcactagtcactactgtaccaatccattgttcaaagttcaaacttcatctttctttcttttttggtaaaaaaaaacttcatctttctaaaagccattttgcaatccaatttgcatttaataaaggcttctaattaattttgactagtcatttgtcaaagggcttccatccaatatgtttattgaaaggggtcaaatactcaaattactacaaccattttaatccgaaataagttccgagtctaattactaagcgatgctgccaagaaactacttctcacttaccttccagcttccaagttaggtcatttttatacataaaccttcttccttcacacacataccaaatcctttgcatcaccaaactaagcagcatggagaaattatcatcatcaacaacaacatcatcacgttcattagaaatcacaattatttctgcagaagatttacgtaac

SEQ ID NO: 106711 - DNA, 423 bp, Aquilegia coerulea
  Intron number 2 from transcript AcoGoldSmith_v1.003683m (l ocus AcoGoldSmith_v1.003683m.g) derived from phytozome v7. 0 (chr-ID scaffold_14; pos 442673 to 443095)
accagcctattcggtatggatagcttcatttttttttactttctttttctcctctacttccaattaaaccttctaggcaaggatagaaagaatgtggatgcaaaactatcctcagaataggatttgagggttcttgttggcttagggcaatgaaccctattgtatatcctcaacttttgcaatttaaacgaattgcaatagtagtgtagctgtagcataatcttcctgtaatttagtccaaacatcctattttttgcaacctgcaattgctttggagtgtttcaagcaggtcatcagctgacatataagtatataaaaatcaagaaccatgctatgcaaatttcaaactgagatagaaaaattgtgtaatctgactaacatatttgagttaacggtttgttaatcttggaactagctttccag

SEQ ID NO: 106712 - DNA, 503 bp, Aquilegia coerulea
  Intron number 1 from transcript AcoGoldSmith_v1.002333m (l ocus AcoGoldSmith_v1.002333m.g) derived from phytozome v7. 0 (chr-ID scaffold_14; pos 1274511 to 1275013 reverse stra nd)
tccaaggttaattttcattaattcattccatacttcttcattatcatgatcatcatatcgtctgcactctgcatgcatatgcttgttcttgataacaattaatccattcttgattgaagttgtgcgtgttacgttaatgatgttatgcttgatccgtcttgtccctcatcttggcttagcttcttatggtgtttgatcatcatattggcttctcttatattttatttatccttcatgtttgtgacctctttcttacaccacgagaaatttcatattaacccaagcgctacgcgtccacaaacgttgatcattagctatgtgttgtcagcttaactgtgttcttaaactatcagtggatcaaatgtaccatcaaaagaaaaaccaaaatggattacttgtcaagatcttttacctttttttttgtttttcttttattggcattcctaaattgaattcgattttgtggtatacttattgttcttataatttgtgtagctcctcgt

SEQ ID NO: 106713 - DNA, 825 bp, Aquilegia coerulea
  Intron number 1 from transcript AcoGoldSmith_v1.010533m (l ocus AcoGoldSmith_v1.010530m.g) derived from phytozome v7. 0 (chr-ID scaffold_23; pos 3463575 to 3464399 reverse stra nd)
caaactctctctctctctacgccaagtcgccaatagtagggtttttttataaaccctaattagaattcgaaatatgttataaatattgaaacaattgttgatccattcccatccagaagtaagcatttataagcatttatagatgctttgatttgatttcaacgtttatttgatgtttttcttagtaaagtttttttttttttttttttttctcttttctctttgttatgaattgattgattgaataattgaagaataattagtgataacttttttgtgtagtgtggtaatgcattttaactgtttgatgaattgtctgaatggaatttgtgtttctattttataatcattagtcacttcataacatgaattccgctttaatatttcatgatattgttaaaaattaagtaatataatgaacacttagatggtctaattacaatctaactatagcttcatcccttttaggaactagaagcacctttaataattctgtggaaactcaactgctgataattctcaactttatctgttgttttctcatatgtcgttatctgtaaattagtaaagtcatgggattgggctaaactatctctatttctaacaaatgcaatttattagaaaccaattcattaagaactagacatacacttgtagatagaattctcaacttttttttttttcttgaacttctgaacaagatagtatggattcttatttagttcttcatataatgtcctttttatgagtctaggtttgaatgtctatgtctactatctgatccggtctttcttcttttccatcagggtaattttctttctgaaa

SEQ ID NO: 106714 - DNA, 469 bp, Aquilegia coerulea
  Intron number 1 from transcript AcoGoldSmith_v1.015217m (l ocus AcoGoldSmith_v1.015217m.g) derived from phytozome v7. 0 (chr-ID scaffold_5; pos 1161301 to 1161769 reverse stran d)
ccttggcgtacttccgcaggtcatcctgtctcttggtaattctcatcaatccgtcctactcgttcatattgaagaaaatttctaatatgtttatgtcaatgtaaaagttgccctcttgaccttcttttgatgcacattatcaaaattattaggactcaaactttatgcatcttcttctgtttatttggttctatataaaatttagcaaatatggattttatattctcaatagagtgcaaagattttcgcactcacacaattcaaacattgattgagtcaaggttgcaccattatccctagattttctggactctgagggctcctatgttaacatgcatgcattgactttattaatctacaactgataaaaatgttatgcatgcttgactaaattgatctataccttatggttgcttttctattttgcataaaagcttctgggatttctggaagtaaagaaacagctcaa

SEQ ID NO: 106715 - DNA, 695 bp, Aquilegia coerulea
  Intron number 3 from transcript AcoGoldSmith_v1.001170m (l ocus AcoGoldSmith_v1.001170m.g) derived from phytozome v7. 0 (chr-ID scaffold_136; pos 14898 to 15592 reverse strand)
gctggagattctttcaattcatctaactgtaataggtaattaactttctccacacatatgatcaagtctttcattagttttctttctgcttatacaatgatgttatggacacttttttctcatcattattgcatgtttataactgttaatgtagtgtaaaacagcaatggttgtaagcttcttagacatcttatcaccagtgtaggcattatatgtaacaaccactcaaccagagctgttaacaagtcaaattactcatggcttttttgtatcttcatctgtgcttttataccacaaatatgattttcaaaggtatatttaaaaccaattataaaaaaaagggaccattttcgaaagatccatatataaataaaatttgaccagtacagactatttggttcatcttgtgagctcctatacttccaagagttgccaacctgagttttagggaaaactgtttgaatgtgacagtgttgtgtttctttatgtggaaaaatagacttgagcagcttcttatggtactgaggttctggcatttagcaactcgtgacaaaaaaatggacttatttagatttatagtacccttaaaaatggcacattttacgaaaataattttgggcaaggtttaattctttatgattttgcgcgctattttgataggaaacttattggcgcccgatactatctcaaagcgt

SEQ ID NO: 106716 - DNA, 171 bp, Aquilegia coerulea
  Intron number 2 from transcript AcoGoldSmith_v1.010657m (l ocus AcoGoldSmith_v1.010657m.g) derived from phytozome v7. 0 (chr-ID scaffold_41; pos 1237833 to 1238003)
caattgaagctatcaaagtaactaatttatttgaatttttttttattttttattttttatgtaaatttgtagaagaaaagagggtttttgacaaagttggggtttttttattgtgttttgttttggatttatgcagttgggttcaactgcaataggattgaagacgaaaca

SEQ ID NO: 106717 - DNA, 554 bp, Aquilegia coerulea
  Intron number 1 from transcript AcoGoldSmith_v1.000509m (l ocus AcoGoldSmith_v1.000509m.g) derived from phytozome v7. 0 (chr-ID scaffold_38; pos 1042455 to 1043008 reverse stra nd)
agatcaaagtttgagatcaaatctaattgtgtaaggtatttcaaatcaattctgttcttgtttagggtttcaattcgatctttttagtttcaagtctgattacaatgataattgtttttaatagatttgttttttctgtttgaatgttagtaggtcgattttgatccaatatgctagttagattcatgttttagggattttattgtaatcgataatctgttttgactagtatatatatatagctttgatctcactatatttgactgttgttgttagtgatttatggatttaaatcatatgttttgcattgggttatcaattgcagcattgaattaagttgaattgaatgattttgaagagaatttaaggaatatagagtgaagaagaacagttttctgatttgtcatagtctttgaaataattggatttccatcattgttctccagactaggttgtttatgtcttaagttgtattcctacttttactttattgctacgaagtttgaattgatttttacaacgtgttctatatgttcttgggcaggtttttgtgc

SEQ ID NO: 106718 - DNA, 781 bp, Aquilegia coerulea
  Intron number 1 from transcript AcoGoldSmith_v1.000150m (l ocus AcoGoldSmith_v1.000150m.g) derived from phytozome v7. 0 (chr-ID scaffold_5; pos 2096936 to 2097716)
gttggtcttttacgccagttgggtgacctagctgagtatgtcccccttcccttttctcctctctctctctctctctcttatatatgcactcaacttcttctaaacttttttttttctcttttcaatttgattttgaactgaaatgaatgtgaaagttggtttagggtttattcaattttttgcaattagaagtaggagggaatttgggtttgggattatgggaattataaatgaagaatcgaatttgggttttggtttttagatccattttttaatttatagttggagaatctgtctttagtggattctataagaggattagagtttagcatttggtgtttttagctattggattatgcatttaggtgctttctaaagaatccaataagttatgttgcgattagatctgttgaagacttgaagtacaagttctatctgttttttcatttaaaatgacttttctattcttttgggctggtttgtatcaattttgttggttgggaatgtgtttttttggaggggaggggttgctagagtttatagaattgatcaatcaaattatggacattcttactgatacaaattaaaagtctaaaatcaagtatcaacgcagacaaatattagtatactgtactggtaatcatttggaagtcagtaatcctcttatcatttgggatttgggaatataaacccaaggaaggcctctcgcctatatatgacagatttgtgttttggtgttttaaatgatgcagatttgctgcagaaatatttcacgacttgc

SEQ ID NO: 106719 - DNA, 792 bp, Aquilegia coerulea
  Intron number 1 from transcript AcoGoldSmith_v1.010590m (l ocus AcoGoldSmith_v1.010590m.g) derived from phytozome v7. 0 (chr-ID scaffold_45; pos 406359 to 407150 reverse strand )
gctcttgaagcagatattcaacacgccaatactctgtaattctctctcaaaaaccttactttttcaatacttattttatgttatgagtttgaatccattttgatttttttttttaatttatttttacaactccttccttttttgttgtttcattttattatttaattattttggtgaaatctactagaaaaaaatttgggttttttagagaaaaaaaaaaaaatttacaattggaaggagtttcttctttatttgaatggatgtggttgtcttatgtagctaacttaatgctcttgaatcaaatatgtaaatgggtatttttagttttaaatttttgaattgatttattggactgttgattacagtcgattttgctttatctttttctttggtatctgtacatactcctgtcaaaagagatagatactggggaaaatataatcagttcagccattaagtttagggacattcgaaatttgttttaagggttagtctcctttgcgaaaacataatatggcttatttgaggctgctatttattagtgcattttaactgttgaaaatggctttattctgtaaaacacacttctttgatcctaactgatttatcagagtttaagagtaaattaaaactatttttgttgctcttatttcattgatggtttatttttgttgacaaatatacatcttggttttttcccttaaattataatcatctctttgatgaatgtctcttactttgtacttacatttgtttttatatctttcagtgcttctatttatccaagggaat

SEQ ID NO: 106720 - DNA, 668 bp, Aquilegia coerulea
  Intron number 1 from transcript AcoGoldSmith_v1.009914m (l ocus AcoGoldSmith_v1.009914m.g) derived from phytozome v7. 0 (chr-ID scaffold_14; pos 4723648 to 4724315)
ctcttcgttcttctatcaaacataaggtatttgcaattaacaacccccattattatgtttatatattccaatttcaatttttagtgttagaatgaacattttgattgggttaaagatgaactagaatttggttattttggcagttttagtgaattgaatggaaggaaagaatggggtttacttacctaatccaaaacatttaggataaggctttgtcattggagagttttaatcatatagctcttattagggatttaggtgtttcttgattgtagctcttttgcgtctttttgccaacgaaatggattagttttacttttacaagtagcttttctaccatacaaattccaaatgcagtcatattcattcaagttatatattcaaatggattatataactattttaataacgaaggaatctgtttggatggttcttatacaatggttattactgctatcagttcactgttcacatgcctttatcatcagtagaaaaactccaatgcaaactgaaattgagtatttcactcttttatacaacctagccactccttcaagtcatggaattttgttttagtattgtatgaaatttacaaccgtcattaatccttgttttcttcttgtttttgggcagggccttgcgccttatcgcggtctgaattacctctt

SEQ ID NO: 106721 - DNA, 713 bp, Aquilegia coerulea
  Intron number 1 from transcript AcoGoldSmith_v1.016184m (l ocus AcoGoldSmith_v1.016184m.g) derived from phytozome v7. 0 (chr-ID scaffold_5; pos 1923165 to 1923877)
ggtcgtggatcctatttccccaagaaggtatttattatttattccggcttgcgccttgcaacctatcttcaaatttagtcgtttggttattatccatgatataaaatcaatcttgtgaattgtttgagactgttaataatccagtttgtgttgccacattttttttttctttatcaatatttgatctgtggataaaaattgaggagttcaaattattattttctgtggagttgtagttctttctgttgttattggcttgttacatgctctagttatgaaagttgatgtgtcagtttcttgtttgcactttttctctgaagctaccattacatatcaaccccaattttacttttgtccgtaaactatgtttaagtcatattttgttctcaagatggttgtaaacatgccatgcaaacagcatggcgtacacaaactgattggactcctttaagtgattcttattatgtgtcactttataccttcgtaacacaagtcgaaatcatccacagtgaccatgttactgatcacacggtttcacttgtggccaaatggccaatacatatacatgggtaggaagtaatagagctactcttatactttgtaacttctttggaacgcttaccagaatcagttatgttggtgtctcaaagtatttattaatgtttccttgtaatctagtctgcaggaggatcggggtgtcttgccgtgaatta

SEQ ID NO: 106722 - DNA, 772 bp, Aquilegia coerulea
  Intron number 2 from transcript AcoGoldSmith_v1.023719m (l ocus AcoGoldSmith_v1.023719m.g) derived from phytozome v7. 0 (chr-ID scaffold_38; pos 920178 to 920949)
ttttttgatattgctccaccccttcggtagaaaaatgatttcacctggtaaatattgtttgaattgttagcattgcttaccactattaccactatggtttgttttttttttgagaattcctgtacaggtactgaagaacatgcaatgtacacgaaaactggacattttgctgcacatagatgatgtagcctctgcacaaatattcctttttcaatgttccaagcagtaggtagacacatttgtaataaatctaatagtagaaacattcaggagaaagcaaaactactgatccctaaatattcagaacatctactacctaatgagtaagttcccactttctctcaaaaatgactatttcatcagattcctttttatagtaattttctctgggtctgtttgattcgagtccgggaaatagattttccggaaaatttcaatttcccatgtttgattaaatgaaaaataagcggtaaatatttaaaacgaaatgataacttaagatgttgggacaaattggagctcaattttgtcgaactctcactacaaacatatttaaatgattttccaaaaaaaaaaaatcatgatcaatgtagcattataactattttatcaaaattttatttcccaaatatttgcacatggtaaatctatttcccggtaaactctttttccgcccgaatcaaacaaatagttacttaagcaagtaggaggaagaaaagccagatcacttctcttcaaagaagctcaaggaattgggatttactgtttaggt

SEQ ID NO: 106723 - DNA, 877 bp, Aquilegia coerulea
  Intron number 1 from transcript AcoGoldSmith_v1.007817m (l ocus AcoGoldSmith_v1.007817m.g) derived from phytozome v7. 0 (chr-ID scaffold_20; pos 1207055 to 1207931 reverse stra nd)
atactaaggtatgataatttttactctttttagttgaattatattgttcttatactttaagaatgtaattctgtctacccaagttagattattgttctgaagaaaaaataagtttgaatttgaagaaattgatgccgaaatgtgctaatttaagttaaatgaagagattcattgtttgagatcatgtttttcaagcttttttaataaaacccatgtttttaaaatcaaaatagtgtatgatctttcgaactttggaagagatgtagaatataaattttctttgttgttgaaatgattaaaactcaatttagatgttaagtttgtattaatcacagtattggtaaagtggatttccttttacagtattggtaaattttctttgtcggttataatcattaagattgttatgctcacaggatgaatgtactgtatgtaattttattatgagtccagatcctccatagaactttgaattctattctttcaatgaaatgaaaaccacaacctcattaacaaaaggctcaatgtaactacattagtatttggttcattggagacgtcttattcctatacttggaggccggatcttctttctttcatcacatggtttgaaatctgttattgttggttatgttggtgtaaatactatcttttgatggtgctttgatggatgtttgatgaattagttcatgcgcttcagcttcttccaaatcatttcatttagagtcttttatttgttattagtaacggacgaaattaaggcaaccattcagcagtatttaggattaacacccgatggattaatatttatcaacaaggacacttatctttaatggattaatcgttaatattcatctgctgcttcaggccttccaag

SEQ ID NO: 106724 - DNA, 801 bp, Aquilegia coerulea
  Intron number 2 from transcript AcoGoldSmith_v1.020932m (l ocus AcoGoldSmith_v1.020932m.g) derived from phytozome v7. 0 (chr-ID scaffold_41; pos 1019817 to 1020617)
ccaccaggtaggccattagttttgtattatgtaataattttccttcctcttagttccctttctttttaatggatacttagctctacgaaaattctttcattggtttcaaacatgaaggtgtcattgttttatagttagcctcaaggcacagaatatgtaagtcttgtgacatgagaacattaagcaaatgagagccaagtcattaaaaaagtaaaagaaaaaggtttatgtactatatattatatatgaaaaaagctttatcttttgaaatgtaggtgcagctaaataaatatagagttatagatagtcttcgacttattctgaatatttgaaaagtacggcatcaggtttttggatttttaatgaatagcgatttgatttttgatctttcctagttatggtgattttcttggagatattgccttcaataatttgagccttgacttatttaccttgaataagttcttagcaaacatgggagctaagatggaaggagaaatatccttttgtaaccctctacaagaggaactgtcaactattgtaactaaggatgccaatggcaccttgtgtttgagacattaattttcaataaactggtaggggtcttccaaaccccagcttaaactccacaaaacaaaaaaaaaagttagaatattgatcggttttgctcaaaagttgactctacctacctctgcattctctgtgaatccatgtacagttgtaatgtgtgagtctgatggttttctttctgacttatcatgtgcagcaatttaaaccaggctatacagcacctcctagatt

SEQ ID NO: 106725 - DNA, 874 bp, Aquilegia coerulea
  Intron number 1 from transcript AcoGoldSmith_v1.011644m (l ocus AcoGoldSmith_v1.011644m.g) derived from phytozome v7. 0 (chr-ID scaffold_89; pos 500897 to 501770 reverse strand )
aagttgtgtccctcagaggctccaatatcattgaggtaatttacagtattttcttttaaactaatttattaattattttcttatccccctctattgactattggttaagtttagtaatatggtttcaagtttttatttttttcccctctgtaatctgtagtgaggttaaagtagtatacttactgtatttgaaagaaaatgggtagatagtagacactcttcactctttcttgactccgttgcagttcctataatgcaacacttgctcgtaaaccctctcaacaccactatgtagttgtacacttattgtgcatgatctcccttattttatgtttgaatttacacactatcggctttcttattttctaatgggtggttagaattgcacaaccattttgacaaactccttctccatccatcgagtatgggagacaaacagatagtccccttaacacaatctgttcttatgaaaaaatttgtcaccaacgactatacttgcgctaattttgttaaaattagcaaagttgtagctatatgctcatacttcatacttgtaaaaataatttaaaaaaggccaaattatattttatacatcaatttttttttcatgtgcataagtgcattgtacagggaattaaagctatatttatttgattcatctagacaatggaactaaatttgtgaatgcaattacgtcaaattttcattattcaacaaattttctatttaagatgcactttaaaatacttgtttgtgcaccatttttataaccatgcttcttacaattgctttataactcattttctctccctcttatcatattgagtttgcttctgatacccacccccttgtcatatattttgcatcttaggtg

SEQ ID NO: 106726 - DNA, 1044 bp, Aquilegia coerulea
  Intron number 1 from transcript AcoGoldSmith_v1.019219m (l ocus AcoGoldSmith_v1.019219m.g) derived from phytozome v7. 0 (chr-ID scaffold_33; pos 194206 to 195249)
agagataactagtttaagatctttgcaacttgcaagtaaagtagaggactagaaggaatcaaggaaagctaaagcaaatgacaaggagcataatgtggaccctttgctttgcagagcattatgagtattgactattgagcagctgagggaccatgagcatgaggtgctttgcattattgtgttacaatttacattacgactagacgcggcaacagtgcaacacactcagattctgtagcgaacatgacatcataatatgtgacttccagctttagttattaactttactattagttacactaaaactgatcaagccttaattagttgtctaattgtatgaacatgcctaatcgtacaggttcaaacaacaaaacttcatcacccggattaatttctacatcacacaaacccatatttcaaaatcatagaaaaattaaccctacatatgcaaaccatgtcatacctaagcaagatgaattggagatggtttcaaactttgagcaatgccccatggcaataaattatttttaagtgaggcacttcaagaagtgggaattttttttccccatgtgttatagttttcacaaattattaataagcaacaatataatattttcactctatacatttttacattaatattttaggaatagataccttccttctttctctcacgccaatctcctctctcacttcctttcatttttaaaagtcaaaattaagtttttaagcccaaaaattcttttcttcataaatcaacaattccatctctatattccatatgttattagttttattttgctcttaccatcacaaatcattgcttctttttaagtagttctattcttataccggtagcattattgatcaatatgaacctggaaaagcgtacaatatcttgccttcctagagaaatacttattgatatcttcaccagactgtctatccaagacctctcgcgatgcaggtttgtacaaaaagattgaaaaaacttgtttactgatccattgtttatagaattaaatcattctagaatacacaaag

SEQ ID NO: 106727 - DNA, 264 bp, Aquilegia coerulea
  Intron number 2 from transcript AcoGoldSmith_v1.021016m (l ocus AcoGoldSmith_v1.021016m.g) derived from phytozome v7. 0 (chr-ID scaffold_14; pos 4160270 to 4160533 reverse stra nd)
tgggggagttgggcgattcaagactttggcacctggtactttctagttttttttttttagcatatctgggacctcgctgagttcatatagatgctccctactcacccatacattcataatgtcagaagaaactagaagtctagaattcgattttggaaactagaaaatttcttgcgtaaatttgatttttattacagtattatttaatgtaccatatcaactttaaatagttgtgatcattttctcattcaggaaggagaggaa

SEQ ID NO: 106728 - DNA, 756 bp, Aquilegia coerulea
  Intron number 1 from transcript AcoGoldSmith_v1.008432m (l ocus AcoGoldSmith_v1.008432m.g) derived from phytozome v7. 0 (chr-ID scaffold_14; pos 4985753 to 4986508)
ttgagttgatttcgaaggtatgttactaatatattaactctcgtgttctcaactttccattcaaaagttgactttgaatttcttgtacagtagcaatagtatacattagtttttcttttattaatgctaaggttttagtctaattttgcatatagattaagatcacagatgtggaggaatttaaacttttcatcaaatacaatcagatcatccaacaattatgatctgtgaaacataatatatcttataatatatgattaaatattacgttatattcgtagtcaataaaagcgacacatattatttgtaactgagattgtctaataacacaagataataatccactagaaaataatttcgtccagaattttatgagtgcctatagtttttcttgttgatttgtttgtgattatataacactttactaccttggggctagaagacgtttctttgcttcctgtgaaatttcatgaaacacatgagagatttccacaacatatgggatctgttgcttttcctgttgctttcaaatacagttattacaataatctagatcgaaaaattgaatccatcactagagctgtcaatgggccaagaaagaatctagcttttggtacactttcaatagattgggacctaacagccccatgtgataaatgacaagattagttgtattgaaaagtcatttgatttttaatattttatatgaatataattacaggctaagatttttcactacgggtcgatcagtttgat

SEQ ID NO: 106729 - DNA, 786 bp, Aquilegia coerulea
  Intron number 2 from transcript AcoGoldSmith_v1.004121m (l ocus AcoGoldSmith_v1.004121m.g) derived from phytozome v7. 0 (chr-ID scaffold_20; pos 3171045 to 3171830 reverse stra nd)
cgacaaagtaatatattctacatttactttggttttttctgatctatacaagtagttgctttctcgaacattgtctgtatttaccaccatttattagactcccatttaactgttataaatagtgatactataaatatgtgtaatctcttagtggttggcagatatcgcactattaaatatgcttcttttgttttgcaaatctttaggagctcaatgacggtttcatgtttcttttgttccgcactcagctttttatcctaaaaaaaaaagaaggaaagagaaagaatcaaagaagattcacccgcaacgaaactcaggtttagggtgaattaatagagggagagcagaaatggaaaaaataagggtcgaagtcaacaaaaacatacaagatacttaaatgaaataccaatatgagaactaatttatagttagaaatttgtatacttattatttttattttatttctctattgattgcaatgaaatatttaagacttggatttagagtcggcaacttctttttttcttcccccactctcctttattttattataaaatttctaaatttgttattttaaaagcctaatgttattctatcatgtgtggcatgaatgttttgagtgcaactgattttggtttccaaaaataatatattttgttgcattacttgcatcgtgttatgaaatttatgtaatgtaattacacaaaggaaatgcgttgcaagacaactaatactttcaattgtataattttccacagtttgacctgacgctctgtgcaaggtgtt

SEQ ID NO: 106730 - DNA, 374 bp, Aquilegia coerulea
  Intron number 2 from transcript AcoGoldSmith_v1.025651m (l ocus AcoGoldSmith_v1.025651m.g) derived from phytozome v7. 0 (chr-ID scaffold_14; pos 1175183 to 1175556)
cccagatatttcacttagtgattcttaaggcccgggtaagcaaatcatagttcatgtataaaaggtggagttgggattaaatacggacaaggattgaaagtatattaataggtctattagttacattgaaaggcgcatgtgtatctcttgatgtgttgaaaatatatcaaagtcaaccaattagatctgtcggggtgagtgaagaaaaatctccttttccccgttggctccaaaatatacacaaacataaacatcatttgcagcatcttgtttgggtagtgatggaggtggatttgattgttactgttggcttgtggactatttttcccccttcatatctgtttcttctatggtatttcaggatccttcatctc

SEQ ID NO: 106731 - DNA, 666 bp, Aquilegia coerulea
  Intron number 1 from transcript AcoGoldSmith_v1.006085m (l ocus AcoGoldSmith_v1.006085m.g) derived from phytozome v7. 0 (chr-ID scaffold_23; pos 4011815 to 4012480 reverse stra nd)
tagaaccacattccaggtttgggtttttaatttttttgttattttgtttggagaaaaattagttgtttttttttttttttatttgaattgtagtttgttgagttttttttttttttttcttgaaatgattaatttgaccaattttggaagattttgcatggaaaaaagatccggcaatgttgaagatttgccggatttcttgattttccttcttggtgaattctcaagattgaagttaaatttagaggtgtctttcttatctttctctctttgataatctcctttgtagatcaccatcatgtctatttcttagtaagaagaaagaatttttgaaatatttcaaattagatctttttctacctttttaggaaaattgagtattgatttgcttgcattgtagtcttaattcttcaaattttccaaaaatgttttcaattaatgcatttgctgttactttctcccaaatttgtaacaaaatcatgttaataaatgataatggttatataaatgtcataaaagattttgtacttttggtaatctttgttcaaagaaaaggaaggaaatcttgtttttcagtttgggtttcatacttgattgggttttaattagtttaatagctgatgaatttcagtttctttgtttgttctgtttttgacagcttgttag

SEQ ID NO: 106732 - DNA, 388 bp, Aquilegia coerulea
  Intron number 2 from transcript AcoGoldSmith_v1.027378m (l ocus AcoGoldSmith_v1.027378m.g) derived from phytozome v7. 0 (chr-ID scaffold_45; pos 726824 to 727211 reverse strand )
gattctttctttggttctccttctggtattcattattattaaacttttttttttttttttgcttaataaattaacctcaatatcattaattatgagttcacaattgattttaaggttttgaggtttaaggttttaatacaaatttcataggtttaagaatatatttgattgattgtttgacaagaatatctggagatggttttaatattttcactatacataagtttgtttgcaaattatgtgcctctgtagccattgttttaatcggcaaactcgtcatagagatgatagagtgtcttcaattgtaaataggggtgtgtttttgttattggtgaagatttaccaatatattctctctttgtaaatttgacaggattcataaatccat

SEQ ID NO: 106733 - DNA, 770 bp, Aquilegia coerulea
  Intron number 1 from transcript AcoGoldSmith_v1.021049m (l ocus AcoGoldSmith_v1.021049m.g) derived from phytozome v7. 0 (chr-ID scaffold_20; pos 1463410 to 1464179 reverse stra nd)
cttgatccagaactctccaaggctttgttgggaatgtttttgagtggtcaaaacatttgtatatgaatgataaattaaagtcctaagttatccactgatcatggctaacttgtgttatagtagataaatatgtatgtatttcacatacaatgtatttggtccaatccatctaaatgggtgtgtctttctccaatagacacatactttgtagatacttattctgaagaggtgtgtctgtcccaacagatgtgtacattgtattgggtcaagtgtctattcaaatatccattgaatagacatgtgccttctgaaaatgtgtctttcctactatataagtgtgtcttgtgtttgtagtcaaattacttttcaatgaattgtttttccatcttctagtgtttgtgtcttgtcatgagagagtataacaaataaattggttcatcgtcttctatgcgtttgaagtgctgctacgctaagaaggatagatcgttgtatcctgggagacagtccgccattgagaaaccgttcggcacatgtacggggcgaataatgtcttaaggagagagattttatctcgactcgatctaaatcttgtccttcatctatttattctggtttgcatcatctattcccttttatatattttagaatcaaaagttccagatactaaactaccgcctctatcattatcagactgtaataagagtggaaacactaggtcaagcaacgctgaagtagaagctgcaagtcacaagcagaaatctctgtccttg

SEQ ID NO: 106734 - DNA, 977 bp, Aquilegia coerulea
  Intron number 1 from transcript AcoGoldSmith_v1.002354m (l ocus AcoGoldSmith_v1.002354m.g) derived from phytozome v7. 0 (chr-ID scaffold_4; pos 7609529 to 7610505)
tttgacactggacaggtcttacctccacagttttattcattgtttatctttaatttatggcttcagagtcagaacctgcatttttttttacttgctatgatgatgacaaaaaactctttatctttggcggggaacatatcatggatgaaactcatatattctgtttttataatatttacaaataaaaaaaagattctcactttgtatgaggcttcgtttgatctgttagaagtttcttgcagttttgcccattgaatttctttgcatcgcctgcattcatgactgaaccagatttgaggatgtatactccatgtgtgattttcaagaatgtattgtaggagagagctgagaaacacaaaacatctaaacaagattgatttaatcatctaaaagctaaaaggaaaagcaataatataaaacgaatcactcctctctggggaaaatatttttttgttaaacttttaaacatacatcacccaaaagttttgtcatgcacctcgttatgcctctttcagtttatttaccaacttttttgtttgccactgttgagagcttgtataaaccctttgacagattggttagattagcaatccaaaagaaaagagaggctgtaagtcttcaatttttagtcaaagagttaaaggttacaactctgtagagttccaactgtatttagaggaaaagtaggcccttaagtgaactttctagtagtttcagggatcttgcttttagattagatgtttgaaacttataatagataaatttgcatcataatatcttagttataaacttacaatgtaccattactacgcaccccagtatttcaattaaaagttgtatacttgtatctatacaggggcccttcaaagttgatttttttttctctattttatgcctgtcattgttgagtgaattgtttgttttaattcattggatgtataggcctcaagggtattgaacttggaaaggaacagcct

SEQ ID NO: 106735 - DNA, 922 bp, Aquilegia coerulea
  Intron number 2 from transcript AcoGoldSmith_v1.020714m (l ocus AcoGoldSmith_v1.020714m.g) derived from phytozome v7. 0 (chr-ID scaffold_5; pos 5678053 to 5678974 reverse stran d)
tttcatcctgatccagatcacctattggtaagttctagtacaatacaaattggaatattttcacttcaattatattattttatcgttcttatgcattagctctgactttcggtgagttcgttgagtttccattgcttgttcctatttgtttgaactataagagtgtttttagtcttcccaaaaataaaaggtatggttcttggcttcaaaagtccaaacaaccttcagtctcatctagggactgagactgaaattcttcattggtggtgggatccactgattcattgagaaagagaaaaaaaaacgcagatattgagtggggtaggcatgatccttcgagcagatacctttaactagtaaattattccttactagttttatttcaaaattttgggtgaaaacaaatgccccacctcactacaacatggcattcctgcatccatcttatcatattatttcttccgatataaattgttatggagttatcacgaagatgttgtcctttttagagtattgcaaactgacagtatgggatgtcttgggaataaagttgcgtagacatgaagaaaatactgatatctcaggttgttgcttgcccttagtcaattatatcgaagatcttgttcaagagaaaacactaatttctgaccctcaattccctaccgtgacaaattgtcgtccttgatattgttgagaaattatgctaaaaaaataaaatccatttattttcatatataccagctcaaaccatatccagtgggtaattacatacaattttattatgctttgttatgagaattatattaggagtagcttcttatctgaaagaagaaacatattatttactagtgtgatagttcctcatacctatgtgtgatatgccgattatttgttttgctgcaatagcttttctctggaagtg

SEQ ID NO: 106736 - DNA, 964 bp, Aquilegia coerulea
  Intron number 1 from transcript AcoGoldSmith_v1.004601m (l ocus AcoGoldSmith_v1.004601m.g) derived from phytozome v7. 0 (chr-ID scaffold_4; pos 6557257 to 6558220 reverse stran d)
ttgtgccctagattcaaaggacaaacttacatcgggtaatttacttattcaaattgttaattatactagggttttgattcattatacctaaagtttaaatctttgataaatttaaacttataatttctgttgcagttggatgattgagataatttgtatgatgaatgttttcgattgggcgtttatattgctgattaaaatagggttcttgtattgtatcgacaaagtcacaagttatttcttattgtaagaaaaatacgaatgaagaaagaaataggtgtggtgggatttcagagaattttttcggagtttatgggatataatctaatcggtgaacgtcgttaatttggtctcattttaagctggtttgtcatgtatagacagtacagtcgtgaattggtattctaagttgacttggatgtgtttagagtctataaaagtttgatatagggttattgatccatttcacagatacaagctgtccttttcaagttaaaatacggcttataggtccagtggctcttgttacagtctttggtcgtagacaaagaaaactgctcaaacttaagaatctaagcaaaaaaattatacggaaatgagaaccacatctgcaatagcccgggggtactatagaaaaatttaattgaatgatggaatacatgtgcaaactgtttatttcttcagactgataacaattgaaagataatatcactcaacataacattgcggatgcatggggggattcagaaactttccacctttaaaactcatcttagatggtttgctagctgtttctctttttttttcacggaagaagtctgttttgcatgccaaaacttattgataattctgcacaaaatagagtttaacaagaaattcaatattcttatattaaatccttttcattagaaacctttttggtttaacaggttcacagtcaatcctcgccgtcggatcaggcagc

SEQ ID NO: 106737 - DNA, 984 bp, Aquilegia coerulea
  Intron number 2 from transcript AcoGoldSmith_v1.011387m (l ocus AcoGoldSmith_v1.011387m.g) derived from phytozome v7. 0 (chr-ID scaffold_4; pos 9435333 to 9436316 reverse stran d)
ctttgcttctccagagtacaattactctgtctctcgtacgatgatctctctcactcaatcattcctctgtgttttttcgataaatcttacgttgttgttgttattatctgtgtggtgattggtccacgtggtagtcttattattaaagttgttgtcggttgttttcttcctaactggcttctaggagttctagatcaaattgacatgggctcagcccaagtttctaacagatctaaatctgcaatttttttatggtctttactaagaaacagatctgaccctgatttgaaataaatggcccatggcccatgcttttccaatgaggtcacgacacatgggatgggacttgggagtcctacaaaataaatggacccacaaaatcaaaatgacccctcatcatatagtgaactactatactagttgatcatgctcataaaatttgatgcatggtggatggatttttaaattttgatacatacaaggaatagttcaactcaactcctatatggtgactggcgagggaaggggtcttttgagtgaccattgattatgctgcaaatgattttgaaaataatgctgattttctatttcattagtcacttagattttcaccaaatgaggactatatataataaaacactttaagagtttcagtcccatacatccttatctgcctctaccaatggatgattgaaaatgtacagaatgtatgtctcttaaaatttctgcacatgcacacattcatttacatattgtaagcaaagttggtcatccaaatatccaatacttataacaagaaacactagtggtatcacgctgtctcaattttttcatttatatgtacagtagttcctttattctcaactccaatggtgaagataatatctattaagtaatattttaaacttgttcctggccatttggcagtttcctgatcttgggtattttttttttttttccttttcatgatagctccattgaaga

SEQ ID NO: 106738 - DNA, 972 bp, Aquilegia coerulea
  Intron number 1 from transcript AcoGoldSmith_v1.008643m (l ocus AcoGoldSmith_v1.006769m.g) derived from phytozome v7. 0 (chr-ID scaffold_42; pos 154881 to 155852)
ctaatcaacctgctcgtccttcaaaacctcaactggttagtttgaatttgttgtttttgaatttctgtgtttagatatcttgatgttatgaacaaaatatgttgtatttctccatatgtgcctgattttatcatattaacattattttgaaaatgagcaaaaagcatattgatgaaggcatatgcaccaaacaggctattatttattcaataaaaataaggcattctataaattaacagccttatcagcccatccaccaatatacatccatattatatggtcctcaattacaaacacttagtggagccgtgtaggggccttgatccttatatgtaaagtattctttttacatgaatcagaagaagattttccaaataagactaatacggtgtttgaaacgagagtcagttctaactgaatatgatggtatatgagaaattattgtccatcaatcatcaactcaggcttcacggggagttggtgccttggtggttccattcaaaccaaatatgatttcaagaaatgagtattgatggttttgaaacacctgtatattgttccactctgtaccaattttatcatatttggttaggttcaaattcttattataacgttacaatctcatgaacgataaatgaatatatttttttctcttaggaaagagctatgtcatattatagccatataggcacgtcagtgataagatgctcattgtcaacccccctaattaagaaatttgttccggggacaatgatgataactaaaagttttaaatctatcttgcacatggattaggattagaagttcatttgatagggttttagtcactgataagatgttcattgccccataaacaaacaactttgttctggggacaatgatgatgcaggtttgtctatctcttaagttaatgtaatggcttcttttgaaatttcaggttcccccaaaggagattccagttcccaagaactc

SEQ ID NO: 106739 - DNA, 731 bp, Aquilegia coerulea
  Intron number 2 from transcript AcoGoldSmith_v1.005942m (l ocus AcoGoldSmith_v1.005942m.g) derived from phytozome v7. 0 (chr-ID scaffold_53; pos 988510 to 989240 reverse strand )
aaaggagggattcgataccatcccgaggtgatggtcgttacccttctttgttttttcgatttgtttgaggttctgcatgttatgattgttttgtgtattttaattcaatctatattgatttggattgattgaatttttgttcattttgatcatttcttttagtaaaaactgatcgaggaaatgtcgattgttttgttttattcattacttattttgatgtttttgccttaaaattgatgatggattgcccataaaattgttttgactttttgtttgagttgtgtggttgatgctttctataaattttgtaaatagatagtatatatgttagagatagatcactacaattatctacaaaactgtcttcacgcttaaggtggcatataaccaattatttagttcaaagaaccgcagtatatcccactcaaaagcaaataattatttcactgattagcgcttgaccatatattcgggctgttttcaattgaaaccatctcattcttatctatctctcagatcaaaagactgcttcacatttatatgaatttctggaaatcagaattgtagcccacttgtgaacacatatccatgtcttagatattattggattagtttctatcaaatggtggaactgtatatttgattagtctacatcagatattttattgagaattacaacttctactttcatacttatgtgtgtgtttatcgctgttacaaggttgaccctg

SEQ ID NO: 106740 - DNA, 147 bp, Aquilegia coerulea
  Intron number 1 from transcript AcoGoldSmith_v1.005942m (l ocus AcoGoldSmith_v1.005942m.g) derived from phytozome v7. 0 (chr-ID scaffold_53; pos 989323 to 989469 reverse strand )
aaaaaagtcttttgattccttttagagaaatcaaagtaagtttttgatttaaaaaaaagtgatggggatttttgtttattgtgattttggtataaataattcagattctctaattcattttttttttattttttcttttcaggttga

SEQ ID NO: 106741 - DNA, 540 bp, Aquilegia coerulea
  Intron number 4 from transcript AcoGoldSmith_v1.024573m (l ocus AcoGoldSmith_v1.024573m.g) derived from phytozome v7. 0 (chr-ID scaffold_66; pos 586609 to 587148)
taaaggggtctctttgggtccatttccttgtcagtgtaagatccttatgatgtttccatctgttgagttactatattatacctagttctttactaaagtaggattagtgttgctcaccccagtaattcagattttgcggcaatgccaagcctacttaaatgtttgtgctctttcggtttctactacttcagaaaatcagtatattaaactttgagattggtatatgagcattcagtgtatcagcctggggtctaatataatgaggatattgcggaaagatgatagcattcccaaaagattagcaatatgccttgttctgtaggttgtttgaagagtttaatacctatttcgtatacttgtgttggatgctccttattagtgcctatacgttgctaaaaaggtgttatatagatcttctaatatattgttatgggtttactgcaaattttagacatgattatattgaaatgtaatattttgttattttgtttcatccttcatgcagggaccacctgtaatagtattttcatcagcttgtgc

SEQ ID NO: 106742 - DNA, 644 bp, Aquilegia coerulea
  Intron number 1 from transcript AcoGoldSmith_v1.003042m (l ocus AcoGoldSmith_v1.003042m.g) derived from phytozome v7. 0 (chr-ID scaffold_45; pos 1737036 to 1737679 reverse stra nd)
gatctcaattttctgggaaatttgtttcatttcaggttggattcagctccccttttatcttattcagtcaaacttgttttgagttttcgcaattgcactgctttaatatgtttgttttcttaaatttatgctaaagttttgatttttattcaaattgagatgaatgggatgatttgttgctcatatattagttataaatttagaatttcttcatttaaatatcgtttttttttgttggttttatggatttgagcttgaataaagctgaattggtagttatagttgggaattaggttagaaaggtttgttcttggtgtggatatttacggtatgttaattgaaaaaaaaaaaaaaatgtttctatgggtttcttcatttttttttcaatttgatttattatggtgtttttcgtcttcggcgtctattggtatgcagttccttgttgtatttgtgttctttcagacataaatgtttctcaattgcattgtattgcactcatttatgtatttgtaaatggttactatactcatttgatgcttcgtatctgtcaaaccttggtgagcattggagccttttctaattgaattcgtgatttttcgtgtatttcaggagatagtggagagtctcattgagtgcatttgaga

SEQ ID NO: 106743 - DNA, 280 bp, Aquilegia coerulea
  Intron number 1 from transcript AcoGoldSmith_v1.018182m (l ocus AcoGoldSmith_v1.018182m.g) derived from phytozome v7. 0 (chr-ID scaffold_17; pos 1122849 to 1123128 reverse stra nd)
tcttgcttctgctactgttggaattgctggacctggtaattattccccccatgtacattacatttgcatttttttttcttcttaatgaccatttattttaattctccgaaacttggaatgagactcctaattactaattatcgtcatgaaagacctaggctgagttggccgattcaacatacctttgcgtttatttgacagatgcgccgatattatatatagttggtttagtatgttggtaatttgaatttctttttatgaatgaatgcaggagctgcag

SEQ ID NO: 106744 - DNA, 927 bp, Aquilegia coerulea
  Intron number 1 from transcript AcoGoldSmith_v1.022350m (l ocus AcoGoldSmith_v1.022350m.g) derived from phytozome v7. 0 (chr-ID scaffold_73; pos 650267 to 651193 reverse strand )
ccagatctttgctcaggaaaattacagaacttgaggtgtgcattaccttctctaatttcttgttccatttgctatttgggatgttatatgttgtctaacattaaagaagctctgtgtttcttgggaaaattggtcaaaactccctatattgtgaccggatttggcgtaaaccccccaatgttgtccaaccttggtgttaacccccttctgttaagcaatcccccaagtttccgtccattcaaagtttgcttatccattttgcccctaatttaaatgatttgtctaaaccccccaaaagtttgcttacacattatacccccaaattcaaattcaaattagtgaagttatttctgataaccattttttgggggatttagacaaatcatttgaattaggggtataatgggtattcaaactttgaatggatggaaacttagggggtgcttaacggaagggggttaatgccaatgttcgacaacattggggggttcacgccaaagccagtcaaaacttggggggttatgaccaattttcccgtgtttctttggtgatagttggattattttcaaaactgggggtgctggcatgaacattagtgtagatcatgcatggctgggtcttattaccatagtagtacttaatgttgagaaatgagaactagtcatttttgatattgaggaagatgttttatttattacagaaatgtaaatctaaaatattatacaatgttgagagctagtcaaatattgtgtgaatccaaattggccatgagcagttccagtttcttagatttaaaatgagctgggtttatttttagcgttattattgaatatattcttattttgtctgactggttagctaaaatatcacttgatatattaatatatgtgtgcttttacttctaaagctctactacagtgattgttg

SEQ ID NO: 106745 - DNA, 303 bp, Aquilegia coerulea
  Intron number 1 from transcript AcoGoldSmith_v1.013533m (l ocus AcoGoldSmith_v1.013533m.g) derived from phytozome v7. 0 (chr-ID scaffold_38; pos 445272 to 445574)
ccttaaaattcaaccttacaagcttccacctcttggtaaattaacttcttcttcttctttgaatctaatatatctagtttttttttatgatactgtatatgatttataggattgcatggtttgctagatttattgtttattttctaatatcatagtttttttttccgctaaagtaatatcatagttatgttgttccttatgtgtgaatcagtataacatatttctgatctagtatgtatgaatattatagtattcttttgaattattaattaataactatctttcttgaattttcaggaccta

SEQ ID NO: 106746 - DNA, 910 bp, Aquilegia coerulea
  Intron number 1 from transcript AcoGoldSmith_v1.017995m (l ocus AcoGoldSmith_v1.017995m.g) derived from phytozome v7. 0 (chr-ID scaffold_42; pos 965108 to 966017 reverse strand )
tacaaatacaagtacaaggtcagtattaactattaacttaacaaactaactcaatttcatgataattagattcacttgatcatcaatttggtaatcaaagctgtattttgtttagaaatgctcgtaaaatatatatatatatatatatatatatatatatatatatatcggtgtatgtattgagttatatgttagtatttttattgagctcgtaaataaatgctcttcacctagagtttttcatgctgcaatcagaaccctcaccatcaccagagaacctatcaattaatcttttcgatgatagattccaatgtaaagaaaatagaaggcttaaaggccaagatttacacagtcagacagaatataatgccatactggagaaggaaaccatgtgcaattgagtttttatttgttattaataaactggcgattttatctctgaaaaaagagctgggaaactagaatgaacttttttttttttacattccttttggatggtgcaatgattttgtagtttaggaggactttaaactgttgggtggttgaaatagatattctagagagtgagaaaatcactagttagaaacaacttcacccgttttttattctagaaaaacaggtacatgattgtgatccttgggatgtctcttgtttcgccccaaccaaatattcaagattataggaattggaaatgagacactgtctcctcttcttctcttgggcggactcatgagggaaaaaggtcaaatgcataagaaaacatggagagaccaggatttcccaacaaagagaatgactattttaacaaaggttgttggccaaggtttttcacatggtagcagtacaggagaagtgtgtgttggactgttattccaaatcttttgttgaaggaaacagaagagggacggta

SEQ ID NO: 106747 - DNA, 796 bp, Aquilegia coerulea
  Intron number 1 from transcript AcoGoldSmith_v1.014621m (l ocus AcoGoldSmith_v1.014621m.g) derived from phytozome v7. 0 (chr-ID scaffold_4; pos 2871111 to 2871906)
ggactcattcagttattgggtaaggtatctttggtggtttcactatttgggaaatttattttcaatcaatctatgaattctctatgtttaattatgaacatttcagtaaaaaggaaataatacaaaatgatttgcaagtaagcttttttttttttttttttttttttttttgtgaagataactaatttatattgggtcaaattccagtcagggatatatagattatagattgcagataagacttataccaatgtattcagttttgatcaattccttggcaattaattttaagccacatgtgatgtggataatcactttggctacttagaactttttctttttagagaaagtcttgtgtaggaaggtgatatgattgattaagttctgatttctagagtgagtggtggaaggctgtaatttgtgacccagaagatggggttttgatttttaccagataaatgattataaataaaaatgacgattttgatttgtgaattctgacgcttaaaatgcaacttagtatcccagaaaactgggatgagagggggtaaagtccaaacttggacaaatggggggtttactcaaaacgtgaccataaaagggggggttaagtctaaaactcccgtattttaaaactcagtttgtacataactttgacttatgaaaaaacttgattgtggaagtgttgtttgaattatcaacttgatgaataaatttttattcagtttttagtaattctttgtttcagatcttaaattcagatatactggtgtaactggtccagacaagtggggta

SEQ ID NO: 106748 - DNA, 802 bp, Aquilegia coerulea
  Intron number 3 from transcript AcoGoldSmith_v1.002858m (l ocus AcoGoldSmith_v1.002085m.g) derived from phytozome v7. 0 (chr-ID scaffold_4; pos 7971634 to 7972435 reverse stran d)
ctctgcagctaatcctttcgaggtatatataacgatgttctatttttccacacttttatgtttttgattggtagagattttttctttttcgagatgtaggcagagatgacgtacattaaaaaaagcaaaccagaaacaatacttatctccaccctcaatcatataaccacttacacccgaattagtgatagatacccatttaagcataaagtgaccaaaaggtgttactattagcatcatacaagtgtagaaaaggcatcacttagctttaaaaggaaaactactatgaacacattggttgagttactcatttaggatctaatttattcttatatgccaatcctactcgaaatcgtttgttgtgaaaatgaagttgtaagcgcatttcgtctacattttgcctagggaatgtccttctaatgagcattataggatttattgtatagtaacccatacttctattcgggcttctgtggtgatcactcttgcatatggctgatgttatattatttgtttgagtattaagaaacaatggcacgttttgtgtttatcatataagtatactcatatgtttaggttgcattcttaattgatacacaggttttttgttatgttcatagtttatgactgcatccattttgatatttaagggttttgtagtagtattttattcatatgacttctatcaggtgtgatctcttcataatataattctgacccttatgccgggtgtgagaataataaaatcttaatattttttattgtaggtccttgaagttatccattgcgtccaaagagcagt

SEQ ID NO: 106749 - DNA, 816 bp, Aquilegia coerulea
  Intron number 1 from transcript AcoGoldSmith_v1.011845m (l ocus AcoGoldSmith_v1.011845m.g) derived from phytozome v7. 0 (chr-ID scaffold_122; pos 55461 to 56276)
aggaagaaacaaagcgcttggcagagatccgggaagtaagttctcttcatccagctgggaaaattagttaatttgctcagtaatatttttgaatatggctaccttacagcttcctctctttcatttaactctagctggatcagttttcgtattaatgaaatatgctaaattttaagttgatttttagttgtatttaaagtatatatattaccatggtccatgaggcatatataatttaccagctgcccagccaggtatatcaccactaaataaatttatttcaagaggattgttaaaatacatatgaactttcttctttgcagtttacaaattttctactaccttaatgtattttgtctaatgtattgtatttgatgagtatctattatgaattgtgagtttgtgacaaatgttatcatgacttgatacttaacttgaaagtaaagcaagatgggtttatgagcatgttgcccagtcatatattgattccagaatttcaaaatgaagagatgtacatctctattctctctccatatggtgatgtaggtatctttaagagttttgcatttccttttgttttggaaccatccgaattatatcaaatcaagggtataacagaactggcaaattgacaaatttaaggtaaaagtaatggatcatgttatgaatgattatgggggtgcaaccacagtgggagccaatatccatatactgggtgtgcatgtttgtattattctgtaacttatactatgctaatttgcttaattgcatctttttatttgttgatatcaggagttagaaggacttgcagatccg

SEQ ID NO: 106750 - DNA, 872 bp, Aquilegia coerulea
  Intron number 1 from transcript AcoGoldSmith_v1.000117m (l ocus AcoGoldSmith_v1.000117m.g) derived from phytozome v7. 0 (chr-ID scaffold_20; pos 2084020 to 2084891 reverse stra nd)
aagttcttaagcaaattcagaaatcggattgacaagtaagtatttctacattttttttttttcgaaattaagttaatttattaggtttaatcaacatttattgtagtatttcatggttaatctacttccattaaacttaataaaaatgacctagcatctatttgaaacatctaaatcattaatgtctctgttacttgatttttcataactaatatccttatcttttgcctttattttcttgctaattactagctatatagttaagagaagattaggtataatctctttcttaacagttgtgtttgatattgaatactactaaaatatcatacgttagagtgtttcactttctaacttgctttcatgggaccatttcaatttcataaaaaaaactttggtttgttttgttttgcttacttttgtaatttttttccctggatttttgtctaaaactgtagtaaataagcatgggcagaatttgtcgcttaaacgtaagctattttaccatttttctgttattaattttctcaaaactaaaagaatttttgtcattaaacgccttataaatcatcaacttgcacaagttgcatacttgcatgtgtgtgtcaattgtcatgtggtgatgtgcgctgccaatgttgttcatgttccttcctaaatcctaatcaaactgttaatccatattaaggatatacatatagtgctgagtttgctaactagctagctaacaaaatctagctgtagagaataataaaaatcttttaatcatttatgcaatttgaacaattatttgaatcagttgactcaattgactcatggtcaactttatatttacagggttggaattcaacttccaacagtggaagtaagat

SEQ ID NO: 106751 - DNA, 866 bp, Aquilegia coerulea
  Intron number 1 from transcript AcoGoldSmith_v1.027157m (l ocus AcoGoldSmith_v1.027157m.g) derived from phytozome v7. 0 (chr-ID scaffold_23; pos 3950687 to 3951552 reverse stra nd)
tattcactgaaacaggtcagattattataaaataacctggatagttacatatgaacaaggctgaatgcttgactttaaattgctttatctacttattagtgaacagtccatgctctaccatcttgattctatcttataaagttcctgccgactgcacacattgtttgcttgttgttccaacttccatcccatttttcagggtaaagattttgtttatgcatttcgttgtgcaatagccaaccctccgtacttcagctcaatatttaccaattctgaaaatgatttatttggaaggatttctttgcatcttagtttaactagtggagagaaaatgtaactttacatttgatatgccatgtggatgtattaaggcctggggttttctctttcggcattaattttctttaggtgtgcacatattgtttggagtgatcatcaggaaaacttacatatgtgtttttttcctcctttttacagccttttcgatcactgttggaaagatcactagttcactattatattaccaaagaaaaatccagatttgaatttaagtacttactattcctctcattttagagattggatagatgcagagagcctatgctgtaacataatcatcttaaatattccaaatgtctaacacctgaagaaaactggcctttgagcatcttcgtgcccccatggagtcatcgtgtaactttcttagcatctgttccacaagtccacttatgtttcatcacatccgtccttgataatattaatgatctagcattttggtttctcagttattacttgtaccttgtgaggctaaattaaatacttttttggcagatagtggtccattggtacaccaagaaacagggcca

SEQ ID NO: 106752 - DNA, 920 bp, Aquilegia coerulea
  Intron number 4 from transcript AcoGoldSmith_v1.005576m (l ocus AcoGoldSmith_v1.005576m.g) derived from phytozome v7. 0 (chr-ID scaffold_20; pos 3400874 to 3401793)
gccaggttagttatgaagtacattcagtttatcattcagactcacattttttgtttcatatcaggcattacgttttcatttacatttatattaccaaattatgcctgcgtagatgactgaattttttatctggtcgcttcatgtcttcaacccttttcattttttatttgatatcattctatttttactaactatgaaagtatcacaccatacaaattttgatcagaggcatcctgttctttcattaatgcgctttgatctttctaaggtgtgttgaattttagttgaatcatcaaacttgttgatagtccataaggcttaaaaaccccaaaatccagttctaatctcagtcaggttggtttcattatgtaatgcatcgatccatgtacctatacattagagaaaggccaagttctaaggaccttctgttctaaggaggagaatgtttttattaaaatctacttattgaaaaaagaaaaagagaagcaagaggagcatggccttactgctttaaaacacttggtatctatgcattctctaggcacacatgatttcaaatgtttaattggtatcaaggaaaaattcttctgttcaaaatagggtaaggaccactcttttggttaaaggttaggtccttagtgttcttcttatccagtatactaataaactaatatttagtgaaatccatggcaatggatgtcagtgtagctctcttttgatttgtaattgtatttcttttgcactactaagaattatgatgacatattacgccatcttaccgtttcaatattttgcttatcttttgtttggaattgaagcatttgctcatttcagatgcacacttgtataattatctttatcttgacccgatttgttttattttagggactatttgaagggttaaaagcatacaggaaaaa

SEQ ID NO: 106753 - DNA, 853 bp, Aquilegia coerulea
  Intron number 2 from transcript AcoGoldSmith_v1.019327m (l ocus AcoGoldSmith_v1.019327m.g) derived from phytozome v7. 0 (chr-ID scaffold_14; pos 2546357 to 2547209)
agattgtcggtctcttttctattcacaaattagtgagaaatggccttcacactgtgtccctattctctatttacttttaatttgcaattagaagttttttttttttttttttttgaaagagttaagggttaaggcagaccctgacctgtattaattaaaatctcaagtatacaactccctctttgtcctcccttacaagtttacatgcagtttcatccatgggaggacaaaagtaagataaactataggctcctcccacacctacagatgctaggtaatctgctactctattggcctctctgtaggtatgggttacatgcacactcttaaatacattacatttagtaagaatggctctcaaaaggttaaggcaataggaaggtgatttgtacagacatctcccgttcaatgaagattaaggaatcctttttttcccgcatgggtcaataggtatctgaaagttggaggtggttgattcaaaaatcaaaacatattaataacaactctttgggggtgtgctcttaaacaataaagtggtgatttttaagtattgattcgataaaaaggtatatatataatattgagcaccaatggaatctgggaaattggttgctgttgatataaagaatattttagggggttacccttgatttattttatggttttttggttcctggataattgattttgacctagctttcaagtttcaagtatggaaatgtgggtcccagattcccaactaaacaacttcactttctaattggttataaatatattcttgtgatccatttgatattagatttttatttatttttatttctcatggtttcccttgcaggcattatctttgttc

SEQ ID NO: 106754 - DNA, 706 bp, Aquilegia coerulea
  Intron number 3 from transcript AcoGoldSmith_v1.006329m (l ocus AcoGoldSmith_v1.006329m.g) derived from phytozome v7. 0 (chr-ID scaffold_14; pos 123343 to 124048)
tgttggcagtcttgcttgtgttattgcagcctcaggtaatgactgaagctttttcatctgtcatatagcctagttgtccctatttgtaatgcagtttatatttcccccaaaatttcccccaaaataggaagacaagagagaaaaggtcatatgattcttatcattctggctgacatagggtcctcttggtttcatatcccaagtgtgactgattacgtaaatgtgatacatatgcatcgcaggtgccagttgggctcaactgttaaaacctttggattatgataccagaggtccggggttcgaatcccaccaggattaccgagttactgatctcattaaaaacaggcttaccacaacatttgctcaatggtagcacccctctcacaaagtggagaggttgtgggttcgaaacacgtcaacagctgattgttgatataagtttccacacctaatttaaaggggcaagggtcccctcaaccctgcttgccaataaaaaaaaaaaaagaagatacatatgcatcaaatatagggtcccctcaaccctgcttgccaatcaaaaaaaaaaaaaaagatacatatgcatcaaatatatgatactatggccacatgtacaagttctttaggtttgtatactcatattaatatgattggcttattaactactgcttgtgtctgtgatttttcttccttgtaccagaatcaacaa

SEQ ID NO: 106755 - DNA, 711 bp, Aquilegia coerulea
  Intron number 1 from transcript AcoGoldSmith_v1.001577m (l ocus AcoGoldSmith_v1.001572m.g) derived from phytozome v7. 0 (chr-ID scaffold_4; pos 7926515 to 7927225)
tttcattcaatttgttatccgatcgttgttgatctgtaagtaattgattattttttgatatttttacttgatttttgattgattgattgattgatcgatgatcggttattgaatttgattttgttatttatgaatacgtgagtttcgatgatgttgatgatgattatgatgatgaaatgatttagattcggtttatcaacttgtttggaatctatgatgataaagaggttaagatgatatcagatttggtactgaaagttgtttatttgattactaattcgttgttattctatgtgaataacaatttttggaatctgttaaagctttattagactcattattaaagttcatgttttttttattgaaatgaatttgttgtggtgtttaggcagaaaactattcacttagggagatattgaattttgttgtctgaattgaaagtaggctgttatgtattggacttacatacttgccttactgattatatagtaaactttaataaccttcattccaggcgagaagattggtgttgttttatgtattcttttgtgtgttttgcataaatggtgctttttttagggatgatggtctggtgttcgattcgctgtctttttcttctttgcttgcttgtttttcttgtcatgcaatatgattcttgtgttggtttttattacagaaggcttgagggaaattgctggaatttggtgtggg

SEQ ID NO: 106756 - DNA, 706 bp, Aquilegia coerulea
  Intron number 1 from transcript AcoGoldSmith_v1.006290m (l ocus AcoGoldSmith_v1.006290m.g) derived from phytozome v7. 0 (chr-ID scaffold_17; pos 131325 to 132030 reverse strand )
cagaagccgagatcaagaaagcttattacataaaggtaatactccaatcgattcattcatcaatttaatttcatttcaacagagaaatatagtgtataagattcattttttcttctatattattgatcaattaagattttttttttttttttttaaatcaaattttgcgtgatttgaacgttagatcctaagtgagaagttatgagtttattgtggttaggttttttttttttgttgttgttgttgtgtgggaccactttccttgtatctaatccagcatattcttcttgttcttgttctttatcttctttttcttctttgttttttgtttctttcatttaagtaagattatgatgaaggctttcttggaggagcagttggagagcttcaattgaataagacatttcttttaactccgggaaagcaacacctttgtattcctttaattaattcaacctaattgttacaagttgaccaatagaattttgattttttacttggtcaatctagggttacttgaatcatatgtactagaacaagttcaaattactgcatcaaaaattaatttacagccttaggaaactggtagttcagttttgtaattattttttgccgtatcgaatatgcaagcttatttatcgacatcttatgtcatgttggttttgtgacttataggcacgacaagttcatccagataaaaatccaa

SEQ ID NO: 106757 - DNA, 972 bp, Aquilegia coerulea
  Intron number 1 from transcript AcoGoldSmith_v1.002366m (l ocus AcoGoldSmith_v1.002366m.g) derived from phytozome v7. 0 (chr-ID scaffold_14; pos 5782058 to 5783029 reverse stra nd)
tcttctaatccatagtaagtcatctttactctttactgatttccatagaaatgatttttttttttctattgaatcatctactatctttttagttttgatgtttgattctctattgttttttttttttcgatcgattgattgatttcttattgtattgactattgactattgactaactaagttgtgaatgtaaattatcatctctattaattattcttcattttgtttgtgactgtgttacaacaaatattattcttcatatcatatgtacatcttatgtttttctgattgattcctgatcgagttttctgactcacttgtgattgtaaattatcatcttttccatccttttgtcttgcaattacaactaatattattcttctaacaatccatcttatgtttttttctgattggtctgagttttgattgcaaattaattatctcttcattttgtgtttcaattacaacaaattattattcttttctatatccaatatacatcaatcaatatgctatatgaaacaccctattcaattttcaaatattattcttgttttaatcttagatctaaagatacgtcctttttattatcagtatgtttcttatgaattatttatattatacaaagcttaattatgaaattctagtatggcaacaatatcatttcgctctattgctatttgctattatttaataatctttaccaatttcagattcattttaggtttgatttctagcactgcagtctcgttgtaactaattaatgactatttcgtggaattaaagttttaactatctttgattgcgtgttttagtttcaatttttggtagctttcccctttgattcattcctcagttattgtgctttaattctgtgttttacaggaaacaaaaatatcaatcaatttcttaaaaaagaatcagcaaccgtgattatcgctttgtgattgtaattttgagagacgtttcaag

SEQ ID NO: 106758 - DNA, 936 bp, Aquilegia coerulea
  Intron number 1 from transcript AcoGoldSmith_v1.008156m (l ocus AcoGoldSmith_v1.006441m.g) derived from phytozome v7. 0 (chr-ID scaffold_125; pos 213606 to 214541 reverse stran d)
aaaaaagacatctagacggtctctctaatttatctgtgagtaccatttactgattagtttttactttttagaatatgctgtctgattgcgaagatcaatgctggtggatatgaacacctagtaattatttcagttgaatcagataacttttgagttgggaaaagtttttgactcattattctgacagagcagcaatatgtgcgtagaaatatagtctgtgattttatgtctgtcaaattatatgattacttaagaattggatgatatcttctctttctacattctacatttctatgcaaaattgcatccccaaatttcttttagggtacttgtgtttgactagcatcatcctatccagtggtttcctaacaaggatgctaagtgctaataatgtagcatattcattctgtacctacggagaaatgtctttgagtcttcaaattagttgatggcacaacagggattaaaaattcatcttcatctactaaagttattgctttatcaaagagtaagagatgtttattatatgtaatagatattcttctactctgatccatgcaaggcacagtacatgttttgctggaattgagaagacctctattgtcattgtctcattgatactattattgcatgtactattatactattagagtcaatttagtgcaatatatagtaccatgagagtaggcttatcatacctcttggcttgtaatcattcatcaagtagactgttatctagcggggctaatctctgattcacgaaattagtcttattgctctcttgaagatattgaagtttaaaatctatagttatatatcatgtacgtttcaaataaagcaatgtacttagaggtatgttactgcctgttttactttccttaaagtcaaattgtcttcacagaaacaagaagatcagaagaagataagacgctcatt

SEQ ID NO: 106759 - DNA, 329 bp, Aquilegia coerulea
  Intron number 1 from transcript AcoGoldSmith_v1.007850m (l ocus AcoGoldSmith_v1.007856m.g) derived from phytozome v7. 0 (chr-ID scaffold_14; pos 3392783 to 3393111)
gatcagatttcttcttctctcattttcttctcaaggtaataatctttcttcttcttcttctttctcatctttgaatttctgtttcttttccaacatttttttttctttctcgaatctcattttcttgaagaaaagatcaaaatcacaatttttttatgaaaattagggtttgtagaatagaaaagatttgaaattgattgttgaaactgtttatttgattgttttgaaacacacaggcacatgcttcttcatcaaaacgagcaaaaatcactaattttcgctctattcaatcagatactatagttaataatactgtttattacgagttt

SEQ ID NO: 106760 - DNA, 386 bp, Aquilegia coerulea
  Intron number 1 from transcript AcoGoldSmith_v1.010005m (l ocus AcoGoldSmith_v1.008787m.g) derived from phytozome v7. 0 (chr-ID scaffold_17; pos 1074144 to 1074529)
cttgcagcttgtttcaatcttcttcgaaatcccaggtttttttcagttcttgtgaaaccttagatttcgatttgagcatacgttgttgtattatttatttgatttatattttatacaattttctcattgaatttcgatttcaatcgttaaaattttcaaacttattataaggtgttagcattataataaatggtttgtaaaacctattacaatggtttatgttgtttttttgtcattaattaagaagattttaacaaccatgatgatgagttagtgatggtaaaaaagttagggttttcaaacttaattccctaaatgggttttgatgtttagtcttcttttgattccggggttagtaactgtttcttgtttgtctacattgaagt

SEQ ID NO: 106761 - DNA, 841 bp, Aquilegia coerulea
  Intron number 1 from transcript AcoGoldSmith_v1.025937m (l ocus AcoGoldSmith_v1.025937m.g) derived from phytozome v7. 0 (chr-ID scaffold_38; pos 1726703 to 1727543)
ccatatccaaaagttcgaattcaacttccattcaggtacattcacaaaacgttcatagtatagttccatccataactgcaagtaatttagacgtcctaccactatttcaaccaccgtactataaactcttaataaaagttcatagtataataatattttcatcatccattaacaataacaaataaattaataaatattcgaccaacttttaggaggttcattatactttgggtggaaaaaaaaacagtgtccgtccgtccgttcgtccactttcaattttttttttctctcttctcccattctccttcttctcttattcttcttcttcttcttctcatctcttctctctgtcatctctctctcactctcaattctcctacttctctttcttctatcttcttcttctctcatctccttttcctctctttcaattctcttaattctctttcttctttatgctatctttttcttcttctctctcaattctgcttcttctcttcgtacctctccgatttctctttttaaagtcggtccccaccgtctcacggttctatattcttaatacaatatctgttttttttttctcaatagaaacccatcttgacctaaaacggcttttttcggttcagatcatacatatttcgaatctaacccggtccattgccagccttaggctgacccacatatataagagagaaacttatgatcatggtatgagtaagatcagaatgatcacataggttttttacttgtgaggttttccaatcatttggaataaagaatcaaaatgatgcaacagcaacaacaacaacatcatcagcagagcaatgaaactgacaga

SEQ ID NO: 106762 - DNA, 819 bp, Aquilegia coerulea
  Intron number 1 from transcript AcoGoldSmith_v1.006399m (l ocus AcoGoldSmith_v1.006399m.g) derived from phytozome v7. 0 (chr-ID scaffold_45; pos 1202509 to 1203327 reverse stra nd)
ttgctgaaaggtatatttatttatatattttttgaattcaattctttaagtttatgagaaaaatcttattgtatttttcttaattactgaaaccctctgcttgtattaggatttttatattatttctagtagtgggtggtaggttagaatttggaataagatcatttgccaatagttgtattatagtggctcgaaaatgaaaatgatgtaggaaggaccaaaagcaatattacctactcttttaatcttaaacatatttggacttgttctcgccggtattaatttttgttagatgaccaccccaaatcttcaaaataaaggttgatcaccttatacattaatgccctctttttttcgcacttttaagagagccctttgacttagatgagattttgtattgagtgatgccttccattttaggacagttcatggtggttgttttctagtgtttttataatacttgcgttacctatcaaaaagaaatatgttttccagtagagttctagagggcctgatagtgagcagagattcattagctattgcggaaacaatgaaagacactaattctgtgttaagcaatagagtctacttacctaaaaaaattaatttatatatcaataatggtgtagattcatgtgaatccctgccagttattaccagtctaagatgccataccttaagtctttatagaatatcttgcaagtttgattatttgctacatattttcattactttttgatcaatcacaaggtttaactctatttttaatgtgttctaatatgttctgtttgagactatcattccaggtgccccaggctt

SEQ ID NO: 106763 - DNA, 774 bp, Aquilegia coerulea
  Intron number 1 from transcript AcoGoldSmith_v1.008352m (l ocus AcoGoldSmith_v1.008352m.g) derived from phytozome v7. 0 (chr-ID scaffold_4; pos 8702240 to 8703013)
actaagataagatcttgtatgtgtgcacatcagaaactgtcaagattatatcgcatctccactagtctagggtaccccccttacaaatagcttgtaaggttacctctctgaaacctgatacttagatattgtgttatcaaaaaatcaaaagtatgtaacagagaagcgaacagttttgtgaaattcgcggttcacatactaagtttttattcttcaacctttctaatatttttcttatttacccttgtttctaaccttcaacttcatgtaaaacttttttcatttgctggtgtatcttaatcagtttcttattactgtgattctgtttatcttcccatagttcatatttattgccatctaaaatatggctgtttgtttattaaagaaccatgcccactctttctctctgttacatacatacaaacataacatatgtttcctaaccatcacagacatcgtcatgtcgctaagctaaccttctcccccgagttaagcattttattctctcattgaaattaaaagtttggacttcaagaataacccattttgattatagtgaaatcactgagcgaggtaagtgaattgattcgacttctatttcaaactaacattttcccccttttgcagaatgacgaccaggagaagaacagtacaggtacaacagccccatcaaaacgcaaaagatttttttttttatccaatttcatcctcaatcccttcaaatccttcacactcaaaggtacaacaaccccatcaaatccattccatttccca

SEQ ID NO: 106764 - DNA, 730 bp, Aquilegia coerulea
  Intron number 2 from transcript AcoGoldSmith_v1.006594m (l ocus AcoGoldSmith_v1.006594m.g) derived from phytozome v7. 0 (chr-ID scaffold_66; pos 20117 to 20846)
aaagaagcagaagagtttgttctccgaacaggaaggttagtttatttgaagaagtgacaatttctagtaggttattatgcttgtccaagcatttatcgaacttcttggaagttcaatttggtgtattcttgcattttattttggcatgatatgattctttactactcctaaaatatatatttatataaaaaaaaaaaaaaacattctaagctgaagatcatactgaaaaccatgaatattagaatactgaaagtcgtcagccactcaaactgatgggaactaaagagactaaatggtggctgcttttattggctgtatgttgtgacagcgctatggctactgctgaacactatatcgtgcttaatgctcatgaatatggtacatgttaatgtgctgtatatgttgtgtattaggagttgttgttacaagtcccttattttaaagcaatcctaatgcgatatctttctgaccaagagccctcctaaactaggcaactgaataattaaataaacgaattaaaataaaataactaaaataaaacaaatcgatatcttaaggttgttcactttttaggattatgcttttttttgttcactttttactgttatcttatatctagtgttattgattttcaattcctatcccaagtttaaaaccttttattcgtatgcataccttttcttttcatgattataactcacagtattttaatggtcagttgtggtgctgg

SEQ ID NO: 106765 - DNA, 134 bp, Aquilegia coerulea
  Intron number 1 from transcript AcoGoldSmith_v1.003765m (l ocus AcoGoldSmith_v1.003765m.g) derived from phytozome v7. 0 (chr-ID scaffold_38; pos 1772690 to 1772823)
ctcattgtagaatctaagtccattgaccaagacatgtgagtttagagatacatggttttctcgtcgattattagaatcaaattgtgtttgtttgacagttgacacccgttattctcttttctttctttgcagca

SEQ ID NO: 106766 - DNA, 931 bp, Aquilegia coerulea
  Intron number 1 from transcript AcoGoldSmith_v1.005874m (l ocus AcoGoldSmith_v1.004042m.g) derived from phytozome v7. 0 (chr-ID scaffold_17; pos 4009836 to 4010766 reverse stra nd)
attcatcattccaatcacaagattgaataataaaggtaattcttcactctaaagtctctattactatcatatttgattcaagaattcctttgatctaaactttctaattcctttgatcttttaattaataagttgattggtttctttgctaaatcatctatccctataaaagaaaaattgatttagaatcctaaaatttctggtttgactcggcgattattctgtttttttttataaaatcggccgatttaacaaccgattctacgatcccgattcaaaccgtccgatttaaacaaaacccggccgagtcttaaaaccatgcgtactaataaaacatgtacgtgagctatataaacacccccaacaacgtaggaaacttctgaagagaagagagacaaccaacacaaaacaccatattcagattcgagttacacttcttctgtgtctctcttcatctataaattctcaccaaattttcctaaaaaccctgttaatcttaccttatggttttaaatcaaatctaatacatcaaaactttcattaattttctcgattttgttatctgagaattgatctcagttagagaattgatcgtttttatttgtagatcttataaaaaaatttatcagatacgcatgagctgtttggtgaatttaggaaatctttcaaactcaaatcacttcattacgtgtcttttgatttttgttcttcacttttcccctttattacatcttcctttatttaattctgaaaaaaagtctataaaacctttattaagatttttaaatcatggagtccagagatcagagtaatcttcaattgaaaaaaggtttgtcagaaactttttttttttaattatttaattatatagtattttttatttaatttgattgtatttattaatgtggtttattcttgttccagcttcttc

SEQ ID NO: 106767 - DNA, 956 bp, Aquilegia coerulea
  Intron number 3 from transcript AcoGoldSmith_v1.005408m (l ocus AcoGoldSmith_v1.005408m.g) derived from phytozome v7. 0 (chr-ID scaffold_45; pos 198817 to 199772)
cgaaacctcacaaaagatttctaggcttgctaagtgtaagttgatctcgtaacaaatttttttttttttctaaatttatttcaattttttcttatcaaagacgaaagtaaaactagttttaatttaattagttggagaatcagtaattttaattacaatggtgcttgatcacgaaatagcttcattagaagcacataaggataaacatgatattaacatatatatataagtatcattcatggtgaagagtagaccaacttttagtttggaccttagcaatgatttcccaccagaagatgagttagctgtttcagagtgagggaacgagttgggcgagatgaaagaaatgaggaagatgtgggaaacaagaaagtgggtggatggagatgttatttttcccacttaactcataaaagacctattaaagtcaattgattactggaattttttctagtcacataatggcttatgcaagattatcagcacattatactttgatattttctactttcagtttgaatttttgaaatgagccaaagaaactactttttttatctggattcatattcaattgaccaagaaaaccatttgttgaaagtacctgcatatttaattttgtgtgttcttaaatttattcatataaacttggagggctgtagtatgacatccatacatacttccacattactaataataaagcttaatttatttcttacatttttatggctcaaatgtgctccatacaattttggataaaaaaggagctctgtatgtatcattaagaaaatgggagctgtgcactattattttaccattttacttaccatgaggtactaaagtacaagtagttcctttttgtaaatgcaaatacacataggatttgcacacattttttccctaagcttctttgcatctgatgacgtttgtattgatctgcagtgtcaacaaggtcgtct

SEQ ID NO: 106768 - DNA, 486 bp, Aquilegia coerulea
  Intron number 1 from transcript AcoGoldSmith_v1.003243m (l ocus AcoGoldSmith_v1.003243m.g) derived from phytozome v7. 0 (chr-ID scaffold_4; pos 8549157 to 8549642)
cctgataactggtgcaactggctttttagcaaaaggtactattattagtctaaactctaaagcctaaaaatagtgtagaaatgtaccttgttatcttgttagtagttagcatagattttatcctacaagttacaagtaatgtggtttgtcttggtttcaattctaagaatcagttaggtagattcacctaattaaggtctggtactttggtctttatttgttcaaattgatgtctacttgaccaatgtttttaactggtcaaatctaccaatttgattttttttttccctttacacattttaagtactctacactatttagcaaatttccttatttactgatcacctgatacaactttctgattcatttatgaatttattttgatagaaatctatgttattttctttttcaattaacaaactcatgggaattttctttgctttgtttgcagttctgattgagaagattttaaggacagtgcctgat

SEQ ID NO: 106769 - DNA, 543 bp, Aquilegia coerulea
  Intron number 3 from transcript AcoGoldSmith_v1.003726m (l ocus AcoGoldSmith_v1.003744m.g) derived from phytozome v7. 0 (chr-ID scaffold_45; pos 232651 to 233193)
ctgagtctgccagctccaattattgtggtgccaaggttcgatatgtgtcttttcatgcttttgtcatttttattattgttatctcttcaggacttgtttttatcacctgttacttacaggtcacaaacattgtctttgttcacaccttattttattgttatggtttgaatattgatctccaccaataatattttccgatgacccgacccactaataaacttaatttgaaaataaatacaatcgggttgacaataagtgcgttgatatagtgtttgcacaatactgataaaaattctgtttaggtctcctatgcttttactacggatccaacttgcaataatctttttctgtttatgtccaaatgcattgctcttcttgtattggatacctcaattcttattggccattttggttgaacctctaataatggaaattgaagttgttcagttacttgttttttctttccattactgaagaacctagaatgtctactttcttcccttctcagggcaaggttccactgttgtctctggaggcattaca

SEQ ID NO: 106770 - DNA, 712 bp, Aquilegia coerulea
  Intron number 1 from transcript AcoGoldSmith_v1.027342m (l ocus AcoGoldSmith_v1.027342m.g) derived from phytozome v7. 0 (chr-ID scaffold_5; pos 3386133 to 3386844 reverse stran d)
acactgaggtgataaactgatgggggctggtctctgtagacagattaatagggatgcaatcacaatgacgttctttaaataccaatagggagattttgcgggttgggtttacttttctcagtttctagctgattgatgtgtgggttatcttcttcttgatgtaatagcgaagccattactgaataccctttgttttatcaaaaaaaaaaaaaaaaatgtaaaaagagaaaaaaaaaacaaaaacaaaaaacacgtagtactttatttaacctcagaagtaactcttttagacacctcaaatccaggcagtcttggcaaacagcttgtcaaatacctgtatatatatatatttactgtgactgagttgtctgttatttcatgtccatttaataccagttagtattatagaaattaatatgacatttttccatgcagaatgttttgggcagggtgcatatatggttgtagaaatgatggagaacggtttggtttcttctgccatgctgctcttgaatttctacttcgatgtggagctcatcctgtaagtttcattgcaaattctagaattttttttatccatttggggttttctgttctgcgtgggcatacataatcgtagaaaaaagtcatgacctcatgattgcgagtaacttgttttcgttatttatttgtttgatggttttgcaacctggccaggatattctacattgcc

SEQ ID NO: 106771 - DNA, 579 bp, Aquilegia coerulea
  Intron number 1 from transcript AcoGoldSmith_v1.023891m (l ocus AcoGoldSmith_v1.023891m.g) derived from phytozome v7. 0 (chr-ID scaffold_20; pos 1049910 to 1050488 reverse stra nd)
tttcagcaggtcaaggcagagaaatacattattgagttgggtttctgtcaaggttcttgttagggccttagccttgggccatacatgtcaagtttgtttactaagcctgctctggtttaaacattgagatctgttttgatccaagagctgtgtttgaaaggagtttccactgaaaactaaacactcacttcctctctcgcagtttcttcatcacaagttcacaaccagtttctctatcattctcttgctggcgtccttcttttcttcttcttcttctaaatccctgtctcttctcaaatggagcagggcttttacggcgacttctaccggacttctgtccaaaacctcacttttaactagtcggaatatctctcaattccgttcgtactcttctttttccggtgaaataaagattcaatggttaggtttacaatgtagatcattttcttctggtaataatttgaattaatattaatgaataggtttgatatcaatcaattattttggaatttattgatgataataataataataatgtatacagatttaagaaatcaggcagtgggatcagttgaacaa

SEQ ID NO: 106772 - DNA, 877 bp, Aquilegia coerulea
  Intron number 1 from transcript AcoGoldSmith_v1.025608m (l ocus AcoGoldSmith_v1.025608m.g) derived from phytozome v7. 0 (chr-ID scaffold_23; pos 1379455 to 1380331 reverse stra nd)
agccagttccagaaagatacacagaagtactagatgtgagtaaagataaaatattaggttttgggtagatggaccaatgacgatcaagagtttaagcaagggttaggtgtcatatattgcgttacaaaattcaattcttctaagtggcgttagtagtgtttatgagtgtaagtttgagcttgcattttcatgttggctcaggtttgttaagtatgttttcgttttttcagttgctattcttgtaatctctatgagtaaaagcttatgttaaactcttcttctacccctatgtcatatcgttttagtaatgcaaaagtattaagcttccataagtagtgttcattatattacattagcgatatcatctatgtcaatatcatgttcaaatatatagaatatttatatgttcttgtaatatgatttctattttgcaacattttcaaacatatctttgaaattaatcctattttagttcagtcttaaataggatgaagtgtgtcaggtcaaattagaggtaagatattatttttcatttttatcaactaatattttggcagcaaaaaaacatgcctatcaaatgaacatataaaaattataagggaaatgaaaaaaaaaactgcaatgttagcattagatatgaaactcctttcaatgaaaagcaagatctagtaggtcttcatcccagtcgcggtcttacttaaacgaaatggatacttgaccaaggttgagcatatcagatacttccaaaatcaaagtgctggaacattatgtattgttagtatcatgtataataagatgatatctaaagtttgattttaaagcttcttctcatcttatttcagttggacattgcaacatccgcagcaaatatcgcgat

SEQ ID NO: 106773 - DNA, 373 bp, Aquilegia coerulea
  Intron number 2 from transcript AcoGoldSmith_v1.001266m (l ocus AcoGoldSmith_v1.001266m.g) derived from phytozome v7. 0 (chr-ID scaffold_17; pos 2778489 to 2778861)
aaatccttggtaaaggtgcttcaaagacagtgtatgaaaaaactctagacccatttcaatttaaattaaaatttgatcttgttttgagattatttttttttgataattttgatatatgggtatccgttattttcttctttttagttgttttaggtagttatttaaggaaaatgtgtgaaaatattgatcattggtgcctacccattatagaattcatccaaatttgatctttttttttttttcgacttcaatgtagttttaataaatgggtatctagtagtattattcttcacagtttcgtttgttcatatgtttgtgtttcaatttgattgatatagttatagaggctttgacgagtttgaaggaattgaag

SEQ ID NO: 106774 - DNA, 392 bp, Aquilegia coerulea
  Intron number 2 from transcript AcoGoldSmith_v1.011096m (l ocus AcoGoldSmith_v1.011096m.g) derived from phytozome v7. 0 (chr-ID scaffold_4; pos 8208940 to 8209331)
caattcaactggtataatctttcaagcttttacttttgatgattatgcctgttattctgttaagttgaaattttgatgattgcccattttccttctgtgttctatccttctaaatcaattgagaatttgggattttgatgttctttttgtttctttagatatcaagctttaatccaatgtttaccctagttttcttctttgctttataatcagttgattaattttttgattttctctcagtcaaacttcgatttttgcgatttatttatgtcttctatgtgtgcttatttttgaattgatagataagaaatggatttgctaatgttgattgtgtattcccctttctttctcttgtgttgcaggaccgcactttaatccattgaagaaaaatc

SEQ ID NO: 106775 - DNA, 779 bp, Aquilegia coerulea
  Intron number 1 from transcript AcoGoldSmith_v1.014567m (l ocus AcoGoldSmith_v1.014567m.g) derived from phytozome v7. 0 (chr-ID scaffold_33; pos 890357 to 891135 reverse strand )
cctaggtatgctttaaattccattcatttatccattggagtattatttttcgattcatccaatgtgattcgtagagtaaatgatctatcccctacacgacatatataagtcagattgtcagacatcacaagcattggaccatcttaggatcttaaatgttgctatggttattagtaacaagaaattatcatatacctttagctgaattttgtctacacttacagatacctcgagattttgtttatcatcccgagagcaccaaacacgtaccatacagctcaggtatgccaatattgagtaatgtagcccttctgagttcttcaaaccaaccaatcatgcttgatagtaatacgaatctatcgtaaaccttaactgatcttcaaaaccaagaaatacattttaattttccctaagttagatcactagctattagattagtaaaaggagtatggcctaaataaatcgcacacaaaatcttagaatctgcataatgtccataagggccatatatttttggcaagttgtttttacttcgtgttacttagaagctaatcgattttaataaactctaaattgaataactttgaattttgtaatgaaattattttgtattgataagaaattgattacaacaaagatcttctcaaattagaaaatcacattttttttaattcagtacacagatctaatgatgcgaggtatacgtataaaccctaacttctttgtgctagttgtaaatgaattttgatagatatgctttatcaatggggcaaggtatt

SEQ ID NO: 106776 - DNA, 720 bp, Aquilegia coerulea
  Intron number 1 from transcript AcoGoldSmith_v1.000583m (l ocus AcoGoldSmith_v1.000583m.g) derived from phytozome v7. 0 (chr-ID scaffold_82; pos 786915 to 787634)
gtttcttctcttctcgaattggtttggatactcaggtgagaacttctttacttaattcttatatttctagtgctatttacagctcttctttttcttgttgtattcagtaatctcattttgctaaaaatttaagctattttttttattgctttcggcttagttgcataactgtggaatgatcttgatagtgtttttcgtctagtaatttttgtacaatgaaatctatgatgttcattatgtttgccttattcaagactatatttgcttttatgtcgtttttagtgtaatattttcggtcttagcgcataagatctattcggcgatgatgaaatctaatacaaaacttacccccaaagttcttgacaatgtggaccaaggaccatgatatagatacatggaaatacagatggagttaattatttgaatggattaacgtatggattaaatgtgttagcatgtctatgaggatatgttggggctacttgctgtggaaattgactaaacattttgtattcctgatacgtagtttgatattgatttctctggtttctttatgcttattgaagtacttgcacactaagatatgtgacttcacctatgcaaatattggctatcatggtgtttggcgcttcatattttttcccctctttaaacctaattaagttatgttgttattgttgggaagacttttcagtctcaggatatatcccaacaatcttg

SEQ ID NO: 106777 - DNA, 814 bp, Aquilegia coerulea
  Intron number 1 from transcript AcoGoldSmith_v1.017334m (l ocus AcoGoldSmith_v1.017334m.g) derived from phytozome v7. 0 (chr-ID scaffold_4; pos 5658576 to 5659389 reverse stran d)
ggtcttggtggttgtattgctcaggtatatatttgaattccttctctatgtatttgtggacaggttagaaatgttggcagggttacattcttgaatagtgctaactggagttcgctggtgaactgttgttgagtatataattagggtttaggattatgaggaagtgtatagttagattgaatttagagtcacattattgaaaacaaatgatgaattagctattttggtcgtctaattttgctcaaattttcagttgagtcctctaagtttaaactgctcaatttggtctcaaatctttcaaaacgtttgcaaaatggtctgaccgtttccaagcatttaacaaagttgcccagtgtaatttatgtgcattttgaagttatttttgcgcattttttcagcacttgtgaatgggcaactctgttaaatgcttagtctttaggtcagttgcacataaattcaatgttttatagaagcccgaccaaaataagatcatgaagatctttacaataacatatatagaatttttttttaagaaaaaaaaaaataacggatgaccattttgcaaacgtttcgaaagatttgggaccaaattgaccaatataaactttggggactcaactgaaaatttcggcaaagttaggggaccaaaatagctatttgttcgaaaagaaatacagtatgaagaaatgcaaacctgaaattaatatgctagtttaataatgtgtgtcacttgttagtgtttaatcatttttttgtatgacatctcaaaagttgtttgttgattttgaaggcgggcttcaacttggggactacg

SEQ ID NO: 106778 - DNA, 642 bp, Aquilegia coerulea
  Intron number 2 from transcript AcoGoldSmith_v1.006491m (l ocus AcoGoldSmith_v1.006490m.g) derived from phytozome v7. 0 (chr-ID scaffold_17; pos 4819633 to 4820274 reverse stra nd)
gttggttcttgaaactcatagcttacgaactacaggtttgcttcttcttcttcttcttcatatgagttctctttggtttttttatttttttttccctttgatttattgatttactaactttggattctacctatgaaattgcgacgttctcttccacccctcttgatttggaagagaatgtcgcaatttcaaaggtagattctaaagttagtatatcaataaatctttcatatcttataaaataaaccatagaggaaaaaaaagtgttttcaatgacaactctatagacctctaaacacaatgagcttctgctaacgagccttttcagatggtgaaaatgattaagtgagagtttaattggtgcatgatatagctgtagactcgtactgacgggttagtgtaagatatatagtcatccaagtggcatttagtaggatatatagtcatccaagtggcatttatgtatattcttagtgtatataattgggaatttgtgatggtcattgtttaagtattccagcgtagcttgatcaatgaggatggatttatttaattgatatggtagctattacctgacagtgtattacctaggctttaacggtagttttatttttgcagaggcttctttttctgagtctcttt

SEQ ID NO: 106779 - DNA, 1026 bp, Aquilegia coerulea
  Intron number 1 from transcript AcoGoldSmith_v1.022154m (l ocus AcoGoldSmith_v1.022154m.g) derived from phytozome v7. 0 (chr-ID scaffold_29; pos 449417 to 450442)
gaaacgtaacttgtgaccagtaccacaaatataaggtatgcatttcacccacttactagctagctcttaagcaataataattttttttttttaatggcaagcctgtttttaacgagattagtaactcaaagatgcactgcctgggatcgaaccccagacctctggtatcatcgcccagaggtattaccaactgggctcagctggcatctgcaaaattgtgtggtaagcagtaactcagtaatgctggcgggattcgaaccccagacctctggtatcatcacccaaagattttaccagttgagcccaactggcacctgcaataatacatattagtactgttaaattctcaagagcaggctcagtagcttatcattaaccctgtagcatttatacaagctcgttttttttttcttttttttttggcttattcgatcttttcaggaggatgtccaactaatggtggatacagggttagaagcctatagattctccatctcatggtcaaggcttatcccaagtaagcatgtgtacatgcatgtatagcttctaacatattatttcggaaaaataaggatgagaaaactgagaaatttcgacattatgctaatatgtgctcttttctgcagatggaagggggcctgtcaatccaaagggcttacagtactataataatctcatcaatgagcttataagatatggtaattaatctatgttccttataaacctgtgaattaaaagaagaaactatacatgaagactgtaacattcagcccatggtgggaggatgggaaaatgcatgcattgtatttgtcactgttaatatgcaaatattattgttagaatgtgtacaccgaaatatgaatcatcacacatcgattaatgtatttaactagtactgtggtctttccacataaaactgcacaccatggatgaccaactccttttccatgtgcttatttcttttgtactacaggaattgaaccacatgttacactctttcatctgatccaccgcaggcactcgaag

SEQ ID NO: 106780 - DNA, 670 bp, Aquilegia coerulea
  Intron number 1 from transcript AcoGoldSmith_v1.003189m (l ocus AcoGoldSmith_v1.003189m.g) derived from phytozome v7. 0 (chr-ID scaffold_42; pos 1610985 to 1611654 reverse stra nd)
tgaaattttatctacataaggtatgcacaacgatatgataaatatcagactgaattgaaccattgagacaattcatccaattttttttttttttttttttgtgatagaaaaaaaaaacctattatttcactgacatagttgcaccaagcatgcaaattccagaaaggcagaaattgtccccaatctactatttgtcagatgttattttcaagttcgtggttgttaaactccaattccttccaaaccaccgataatccgttgttttaaaagaagtcttcaatatggtcctagtcttgattcagtgggcattcatatccatgcaacataatcattttggctcatctgtatgtttatgacatataacaagcaattgacactaatgtgaatgttttacatgtttttgagatagttttatgaaagaaaagggtatttattaagtatatagggcttaaccccacacccagtaaatatataaagtgtataggacttccactttggtatttggccacaaccaccagtttctctttgattactaaattgtactaaagaaatgatatggtttatcgttttgacggttttatgggattttacttactgtgttcctattggtattgtagtttccccttctttccaagagtgcgcgcttgcagaagttggttgcagctgcaaa

SEQ ID NO: 106781 - DNA, 305 bp, Aquilegia coerulea
  Intron number 2 from transcript AcoGoldSmith_v1.006246m (l ocus AcoGoldSmith_v1.006246m.g) derived from phytozome v7. 0 (chr-ID scaffold_20; pos 131690 to 131994 reverse strand )
aactggtaagatcagagcttgaatttttgtttctatattgacttgatatattaaaggaagagatggacatgtatgcctctgtaaaacctaatagggattgctacagacattttctatcagacgtacttacaggtaggctcattttgtgtgggtacatatcaatgcttgctcaataattgccgaaagattaagttaaaaagcccaatgctatggtttgagttttgacgtaggatatcattatacactttacataatgaaatgaattttgttatattggcagtgtcatcagcagcgacacttggagg

SEQ ID NO: 106782 - DNA, 991 bp, Aquilegia coerulea
  Intron number 1 from transcript AcoGoldSmith_v1.008906m (l ocus AcoGoldSmith_v1.008906m.g) derived from phytozome v7. 0 (chr-ID scaffold_17; pos 1841403 to 1842393)
ttccaaaggtaaaaccctaattatgtcccctttttttttttaagaatttgaaattcttaatagaattctataatcctagattttatttagccgatcgatattcgaattttgattcaaaatcatcatttaaacgaagagtagattattttttttccgcttggttttttatggagagagatctccaaaatttgatataattgtagttactgattcgtagtttttagtttttactatgtttaatttgcttgttttactttaatttcggtataaatttgggtgaaaaatgtagtttgaagaatcttgttggtagaacttacatattccagttaaaaactgcatcaccatctgaattttattgccggttcggaagtatgcttgaaccagtaaactaataaactttttgcaaaatctagtggctgtgaaacttgttcatcattattatattgtattaataaatcaatgcgtcttgaatctgttcatttatcgggcaagtcccctcatgtacttggcatttgggaaatgaagaattgcagcctcgcatcatgtttgtgttggctctgtcattatttctattggtgtcaatttagtattactatctcgttagcttggaagggttcgttggtagaaaaggagaaggggaggtggaggtaatagaagtcaatatgtggccacagctccaagtgtaccttgtagtgacttatgaagagcttgatcgtaagagcctccagagtccaccctgtagtaagaagttcttgtgtacactcaaccctttgatgtatggaatatgtttaaggttctttagatacccacatatatgtaggaagtcaaggcaaagattaaaattgtgtaaatgacataccagcttgagttgctgctaaacttgacgtgtgatttcttttggtattaccttttagatgtgatatcttatatgattttgataatttggttcttaaccctagtctgagtaattgttccttataactgtagatag

SEQ ID NO: 106783 - DNA, 674 bp, Aquilegia coerulea
  Intron number 1 from transcript AcoGoldSmith_v1.009453m (l ocus AcoGoldSmith_v1.007355m.g) derived from phytozome v7. 0 (chr-ID scaffold_45; pos 764788 to 765461 reverse strand )
caggtattgttcccagataacagacgacccggcaggtattgttcccagataacagacgacccttgtacaccaacgaccaccatcacatacaccttcacactatacaagacttaccttaccaattacaagtatttgattcccaaggtcatgcatcatcgatccttagcttcttccaggccagtagtagcaaatagaatagagctccctcctgctgcagatgttaatatataactcgatcaccattcatcaatgacagtctgattccacctacacatgatgtcagctatattagagtacacgcttcttgtaatcgatcatcccctctacagtccatattagagtgcttcttcacggtgccaaaatgagttctaacatacataaatacattctaagtttctactagtgcaacatatatccaccaaaaatcttagctaaggtactctagggttctattgaatatgacatacaagagtccaacctgcaggagtataatataatctacacaaacacacacatccatttaaacatttatttcttgttcggattacgtctggttgtggaacaaaaccaacaccacttataatttttatggtgcgtggaactaatatttttcatgtattaattaccttcgagcttattttatcttttgaatatgatgatcttcataacagaga

SEQ ID NO: 106784 - DNA, 560 bp, Aquilegia coerulea
  Intron number 2 from transcript AcoGoldSmith_v1.009171m (l ocus AcoGoldSmith_v1.009171m.g) derived from phytozome v7. 0 (chr-ID scaffold_17; pos 1782262 to 1782821 reverse stra nd)
tgtagctgccgcaacagccgtcactcaccctttaggttttttttcttctctcttagtacattttttttcttttgagtaacaacaaaagtatgtagatgtattgaagtggaaacgatgttttgatttaaaattgcgccatttttaagataacctaagcacttaaaggtcaaaaaattattacgccaagtgcagcctatgtagtacatgagataagaatatggatagaaataagttgaagatattagtttatcatggattggtacagttgcctgagcataatgatgtgtctttttgacacttgaaagagttattcttaaagtttatatgatttctcagtaaaagttttatctcaatgtagggattcttgttttgttaaaaaaaaaggttattaatattttaggtgtttttgtcatataattaaatccaatagagcacattttataggagatgaattgggagattctacctattaaagtttgtcgaataaggttaacatccgtagaagtagaattgtctggcagttttttcgtatgtttatttttttcttttttgaaccgcag

SEQ ID NO: 106785 - DNA, 693 bp, Aquilegia coerulea
  Intron number 1 from transcript AcoGoldSmith_v1.013676m (l ocus AcoGoldSmith_v1.013676m.g) derived from phytozome v7. 0 (chr-ID scaffold_114; pos 218130 to 218822 reverse stran d)
ttttcaggcgtgttgcctggcatcgagtgaggcaggttctcttcttgctttttatttatgtgcaatgggttactaatgtaggaactttaaatttttaatttgtctgaattacaacattttttttattttctttttttagaggtaaacgagcataatatatattcataacaaaaggatacgtacaaacaaagccaagggatgagatatccctagtcaaggactcaaggaaacaaaagcaaatacaatgtacaacatacaaacaaacatactgcaaaaacaacaaagaaactctacatcaaggaccactaagaacggcttcccaagagtataaatggaatctccccataagcctgccatcttttgcaccaaaaccaaagggacaagggtactttgatgtcaaggatggtgagatctaagtcaccctgaactccctgaaaatgtctccgataacaacatttataatccaaaattggcatctagtcattttcacgctaagatcggtatagtgaataacactaaataaaagatcattgctgtagtagccacagttgacatcaaacgttggtgtgaatatacatgtatagctcccttaaggaatgactgcagtactaagaaggtccttagaacttgtcagttaaactcaatcatttttctgcagataaaacagtataacgagcctattgaggtcagaat

SEQ ID NO: 106786 - DNA, 498 bp, Aquilegia coerulea
  Intron number 1 from transcript AcoGoldSmith_v1.003724m (l ocus AcoGoldSmith_v1.001940m.g) derived from phytozome v7. 0 (chr-ID scaffold_14; pos 2950797 to 2951294 reverse stra nd)
cttccagcttcttttgcagactttccaacaaaactgtaagctctatctctttatctatttctctatcttgtttttctctgtaggttgtaggcaagaatttgggattagggatttagggttatttttagctcattaatttgtaatttggtacattgttgtataaattagggtttgtgattaaacttttgtgattaaatttcctgtaatttaaaagaagattttgatgcttggagtatgtttctttagctaatttgttattgcatttgtcttttacgtttgtttagttgtatattattttataataatatattaatgctgagctagttgtgaagcttccccctttctgtctgttacttgagttagtatttttcgatggagtcagctagctagtctttggtatactttttttgtgctttctcggttgactcattggtgctctttatttttcattgttaggatcttggaggtaaaaattgggtgaatttaaaagtacgaaaa

SEQ ID NO: 106787 - DNA, 161 bp, Aquilegia coerulea
  Intron number 1 from transcript AcoGoldSmith_v1.006548m (l ocus AcoGoldSmith_v1.006548m.g) derived from phytozome v7. 0 (chr-ID scaffold_17; pos 2576219 to 2576379 reverse stra nd)
tcaacccaaatttagtgagagaaacagtcaacaaggtatataataaattcgatctattcaacaacccattttttttctttctcttgttcttcaatttgatttagattctatataatttcttcaagtaatttgttaattttgtttgtgttgaaggtggataa

SEQ ID NO: 106788 - DNA, 660 bp, Aquilegia coerulea
  Intron number 1 from transcript AcoGoldSmith_v1.007838m (l ocus AcoGoldSmith_v1.007849m.g) derived from phytozome v7. 0 (chr-ID scaffold_14; pos 3178361 to 3179020)
cacatcatcaaagctgtttcttcttctatataaaggtgactttttttttttttctttgctttacttgtttgcatttcaaggtagaaatttttgatcattttctttcttagggtcttcttattttgcttgtttatgtatatttgatccttgtttgttagtaacgtttggggtgtttatggtttgatttgttgttggattaacaatttcacattaatggagaaaacccattgtttgaaaattaaaactgtatttgccaacattgtactctaatttactggatctcaaatgggattttagtttaaatctaatttatagaaaaaatagctctttttttttcatggaaattactaattttctcttaatgttatgtttcttattagttatactggatctaattagaattataactaatcacaatgatttagaagttaaaacatttctgtgaattttgtaaaattattttcgtaaaaattaatttttatttactcaaatttgatggcctaaattttttatttattttattttttctaatcagtgatagattgtggttttattgacagcatcgaaattttccacagtctttattttcctaattaatataatttctaaattatgtttatcattatgtaataggttctcgtttgtgtttagatattcaga

SEQ ID NO: 106789 - DNA, 470 bp, Aquilegia coerulea
  Intron number 1 from transcript AcoGoldSmith_v1.016428m (l ocus AcoGoldSmith_v1.016428m.g) derived from phytozome v7. 0 (chr-ID scaffold_65; pos 655024 to 655493)
aagggaacctttttacaatacttatcactgattgggtcttattgtcgagagcgtgagtttttgtttctattatggtatcatactttgtagtagtgggtgaggtcctcccccactctccttctgtttttatcttttgtaacttattcacaatcaataatttttttttaatatatatgttgtgtgttgtttggcggtggggagcacttcttcattatgtacatatgttataaatcactaggaaaaaaagctgtaaaggatagatttaaaatgattggggcttttagattacgagaatgtaaaattattaaattttagaagtcttatttgattcatttagtaaccctgttcagatttcttggccgattatgattattttcttggccgataaagattcaacttttttttttctttttaacggtttttgttcacttgtaggttctacatctgcttaggaaatatttgggtgaata

SEQ ID NO: 106790 - DNA, 818 bp, Aquilegia coerulea
  Intron number 3 from transcript AcoGoldSmith_v1.024642m (l ocus AcoGoldSmith_v1.024642m.g) derived from phytozome v7. 0 (chr-ID scaffold_20; pos 1901208 to 1902025 reverse stra nd)
aagttcaatttgaagataggcttttcacactacaggtcactttcaagttcaaactcaaaagctataatataatttggaatgttgtttcttgcttgattttgctgttaggttgagttaaactgtaaagatttgcatgtttgtcaaaaactaaaaaatttcagataaaaacaacgtaatttgataagtaattgaccatttgttgtttcaattttgttttaaatctttctgtatacgctacattcaaccaagttgttcattgccctaagcccctaacttttaactcttaagtcgaagctaagttttgattatatatacataatgtttggtagcaataagtttatttgaaaatgtatggggatgttgatttcctggttctctgataagagctcaaagtcatggaggaatggtgatgtaatcgattcatctgagtttagtcagtagaaaagggttgattaatggttttaacttcaaatgtttaaatagcaacatcttcagtaattgaaaattgtatcataagctttcccatcttggaaacactctgtaacaagtctgcacttacataccacatataacggattgcaaaacaacagaacgtttataactcattgaagtcaagtgcacaactatttggattcgtagcctgataaattcctgtcaccaggcattgtattcgccttaatgttaggttttgttaattatctatttatctaaaatattgtcttttaaacgttgtttgttttttagtttatagccagatatatcttgatgaacatcacatcttctctgctttagtctaacatttgtgtttataatcagat

SEQ ID NO: 106791 - DNA, 1020 bp, Aquilegia coerulea
  Intron number 1 from transcript AcoGoldSmith_v1.025096m (l ocus AcoGoldSmith_v1.025096m.g) derived from phytozome v7. 0 (chr-ID scaffold_17; pos 4167053 to 4168072 reverse stra nd)
gctttgttcgatcaacagaatctaacattgagagggtaagtagaattttccattttcattttttcttactgttatttgatttcttaaaattgggtttttttttttttattttgcatataagttataatttttttttttttaagacatagtttatgcaattattggtatgtatatgagaaggacaccaacttaattgatgatgttatgtgatataacccaattgatttgggattaaggtttaggtaaataactcaaatttgttgaaattagattaattgaggtagccatcatgattgtgcatgtttgttctgatcttgttgttatttactgatttaaatatcgttagtgttcttaattcttaattcatgttactcaccgaaaacacacattgattataatgtaaaaaatataccatgagattagcctttgggacatctcaatcaaatcctaactgctgatgttcattacagataggttcagtgaccactaagaaaatgtactcaattaaccacaaacacacacataaaattatgcagtaaagatgaatattactgcaagctgagtgcttattttgcttatcatacatgtagtttcttctgtttatgagttaagagcttactctcattcatgttcacgacaagcttgttcccgttgattagtctctggaagaatggcacacctttttgtgagtttgagttttgtcctgtacattttggctccagtgtactgtagatgcatcaatcatgagtttccatcttatcaaggcattgcaccaaagcaattcatatctaacttgtaattttttccgatatttactgctcactatgtttttattcgactgatttggctccaatgtcttcatatatagggatctgaccccccacccccttttccctttctctcttccgcctccctttatattagtttcttcatatattgtgagttcttgttataaagcttctttgcttgttcttttgttgatcaggtgatatttgactttcgattcttggcgcttctagc

SEQ ID NO: 106792 - DNA, 756 bp, Aquilegia coerulea
  Intron number 1 from transcript AcoGoldSmith_v1.021130m (l ocus AcoGoldSmith_v1.021130m.g) derived from phytozome v7. 0 (chr-ID scaffold_20; pos 2578706 to 2579461)
ttactcctctacagactttagatcagttgagcgaggtatatatgatttcatctgtgttattaagtatttaagtttagtttttcttaaaactatgatttgttttccatatgagtatttttttttttttttttgctttttatcagcttctatgaatgtggaaacaatataatttactacgaagatggtttggagtagtttgagcaaatgaacatgataaattctgatttttctttgacgtagacaattatagttgatagtcttatatagaattggttatcattttctgccgcgataataatttttggggcaccatctcttttgacataaaaacaaaggcgttttgagtgaggagatttcttgtcaattacataaaaaattatagcagatagtcttatataggagatttcttgtcaattacactttcttctaaaaaaaattggtactgtataactgtattagtctgaccaatttgtagtgcaatgacattagttttccatgttaacgcaacccttgtaatttatcgtttgactgcgtaattagttgataataacattgtaatgtactaatgtgtttaatggttcttgtgtgcgttatatatgatatcaagccaatccccggccaactcttttgtataatgcattgctgttccttctatggtatatagacaatcatattgtttagcacattgctaatctgcagtcctcctttatgcattgtgtagaaacttgaagatctagagaaaagagaggcagccct

SEQ ID NO: 106793 - DNA, 645 bp, Aquilegia coerulea
  Intron number 2 from transcript AcoGoldSmith_v1.006573m (l ocus AcoGoldSmith_v1.006573m.g) derived from phytozome v7. 0 (chr-ID scaffold_5; pos 6414051 to 6414695)
aattcaaaggaagtaagtagttctaaaagttttaggtaatattattattcgaatcgatttcactttctttcttttagtgattcatttgttttcttctttatcgaatctgagctttttacaggtttctttctaggtcaattgacttttaaactagtattgaaaaccctaaataacgtatttctctgattcattttttcattttaaatcgttttagttaagatttcgatttatatatatgttcaagtgattattgatttgatcttgatgaatcggttctagatctttgcaaatgattcatagttttcaattagttcagttttatttctcttttagatgatttgaatgagttttctaattccaaatgttgtatttgattgctttattatgatttaaatgaattttagtttgtaaggttttagcaggtttgtgagttaagaggaaactagtcaagtttttttattcttaagtagtttggtgtgattgatttgatataacttggttttagcatacttgtgttaccttagtggtattatgacgtaacttattcattttctgttgaatggattggaaatgccatttacttttttcaacttatgaaagtgtattttgtctgctaattgtacttgtgtttcaaacaggattacc

SEQ ID NO: 106794 - DNA, 779 bp, Aquilegia coerulea
  Intron number 1 from transcript AcoGoldSmith_v1.003554m (l ocus AcoGoldSmith_v1.003554m.g) derived from phytozome v7. 0 (chr-ID scaffold_14; pos 266880 to 267658)
gccatcttcgatcttcttttcttctcttctctctggttagttttctctactctctaccatatttttctctctttattttttaatatttgttagtttttttttttctttgttggggcggtagttaagttgattgtagttcttgtttttctttctaattccaatacagcaatacaccttttctctgtctgtatagttccactcattattcaacttttagaatcgaacggtttgatgatcgtatatggaagatacttatatgtttttgggaaattttaggggaaatatgaatgtgatacacagtatagactgaatgaatgggaggttatctattttactaaggactttatattttgcgataaatcggtaaaactctttaaggaattggacttctgggtattcaaactttgtagtattacctccctatagtgtagtttcagtttttttgtgtgcaggaatcaaaccagcatgtttgttatatagtatccatcaaggaaaactaacataaatgttcactattttgcgcaaccatacaccattagtccaaaacctcaaacacttgcaacaaatataccatattccaatttatcttgttgacagggacatgcttgtatgattatacttctgtacgaactgaaagatgatgtagacatattgacaattgtgttagtgtatttaatgatgagctatcatcattggaaatttttgtttattgttaacttaatttgctccttttttttttctgaattcaaggttgataattcgaatacatatcatcaacc

SEQ ID NO: 106795 - DNA, 504 bp, Aquilegia coerulea
  Intron number 1 from transcript AcoGoldSmith_v1.003943m (l ocus AcoGoldSmith_v1.003943m.g) derived from phytozome v7. 0 (chr-ID scaffold_45; pos 113985 to 114488 reverse strand )
tcaatttgcaaggtttgataatttactctcataattttattgaaatttcctgttttttttacataggcatagttcctcaatagtttactgggccctgccataattctggtctattgaatctcaactgacccaaatatagaaagactatagaacagtgctgtttggctgtttgccaggtagtccatcagaaggaaacttgatcatctacactgcatctggtctttatttttggcacaacagaaatactattttcttcataattcttttgtctataataccattgtttttgagtttttttgttccatctttgcatatattttttatatttaattggtcacttacatgatcattatccttatgagattttcttcccataagcgcgttccgttgcgtttatatagtaaatgacataggaaaacatcattacttgattaactaagtctaaatagcaacctaagtatgacagcttgattctgttttatgtcacttttgcaggaagggtac

SEQ ID NO: 106796 - DNA, 489 bp, Aquilegia coerulea
  Intron number 2 from transcript AcoGoldSmith_v1.008357m (l ocus AcoGoldSmith_v1.008357m.g) derived from phytozome v7. 0 (chr-ID scaffold_4; pos 214166 to 214654 reverse strand)
gtctcaacaaaccagaggacaaaatagttttgaaggtaaagtcatttatcattttgtgtgcatatgggcaattttgtaatttgatcttaccaaggcaaccttagttcatatagatatagtggaaaagaaacacagtgactttgttgtataaaatggctggatcagactgatgtagcattgatcttgagtatgttatattcccaaaagaattgtctattcagactgatgtattttttaatccattttgattcaacttggaagctccaaagaaaaatagttgttttggcgttaaaaaaatgcaggatttacccaagtctttatttaattatattctttatttgttgttttttatttgcatacttttctttagctaccatctagtgattttctgtgagaatctggtgtgccctgtcagtcaaacttgaaatattcaatctcctataccaaacttatctagtgtgcctgcatgtttcagaaacttcattcaat

SEQ ID NO: 106797 - DNA, 473 bp, Aquilegia coerulea
  Intron number 1 from transcript AcoGoldSmith_v1.008357m (l ocus AcoGoldSmith_v1.008357m.g) derived from phytozome v7. 0 (chr-ID scaffold_4; pos 214666 to 215138 reverse strand)
tcttgaaccaaaatagttctagtcttcttgtacaggtgagtttcttgcgcttttgttatttgtttgtaattcattttgaattttcataatgcttgtcgtgtttgaatctttgagtatgtatgttagttgtatgtgaaaatgcttatttatgattaagtcaatacaaggcatctaatcaaatactgtatgtttatcattctagctagtgttatttttaatgtggttatatcaagaaaaaaatttgctttggtgattgaatcagaatgattgatctgtctggcattaatccgtataagactcgtacgattgttattttgcactatcttttgttagaataagacctgatagaaattatttcttgaagatgttagtgttgtactagttttctctttttcaaatgttgatatctttggatactgtctgtgtgcattaaaccagttagagcagcgtgggtcgcgaactctacagtgtat

SEQ ID NO: 106798 - DNA, 939 bp, Aquilegia coerulea
  Intron number 4 from transcript AcoGoldSmith_v1.008833m (l ocus AcoGoldSmith_v1.008833m.g) derived from phytozome v7. 0 (chr-ID scaffold_5; pos 1062626 to 1063564 reverse stran d)
aaacttgaggcaaagctccaggagctagaggtagtaataaggcttaaataattttgctacatacagtctgagatacctatactttatactattagtcttacaatctccattaaacattaataggatgaatttaagcatcagaaatttttctcttgcacgattctacattattttaatcctagtgaaactaattatattgtttcagtgagtagacttttttacgttcttaattgaatgtgttttacatgacaatatcttggttggctaaatctgactgctcatgaaacttccacttcatttatccagctatgtcttttgttggtccttaatactgtaatgtggaaaagtttgtgaaactaattgaattgatttggagaaagtgaaagcctatttatatcaaatgtgtcatgtagggagtttggtaatcagaacaaaaaaccaccagtatttatcatttggtaatacactatgtgctgctttaaggctatcttgttccaactgtcgtgcgtatataatctctatggttcagaattttattttaagtttttcacattgtttacttcaataattctctccattttttagctactgtttagtttcaaacggaaatctatcattcctcaaaccattcactcttacatacctcagataaattcatcataaaaatggaatcatagtcattgtaagagtgcaatgaagtgaacatgtggtctttgcaactaaaactggtcttggtcatcactttgtcatcaggagaaggtatcaaactatctatccaatggactgacatagatgattgagttccctttaataaaggttgggttttatagtaagagaacagtttctgttaaatcataaagatttagaagaaaaaaaaacattctattgcatagaaatctcaacttataagaagctaagagttagtttatgacaggtgga

SEQ ID NO: 106799 - DNA, 439 bp, Aquilegia coerulea
  Intron number 2 from transcript AcoGoldSmith_v1.003850m (l ocus AcoGoldSmith_v1.003850m.g) derived from phytozome v7. 0 (chr-ID scaffold_20; pos 1687265 to 1687703)
tcaattttcagaagaatctaagaatttttggggaagtaagttttcgacgactagcctatcttttatgtgtttctcttaaaaaggcattttgagtgacaatttttaattagaggtttctgtgtcacatataaaaggttgtatattgtattttaatttagtatgtttaaatggaatgaaaaaaggttttttgttcgctgttcagttgatttgattgtataacggatttgccgaggaaattttgagtaatctttttcatttttgactcagttgattgtatacatattcactcagttttttttttctatttgtaatggggatctcattggaagagttataacgttatcattataatgttagttgcttataaatttcaatttctcaatcaatcatttgttaatgcataggcaggcacgagctagtgttggggagcacttttaaa

SEQ ID NO: 106800 - DNA, 733 bp, Aquilegia coerulea
  Intron number 1 from transcript AcoGoldSmith_v1.005509m (l ocus AcoGoldSmith_v1.005509m.g) derived from phytozome v7. 0 (chr-ID scaffold_17; pos 3750496 to 3751228)
tgttcgatctcatccgttagatatcttttatatctgtaagtttttttttctttcttcttcttgtttctgccttcactcttttttttctagggtagttcattgattatgattgtcaagcattatgtttgtttttggggttttaaaattttatgaagaatttaggtgtttgaaattgaattatgttaaaaacaattgttttaaatgaaatagttcatcttctgagtaatgtgaggtaaccaaagtagatttttaactgtacacactacttgtttgatgaattgtttcatagacactgctcgcggaaataaaataatcaaatgttagggtgaattataaatttcagtttgaatcataaccatgttgggtagatgtaatttgttaaatttcattaatttttacaattcataggtgttagtaaataatgtttggatcaaaatatctaaaaaccaatatttttaggttttagcttcgaataagctttttctattgtttcttgtggattgcttacattaaataattttgattgtgtctgttttgtttcttgtcatcttctacgataatcccttttaaaagtttattactgtgctctccttaaacaatgttgtgtttcaagagtacagggaactatattttttttcttctggattgtgtttacaagttgtacttgcaattggtcgtgcccatataaattattatttcttttttgcttcagatatttagacctgcaaacagt

SEQ ID NO: 106801 - DNA, 1039 bp, Aquilegia coerulea
  Intron number 1 from transcript AcoGoldSmith_v1.005546m (l ocus AcoGoldSmith_v1.005546m.g) derived from phytozome v7. 0 (chr-ID scaffold_14; pos 1082197 to 1083235 reverse stra nd)
gggatatacttgctgttcctttgccgggtaagttagctttatgagatttgtttaattacccttttgtgtgttagtgcttatggagtcgatttcaaattattaagctaagtgacaataaatttgagctagcttgaagtgaatatggtagtgggtatgattgtgttgatcttattgatggatgttacattatgacattatgttcatgttaatgtgttaaggccttccttgttagtgtggcaaaatgttgctccctagactctgtactaatattaaggtgatctaagtggtacagttgtcttggcagttgcttcgaacacaaaagtttctcacctcgtagctgcaaacacttttaataatttattcttcagtgtgtttgcagcttggaagaaagatgtttgtggtgtaattaaccacatagcaaggcagccgtaccacctagaggaccatcatattgagtacaatcaagagcaatgttttactctcatacgcagtgtaaccctttagaccttctacctgttgtatcttccaagtcgagatatatagttttgctgatatatacctgctaccctacatatgtgaatgtttcacaactgacaatgtagtacatgcttgccgatattgtccactaatttttaagctacctcgatatctctcaaaccagagatatcccaaaaatcaagatgaagtgaagtcctttaaacacagtgtgattgatcaaattgagtttagttgagtctgttatggtttctctagtccatcacaaatctaggattgcagtctggtatatcaaactgagttattttggttgaatagtttctatggtttatgtggttcacaccccagttagatgtggaatatggtatttcacactttatgttttgattgtgtcttcgttgttgaatcactttaatgattatcaattccttgttttgtgtgttgctgttttcataaattgataagtttatttacagatggaaatggtgcttggatgtttcctttgtttcttctgttacagcttgtgcttccaacttcccaagat

SEQ ID NO: 106802 - DNA, 621 bp, Aquilegia coerulea
  Intron number 1 from transcript AcoGoldSmith_v1.003190m (l ocus AcoGoldSmith_v1.003190m.g) derived from phytozome v7. 0 (chr-ID scaffold_14; pos 602907 to 603527 reverse strand )
aaaggaagctcgaggaacgtatccttcatacttcattacatttatatacatttctgttttgtttgattattctatgttttgtttatattatttgaaatttataaacaaatctgttagtgtttattgaaatattgaaattgattttattaaaatctgatttttgaataaatgtgctggtggaaaaggtttgccctatgctcttctaagtgaatttaattcaaattggtgctagtaaaacaatgtagttttcttgtcaaaagtttttttggcttttgatggtgctgatgatattaatgtgtgtttgttatcaaaagccagtagaggttgaaatccttttttgaacattcaaaaacttttgtagcttctagtgacttaggatctgataaaatattcacaattttgaatttttagtacaattaaaactaaaggcctttcatgggtttgataatttccgacaaacaatcatgtatatagaaatcttattatgttgtttgttataaattagctaagtgatatgtgtaacaacatttgaacttgtatatacagtacaatagtattaaatttcccttaaccatcccttattcagttaagcaggggttgaacataggacttcagtcagct

SEQ ID NO: 106803 - DNA, 875 bp, Aquilegia coerulea
  Intron number 1 from transcript AcoGoldSmith_v1.000369m (l ocus AcoGoldSmith_v1.000369m.g) derived from phytozome v7. 0 (chr-ID scaffold_23; pos 3296957 to 3297831)
atattggaagagtaagatttttttttttgtttctttgtacataaatattggttttttgaagataccctttttctgattctattgtttatgtaatgttgatttttatataaaaaatttgtgattttgtaaatgttggtttcatacattaatcaaattatcttaaaatttatcatttttgaagataccctttcctcaccattgccaaattctgtatttttgtaatgttggtggtttaagaattataaaattctattcttttgattgcatccatttgtctattttgtgtttctggaataaagataatttttttatgatatacatttgcctattttgtgtttccaagctactgttgttgtgaatgaaaaaaaaacgaggaattgcttttcctcaaactctttgttttcttgtttcattaagaaattgggtattaaaaaaaaaagctacatatttgttgcttgattatatcaatttccttactagtactcagttttatctgcactcggaatgatatgataatggtttatttttcgtttgggtggtcagttctctgtttctcattagactggcagaatgaagaatatggttcatgcaaaggtgatgagtttctttgttagatcaatgtgtaggagtaggactgtggcctctgggatttggtttttcgtttctttgtttattagttgttcttgatgctggaatagaagtacacgtttattcctgttgtttcttgctcccatgaatagaagtacacatttaactcttacatttgaaccgtggtaaatttgattttgacgtttcactttttggctatgattttgacttgaatatttttggttttgctaggtgaattctctacgagaattgagcggccagatctg

SEQ ID NO: 106804 - DNA, 842 bp, Aquilegia coerulea
  Intron number 1 from transcript AcoGoldSmith_v1.015236m (l ocus AcoGoldSmith_v1.015236m.g) derived from phytozome v7. 0 (chr-ID scaffold_45; pos 1205150 to 1205991 reverse stra nd)
tcagtattgttgttgcttgcatttggattcaatctgttaattcctgtttactttaaatcattacctgtactagtagtattcaactgtcacatgatagcagacaaccttgcacatgaatgagaattccacttctgcagagtgcatgatatcttctcctcttcttgtatttcatcacatgggttggtttgtaagttgtattgattccatgcagccttgtatactggtggctatccccaatgaacgatattcatcttgtattgcgtcagtcctacacctaccaagttgatggaaattatcccttttcagaactttgatccactatttctaaatgggagtctggtttcatttttggtttaaggggtgttttggctgacaggagatcaatacgtcgatgactctttgttcttgggtccatatcctttacgcactttagagatgtatctttactattgcggtgagagatgccttgacttttaggatggtggtaattgtttgtttttctatcgttctctatatttgtatcacctggtgagaaagcatttattaggtactcagaaaagtatgaagacactgatagtgcatattaatccatatgagttataccaatgatagtttagatacatgtccagccttgaatgttcttaccagtttaagacgacactttagtctttttaaaaacatccttctaattgttcatttgctacatatttaatttactttttcgatcaattaagaattccccagagttgcaagctgcttattcctctttgactgtgttctaacatctgtttgggactatctttccaggtgccccaggctcacatactttgatctagagattc

SEQ ID NO: 106805 - DNA, 367 bp, Aquilegia coerulea
  Intron number 1 from transcript AcoGoldSmith_v1.009063m (l ocus AcoGoldSmith_v1.009063m.g) derived from phytozome v7. 0 (chr-ID scaffold_20; pos 2052321 to 2052687)
ctaacattcacaaatccgtttcttcattaaaacaggtaatctggtaatcttttctttctacattagggcaaatattttgatggaaattttgttttttttaccaagtttgcatcatcatgaacaattgaatttttttttttaattttcaagttgttaatgtttattttcatgaattattagctgaaaatcactttaatctgataatgtttgattaataagttttgattttgtttattttaatgttaattcacttaatattctagcttaaaggtagttatgtaacttgaatttgtttatttgaacttgtttatggaattcccttatttgttttgcaagttaatcttctctgttttttcaatttgcaggc

SEQ ID NO: 106806 - DNA, 521 bp, Aquilegia coerulea
  Intron number 1 from transcript AcoGoldSmith_v1.006554m (l ocus AcoGoldSmith_v1.006554m.g) derived from phytozome v7. 0 (chr-ID scaffold_14; pos 1158871 to 1159391)
aaggtttcacttattagaattgggacaagaggaaggtattattctgttttacttgattttagctcataatgttgttttttctgattgtgtattttcgtttgaattttaatcgtgtttaatcatttttcttaattttccaagtgtttgatgtaatgggttcattttatatttttattattctgggaaattttcttcatatttcttcttttatcatcttttgtttgtttatctctacaattatgtttgatatttgcttagaaagcgagcttagagtctttcgaaatcaaggtttctaagtatggattggttttaattaaagatagtcttttaattgatttaaattgcaccatttaatgacattttaaaactatttacttaattcaggtaccaattgcttactaaaaaaatacaaactaattctaaaccagtttaaccaacattttatagaaatgcacaatcatcttggatgacattctttttgttccttatgtaggacagcccacttgcacttgcccaggcat

SEQ ID NO: 106807 - DNA, 598 bp, Aquilegia coerulea
  Intron number 1 from transcript AcoGoldSmith_v1.005480m (l ocus AcoGoldSmith_v1.005480m.g) derived from phytozome v7. 0 (chr-ID scaffold_14; pos 1189299 to 1189896)
catcgttcattctttcttggattttctcaaatcaggtaatttctctctttcaaaagaactgattgattatattagtattgtttttagtgattttgttactgtaattggttaaacattttaccttgataacattattagtttttgttaattagggtttcgcaattaacattcaatatgaaatggttcttgactttgtttttgttcaagaatggcattttcatgaattatttgtttggtattaatgatttgagcaagaatatctattaacaatttcttttgttttcttcaattcatagtattgttatccttcaaattatggttaatgcactattacaaaaaattaggagtgaggaacaatagtaaattagtattagagtatctgaatgttataattctcttcatctatcatactttttaatgcactattgcaaaggccgttgtgctgtggggaagaaattagaagcatatgaagcagttataccttttgatatcttattaataattaaatactttctttatgacccgttatgcgttctgatgcttattattatcatctactgcagttgaaccagctccaggtgttgattttgaaggtctt

SEQ ID NO: 106808 - DNA, 922 bp, Aquilegia coerulea
  Intron number 2 from transcript AcoGoldSmith_v1.005480m (l ocus AcoGoldSmith_v1.005480m.g) derived from phytozome v7. 0 (chr-ID scaffold_14; pos 1190084 to 1191005)
caagtccttcatattcaccaaaacagcaggtttgtccgtcctcagctataggtcctcatattaatatgtatgaattttgtacaaattattgttgcatacagataatatctcaaagtttgggcctttggggttgcatattaataatcttaaattcttgtacatccattctatttccagaactatttgtttcaaggacctggttaagaacttaagatggtgtagctttcttttaaatggttatctgaatatctcatatcttaaacttttgtcttgttattgttaacaaatgtaagtttagtttgctgtatctatttttgcgataatctcccaaacagtgcgttattcagttgtttcgttgtgtatgtatcttgtgtcgccttctctagagtctagacaccttgattaaccactttatgtcttcgatacttactaatatatattcttagtccatatatatcattagaaaaagtatatttttatcagtgcaggaaaaaggaattaaaaaaaaggcaatgctcatatatcaagacaatgatgatcttcacatctataatccattattggaacttttttgaattgttttacattggtggactagtttgatgtgagttctgggtatcacctaagtattgctgtacattaactaccctatgtcctcatgggtcaccaagctaataaaattacacctgctgtatcactaagattgaaaaataacattcccagtctttccttgacatcatcaattgtaatcccttttatacagtatctaagcaaaagcccaaattaggttgtgattcatttcattttttggcatcacatatatgtattagactattagtttgttactttgttatgcaaaaatttcccctaaacttcatgccctgattttgatcttggctttgtttattgtgccttaaccagg

SEQ ID NO: 106809 - DNA, 938 bp, Aquilegia coerulea
  Intron number 1 from transcript AcoGoldSmith_v1.007432m (l ocus AcoGoldSmith_v1.007432m.g) derived from phytozome v7. 0 (chr-ID scaffold_41; pos 472468 to 473405 reverse strand )
gctgcacacaaacgtattgattctcctcttgtaaggtactactcttcatacataccaccttttttcagatttttttttgttatttgagtctattgctttcacttctcgttttcatcattattggtcattaatattagggtaataatttactttattttattttttatttttttataaagtagtagtagtagtagtagtagtagtagtagtggggattttaagagattaccaatgttcatgaaatcatatgagaatgaaattgtttaattttaatatggaacaggactgagaattgagatatatattttggcgagaaaaagagtgtggacttgttttccttccacaaggaccagaaaatgaacccatcaatgctctatctagagtactactaaccactttgcttttgttctaagttggttaatgattacaaagggttttttttaaactgtatacagtaatatatagaattatgtcccatattcacagaagattaaagcaagcatgaaatgagaagatggtatacacccttttctgaattttttacaaagaaaacataacttacggagatccatgtcttattacattgcctactatctaatgtatcaatgtggatgtgcttcttcctggtgattctctgttggttctagtatgttagaaattcaaaaaagtatgtatgtagatacaattcctatatacaatacgtacccaggaaaaaggggaacattattaacttgacatataggtacagtatatagtgacacataaaaagcgagttactgttgttatctgattttaatctgtgataatcttcttacataagtcttttgtaagtaaaagtttgtatggtgtctttcactcaatgttattaatactgctataacttataagacagggaaacaactgacattaaccttgtgtttttttgtgtgtaaggtaca

SEQ ID NO: 106810 - DNA, 445 bp, Aquilegia coerulea
  Intron number 1 from transcript AcoGoldSmith_v1.026317m (l ocus AcoGoldSmith_v1.026317m.g) derived from phytozome v7. 0 (chr-ID scaffold_4; pos 7925065 to 7925509 reverse stran d)
acaggtaatgtaaatatatttttgcactcaaagttataccaatatggaagttagattactactgttataatgttgttggtcgcaaaacccatgagaaaaaatgacagaaaactggcgaaaattgcaaattctaaaaatccattggtccatagatttcagtttctgagcactggagatatctctgtgtctaatgcattgtttgggcaaacattgtatattgttgttgaactcttgtgtagctatgagaattaaactttagcggtctagccaactgtggcaccacatgtttgaactgattaagaaaaacaaagcatattgaattgtcacagaaatccttttcttttagtcaatatacgtgtgtgtttcttttcttggagatttgaggctttatatatcatgggcatctcattctaggctgtactcttataattacaggtattattgc

SEQ ID NO: 106811 - DNA, 312 bp, Aquilegia coerulea
  Intron number 1 from transcript AcoGoldSmith_v1.003844m (l ocus AcoGoldSmith_v1.003844m.g) derived from phytozome v7. 0 (chr-ID scaffold_4; pos 6798586 to 6798897 reverse stran d)
ggaggttcaaggaaaaggtcattctcaagaaggtaaattatattacagaaatcgtattcgtttatttgtttatttgtgtgtgtcaattaaagctcaaagaggatccaaatttgtacaggcaaggtttgtgttatgtagccaatagaccatagggcattttgcgtcatgaaaacaaaattcaaaatagtctcttctgtcgtgttaaatattcccattatgcttctgttaatattagttatgtttttcaaatgtgtataatgatagatcatgaataagatttcaggttaaggttggagttcaaggggctgaaga

SEQ ID NO: 106812 - DNA, 362 bp, Aquilegia coerulea
  Intron number 1 from transcript AcoGoldSmith_v1.005431m (l ocus AcoGoldSmith_v1.004908m.g) derived from phytozome v7. 0 (chr-ID scaffold_14; pos 1394594 to 1394955)
ggtaagtcttagaaagacttagtttgattgtttctttctgtaatcaatgttttccagttttgttgttacttttgaaatttcaaatacccattttgtcaaaattcaaaatcaaagcaatttcttcaaccccttttcttgatataatcgcgattttgattaaaccccattacttatatctgcaattgttagagttcactttatttgttctacaactcttttgcggggtttattacattcattaagctgctttcctttgctttcttcaattagaatcatatgcaggaagcttatgttacattaaatccgtttgtgaatgttgaatctaatcataatgtatctttgtttgtactgcagatattact

SEQ ID NO: 106813 - DNA, 574 bp, Aquilegia coerulea
  Intron number 1 from transcript AcoGoldSmith_v1.001374m (l ocus AcoGoldSmith_v1.001374m.g) derived from phytozome v7. 0 (chr-ID scaffold_17; pos 742711 to 743284 reverse strand )
atactttgtgggggatgtgagagaacttttttttttgtatttcaagctgaaattcagagtctgaatgttcagcttgagggggagtgttggaagttattgtaatagtagtgacttgtctaacacactactagtagtagtgacttgtctaacacacttctttcattatatatacaagttatgtctcacattgagatatatagctttccaccctaatattctacttctagtataattcatcttttatacttctagtaaaataaagaatattttgctagtcaagattctgagaaacaagaaaactattgattgcaatcagttaattagagacattatgacaataatataattttaaatggataacctggactgcgaagtactgaagagatgggcacaatttttgacttggccaacagcccaacaggcacatactcataactaggcttaaaacctagcacttaccttttatagttctatttggctgatagtaaaactgtaaatttgatggctgcatttttttaactttcttacagacatcctatctcaaagattcaacaatatctatcactcgtgtagc

SEQ ID NO: 106814 - DNA, 561 bp, Aquilegia coerulea
  Intron number 2 from transcript AcoGoldSmith_v1.014235m (l ocus AcoGoldSmith_v1.014235m.g) derived from phytozome v7. 0 (chr-ID scaffold_14; pos 3068660 to 3069220)
ccaaacaactgatctaactttgtttttgagagaaggtgagactccgccattattcaaattttcaacaaaaagcaattgatattttggagtttggaccactttcacaattatgtgtgatgcagggcaactctgttgaatcattcaacttaattgtttgattttctgtgtatagaaagtatgactatttgatcaattatgcgggattatatattgttaattctgcgattatattcttggtccacaggtaagaaaaaatcactcaaggcatatgccattgtactcatttctggatcaattgtcttcagtgtcatggcatgcagtttgtgtatgtataaaattatgcacagaggtaagattctatctctcacaatagtggttactgttttatatattgagttcaattgaacaattcaattgacaattatagatcagagtagaaagatatcaccgctggatttgccaagagatgatggaaaagaaagagacacatcagaagtgccatcatttgattttgatacggttgcagttgctacaaacggcttctcaaataagcttggggag

SEQ ID NO: 106815 - DNA, 802 bp, Aquilegia coerulea
  Intron number 1 from transcript AcoGoldSmith_v1.005438m (l ocus AcoGoldSmith_v1.005438m.g) derived from phytozome v7. 0 (chr-ID scaffold_41; pos 933170 to 933971)
tgcggtccctcccttcatagtgctacaaaaccaaggtacgcttctattcgattgaattatttttgtcaacaaaacttatatgcttatatctggatgttgctagagtcgattggagaaaaactgatgagaaaaaagcatttgctaaattaaagatgttttatatgaatgaatggcgttttgggggctaattttgattttgatatggatgatttgcaattaagcattaagtcgtgtgtgcggaaaaaaaatattcattggtaactcttatcttatcttagaaactgaaaaaaatataaaaatttgatttttttttactagtgacatactttctattttatagctactcattatctatgctactaatagcctaatagagatattttaggattctaaaatccaaatgtgggaattaatgttaccaaattctattaattccactttttttaggtggagatttcctcaatccttcaggcttcaactaagttcttattctttttatcttcaattttgttaacttttatttttataaaaagattctctgcaatataatattcttatgggcttaagaaatactaaaagatgtaggggaactgccaaggcccaagggtaaccaaatttgattgaataagaatttcttttgaatttggctttcttcactattccgactctatattggtttgtaatctgtttccaacttcgatttgtaactttctctatatatgcctctcttatagttactcttttttttttgaaaaaatatattacagaagacaacctaagcctcgcagaagtcaacccaaga

SEQ ID NO: 106816 - DNA, 752 bp, Aquilegia coerulea
  Intron number 1 from transcript AcoGoldSmith_v1.004231m (l ocus AcoGoldSmith_v1.004231m.g) derived from phytozome v7. 0 (chr-ID scaffold_14; pos 3821957 to 3822708 reverse stra nd)
cttttggtgttgagcagcttgcattgcttactcaggtgatcaccttacccttataagttataaaccttggatactttctgctctctctctctctctctctctctcttgaacagtgtgtttataagtttatcattttgtgtttgatttgagacaaaagagctagaatttaaaaatagtgaacttttcttgtacatcttttgatgaaatggggatgttggaattttctctttcatttctgttctctttctaattttgttaattatacttgtatttttttttcttcaaatggggtttcctcaaataacctgatctacttcttgtttgaataaatttgtgaaacttcttctagaaattcagtttgtttctcatattgatttcatgtatatagtttgatttcatgcaacattttatgtttctttcaaattgggtatgttatctttttttgtagcttacaccatgactttctacatatagatcctgatccagtcttgtctttacacagtagtatatatatatatctatatctttctctcacattcaactttcctcatttgagtcatgggtttttaccacctatgcttcaattatttcaagttactattaagaaagagccagcttgcatgttaacatcacaacaaactcatcactattagaaaattttgatatctttgcttgaacttgaattcaattcatttagctagggggctcatttccatcaacttcttttgaatttgtagaagcaattagcaagt

SEQ ID NO: 106817 - DNA, 860 bp, Aquilegia coerulea
  Intron number 1 from transcript AcoGoldSmith_v1.021620m (l ocus AcoGoldSmith_v1.021620m.g) derived from phytozome v7. 0 (chr-ID scaffold_42; pos 1253130 to 1253989)
aacctggaatttcaacttctcctaagatccgaaaggtaatatcaatatctttagtctgattcgttattgtgtttgatttagagttttagtagtagttagtataaaccctaatttgtcttcttgattatacaatagattgtgttttccttaagttctgtttggatttcgaatttatgttgtgtggaaagaaattattctctaatttgcctaaaccctaattttcactccagaaagataattgctttttttttttattattattattattgatttttggaacaacatttgcatagaaaaaattaatttccagcaaacacaagcattcattccaccaatagtagactttaggatcaatagattaatttgctggggggtttgtccttcatgaaatatatagtgctgctggttataaataaatgatcatagtctaaaatgtagaaattgaacttaggaacatactatactgagagatgtacattgcgacagagtgtgtctgataatatttgtgtcagatagattaatgtgtctgataatatgatagttagctgttcaaaattgatttgtatgatgattatgccagagtgtactcaagataatgatcaaagacactggttgagattgtatgcaaatccaaagtcaaaactgtaaggtaacatttaggaaatgttggttgtcatctacttgatggctccactagagatactatacttgaagaacctaaggctgcacattattataagtagtaagacctttttgttaagtatatccgcatttctgtttttgtcgagacttccattttttaaatatgtttggccttttatgcagagtaaaggatcaaaaacatctgggctatcagcaca

SEQ ID NO: 106818 - DNA, 791 bp, Aquilegia coerulea
  Intron number 1 from transcript AcoGoldSmith_v1.000244m (l ocus AcoGoldSmith_v1.000244m.g) derived from phytozome v7. 0 (chr-ID scaffold_20; pos 3115134 to 3115924)
attccaggtactttttctcaccttttttttatcttctttgttttttctttttttattttattagctggaactagattggtttcttcttcttcgtcttcttcttcttcaactattcaatttttttatttcaatctgtttataactagtatgtaatgtactagtgagaaagaaagaaagaaagaaagagatagacttattggtttgaaagttttatttatatatttttttgaattttgatttagttttatgggttttgagttttttttaagagattagaagtgtgatttgatgattttaaggtttgggtttttggttttagttggaaatttgaatacccatttcattttgaattgtcagatctgaagatagactaccaagatgttgacttttttgattttagtgcttttagctaaaatttgaatttttaattatttctacttaatcttgattattttcttcataattcaagtactaattgattagtttaacattcgattcgtagacaattgcttatattgaagtggaatttggttttaaaattgtaaattaaacaacttgtcaacattgaatttgtcgaaaagactttaattgagtaatccttgagacttttgagagagactctgatggatgagaattagtcatgtttgtgtggaatcttaacattcaaatcattcttagctggtatgtgacaatgctacacacgacacaggttattgctcatgggaggaggaaatattagacacaattttttttggtttcttcagtgtttgatgcagttttcggtttttcag

SEQ ID NO: 106819 - DNA, 666 bp, Aquilegia coerulea
  Intron number 2 from transcript AcoGoldSmith_v1.003279m (l ocus AcoGoldSmith_v1.003279m.g) derived from phytozome v7. 0 (chr-ID scaffold_14; pos 1815362 to 1816027)
ttcagctggtgctagtcattctgttgctttactttgtaagtttcttcagacaatttgtttcttttcattcaattttaattagggtttttttctaaaaaaaattaaaagtttctgtgtcttgggtacttgatactgatgatcttatctgatttcccaaagtacccattgttattagtagtttcttgacaaatgtggtgtcaaaacattctaaaataaagtgatcgacatcgaacatttcgtagataaatgattaatgttgttcttacttcttagtgtaattaattgaaatgatgatgagaatcactaggcaaaattgaaccattgatatggaacaacaggacaatgatgttggattctaattttctttgatcaatgattgggagatatcccatttgattttgaaaattattacttcaatttgattgtcaaattatgagttttttttggcaatggaagttgagtaatttggatgcattaatttgttctcatctcggaagtctactcatttagtgggtttttttagttgtcatttggctgagagcctgggagtttctttttaatttgtagaaattaaatgttgagctaaaatttaacttatgtatcaattaagcgattattatgactaaaattttgggtattggttgtaatttttttgtgtagctggta

SEQ ID NO: 106820 - DNA, 904 bp, Aquilegia coerulea
  Intron number 3 from transcript AcoGoldSmith_v1.019038m (l ocus AcoGoldSmith_v1.019038m.g) derived from phytozome v7. 0 (chr-ID scaffold_14; pos 4474706 to 4475609)
accttgtaagcaacttttatttttgaattgttttgattttatctgtagttaatatgaatgtgattacagtgtgctctctaaaattttagaaacatgtttttgctgattgtagtttgtatctgctaattactcattctatttttacgggattctgggatttagtatgttatccaaggaatatcatggaggaagacagtatataattcaacttaattatgaattcacgtgtagcttcaagtaggaagaaaatatatgctatcaacggtgttttgggtcaaagttctctggtgtagttccaacgtactaaaagaattcttatgaagcagaagcccagggggtgtatctgtttagaaacatataagagtctactcttcctgggttgaggataatcgagagaattgtagactttcacagttaaatagaattacaacatatttcttaagtattcctgacaatcttaaacttttgcgcttatagtcatagactcataggggtagccattttcggttcgtgtgcacattatttttctttaacattttgtataaacgtaacctccacaaagtttatgtttttgttgtgatcatgttgaaaacatttgccaaattagaatgacacaaaaaaaaaaaaaaattctcatgctagcatatttcgaaacaaaaacttagatgaacaggtagagaatggtttcagtagtaatgctgtaacaccccgtggggtcgtgataaatgcagacagtgttgcacacctgaaactatccttaatatttaccttaccatgctgggatgatgcatcaagaaatctcggtgtttataggaacttaggaagagttattcagcctggattgaagccatttgtatatttgatctcatatttttttgcaatttttgtttgcagatagatagcc

SEQ ID NO: 106821 - DNA, 653 bp, Aquilegia coerulea
  Intron number 3 from transcript AcoGoldSmith_v1.013973m (l ocus AcoGoldSmith_v1.013973m.g) derived from phytozome v7. 0 (chr-ID scaffold_4; pos 2504804 to 2505456 reverse stran d)
cacttgggttgttagtggagctccacagacaaagagtattctttccaaactattttatttttctctgccaatgtgtatacaatattcaaaacacaaatttggcattcacatagtttcttgatggggccacagttgattttttattgaatagaggaatatatacaaagttacaaaccccattggttatttaccacacacacaatacaaaggatacagtcagctattgcaatttcttacatcacctagactatctccctagatcactgggtacaaggttttgagatacttttctttgacactgatgaaaattgacagcataagctctaatatttgaagaggtgacagtaatgactaaaacatcaagagattcgtaatctcctaacattctcaacattgtaatagcaagcctatccttatagaagctagcactctgaaatctccatcataaaattatggccacatcggcacttatctataaaagaccaaaactggtcgtttgactttttagtttttactatatctgaagacacccactaggaaacatcatatctggcactgaggcccttaaggtgtagtacactagtactggtattttgtagtatatgaagtgatgttgtataacatttgaattcattatctttcagaattgcagg

SEQ ID NO: 106822 - DNA, 860 bp, Aquilegia coerulea
  Intron number 2 from transcript AcoGoldSmith_v1.019456m (l ocus AcoGoldSmith_v1.019456m.g) derived from phytozome v7. 0 (chr-ID scaffold_33; pos 1337148 to 1338007 reverse stra nd)
tgaggctgaggtaggcaactgatgtttcttctatggttcaaatcttcaaatggtttcaaatcaactcgtagttcgtatgtttgagatatgtatttccttggattctggtttgtctagatatatccaggccattttgcggccagttatatgtacatctatagtctatacgtgctgttgctattgagatgaaactatcatatgttctcacccctctggcatgtgacctcttcgaagtattatgatattaattatataaaatatgtgtgcttacagattaggatgtattgagattttctgcgagtagggatagttgttacaatggcgtactataatggggaatagatgtaagtaggaatgaagggatgtagaaattatctttttaaatgggcttcttgttgatgcaaatgcaatgattgctgcacttttgtgaatgcctcttggttatataaaactataaaacagagaatttttcggtgctagaaatactttgaaatttatagttatgattcaatgattatatgctgttcattgttgtgctcgttgagctaacttcagttttagtaattggttataagttgaatttggtttagtttctagtagttgatgacaaattaccgcccaaatatgcatgtaccatattgttgatatgtttcactccccatggtccttcagtataacaatattttctcataggatgcttagttatatcagagtatatcaatatcctggatttaaaaataccaatctcataaatttcatcactatatttcattagtatgtgcgctcttggccagtcataattactcttgatactttattaataaagaattcaagcatcattttcttgaaaacttgcaggt

SEQ ID NO: 106823 - DNA, 771 bp, Aquilegia coerulea
  Intron number 1 from transcript AcoGoldSmith_v1.007925m (l ocus AcoGoldSmith_v1.007925m.g) derived from phytozome v7. 0 (chr-ID scaffold_33; pos 1977010 to 1977780)
gaattgctttgtaagttgttttgttagatcgaatcaaagtttgaccgtcatgaagctctgatttagtgatttgtattattattactgtattagttaattaattgctcataaaaatattcagaattagtaacagttaattaacacttgtggatttagttgttttaatctattttaaagaacaaccccatttattatttatattagattacaaatgtcgaggcagggttgatcttggttggtctgttgtctttctataaatactactgtaatactgtattacttaatgtttttgacatttatttggatgttgttcgcatacaatacataggtattgtatactgtataatacagatctgtccttaaaacccattttacgtgcaagataaaccgatttaagtgagggattatggttttaattggtccttagagtcaccgagaaggcttgtatatatgcacgatttttgtgtggaaaaacgtatatcagatttcgagttatgtactttgtgcaacaatagttgacatatgttggcgtatataatagtataaaaaaagtggacatactatgctcattgtattcatcagctttcaaaaggttgggaaagaggtagcctctgaaaaccataatagttttcttcttaaaagctaatcaaaaatggaatcatgtttgagaaaaatgcaagcatttgtattattcacaatttatatatagagaactgactttctttttgttggaagtttggttttaactattatttctttgattccacagcc

SEQ ID NO: 106824 - DNA, 609 bp, Aquilegia coerulea
  Intron number 1 from transcript AcoGoldSmith_v1.025313m (l ocus AcoGoldSmith_v1.025313m.g) derived from phytozome v7. 0 (chr-ID scaffold_65; pos 1002369 to 1002977)
cctgaatacatttcaaaagaagagacaagagccaagttttaacattcataaaaatctggacacacctcaaaattgctccaaatcagcatccccagaggagaggggggggggggggataccattggaacgaggaatctggatatgcaacctatgacacaagctcagaagtcctttcacatgttatttagtagcctcttaatggatcacagttgtcctgatccagatttacgttttggatggtcagaactgaccggcgcaagggtcatgtaaactaggtagactgataaagaaaatcataagacaaaaaagaacaaatgcagggtgtggacctgcagagagtatagagaataatattataaaaaggaaagctgaggcaggtgaaactgacacaaggaagatttgtctatgacacataagtcatattggtgtgtcaaaataaactatggaggagattcatcaagaagatttatctaagaacaaaattctcaaatagtaatttttgttttaaactaagctgtgtttataagtttagtggggttttttctttttaatttgattaatgcttttgttttcagagatacacctcaattagctgctgtattgaaagaa

SEQ ID NO: 106825 - DNA, 939 bp, Aquilegia coerulea
  Intron number 3 from transcript AcoGoldSmith_v1.010671m (l ocus AcoGoldSmith_v1.010671m.g) derived from phytozome v7. 0 (chr-ID scaffold_4; pos 1891510 to 1892448)
ctgttccttgtgaacaatttgatactgcttttgatgtaaatcttctatcctattcttcatttctgttaatatcattattacgctgcatttcttttggaaatctgaatttttactcaattttacaatgtaaatcaaatcatgttgttcatcatttgttttctaggtgtaatttcgagtgttgtaactttcagcttaaatcatatgatagttctcaaagtaatttgcttacttaaaacagaaatttaaagaaacaattggattgtttgaatttagtattccccctctctggctgcctttttttattgcttttccctcattttcaagaaccaagtcttatgcataggttctccgtagtttttttttcttttcgtaaatagactacctaaaacttctattcttttggttcattatccccatctttccttttagtcaaaacattaccatattttggaacatgtgtatcaaatcgctaattatagtgggggtgacttgtggcaacactggctagcagaccagtatatatcctagcatagatgcctctagtatgcccaattcgtgccttgcgacatgcatgatggttcgcatgcctagcgtctttgggtattttctctctcttgaaattgatgctcatgagtgttctcactggaaagatcttgacaagagcttttctttcaaaaaatgtctttcgatatcgagttttgaacaaaaatttataagtcttcttgtttctgtcaagtgttgcactcagttctcaccacactcgttattttgttgccctctatattcatatttgcagccttgtctagtcaccaacgaatctaaaccatgggggctatttgttattaattgatatttcaactaaaatgttgtggattataatcaatctgtatatctctaatgacaggctgttgaacggtggcttgttgatagagcggtttt

SEQ ID NO: 106826 - DNA, 423 bp, Aquilegia coerulea
  Intron number 1 from transcript AcoGoldSmith_v1.005210m (l ocus AcoGoldSmith_v1.005210m.g) derived from phytozome v7. 0 (chr-ID scaffold_45; pos 863258 to 863680)
actattaatccttcttcacaaaagccaggtacttctagtcttcttctactactacctgtctctgtctctaatcttttcaacttatcttgatttcaatgttttaaaatgatgttttggatcacaaatttgttttgcttgaatcgaaaatgagatttaaatgatttattttatgtttattgatgaatttgaagatatttttattaacaaatagacagacctgaaatttgtttttcaatttttattacagtgattaaacaactagagtctagaggaggtaagagttttcttgtctataataagattcattcaaaaacaatcttgatttcaattcaatgataagattgtgatttttagttgtaacacactctctttctctcgagaaacacaatacattttttttttttgaattatatgcagataata

SEQ ID NO: 106827 - DNA, 919 bp, Aquilegia coerulea
  Intron number 1 from transcript AcoGoldSmith_v1.016482m (l ocus AcoGoldSmith_v1.016482m.g) derived from phytozome v7. 0 (chr-ID scaffold_29; pos 1058072 to 1058990 reverse stra nd)
tcatcagtactacctggtaccccttcgtgttttccgtaagcaacatcaacaaaattttccattccaatccctccatcaaccatagtttcttcctgaatatttaccctttttactatatacggtttttcaccatgtaaaacccatactttatacgttgggtctataccgcttaaaatcaaatgtcttcttagatcttgaagggatacactctttatatttttgcacttcttacatgggcaagtacatgttgtggacccagaattatttaattccacaaatttcataaaatccctgaccccttccaaatacacatcactaaatctatttccttcactcatccactctttttgaattgggtgcgacattctgcaagactatataaagaaaagatttaggagctttcgaaatttataaaacaatcttgttttattctcgaatttgttatcctaacaatgcacttgatcagattacttgggctgcacaataaaactattcaataccatctaagctaagattgtagaactaaataaaaaacatgtgtttgcacctgacctggttaactttttcaggcttgggtaaaagggtttgaacatgaagaacaaagtcttattgcatttgagcagacattaatgcatttgtagaatgttttatcacacagttacttatatctctaagtaagaacaaggggtgggaaagataagtcaatgcaggaaattgaagaatatgagagaacaaagttaagaaaatcaattgaattttcattaaattggattaaaatatcaactcaagctctataagtacacaaagcaacatcatattccatatttaccagaaaaaaaaaaaatatattccatagttaagaatataatcaaatattccatatttgatgtgcatttattttatgtacaggaaactcaag

SEQ ID NO: 106828 - DNA, 517 bp, Aquilegia coerulea
  Intron number 3 from transcript AcoGoldSmith_v1.007444m (l ocus AcoGoldSmith_v1.007444m.g) derived from phytozome v7. 0 (chr-ID scaffold_20; pos 3805870 to 3806386 reverse stra nd)
ttgcccttttgttaattacaggtatataccggaacatgtctgttttattcatacgtgaaatcctgggtctgaacgagatcttcacaataattacttgctattccatttataacaatgtgtccgtctttataattatccccattgatatactttgatgtcaaaaattaattagtgaacctgtcaagactgaaatatatagcaaaatagtgaaatatagtaacacaggaaatcaaagatatagttgaatctcaagctgtgcgtgttttttcgttcttacattatattcttgtagcattgcttgcttctttatgtgatgggataattgttgcaataagataattgagctggaatcattttgctttttgttgtaacattttaagctttagcatgggaataactccactacttctttttccccacttgtaaacattgttagttctaggacttggaaaagttataattgtactttatcattgttctaggcattttccaacagtatcttgtttacgaagttcaa

SEQ ID NO: 106829 - DNA, 531 bp, Aquilegia coerulea
  Intron number 1 from transcript AcoGoldSmith_v1.007444m (l ocus AcoGoldSmith_v1.007444m.g) derived from phytozome v7. 0 (chr-ID scaffold_20; pos 3806604 to 3807134 reverse stra nd)
tcatctacctcactttctactcacgaagacaacctgtaagagatcttcttctcttcttttccacgtttttctattcatctctttcgatttgatttctttgaatttgatttttgtagtaatttgtgttaatgaattcgttctgaaacctgaactttcgatctcaattatcactaattccatttgcgaatttgcacatgtaaaaggaaaaccgcaatcactagctacatctgacgaatttcatttgaaatagttagaatattaattatgagattcagattcgtgtgtctttatgttcatgtttctatttgttgaaatctgaagaatcaaagctgttttacttgaaagttgaaatcaatgctcttgatctgaaaatatattgatgcttttggttatgaattatacttctgaagacaattattcgtactcatagtctatttctggatacaagaagattattggtactgtactactgattggttaaccaaatttcctaatataggtttgttgacattctgcacgaggctcctttat

SEQ ID NO: 106830 - DNA, 825 bp, Aquilegia coerulea
  Intron number 1 from transcript AcoGoldSmith_v1.003390m (l ocus AcoGoldSmith_v1.003390m.g) derived from phytozome v7. 0 (chr-ID scaffold_14; pos 1617727 to 1618551 reverse stra nd)
accaccacactagtacgggcagatttggtttagctgtaagtagttcttcattcttattcaaattagggtttttctttttaggggttttaaaagtacccgaagtgatttttatatcttattaatttagttgatttgaaaaacaagggtttgatcttattttcaacaacatcaaccttcttaatcaacaaaaggatgttagagaaaacttcaaatttttattattaataataattataatgtattaattgtacatccattttcaatgaatacatcatatccaattaatcaaatgtgttggttggattcgagattgcttaattgtttagtcctataaatttgttttatttataaatgaaggttcaagtatgttgcaaattcatataggaactggtataaaagacgtaccgaaacctgcaaactatgaataacaagaagtaatatacaccttggattgataggatttagattctcagttcaatatagtgttgtttacttgtttttccagttagaagttaaagttaacgatgaattcgagagtattatcaagaaataagatctattttttttgagaaagtttgcaacagcacctagagtagtctccaactatcaccaacttgaagtaggggtttttttgttttctatttcttagctctttgtttatttatttttgtgtcctgaattccttctgagtatgctgatcacatttgttttctatgtgtattatttgatttaagatgttgcttcaacttcctcaagttttctgtttctctttcttacagttttgcaagctatcatctctgctttattcttttagtttctctcaca

SEQ ID NO: 106831 - DNA, 486 bp, Aquilegia coerulea
  Intron number 1 from transcript AcoGoldSmith_v1.023647m (l ocus AcoGoldSmith_v1.023647m.g) derived from phytozome v7. 0 (chr-ID scaffold_29; pos 2040912 to 2041397 reverse stra nd)
aaatttcttcagctattgaaaaatttggtgagtaacgttcattttattctgctttaagaattgtaatcagctcaaagctaacaaaaggttgattgcatagtaaaaaagttatgtcagtgatctgtgaggattttccataataattcagttaaacttggtcagtagacttcaatatctatatatgatgcaattccccagaaaataagtttaaagttagcttgcatcctcattattttattagtgattatttatctttgaaaaagaaactaagctcttcacaaagaaaatgagggaacttttctccatgcaagctttgattttttttttcttttttagactaatgaagactttgaaattaagtgtaattccataagctacattcagggtagtaaaggtatcgattcttaccaacgggacctgtcattgcttgacttttcttttacaacatcaggtgcagaaattccaattgaggagcttgctgattca

SEQ ID NO: 106832 - DNA, 892 bp, Aquilegia coerulea
  Intron number 1 from transcript AcoGoldSmith_v1.010072m (l ocus AcoGoldSmith_v1.010072m.g) derived from phytozome v7. 0 (chr-ID scaffold_14; pos 5284206 to 5285097)
aattttcgatactatcgctaagcgttgttcgccaggtaatttctttacttagaaaacggatttcttataccaatgtagttgttaatgttgaactgtgcattttaactgaatattgatttcagatcaagtaagcaacgttgttgaaagttaatataactattgaatgactcaaacatttctgagtgacaagtgttcaataaactacataatttgttaagcaaatgggtctttttcgcttgtgctcagacatttatcttatgagtagattttactatcagtgattctaaaactggcatcttgtttatgtttaccttcggacaattgaatatgttagatagatgtcctccttccttaagtgtacctctgtcaatgcaattgcatactgtagttttcttatttatgggctgtatcaagttgtaatgagttcaatgagcaatagaacctatgtatctatatgttcatatgtttcatgatgggtggatcttctagtgaaagtctctctttatggtctggttacttttggagatatacgtaagcatttgttagagtatataggcctccttccatctgtgtacttctcactggaattgcgaagttttcatttctatgtgctgtatcaagtatgcattatgaattttgtgagcaatagaacctatgtatatgttcatgtgtttcgtgattgctggatcttctgcatgtggtctagtgaaagtctgtctccttggtttgattattttgaagttgtacaggagcatttgtgaagaattgggatctcatttccctcacaacattttacttttacgttagtcattttcccttcttacatggccttaatattcgacttaaaatgtgtgtaggtgcaagactagttatcagcttttcacaaggaagg

SEQ ID NO: 106833 - DNA, 1002 bp, Aquilegia coerulea
  Intron number 2 from transcript AcoGoldSmith_v1.011058m (l ocus AcoGoldSmith_v1.011058m.g) derived from phytozome v7. 0 (chr-ID scaffold_17; pos 1343929 to 1344930 reverse stra nd)
atctcactctttttggtaagttcgattcctatatattaatgaaataacattttatgttttagatctttgcaaattgtgtatgtttcaaggcttgatcacttgatggcaatgaccaattgactatgatacatgtttcaagtcttgatcaccgagtgcgaatttgttttgtataaaaataaaaaaaaaattgatttttcttttttaataataagtgagattaattagaaaactaaaacacctgggtgttgttaactctagtggaaccagttaaatttaaaaaaaaaattaatactatgtggacaaatctggtggagagtgttgttccatacttttaagagtgtgaaacaaattcaaattccttaattatcatgaagagcatgatgttgctagtggtgatcaagaatttgaatttgttccaaagagtgtggaacaacacttttcaccagatttgcctaccgtagcattagattttttaaaaaaaaaattaactggtcgtcccactagggttaacaacacccatcttaggtgttttagttttttaattaatcttacttattattataaaaaaatcaatttttttttttgatacaaccacgtggactgatttggtggagagtattgttccgcactctttgaagagtagagtgtggaacaaattcgcactcataattaaggaggcatgtgatgtcatgaatacgcatgtcatatgataaattgttttcatatttaatattcataaatgatgctaccaaactaataatgcaaaggatatgaatggaatcgttttcataaagtcaaaacgataagtccaccttttcaaatgattcgcacagctgtgatataaatttcaatttcatattagtattgaattttcagattaatgattaaaaagttaggtagtaaaaatagtgtaatttccatcatattttagttctaattaaattctaaaacaatgtgatatgatcataatcatatggtcagaatctcgcgcaattgctgcat

SEQ ID NO: 106834 - DNA, 561 bp, Aquilegia coerulea
  Intron number 1 from transcript AcoGoldSmith_v1.001497m (l ocus AcoGoldSmith_v1.001497m.g) derived from phytozome v7. 0 (chr-ID scaffold_14; pos 1124093 to 1124653 reverse stra nd)
tctctcattaatttatccaggtttaattttttcttcaatcttcatgatctagtttcgtttgatttgaacaaatttatcttttagcttaattcttgaacgaattacgattttattgtttatatcgttgaacatttcggatagatgtggattgtaagaagtttgatttgaaaagtttttgttgaaaccagttctattgatcttgattataaatgcagttttttgttttttttgttgttgaattcataacttgtatgaaagttttggttaaaaggaaatcttttgttagtgatgattgcttgtgataaaagcaagcaacagaatattgcatttagatcttcaatgttatttttttttttttttataaattgcggaaagattagttacaggaggaaatggtttaatcatgagcaacttcacttattgcattatcatgtcatgtggtctatgttgtatctgatcattttaatgattttttattgcatcaaagtttagttcaactcattgaatttgaaaattttatattcagatcttgtttgggagcaaaggtttcaattgttttgc

SEQ ID NO: 106835 - DNA, 871 bp, Aquilegia coerulea
  Intron number 2 from transcript AcoGoldSmith_v1.011773m (l ocus AcoGoldSmith_v1.011773m.g) derived from phytozome v7. 0 (chr-ID scaffold_4; pos 9151166 to 9152036 reverse stran d)
cttacttgcaggcagttttgtactggtgaatacaggtgttgtgtagaaccctaatatactactatctttgctttacattatgagttgaatcgaggagttttacattatcattgtgcaatgaaaactgctagtaattaaaaaagaagaaatgaaaaagaatgcaattcattgataatccatacttgagcagtaacaagatgtacatgccacacatttttcttttattgaatagaataataaatgaactactggacaagattttaagcttcatttggttagttggtttttgttaatagcggagcttgattgaggttgaaaattttgctgaatgtattatgtttaatgaatgccaaatgtgatattgctctagtctatctagtaatgttttctattattaaattataaaagaaaagtgaataattaaaactagaattgagcattttccctgctgatgtgtcttagtattgtcgctatcctaccagtgagtatcacgttttagtttatacaatatagttttgtatgaaatgatttcttaaagtacttcatcaatatgatgaacaaaactataaacacttttctttttatagcctgcttattttagtcaaaatgtcaaattagtcatagtggttatggaaatacttatttacttctaagttccaaatagtattttcctttttactgatttataagtaccttatttcaatattaagaaaaccaaatccatgtttttgcttgtgatcttcaaggtgctatttcaggctcctcatcagatgttttaggcagttcgtatttgatgttagttgatctattcttcatttatttgaatacatttgcagaaaatcaggagtaccaattggatacaaaaattgtc

SEQ ID NO: 106836 - DNA, 298 bp, Aquilegia coerulea
  Intron number 1 from transcript AcoGoldSmith_v1.011773m (l ocus AcoGoldSmith_v1.011773m.g) derived from phytozome v7. 0 (chr-ID scaffold_4; pos 9151991 to 9152288 reverse stran d)
gctgacattactcctaaaaccgctgagaatttcaggtttctttctctattcactaaaaccttacactactgttcttttcttattactttataataattattttgttgttaagttgaatttgtagttgaatttgatttttcaatagaatcagtaaattatgctattgtaggttatttcttttcaatttatagaactttctagttgttagttctttgctttagagttctgaagactgacacactttctgtttgtcttacttgcaggcagttttgtactggtgaatacaggtgttgtgtag

SEQ ID NO: 106837 - DNA, 726 bp, Aquilegia coerulea
  Intron number 1 from transcript AcoGoldSmith_v1.000942m (l ocus AcoGoldSmith_v1.000942m.g) derived from phytozome v7. 0 (chr-ID scaffold_17; pos 1130204 to 1130929)
ctctctatctatctgtgactcttgtctgcaaattggtaaatattgttttttaacgttactaatccctccctcccgcatcccgcatgcattgcaggccttttcttttcttttcttttcttttcttttcttttcttttctttctttgccatcattctaaacaatttcgcacacaagtaaccgtgaaactgtgaaagaaaaggagagagagagaaagagaagaagaataaacccgatagaaataaacgagaaaagcttttgaagcaaaattagggtttcccttcttcaatctaaaataatcttctttatttcacttattagatcttgatttacaatctcaatctttccaagaacagatctttactttatctgatttctctctatatatatctttaaacatttcgtttccgatcgaatctggtaagaatttaatgagatgtaattactactttcgatatcttcttcttatatatatatatatatagagagagagagagagagagagagagagagagagagagagagagagagagagagagagagagagagagagagagagagagagagagattgagattgttttatggttaggtttgaatttgaattgaatctttctttagaaactttggattacagattcattttgatttttttttttttttttttttttttgaaattttgtcggttttggattgaatctcagatttaacgagggacagaagaaggcgg

SEQ ID NO: 106838 - DNA, 664 bp, Aquilegia coerulea
  Intron number 1 from transcript AcoGoldSmith_v1.026934m (l ocus AcoGoldSmith_v1.026934m.g) derived from phytozome v7. 0 (chr-ID scaffold_14; pos 2541360 to 2542023)
taaaaagacggcaaaaacgattcatatcgtggaaggtaactcaaactttcttatcatttgtgataattcgcttagaattctaaatacccatttccttataattgattttttgtgattgaaaaccagtaatttgaaagctatcatgttatttcattaaaattttgttaaattatacagtaatttatgtttacagaaagaaaaacgaaattgagataaaattagttttttatcttaaaagtagttgagctttaattagagagaactgtttttccccaatgtgggagttttttttttataagtgcaactttgtgtttagttgtttctttgatttttagccatacatatagtggctgcttttgtaataagggtctgatagattaatatattgggttttgagttagctaagtcgatatctggaagtttccattggtgtaagtacagcttagttgtctagagggattggtagtttttatgtttactgtaatgggatctgtttcatgatagtctttcatgtacaacttaaaccatataataataaataaagctaccagagttcttaaggaatgttttagaactggtggtttacaatacatggcatatgcataatgccataatgcattattcctcatctcatgtattgtgttgcattttccacgttaggtac

SEQ ID NO: 106839 - DNA, 493 bp, Aquilegia coerulea
  Intron number 2 from transcript AcoGoldSmith_v1.006133m (l ocus AcoGoldSmith_v1.006133m.g) derived from phytozome v7. 0 (chr-ID scaffold_42; pos 1044508 to 1045000 reverse stra nd)
ctattcttcttggagcgattggagggtaataataacttaataagaaatttcaatttatgttcaatttgtttagtatctattaaagatgcatccagaccactccatttataaggacacagtttttggtcttgtgaatctaatgtattgaactctaacacccacttaagacatacatttgagtctttttattctgtgacattctatggacgcaactctctaaataaagcaattatcttcttcagaaaatttctaagcaccaactcttacaagagttatgtcctcaccaccagaatgccttttttttttttttttttggcatgaaaaaactttacttgaaaacaactccaagaaaagaagtgtttctgttataaattggtgctgatgcaactttcttaagagttaagtcttggcattcctctatatgatctttggtttagtttgatctttatacatttgtagcattcacttgtgtttgaataatgtgtaggtataa

SEQ ID NO: 106840 - DNA, 413 bp, Aquilegia coerulea; identical to SEQ ID NO: 106345
  Intron number 1 from transcript AcoGoldSmith_v1.008148m (l ocus AcoGoldSmith_v1.008135m.g) derived from phytozome v7. 0 (chr-ID scaffold_89; pos 495579 to 495991)

SEQ ID NO: 106841 - DNA, 440 bp, Aquilegia coerulea
  Intron number 1 from transcript AcoGoldSmith_v1.001329m (l ocus AcoGoldSmith_v1.001329m.g) derived from phytozome v7. 0 (chr-ID scaffold_14; pos 1109300 to 1109739 reverse stra nd)
tgagtgatttcgaaactttggaggatcgattgaaggttcgtatttgtataagttcattggtttgatctttatgagtgagaattaagaattttaatcaaacagttcgaattttctttcattttaaacaaacaattaacttcttttattgatttttgtgtattcaaagaattgttgttgttgttgttgttgaaattgaacttgtgtaagatttaaatagaagacatttagtacttcatgcttattgaaatcgaacttgtataagcatgaactctgatctgaatgttgatttatatgaaaactaggattctgaaacaatggatgagtatttgtttctttttaagaaatgtgaaaatttgacgatttatgtctggttcacatctaattattgaggttatgtattttcaggagtacagatttgaaggcagggtgattctatatag

SEQ ID NO: 106842 - DNA, 679 bp, Aquilegia coerulea
  Intron number 1 from transcript AcoGoldSmith_v1.020969m (l ocus AcoGoldSmith_v1.020969m.g) derived from phytozome v7. 0 (chr-ID scaffold_94; pos 487204 to 487882)
tgccttcgacgattaatactgagatagtgatcaaggtaagattttgatctgatcttcttcaattttatatattcttctgctttggatcattagtttgttgttttcattctttaatttgaatttttgttaattatttttttcttttatagattaataaaaactgtttgttcttagttatgtagaaaagtagttttttttttttttttttttgtgatttaagtttgaagaaagaacttataaagtttgtacttttctttattgcatattttttgtgtgatttattaatggtgttggactggtgttatactagtaagtcataacgtaccacctgcctaattttctccatcatcgatttggatagagtattgtatatttccatgttacatatcttataggatgtaattacaaaacagttagtatcatgcaacagagtaaatcattgatgaggtctaaactcttggctttgtttttgtttgtctttttgcattttgtgttgatatgattttcttactactcttactgtctttggcactgagccatagtttgagacattgttatttaatatttactgttcttgatatgtttatagccattttatttagaaaatttatctccatgtctgcctttctttctgctaaccttatgttaacatttgtcatggtcatttttcaggtaaatt

SEQ ID NO: 106843 - DNA, 498 bp, Aquilegia coerulea
  Intron number 1 from transcript AcoGoldSmith_v1.011442m (l ocus AcoGoldSmith_v1.011442m.g) derived from phytozome v7. 0 (chr-ID scaffold_113; pos 165234 to 165731)
ttgttcttctcaaccccttctttccattccactaggtatatcagatttttttttacttatttaagatctatgtataacttttttttttttttttaattagatcttgccaaaatgttggatttaatatagatctattatgatttaaacccattttggatcttgggttttgttgggttttatatgatttttgggaattttatgtgaattgggtttaatcaagattgatgatgggggttcttgaatatgataattgaatctagattggggattgttgaattatgttataagttgttatttgagtaatgttacagtatttttgtcgatttctatacaattaaagatatcatatattattttttaagttgagttgagttgatttgattagatttattcttttccctacccactttctcaacatattaatattgttcttactcttgttttttgatctattctgttgcagaactgagcaacacgtcattcgcaggttagtttttt

SEQ ID NO: 106844 - DNA, 458 bp, Aquilegia coerulea
  Intron number 2 from transcript AcoGoldSmith_v1.014407m (l ocus AcoGoldSmith_v1.014407m.g) derived from phytozome v7. 0 (chr-ID scaffold_17; pos 1818730 to 1819187 reverse stra nd)
aactcggagctgattacattgagatcgagctcaaggtttctttctatctaattgtccttcaaaatgttctgccttttgactttcgagagaggtgtcgttcattttggtgttgtttcttcttaaagtctcatagcttatctaggctggggataagcccgaagtaaaagatcgttttatgtgcattaaatcatctaatcgatcagcttacatgtctgtttctacttttgctagatggctaattattgagacaccttaagggagtttagtattttggttaatgagagggtttttactttttatacttctagatgctgtatgttgagttcagacaacagagcactctaaaagctaggaagatgagaaaattttaagaaatagcaaataaaagttgcagattgataaaattctgatccacattttacattgttacattcaggcagcttctggtttcttgaggg

SEQ ID NO: 106845 - DNA, 343 bp, Aquilegia coerulea
  Intron number 1 from transcript AcoGoldSmith_v1.014407m (l ocus AcoGoldSmith_v1.014407m.g) derived from phytozome v7. 0 (chr-ID scaffold_17; pos 1819253 to 1819595 reverse stra nd)
aaagataaaccattaccagttgttgttgtctacaggtataaatctatttcatttttcaataattttgttcagtttattcgcctttccatgatttttgattcacgataataatttctatattctatattttgtggaatgcttatgatgcctttattcgagtttcgaagcaatttattccaacttgtaatatatataaagttcattatgattgcctgaaggcctacagtgtttttttgtaaaaataagggtctaaatctagttattcttcgaaatgttttgaccccatataaaaacttcattctactataacgagcttaaatattatgttttgttccaggccaaa

SEQ ID NO: 106846 - DNA, 880 bp, Aquilegia coerulea
  Intron number 1 from transcript AcoGoldSmith_v1.003335m (l ocus AcoGoldSmith_v1.003335m.g) derived from phytozome v7. 0 (chr-ID scaffold_20; pos 3123882 to 3124761)
aactcaaggtaatacaatctaacttaatgcttgattcatatatattttatgtgcaactacttttcattatgatttgtgttttagtatgaaatgttattatcaaatcatgaaatgtagtcacaattaatacaatttactaatttgcgtaatgccccccataccgctttgtgtctataacatcacaagtagatatctaagtattgatttcaattaattataagccattatcctgcaaattgcagtcaatatagattcacatctgatagaattcagaaaccctacatcagagaggaaggtgggagtgatctgttatattccaattaagaccagatcatctgcaagatgacttacatatttctggagcatatataagatccagttaactaggcttcttccccatatatggcctggtgaccatgctagttacaaactgctcttacttacatttaacccgtgaaatttccggttttgggaccatagccaagtataggttatgtagaatcatggttgcgtagttggtttgattacagggccaaaactaatcagagtattaactatgtataaaccataattgctggcatcggacaggcttatttgcgatgctcaatagatccataactaatcaacatctacggccatgtgtaagttatgggactcagggaaatgagagaactgtagaagtatgaaacttattgaagatattttagtgctaacataggacaatgtcactttatgatatctctgagtcaaaagaaaacttttatgtgagaataggcacttcattgcacgcaatctatacaggtatttgctgaacgtaactaacatttggaaacgatcttccacaggtatccaaggaagattatattgagttagctcgaaa

SEQ ID NO: 106847 - DNA, 710 bp, Aquilegia coerulea
  Intron number 1 from transcript AcoGoldSmith_v1.006545m (l ocus AcoGoldSmith_v1.006545m.g) derived from phytozome v7. 0 (chr-ID scaffold_20; pos 3977513 to 3978222 reverse stra nd)
cttttcctttgcacccaaatctgctttacctcgaggtattaattataaataaattccattgatttcttctcctattttattcgtgtagaacttttttttttttttttttaagatgattattctgttctgagaattttgtttggtcatgttgttgtccatcttatgttgaattttagtttttaagattgaattttccttaaattgggattagaatttgataggattgtagttatttaggttacatttattttgtttatcagatttttttttttttttttattgagatgtcttttgaaacatgccttgattatgatctgatctatccctattccataatccctagagtaaaattttgcgaattgacttcatttcagaacctaaaatttccctataactgcaataaacttcgcatcaaaacaacaacaaaagattttccaccaattcgaagattttcctttagttgatattctaataaatgatgaaagtgaagtctttttgttcgttgacatagccccatgaatttaaggctaagatttgaggaatgttgtgctaggtttgttgtcaaggctgctactaatagtttgttttcttatgaaattgatatcaaacacttgatttttgtacatagactaacaattgttattttaaatttgtgttttttgtatcaaatattagagaaaactactgctgtgaaatctgtggagtacaat

SEQ ID NO: 106848 - DNA, 606 bp, Aquilegia coerulea
  Intron number 1 from transcript AcoGoldSmith_v1.008742m (l ocus AcoGoldSmith_v1.008742m.g) derived from phytozome v7. 0 (chr-ID scaffold_5; pos 294241 to 294846 reverse strand)
ctaaagctggaatttctcctctccttctcaccagagtaagatttctctcatttcaactaatggggttattgcatatcctcttgattatattcttatttgaactatgttatacgtaagtagaatgaactattttttgttttgatgtaatgggtaagttgttgctatctttaaattaggcagactacattgattttaaagtttaaacatgtattctacttattttccaatgttggcattaattcggtttagttattttaatggatttttgcgcatatgaaattgaataggagggtttgagccgactttagtgatttagttctttgagcattgattgagtgatcatctggccaagataatgttgttcggaatcgaacaacttaggtttgtttgagagaagatagaaatgcaattaatcttgccattcgaagtacgtataggctaacccctcaactagaaactttgaaaatgtcctctactcccacccggccattttttgttgatttaggtgagttaaatatacaaaacctatacttgattttttgtcggttctagccaggaattaagcagatttggttataattgagattgtgtttctcttgcagggtt

SEQ ID NO: 106849 - DNA, 787 bp, Aquilegia coerulea
  Intron number 1 from transcript AcoGoldSmith_v1.004815m (l ocus AcoGoldSmith_v1.004815m.g) derived from phytozome v7. 0 (chr-ID scaffold_4; pos 2993137 to 2993923)
cgtttgcctgagatttattaaagcaaagcaaggtatgtaaattttaatttagttcttgatatctcaataactatttgtaatttgttgttgttattgttaaatccatcaaatttattttaattagggccttttgtagtagataactgggtaacgaagcttattagtagttttttttttttttttttttatgaaattaagtaattaactttaaaaactgatactatctatgtatgtataaactcaaaatcgaatgatgaactcttctaccactaaaactctttttaattttagattatgcaaacttggtcattttcagttttatggaattgtggattcatgggttttgagttatttagaatgaaaacagcttaattttagtttgctaagattaaattataactattctgttttcagcccaactttttaatattcactcagtgatggggaaatcttttaaaggttttattaatttataaacatcttgattgaataagtaatatgtattggcattttcaattagagaaattttaaaaggaaaaaaagaaaagaaaaagaagaagagtctgtcatgcttcgtacgttggtgcatattttccttgctaatacaatgaaattcttccttttcaaggtttcatttatttaattattcttttcttgtattatgatatcaatcaagccaaaatactcgcattgttttttatttttatttttttattattatatatatgcaccataagttcttcttcgctttgatattgcagtatagcttttgggtggatcctttgtc

SEQ ID NO: 106850 - DNA, 883 bp, Aquilegia coerulea
  Intron number 1 from transcript AcoGoldSmith_v1.001796m (l ocus AcoGoldSmith_v1.001796m.g) derived from phytozome v7. 0 (chr-ID scaffold_5; pos 2892480 to 2893362 reverse stran d)
tcagatctcgtcgccatctatcttctctctacagtgtaaatattctccacaacaatttgtcttttttattctaaaattcccttcaaaatgttatgaattatactgttaaattctactatatattgattattcagaatttaatgtgttttttaagttatttgtatctgcaatttacactactactatgaatctatgatcaaataactacgtataaatagctgcttaaaatgaccaaaatgccgcgagcttataacttcaaatagctaccaaaactttcttcaaccccaagcttctttcaactaccttctttcaaccccaagcacatttccgccgcatgattcagttaattacctactcgaatctcgtgttgaaacttcaaatttttgttttggatttgtggcgtataaggattgttgttcatgtgatgtaataatatatattaatacctcttacctttttgtgtatttatttgtacaatgaataggtataattgattctcagatgatgatctagatttccttcttgttttcaatacaccttgttagaattgtatgaaacggcaatgccacctttttcggaatttttcagtttgggtttaaacttaaatacatttctaccatttatgccaaacgaataaaaacgtgaaagattttttattccttacaaacgttgtttagatgcagctaattgtacgaatcaatgagatcctctgctcttagacatagttttaattttatgttgggaatctgtcaggctctatgtttgttatgaataatgatttattgttacttcaaataaagggttctcactctgactcctgtatgttgtactaaatgtgtatattatttgattactatctttgcgtgcatacagttgggtagca

SEQ ID NO: 106851 - DNA, 983 bp, Aquilegia coerulea
  Intron number 1 from transcript AcoGoldSmith_v1.004785m (l ocus AcoGoldSmith_v1.004785m.g) derived from phytozome v7. 0 (chr-ID scaffold_17; pos 2899261 to 2900243 reverse stra nd)
cacttgctggggaacacattgttaaggtcaatttcttgtctttcttcaccttttctctaaattattttttgagatacagtgtagctcctcagcatgtccaataagtaataaccatggatgggattattctgaggatttgattgttcaatagtttttcatgagttggggatttgatcgatcaatagtttaatcaaatatatgaccaaaggattagctctgagtcatagatgtgtcagtcaactgatagcataacggaaattatttgtgataatgttaaccaagcttatgatttttcgatttatttatgaaacggggtagaggtcccccataacaattccgcttgcataccccaaaagaattagggtgggggggggggggggtgggaatagactttaatgaggcaatcgaaaagttgatgataactttcaagctatcatgatttttagacaattgaccatggatttgattagtgttaatgacgtggcatatgtggacgataggtagaatgaattccaatactcatgtaaatgtttattttggtgattatcaagtggatgagttattggggtgttatataacgtgctgatagagatagtgaactaagtttttcttgtgtaaacaataacaatttttagccaagctgaccaatagtaaacaatgaattaaggttgagctattataactgttttgaaattgtttgcacaatagataaaaccctccattacgttactgtgttttgtgggaaaaaaatatgttgaagacatgtcagcaatgaagccataccgtaccaatgtgtatgtgctacgtttagcagagtatagctaatatacttaatatttttacttacttttaatggtattctggtttttatcgttgctatttctaaatgcatgatgtcattagttttcttatgaatgttatagcctttctcatccaattcccaaacaggtatcactcgggtgggggcacgctttggcatacac

SEQ ID NO: 106852 - DNA, 456 bp, Aquilegia coerulea
  Intron number 2 from transcript AcoGoldSmith_v1.001059m (l ocus AcoGoldSmith_v1.001059m.g) derived from phytozome v7. 0 (chr-ID scaffold_14; pos 5230785 to 5231240 reverse stra nd)
tggaggtaagtaatggtattgttctatgttttaggatttttgtcaaaaagaatgttctcaggcatgatggtgtaggactaaaagataaattgaatgttaaaaggttcattgcagtatttagttccattttggcaacagatggtttagatacatttcttccaaggttcaatccaacagtacgggtaaatgtcagtctatcataattcataaccagtccttattgacgtaaaatgattgatttaagatgacaagattgctatacatctgtattattgatgaatgtttataaatttgtcatgatatatttgatttttgaaccatgcattacatcattaacactttttagcgaccaaactaccttttctgtggttcttattgtttgttatcctatttcagtacagaattccaaacttgcaaattctgtctttactcactccttgtatgctctaattgcag

SEQ ID NO: 106853 - DNA, 918 bp, Aquilegia coerulea
  Intron number 2 from transcript AcoGoldSmith_v1.006334m (l ocus AcoGoldSmith_v1.006334m.g) derived from phytozome v7. 0 (chr-ID scaffold_14; pos 449608 to 450525 reverse strand )
attgaaatctgtgaactagtttcacaagatccagggtatgttttaatcacttaaatttctcgtgtttaaaaatcatattaatggttgattcttgcgttgatttatgctatctggggaattacttttctgttcatcagtaagctctacttattgcaccgcaattaatgctacacttagcctcaagcttgtagaaatggtgttttccttttcttgtatgtttttattagatagaaacttggtagttttagtctataactctataaatttattttcctttatagttttgattagttgtgtgaggaatgataaggcttttagcctaggtttgtggtaacatctcccatatatttcaccatctaagctagttgcacctgcctttattgtggttacaattctatgcaaaatactaaatcatgcatttgataatttaaatagcaaaataaatagctcttcacctcttattaccacaagttgttctaatttaaagttctttgttatacaatgcaaataattttgaacatcagcttttccattctgcgttgtcatttctctgcattgtgtttcatacaaatcaaaggatgtccttactccttagagatgggcctcggcatgaacacagaaatttatatacatatgaggacacgctaagcactatattagattgttaaagtttgtgctttttcgcaattaagttaaaattgtcgtgaagcatacctagtcattgaatatatacttgtgtctaggcaagtaggcaggcatggacaaaatgtgttcatgcatgtgcaaatatgctagttggtatcttgaattagtaagttttgtttctttcgtaattatgagataattggttttacatgatagcttcgtcaattgacagttgaccatgatgtttgctttggttgagcaggcaagctaaag

SEQ ID NO: 106854 - DNA, 492 bp, Aquilegia coerulea
  Intron number 2 from transcript AcoGoldSmith_v1.001686m (l ocus AcoGoldSmith_v1.001686m.g) derived from phytozome v7. 0 (chr-ID scaffold_41; pos 1268166 to 1268657)
tgtgtgttagtggtaaggtaggtcttttgtttgtctgataacttcttctgccgctcatcaaattggtttaagagttaggtcgactctattttcatgttttttttcttctgcgtatcttacagttcaatgaggaagacctggagatgagttaagaaccaattcttgttaatgattatatattgtccttacaaaataagctcttcagtcgtatccatgtggcccctcaattaactgattgatacacagatattattcatagcaacttttattgcatgattacatggatgactcgaaataaacacaattgtcaaatttgtaatccttttgattaggttcactagaaaactttgaaacttttttttttggtgacaatgatatttatagaggtggttgctgacactaataaattaaagttcaactaatacagcctcataacagatgctcccattttaacatctcttaactttattgttttgcttataggtgaaggca

SEQ ID NO: 106855 - DNA, 485 bp, Aquilegia coerulea
  Intron number 3 from transcript AcoGoldSmith_v1.010502m (l ocus AcoGoldSmith_v1.010502m.g) derived from phytozome v7. 0 (chr-ID scaffold_20; pos 3556992 to 3557476)
acaggtttgtttttttctttatgttatttttatcattgtgtagtgatttgaatgatgagaatgaagtgatgcaatgcaatgcaagtatactaatatcataatgttttatatgttttaagttttatcaatacactcgaaaagttttaaaagaagaaatcaattggttgagttgaatgtcagaccaatttgtagacaacatgggcctaggttttgtttggaaactgatctttggtttatctctatttgtgattcacggatctgtagattgtttgcaaaccaaagatttgaagttatgatagaaaaaaaaaattatagcataaatgattagcaggttacttaagtggggatcttttattcggctttagtttttgatggttcagtttcatcgttgtgccattgattgataggttgtatgtaaagttttgttttgttacacaaagtgaaatcttgatgataattttatatcttttcacatgtactagctg

SEQ ID NO: 106856 - DNA, 624 bp, Aquilegia coerulea
  Intron number 1 from transcript AcoGoldSmith_v1.016980m (l ocus AcoGoldSmith_v1.016980m.g) derived from phytozome v7. 0 (chr-ID scaffold_14; pos 5641950 to 5642573 reverse stra nd)
cgtcggactcgtctagttctcaaggaaattgtctgtaagcttctctttgctgctttgcaatctttattggaacaaaaaacatggactatcgttctgcattaaagtaataggatgatgaattataagaagaaatgcattgtaatattttgttttggttggttcaatacttcaatgaaaccattttaactttttatgagagcatatatctgtatattaattataaaactctccaaatatctaatcttctgcggcggctcgaaactattaaccacaataattatcctgcttcttggcacaaaggtttgcagcataaaattttgtttagggaaaatcttttgagggctttgatcgtgtcttgttagaagacgccaccatctacttactacaatttcacattaaagaggttgcgcaattccttgtccacactccctcatcaaaagagaaacttatctgcattctcttgctttatcgtgaatactagtcttaatatctattctattaagtcacaatataagcaatggggtgtgtgcacttttactgcattatatctacaagttgagtttgatagtgcaatacgtttggtttctaatgtcttaatggttcatttatttatttgaaaggagc

SEQ ID NO: 106857 - DNA, 696 bp, Aquilegia coerulea
  Intron number 1 from transcript AcoGoldSmith_v1.006360m (l ocus AcoGoldSmith_v1.006360m.g) derived from phytozome v7. 0 (chr-ID scaffold_29; pos 1153237 to 1153932 reverse stra nd)
ggggtagttctctctttgaagtttcaatcaacaaggtatagttactttatttcctttcttgtttctcttgaatgtttttcttctataaattggagaatttttgtagtgaaactgatttgtgttttttttttttttcccgcttccttcaagttatcaagtaatcaagaaatgttaaataacctttttcaaatgtgatgatttcttttggaaacaaaaaatgctttgagtttgcagatctgaaattttagtttcattttaatttctatatgtttgatttagagttaataatagtgattattaggagtattacttactttgattgagaagcataaagtaaaagttagtttcatttgtatcttatcatttcaaactgataaaacagggtttcaacatctgtgaaattttagatatatattgtacagtaagtttcaaagataagccgacaacaaatatatgttcatattaaatgaaatgttttaaatttatgtcatgctacaaatatattgagatcagatcagatctgttgtgtttcctacatcagcatttctgagctatgttagagtacaatttttttgattcttatgtagtagtattgcttatattttaagtgcatctgtaaatatttctttacattttcagaacgaaaaagaattagatccttgtgtgaccgacctattttatatgtttttatagatt

SEQ ID NO: 106858 - DNA, 870 bp, Aquilegia coerulea
  Intron number 1 from transcript AcoGoldSmith_v1.001759m (l ocus AcoGoldSmith_v1.001759m.g) derived from phytozome v7. 0 (chr-ID scaffold_38; pos 1894472 to 1895341)
tctttgttatccttccagttccacaggtactgtcactatatacttttaactccttgttttaaccatatgttccatggaatgcagattttactgtaagaaaactgtatattgctcatttgccctggacactagtgttagtgtagcaacaaataaattgcatcagttctgttctaatgcatgtgtcaactgaggaggaggttgtacctaaattccatagaacatgatgtgtactcttttgtatccatgcacattcatcaagagatgcttgtccttggcttctttgccattttcatctcttttgggtgttagtgtgtgaaatttgatctattgagaaatcatcctgctgaaaaattactaagaattcaaatctcctagctagatcattatcattcaagttcgaaaagtcacgaaattttgagaaaacccgatatatcatctattgaaatattgtgtttgataattagtcagaaagatgattatattgtttgtaagtgatatttcaatattctctaagttgaaattcatctctatttttttcaatcactatgtgaagagatcttggcatatgtacagttactatgcggaaagatctaatttattttcatgttatttataattggcaagccttagaacatctcagagattgaagttgatcttcacataatgtttcgaaattaagcatccacagtgaaccagcgatgcataaggcgagtcagtgtaatatttcgagagtagtttgttctttctttgagagaacatatgaagcagtatgtcagaaaacatctagagcttactcaccttttcaggactaccctcgccattttaatttcgcatttgccctgataaaagttatcacttgcaggttgtact

SEQ ID NO: 106859 - DNA, 892 bp, Aquilegia coerulea
  Intron number 2 from transcript AcoGoldSmith_v1.009655m (l ocus AcoGoldSmith_v1.009655m.g) derived from phytozome v7. 0 (chr-ID scaffold_42; pos 1177883 to 1178774 reverse stra nd)
tcatgtaagtgtatttttcgtcttctctctctctgagttatatacttgaattagtaatttgatgtaaacttgttattcataaataaaagtattattcagctaaaaaaagtaatcagaagaaagcttcacttgttgaattgtgtttttaaacttttttaaaccaatgttaaagtttcattcgctgcgcagaaagttttcatgaaaatattatttcctcttgatttattattatttttccgcaaggctataccttagaagtcttttgcgtttgtttttctaatccaatttttctaaacacagtggcattataaaacatgtattcaatgtgtaatattggggtctggggacatgtaaatcttaggaatattaagataaatgcttgtgatcatgtacctgaattagtaattagatgtaccaagatattgaaaagaagaaacctttagtttgttgaaatttgctatacttaaacaatgcaaacttcttcattcaatttgcagaaaattttgacgagagtttaaaatttgcttgttctgtatttgtttttgtgtttcattcttaaatgctaaaaaactaaaaagtagaagtctgtcttctaatgaaaagaaattctcgtgcaatctgacccgtgggtgtaatatgctatctttgcctcctacatcctaataaattttcacggtaaatgacatttctgctgctattagacacagcctatgttatgataaataaccttctcaaaattgctttccgtaggagttaggagatacctgtaactgatatactatattgtgttcggtgaatattgatttcaactttgtaaggggttggagaaaactgacaaattgatttactttgtgtagcggtccaaagaagatttgcatcacattttgcttcc

SEQ ID NO: 106860 - DNA, 952 bp, Aquilegia coerulea
  Intron number 1 from transcript AcoGoldSmith_v1.019565m (l ocus AcoGoldSmith_v1.019565m.g) derived from phytozome v7. 0 (chr-ID scaffold_14; pos 4899327 to 4900278 reverse stra nd)
caggtttgtttctttatttaattgagtaggtgtttttggttatcttcttcaattgtaaaaggaaccaaaaaacccatttttaactttgtttgctctattccttttcttgcttgattggataaaaaagagagttttgtccatgcaatctatctatctatctatctctctcatcttttgttttcatctcctttgcttttctgatgagttctttatatttgtatacaatgaataatgaatatcatctatttttaatttgcatggtgtgtaagttttggggatttgaatactatttatctttctatctatctggtccaactgaaaattgatcagtaactttctttatgtgattgaacaacacagacaatgttccttatgcttttggtatactttgaagtttgtgtacttctttctacacaagaagacgtgtgaactgcaatttgttcagttgaattcagatgatcttcatcaaagactccaacctctaaatttgaaccccctttgtgatgtaacatttcattctataatacatacaagatgtgacattcacattttctgccctacttatttaagcattcatttgtttccttcctatatataccatgtagattgggaatagaaagagcccccatttatacacaatttgaagaagggaaataaaaaggggtaattttacatcttgttttgggacaaaactaataactgtcctttagctttatgtataagtggatttttaattacattacattcaaatatgcattgagaatgagtaataaagcagaaactaacatagtgtaaagtgctatatataatcacaattgtctctaaaaccaaaggactgcattacaaattataccatagggaaaagttgttttaaagcttatgcagattaaatgtaggtctctgcagttttctaatggtgtttatgttatcttcctgtgatttgatctcatag

SEQ ID NO: 106861 - DNA, 865 bp, Aquilegia coerulea
  Intron number 1 from transcript AcoGoldSmith_v1.018154m (l ocus AcoGoldSmith_v1.018154m.g) derived from phytozome v7. 0 (chr-ID scaffold_20; pos 2629698 to 2630562 reverse stra nd)
tcctcctccttgttcaccccataccccttctcaaggttggttgttttgtttctatctctagttttttcttttgggttcatttttactatgtattgattatatatggtttttcattgtaggtaataagaagatcagttcgggttcttcgtcgtccactccaacctttagggatgttggttcaatcctacaagaaaacattgtatggctgaattctaatcgctgttgtgtttaataaatttcatttatatttgttatatgctaatgtttggattgtgatataggtacatcataatatattaggaacaaattctaatggagtcaatccatatgtagggtgtgttgttgtagtagtgatgattcatgataggaagttccgtattactttcacttgtaaagtcatttccatcaaaactttccgatttccacgaaagttcaatttttttgaaagttcgtgagggttaaaaacatctcccatgccctcccttaattgaaaatcatctccattacaaagtggatttactcgtaataatgcccttatgcaagtaaacgttgcactagttttctactggagggttttcatgtttgattcaagtcaccctgtattcatttattcatatcattcatatatacatgtgaaataaaagaatcttatttacgccctatcttcctttctcagctaatcaaaaggaaacaatattttgaaccttgtagtttactgctaacaagacagttatatatgatgtttgagggtcttcattcagttttagtcagtacttaatcatgtagatcaaagggatccacatcttgtatctaatggaagattgctttcttcttgcagaaagaaagccctcgtcagaggggaacc

SEQ ID NO: 106862 - DNA, 944 bp, Aquilegia coerulea
  Intron number 6 from transcript AcoGoldSmith_v1.010055m (l ocus AcoGoldSmith_v1.010055m.g) derived from phytozome v7. 0 (chr-ID scaffold_53; pos 1129454 to 1130397 reverse stra nd)
gcaaggtatgtattctcctcgttagtaagtaaatcgaattagtcctctccagtttaattgtccaccttatgatacgtcatgggtaagaacagatgaattttccatccaattggatagcaagctcaccgaaacctcaaatgtttgtataatatagtgcatttctccttaaaacaatggtcatttcaagtaatagacatgttagcatgggcaagttgcgtactccaagagtgttgcacaaaaaccaggtatagaaagttggctttggtcgttcctgaacaggcagtgaggttcaggtgctagatcattcattagtttggtaccctccgttccagaagttcaaacaagataaagctgcaaaatacatcatttttcgaacaagattttctactcttacattcaaactcaaagaaaaatttgtttacaaccgtatatgaatatgtagcatctcttgagggcacacttattcacttacatatgtgtggtggcttaaataagctggcagctgtagtagtgtgatcgttttagattatcttgattgggctaagtttttaagatgttataaaagcttcttgtaaaatgacgttaccccgttacgatggtaaaaagcaggaaaaagttttatatcttgcaatctcaagtaaggttatagattttttttggctttcgagccatctgaatatgtgattgaacaggggcagttttaaagtgtttacaatattatcatgtatcttaggattctccgtgattgtacccaattatgcttccttccatactcagtttatcttcagaaatattgactccataatactctctatcactctgttacagtgataaagtttaatcgccttaacatatttacatatttctaaattatgtactgaataaatgcagtcatctacgatttctccttggttaacttcaatatgttaaattgcagatagcag

SEQ ID NO: 106863 - DNA, 996 bp, Aquilegia coerulea
  Intron number 2 from transcript AcoGoldSmith_v1.003492m (l ocus AcoGoldSmith_v1.003492m.g) derived from phytozome v7. 0 (chr-ID scaffold_14; pos 3836320 to 3837315 reverse stra nd)
agagtaaatagttcattctctactttttagcaattttatcttttttatctgataattgtaaacatattgacatatactgtccccttggtatccctagaaattcacaatgttccctacttaaaattttaaactaaagaaaaggggggggggggggggggggggttaaaaatgttttagttttcttttattttgacaagtaaattttttatttaagtaggaacaatattcttacaaaaccagtagagaaatggtgagaaagacactcaaccaaatcatatagaagcgaaaacaactactacataaaaaagaaagagcaatagtgaaattagacccatccatgcatcccagtcaagcatcaacttatcaatgtaattgtattgcctctcctacacaccccaaagtcaatactgaaaagttactttggtttgcatcatcaaatcctcacaattttcatcagtgataatctcatttcacaatttcatatagcccaaaaaactgcagcttgcaccaaactctgaaaattctgccccaaaagaccaatgtttacaaaccgaccaatgtctaattgtcttaactgagttatgaccccaaatcagatgacaaacaaactccacaccccgtttctaaaatctctgcaaaataatatgcaattgcaaacaccatcagatcagtaagtggtagctatttcttttacatgatgtgtttgcatcttgggtacaaccacataccaagacattcaaaacccttggaactgtctctctcaagcagattgtattatataatattttgatgtcaatatcgatattcccattttctatacacatatatctgtgtataaaaaggggattgatataagctgcatataaatacagaaaagtagcttattaaaatcagcaatgtcagatgcagcaatatcttcttatgcattatatagtttccagttttttgaatttatgcattgcataaagtgttatgtttgttatttatattttgtag

SEQ ID NO: 106864 - DNA, 955 bp, Aquilegia coerulea
  Intron number 1 from transcript AcoGoldSmith_v1.008837m (l ocus AcoGoldSmith_v1.008832m.g) derived from phytozome v7. 0 (chr-ID scaffold_4; pos 9104456 to 9105410)
tctcctttacaaggggtttcgatttatcacttcaggtattcattaatctctctctctctctttctctgtgcacattttttttttctcttaatttgttgatttaatacattgtgaggaaggaatttaacccaaaaattgaagggttttgttttgttttgattttgggttttgagtatatttagttgtatgtaatgttgatatgatttttatgctagtattgatcactctgcataatgtcattatatgtgttcactctgattgcattgtggataaaaaacatttcttttcgatatggctggcgagtggcgatagtgaatttttcctataatactgcttactctcagtctttttaggataatttaagccttgtgccccagcgcaaaaattggatttcggctaaatttcaacgattacacaaaaatataataataataatattcggaatttggaaagtaattttgaagctttatcgaaacttattacctatatcttgttttagggtttataacgtcaatacttttggaattttagtgttaaactagtacaaaaagcttagcattttcacctgggattggttattttcatgtataaatcctgttctgataaagtttgaatctaaattatcgatgcatatacatgcggaatattgtaatgcatgcctctgtcacattgacatataggaaaggcatgggtcatgattcaggcataccgcatactgaattgaaaatcaagttattcatggataaatgttgtaagcacatttagagggatataattttgtgtttctttgtgtggttgagcaatgccaataggcatgataaattttttggtatagataattgttatttttttatttttaatattctgccctgcttgcttttgaaagctcacttaagatctgctgaatatttctttcgaagtgcattgagcaagcctttataagttccggcttcaa

SEQ ID NO: 106865 - DNA, 954 bp, Aquilegia coerulea
  Intron number 1 from transcript AcoGoldSmith_v1.026161m (l ocus AcoGoldSmith_v1.026161m.g) derived from phytozome v7. 0 (chr-ID scaffold_20; pos 2335430 to 2336383)
aggtacagcaaaatcgggaaagaaattgtttcagcgtaagtttatcggactcttaagattcctcatggttcattatggagctccgtcattttctatgtttcaatcaaattattattagattactctacaatgatggcattgttgattgtagatttgtaatcatggtgtttataaaggaataaaggagttctgttatgtacttatgttcatgatcgtgctcagtcaggaaaaagtcaaatttttttaaccttaggtcatcaacctagtgatatttctatgatgatcataggtcatcaaattagtgatatataggtcatcattttagcattaaagaaacagcacataaagtgctcaccgagtatcacacaatggaatcccaaatgagtactacaccacacctaaagagattagagactatcaccgttaaagaaactagaggtacgcggaatgttttgtcggatagttggcaagggtaggtggcatgattccatggtcctagaaaataaaatatattgtttaacacatcacaagctagggcatgatgatagcaatagtaataacacaagtacaactgtataaccttctacggtcatcatggtacaaataacaaaacagggagacctttctatgttttgtaagtcagtaagtgtctaatgctacataaaagttatcaaagttaacagtcccagcctcccagggcttgcagttggaagagccaaataacaattttgtggttgcaaatagtcaaataccaagtgaaaaaaaaatccatcagagcatatggtaaacaaactttggatggctttatgtgtataggtgtgcgcttgtgagaatacttttcattcttagatccgttgcaagttgcaagagaacaatttcccaatagggctaatatatctactacattggtataatgcagtgtgaaaaaaggtggtccaaaccctatatcaaata

SEQ ID NO: 106866 - DNA, 613 bp, Aquilegia coerulea
  Intron number 1 from transcript AcoGoldSmith_v1.004252m (l ocus AcoGoldSmith_v1.004252m.g) derived from phytozome v7. 0 (chr-ID scaffold_33; pos 1297720 to 1298332)
actcttgggctactgtctctggtcttgctttagtggtaagaaacacactatcttagtacttttaagatatgaaatttgattgataaatgtaaatttctcacagtggaagttttggtattgccgatgtttttatttaagatcagaactactcccattctcacaaaaagtatatgtatgtatataccgatctgatctaaccacgaggggaataagaactctgtgacacttaccggtagctaaatgcaatcatttcctttagctgacaggaccttttatacgaatttctgcctttatctgaatatccacttcagagatatctgtgtccggcctgtaatttgccaataaaaaacgcccccgctaagccttgttgattttatcaaatgacctgattgaaagagtgttctgttatgatgataaccgggaaaacattcacctcgagtatcaccaattaactgaagcttttatatagatattgttcttctcaacctggtgaaagtaaatagatttattttttcttgtaaatgaatgcgcttgtttgaaatcataatatattttttgttgtatcattcttgtttcagactggtctaagcggagctcttgagactctttgtgg

SEQ ID NO: 106867 - DNA, 429 bp, Aquilegia coerulea
  Intron number 1 from transcript AcoGoldSmith_v1.013816m (l ocus AcoGoldSmith_v1.013816m.g) derived from phytozome v7. 0 (chr-ID scaffold_76; pos 356999 to 357427)
tttttcagcatctaagatcttacacgaatcctgcggttagccatttaacagattttgattttagtattatcgctatctttccattgtcagaaataagaatacaataagaaaacacatcaggtgatcagccatcagaagagatcacctatcaattagtaggccgtgtacctgttccatttaatccccagtgtcgtaattcctgccgttaatatttaactgaagtaaaaaaaaaaaaaaaaaaactctttgtttttgcatatttgtacatcctgatggaataaggcttgatttcaaggtgcacaaatatttgcccgagaatattgtcaaatatctttgtgatgcttgcaataggtttgcactgattgtagattgaataagtattagtaaaatgatattctgacacaattaggtatcttttcaggaacaaaa

SEQ ID NO: 106868 - DNA, 674 bp, Aquilegia coerulea
  Intron number 1 from transcript AcoGoldSmith_v1.006025m (l ocus AcoGoldSmith_v1.006025m.g) derived from phytozome v7. 0 (chr-ID scaffold_14; pos 1835090 to 1835763 reverse stra nd)
ggaaaaaagaaggtctgcgatttcaatactcactgtacatacgttaagttaagtctttagaaatcaaatgtgcatgaagccttaggagccaaattaaggaatacgcaccactaccaatgactgaaaagaaaatctgttacaaacatcccagtttatatgcatgacgactaatgcagtttggagttctttctctgttgtgtcatgttatgttctttttatttagctcggacaatgacagacaccttcttgactcttgtttattgtttacatcagtggctgaggccattgtgctttcctataacttgatatcaaaaggcgaagtcacatttttatcacttatagatcgatcagattatttttcgggtagtactagacaatagacaaatgacaatctatgttgtttgaatgtttattacaagatgatgatacactttaacatatggtgtcttcataaatgtagggaattgatctcaaacttacaaattaattatgatcgatttgttttaattttcttcatttcccacatataagtctatttgaattctttgtttatgtccttctgaataaccttagctggtaattaaggagtcgtacttccggcttcaatagcaattctagccaagtatttctatctttggtttaacattcagctgaatgcatctgttttagttgga

SEQ ID NO: 106869 - DNA, 566 bp, Aquilegia coerulea
  Intron number 1 from transcript AcoGoldSmith_v1.007412m (l ocus AcoGoldSmith_v1.007412m.g) derived from phytozome v7. 0 (chr-ID scaffold_5; pos 2525025 to 2525590 reverse stran d)
tttgtctccacataccaccgcagcagatctcaaaagtaagaaaacactcttatctgtttcatgtttcaattaaaccatttattgatcgatgctcatttttcaaatttttgtatatctatggtaaaataatttccaattaatccatgccattgagctcctatatattttgtgctcagattgctgcattttgtattattatttatgaaccattggtgacatgtgaactcttacttcatcaaaggtctgttttattagatcccggaaaaaccccaatagaaattagaaggaaaagagtctttgatttcaccaatgaaatcaaatttgaagacttaagaatgttttcgggaaaataaaataatgaatgacttatgataagtttggtgtcattgtacattacaaccatcattaggtgtcttacagtcttagacattgaaacttagtagttttctttataaagaaactacattaaaccgacattctgatttttaatattctgtatatacatgtaattatagaatttatgctcaaaattattgcgaaaatatttattataggagaacttggaa

SEQ ID NO: 106870 - DNA, 829 bp, Aquilegia coerulea
  Intron number 1 from transcript AcoGoldSmith_v1.025369m (l ocus AcoGoldSmith_v1.025369m.g) derived from phytozome v7. 0 (chr-ID scaffold_5; pos 4709860 to 4710688 reverse stran d)
aatttgtatttacagcaatgataaagaggcaggattgaattgggacaaatgccgcgcggtttataggcaacaaggaagaaacagactgcaatacttgtgatgagaaacagactacaagttaatctgtggagaggctaataattatcaacaaaaattaggtcccaaggacaaagtttcgtcctcatattccctaagcctaaagattcaaggcaagttaaaaccggttttggcgacattgtgattgttgttttcttggtcctcatggtctacaataattgtctgttgaatgttcttctgatgattataattaaatattgatactctctatctgctgttacaagttgtatatgcaacaacctgcagagctagaattatatataaaagggatgcttgaaatacaggtccactagaccactactaaagttgacactgtcattttattagagagtcgtgatgatcaatgccacgttgcctaaatcctaaatgctttttgaattacaacgacgaacttgcattgaatggggcatttgattagttcttcgtttacaggacgcgttcttaatgttcagcagaccccaaaccccacccaaatgttctgaaaagtcaagttgagaaaatcataaatgcacatatatcatgtcctaaaagaaagaaagtactgcaacaacaacagccatagaaattatcttggaataaaaattcatcatttcatgtccagcagaaaagagaagaggagaggagaggagaggagaaaacaaaatgtatgtattaagttcaacttccaaatatttaatcatcttattgccaagttttcttctcttacatattc

SEQ ID NO: 106871 - DNA, 989 bp, Aquilegia coerulea
  Intron number 1 from transcript AcoGoldSmith_v1.024624m (l ocus AcoGoldSmith_v1.024624m.g) derived from phytozome v7. 0 (chr-ID scaffold_135; pos 94645 to 95633 reverse strand)
tttgcctcagttgcaacatctttccattgactttggttcaaattatcatcatttatccatccatgcccctaatctgcgttttctctatggacgagggtgcatttctgataagttgcacatacagaattctccgtacttgcatatggcaacgttgttatttaaagttgatcagaaattgtcccaaatgccttgtgaacatcttcatttctgggggcatactatgtacaacgtcgcaaacataaaggttttacatttaacatgtgatctacttaaggtgtgtttctcattatcaatcttgttctccttttgtcctcaattttttgtaattatcttcatacatattagagttatggagtgtgtgataacaaggtgagcagtatgttagcacacttctattattataacatctatgtaaatattatttcactagctatattaaaatttcagtacatcacataatttaggtagtttttccgccattccgtgtgaccgtccatcatatcttacatatgtattatgtattgtttaaatactatgttgttgagtttttttttttttttttgctgttgttgtgcattgtttcatttatttccatgttaagctttttgaaggtgtctatactttaaataacatggagttaaaagttaggttacggattacaatattgagatatgaagaatgacatgcttctgccttgtggatggtttcatgatcttgtctaaatgctaacattttgcaaagaaaaaataatgtaggctacataaatagtgagtttttttattgaggtcatattgagatactctggaacttaggatattgaatttgcattttttcatgtaaacaataactttttaaatgttaaactgcttcgagttagttgtcgtattcaccaacaattagaattctatgcatcatcttgttttaattgatctgttttctttgactctgtttggtacttttgaagatgattcacacagaatattacttaa

SEQ ID NO: 106872 - DNA, 678 bp, Aquilegia coerulea
  Intron number 2 from transcript AcoGoldSmith_v1.017847m (l ocus AcoGoldSmith_v1.017847m.g) derived from phytozome v7. 0 (chr-ID scaffold_17; pos 4812420 to 4813097 reverse stra nd)
ccctcagtgtaacactcgctacaaacgtcacaaaggtttctaccgaacttctgtgtatttatcatccgaattcacagctctcatttttaaattaatgtgatttcaaattctcaactgttcgttaaaaaaaaaaatgtgatctaaccaatttcaaataatgaagtcaactaattgaaagaaattgagtcaaaattactacgaatcatcaaaaaagtcaagatatggtcaaccgatttgggtccttcaaggaccgaactcggcccacaaatcgttgaaagccagattacgtgggcttttataaactagaaccctgtcgggccgaacaaaggtccatattaagtaatcgaccgactttccgatctattctaattaagtaaccgaccgacaggatttggaaaccgatcgacttgtttcttccctcccccatctctctctctctctctgagttttcttctactctcttctgcttcttcaacctaacttcggtcatcaccgtcaccggtgctatatgttaaactctacaaacggctgaattggtttgaaatctgaattataagttcacttggtttcgtaagttggaatttgtaaattatttctgatagattgattgaagtattgaacataattgatgatgaagtatgttaatcgttatgaattgaacaggttgtccacgagttc

SEQ ID NO: 106873 - DNA, 766 bp, Aquilegia coerulea
  Intron number 4 from transcript AcoGoldSmith_v1.001507m (l ocus AcoGoldSmith_v1.001507m.g) derived from phytozome v7. 0 (chr-ID scaffold_17; pos 3234681 to 3235446 reverse stra nd)
acagaagctccctcgagggacagttcctggtgattgtatccaagatgtttactttggatccatccatgcatgatgcatgagtattattattgatgtcatcttcatatagtttcatttgtatttttgcaagtgtgcatttgaattttttctagaagtcagtaatgtatatagtattgtcccatcatattcatcaaaaagaaaaacttctaatagcatgtttattgattatactaaatgctccctctggacttaataatgctttattaatctgctttggttccgcttttgtggagtttctttaaaaagttgcctctgtatgggaataggattgtgtggttgtatcacatgtactggtagatacattacagggtcatagtttatggatttcatgctttgcagcaaatatcatacctcagacttttctgtaatttatgattatagaagcatttagtagttatacactcatcaatacatgcctttttctatcatataagacaatgggagatacttggtctagtgcctttggaagtgggtgctgccagtatgttataatgtttatgttactgctttacttctggatctttatctacattgaacagtgaatgttgtctgtgcttccccagagccctagcagtagccatgatataaatgcataatacagggtagactgtgcaaatgttttaggtcattaataagttctatcatgtaggaagccttttgttttctttctgttccatttgagaccttgacttgttttcagttctgg

SEQ ID NO: 106874 - DNA, 512 bp, Aquilegia coerulea
  Intron number 3 from transcript AcoGoldSmith_v1.001507m (l ocus AcoGoldSmith_v1.001507m.g) derived from phytozome v7. 0 (chr-ID scaffold_17; pos 3235535 to 3236046 reverse stra nd)
aagtgggggttgtgttatttgggactgaaggtaatttttgttttcttccagaacagttggttagagtgatgcatttactgttgtagtttcagcctctctaaattaatatgtgatgtgaccataaacaaatcttcataagtggaatgatgttttctcctttgtatgcaactagaaggagacttgatggatataccaaagttaataatttcaagttgtcagccttagaagctgctgaaagcaaaaaaaaccctacgtctattagtgataacatggtaatgaggtgagccttctgatgagaatggcaaaattgatttttagttaccattttgacatggtttcgacattagtcttcttaaaacagcatgtttaatgtataattgaacagattgcagttcagtgtttttctagctatatgaagaagttgttttggaaagtttcatgtttgagtaattgactgattgatcaattgaaaatgcgtgatgctttgctaaaaaatcttgcagatactgaca

SEQ ID NO: 106875 - DNA, 792 bp, Aquilegia coerulea
  Intron number 2 from transcript AcoGoldSmith_v1.027848m (l ocus AcoGoldSmith_v1.027848m.g) derived from phytozome v7. 0 (chr-ID scaffold_41; pos 1298189 to 1298980)
tctgtgattgcccacgttgaccgtatgcaaatgataatatctgtctgtgttttgattgtttgtgaacatcttgttaatatgcattgaactttgatttacaaaaacaattgaacgagcctttaactagatgaattagccttaactggataatattttcttaagactcaagatttacagactacatttctcttttcattgtttggattccctatttgttaactgtattttatattagctcagcattgcatttgaatgttttcccaatcatatctgtagttagtctgctgtaggatgttaggaatgtgtcgagctattttgaaaaacatactgagtgaattggttagtgatgaattcctgtgatttatgctattcacaaaatataaggtgttatagctaggctgtgctattaatataagtctctttgcttagctagggtctgcatttgaatgttatccatatcatataagccgtttatccaatacaaaatcataggacattcattgagctgcctttggaaaagatgtgtgttgaaacttgttaatattttatatcatgtgatttcttctattaatggaatgcaaggaccgaggagtcattgctagactccacaattgcttaagtaaactggtattcaatcggaagtctgtctgtatggggacatagatagggttcttgtatcttgatgcttcgacatttcatttctttatgatacggtaaatgatatttttgtgctaatgtttctccatgaactcgacaggaaaatctactctcaccgactctctggtggctgct

SEQ ID NO: 106876 - DNA, 601 bp, Aquilegia coerulea
  Intron number 1 from transcript AcoGoldSmith_v1.011578m (l ocus AcoGoldSmith_v1.011578m.g) derived from phytozome v7. 0 (chr-ID scaffold_29; pos 2161689 to 2162289)
cttttttctttttttctttctatctctcgtctaaggtattcttcttgtttttctcgcattcttctctctctttctttctcatttctttcagatctaggtttgtgttagggtttcgaatccattattattattattattattctaaatcattgataaagagatctgttgtttagatctgaatcgagatcatcgttgtgttttttaatctgatttggttttcgaagacagaaatatcatctattcatcttagatctgaggttgtattacttagatattcctcgattttatcatctattgttcttgttgatttatctatctatctacattgtatttggcttgattcgatttttttttttttttttgattaacattatatctaattaataactggtttcttttttttgctgaaaagcttacattttgttttatgcatgatgatttttttttctagatcctctattttgtttgttcaattagagcaaccaccatttgtttaggtgtcttctgtatcttttgatctgcttatattaacctaaaaacatgcattttgattgtgtttgtttctgatcctcttttcatgtttaatatatcagccttgaag

SEQ ID NO: 106877 - DNA, 265 bp, Aquilegia coerulea
  Intron number 2 from transcript AcoGoldSmith_v1.023119m (l ocus AcoGoldSmith_v1.023119m.g) derived from phytozome v7. 0 (chr-ID scaffold_53; pos 1405712 to 1405976 reverse stra nd)
agaaattgttaactcttcagaaggttagagttctctttttcttctcttaatattaatttaacttcaaatgcatactttagaaacaattgattgctttaatataatgttcattatgcatgattgtctagtttatgaaacttttagttgagataatagtttggagaaagaaatgagaataatagttactttcagacaattttgatagttcagtaactaattttcactcgcagatggcaggaagttgaacgtcttcgtggagaaagaa

SEQ ID NO: 106878 - DNA, 981 bp, Aquilegia coerulea
  Intron number 1 from transcript AcoGoldSmith_v1.001024m (l ocus AcoGoldSmith_v1.001024m.g) derived from phytozome v7. 0 (chr-ID scaffold_20; pos 3811160 to 3812140)
ctcgtaatcaggtagaaaaatttcaaaatctttcggttcttcagtaaaacttttgattaatatccatttgggtttgtggaaaagctgtttataaacttattttgactcaattttggtttaatctgattataaacttgttgaaactctgaattcctttacgttttcgctgaaattaccagttttaagattattgtgtaaaggttataagttagttctagctacttcttattgcattttataaacagagttctaaattaatgttgtaaacttggaggtgggttcttaatgcattttcacgatgaacaagaaatatgattgttgagagtttaagtttgatgattttaaagtactactcagaatactactgtacaaaattctgacagagtaatgtgagatacaacagtaggactatagtctttgcacttcccgtaagttggaaactttgacgaactactggaacaatgtttatgcctgttatgatgttagaattccgtagaataattttttattttgggtaaaactgttttgaactaccattaaatgttttacaagatatttgctcgtatgaaggcctgattgtcctttagctgatgttggtcgatgtcaaaagatctcaacttcaaattcatattcgacgtacatttccttcaaaattcacctttctttcatttcttatgtatcgaagggccatttctgtgttcccgacccccaatttattttcatacagtgtctgatagtgttatatccattgtatgccactcacctggtgcgactgtttttcagtctttctgccattaaggttgatgtcactaaccttgacattgagctgaagcatgtgaatgatgacaattcaaatttcaaatagtctgacccaaaaacattattctgtatctactatctacttatccctcgataactgaatttttgtttttcaaatttgaatttatgcagctccaagaaattccgggattagctgagagg

SEQ ID NO: 106879 - DNA, 643 bp, Aquilegia coerulea
  Intron number 1 from transcript AcoGoldSmith_v1.013163m (l ocus AcoGoldSmith_v1.013163m.g) derived from phytozome v7. 0 (chr-ID scaffold_4; pos 2879505 to 2880147 reverse stran d)
attgtgagctaccgaggtacgtacattgcctcttctctctttagtgtttgtttgctttctaaatctgcatgttatgaattacatcattacatgtaagttaatatcactttgatctttaggtcaaaataatggaaaactttaatgtgaaggcaatactttgaattactgtatttgttgaatttaattgaatgttggataataagaatatgacaatatcttttatactgaagttgggaaaccttttttgcgctctgacattacgagcttagagatcaaaatcatctgcttctgggctgcagaggttgaaacccatgcttcctcgtaggtagtcttggataccaaccatgatctcatagaggtgttttaaagtggtgaaaccaagtggaatattgctttcgaatgatagaactagctgaactggacggtctaccttagttgaattggctaaaattgttaaagattttgccaaaatatttccaacatgatgaccatatatcattactgagttatttcaatatactaattaaacaacagtaaatgcagccaatatatagtaatagaaaatgactaaaaaaatgtttttgtgatttcttttttgccctgattcttctcttacttttagatcatgtacaatgcaggttta

SEQ ID NO: 106880 - DNA, 526 bp, Aquilegia coerulea
  Intron number 3 from transcript AcoGoldSmith_v1.005733m (l ocus AcoGoldSmith_v1.005733m.g) derived from phytozome v7. 0 (chr-ID scaffold_5; pos 174388 to 174913)
acatcagaaatatcatttgaagtcaagggaagacagtaagtacatagataacacacagacagcatttaagttagatcaaccgatccttgtgcattttttggtgatacatgccaccaccagggcctggcacacatggttgggggtgcttacgagaggggaagctcccaagggtagactcgtcgatcatagggcataaagtttgatataatttgttataacatttcagcttttgtcaaatcaggttctaggtcacacttcaaagttcaaacttcaccaatgatagtcctagatcttctaggccatttaggttttgatatcaacaatgatgtgtttgattaaaggattcaataatttgtaaataaaaatgcaacacaccaaacatatattaaattattggcattcaacaagaacatagattcagaagcttctgttcatcattgttcaaatcaacctagatttctattcttttcttgatcatgaaactaagtaatgcagttgaaaatttggtttatatatagtggagatc

SEQ ID NO: 106881 - DNA, 625 bp, Aquilegia coerulea
  Intron number 1 from transcript AcoGoldSmith_v1.016423m (l ocus AcoGoldSmith_v1.016423m.g) derived from phytozome v7. 0 (chr-ID scaffold_41; pos 1603664 to 1604288 reverse stra nd)
atttcaaatttggtatgcaactgttgttatacaatcttctcccttccagatgattgaggtgttgagcctgagcaatagtaaaaacaaattaattaaccttagcaaacagatcaaatttatatttatagtaagatacaaaaagtaaaacacccaaaatcatatttgagataccaattgatagcaaaaaaagagagttggcattgaagcaatataccaaaaaagagattgaagaataccaattgcagcgagattcattgatttgggaagagagagaattagggcttgagaagagaagaggaggaagtatcgtattgtttacaaattaatgtttaattagggtttgttgttttagatcaaatatcaacatcctacggtccataatatctctccaaattattttttgtagatgtttaatctctgtcatccatataaaatcagactgtccaaaatatctttcaaaattgtcttttttctcaaactgtgtccccaacttatgtacatgttgtcgcttataacttagatgtatttttcaacccacctacttcatggtgttttatataaactcttttcctccaccactctccttgcgttagctgctgaattccatattcttttacttgagtac

SEQ ID NO: 106882 - DNA, 819 bp, Aquilegia coerulea
  Intron number 3 from transcript AcoGoldSmith_v1.008463m (l ocus AcoGoldSmith_v1.008463m.g) derived from phytozome v7. 0 (chr-ID scaffold_125; pos 193711 to 194529)
tggtaaacccagtcgtttagtgcgttttaacacaggtaagtttttgcatatcaaacaaaaccagatgaactatctaacgaaaaaagtagttagaaaatgaatgataagaactgatataactcatgaatcgtagacatgtacctatagagactattttccattcttcacaatgctcctagtttaggatcataattactcttattgtaagttaaatgtctcattaatatttttgtaccttgctccattgcatttaagtgaccaaagttttgctgtccaatatgcctctaaaaacttgtaaaaataattatctaacttctgctgctatctttttcatgaaacgaggatactgtcaattttaacaagtagtggaggagagattattaagtcaaaatgtgaaaagcctgagaaacaaagagttgtatatgtgaaagttctcctgtgttgtcaatggattgacatgtgttaaatataattgctcataaacataacactataccaacagaaagccgaggaatgcttagtgatcagtgatgggtaaaaaatcagtaaggaaagcagctccccttttaccataagttagatatatgtagctttcatcagaagaattgagattgcatgtatatttactcgcaggagtattttcctcttacaagccatgcatataattatatgattatatcatgttgttgaaaatgtacgcttttttttttttggggcattttactattatctcctgtgatctgaaatcaacgttaatgaatgagtctgcctacactgtaattgctgcagcatcagaaactagagccgtcgacccaaaat

SEQ ID NO: 106883 - DNA, 525 bp, Aquilegia coerulea
  Intron number 1 from transcript AcoGoldSmith_v1.012710m (l ocus AcoGoldSmith_v1.012710m.g) derived from phytozome v7. 0 (chr-ID scaffold_5; pos 5931054 to 5931578)
gaaataaatatttttttttttagattaatacattggtataagtctcaaaaaaaaaaaaataatcaataaaagcttagcgtttttaaattttattaagtaacaacatctaatgagcaaaaataatcactaaaactcgaaattctactatccaatttattgaagataattcgacctggttctaccgataataaacatatcctcggtataaatctgccgaatatacaatattattttgacagaattgtaccgaaaatattaaatcagtgtgattgattttattgtttattttttgaaaaagatttgattgatttttttaacattatatctattgaacatttttaccggaatagtttgcttaatggcttcccttccccagccccaacccttcccttcttctacttcgttctttcatcatgactgtcgatctagttctccacgatcgtttagggatattcttctaaccccactagaacatagcaaagttgttcaatttacaagtccacagatccacgagcttcgaaaggg

SEQ ID NO: 106884 - DNA, 729 bp, Aquilegia coerulea
  Intron number 1 from transcript AcoGoldSmith_v1.019637m (l ocus AcoGoldSmith_v1.019637m.g) derived from phytozome v7. 0 (chr-ID scaffold_17; pos 2518866 to 2519594)
ttctcttctccggtcacttgtggtaaaaatccttctcagtgtcatcttctatggtggtgactagttatcgtttctctaaatttttatggttttatgctaatttcgtttaattgacttggttgtgttcaactgttcataaaagcttttaagagtaaacatgattctttttggttttgagtgcaaacataatcatttttttttttcattcatgaaagcttttgtttggtagtaaagaatgaccaatagtgcatttgttttggaacaagaaaataaataaataaagaattggcattcatagtgttttccagatgcaagagtgtgatcaacaggaacttagtttacttttttgatacagttcaagtcttcaagaaagagttctaactttttacagaagaatccagtaaggaaattaaaagcaaaaagaaatttagaacctctgtccgtgaggacagactttagtagaaagagagggaagattatcgaaaaaaaatattaaaatatatttaaagacgactaaaagagaaaaggaagaaaaataccaatttaccaaaccatgattcaaatgctgattatcaaaagtagggtggttctgtttctttctgcttaacgtctacaaagattagccatctatatatgaaattatgaagttaaggtttatgtcctcctcttggaagtattctgtataaatgcattagttacttatagctgtgtgtgcggttttatctgcag

SEQ ID NO: 106885 - DNA, 683 bp, Aquilegia coerulea
  Intron number 1 from transcript AcoGoldSmith_v1.021241m (l ocus AcoGoldSmith_v1.021241m.g) derived from phytozome v7. 0 (chr-ID scaffold_4; pos 1560262 to 1560944 reverse stran d)
ggagtcgcccctgttgaccttcttggtgtcgtccggtaggcccatagcacttcccaaagattttcataccacttttcttttctatcttccagcttctttttcaatacctccagtatggctttgtttgatgcttcagcctgcccatttccttgcgggtgaaatgtaggggtgttattcgagccgagcgagccgagctttgaatgctcatactcggctcgttttaatacgagccgagcccgagccgagcccaatttctgaatcgagcctggttttatgttcaagctcggctcgcgagctatttatcaagctcgagcttgttaggctcgtttagctcgagccgagctcgagccctccaagctcgtttagctcgaatcaagctcgaaccctccaagctcgtttaggctcgagctcgagctcgtttgcatgattgttttgattctgattcttcagcagttgaagagataatctctcaagcaatggatcttcatgttcttgaacaaatttcatctattaatctctctggagttactacaactgatcttcccattgatcttgaaaccaggtttagaaaacttacatctttcccacaaactaatctgaaaagccataataccccactttctacccaactcaattctcaaattaaagacttacccacaacttcaattcccatttcatcccca

SEQ ID NO: 106886 - DNA, 658 bp, Aquilegia coerulea
  Intron number 1 from transcript AcoGoldSmith_v1.015055m (l ocus AcoGoldSmith_v1.015055m.g) derived from phytozome v7. 0 (chr-ID scaffold_5; pos 1381787 to 1382444 reverse stran d)
tgatagtggtgccctgaccattgacatcgatcttggtaatattcatcatttgccctttcctttccctttgaatttttttaaacataactgatattttccctttgcacgagaagctaacacagctactgcacaacaaattacactagatgatactcccgtccctaatgacatctacaatttatgggaacccgaccatgagcaagcaaatatcacctcagaaccaggttcttacttttgcacgttctttttccttaatctttctcttcccacaaaatttttttccctttgtttacatatctatacttccacaaatttccccttttatttatatccatattttattatcaccattacctgtatttcaattttgttatatgattttattcttaatttatttagtaatgtctccatatatcattacaatcaggtcgtcaagatggacttcctactgttaccaataattcaaccagaagaagaagagtgccaaccatccaaagatcatctcataattgtgcaagagattatattgattgccctcaattccagcaatttcgacttggttctttctctatctgtcaccactgccacgcaaagttgtttccaagtgaaacaaaaaacatgtgttgcttagatggaagcctaactttgccgctaatag

SEQ ID NO: 106887 - DNA, 861 bp, Aquilegia coerulea
  Intron number 1 from transcript AcoGoldSmith_v1.025085m (l ocus AcoGoldSmith_v1.025085m.g) derived from phytozome v7. 0 (chr-ID scaffold_14; pos 2291839 to 2292699 reverse stra nd)
gaaggtaattataagttttctctccctagtgttatatgcaataggtttcattgtttcaaacttctgttgattgtagcatttagctaagacaggttatcattttgtttgtccctgaagttttcttgaatagttctaagtctcttaaatacccgaggatctgaaactactgaaaaatcatagttcacatgtgagctagatattaaacttctgtatgatacatactgatcagaatggcataatgatcaaaacgatttcacaatttgagtgaaggttaaatctatgagagtgatgataaccctttttaagatacataggttcggtgtggaattgttagtaaagatggttggcaaaattctaatttagtttgatcatcattctaaccgcaagagcatctgcaatgcatttccactaacaccaagtccagatatttagagctagagctcaatgagagacaaagaaataaattacaaacaaacgatgcaaatcaacaaatttttacttaccttaaataatgacgagtgtttatatgatgagcatcaaattgagtctggcagaatgcatcgacagtcacttgttacatgattgaatggaggcgaagcagagtttctgccgtgctgcacaaactttgccttctgccataaccaccactgcctggtgaacttgtgcattgaataccaaattgcataatcatatgaactaaaatttggattttaatcatgttacccgtggagtcatgtactgtattggtttagagcaaaagaaatggataatctgaaatgttagtgttatgtatactacgcggttgccaaatgatctaagcttctgactttcttttctatatcttttatggtggttatgcag

SEQ ID NO: 106888 - DNA, 996 bp, Aquilegia coerulea
  Intron number 1 from transcript AcoGoldSmith_v1.011433m (l ocus AcoGoldSmith_v1.011433m.g) derived from phytozome v7. 0 (chr-ID scaffold_23; pos 3030359 to 3031354)
ctaaacaatctcttggtggcttgttgaaggaacaggtataacccttttactccttttttttttttattattattattggatttgatcgatcatcgatttattagggtttgaagaattggtttattttttagttatgatttttttttttttcaaactatttgtttttcttaatattaatttgaggtaaaggaaatcaatatttctatagtagtactttataagaaaaggttaattttctataattggaatagcttttttttattagttatttcgcgttttttgtgtaaagattctgaatttttcagtaatacagatcgaatttaactatttcaaggattaattggttgaaataaatatatatttttgatctaactgtctaggcaataattcaagatcaatgcaactatttccatgattggtatgaaaatcttatacagtattaatttaaatttggtgcaactgtcttaggcatatattaattattttttgattaaaaaaatatgaataaatttatagatccaatggaaccacctaagcagggaatcaaccacaccactggttccaattgttagtattttttttggatattccaataagtttgatatcaatgatttggacagataggaggataaccatttcttcaaacattcttagctggtccagctcatattgtctatatacaaaattattgatcagatgtgaagttgatatttggaattatcaaaacacctggcttatataggtggtacacaaaacattgcccataagtttaaaatttgttgtatatcttctaactatgccaatgtttttatatgagagggtcattttctttactttttcttgatatagacctattcttgatactctattatgtacttcatcaaggtgacaagccctctatcttgttaggaattaataaatttgaaaacattattatgtatgtaaaatatattgaattaagaaccctttttgtttggcaggttgaagaaccaaagg

SEQ ID NO: 106889 - DNA, 974 bp, Aquilegia coerulea
  Intron number 1 from transcript AcoGoldSmith_v1.007137m (l ocus AcoGoldSmith_v1.007135m.g) derived from phytozome v7. 0 (chr-ID scaffold_17; pos 4467503 to 4468476)
tgttctcactctggtttgattctttcgtttcaaaggtaaatataatgctttgttctttagatgagtttaattttgttggttttagttaaaattagaaatctgatgtgtttatgagatgttttgaaagaaacgtgaaaattctcttgatttaaaatttgcattgtaggtgacagatgctgaaaaagttctaagaaaagttttttttttttttttttttttaagaagacatgtgatgtgttttgtgtggtggaagtttagtttgtagaatgttcatttttatgttgatttggttgattcttttgttctcttgctattttctttgatatttccgtcgaatttagtcgtttttttgggaaaaaattggaacttgttggaatttttgttgaagattctgagagagaaaggagaatttctttgattcagaagattcttgaaactttggtgtttttttttgtttttttttactgttgcttttgctatattaaatgagctttccttgaaaaaaaaacaggttggctttggattcaaaccattgaactgaaactttaaggcattcttgttgaaggtttttcattgttttgataaaaaataaggaacagagcatttgttgtagggtttaaggtttgcagtcttctttcaacttctgtcagatttttggaatttttctggtttgaagcaagaaagaaaattgaatttgcaaatatagagataaaaacaatttttggtctctctgtgtgtttaagtccaccttggcggaggaaatgttcctaaatcagtaaattgtgcagtatttgtctccgttattaatttcttagtaagcttttaatgcttatagtgaatatagaaagttctcacggtctgtcgtttgattattacagctaagtttacttgatggtgattgtagatacagttgaatcttgagtccagattttttacgtattgagtaacggattggtttttagttttcaggtaaa

SEQ ID NO: 106890 - DNA, 843 bp, Aquilegia coerulea
  Intron number 1 from transcript AcoGoldSmith_v1.006684m (l ocus AcoGoldSmith_v1.006696m.g) derived from phytozome v7. 0 (chr-ID scaffold_66; pos 98772 to 99614)
tgcttgcagcgaaggaaatcaatcgtaatccacgagtgagtcggtcagtcggtgtctatcattataaaacaacatatacacaagtgtttttttcttattaaaccaatctctttcttcttcttcttcttcttctaattttcccatttgctcacatctcgtccttctctgaaggtaagcaaagcaattagcaggttctattattgtttatttcttgattagggttttcttgatataatagttatttgattcgatttgtgattatcagttatattttgttttttattattttttgattttcttgttgctttaaatatgttttaggatttgattttaaatgttttatgtgttaattacttgtgattcaattttcgtaggtatttattcttattttaataatttatgattttgatggctaaattcgatttttaggttttgtgtgatcaatggaaatattcatggagttgttttagttatttagttagatttgtgataatcagttatattttgttttattattttgattttttttgttgctttaaacatgttttaggatttcattctaaaagttttatgttttaatcatgattcaattttcgtaggtatttttttttttaataatttatgattgatagctaaattcgatttaggtatttttttaataatcaatggaaatatttggagttcctttttaataattcatgaatttgatgattaaatagcaattagttttgaataatattaattagttttggctttcacatctgttggatacttggatcattgaggtttgactgtgattagtttgttatctatattcgctaatatattactactattttgcag

SEQ ID NO: 106891 - DNA, 310 bp, Aquilegia coerulea
  Intron number 2 from transcript AcoGoldSmith_v1.004220m (l ocus AcoGoldSmith_v1.004220m.g) derived from phytozome v7. 0 (chr-ID scaffold_20; pos 2181390 to 2181699)
tcaccaaaaaaggtcaattattcttctcttatcatcttttgtatcaattacagtatgtatctatgttaattgaatcaattcttacaataattgatgaatgcagacttttctgttccatgttgaagtaatccaatatttgatcttctgtttaatgcacaaactaaccgacaaacaagcagtaaaactacaataacgaaaccaaaagaaaattcaatgttatgaatttattttgttttctagtcaatttgatctaaagagtactatatatttatcagattccactccccctagctgcgtttccctcctcggc

SEQ ID NO: 106892 - DNA, 735 bp, Aquilegia coerulea
  Intron number 2 from transcript AcoGoldSmith_v1.003154m (l ocus AcoGoldSmith_v1.003145m.g) derived from phytozome v7. 0 (chr-ID scaffold_125; pos 224946 to 225680)
caaaccacctccatctccatctccatctccatcaggtttttcttccattttacacttacccacattaccaatttgagcttaatacttaataccattaccataccatcatcactttaccatatttgttgcattttactcaactctacaatcttatgcatatccttagctaacttggtgaatttgttacttttcaaaactctcatgtgctttgaattattttctatttgttagtacagtataatacaacaatgcagaatttccatcacatttttctcctttgttatacataattaaaagccttaaaattcaatcactcactaatcactatccctctgtctttggatagatggctgttcgcagctaacaaatatcagatatatattgaggtttaatactcacccactggggtctgagggattgtccgtcataatttatattaggtcactaattacctccctgaaccgtttattccatttataagatgatatcttttcccaacagttctcttttggtgggttttagttttatattggtgacataaaatccctctacactaatttatctcgcaaatcgcaatcacataagggacagcagaataatattcctttttatttccagttctcactttgttcattacagaattcagaataatagtgtatatgttttgttgactgatatgagcgtatctacggctcggcagaagtcatctacaggttcatttctggcagtaagggc

SEQ ID NO: 106893 - DNA, 1034 bp, Aquilegia coerulea
  Intron number 1 from transcript AcoGoldSmith_v1.001248m (l ocus AcoGoldSmith_v1.001248m.g) derived from phytozome v7. 0 (chr-ID scaffold_20; pos 146383 to 147416 reverse strand )
tgctgaaatccaacaagctatttctgaaggtaatgtttttacttctttttcagatcttcagcgttttttatttttatttttttagatctatggtttgttttatgttaaaaatcatgtttttagttcataaatctaaatcttttctttgtttagttttttttagccttattactttctagtgattctataaactaatctaaataataaaaatgtttaatgttttacatctttttcagatcttcagggttttttttagatctatgttttttttgttaaaaattgtttttttttttttaattataaatctctaataaaaatctctgctttgttgagttataggttgctttctagtgattctataaactaatctaaataataaaaatgttttttattttattttattttagtggtcatcttagctgaaaagaatctgcattttctttttgttgagattagattctttggagatacttttaattattgttttagatttatggaataataaatcgattcctttttttttgtttttgtattaaaggtcaaaactttgtgatttaactgtttatagttgtgtcggttgtcaaaagaaaatttatatttatatttttaatgattgtagaaattagaaaatactgcatttacaggatatttatagatatgggtccctatgtctgattggtggcatggtatcttaatttgtttggaaaataagatttagtctgtatttgttagtctttttaattggcaatctagatctaaattcaaatatatatatatgattggatgaattagtagtagtattctggtaatagttatactttgtaattaatttttggggtgatttttttcattggtattatttttttcatgtttttctgtatgtttgcattgttttgtgtgaatcgatcaagagttaagacctacctcaccttggatatttacacatagttaacattgattggaaactttgagcttatgtattgtctgtggattatacaggagcgacttccttcttgttcacggaatatcagtat

SEQ ID NO: 106894 - DNA, 960 bp, Aquilegia coerulea
  Intron number 2 from transcript AcoGoldSmith_v1.026218m (l ocus AcoGoldSmith_v1.026218m.g) derived from phytozome v7. 0 (chr-ID scaffold_23; pos 1069731 to 1070690)
tgtctgttctttgcccattacttaagctcttttctgtaagtttttactcactctattatgtttagattgatttatattaattccatttattaccctttttcaattcagtatttaaagttcattttaatttcaaaatttgacgtttttcttactcaaataagttaaattttagagacttgcaatcctttccacttcaaaagagtgaaacggcaccctctgtaactgagttttggagacacatttggcattttgtagtatagtgtgccacatgaaggtcaggaatgagcaaatctttcacaacaaaagagggagtgccttcggacattatcttgccttctcgttcgtttaagcaccaatttttcaagtttagtatgcagacttggtgtttccaaaagccaaatttatgcttcctagcaacttaaaaaactaaatgacggttttttttttatatttatttattgcctagggactataattcagcatactttaaagggcttaatgtatagcttaaaacaagtagccttcaagacttcaagaagaagtgaacacaagaagaagagaaaataagaacagtggagaaaatgaatgaactgttgcgtaatcttttccttccggatgttatttgaaattttataaaagcaaagaagaaaaactatgtatgggcacatatgtttcccattctaatgtagaacatacagtcatacttgaatacaataaaattgatgtagttttattatcactacctttaagcaaggcatttagaaaatcctgtaaacatcgaagaaaatgatttttgtttttttttgagaaaaattatttgggagaacatctattgattggccttttgatttacatgcatctttggattatttgaaacaatgattaagcttcattatgactaatctttttaccatgttgataatagggatcagatccttctcaagataggaacaatctagt

SEQ ID NO: 106895 - DNA, 704 bp, Aquilegia coerulea
  Intron number 3 from transcript AcoGoldSmith_v1.004246m (l ocus AcoGoldSmith_v1.004246m.g) derived from phytozome v7. 0 (chr-ID scaffold_14; pos 875477 to 876180)
gagaaagaagcaaaggataagagtcgagaaagttggtaaggctctgtgttagttcctaatacttggatgtgtagttatcagcctttgggtcatatttattctatggttcttgttattgttgcaattttagcctttcttttgtttttatattaaaaatgtgatgctaattggtgtggtagagaacgctgcaagtaaactaatataccggtcttttcataatcaaaattcaaaaaaaagttgtccgataactttttgtctttcgtagaaggtcagctgtatttggcctttagtttcatagtttcgtactttcgtatgccattttaagtttgtttggcgctctagctatatatgtagtgataaatcaactattatggagtctactgttttatataagaaagcctttctttgatactgcattttcttgaggttgagaagatgggtaattatttttgagacacatctttgaatcgaggatctgttgaactgacaagggacatttatagacttagtttaattatttatggtgttaacttccttatatgatgatatatttggccttgatttaaagtagtatatatacttatatagtatataattttgaaatacatgaccacaagtgttattgttattatttcttaactttgtggaataaattttaactgtaccctcatattggcatgggctacttactctttattaggtac

SEQ ID NO: 106896 - DNA, 724 bp, Aquilegia coerulea
  Intron number 2 from transcript AcoGoldSmith_v1.007494m (l ocus AcoGoldSmith_v1.007494m.g) derived from phytozome v7. 0 (chr-ID scaffold_20; pos 508370 to 509093)
atgtaagtgactggtttttaaatattatatataatatagaagatgtattttttgttttgtgatttctatctgttgttggtttagatactttgattgatactacttgttttgattttgctgaaaaaacggggaagaaaggttgaatctatgtgtttattttataggaattttgcttaaagtgttgaactttatgcctgcatctaactgattttcaaaaggagtaagaagatgccgggttctaagtgtttagaatgttttgttgattgtttggggcttatttgttcattgttaatggtgtttaaaattttcaactttatgttccaatctgattataagactattgacaagtagaaaaacaaacgggaacaaaaaaaattgagcaaatttgagatttttatttctgtcttcacccaattgctttttctgctacagtatttatatgtttgtatgaagtatgaactgttatctaatttaccttcttttttcccctacattcaaaataaatccttttttttttattgggggttggggatgggggtgtgtggatgtgtgggtgtgtgttgaatctttagtgtttagtatacgtctactctagttcaaactgacataatactcttgtatctcacattaaagatggcttaatcttgtaattatatgatacccattatcttgatttcttattggtatttggaccttgcagaaaatccagactgtcactagatta

SEQ ID NO: 106897 - DNA, 607 bp, Aquilegia coerulea
  Intron number 1 from transcript AcoGoldSmith_v1.015502m (l ocus AcoGoldSmith_v1.015502m.g) derived from phytozome v7. 0 (chr-ID scaffold_20; pos 2515701 to 2516307)
gtgccattgttgaataatttaggtgacacactaaaacacggctaacaaactagggcgacgaagccaccttgctcatattatcattaaatcgaacttttcaagcgcgcatgtaaacacttgtacgaagaaatcctacaaaaacaaaaagaaaaatcgtaattatatagccacagaaagtgatacattcctatagcttgtctataggtgttaaaagaataaaattgtcctaaatttaaagggaatgaagatcaaagaatcatatctttatttagtgctacatataaaccgaattgaatcagatgctcccaggccactttcacaatctcttatatatggtagccattcccatagtacaaaccctagtaatgtgtcttccttccttctaagttctgattatattgagcactcggcagcactgctattgactactagctagctagctctcttcttacaaatcataatggtatgagctaggcttttggttttgggtatttcttatgtgtcatgtagtactaattttcgttattaacatttcgaatttgcatgtgaatgtataggaaggtgagaagaaggttggagggacaaaaaagactattactgttgggcc

SEQ ID NO: 106898 - DNA, 887 bp, Aquilegia coerulea
  Intron number 1 from transcript AcoGoldSmith_v1.007958m (l ocus AcoGoldSmith_v1.007958m.g) derived from phytozome v7. 0 (chr-ID scaffold_20; pos 1373731 to 1374617)
aagtagtacttctcttaagcaaggttagctccaatttcttcttcttcttctttaataataaaaaatgattttttgtgcgtatttcatgtgttttagtgtatgttttttttttttttttttttgatgaagatgtgttttagtgtattgtttttacattctaaagcgatttatataaatagatgaattttttttttaaaaaaaaaacctaacaaagatttggtgttagggtttaagaagttcatatcatttgaatgcacgtgtgtgttttttgttgaagaagtaaattaagaaactttcttccttggagaaaatatatttgttcaaatttaattgaattgtttggaaaaacttgcacattcatgtcttttgtatgtgaaattacacatatatacagtatatacttttagaatagtgtcgaatcatgtcagatttttcttatactagtggaaattggcctattcatgtgctactgagatcaatgattttggttgaaccagtttgattaccaattggaggaataacaaatttttgttcccgggtttgaaagagtgatcattggttgaaaagatattaatatggaagaagattttgaatcatagtttatacaacttgacctcgtaccgttgtgtacacatggacacacctatagtattatctagcatgccaacatctatggtaaccagataataacatataaggtgtgtttcctgtttgaggttggataatcgaacgtttaagcaattcaggttttattcttcatatttatagcacctttaattaaattggtgcttttcaagatcggtgtttacccttcccatgatgacagacttatggttttgttttgtttgggtttacaggaaacaaaaagcattaccatctccaattca

SEQ ID NO: 106899 - DNA, 994 bp, Aquilegia coerulea
  Intron number 2 from transcript AcoGoldSmith_v1.015517m (l ocus AcoGoldSmith_v1.015517m.g) derived from phytozome v7. 0 (chr-ID scaffold_14; pos 2265815 to 2266808)
ctttggattccttacttcaaggtaagaattagtagttgaactcatgaggcaattactcttactgatttccatttgttgatatatgtttacttcacaattagtcagttataccacactaaaaatcattgccgttttcattacatagaatataattactgaacattaattcatccagttgctagtcatattcatttgtacaaaaaccgaatatagttttgtagattgacatctgaatcattcaaacacaaagcaaaaactttagtatcaccagggttgtgttagtttatctgatctttactaggagtagacttggacatgatagtttgagccattgagggcctagtgacggttcaacctttttccgagctatttcccctgtcttctattgggacaagcattccacagtttatgcaggcttagagggagggagaagtgaatgatactctggaagcgttttcgtattactgtaattgaaaaggcaggcagtccttttactcatgcaatcaatatgtctcatgcaagggatgctgtaactactcgtactctcctaggcagttctcaaataccaacctgatgatcctgagtaaatggttgacaaatcaatttatgtgctttctcttttcccatgccaatttacctattaggaaatcactgttgttgctatagatattgtagccacacattgtttgaatcctttgagtgttgcgtgtttagctcattgaaaagagactgtccccagcattcagtggtacacaaacctcctcatataagtttcatctctgtcggtagtttttgggatactccaagacatgtggcaactgttcctactttctgggctgtaggcaacttacttgtagtcagactcaatacaaagaactgtatattgtttttactcgactttataccattttttgtttcacatgtctttaatcctatttttcatctgtacactgcatttactgttacagaattgtgcatccttcgggataaaagt

SEQ ID NO: 106900 - DNA, 173 bp, Aquilegia coerulea
  Intron number 1 from transcript AcoGoldSmith_v1.024798m (l ocus AcoGoldSmith_v1.024798m.g) derived from phytozome v7. 0 (chr-ID scaffold_125; pos 28758 to 28930 reverse strand)
ctgattctcatttgaaacttgttcttgaagaaaatgtaataaaaatttgatttttttttcttcatataaatgtgttttttttattttatttttgattgattaatgatttgggtgttttttgtttttttgtttttgaaggttaagattgcgaaagaacgagattctttagctat

SEQ ID NO: 106901 - DNA, 1025 bp, Aquilegia coerulea
  Intron number 1 from transcript AcoGoldSmith_v1.002527m (l ocus AcoGoldSmith_v1.002527m.g) derived from phytozome v7. 0 (chr-ID scaffold_14; pos 424339 to 425363)
tacctcaaaccttcgctgtcgattcagatcacaaggtgaagtgcaagtctaattgttaattcaatctaatggtttaatgcctttgatagatagattgttattgcttcgaatcatcgttattgtttttgttcagatctagagaattgtttgtggatctgaaaaaaataaataattaaaacctaagtaactgtagtttagtatgtttgtttaatttctatactacatatgtttgtagttagatctcttcttttataagtcaaattacttatcttcttatgatatagatctctcaaaagtttcattttttgtgtcaatttgaatatgcattttgcatttcacgattttcttcgtgtttttttttaacatttgacattggatctaattttgttgatcagattgttgatttcaatcctagattaataaatattatgattctattaacaattgcccctttgtcactctaaccttagaaggagtttagatattattgtttaaatatgccttatttatataccttcgacatgaaacctgcaatgagtatcacggtatcacctataaactaaacatgttgatttttagttttgacacttgtgatacaccaagagtcacactctctcatttggatatataactgattcagacactaaaattttgctattgaaagacgtgtggtagtttatgcttgttgggtcatggaatcatttgcttgaattcggatgattaggagtaatgagtgacgatgattaatggtcctaatctttggtgccaaaaagagaggtgtgacacataaatgaaatagtgcagtgccaaatgatatcaatagtcctaatcttatacatctcttggagcctgtaagatgctggattgaacacttctaactttagtggtcttcttaagaatagctccttctccgatacaaatttaagtaataaattgttgtgacatcatctcttgaaaaatgtttacagaattcttcttctttatctgcagtatcaacaagaagaagcagttaccctttgggtaaa

SEQ ID NO: 106902 - DNA, 976 bp, Aquilegia coerulea
  Intron number 3 from transcript AcoGoldSmith_v1.025880m (l ocus AcoGoldSmith_v1.025880m.g) derived from phytozome v7. 0 (chr-ID scaffold_41; pos 2266871 to 2267846 reverse stra nd)
tgaacaggtcagccttgaattattgaatgcttataattctgatcgggggaaaattatgtgtatattatattttcttgaaaggctttccatttgagtttacctaggtacatcttggaatttttcttttttgtgtcttaccatcaataaatggatcaaatcagtcaacttttatcaaccatcaaatgctcaaatttgaaagctgggtattctttttgaggatccttagtgatggattcttgttccggaagcaagaacaccaatgaaataaagaatctctttataaattgtctcaaaaacaatagtttccacaaaacactaaaaatactctctttaagctctacaatttattaacttaaacaacctagttgtaataatgccctaattggccttttataacaagaataacttgtattaaaaggaaactagtttatttaataatttgaagaattagcttaattttgataacctaaatatggaggttgataggatctcaagagccacgtaggcactcaaagatgtatcatccatcattttgtttggaattaggtatagtctgtgctccacccaatttagacttttaccagctttactcacttgaatttagtagcacgtgtggggcactaggtaagtgctacagtctgtggacgtactttctcaagacatgcatacgactatatggctactaagtatgctagaaaattgggtgggacacttgccccaccaactgacaatgtggctccgccagtaagtttaggcatatggttctgctggtagataaactactatcatcaaaatatcaaatatctgtgtgatcaatatgtctttccagtttccccaagtttcccttagatttgctagttaaacttatctcccatgtatttactgattacttagttctttcctaaaaatcatgtgtttattgacactttaaagaaatgcaggttgcaaaagaattgcgtcaaaaaggaatttcagc

SEQ ID NO: 106903 - DNA, 904 bp, Aquilegia coerulea
  Intron number 1 from transcript AcoGoldSmith_v1.021796m (l ocus AcoGoldSmith_v1.021796m.g) derived from phytozome v7. 0 (chr-ID scaffold_29; pos 790798 to 791701)
gttgacgacggagacatcttcggtgccctttgcaggtcatctatggagagggagcaaaatgaccatctcaacaacactaatctctatatataacaggaatcaaggcttaccggttctatatgttttttttttcttttttttgcaatgagcaagctggggttgaggcagaccctaccagatttattaattatagtccaatgcgtagcacagcacgggttcctcagcttgcttaaatatttattgggaaaaggatttagttgaggcgagcgccaggcgaagagtttatgttttgaattatttgttgggttgggtcacaaagcgcccaacaccagtggactaatccaacacaacccatcaaacgacttacgactccaatagtccaatctgctacatatatatccgcatccgacgagcacggccattatgttacgacatgcactaataaaccaccacgtgtaacatgcagaatattatatttgagttcgaccactaataatttgacaggtgtacactggtaaacatattctctttacaactggagtataataacacggcgacattgacattttgacatttgacatactaccagtttccaaaaatgaagatttattaataggataggactactatagagtatagagtactctttttatttttaattggaccctgaccctctttaaccagctagcaagttcaaagttcacatcatcatcactttacagagaaaattcaaaacatggaaacagaaccattaattgtctctaatcaagaaaaaaaccattcttgttcaaatcaagaaatcttactcaatatccctcctgaatctgaatcatcacaaatttcatcaacaaatgatttgaaatcatcagagtttaaaaaagggtcagtttctttgatcaaacaa

SEQ ID NO: 106904 - DNA, 1040 bp, Aquilegia coerulea
  Intron number 1 from transcript AcoGoldSmith_v1.001856m (l ocus AcoGoldSmith_v1.001856m.g) derived from phytozome v7. 0 (chr-ID scaffold_20; pos 3589628 to 3590667 reverse stra nd)
tggcttttggaatcaattatcttttgaaaagacaggtatgtagttgcttacttgcttcttttatttctgttaatatttgcaattgtaattcaagctcttttaagttatgaacagttgtagaatcaaatacgtagttaatgactcaactggcatacttaaaaaaagttttgtagtcctttattacgacccaaaagatttaatcgaagcatatatacaacttaaacaaacctcaaatgtagtaataaatccggaatggaatcaagaatattatatgatgacgactgtctactatgtgagagttataacttataacttacacaatttaatcgtcaagggtaatgctgcttctctgtccaatttgaatccgttatttatatttttatatgtgaatgctgtgttgttgtctgttgtattcttgcttttttagtgcatcatagattgtgacaaataatgttcatgtcaatatgtttggttggattttgaacttttatgtactgcaataagcactaagtattacactgcagcctatttatatttaataaaaatccattctgtctaccatgtagttagatatagggtataataaccttcacagttcttcctgaactttaaataccatccttcacaaacgatgctccttggttatgtatccacatagtagttatatctctttatttgaacggttgaacctctaaaagctgcattatactgtcatccctaccgccaatagtgcaacaactttttataaacagatcataatagttgtacgcatgtaaagatttacgcttggtttctacaatccagttgcgagtgtgtttcttgtaaaattttgatttgattgaattatctgacttcatcaccacagaaagaggaaagcctactatttttacgactttatgtgacaccattacacaatagatgcactactagaatcaaacctactattttgcattctcaatgcatgtttagtagtcttttttcataattaagctgctgggttgaccttgccttgcagggaaatttacaagttgccagtgtat

SEQ ID NO: 106905 - DNA, 675 bp, Aquilegia coerulea
  Intron number 2 from transcript AcoGoldSmith_v1.002104m (l ocus AcoGoldSmith_v1.002104m.g) derived from phytozome v7. 0 (chr-ID scaffold_14; pos 1959345 to 1960019 reverse stra nd)
agaaaagaaaaaaggaagaagagagattagcaaaggtttttgttttgttaaaccctacttattgttttcactaggaatttgattgattgtgattgttacttgtaatgaaatccattgatttatgaatttttactggttagatgttagtctctagacaaattgctaatgtgatgttgtgcatgaaatacagtaggttttagtaatacagtgtaataatttagttaactttttcaagctttgctgaattacttgtactttaatacatttcataatcaaaatatgtaataaatcatacttggagacttagcattgagtaatttttctttaattgaaccatttttttggctttggaagtttgaacattattgtcgtttcattgaatgttaatacatgaattgttgttgtcctgcctatatcccttaaacaaaagaagagaaatgcatctgaaatacttctgtatactatatatatactgttatattatatactacatacctgcatcagtgtctaccacacagtattaagtttcttactttctttgtatgagctatatcagacaccttgtaccttctcaagccctgacacaatgcacctactacctgtgtcgattacttagagtttagtgttgcatattttgcaggctgctgaggcagatagcacaccatctcagaggcg

SEQ ID NO: 106906 - DNA, 738 bp, Aquilegia coerulea
  Intron number 2 from transcript AcoGoldSmith_v1.001958m (l ocus AcoGoldSmith_v1.001958m.g) derived from phytozome v7. 0 (chr-ID scaffold_4; pos 5865856 to 5866593)
ttcacaaggaaaagttatcattttgtaagttcaacaaaatctctatataattttgacttttttgaacagttctacactttgatctaagtttggaattcatgctaaagaatttatcaatttgagatcttattgaaataagctagggttttgtgtttagatgagtagtttgatggaaatcattaaagataatttctagttatttaggagatattttctcaagtagtattagttggataacacaataaatgagaccgtcgtagaaatatctgctatatataatatcacatttaattttcagtttgtgtaaataaatacaaaagaagagattgagattatgtctggctgtttttagagaaaataatggataattcttcagttattatactttttttttttcgatcacaaaacacctagggcgtagatgtagttaaggacgctgatctactttaaggttcaagatttatggcattgagcaaagattcaaaattaaggagtctaatgtcacctggcttgtaaattagttcttttggtctgtgctcgatttgagatgaaggatgaaaaagctattttaaatgataaatatatttctaaactatggttttcaagtattgaaatttgatgtagatttttatttaaggtgtatatgtagaatatatcgtttttgttgtgattgatcctaaagtctgatgtatcctctccgcaggaatttgaaggatctttgccttgaaggaacactgg

SEQ ID NO: 106907 - DNA, 617 bp, Aquilegia coerulea
  Intron number 1 from transcript AcoGoldSmith_v1.011497m (l ocus AcoGoldSmith_v1.011497m.g) derived from phytozome v7. 0 (chr-ID scaffold_38; pos 386417 to 387033 reverse strand )
ggagaaaaacaaggtaattctttttttttattataaaattttcagtttaaattgttcccaacttgatttaattacgttttgagaatatgggtatttgattattataaaaaaggtaaaagcttgcaattgaattgtactgtatttggggttcactagaaaaggttggatttttaacatttgcccccattttgattattcaattataaggtatcattggtcattttcttcttccacttatgtacaaatctagatattagcttaattacagtaagctgggagttacatttgaatagcatctggacttctcgggtttattgataaggtttggatttttgtaaaaactgtcgaaattttgaaatgtccctcaaattttgaagttcaagctatcttcagtttggttgtaaagttgtagtaaagaaatattactagtttgcagacagtagtatgtcgggtttactggttatttagaaaagattgtaaaattgtgaagggtttttttctatattttgtttggaaaaccaatttcttttgatggtgttttttttgaaggaatttgatattatataaatacatcttttgtagatttgtttgctttgtcgtcgacgtgggcatagttt

SEQ ID NO: 106908 - DNA, 832 bp, Aquilegia coerulea
  Intron number 3 from transcript AcoGoldSmith_v1.007333m (l ocus AcoGoldSmith_v1.007333m.g) derived from phytozome v7. 0 (chr-ID scaffold_42; pos 1123274 to 1124105 reverse stra nd)
ccagtcatcaccttcttcttggctgttttgctcaggtatagcttttctcttccgacttctccaaagcaagctataaaaaattacactctttgaaccaattctgctttttctaaagtaagaaatcaaattattatcattacaaacagtaaaaatctctaaagcctagctgaaatatggaaactaatggggaaaggttgtgtattatattcagattgactgctgaaaagttgctcagaagttatgtaaatataatttatattatcaaatgtaatatgccataacttactttatggcattacataacactttatcagcaatatggtttaaaatacaagaatttctcttatagaggatacatgaagaaaaaattcacatatcttaagttgtactaaagaaatttctgcgccttacaattatatgtgactagaaaaagaaaaagacgaattaggtgtgtggactgtaatctacagatatagtccaaaatatgtgaagtgggagttcaaaaccaattatatcagagaagccatttcagataaaaccccacagcacatatctgagataaggcctagctacgtttggagcccaatgctggttagtttggggacaatatagctaccgcttaccagtgaggatccttgggggggcacaatatgttgtaaggttttgtttatttctacgattattactctgagactaatgtgctggtagggataatggtactgcttcaattggctgagttgcctacagggcttctaacttctaagttcaaactgatatcatatttggccacgttacaggctggaaaaagtacagttgaggaccctttcagggg

SEQ ID NO: 106909 - DNA, 896 bp, Aquilegia coerulea
  Intron number 1 from transcript AcoGoldSmith_v1.026004m (l ocus AcoGoldSmith_v1.026004m.g) derived from phytozome v7. 0 (chr-ID scaffold_23; pos 2400269 to 2401164)
tggttgtactaagcaggagcgttcccccctccctggttaggcggctagtagatgcttggctttcattcaaactctcttcattcttcttgtcttgtcccattgggtctgggtacctgtactaaattaaaaatctggctcagtagagctcctaagtcagccaataatggccagtgactaggtccctactagcaggactctgatgccgcctgtaggtctttgtcagcggtgtatagttagtatggcgcccttattggctcttggtacccaattcgctgttttgttggcagtttcagttctgatgtctccactaagctccgggtctcggtgctactaagtatcccacaaccctagtagtgactaaagaagaagggcatttggcttgacgaagctgagtagatcaccaagtttgagtagggaatatcgagttctggatcgttcctcgatgccgtatacttgactgttcatttctcttctaacgctgggtaagtgcctcaaagtcctaatgctggaaaaaaagaatccagaaagaagcccgcatacccactcttctttcaccccttgccttggactaggaaaaaacaaactaacatctgtttactgtggctttgcccacccctgcagctaagtggttaagagagtgaatgctgttattgttgccttgttgttaatccttgttgttaatcagtgtagccttgttgctaacaagtgaacggaccactgggtggagtgggcctgaacaatataagcagtgagtggacggctgagccttgctgctattggtagagctacctgcagcgagagtcaatcctcaagcggagatacctaatcctcataatgacaacggtgacttacgtcgtctagacgcacatatcaagtatctccccaacgctttccac

SEQ ID NO: 106910 - DNA, 816 bp, Aquilegia coerulea
  Intron number 2 from transcript AcoGoldSmith_v1.015537m (l ocus AcoGoldSmith_v1.015537m.g) derived from phytozome v7. 0 (chr-ID scaffold_23; pos 635002 to 635817)
cagcaaaaagggttggttgcacactcttatttctgttatatatgctttctttttatatttgtgtgactgtacgtactatttcgaacttataaggcacctgtgtcagtttctataatttccgtgatttgcgtccgtagcaccattttttctgttctcatgctgtcctaaagttgctctagtaatttctgagaacagagagaatggatgcatgggtaattccatagttagagatcaactcaaagctttctagtggtggggcccatatgacatagttaccccattctttcgttcggtcaaccaagatataaacaagtgttgctgttttcacatgaaagaagtacacatgctatgttaagatgagttattttgttggtgccatgaagtcgtctgtgaaacttttttagtgttctagatctagtgttccttagttcagtttaccctgtgtttgttaacacaagtactgatatcacaaaaatgttaacttcgcgacatacaactaactctcgacgattttcgagatgcaccctgctacatgtgttggctatagatgtattggattcaaataacaaaaggctgaataacatactgaaatatcatgtggaataaaaccgaccttacattggagacatatgtatgacatgtccaaaacccatccatgcacatttatttgaatccttaatctcacattgatatttaccctcatcccttttaagtaacaatcttcttttctcgtcggtatcaaaatgttgttccttaatccttttctgtccatatattgctgactcgctttgtattatttttagggaagagttaaat

SEQ ID NO: 106911 - DNA, 454 bp, Aquilegia coerulea
  Intron number 1 from transcript AcoGoldSmith_v1.027270m (l ocus AcoGoldSmith_v1.027270m.g) derived from phytozome v7. 0 (chr-ID scaffold_17; pos 2957554 to 2958007)
ctatttacgaagctgaagtcggctctgctgttaaagtatgatttttacttttaaatctcaattgattctttcttttcttcttaattttaattgtagtttttaagtgttcgctttgtagctttgtgtacataggcctttatatgctgctatttcaaaattcaaatgtatctgcttattcagcatgtcacactaccagtactgatatttctctaagtaggctttaatgtcaaaacaaaacatatccatttcaaaatatctgggtgcatggtctactttatctcgtcacaatttggtcaaaaagtatgctcatattatactttgtcgcacattacatattcatgtttcagtcatttttgtacttctagaaacttctttgtacttgtctggtggtgataatagttggaattgtgatttcacagaaggaagaagctgctcatcagcatcaatttatatt

SEQ ID NO: 106912 - DNA, 637 bp, Aquilegia coerulea
  Intron number 1 from transcript AcoGoldSmith_v1.007286m (l ocus AcoGoldSmith_v1.007286m.g) derived from phytozome v7. 0 (chr-ID scaffold_4; pos 6393195 to 6393831 reverse stran d)
ttgataaatctacaggtaactaaactatctaatcaaacaaatccaactcttttcccctaatttctctagggtttcattatgtacatatatataggtttttaatgaataactgagttgactcactgaattttatcaaattgagcttaatgattgcttctttgagaaatttttccagaagaaaagataatttttttttatataaaatctgattttgtagccaattgcaaaattgaattttcactaaagtgaaacaattaggagaaattatatatagcatagcataaatgagtattgggtaggttttcatttgttgaatttcttttttttttttcgtgtgaagggtgtttctagaattttagatgtaaagaaacaaacttttttcatgtaagttatgccttttggcactgtattgagctatttttgcaggtaaaatagctcaatacacaaagaaattcgcttagtaaattttgtaggcttgtgttggtaggggtttggttatcacgtcttaatgtttttttttttttttgtatcaaattgtacgtttttttttgaattgctgttttctcgcaaggaacttatgatctgtatgatatatgtttcagatatttcggtgaagaagaagattgaaaaacatagg

SEQ ID NO: 106913 - DNA, 463 bp, Aquilegia coerulea
  Intron number 2 from transcript AcoGoldSmith_v1.013649m (l ocus AcoGoldSmith_v1.013649m.g) derived from phytozome v7. 0 (chr-ID scaffold_41; pos 1329626 to 1330088 reverse stra nd)
ctgtggatattggacttgttttcgtcggtcgagaggtatggacttgtagtattatttattctagagtggccaacttaaaacggatccgtatttcttgtcgatttacttttctgtgtactcgtgtttggcccttgagctagtcaattgttgtctgatcctttgattttgttatgcaactatcatgtcactattccttcatgtgccagggtcttaatattagaccctctttactattatgatattttttttatcaatctgtaggtgcaatcttcggatatatataatagtcatcttgcagatccagcattaatgaacttgctcagggaaattcacagaatctacggcctttgattggatttttttcccattttttataaggaattgtgtctttctggtggcattaactattagatttggttttttagcaggtctctttcacaggatcgaatttttccgtggcatt

SEQ ID NO: 106914 - DNA, 619 bp, Aquilegia coerulea
  Intron number 1 from transcript AcoGoldSmith_v1.008150m (l ocus AcoGoldSmith_v1.008150m.g) derived from phytozome v7. 0 (chr-ID scaffold_17; pos 1705958 to 1706576)
tggtgagtgcgatttttttttaccctgataatatatgtaaattttccatgcatgattcataaatgtatatattttgcatcaccatttcagtattttggtctatcaactgtattgagtcatgatttaaatgcccacatgtatagtcgaagctgactttgaaattggtagcctacttcaacaagcaccctttctgcaagaaaaaaaaaacaagcactttctatcttctagaatcacataaccacgtgaccaacagccaactaaagtgcttcacagaatctggctgcatcattgagatcttgttggcagtgaaaatcctaaaacaatcaacatagtctctttcttgtgtcaagaaagaagataacgaatggctgaaatgctgaatggctgaatggctgaatccaatccaagcaacttgctttttctttttctttttttcactttccctccataaatgttcagctttaaaggatacccaataaaaatattttatcatgggtactatcatcaatctattttatttaatattccctctattattactatttctgtctaatatttataaggtgggtagaattcaaagcaaggcaaaaaaaaagacaattatataaggtcctttctc

SEQ ID NO: 106915 - DNA, 358 bp, Aquilegia coerulea
  Intron number 1 from transcript AcoGoldSmith_v1.002464m (l ocus AcoGoldSmith_v1.002464m.g) derived from phytozome v7. 0 (chr-ID scaffold_5; pos 1662507 to 1662864)
gtgactttctttcagatcgagaaaccctttctcaggtcaatttctctcttcctcatcgcttcaacaaaaccctaatttattattattgagtaaaattaggattttttctgaaagaaccctagatcccaatttcaatgttttgaatgtttctctccaaaaattagaatttaaaaactccttcattttctggctaattttccaatccaatcaaacttagcaattgttacattatgcttctcttacttctattacattgagatgctttaggagttttatataagttgcaatctgaattcctttattttggatttactttgtttcaggtgccaatccttgatcattcaagcattggttggat

SEQ ID NO: 106916 - DNA, 647 bp, Aquilegia coerulea
  Intron number 1 from transcript AcoGoldSmith_v1.027556m (l ocus AcoGoldSmith_v1.027556m.g) derived from phytozome v7. 0 (chr-ID scaffold_4; pos 3963794 to 3964440)
tgggagaaaggtttgcagaggtggatataagatttgggtttgggacaaagatgggcaactcgtggaccaaagttgtggaattttaaattttgcgagaatattctgttttttcgccacatggacgtctctcatccacaaatgcactttgcctctcttttgcctgttccttcacaaattatataatttcataccacatcattgtttctttaatttaacatagacagtaattcgtggtttgagaatgagtttcaccttacaaatatgtaacccccagtgagattttgctatatctatctgttttttatcgttagggatgtatattttgttgaaacaactataaactagtttgaggtaaccttttcactatgatacatataacctatgttagccttgatttggggttttggaatcttcgttttaattttttcccttgcacattttatatgatgatcaagaagaaaaagatggcctggggggatttcccggtagagtggtagactttagtcactccattatattttttatttcttttttccaataaggttatatttactgtgtttgagatttgaatatcctccattatttgactttaaggtatgatgggtattaagagacatgattttttaggaagttgatctagccacttt

SEQ ID NO: 106917 - DNA, 623 bp, Aquilegia coerulea
  Intron number 2 from transcript AcoGoldSmith_v1.005868m (l ocus AcoGoldSmith_v1.005868m.g) derived from phytozome v7. 0 (chr-ID scaffold_17; pos 435263 to 435885)
gctttggtaagtgtgtttcttaaactcttttatcatttcatctaatgtttgttggttgctattcaagttatctagttcatcaaaaagtaactgaagtcacagtagttttaaatttgtttgcaattcaaatatagtggaaattgagtagtttcagttatcaaagtgtgtgaacttaattattcagatatttgagattcacagagtcaccatgtgtggtcaaagtttatgtaggggaaaattgtgttcactgcttctgagtcagctgtctggtaaaattgattctaaaaatttaatactagtttatatatatactccacgatcaggggtatgttggttttcgaataaagaaataatcgttaactgcagtctaccaatcacgcaaatctcttaattgtaatgtgggaagtcatatttcgaaggaatatgtttacataaatatgtgatttatgtgatacttttagtgggaaagatcgctttgtgttatgttaccctctgattttttttaagtatgctgttagggttgcaaatttttagatttagagctgcaaattatggagaaatttgttgatatgcaattgttaatactctctatccaatcctaatatcttctttccaggttttgc

SEQ ID NO: 106918 - DNA, 694 bp, Aquilegia coerulea
  Intron number 2 from transcript AcoGoldSmith_v1.009221m (l ocus AcoGoldSmith_v1.009221m.g) derived from phytozome v7. 0 (chr-ID scaffold_5; pos 5615326 to 5616019)
attggtatatttctcaattctcaaattctccattctacttctactatactactacagtatagtttttattctgaataattgattgattgttgatggggattgggattgggccccaagtatcataccaaaatttatgtatattttcattgttttgacacaaaattcaaatgaaagtctagttatgggggaaattgacactaatagtgcaattcagtgattcactcgctgtctcactccacatttttttattcttgtttagattttttcgagacaaattcatattcctggataactttgtttttggacatagcttaaccgtcttagctcttaaatctgaagctttaatttattgaatttttggaacatgaattagattgataattaagaattttccgattgaaaataaactatcatcaaattcatatgaaaaaaggtcaatgttctaatagcttttaagacaagtaacattggctatctaaagatttgttgtgaaggaactttagtattcaattttttatgagtagtcaaaggaagaatttctcaactttcagttttgggttctactccactctgcatgttcctggtagtagagagtagacgtaaattagacattgcttattctcatgcttattagctggtcttatataattatttgcccattttttaattaaagtttctctgttgcagttacgta

SEQ ID NO: 106919 - DNA, 918 bp, Aquilegia coerulea
  Intron number 1 from transcript AcoGoldSmith_v1.008773m (l ocus AcoGoldSmith_v1.008773m.g) derived from phytozome v7. 0 (chr-ID scaffold_94; pos 501816 to 502733 reverse strand )
aatcttctggtaattctaatctttcattcttttctttattgagttgtagcaattaaatgatttaaataaatgcaatatgatttattaccaagtattctctgaaaagattgaattaggatttaggattaaattcctttgggattgtaattccaaggatttataagaaagttgtaagtcgatacaacacaatgtaccttgaaaatctctagttgaactactgtctgtatctatgaatgtaactgatacagaagacggatagttgttttatgttaactgtctgtatcttgttcatagatttagcataaaattattatccatttccggaaaagttttattgttagttagggtgtaatatatgtgagtgaccaagacctggagttgtagatcgctggaatgtctgatgtgctttggtcaaaattctatgaataggcaatatagtgtatctatttgtgagaaattgcaaacatgttttcatgccaactacgtaagaatttaagacaactttattttagagagtcaatattttgacaaaagataaagagattctactgttcttttttgaaacttaattgccataatacctttttttttttatcatgtgtaaacattatcaaatatcaatttattataacgcgattttacacattctaagactgatttggaagattttgtttttgatcatccgctatgatcataggtagagatcatttctgtcatgtcctgattcctgaataaagtggttttcttttccgatagcaaataaagtttgtatttgtcttgtgccagttaccataatattgtttgttattgcacctgtgtgcttaactttttcctcctagtatctggtgtttacaagttgatactcttacactcgcaaatgcagatccataagtcaaatttggagggaatcctccagaa

SEQ ID NO: 106920 - DNA, 954 bp, Aquilegia coerulea
  Intron number 3 from transcript AcoGoldSmith_v1.000070m (l ocus AcoGoldSmith_v1.000070m.g) derived from phytozome v7. 0 (chr-ID scaffold_20; pos 4245103 to 4246056 reverse stra nd)
ttgcacaatatcttcgtgcaaggggtgctgctaaggtatatattatacacttaacacttctatcttggcctctatatagctctaaccattagaatacccaaactggcttgatcagaaaataaaattacattttctgtgtcacataccattcatattagtgccagggatgaagacaacgactcgaagagacaccacagtgcaactcacatctttgtagtttgtgtgtgtgtatttgccgagactctgacaaacatatgtatggggtactgtatggggtacagtactacttattgatcctactttgttaaccaatgatatcatttcgacatccgttttaatctgattcactattggatctaacacgaattgctcacttgggaatcaatttattgtgagagcagatcaaattgatttggagatgtatgttttttgagtggatatattaatctacattgtatttgtctaataagttttctaagtactaatttctaatcgaaagcattgttgtacttgattgagatcaatgtagtagatcatacttgtctatgcgtggtcaaatgtgattttatgtttttgcgtacaacatgtgtggctctgttacaaatacagattggggagttggcatgtttagctagcttaattttgaagctttataaattttcatattataaattttgaagctgtatacacttcgttatttccttatatttttatttgagttataacctggaattgaaagtttgaccagtagaaaatttctgtgatcatattgtgagacctaatttgtggtttctgacattgttaacagtgctgtgtcagtgaaagggagattggcctctttccattcatgaacattcctatcgtaatttctttttgacaattgtttaatccctttttatctgatacttgtggttgtgtttcctttttaactacaaggattctcgtgatctccat

SEQ ID NO: 106921 - DNA, 923 bp, Aquilegia coerulea
  Intron number 1 from transcript AcoGoldSmith_v1.000070m (l ocus AcoGoldSmith_v1.000070m.g) derived from phytozome v7. 0 (chr-ID scaffold_20; pos 4246397 to 4247319 reverse stra nd)
gagacagcaggactcgcactttactcccttgtgaggtattcttgatgcttatatttggtttcttataacagtctgctatcttttttcttttttcatttcccaatttaaataatttgtttgttattgatgctaattttcactttagtaacattaagatcaccagattggtaatatttgtgatatcaagtactgtcatgggtaatgatttgcataacttggcatacatatagattaagtattctgttattattacagcaattatgatatacaacttcttttgtttttctatatgcttcctttcaaactttttacaagcatagacacttgcctgtaaacgctttgctagttcagcataagataaagatgctgcatcggttagttttcaatggctacctctgtcaattacggaatctgccattcagcaggaagttattgacagatgaagtatatctagatctgttgcctttcatcagttttttttattcttctctctataaccttattcaagggttagtgataagcaccagaattgtctctgaaactgtcattgttatctagtgaagcctctgcaagtaacaccttgtttggcagtgagaaaaagttgtgctattttctgaacagacgacttttttcttcgaagtgaaaaaaagagagctgtattgcgatccagttagtagtggccgacacactttaccgaaaaccatctgtagtgtgttttcatgttttacatttgaagagctactgtactttgctgtcaatattgtgttgattcggatgaaagtttatcttattcaaatttatattatatttatgaagattttcttctcaaaactttaaaaataagccccaaaacaattcctgatgcgtggttatattgcactgtatcaggttctagaaattttgaaaggattctcggaagacac

SEQ ID NO: 106922 - DNA, 807 bp, Aquilegia coerulea
  Intron number 1 from transcript AcoGoldSmith_v1.027013m (l ocus AcoGoldSmith_v1.027013m.g) derived from phytozome v7. 0 (chr-ID scaffold_17; pos 4523457 to 4524263)
accgataattgcatacgtgtgagttttgaattatgtttattttcatttaattacaaattaattaggttttggttgttgtttattttgttctattaagcatggcaaatgtatgatgtatctgctaaatgagaacagaagcttgatatatagaaaaaaatacatataatagaaatatattatctctgtaaaattagcttactgtagatatattttaaactgcctaattttaatataatactgaatctaaataatatacagtatatagtatcaaatttcacaaaatttaaaatggtactgagtttatataaacgcaactactaatggtttcctgtgaattttggaattgggtttcatcgtgtcattatttacttctctttctctgttgttcactttggtcatctttggtttttcactagagttctcttccttgggctctctcttaaagaatttttaaattttatgtctattggcatccaatgtaaaagagagagagagaaaaaaagggaataattaacagtttggaggagagagaatggtgggagggatgtgtgtgttcatcgcaatatcgcaacagatagaaatatatgattttcattaaagtggcttactgtagatatattttaaatttgaagattctcttgataaggttagatatattcaaataagctcgatttttttacaagggtgatctcaatgttctggtgataaatttcacaaatagctagtattggctcattgtacctttacactaaactttattcgtgtcttgcagagattgaaagagttgagtgagaaagaagcatctac

SEQ ID NO: 106923 - DNA, 515 bp, Aquilegia coerulea
  Intron number 1 from transcript AcoGoldSmith_v1.000367m (l ocus AcoGoldSmith_v1.000367m.g) derived from phytozome v7. 0 (chr-ID scaffold_23; pos 2941576 to 2942090)
aagctgaggtatttgatttcattttcttttcttatctttatgatgtttgtgaattggaatctgttatcagtttagtttctggattctaatttctacttcttctttttttaacacaacttgatttgcaattatgttgaatttgtacgaaacttgattgaaattgagcattatgttgtacaataggaagactcgaaggagtgatttagctgcaaattgaaacactatcaaggagagtataattgagttaaaatttaggatatttggatcttaatttgttgaattttgcatgaattgtgatcttcattgaagactgataaatgataataatagattagtagtgagaactgagaagagtaatttagaggaatgatataaaagttatggttaatagatatgcatttcttttgcggttttaacgttatgtgcatatggtaaaggttccacgcaatcgaattagacctttgttcttatttgactatgcttttggtttatagctcgctcgtagagttcgtgaa

SEQ ID NO: 106924 - DNA, 843 bp, Aquilegia coerulea
  Intron number 1 from transcript AcoGoldSmith_v1.001228m (l ocus AcoGoldSmith_v1.001228m.g) derived from phytozome v7. 0 (chr-ID scaffold_14; pos 2623676 to 2624518)
catctctctttcaggctattgggaaggtaaataatattctgtatcttatctcattggttttaataatttatattgctttaatcatggttttttattcaatctataaaaagaagatcttattggaatgttttagtttcttgtttaaattctactctacatataatagtactaaagatgcatgatttggattcataatgcaccttactgattcctcaatgtttttggtctacatttgaagaatgatttacttagactgtaaatatgcatcaatgcatggaattagtaattactgcagtgatgaaatccatactgacattgtgacatattcatctttagaagttagcaagatttaaaacatctgtagctagactgtagttatgcaatctacatcagtatatgaatatctgtactgaataggactaatttaatagactgggtcatttgtatttggtagtttggcacatacatgtgaaatatataggtgaagtttaattagaatactattattggtcattctgaatttctgataatctgattaagtgagaaatctctatcacagtaataatgcttttttttttctaaggttagaaactcattcgcataggaattgtttacagttgcattgcacatttgcacatatgtgctaaaccgaaatgcacgttcacctccgaggaattaacttaatatgaatttggttatgtagcagaaatttttattatgggggtagagaaaatgtttctttgaatcttactatgttgacagttgttacaatgagaacttagtttgaaggcaattttaattgttaaacatgtgaaccaggtggtttccactgaagctagagca

SEQ ID NO: 106925 - DNA, 1008 bp, Aquilegia coerulea
  Intron number 2 from transcript AcoGoldSmith_v1.010718m (l ocus AcoGoldSmith_v1.010718m.g) derived from phytozome v7. 0 (chr-ID scaffold_14; pos 5165938 to 5166945 reverse stra nd)
taaacaacttgcatctggattgctcttggtcactggtgagttttctgttcattttatatctagaataagtaattttgttgacttaatgttgtttgtagatttgcttgttttgaatgtaatagtatgtttgggatgtgatgagataatctacgattatcagatgttcaattttattgttctatgctgaataattgcacgtcagtctgatcccaatttatcaattcaataattttgattgatgtactcttgtattctgaaggttggactgttgaatagaggcctacagctttgatgtgtaacattttatttaccttcaattggtcattttgttctgcgcaatatcttccttggctagtaacttgacccaatttgcttgggttcataaacattttgcttgatagcaacattcatgttttgatagttgcattctggttaatatttttttatctggtgatattctttattcgactacttggtatgccattttaagtggtttatccatcacatatgttatggaagtgatgatagactcaaacatcttatcagaggctcaaattttgtgctatgctgaatgttttgcacgtcagtctgatcaatacctttctcttcatgattcactataagaaatgatttgcagtttgtgtttatagttaatatggaatcttttgaatcattgttaatatgaattttgttgcatattattgcatctagatttctttgtatgaatggtgaactactagggtttgtttcatgtcctcgatattttagtagtcagagttagaagtggtagagactgtaatataaataatgtagaatgcaaattttaagtttgaatgaaatttaagctgatgccaatctactttgcccatatacacagagttaactttatttacttcacgtgtgtctagactatgtgctttccttgatatttcaatttatttttattgtcttgttcgaccagacctactaatatctctcgtcctattgttgtagggccattcaagatca

SEQ ID NO: 106926 - DNA, 958 bp, Aquilegia coerulea
  Intron number 1 from transcript AcoGoldSmith_v1.006451m (l ocus AcoGoldSmith_v1.006451m.g) derived from phytozome v7. 0 (chr-ID scaffold_4; pos 7959917 to 7960874)
agtgttcagagtccagaagttgaggttcagattgggtatttcattttaccttgcaaatgccttgaaagcttcaattatttttaatatttaagattacagtttgaaaacagtacattttcagtgtagagaaatttttatttttatttaattagaatgtaataattttttgtttgtaaaattcttagttatgcatgatttttgtatataatcaagaggaaacaattctactaggaatgacgtaattgccttaaatttagtgaagatacatggtttgtgatttgtttgcccactataacagagaagataacattataattagagcaaagtgtcacatagacatggttaaaaggatgattggcaacttattcatgaaatgtcggagaatgtgttaacttgcagtggggaagatgttcaactcataagttaaacacatagtactagttggtgtggttcgaggctaagtacattttgaatcacaatcaagttaatttcagtttgcttcttttttttttttttttttttttttttttttttgcatcgatacaaatatcccagagcaatctaggaagtaggaagtcattcttctctcatagaagcatttccccttctgcactcaaaatgttttcactatcaaattaatgtgtagtgtatctaaatggcgtcaaaaactttcataagtcggtaactcagtatcatttttcataataatttttttgtatttataaaacacttaccgagatctctgaaacactactcatattcaaaaactagaccatcacattgctgtcgatcttactaacttagtaaccttgttcccctttgcaataaggtagttcatctttgcctcttttaacgtgttggtctatttcatatatctgttgtttgatctttatgacatatatttttgagcgtgaagcttgcactaagtctgtggtatactggcatgtgattgcaggaa

SEQ ID NO: 106927 - DNA, 511 bp, Aquilegia coerulea
  Intron number 3 from transcript AcoGoldSmith_v1.001090m (l ocus AcoGoldSmith_v1.001090m.g) derived from phytozome v7. 0 (chr-ID scaffold_53; pos 324181 to 324691 reverse strand )
tgttccttcgagaactgattaggtaggtttcttccccatcctttagaattcgtagctgattagaataattctataggtaccatctcttttacactttaaaaggacattcatagaagaagcactgagtgccacctatcaaattcttaaacatgggcctcacgtgtgaactttagtgggattcgaggaggctgaaacaatgtcagtgtgaccttaactatgtatgatgaactgtatgccttctttctctgtgtgttcagacacgggttactttagggaaaggcatataagttttgatttttgacagcagtctcaaatgcttgtcattatagtgctgtaatctttctaaagtcattatgaactgatgaataggccaccacaggagagggaaaaaaaacttttgcatgtttacagggcttcttatctctcccagtagtgtaagagttgtaagactgtaaatcagctttggtgttttttggtctaacatatctttgtggtcgttttacctacagta

SEQ ID NO: 106928 - DNA, 308 bp, Aquilegia coerulea
  Intron number 1 from transcript AcoGoldSmith_v1.007882m (l ocus AcoGoldSmith_v1.007882m.g) derived from phytozome v7. 0 (chr-ID scaffold_14; pos 4504455 to 4504762)
aggtcagtgatgagtcaaacctttcatttctttgtcttcttcactacttctttaactcaatttcttcataatttatagtgtttattgattccatgttagtttaattagattaaatttcacatctttttgatttagaacattgtttgctgcaataaattttgaaaattttcatgatttctagggttttttttgatcttatgtttattgggtattgttcaattttagtaattatgaataaagtttgattcttttttagtttggaatattgtttgcttgataattgttgggttgatcaggtttaggtgttg

SEQ ID NO: 106929 - DNA, 971 bp, Aquilegia coerulea
  Intron number 2 from transcript AcoGoldSmith_v1.007882m (l ocus AcoGoldSmith_v1.007882m.g) derived from phytozome v7. 0 (chr-ID scaffold_14; pos 4505009 to 4505979)
caaagacgttgtaacttcggccttgccacagtcaggtagtattagggaatttagttttgattcggtttgtatggtttcattatattggatttccgaaattatattacctatatctgattaataggaaaaaaaaatttgtcaagattataatttttgtgtttccatgagatcttggtgtaaatatttaataggtgtcgggggctcatttagtgtggtggtgtagccgtgtacatataacccttaaaacggataaacatgatagtttgtacctactgtagggaaggaaatatggtattttttgaagtataaagttcttatttttcctgatataaaagaaaaatcaaatatctacactctgttacttatcttgattgcccgagacaatattcgactaatgctggatgaagaatatactagtggtataaatctcaacctgcaaataatttccaaaacaagtagaatggaaagtatgaaactatgaacacaagccaaaaagcatatcgctccaccatgccccctcagaccaattgagagcgtaattgggctgtaaggagtaagaacaatgcatgatttgatttaagtttcattgaattgattatatcaagtacctgtctgtgatggataacctcagtatcaaactatgcatcttgttggacgtaagtcaatgtgttttctggaccattaagttggaaaagttgatggttgatctcttcatttatggacttcccatttagttgagaaagatcaatatgtggatttggcatgtcatacattactgaacaactattcttcgtaatccaattataaactataaaggttattggtttgttcagatagttaaatttaatactttccaattgtttatctactgcgacaggatataccactatcattttggttggttttatgctgattacagtttccaattacatttagggttggagggaaatcagggccctggacaccggcat

SEQ ID NO: 106930 - DNA, 764 bp, Aquilegia coerulea
  Intron number 1 from transcript AcoGoldSmith_v1.009067m (l ocus AcoGoldSmith_v1.009067m.g) derived from phytozome v7. 0 (chr-ID scaffold_4; pos 8906682 to 8907445)
caacaaaatcttcaagtactcttatctccataaaggtgtgtatgtcttcttatcacttgtgattaagttgtttttgtcttttttatgtggttattgaaaatcgattgaaataagcaatgggttttccttaaaatttcattttctatggtgatttaagagatttttgcattttaagatgatgggtatctttttattttgactaattttggtcaaggaatgttataaattagtatgtgtaaaaatctgttgggtgtttgttatggaaaattgatgattcaagggggtaagaactgaacagataaaatatttttggattcaacaagtttcaaagtttttagctgtatgcaatcagctcacatgttgatgaattgataagaagttaggataaaaatgttttggaaatagattacagatttgcagtcttctttcagaagtcatttctgtcagaaagtcatgtattaaaagtcacaccagctcacatgctaagaagaataattttgattggttatattatgaggtggtttagaatattgattggtttttttttatttaatatatctaacaaatcaagaaaaataaaaatggaaatttgaattatgaattatcctctcctctagctagtagctacccttgtgttttgttcatagactgattatctttcattagagtttagtgaagcaaactattttcagaatttcattatatttttagtacttatatctagttgaactgagctttcaatcatgttgtttcagaatcttcaa

SEQ ID NO: 106931 - DNA, 898 bp, Aquilegia coerulea
  Intron number 3 from transcript AcoGoldSmith_v1.009067m (l ocus AcoGoldSmith_v1.009067m.g) derived from phytozome v7. 0 (chr-ID scaffold_4; pos 8908115 to 8909012)
gcaaaggatttatcacaagaaatgtaagaactctttcttgatcaagtggaaaacattttttaataggaatgatgattcctttaaaagaaaaagccaaagcatcaggtttttgacctttttatgtgctcaatcaagtatactctatgcttgcatcatgcattaagaggatgttttggaagttgtacttgcctacaatgacacagtacaccagactggtaacaaatacttgtctagttgtcttatttagctcaatacaacactaaatcagagcctcagtattcatattgaactaatggtgaaataatctttaaattaacgagcaggttgtgataggcctatcacagctctgttggaagcaatgcaagatgtctgccacgcgaaggagttaagttgcatttgtaccagttttagaaagttgtcaggtaagatgaaaatttgagccttgtagaaaaatataaataactttctctctcttataaaagaaaatcctctccgttccaagtatacttcagatcactgagcttcttgtaaacaatatcttcctttctggttttggtgagcatacagcgctaatctccctcaattcagattctcaatattcttacacttgaatatgatcctatttaaactcccattgtaccatcctgtttccatatcaattcataatgtagaagaatctgttgaaaggttcctaaaataaatgctgtcaaagttcttgatctttttatttacaagtttgtatgttgatcttgcatcgacctttcggacctatgatgttttagaataattgtttgaagccacctatcaaagacttccttttatttcacgccttaacattcaactttttaattgtagattgaataaataaactgatcatgtgatggcaactttcaggcac

SEQ ID NO: 106932 - DNA, 789 bp, Aquilegia coerulea
  Intron number 1 from transcript AcoGoldSmith_v1.002774m (l ocus AcoGoldSmith_v1.002774m.g) derived from phytozome v7. 0 (chr-ID scaffold_5; pos 2782072 to 2782860)
atttgaatcaaaggtccttactttatcactacttgttcgtttttatgctttaattgaacttgggtttgtttcaatttcaatttttagtataatttggttgttttttttgcaatttattgattaattgtttgtttatatgtgtgaatttgatcaagttttatgcccaatttgtattaaatttgaaaaagtttgaatttttgaatatttcaaatcaaatttttttgccagtttgatatgtttgcagtgtattggaatgtctttggtttgcagaaaataaatataattaatcaagttttatgcccaatttgtattaaatttgaaaatttgaatttctcaatcagaaaactttcccagcttgatacgtttgcaatctattggaatgtctttcgtttgcagaaaatggatataactaagaatttttttatttctgcaatgttggataatgagataatgaacaatcattttcataaaatggatagatttatttttttaattgcagattgtttttgggattcgaatgctgttttaatttgttcaatcggttatatttcccattggttggtaattgtgttcttttttgggaaaattttcagtatttggctatttggtacttggtttttcttttaatcttatatacggttatattgcatcttctctactggaactttaaaagtttaaagtatggatagcacactatacacttgttattttattccgattctatataaagttttgttgttgtttttttttccagatcaaagagaaaaagagctgcttcaagtggggaga

SEQ ID NO: 106933 - DNA, 388 bp, Aquilegia coerulea
  Intron number 1 from transcript AcoGoldSmith_v1.013983m (l ocus AcoGoldSmith_v1.013983m.g) derived from phytozome v7. 0 (chr-ID scaffold_41; pos 1243824 to 1244211 reverse stra nd)
tactagttcttcagcctcacttcatagtactacaggtaatatacttccttatatttatcctgcttttttctttgatgatcttggtgttttaaccattttcttaattcttttattttcactcctctttttgaatttgagattgaagaagttattataaattcttgcttttcaaactttttatgtacccaaaatgataatgtatgtttcatgcagtttgatctatctctttttaattaaagtcatgggaggttctgttttgaatttatttaatttttttttccactacatccatcactgatcactccatcatcttatttaatttctataccaaccttactatatgaaatgatggtgccattttaaaatttgtatgattaatttgaaggtg

SEQ ID NO: 106934 - DNA, 837 bp, Aquilegia coerulea
  Intron number 3 from transcript AcoGoldSmith_v1.003055m (l ocus AcoGoldSmith_v1.003055m.g) derived from phytozome v7. 0 (chr-ID scaffold_14; pos 1234799 to 1235635)
gtgcaaggttagttgtgtgtaccagttgacttttgacttatatcacatgttatatgatgaactgatatctacaaatccttacaaatgcgatttttacactttcacacgtatggtatgattttacagcttacagaagttcaatctgtcgagttgtgtttacagtgtctgttttatttaatgttgtacatttgttggattttgttatagaagccagaggctagaaacataacttagagtcaagctgcaccaattcatatgaatgattcataatctgtatatacacgaaaatgttgaacttagatataaagtttcagtgtacgtgaggtttgggggattcactttattcactttcactcagcaatctgtaccagtattatagttctatgtcacatgatcatgtcattggggtacagagttgttatattaagtggagaagttcgttttcttctaagttctctctttagtctttcgaactccatcattgaaattgtcattctactttttggaagtagtagtacgttccaatacttttattatttctgccaaaggccacatattattttgtttcatgttagttgccactcaaacaagataaggctacaggattagtttgtttcagtgattctatttttaactttagtggatttttttgcacaaaactccaccatatctttcttggcgtaattgctgataagtttatcgggtaggctttgattttcttgttcgttgcattgagtattagtcatgtgtgtgctattgtaatgcctcaactaattgggaaaccttggcctggctttgcattcgcaggaaagttcaggcaccttcctgtcgtagaaa

SEQ ID NO: 106935 - DNA, 908 bp, Aquilegia coerulea
  Intron number 1 from transcript AcoGoldSmith_v1.013417m (l ocus AcoGoldSmith_v1.013417m.g) derived from phytozome v7. 0 (chr-ID scaffold_76; pos 754700 to 755607)
agaatgtaaacacatttgaactcatacaaccatttcaaactgaaacagcaggttagtaaggcttttcctcaattttgatcttgagggacttttttttccagatgaccagaaatctacccatcctttaaagagttgcacctctgccacagtccaccatttggcattattccattgatttttaactttcctctcctaatggctcttagtcttactgttggatttttaagttccttcttgttcggttttgtttccatttatttcattgagcaggcttggggtactacagcttggaacattgtaaatcgctaaacactaacacaacttgcaactgtaacctacttcataaggaacacacagcttagtactgcacgttatagctagtgattttacgcgatgtcaatagctatgaatgaccaaatgctattatcttggtgtgtaggtttacaatgagaagcccacataatatccatagagagaatcagtgagataaatagctgccacaaatcagcgatggcacaggtgcaactttataaaggactgcttcttagcatacctcaataaatagattttactattttaggatggagtcacttcttaaaattttaaactgaataaccttgttctcatcatatttgctctcaaaggttttggtaaaaaaggtcactcagttgcagaaagcagttccattcgacttccccagagcagcctggcggcacaggtcataacttttccttgatcccttgcactttatattacgcatattatgcattttgttgtgttcatgttctagattaatctttcttatgttcattaccaaacaagttctaacttttgttactcgtatttgattggtttatgcactttccgatgtagagagtaagaacagggaagttgaagataagcgattt

SEQ ID NO: 106936 - DNA, 765 bp, Aquilegia coerulea
  Intron number 1 from transcript AcoGoldSmith_v1.021910m (l ocus AcoGoldSmith_v1.021910m.g) derived from phytozome v7. 0 (chr-ID scaffold_76; pos 296994 to 297758)
tacaggtacaatctctagttctctacttcctctttctaatgtgtgtgtgggcgcgtttttaggttgtttattcaaatgttttaagaccaaaacatagtaattgctctaagttaagaatcaagaatctatataaagttctgaaccacattaattgaacttttgttctgaatgaaggataattggacatagcacatagggtgtttgtttgcatctttttcctacaaaattaagaagcctttctaaagtttcaatcaagttataggcattcctaaaatttgttagggaagataaactattgagtaaggtcaagaatcaagatactaaataggggtaaaaaacccaaaaaattcctttcacgcactaaaaaacatgccatatgtgcaagtttttagcgcctaacgatattcagtacctttgctgaatccaggcagtttgtgtaaattgttcaataaatcttggaaagggttatattatgttaatagatttagtgttagaaatgttgaaatttgtcgattcgagattaaaacctctgctgctaactagtactgaatgtaaaagcacatgttaatatggtgatattttaggatttgatttccttcatcgaatagatttaggaaggaaatcaaatcctaaaatatcacatactaaaaatgtgcttttacactgaaatgagtttattgcaagtgtttatgggcagatagccagatactaatagttagtgatatatgtgatctgcagaggagaaaaagcattttgtagcccaga

SEQ ID NO: 106937 - DNA, 747 bp, Aquilegia coerulea
  Intron number 1 from transcript AcoGoldSmith_v1.009660m (l ocus AcoGoldSmith_v1.009660m.g) derived from phytozome v7. 0 (chr-ID scaffold_17; pos 2872414 to 2873160 reverse stra nd)
tttaccaggtaacctttcagttctctccttagttctcaaattcggtgtgagatccagttttggtaatttgatttgatttttttttttttttttttcaatttcagtttccttttttaaaaatagggttttatttatcattttgtgtgtagctagattacttgtagtttccgttgttagggattttttatacattgtgtggtttagattttttttttcctgattttgttgttgatgaccttagagtggaagttatgtttttcgttttttagaaggatggaagcgttaaagttgtgctcaaattcacttagaaatgtgactcaattacttacagttctgtctgtttgaccaaatttgaaatgagtacgatctgaattcatcttagagatttgtatttagtttgtcattaatatctcgtagtgtatctaattcgatgaagaatagggaaaactgtagaagagttctgcactctgagccttgaaccaggccgtgctagtgaatatctggaggcagatgaacctaaaacacctaggttataggctttccaagggatatttttgtgaggttgttgtaaatgtttcacccactataacatgaccctgttcttactggaaatctttctgatatatctatactagttattatgctgaggtaatataattatagttcaggaacctgcacagtttcaggactcatttcaaaatctctattgcagagtcaacaagcagcggttataccttttcaaatttt

SEQ ID NO: 106938 - DNA, 997 bp, Aquilegia coerulea
  Intron number 1 from transcript AcoGoldSmith_v1.002830m (l ocus AcoGoldSmith_v1.002830m.g) derived from phytozome v7. 0 (chr-ID scaffold_42; pos 1424665 to 1425661)
aagaaaaatcataaggaaaagataattcgtcaaaagtaagtagtagtagtctagtactagtttttttaatcaaaacccattttttctctttgttagtttcattcaatttactgattttttttttttttttttttttgatgtataatttttgtttttgtgatttgattatattgaatcattgagtgagttggtaataataatttacgttttatttaatataatgggtattattgattagttgcgaagatttttccttctaagttctaaccaaacaacaataacagatgactatgaatgcctattgcctcctgcgtcttttatatctttttaatgaatacaacttattaagtgaaaacagcattatttccaattccgcacaacacaagcaaaaaaaaatccccaaattgtatttcaccaattttttttttttttttttaagttcccagctgaacaaagcttcccttagcctcaaactcgaggcttgtcgatgtataaatggtgtactgttttgaaaaatatgggtacctattacttcctacctgataacacaatctaattattgaattagttacttagaaaaaggtattgctctggtgtactgtcatgcgattaccatttattgttgtacatatatttgagtgataaatgtcaactgtcctgtactgttctctaaaatttctaaccaggttacataccattctagattgttatgtgaattttaattagcttaaaatgtgtaaatgtctgatcctattattctaagttgtgtgtgcttgccgccctcatctgagtccacatcgtggatcaggtttaagtcctatcaaaacctaagggtagccacattgaaagatgtgtttgtttaataaactatgccttttggtgttaaattatggtgatccaaccaaactagttcttgtgcaaagaaaaagcattttgattttctcttatatgaaatttcatagggaagagaagaaagaagaagtggaattacccaaat

SEQ ID NO: 106939 - DNA, 354 bp, Aquilegia coerulea
  Intron number 1 from transcript AcoGoldSmith_v1.007076m (l ocus AcoGoldSmith_v1.007076m.g) derived from phytozome v7. 0 (chr-ID scaffold_17; pos 561394 to 561747 reverse strand )
gctttctcttcaatccctgatcgtccagcaacacagtaagatgatcttcttcttttcaaatctcattttaattttaatcatgttgttgacatcagtcacattgctctgatgattttgattttcgatttgaacagttttgattaaccctagatgaatttagatgtaagttggaagaaatcaaacgttgagaaacaaactacaataatcttttgcattaagagtaacactaacaagcgtttgagttactggaatttcatttaggtagattttaaggactggattcaccatcttatcatcttatgctttttcaattgttatatgtagaacttccttgcaaaagtacgcaccattaga

SEQ ID NO: 106940 - DNA, 539 bp, Aquilegia coerulea
  Intron number 2 from transcript AcoGoldSmith_v1.000647m (l ocus AcoGoldSmith_v1.000647m.g) derived from phytozome v7. 0 (chr-ID scaffold_14; pos 2482955 to 2483493)
ttgtggtgttacaaggataaacttgagattagcaggttctttttgttcaattcagtttcaacattaaactttcattttgttagaatgctagctgttgagtgatattttaagaagttggttttcgagagcattacacaataacacatttcatatacagctcaatttaagcatttgaagtttattgcaaaaatgaaattaaaatttgattgttagatcattatttaggaaggttatgtacacagtacactctatgcaaattggtttgagctacaaattaagggttaaatccagtttaggtcgataactgttagatcattattttagtagtagtttgacagactatgctttaagtagtgattataatgtaagatatattcaaatcactttttcttacttgtgatacatgctattgatttttttgtgagtgactgttttgtctatactctgtagaatactatgaagagtcactatgttatcatgattgtgtggttatgttggttgcagtcatcggcaaaaacgtcaaaaacaaattaaaaaga

SEQ ID NO: 106941 - DNA, 482 bp, Aquilegia coerulea
  Intron number 1 from transcript AcoGoldSmith_v1.025497m (l ocus AcoGoldSmith_v1.025497m.g) derived from phytozome v7. 0 (chr-ID scaffold_85; pos 525171 to 525652)
ctggggcaggggatccaataagaaggctgttggaggtctgttgccatggggtctggcggtatgttataacataaggtcacttgttatctgtctgtcgatttcatatcacttctcacactctccttttcatgtattccagtccttgtttttgtatctggcttttttttaacctttgtttgtcaattggtatcttcattttaaattggttgagatgttgaattgtcttttcacgcatttccattttttttattgatgtagagttgttcattcaagttgtaaagttgttatcgaggttaatgttaattggtgtagaattgtgcagtttgattcttcttacatgacatgctaactctaaagctgtttgcacttgatgttgtattactattacacttatttctgaaatcattgctgaggtaaatgcttggtgtttgaaatgtgtttctttaggcttgcaccatcagttggtctacaccactttgttt

SEQ ID NO: 106942 - DNA, 881 bp, Aquilegia coerulea
  Intron number 1 from transcript AcoGoldSmith_v1.006252m (l ocus AcoGoldSmith_v1.006252m.g) derived from phytozome v7. 0 (chr-ID scaffold_14; pos 2434884 to 2435764)
ttccacgtgtcgaaatcgcgtcctctgactcactggtaattacttttacataataacaacgcatcaatatctatcacttctttctttctctctgtttataaattctccgaaaaacgttgaaacattcaaatataattatagagtttcttttcatttaggtttcttgattaagaacgagagattgagagttggtctttttgaaattagggttttagttattcacattaataaacattcattttcaatttcaattccgtcttctgaagctttctttctttctcgaggtaatctttctttcgtgatttgtttgattatttgttctttggaagtatgtgttggtttactcttgattgattgatttgtttgattttgttttttttctttcaatcttatagattgatattgaagttgctatctttcttgattctcttttgttgttgttgttagagattttgttttgttactgttgaagagctcaagatattaatggaatcatatttccttttgttttgttttttataaacatttaccactttttatccttttatattgtggtattcttatttagtagtaaaagtgttttcttttgttgttatgtttgtttgagctgaattaagaaagattagtttgtttgtttaagttcaaatagccaaggaatttgaagaaatggatttgagctatttctttgtttctttctttttctttttttttcagattaaagattctcgtagtaaaagcgtcatagatattgattttctgaagaaagtcttgccagtatatttgtggaaaattttctgggtattttataatgggtgtagagaatgataatcttgttcaaaacaacagtgaaggtcgtctgccaggagaagcaaacaagattt

SEQ ID NO: 106943 - DNA, 937 bp, Aquilegia coerulea
  Intron number 1 from transcript AcoGoldSmith_v1.007830m (l ocus AcoGoldSmith_v1.007830m.g) derived from phytozome v7. 0 (chr-ID scaffold_5; pos 3345359 to 3346295)
tcatcgtaatcaaaagaaaaaaagctcaagcactagtaagttaaacctaaatctcttattgcattactcattgaatttaattccttacattttgttctatttctttttcaatctttttagttaactttgttgtgaagattttatcattctgattcctacaaaaatagattatgtcgagatttcaatactggaaagcaatttacatgccaaactatatctgatccgacactcaaaacatcttacattctaatatatagtaatattcgattttggaaaaatcaacatattttgtgggatatctacgaaatctgatggtatttcaaactatatataatgctaatcaacttaatttttccaaccccttccttgtaaattgtatgaatttgggactttgcatacaattgttcaaatgcttttagagctttagtatttctatgatgcattagtaaaattctatgtaacagttcaatatttcgtttattaaatttatttatctcaaaatgtgtgtttttcctttacaaaattcaatcaaaagatttgacatttatttactaatttcataattgttttttcataatatttgttttcatatatttaagttattactttgatttttacaggtttgacttttactttgttttttaagaaaatttacaaaagcacccaaccccaccaaaattttgctaacaaaaagtcaaaactgcttaaatatataaattacatcaattttactaagcaacaaaaggacccacttataaaaagctctaactctatagtcagtttaagcagtttgatagtgcttatgcggataagatgtttaactttatagtaattgtttcattggaaaccatcttcttaacttttcaataatcaatttttaagaaatttcattgaatcattatttgaattttacggttgcaatgatgtttcaggtgca

SEQ ID NO: 106944 - DNA, 464 bp, Aquilegia coerulea
  Intron number 2 from transcript AcoGoldSmith_v1.009987m (l ocus AcoGoldSmith_v1.009987m.g) derived from phytozome v7. 0 (chr-ID scaffold_14; pos 1565784 to 1566247 reverse stra nd)
gttcgccagcgtctgcatttggtgagtggtttttatttatctacggttaattttttcgtttattttgtatgtttgtgaataaattcatatttgtgcaaagataagggataaacaattaaatactttcagtgtttaagttatgttaagactacaatatgtagagatttgttgttgcagaaaaacacaataagatgaataaattagattgatgtaagaacagatgtctacgcctgtgacttgaaatgttgtaaggaagtcgtgatgtcttgtgatgccttttttgttttaatcttaactagagcagaagtataacgcaaaatatacttttgtttttctttctcaacctgttgcaagttgaataatctcatttgagtgtttatgtcctagtttgggttcttagcaaaagaaactatctgtctatctgatgtttggtttctgaaattattgtgtttcaggtgccaaat

SEQ ID NO: 106945 - DNA, 515 bp, Aquilegia coerulea
  Intron number 1 from transcript AcoGoldSmith_v1.009987m (l ocus AcoGoldSmith_v1.009987m.g) derived from phytozome v7. 0 (chr-ID scaffold_14; pos 1566338 to 1566852 reverse stra nd)
agtcaaccaaatctcttactcaacttgaagacttggtgagctttttcttttcttctcttcttcttacttcctcttttttattttcatcattattttgcttctgtaactattacttctgttggtacatatttctaagggtttgatgaaactacatgatttgggttttttttttttttttttgaattaaatagagtatttatgttggttaagagttaacacataagtgatgagcaagtgttatgaaagatttagggaattttgttattgcttttgaaatataataatggaagaaaaggaaagaggaaaaataaggaatatatttatttatgtgataccttttagatttacttgggtttctcatggtaaaatcaaatctatatgatattttaatttgaaggtatctttgtttgaaaggggtattttctacagctttatgtgttgttgatttggttgagtttggtaatttacgcattcaatctaggaatctgatgatatagcttctgttatgcagaaag

SEQ ID NO: 106946 - DNA, 992 bp, Aquilegia coerulea
  Intron number 1 from transcript AcoGoldSmith_v1.004142m (l ocus AcoGoldSmith_v1.003303m.g) derived from phytozome v7. 0 (chr-ID scaffold_14; pos 1381150 to 1382141)
atctcatcaacaaataaagctaaaaaactttacaggtgaagtgatgcaaactcttagacttgagttctacaggtactcttatattttctccattgaataacttttatatactgtaattgatttcttcactgctaaagaattccttttaattcacaaaatgtacactcttcttcctcttttgttttcattgtcattcaaagcgagttgatttgcttccagtttggactttgaattctattgaagaaagcccaagtccaatagtccatcagatttcataatgaacttgtttagtcattagtggtcaactggtcatgctacattggcacattgctacctttgacgatcgaagtgcgttacaacttacaacacgttaggttaagagagagacagtcgagagttttaaaacaaaagagtttacttgttgtttttggtcaggatattaaacaggtagtttgtttgttgcaccaattccacctacgtacgtaattagctaaccatgaatacaaaactagtaatattatacacacaattgttggatttactgtactagaatttttgtcgaaaaagaacaagttttgcaagacatagattacacttaacccaaaaacatacattttgtgctcaatcataattaattaattttagcttaaagtgaactcaaccaattagattatagtacaccgaatcatatcaaatcaaatcaaatcaaatcaaagatgtttcccactaaaaattgcgggaactatgaattgaaatataaattagtattatttactgtatgcaattattatcagatatggatatacacgtcaaatagcactatttgatgtgaaataataataattgcttgctatatgcttataaatatctatcttagtcacaataacagagaatccaaattctctgacaattcttgtttctgacttgttttgttctctctctttttctcgcctgcagcaatattagctatttcttttctaataagaataagc

SEQ ID NO: 106947 - DNA, 1033 bp, Aquilegia coerulea
  Intron number 1 from transcript AcoGoldSmith_v1.010059m (l ocus AcoGoldSmith_v1.010059m.g) derived from phytozome v7. 0 (chr-ID scaffold_23; pos 3652475 to 3653507 reverse stra nd)
caatctggcgctctagagactaaaacctacttcgagtaagcattatcctttctctcgattttatttcgatttgaattgaagaagttgtttcagtaattcgtagattgacctaattttgatcaaaatgttcatcgatttacctaactttcttaacctaatgccatgaatttgaattgaacatcaacattgttggatttgtagagatttctacttagtttcgttgaaaaaatcattcaattgagttgattctctatatctttccagttatttagattaaatagtgatatatctatgttgatattattattgaatgaatgagatggtttatttgtatgtttgagatttaatgttgaaggtttaggagagattttgttgattttttttttttcaaattattttcatggttaagagagtattcatcatatctatgattgatgttcacatcagaaactgtgtttgtatagaatagagttaaagttgtttttgtatacaggagatcttatcatgtaaggaagttcatggagcgttaattattatacgttgtactcattggctatttctgggttatctgttcttgcaaggaaagagttaacatagtaaatttgtctatcaatgttattttcttgttatcttctcttgctttggctgccaatagattcattacttggtaaggtttagcttgattgacgagatccaaccttgtaattttcacactacacagaaggacaaaaggatcaaaataagcacataattataaagaggaggaagtgatagagataacggtttcagaaacagattaccaatggctatagactatagagccttatacgtctccacttatatatatggatgacttccatgcttttctcgatttatacacaaaagcagtgaaatatcaaaaactattgttaatatttttgtataagtacattatctaatgactttgtaataaatgcattcatcatcttatgtgttcttgtaattttgatttgtaataaaaaattgtgctgtttttctttgaagtataattgaa

SEQ ID NO: 106948 - DNA, 1044 bp, Aquilegia coerulea
  Intron number 1 from transcript AcoGoldSmith_v1.012761m (l ocus AcoGoldSmith_v1.012761m.g) derived from phytozome v7. 0 (chr-ID scaffold_14; pos 5613750 to 5614793 reverse stra nd)
gccccaattgatcgctgttacttgaggcacaagtggtaagttatgttcttgcttcttcttttgtgtaattgttaataaagattcattctttttaactttctttttccgtatttaagatttgagtataaacatattgttgaaatggtgggatttttgaggattgattaatgttagagtttggattagctggttctagtttgggtctgtgtttttttcatgaatacacatcatgtgataaactgcgcaaagttctattgaattccttacccattggaaatcctgctttctatacattatttattttttgattttcttgtttggatttcttttgtgggaaatttctttacaacttaattcttctttttgaccctgtaaaaatcggtttatctaatgcgagactgacattagtaaactcaattgctgtacatgatatatcaactattgttttttcttgtaatagtatgataatctctttaaggaagtaactctgttttggtctccatagatctgtcatatatttgtgaagtaacttaaattaggtcctcatgggatggacaattttttcatagtttattatgtttggatatattgtaaatttgtaatgtgtatatgttttccacttttacaagaatctcgccccctccccccccccccccaaaaaaaaaaaaacacacacacacacacacacacacacacacacaaaatttcattaccaagttttaggaaaaataaataaaaatccttactaaatgatttcactaatgcattaagatcattgaatttctttgtcatattttatctaattactattagagtagatttttatgtactcactttttggtcaagccagttacacatgatagttacgcggaaatgctgttgacaagaagcttagcatgatgggggttccattattaaatttctatttatatcattcacggatttggtatggaaagaagttttatcctaacatatatgcttactacatgtttattcctttttttggcaggtatcgcatccaaagtgataaaaaagtttgcagtg

SEQ ID NO: 106949 - DNA, 698 bp, Aquilegia coerulea
  Intron number 2 from transcript AcoGoldSmith_v1.010844m (l ocus AcoGoldSmith_v1.010844m.g) derived from phytozome v7. 0 (chr-ID scaffold_20; pos 3039193 to 3039890 reverse stra nd)
gtttgaggacttgtgttgaagcaatacttgtggtcagttttttttttttttttctcttttggttgtttagttcttatagatttgattgttaattcaattccaatgatttaataataaaaatttaagtaaacccccaactttatagttttgaatcatttgattgtgttcattattaataatttcaagactattgtttggtgtggaaactggaaagtgtttggattgattactatcagtaattttcttgattgaatttatggagttagaaaggcgccatctttacccttaaaattgcattcttatggataattatacatttatacctaggaaattagctaacttaattctgatatacatattacttaggatcttaattatgagtgagtctattgcccatctatcaacttaattacctctgtatttgatttgttttcctattttattagaaagtctgttttctgtttatcttctgcaaaacttgcttggcattcacatcatggttgaatattgaaaatttacgagatttatgcttcgccaatctatactgatatactaatagaatgtgatttaagggattgctcaacctgaagaaaggatatgacattgatatggtatttttgtagtttgtacatgtgtttgggtcaactaaaatctattaatccttaattggcatagaatgtttgttcacacaggttgaa

SEQ ID NO: 106950 - DNA, 946 bp, Aquilegia coerulea
  Intron number 2 from transcript AcoGoldSmith_v1.001052m (l ocus AcoGoldSmith_v1.001052m.g) derived from phytozome v7. 0 (chr-ID scaffold_20; pos 1020887 to 1021832 reverse stra nd)
gaactactggtggtgcacctaagttccttagaaaggttctaattatttgttttaattttcttcgatctatagaaatttgatctcattcttgtttgatttttttttttttttttggtaaagttgaagactttgcactattgattgtggaatatttttattggaagagaaaaacatctttatgattggattgataagagtggtttctgacttctgactctctgtgaccatgtgttgttttcttgttggtttttctgtgggttcattggttagaaatagaaacatttaggcatgtgatgtggggttcattttattgaataaagaaaatgtgtttcattcatgttctttgtaacaaaaatatttctgaaagttagtgagaaaaaaacaaatatttctacataatgattaagtcttctgtaagttgattatgttttagatccagctagagtttcgttgttcagtaggcatttgtgagcattgtttgagtcattgcggcatggtcttaaatttaaggcatggaaaatgccgacgaaacatatcttgatctctatcagttcaggtacacgtaaaacatcagtggtatatctccatatacataccagcagtgccataccacactcccaggtccatatatacatactactagtaccataccacaattgtggcaatcagcttttggcaatgtatataaattgtgattgaaccaagttgtggatcaacgtttttatattttgaaatgtgaaactaaaatgtagaaacaacctctccatccacaacatgtcagtcatatacctcacgtatcatattgccttttcccttttgttttttattctcttcaggaccaagaactttgtgactgtctattcaatttatttcctaattttgatatttaacaattacaattactcttgtagctagtggaaaatattgaagaaactgttggaattgg

SEQ ID NO: 106951 - DNA, 678 bp, Aquilegia coerulea
  Intron number 1 from transcript AcoGoldSmith_v1.002797m (l ocus AcoGoldSmith_v1.002797m.g) derived from phytozome v7. 0 (chr-ID scaffold_4; pos 4908605 to 4909282)
tttacaaaactcagaagagtttgaagctccattaggtatactttttgatttaggttttttgtagttcatttatagtcaattttctgctatatattgtgaaaatctgctgttagatgtagttgttagtataaagttagctcatttaagcaataatatgttcgtatgttcagataatcttatgtgctcttgtgtgattaatgttctagggcatattatgattgtcctatttaaaatgaagatagtatctctgcaaaaaaataatcttaacagatttataataaatatggtgaagattagggcttttgttttaagaagattctcttcaaatcttgtttgtgtttatttgtttggtggaggtactttttaaagcattctttttaaattctaattgtaaggcctactttaaacaatagattctattgaatctaaagcaccttattaggctgaataatagtgtggttctgtcgagtttgaagctgacaaatgaattatgttatttggatgttgttcatttattgtacttttaagtatctatatacaaaaggaacattttgtttattaaaaagacggtggatgagaaaagtaaatattgtttatgggctatgatgtatctatttaattttcttttcatttgcgggtgcaggatctaaacctggaacatccccaatattcaagatt

SEQ ID NO: 106952 - DNA, 555 bp, Aquilegia coerulea
  Intron number 1 from transcript AcoGoldSmith_v1.000023m (l ocus AcoGoldSmith_v1.000023m.g) derived from phytozome v7. 0 (chr-ID scaffold_53; pos 1634846 to 1635400 reverse stra nd)
aagaacagctatcaagggtacttgaaagtccttcagaagaagcaaacagccccgaaatactttaaaaagttggaagtcttgtgggggtagctgttccacagggatgtaaactacagaggatatgtgagatcgattaactatcagctatctcagaactgcaaagtctatcaaagggatcggaagagaaaggatagggtgtcacatcctttggagcaattacgagccacatctgctcctagtagtggctgatccagcatcaaagaacacaagggaaactttgagtcctaatgaggctcaaaggttaaggggatgggtgtagggaggaaatttatagaaatgagatctttaatggggttttttgtatgatggattagtgtgaccatctctttcacgctgtttaatacaatttattgttttactgtaaaaaaaataaaataaaaaaatccttcttgtgttagtcctaaactgttgcatttcaagcatttttttctcatactttgagtatacaaaataaccttagatatctttacaggctattggtccggaacttacatt

SEQ ID NO: 106953 - DNA, 776 bp, Aquilegia coerulea
  Intron number 2 from transcript AcoGoldSmith_v1.010394m (l ocus AcoGoldSmith_v1.010383m.g) derived from phytozome v7. 0 (chr-ID scaffold_14; pos 4262390 to 4263165)
tagtgggcaatctcgaatatttttgaaactagtgggtaatctctaaatggcaattagggcaatctctaattcaccctaaatttttttggatgggaagatgttaaattcatgttgctcaccagtgtcctaatttactgacttggaatttggaaacctacattttcatatcattgacaggtgcttttcattctaaacgtgatctcttagtttccattggttccccctagggctttcactaactgtcaagcattttacgacctttttattaattatttgcggtgcaacctatactttcaactgaaccttattgatgttctatggagaatcattaagcgagagacacaattgtttgacgaggaaggatgtgtttccactaattttatatttagcattaagatgctgaatatgttttctcaaagtttctcaaagggtgaaggttcatttgaatattgaatattcgaatgatgggaggtgtgttttcgcattaggattcggtgtttgtttgtctttctttataggttaaggacttaaggttttataccgtgtatattataattacttaaaggaagttgattctttgtattgttagttagggttggttttggtacaatcattgcatggaatttattctaggaaaatgttcttgctctttggttaatataaatacgttgctttggcttctttttcccgtttttcatgtgcagacttcttatatggtaacttttttccattgtgattgcttaaactttatcttatctgtgcagtgatatattacc

SEQ ID NO: 106954 - DNA, 466 bp, Aquilegia coerulea
  Intron number 1 from transcript AcoGoldSmith_v1.006984m (l ocus AcoGoldSmith_v1.006984m.g) derived from phytozome v7. 0 (chr-ID scaffold_29; pos 973751 to 974216 reverse strand )
gtttatctcgaaaacctgctgttcttaaggtaattctttttcctttttttgttaattattcttttggaattcaatatgtggagttttgatttatttattttttaaatgattgaagctttttttcttcttcttatttcttaaatagagatagaaatctaccatctatgtatgtcatacaagtttctgtagtagaacctctattgttttgtagtatttgttttagacattatattttgtggttttatgttagaatgatatgatataaagttataaaccatgggtgttaggttaggtgctagtgctgccgcttttatcattttttgttttaactttgaaatttgttttattttcttaatttatttattgaaatgataaactgtttttaggtgcctattggtcatgaacctaaatttcattgtcttatttcttaggttagagactggtatttagattctttccgtgatct

SEQ ID NO: 106955 - DNA, 524 bp, Aquilegia coerulea
  Intron number 2 from transcript AcoGoldSmith_v1.018502m (l ocus AcoGoldSmith_v1.018502m.g) derived from phytozome v7. 0 (chr-ID scaffold_53; pos 449504 to 450027)
gccatcaaaacctactaattataggtaattaattgatttctttctactcttcctagcttctcgttggacttcaggcatatcatttagttcgatcattcttagcatacagatcgaataacttagttttgctttcaaatatacatattattcagatacacttttatggggaaaggccggatatgttgtcagacacggattttacacctttgacaacatatcttgtaatttcaactacctgtaaacatgtgttaatatacgttttacctacttgctggaacaccaattccaaacatgaactttacacacaatacactatctttgaaatgtggagtgcatttgacaaactgttgcgtgaaacattctatcacataccctatgcaagtacagtttctggttactactattccaactggacatattcaaaacatgaaaaagaagctgatcaacttatggtcttatttactaatctttattttaatttgctaaatgtcctgtttaaggttttatttccttgtagagaaaca

SEQ ID NO: 106956 - DNA, 952 bp, Aquilegia coerulea
  Intron number 1 from transcript AcoGoldSmith_v1.002965m (l ocus AcoGoldSmith_v1.002965m.g) derived from phytozome v7. 0 (chr-ID scaffold_17; pos 2324048 to 2324999)
tactcttttgctcaggtaccaccatttcacttaactgttgccatttttttttattttttatttttgctattttctgtactcaaattgattgatttttctttagactgaagtatatgttactacatgttgttggtagaatggtactatgataggtatgtatttgggtattttatggaattggttttgatttactcaagttgaagttcttgagtttggtgtacttgattcctctgtttttgactttctgtggactacttgattcccctgtttttgatttggaaaatggattctggtcttgctttgatcttctctatttgaaaccataatttgggtagtctttagttttactaaatttggattcattgacttggtttagacttagttcccctgtttctcaactcttttttggaccaaaagtcttacatgatgagcttcctatctctttctcagtgtaagatctatcagtgaagagatatagtttgtttatagtcatcttgataaatgcgtacaaatgtcgcttaattgatattctagacatacaatcagtctgcatttgttttgtttcaactaatttaattgtgatttactgaattttgactttttgcatatctgaatgaatttaacatgatatgcatgtctcctgaagtatgtgtaggttcacttgtattgtcgtttatgattcttttttatttgaagtatatgtctttacccttttattcaatcctgctagttttgtgtgtgcccaagtccaactatctaattaggaatcatgtgggatgagttgattttttggattcggctagctaatacatatgaattttttctcctctattgaagtattcaggttaataatttacagatatctcttgatttccaagcattatcacttaattatgtttcttgtggcttatgtgtagagggacgatacagaggtgcttgacgaacctctata

SEQ ID NO: 106957 - DNA, 760 bp, Aquilegia coerulea
  Intron number 1 from transcript AcoGoldSmith_v1.005483m (l ocus AcoGoldSmith_v1.005483m.g) derived from phytozome v7. 0 (chr-ID scaffold_20; pos 657771 to 658530)
caggtatttatgaacttctagctacttcttcttcttcttaaaacatgttttttatgtgaattattgaaaagggtatcttcaaaatttgattttttattggttttatgattgattgaggtcttgtttaagatctagaaagtgtattgagaaatgggtttctctgtattttgatgggttttcttagatttctctgtaatatagaattgtgttttcagaagctttgtttgatgttgaagctgcaattaatctttgaggtcttatttggctgtttgaatttgtttgttttgatccttatgttattttcccacaaaagtataattttgtttttttgaggaagttcattcaaatcaataattcattttctatcatgacatcatactgctgattgagaaattagacttcatttgcttccctttttttttgggaaaaatataagtttttgtttcacttggaaatttatttgtgtttgtcttaaattcacaaagttaattcttggaatgtttggatccatccaaagttgcctttttactgtaattggttccacaactttttaaaggaatttatacacactatgttcttcaatttgattgtcggtgaagttggtcacttcaattttgtgatatgctaataccccgaggaacaagcatagacaactttatatgcttcttacattcaaatagatatgtaatggatgtttgaaactggttttgtgtcttacactaaaactatgtctatgtagctactgagacacgatacctaa

SEQ ID NO: 106958 - DNA, 584 bp, Aquilegia coerulea
  Intron number 2 from transcript AcoGoldSmith_v1.003534m (l ocus AcoGoldSmith_v1.003534m.g) derived from phytozome v7. 0 (chr-ID scaffold_5; pos 2991816 to 2992399)
cttctgttgctagatatcagtttagtgattctgaggtaattagtttactatttgtctttcttttcattcaattgaggttttagtatttatgagatggtttagggttttagggttttgaacttgttattgtgttttggaacattgagttaatgcacaaaccaaaattctgatagaacgaaagagaaaagtagcaatgctttagtgtcgcattgtcctggtttcttcaaattggcatgcttttaggaatttaattactttgaatgtgattggaatggaagtgtttggtagcaggtgtttcctaatggaatgctgctgaatccaatactattgatacgcttgtcaatgaattgatcaaatttacggatgttgtttttctttctaaataagttaacaacatggaaatataagttttacagaagagatgtttttcgtaataacattttagagatgtgacttgaaggtatagaattgttattgttgtacggcgtctgtagaaaggccattaattattaaatcacattagagtgtacataatatttttttaataaattcttaatttgtttatattgagtattgacagagtg

SEQ ID NO: 106959 - DNA, 213 bp, Aquilegia coerulea
  Intron number 1 from transcript AcoGoldSmith_v1.015438m (l ocus AcoGoldSmith_v1.015438m.g) derived from phytozome v7. 0 (chr-ID scaffold_38; pos 2023511 to 2023723 reverse stra nd)
tttgccttttcttcatcattcaattcaaaaatgtattcgatctttcttctagctattcactagtttttctcttgccatgttctttgttattcaatctaaaactgttgttgaggttgttgttgcacaaagaatatgtctgtcgaagcgcgcacacacacgtacatgtatagattgattaattgagttgttttttgatttgccaatgtaggtaaa

SEQ ID NO: 106960 - DNA, 811 bp, Aquilegia coerulea
  Intron number 2 from transcript AcoGoldSmith_v1.008995m (l ocus AcoGoldSmith_v1.008995m.g) derived from phytozome v7. 0 (chr-ID scaffold_14; pos 3583445 to 3584255)
taccctccaatccatcaggtttgcatagtttattactgagtttatactttatagtttccgtactcatttgttgttagtcgaacaatatttgttgagtttctttactataaaactaaacaaagccttcttgagttgataacatcttaattgaattcaaaccaccttctggtggattgctcatcaaacaaccaaaacaaaattttcaattgtttgatagcatgagggggatccttggttggacgtgtcacattcaaggatcaaactttggattaaattaaagccattatgtaagttagtaattttagtgcagtttgtggcaaattagaagaattggaattgatttgaaccagcctaaaaaatgcatgacacaatacttgaggaattttgagctgcaaccagttcgctcaagattaccgtgtcccaggactagtcacagtagctaattgtagctgagttcaattaaagaaatatgagcttatgtaaacctcaatttatgagttcattctttcttggttccgttaagtaaatagaaaagacattagtttgtgtgcctgttgattaacaggttggtcatgccatagacatttgcaggatagcattccagtctcacatttatggattaaaattaggaacctctgagaaagataacaaccaataaaagattatgaaaaactttcaacaggaaaagccatttcttcattcattagatttacattttaatactgttacaggattttgtttcaagatagttgcatctgtggacatacatccacttactgcttgttctatttgattttgtttcagtgtacca

SEQ ID NO: 106961 - DNA, 770 bp, Aquilegia coerulea
  Intron number 1 from transcript AcoGoldSmith_v1.020728m (l ocus AcoGoldSmith_v1.020728m.g) derived from phytozome v7. 0 (chr-ID scaffold_17; pos 931070 to 931839 reverse strand )
ttcaagaagtaagttttctctctctcttagggttagggttttgttacagtttgatttaaccgttttacttaaagaatattaattttcaatctttaatacattttacctaattgatcttgttcttcatctataacgtatcaaattcatcacttacatgcttagttttacattataattgagtttctctaacttgttattgagttttttgataattatctacaacaatatgctgcgttatggtgaaactggaatttgtttttgcttatttcaatagtttgtaatggttttcattgttttgtaatataaaactacaatatgtgaatgaagagtttaaattaaaagtagaccctgaaggtgcaacttttggtgtaaatgtgtaataggtagaattagagttgcattggacctgaaggctcgattgaggtcttaaaccattattctagtttcttaagtctgatatggatgattctaacatgatatcttgattggcaaagattcatcgaacattctataccttgttatctagtttcttttgtccttattgagttatcattatttatcattcatttgtgacgtaaacattgttgtaaaatataaaaaaaccatgaactaacactcttaccatgcaaaagtagttgggatgaatcattatattactgatgttacatctccaactgcaaatttccctctgattgttactttttctctgggttgtttttcttctttcatctgcaggttctcttctgaagagatctctggtcaaaatcaag

SEQ ID NO: 106962 - DNA, 317 bp, Aquilegia coerulea
  Intron number 1 from transcript AcoGoldSmith_v1.003716m (l ocus AcoGoldSmith_v1.003716m.g) derived from phytozome v7. 0 (chr-ID scaffold_29; pos 514426 to 514742)
gcaacgtcctcttcatccactgcaggtactttgctttgtttaagatctctatctgtctttgaaatccattatcaagaaactgtgttaaaacagcttaatcgtacccattgttgtattttgagctgatttcttgaatacccattttctaaatttgggtgatttgttgtataatcagatgttttctataatcactcattagaccttagggttttgaaattttcttctttttcatttccatagtttttcttacatagattaaagttacaattgtttggattgcagatagtgggaattgcagtatacagttttattgttgc

SEQ ID NO: 106963 - DNA, 854 bp, Aquilegia coerulea
  Intron number 1 from transcript AcoGoldSmith_v1.005521m (l ocus AcoGoldSmith_v1.005521m.g) derived from phytozome v7. 0 (chr-ID scaffold_114; pos 315141 to 315994)
tacagggaagaagctcagaacggactgaagttcaggtatgaacagttgaaggaagatgtatttgaatgcataattgttattgcacttaatacaaggaatctggatatttaaaaccataactaaccaaaaccttccttagaaaatgtatgcgtatgcttatttttctttcccaagcggcttaatccatccaaacaagtccaaagacctttaactacgatcaaacatttgatgcaaaccttgcaggaattaaaacttctaatacgtcaaattctaaaactcttttactttgttccttctcatcttgctttcttcaatttgattctctcagtgcctcttacgaaacttcatagtgtactttatgttattctaacttctaagagtatgaaacggaaatgacttgtactttcagataagctggacatgcaataagttgcatataattttgaccgttcatcattactgtatttatgttaaaagccttaagggccggcaatgactaagaaaatggaaatgatgtttactcttaaatgagctggacatgcaataaaattttgacagttaattgttacctctgtaaaaagtaaatcctagtctcctatgacagtgctttcttacctaaagccatccaatttttttttgaagaactctacttcactgattaaccattacgttccttaaagctagaggatcttactgcgagcattagcatataactttatatcaaatgataaagtccataaattttagtttggcctctttatttatgtggttctctttgcaaagttctcttataatgtaatgcttaagctcgttcatgatctaaagaatgagtacatgattaaacagacaactgt

SEQ ID NO: 106964 - DNA, 933 bp, Aquilegia coerulea
  Intron number 2 from transcript AcoGoldSmith_v1.005964m (l ocus AcoGoldSmith_v1.005964m.g) derived from phytozome v7. 0 (chr-ID scaffold_42; pos 456232 to 457164)
tttctatttggttctacgagctctcgataccgttggtttgttctttctttactctggatttttgtaattgatgaatttgaatctttatgcttattattttgttacacgaattttgatatataagttcagttttcgcgattttgaaatttagtttaaattgtatgttcttaagaaaaaaattggttatagtttcagcattcaactcaaatttagctttgacatgattgctaatcgttttgaaattatactctacatatagtcgagaagttcatgtcgtattctttccgtgatatattcgatatttgtataaactgtacagaaaatatcacatttgtaatgttggtaagggtcctccatcagacttgaatacctacaatgttcgtatgattttatgtcttctctgtaatttccaaaagtgaggttttatatgagtttaaggagctttgggtggaatttgcagtttgtttcccatcagtgtaatgtaaactagtcttttcaataaaggtagtttggtaggtgggggggaacatgttgcaagagaaggcatgtactaggtgcactcatagttgtaaacaagtctatctttaaataacgcaatgtggtgggtagggggaacattttgcagcagcagttgtaatgcctgtttcttgctattcacacttttacctgcatatgttgaaaccgaatcacttggaagtttagtcctacattcactaacaaggctagcaataggctttcagtatataatgtttctgaaacaaggaaagacattatatcgttcatcttactacaagtttgcaataataacagtcatatcatcatttgattctgaggtattaaataaataaaatacaaagttcgtcgaatgatgatatgtgtttcttgtgttcacctttttctgttaataatcgccctgttgttattttacagagg

SEQ ID NO: 106965 - DNA, 439 bp, Aquilegia coerulea
  Intron number 2 from transcript AcoGoldSmith_v1.023560m (l ocus AcoGoldSmith_v1.023560m.g) derived from phytozome v7. 0 (chr-ID scaffold_4; pos 1677322 to 1677760 reverse stran d)
aggtaatttagtgataccaactcagccaagcaacggttgttcattctcatcagtctcacacgtaggtggttgtggaccaaattcaaataacaagttgctcgtatcgggtcagggatgcggggtactgcactaaatatttgatactaatagtagtacgtcccacattgcagcaccctagttgagttatggactggttgataattcattttctcaaggtcaaggatgcagatgcagactcatgtatacagtatacctgacaaaattaatatttcatccacatgagaaaaaacaaacataataaatcccaagattcaatatggaatgagaaaaactttataaattcttgtttattaggtttcatttttcttcgagtaatgagtataatatttagttacttgaattaggtggtaggaaataatttattcaaggttttgaggga

SEQ ID NO: 106966 - DNA, 592 bp, Aquilegia coerulea
  Intron number 2 from transcript AcoGoldSmith_v1.002932m (l ocus AcoGoldSmith_v1.002932m.g) derived from phytozome v7. 0 (chr-ID scaffold_14; pos 5703559 to 5704150 reverse stra nd)
ttactcattcatctcttccagtctatctgtttcaggtattttttttcttcttgtctttgtttgatctatttttgcatcaataaagcttcaattttggtcatcttctgctactgaggttgatacatttctagtctcttagaggtagatttcatttactgttttgctaagtcactatctgattcaaaacaggacactataggttcaattgttaatctatgctcaaaattccaattgttaaatttgatcgtttactatctctcaaatccataccatgaactgatacaggattaagttaatataataactaatgtagacttatatttacaaatttgcagaatttggttctctacattttcttccattttctacatcttcacatttgcttgtttttttgcttggagttaatttttaccccttaatgctgttcatggtgattggtttttttctccttctcatcccataattgattattgccttcttatatactgtaaactcaataccttaagctacttttctgatttctaattcatttcatttattgttttgtttttgtctgttggtcttattgtttaggcgccgccttttttattgg

SEQ ID NO: 106967 - DNA, 608 bp, Aquilegia coerulea
  Intron number 2 from transcript AcoGoldSmith_v1.013317m (l ocus AcoGoldSmith_v1.013317m.g) derived from phytozome v7. 0 (chr-ID scaffold_14; pos 5851092 to 5851699)
attgttcatttgcaagctttattgggtaacaagtaattctcaaaactcccagtctcttgtctaaaaagctaaaatttaaaatgctaataaactaatttaaaacaaaatgttcatgatcaaatatgtattagatattggtcacaaacaaaacaatataaataaatcatacttttgtatatcttctaattcaacaaaaccatagcttgacttctctcaatttctccttaaatctacctagacgatggttcccataatgtagaaaatgaacattaaagggagctatggaggcttttatttatagtcttccatcaagacctttgagtttcttataatgaatagaattactactaaatagagacataaatcactgtaactcacgttgtaaagtgaaaaacaaaaaagacttttatatatatatatatatattttgatcttctgctttacaatatattccatttattcttaattataggttttagctatctaattcgaaaaattaattttcaaaatcttaaagatatattgatcaatgtccaataattaattagttaacacattttatatataatcaatgcaaataattattccacgcgtgatcatttatatag

SEQ ID NO: 106968 - DNA, 377 bp, Aquilegia coerulea
  Intron number 2 from transcript AcoGoldSmith_v1.010609m (l ocus AcoGoldSmith_v1.010609m.g) derived from phytozome v7. 0 (chr-ID scaffold_38; pos 1272851 to 1273227 reverse stra nd)
gataacgataacgatttcaccttttgtaaggtgagtcttagttgcctataattccttatttacatattttgaaaattttgagttagggaaatatgtagcaacacaatcaatatgtagtcttgaagtcgtttgaaccaaagtaaaaccattgatcatttctgcgactgcgttattatgttgaaatcttagtataacggcattgccagatgatttcactggatataatttagtactttagtttcttcgtatagagttattcactggaaagcttgtaacaaattttctgtttatattactttgaaatagttgttgctactcaaacctaggagatttttcatacaggttgctttgccctccgatcaagaaaatttggaagg

SEQ ID NO: 106969 - DNA, 879 bp, Aquilegia coerulea
  Intron number 2 from transcript AcoGoldSmith_v1.005268m (l ocus AcoGoldSmith_v1.005268m.g) derived from phytozome v7. 0 (chr-ID scaffold_23; pos 3151034 to 3151912)
aagaagctgtaattaaacttgtaagtatttcgattacttcaaacttttgagctgaaagtaagaaaaatctgaacttgattgtttatcatacttgtttgtattagttttatagttgtttttgattatttttacttggaactaggttcttttacttcttttttggatagtttttgattaattacattggacaattcatttgtgtataggcaaacccaaaagaggaaaagttttagttattcttctgcaacaattacaaattgaagcttgacgatattttgtcattaatcttattgagaatacaactgatcttggaatgtcactttcttctatatggctatatataaatccaaaaaaaaaaaaaaaatgtttcggaagttataaacttgttacttgtccgaggcctgtcgtccaagttgtgtgtatcttatttgttttatatatcacagtttagtttttgagtgaatacctgatgattgattgctgttggtacatgttgcctggtacacttaaaaaaggattttcgaactggagaaaaaaaaataggaaaagtggaatactgaaaatttcattcaggttttttatttgttgtaattttcactaggggttgttttaatttccaaatttcatgtttaaaattcaattttttttggtatcttattaaccttatcaatattttttatttttattttcttattcattttaagaagaatgatgatatattttaattatatgggtttttcttctacttctttaaatgtattcatcaatggttccattggtattttgggggaggtgagggttgggtttgtattatcttgtacatgaaatcgcgagtattaactattaagtactaactatgtttgttacttgactttgtag

SEQ ID NO: 106970 - DNA, 1013 bp, Aquilegia coerulea
  Intron number 1 from transcript AcoGoldSmith_v1.024658m (l ocus AcoGoldSmith_v1.024658m.g) derived from phytozome v7. 0 (chr-ID scaffold_125; pos 107955 to 108967)
gtgtttatatttttatactttttgttgctgataatgtatgttatgtaaagtagtacctaggtagtaattcaggatagtgtgtaaataaataacattattagttttttttttattttccgaatgaagtttatgagtagagtggagatattaaaatacgaatcaatgtatttgtgtgttactgtacataaatgattttgagttatttctgtgtatatttatacattatctttaagttgtttgtaatgtatgtttatgcatagtagtacctagttagtaattcaggataatgcgtagcttcctagatgatgctgaaacatttctacaaaaaataggaagagaaacataagttttgtttttaatcgaaaacaaatatgattgtagccttgtaggccttgatatatgactactacaatacgcgatggaaaatgataacattattagtttttattttccgaatgaagtttatgtgtagagggaacaattataatatgaatcaatgttaatgtgtgttactctacatgaatgatctcgaaggttggtagatggtaactagctttgtgacagaaaacaactggttgagtcatatatcagacatgtctgagattgatttctccttgaccaatgtttcccgatataacaacatacaagatgcatcttacattaactttggaatataagatgcatcttagagtgatgcacctctagcaccagttattcagtttgagtttttagaattaagttatttttaaggtacccaacaagtgaaaaaagaatatcataagctaaaccttatatgttgttatgtattcgctgtacagataacttctctgcttattgaggctatcgcatggtgctctatgctgatcatgattggcgtagaaactaaaatatacataaatgagctccggtggtatgttcggtttggagttatctatgttcttgttggggaagcagtcttgttcaatcttgtcctctcagtgaaggaatacttcaacaggtgagttatctgattc

SEQ ID NO: 106971 - DNA, 629 bp, Aquilegia coerulea
  Intron number 1 from transcript AcoGoldSmith_v1.004345m (l ocus AcoGoldSmith_v1.004345m.g) derived from phytozome v7. 0 (chr-ID scaffold_38; pos 2159832 to 2160460 reverse stra nd)
caataacaagaatccttcactttctctcttttaaggtaaagaaataatttttttttcattctaatcttgttattctttgtttgaatatgatcttgttttcttcttcgttaatgtgttttatggctcgaattatagctaatgatgttaggggtttttttcttagaattttacaaaaaaggttcattttattttatgtttgattttactgaataagagattttagattaataatgtagcttgtatcatggtaggttagatatcaagatttgggttaggttttataatgtaggtttgatgattatcattgtgattactatgctagttttcttgaaaaaaaataattggttttttatttatgattttaatgatgattgcagtcaagttaataatacaatgatatttacccatctatgatttaaatttagatagttcaaatagatttagtattgtatgatgaaattcttgaatgcatcgctagatttttttttttctagatggaaactaataattttgttctagattgtttaatttttagcattttatttatgaagaaattataatttttgcgagtttgaggaaattgatggtatttttgtatttttatgtaattttacagctgggacacagta

SEQ ID NO: 106972 - DNA, 438 bp, Aquilegia coerulea
  Intron number 4 from transcript AcoGoldSmith_v1.013187m (l ocus AcoGoldSmith_v1.013187m.g) derived from phytozome v7. 0 (chr-ID scaffold_20; pos 1382168 to 1382605 reverse stra nd)
gatactagtaagtcatctttataagtttattgcgtatgttctgattattgatttgttattgaagcagctttagttgggttttcaattgttgaaataatttttgttgttgataaaatatttaaaatgcttggtattatgttaggttggaattgtggtgttatttctataaaatctactactgagtattgtttgtgatggctgcaaaagtaagaaacatggttttatgaagatggttcgaaagtatttcttcaaaatttgaataaatagcatattagcataggttcaacagtcccaaatttgacgtatatagaactgttgattacttcatatggagtcatctagcaaagcactttggtctgttagatatgtagtttattactatcagtcgtatttagagaacaattgtttacaccagaactttgtttttgtgtagtatac

SEQ ID NO: 106973 - DNA, 825 bp, Aquilegia coerulea
  Intron number 1 from transcript AcoGoldSmith_v1.003891m (l ocus AcoGoldSmith_v1.003891m.g) derived from phytozome v7. 0 (chr-ID scaffold_4; pos 6651420 to 6652244)
tattcgctgaccattcgatcatattaacttcccaggtatgtacttgatcatttttcttgtattctatggcataaacaatactttcatatcaatttcatacatggtgatcgcaaatatctgctctataaatgcctccaatctgcctagactacgcctactacagacaaagtaggcaatattcgttagggtctacaagcggttcaccaccatctcaaccattctcagatcaattattctattgcattcacagttcattgatgattatgatggttgtggtggactagtggcggtggtggtgaaccgctggaataggtttcagggtataactgaaagtataattaagtcacaagtagttattcatgttgcttgtgatattcttcagttctgcatgtgcagataacaaagaccctagctactaggtagaatttctttttggaaggtgcattgatgaaaaccatagtggagtgtttgacgaggactgataacagacctcagaaagaaactaagattaggaaaaattgttcaaaagaaatggatgtgaaaagtttctctattttgcaaacaattaattgacttgcagagtctactgtagggtctgtcacattttgatgaagttcatatgggcaatactataattccatttactaaaactatcatggtcatttaatctatctgtcatatatgtatgcagtactcttatagtgtctttaaacttttgttacatatgctggcatagaactagtgtctttgaactttcatccaagtgttaccatctctgaatttctatgcattataatatccaggaaaggtgcattgtgccatcag

SEQ ID NO: 106974 - DNA, 341 bp, Aquilegia coerulea
  Intron number 1 from transcript AcoGoldSmith_v1.011804m (l ocus AcoGoldSmith_v1.011804m.g) derived from phytozome v7. 0 (chr-ID scaffold_5; pos 6011823 to 6012163 reverse stran d)
tgttgggacagttttgaaggttgtctttccagaaggtatgtttgatattagctctttcaaacctcttgttggatatatatttattgtgatttgtggctacaatatttagattcaataagaaacatcatgtcaattcaagaagaaaagctatctattgtgatttttttagctttgtaactttgacgaaggtctgtttacgattctgggacaacatcattgtttggattttcgcgtataatattgtttataaaacaattttgactgagtcaaataatgatgaaaataactctcttttttgtgttacaggaacatctttggtcacttacttcaaagaaaagatc

SEQ ID NO: 106975 - DNA, 498 bp, Aquilegia coerulea
  Intron number 1 from transcript AcoGoldSmith_v1.022676m (l ocus AcoGoldSmith_v1.022676m.g) derived from phytozome v7. 0 (chr-ID scaffold_41; pos 497180 to 497677)
gatcgagcactagaaatcctcgaggttagttttatttagtattatcgtcatcttcttcttcatttttcatttaaaattcaaacgaaaatgtaatagaaatcctgaggtttgttttatttagtattatcatcatttaaaattcaaacgaaaaagtaaacaaaattcatttcacattattatgcatttttatgcttttaatgaaattttaacattaggcacacataagtgtcactaaactccacatcaatatgtgaatactagttggacagaagataatgtggatataatagttgaaaagttagaggtcttgcaatgaaaatttctgcataaaatgcatattcatgaaaaagaaaaggaaatttgctgcatttgcacagtttggggtgtttcaggtataattgttactattaagactctattgtgggtatttaattactgctaccattaccttgttatgaagcaggtaaagactggaggcttggttgtttggagtaataa

SEQ ID NO: 106976 - DNA, 558 bp, Aquilegia coerulea
  Intron number 1 from transcript AcoGoldSmith_v1.003300m (l ocus AcoGoldSmith_v1.003300m.g) derived from phytozome v7. 0 (chr-ID scaffold_5; pos 2177117 to 2177674)
aacattataatattcaccggagattggctttgaatgtgagtaccaaaatcattgttgcagttatgacagttaataatatttcctattatctgttttttttttccctctctttgtcaattgtcatatctcttctaacagaatattcaactgaaaattattatagtaataatatttgtgtttgtgatcaagatgatcagtactgaatgaattatattatcttataaactgagattttagttgtttttttgttttttgagtaaggtggatggtggtcattttcttgtatgctatatatataatatgtttgaaagatatatgataagaatgctggcattattttgtttttgaataattcaatgaagtcatatcatttatccctgaagtgttggaattggattccaatctttacgatggcccacatcatctctaaatgatttttttttttattattattattaatgacttaaatttaccttaatccaaaatctaaactctcttgcaatgaaatgtactatgacaacagataaccatattgttctgtggagatccattaaatcc

SEQ ID NO: 106977 - DNA, 423 bp, Aquilegia coerulea
  Intron number 1 from transcript AcoGoldSmith_v1.001994m (l ocus AcoGoldSmith_v1.001711m.g) derived from phytozome v7. 0 (chr-ID scaffold_20; pos 2061943 to 2062365 reverse stra nd)
atctcattgaatcgaagcagcttcctggtaatataaacaaactaatctctttcccccatttctttatttttttctattgcaagttttcaacaacccccactttcttgattttccctaaaaacaaaaaaaaaataataatttttttcatattaattcaattattttgaataaagattggttttttaactatacccatttcttaaaaatgaattatgaataatacccattagataattattctaaaagaagattctttattccaaattgttgacgttgaagtttgagataattttgaatattgactattatgaaataattgacaagttttttttggttataaaaagaggtgtttgtgttgttgtttttgtgttttgtgtttgtgttttagaacaaatcttctactagcttttctggtatttctag

SEQ ID NO: 106978 - DNA, 894 bp, Aquilegia coerulea
  Intron number 1 from transcript AcoGoldSmith_v1.007375m (l ocus AcoGoldSmith_v1.007375m.g) derived from phytozome v7. 0 (chr-ID scaffold_14; pos 4911599 to 4912492 reverse stra nd)
tcgaataggtactcttgaaatcatttttttctcttgttttcgattgtaatttagctcaatttctcaatttagaggttacttagctcaatcgtattatgttttattattattattattgattatgtttattggtgatccttgatgaattgtggggttagaagttttgggtaatcattgtttttgaatttgggattgatttagaatggttatggtcatggcttaatgtgaattatgatggataatttgtgtgaatttttggttttttttttttttttttttttttttttttaattgtaaagatatggattctgtcaaagagagaaaattttcaattacatcattggcttctttcctgaaatttgcgttttaagaaaattagttgtgatttaatggaggggaaatggattggtaagtttttgagacctaataccataagggttgtgtatggtacataccttcaccatgcataggctgggtatggtattatggaaaagttgcttgtaaattgattgtagctgctttttgtaattttgttgataagcatgtgtgggcaaaagctatgattttagaggaacacacatagaattaaagggattggagattttaggtagtagtaatttctttggtggttgagaataaaatgaaagaaatcatctttaggatgccctcgtgggagtgtggatgtacaaattatttatacgataaaattaatttgtgagtgtagttggttactcgtcattgtttctgccaaatggattcacttagaagtatatatcacattttcttcttcttttcgtttcaattcatttttctctttagctatagtttgattagtgttatcgtgttatttctgaatatttgatcatatcagggttctctgtaagttctttgttc

SEQ ID NO: 106979 - DNA, 540 bp, Aquilegia coerulea
  Intron number 1 from transcript AcoGoldSmith_v1.023793m (l ocus AcoGoldSmith_v1.023793m.g) derived from phytozome v7. 0 (chr-ID scaffold_45; pos 1483388 to 1483927)
ataacccatcttctcattctcaggtatcgttaagaacatcttgagattctatagtttggcctcttagggtatgattcagcttcagtacattatttccatttggcccaatctcgtatgattgaacttgtactgtggtttttgatattttgtttgctaattggattctcagtagtcagtattgttttcattgggagaaggagattgagaggaagaatataattatataaaaaaagttagaatcgtatcctatcataggttcaacgctaaatttgacaagcagaactgattgtgctcctctcataatataattttctgggtatgcgtcaatgaaagtattgagagggtgtggggggaacatttcaaaatatagtaactgaatatgtttctgttaataaattgaaagaagagcatggttcattttgccaacactcatttatgtttcccttagtttgattgtaattgtggttggcttcatactttacttctttcattgtggtttctgcagttgtcatcccattttttcgaggaactacttgactc

SEQ ID NO: 106980 - DNA, 986 bp, Aquilegia coerulea
  Intron number 1 from transcript AcoGoldSmith_v1.000099m (l ocus AcoGoldSmith_v1.000099m.g) derived from phytozome v7. 0 (chr-ID scaffold_4; pos 9380590 to 9381575 reverse stran d)
aaagaagccaaaagaggttacaaaatacgtatttgaagatttgttatttttagtccatgtacattgttaaaattcataccatatggttatacttcacatacatcttatatgatagtgggctttgcaataatttcacgagctcctgggatatccatttttctctttgctctgtggggtttttcttatgagtctcttctttactatttttatctatcagcaagttatttctatgttcagcttcccttcattttaatgtcatgaatgtttctttgcttgagacattctgtgtacctatactcctatatcaatcttgtgatttgttcttatttcaactcagtgtgtttagtaaataaaaatacatagaccattccatctaacattcattaagttcaatgtgttaaccttttctagttatacttatactttaagtgaaatatttcatttgtaggttattaataaggagagaaggaaatccgaatagggtcataccttgtatgagttattttttgaatagaagaaatgagagtagttctgtacatctgtttagggttaaatcttgctgaagttcacatcatcagctttttctcttaaattggtttatatttggtcatcttttgttcaatggacgagactcaacatcttgaccttattgaaaaggatgcatctaggccacaattttttgataatattgttcttacttttttttattccctgcttttgtattttctttttttttgtattttcttctttcaagtctcaattgctttgtcttcttttcaaatggtctttggcttactgcataaagtctaattttatacttgttgtaggcaccaagctgtcatcctaagtaattcctgtgcacatcatgttcgttagccactatctgctgattattatactcttagtttctatttacttttttagcctaattttttttatttgtttttgcagttatcatagatacttttaaacaagagggtcttgag

SEQ ID NO: 106981 - DNA, 986 bp, Aquilegia coerulea
  Intron number 3 from transcript AcoGoldSmith_v1.000440m (l ocus AcoGoldSmith_v1.000440m.g) derived from phytozome v7. 0 (chr-ID scaffold_38; pos 80071 to 81056 reverse strand)
cagtgtttcacattcattcgcctactagttctaaggtctggagtgtttcctctttattccttgtttttattgaatgatcgatagagtcattctaatgatatatattgttttggattttctggtaaatgggtagtttaaatattcttattttaattgctgatgtaagtgctaccctattttcttacctattttctatcaggtgaacgttcgtttcttatattgatgtctagtggtatcatgtcatttttctagcttcatggcattctagacatcaatacattatttttgggttgttgttatataatattcaagtatcgcaattatctttcaccattctcagctatctaaggaagatagataagaagatagcatgaatggagccaaggacaagttagtaaaataaagcatatcaacgttccatctccctcctagccctttaaattaaaatcttctgtacttgatgctggaaaaacccttctctttttactccttttctcttccccttttccctttcggattgactcattcagtggggtttggaggaaactgcatataagctcttgtctctcacttaatgagaaaggctttaattagggcccagaaaaaaatcgaggcatgtgtacagtgtgtcggtgtttgacatatggtccttggagtagataccctaaccaaaatggatcagcatgtgtaaaattatgtctgggggactgacaaggccgattatatatatatatatatatatatatatgacaatatggttgtacagtctcatttgataaatattgaaacatatgcacatgcattgttaaaataaatagaccttgaaataacctgaagacatcagctatttatcttcttttatctctattgatgatttttgatgttatgttcttcgtacaataatgataagctagcatcgtatatattctttcacatattgtgcatattatttatacaaaatgcaatgttgtcatgtcaggattctg

SEQ ID NO: 106982 - DNA, 127 bp, Aquilegia coerulea
  Intron number 2 from transcript AcoGoldSmith_v1.019626m (l ocus AcoGoldSmith_v1.019626m.g) derived from phytozome v7. 0 (chr-ID scaffold_14; pos 3982369 to 3982495 reverse stra nd)
cgtggaataaaggtaaacatattatttgattttcatgatcagttgttttcttttcgatcttctcataattaattatcactccattagtcttctaaataagtttattctattgggatgttagtggcaa

SEQ ID NO: 106983 - DNA, 514 bp, Aquilegia coerulea
  Intron number 1 from transcript AcoGoldSmith_v1.021240m (l ocus AcoGoldSmith_v1.021240m.g) derived from phytozome v7. 0 (chr-ID scaffold_4; pos 4180732 to 4181245 reverse stran d)
aaatgtgatgagagtaagaaatgatgttcaacaataatacaaagggagtgtgtgccatcgttgtttttgtgttattttgttagttttaaaaataatactcatgtccccctcagggtgtttgtgtcatctcagttgttgagatcgttgtttgtgtgttgttttgttagtgtcaaaaaataatagtcatttccccctcagggtgtttatctcatctcaattgttgagatcattgtttgagtgttgttttttttagtgtcaaaaacaatactcatgtgatgtccccctcaggtttctattacttaattttttttgcaattctatgtaagagctctcttttgtgtcatgtgatatatttctgaatcaagaaaacatgtatacaacgaatctgaatggcgattaatgatatttttctcattttaagtaagaattgtatttctgaatcaagaaaacatgtatgcaaagaatctgaataaatgttgtctggactataaatttagtcttaacaaatccctaa

SEQ ID NO: 106984 - DNA, 506 bp, Aquilegia coerulea
  Intron number 2 from transcript AcoGoldSmith_v1.002311m (l ocus AcoGoldSmith_v1.002311m.g) derived from phytozome v7. 0 (chr-ID scaffold_14; pos 1629832 to 1630337)
acgagaagaaagccttcttggaccaggttcagtcttatgtccttttagatctattaatccagaatttactatttcgttacattgcttatcattatctatggtatttttggggatgcattatgttacttttcatacaaattatgtgttccttgattttacatgtctgtgttattgggtttgagtgcttccgtaagagggtagtctatttagatgcctcccaccagccacaatgatataaaaggattcgaactttactgaatagaaagaaggtctttgcctaactattcttttagcatgtttttcttggttccagtgaattaagactgagcgattaatttgaaagaaaaaaactacatatagaacttcttgagttttgaagtagcatcaagtgtccattgtggagcttattaatcttcatattattatctgtctatttcgttcatatgtagttactatttttttttctttcaggtaactcggctaaacacaagctatcctggtggttt

SEQ ID NO: 106985 - DNA, 347 bp, Aquilegia coerulea
  Intron number 1 from transcript AcoGoldSmith_v1.011552m (l ocus AcoGoldSmith_v1.011552m.g) derived from phytozome v7. 0 (chr-ID scaffold_17; pos 4477409 to 4477755)
gagacaaggtgaagacctaggtatcttataactcttttactttcaaaggttcagatcgatcgatgagttaattattatatcattcttcatactggaagatcttgcagcaaattccaataacaactggaagtaggagaagaagtacagtttaatttccctgatttttcaatttaagtggctttaatatgtatgtattttgtttgaatttttcctctcttatctcctttaatatctagccttcggtttcatatttttttttgtataatcttactattttttttctcttttgtcaatcttggttttttcctacataagcataagagagtgaacaaaaacacttgatttct

SEQ ID NO: 106986 - DNA, 941 bp, Aquilegia coerulea
  Intron number 2 from transcript AcoGoldSmith_v1.003693m (l ocus AcoGoldSmith_v1.003693m.g) derived from phytozome v7. 0 (chr-ID scaffold_62; pos 550629 to 551569 reverse strand )
agtgagttctttcttctcattcatttgataattttatcctgaaaacttggtagagaaccaagggtcatcttgtttgacattgatcaaagtcgtgtgttattaggcttagtacagttacggattagtactgatatataatcaacattcccattgttaatcactgattgggtgatccctggttcggatttttagccatcggcattaatcttatatatctaaaaggacgagactattaattatttgaaacactattctttacagggtaaattcaaaatcctcagttctttgataactcaatcaccattctatttcaaactcccgtctaattttagcagtctggtatctttgatttttttcaagctttgaaaaattaccttgtgtttcacaaatgtttgatgaaatccacactggtttcaagtttgacttgctacacgtttagacactcatagccttgttatacaagcctttatacactactccctgtcttgggcttgtgctgactgctgacaaacactgacgattaaaggtctgaaggtaaggatagttcttttgtctggctttaaccgaaaacttgactgttcgctatgtatttggtaatttccttttcgtcaatggacttcgaaaattgatatcaatgtctatttaggtttagattattagacaacacagattgcagtgaaaatataacttatctaattcattatgagtctcatgtcataagttcatttggcaaaatattcgtttattgttgtcagtccagtaaacctcatctagctctttgaactttcaatctttaaacctatgttttttgctacaactttagcattcccacatctatgatttttctcttcttcccaattttgagtttattcatattgaaacattcacatgcttataactgtaacaaataatcaataggtattcaagtggtggagatccat

SEQ ID NO: 106987 - DNA, 428 bp, Aquilegia coerulea
  Intron number 3 from transcript AcoGoldSmith_v1.021095m (l ocus AcoGoldSmith_v1.021095m.g) derived from phytozome v7. 0 (chr-ID scaffold_41; pos 1077836 to 1078263)
gtgtaagtatgtttaccctactaaattgtgttgaagcatgtctgtagaaagtatgtatattatgcacttttctattctgagattaatctttaaagaagggtttttgtgttggcaataatctttctctgcttcttccagtagtttggttttgaattaaattctacttcttgtcaagtaaatgagaagaaaattttcttgtatatcacgaatagtgctggcatattatgcaacttcttctctgtaagttctttttttgtaatgtttaagtgcacacatcatgcttaaaaatcttgttctgggatattggtttgttttcttcccatatgttgcggttttttcaatgccccgtatttgaagtctaatgttctgtttaattgtacacccgagtggaccttaagctaatttcatttggacagataatttgggaa

SEQ ID NO: 106988 - DNA, 1011 bp, Aquilegia coerulea
  Intron number 2 from transcript AcoGoldSmith_v1.021430m (l ocus AcoGoldSmith_v1.021430m.g) derived from phytozome v7. 0 (chr-ID scaffold_4; pos 4461592 to 4462602)
acacttttgtaagggaaaaaaaatgtcacaatttgctggtggtagtcgattttcgcagcctgacctattgaagggggttggttttattaaagaataaccatccactaatgcaatacaaagtgactttctacgcaacatctagtttccaattgtcagctgcatttatgcaacatttgttgaaatttgattacccgtaagcgttttgaattaatctatgtgatcaacataaatccctagatcatcgtttcttcaaagtaacaaagtaaaataattaaataaaatcaaacaaaacacaaaagaacacaaagatttacatggttcgataattacctactccatggggtgatagtcgtctttatttcgttatatgatgaagaaaataataatattacaatgacctcacaaagaaactctttggtttggtcttggttacactacttatggattgttcaaaacctttaaaatcttattttattttatttttttgacgaaatgctaaacttttattagaaagccaaatagcatgcagtgtattgggtatttataatacctaaaccatagatttctaaatagttagaaatccaaaccgagagcaaagagaactcctgtacgtattactatggttgttggtttctaaaaccaatcttaataattgatccagtacacctataactttataagctacaatccatgttctcacatgtattataagccaaatccaacaacattctatgtcaggcacaacattgtataaagagtctaactagtatggatatgttgcagtagcaacagatcaagggaaggcaatgttgggtaggagactaggagggatattgttgtatgcgctgttgaaggggaactcttgttttcattttatttgcgtcaagatttaaaccttatcaatttcagttttatatagttttgatcactttccttaaattgagtggccggtacacttaactggctgaacatatgcatgcaagtcaaccaagaggttaataaactggaaaa

SEQ ID NO: 106989 - DNA, 596 bp, Aquilegia coerulea
  Intron number 1 from transcript AcoGoldSmith_v1.015859m (l ocus AcoGoldSmith_v1.015859m.g) derived from phytozome v7. 0 (chr-ID scaffold_4; pos 5342136 to 5342731 reverse stran d)
accctcggtttttatctgtgagacaaagattgccacatcgtgcccgaacagaacgaaggcaaaacatatcttccccaagttcattgccatgtattgtgacccgtcattttccatctgattttccaagatcatcatttcaatttgctaatataggtacatcggaatctgcttcaaacaatatgaggtcagtttatttatgtctatttgttcttaaatgatccttcctaaagtaataacatttacattacaaatctttttccccaatatttcagttcaggtggtatactcaatgaagaaataacacacggaattggagatatagccaatcaagcccaagaacgacattggagagattgcttggcacttcattggaaagctgaagagttatcaaattcacaagtgaatgattctttatttggtatgtgttgtcttcaaggaaagataagatcgccattgctttcaccattacctcctgcatttcagtctttgtatgaagactcaaatccattggcaaatcattccgtaaagactacggtttgtttttattggataaaatactgctagaatctgggaagagcttatcagattttccccct

SEQ ID NO: 106990 - DNA, 936 bp, Aquilegia coerulea
  Intron number 2 from transcript AcoGoldSmith_v1.004953m (l ocus AcoGoldSmith_v1.004953m.g) derived from phytozome v7. 0 (chr-ID scaffold_4; pos 5579532 to 5580467)
agttgaaaaagaaagctcagttagataaagaaaaggcaagtctttactctgaatatcctatttgctagattataatgcggccattacactcatttatcaatagaattaaaagttttatcgataacaaaaaattgtaagagtatcttctaataactagaaacaacattttagagttgtgtgttctaagttgaacacaagatgtgtaattagtcccatagaaagcagtatacaatgtgaatatgtgataaactgcaagtatgaatgaggagctacttgttagttgttacaatgaggagttggatatcatcaatatgagatttaaaaaacacaatggtaattagctgacaacaatgcaaggtgtaaaaatgtgtaattgtgctacagtaatatgctctttgatgttgagtaagacttgtgttgcaatggtgcaatagttgaggtctctgatttggctagtattattgtatcacaaggggattggtgggaaaatgcaactactttcttgatcactgcttaatgcccattgctcctctggcaatgattttactgagtgtaccgattttatctagaaagtagactttggaattgatttccaccttataattaatcttaattaatgtgagtgtccttatttaaatctcctcattgttttagtgacatttctaagctctttatatgcaatttgtatgtctaactgtctattctgtatatgacttcaacttgaataaaacaatctctcacaagtcacaactccctttttgaaatttaggtcttttttggaccatgtgtttgtgattcatattgatcaaaatcgtatagtagtttttctcttctattctctatttgaatggattatcccgtatttatcccttggttctgacaagattgaaattatgtgcagatcacctggcagtggctttcatttacatcatctgc

SEQ ID NO: 106991 - DNA, 910 bp, Aquilegia coerulea
  Intron number 1 from transcript AcoGoldSmith_v1.005262m (l ocus AcoGoldSmith_v1.005262m.g) derived from phytozome v7. 0 (chr-ID scaffold_17; pos 1290804 to 1291713 reverse stra nd)
tcaacttgggtctctctctattctctaaaggacgggtaattcactttttttcaatctaaatgatgcagttatatgtaatgggtagttcttaattttgcaaattatatttgttttgatccccattcagattaatttgatgatggttgtgaagaagtaatcaatatgttttgtttgtggtttggctttctttactgaagtctttcattttgctgaccaagtaaggcttaacaaatgattagacactaagaatctcaattgaaaggttttgccgaggaacataatttacgtatttccagcttagcaacaatagaattaggaggatggaaaacaacactgcatctagctagtggagcttaatgagtcatgcccttcaagaatacctgcattatgatttatgaattgtgtaataccatagcaaatatgatgaatggattataattgacaaataccagagacttatgcagttattacgaatgtgttggtcgacgagagcttcttcatcaaagaagcacttaaaccatactcacatttgtatcaaatttttgtacaaagtttgtattaacaaacattatcaataaatgcatagttctcttgttgtattagaacatcgattccggcaagataggggggaaccaaaatacaaaccttgtaatatcatctcataagtatgaaatccaccaatgcttttataggctactgcggtatgattgatcacaacttttgaagttgagtgacatgtcttcacattccataaattttcagacttatctcaagtttcttctctattttggtattgatgatagcagtattaacttcatattaagtaactcctcatagttcttcggatactacaaagcaattttagaaagaaaatttgacttatcttcattctggtgtatgtgccaggtaa

SEQ ID NO: 106992 - DNA, 673 bp, Aquilegia coerulea
  Intron number 1 from transcript AcoGoldSmith_v1.016414m (l ocus AcoGoldSmith_v1.016414m.g) derived from phytozome v7. 0 (chr-ID scaffold_45; pos 542843 to 543515)
cgcgtaaagtacgtcttcatatacaactctttctgtctatgtttctttcaaactgatccaattgtttcaagttgaaataatccattaattcttcatgatttgattgatatcattcaataaagaccaaacaaagatgggaatgtggtatctctggttcaataagacaaaaataaagtttagaatatgcgaaagacttttgcaagactgagagatggtactaaagggtaacagatgcataattcatctgcataagtggttataggtttaaattataagagagaaaattgttcatgttgatgatgagcacgaaaaaatcatttagctacattagtaattagtaacagtcaacacaaccacatgatgaaatgagataatctaaagaacggtggtttagtacctccatccacacccagatgatattccacacactaatcacccacctaatgccaaaatgattgacttagttaaaatctatagccaagttgtgcctgagtagttgcacaataatttattgtaggttggtatatcaatatcatatttaagtttgcaaagacccaaccataactctgttgtttggcggatttttttttccaactttttttctcctaaattttgctggtgaacaccatttcttttccttggatacaggcagacatattattgcgaggttaca

SEQ ID NO: 106993 - DNA, 534 bp, Aquilegia coerulea
  Intron number 2 from transcript AcoGoldSmith_v1.000194m (l ocus AcoGoldSmith_v1.000194m.g) derived from phytozome v7. 0 (chr-ID scaffold_17; pos 27258 to 27791 reverse strand)
ggtatcttcgagattctttagtgagctacagcaaaaaactgttataacataattagctagtagttattctcattgtgcggtgcttgagtgtacttgcagtagctaattgacctgaggtcttggttcaggtttaccaccactagctcttgaaaatcccattgatactaattactaataacaaaggtagtgcgaaaaagacatgttctttattctaacttaaaaaatgaagtatttacttcgcgaggttcgattttcatttagtatctatgcaaaacaattgttgagcagtgatcccattgaagccattttaagttatgcatgtacgtgtgcactctatttgtctattgtttttatatatggatagttgcactattattcccttaaaactgagtgtttttcttctgttaacgctatagctatggagttagaggctgtggctataactcacagtcattagaatttcaactttttaattctttacgtattttagtaacttttcacgttattttgaatttggttttgtagatatatcac

SEQ ID NO: 106994 - DNA, 812 bp, Aquilegia coerulea
  Intron number 1 from transcript AcoGoldSmith_v1.010509m (l ocus AcoGoldSmith_v1.010509m.g) derived from phytozome v7. 0 (chr-ID scaffold_41; pos 310155 to 310966 reverse strand )
tagcttcaattcaaattcttattcttcattaaaaggttcgtttcttcaaactctcgatcatttctttgtttacttctttgggtttcaatttgtgttctttgtatagaattcactagagtgtatagaatagagttgttgcattcctttatatatgaagagacgaagaggggaagaatttatgttatataattagtctggttattgtatatctgtaattatgatgctaattggtgttactgtgatcattttacatgtcgcgttgcggatttctgtattatcttctcactttaatttgataaattcatatttgtggaattttttcactgtactttgacatatagttagcgcatgtttcgaccaaattcaacaagatgacagctttcctatagaatttgaccggacaccctcaattgattgaaatcgatggagaagatgatgaagggggagattgtttgtggttgatgcacgagactgaacctctcttgttgaaggttacctacgtaccctagttcttgaagaggctagggatcaagtctcttgttccgtagttcatgatgtgtagagatttgtgtatttgtagatgtggaaaaccctaattgaggtttccttgttggagaagacttgtgcttcaagttgaatagccatatggggtgtagatgggtaataaatatgggttatggatatgggattatggtgttgggctttagtgtattagcccgatagggggtccaatacagcgcacaaataattaactttgttttttgattaaaaatatgaagcttgtactaagaagaatcttctaaaccagatca

SEQ ID NO: 106995 - DNA, 699 bp, Aquilegia coerulea
  Intron number 3 from transcript AcoGoldSmith_v1.011835m (l ocus AcoGoldSmith_v1.011835m.g) derived from phytozome v7. 0 (chr-ID scaffold_14; pos 5836560 to 5837258 reverse stra nd)
tggagaatcttatatattttgccaagacatatccggtttgtcttcatacccctctctctcactcacacacacacacaccggggtaaattatatattacatttcgcggcatgcacgttgcttggttccaaggagtggtggggcttgcattcctcatggtggatgtggcttgtcttggcttatgtctaatgttttttttttactgaataaatctgtagtgcatggagtcaaactaggaggaggttcttttttcgctcttttgatgttgtatataggctgacaattccatattattaaaaatagcttgagtctcgtgagagagacaaaactctctcattctttgattttctcattttcactcttcgcttgttttcctttattcttctcctgtacatactacatacagaccttagagaaaagatatttagctaatcaacttgaaatccaagtattatgactgatcctattaagagaatcttttgaatttcttgaaaacttaatggataacatacgtagtggaagggtttgtagtcttctaccatttggagtaagtgtcaagaatcaagatacataatccagaaaggatattttaaaatagttcaaagttaatgatatgaaagttacccaatgaagattgccagtctcaaccttttgtttcttttgcaggtatctttccagagactgttgcacaaacaagacgg

SEQ ID NO: 106996 - DNA, 742 bp, Aquilegia coerulea
  Intron number 1 from transcript AcoGoldSmith_v1.023065m (l ocus AcoGoldSmith_v1.023065m.g) derived from phytozome v7. 0 (chr-ID scaffold_4; pos 6847302 to 6848043 reverse stran d)
ccgaccaggttggctcctcagacccagctgagaaggtacactcattcccacttccactcttttatctgtttgtgattattagaattggtatactcataaatttaatgaaaattgcaagtataatatctgaacactgcacttatatatgtatcaaacataggtaaaaccgtataactactgaagtttttttattaattcggaatcaatattttctaggatcactgctacactagtctgacagcaggatgttttcaaaacaattggacaattggctatggtcttgttattgtattctgagttccaaaaataatcgcttaacatcatctataccatgcatgatgcacctagtctgctagtcgcagtacttaattacttatgcatagtggttctagttgtttgaatggttcaaatcaaactacataacctttacatggtatgcttcattacattgcaaccttctatgtgctgaaactgtcaatataaatgagacaagaattgtcccggccaccttggagatatatgatctgtttggcctattgacataaatcagcaatattggctcataaagtagtatgtcagtcgaataaaaatctagaactgttcgtctgttctgcattaaaacctctgttctaaatattgtaacagacttcaaccaattacactgtagaatgctaatcaagctactggatttgtgtttgattttctaggaagtagccaagaaatattactttatcgttgcaaa

SEQ ID NO: 106997 - DNA, 1031 bp, Aquilegia coerulea
  Intron number 1 from transcript AcoGoldSmith_v1.012558m (l ocus AcoGoldSmith_v1.012558m.g) derived from phytozome v7. 0 (chr-ID scaffold_76; pos 858414 to 859444)
tgccttgctttcagcagtttctgcattttcccattgtaagatctgcttcttaatgtctttatttttccttattctggcaccagtaatgaattatttagaacatttggctgaataattgtaatgtgaacattgtggataaggtcttggtttgcaattgaaaggggtaatgcaaaattattaaatgaaaaacaaaagcctaagattgagattggaggcagagggtaggctttttaaagagacaacacacaacaatatagtgaggagtctcactaagactaagacgacaaggatataagtgaaggacatctactcatctatccattcttaagctcctggagtttctttttgtaggaataagttggtcaggaatgtttgagatatactgtgtatggaactcccacgatttctatgataccctagagttagttgatcagctggtgcaactctccacaagtattctttgagttgctctgactgaatgaatcacagatccccaaatattatgcttagctcaacaaacctgtcagacgctcaaagagttaatctacggtggctcaagtctcctaatttattgtgcagagccttattggagccttcaatcattgagctgagtgaatactcatagtaatccttcatctccaccctactccactactactaaagtgcagatctagtaacttgttatccaccagtccctaatattatctacatatgtgattgttgtattaatctttaagcatacatagtatggtctcctcgactttgacgacaaagtagccaggtcaaatcctaaaatacagatacttcttccacatagtagccaggtcaaatcctaaaatacagatacttcttccacatctttcagcatttgcccattcgacaaatctatcttttctttgcatctttctgataaaaaatcatgaactttgtatcatgtgctcatacttcatacccctgcattcaaactttaattctatatttatgttcccattcacttgcagtgcacatcccagcagtatctgtcacagaag

SEQ ID NO: 106998 - DNA, 482 bp, Aquilegia coerulea
  Intron number 1 from transcript AcoGoldSmith_v1.003076m (l ocus AcoGoldSmith_v1.003076m.g) derived from phytozome v7. 0 (chr-ID scaffold_17; pos 4737098 to 4737579 reverse stra nd)
atcctcttgattctgtttggctcgacaccaccaaagtaactaattttctctctgtaatatgtatgatctgtatctgtatgtatctcttcaatcttgcacttattaggtctttttttcatatttaaacatatttctctaggtttttatgatttgattttgaaagaattcagctatgtatgtgttagaaacaatggaagtagaatataattgttgtttagtcttgtattgatcaattaagtttatctgttttcttagttctaagtcctgcttttgaaattttatgtaaatttgtgctgagtggaattgataatgatttctcttgttgtacaaagcatgatgaatggttcaatatatcgattcttaatacctacttgatcttctatctatatttcaagtaggctgtaggtgtaaggatgatattaatatatatgtttatatttttgccagcttctttctgcagtaaattgttggcttaagtgcat

SEQ ID NO: 106999 - DNA, 716 bp, Aquilegia coerulea
  Intron number 1 from transcript AcoGoldSmith_v1.003148m (l ocus AcoGoldSmith_v1.003148m.g) derived from phytozome v7. 0 (chr-ID scaffold_4; pos 5352493 to 5353208 reverse stran d)
tattgattttgggctttctatattcttcaagcctggtgaggattttaatttgcaaatttttttacttctttatggatacaactactgcatttacactttcttgctgctttgtattatttattagttaacatgttgcattaggtatgaagtaaattatggttagaataatttggctacactatatgacatgtggcatcactgggtatataccaaacgatttacatgttagagacacatgctaaaatgggtacttgagatccacatttttatttaggttttgtttgttttgcaaaaaccttggtttataaaattttaaacccttagtattcaaaaaatgtttgtttgaggaaaaatgagtcttaaccctcataacaaagaaagctcaaatttctttcgatatcaaattggaatttcctactatagtcaaagctaggataggccatagcgtgtcgagatataatgccacagtgttttagttaaggcatgcctgagacacgaaaagttattatgaaccaagatgaaggataaaattattattgatgtcattgaggtttgatcatcttcttgtgattcacatttgaaaaacgtgggactatgcactgttcgtttttgtcatgaatgtacataaattttgattcccatttctatccgtgtttaacgtttttattccttacaacttaggtgaaagattttcagaaattgtcggaagtccatat

SEQ ID NO: 107000 - DNA, 695 bp, Aquilegia coerulea
  Intron number 1 from transcript AcoGoldSmith_v1.009098m (l ocus AcoGoldSmith_v1.009098m.g) derived from phytozome v7. 0 (chr-ID scaffold_17; pos 1298253 to 1298947 reverse stra nd)
gaaaggtaaccctcaatattcttctctcaatgttactctattttttattttttattttgatattttagtttattttccattttcttacaagtcgaatttgtaaatgggtagttttaatttgtttggttttgtgcaatttggatgaaaattttgaatgggtttggattagttatagttttgaatcaattagagaacttgaaccaaaaatgggcatttcaggatttataagctcgtttgagctgatttattttaatttatttgtgcaattggaatagaaaagttgatatttgtggaccaataagagtagtagaagtgaacttgggatttttcttttttcatgttgtaggaatgtttgataattcagtgtgtttctgataaattttccgacatacaagaatttttattagtaatctgttgaagtaatatagttggtcgagtatctctgtggatgaaaattgtgaatgtgtttaatttcataataggttcggatcgaatggtcgatgcaagtgctagagttgcatttgggtgtttatccaggcatctattgaagtttcatccatgatgttagtaaaaaaaagtagtttaggtatactttcgtatgatcattcaccaactagactctaaaatttgtggttttttttttttttttgttatgcctaggtccctggactagctgtcatcattgtaggcagtag

SEQ ID NO: 107001 - DNA, 808 bp, Aquilegia coerulea
  Intron number 1 from transcript AcoGoldSmith_v1.027373m (l ocus AcoGoldSmith_v1.027373m.g) derived from phytozome v7. 0 (chr-ID scaffold_41; pos 1163913 to 1164720)
gtcgtgttcttagtattcaatctcacactgttcaggtttctttctctctctctctgaggtttttgattagattgagtttttgattgaagtaaactatcgatctatatgttctgattcgctgttagttaagcgttctgcgtttatagaaatgcatgttggattggaactttggaacttattatctaattaattaatttgatttgatttgatttgatttttttaattgtttaagctttgattgatttctgaagtctattcaactattgaagcaatataataggtgcatgcttgttatacttatatagttagtttaactattttctgattctaatttttaaattaatttgacctaatattattctaattaatcaagcatgtatactgagactttgaatctgtcaaaatgcaatctgctctacgatcggtttgattaataagaaatgttgaattgtttttaaaattccacttttatattggtatttgaaaacaatctgaactatctttgctttaaagttggacaaatgtgcatatgcgctagtaactggagcatagggtcattcgagtacattagtgataaactgtagttaagaatttcagtatctgtggtaaaacacacatgcaaggtgtctaagaaaagaattttggaaattgttggataatcaatgtttgttcatgttcacatcagttgttcatttgtatgttcttacaataacatgttatcttactaattatataacaataacatggttttatgctgcactgccttaccttttttctttttatttccgcgacatgctttgttaggggt

SEQ ID NO: 107002 - DNA, 805 bp, Aquilegia coerulea
  Intron number 1 from transcript AcoGoldSmith_v1.020094m (l ocus AcoGoldSmith_v1.020094m.g) derived from phytozome v7. 0 (chr-ID scaffold_163; pos 17203 to 18007)
accaattctcaaggaaaggccaagtatcattgtggaaagtgaactcactgagttaattagagaataaagaaataaataatttaacaaatttctcacctaaagcaatagactggaaaaaaaaaccccaacttctttatgaaatttatgtcaaagcccagctttagatgaccaattctcaaggaaaggccaagtatcattgtggaaagtgaactcactgagttaattagataatgaagaaataaataaaccacacgacttcctcagttcctccccttcttggcttctggcttctgcaattctttatgaaatcaattcaattcatcttcaatttttgtctagaagtgcaagttgattatttaggtatttttcttttttctttctttccctttttttctctttctatgatccttgatccttctcacttctcagttctctctcattaatttaattaggtttttcacttgttaatttgttatctataggaattattatttgactttgaattaaactattcactttgccatgttaacgttgtttcaaggacagtgaatttgatatagataagtaaggttttgtaacttaattttctattatttaattgtattagtgatttgattgcagttattatatattgctcgagactcgagttattaatttacttgtttcatttttattcttttcagaaatgaaaaaaccgaaaatcgacatgaacagtcgaagaattgatagtgtatttcaaaagaaaacctgtaaaaacgtttctacactagggggaacttcctcgaacttttcactttcttagctt

SEQ ID NO: 107003 - DNA, 981 bp, Aquilegia coerulea
  Intron number 1 from transcript AcoGoldSmith_v1.005156m (l ocus AcoGoldSmith_v1.005156m.g) derived from phytozome v7. 0 (chr-ID scaffold_4; pos 6748645 to 6749625)
aaacacttaagattgtacccattgctgctaacaaggtgattgctttatatacttgttttactgcattttcagatattttgcagtgattaatgtagctatgtttagttagggtgggtttaacaaggtgttgttattgaagtaggtctaggttatgtacaacttgtagaagtaaggagattaagtttatatgtagattgtttaagtcgtttatataagtagaaaacaatgaggtagacacatataaccaggcataagagcatatatatttcgttgcaatgtatccacttagccaacaactgtttgtacacaatctcttgagttattttcactggcgtacaacctgtgctaccaactcaaaaggttattgagaggaattatgatcgattgacaataatggtcacactaattatattctgatgtcacaaacctggtaaaatttccaccattagtcatttttgtatagttatctcaaaggaaaagtagcccccagtaaataattttgaaatataagttgtgtctctaaggtctaagctaaaatgttctatagtattgacattatcattaaaaaaggttctggaaaaacacctaacgttcttcgcagaaagattaataccagatgacgtgccaaaaaattatatagttcgatttcatagtttgcagactgtttaatgtttagaactgggatggctgtgccccaatctcttgtagctatagccaactaaggcttccattagtggtgctatttgatattatgtactgtaggccttttggtttttgttctatatgtgatgctttttcttaacatttctcgcataattttcaacattacacgctgtaggtttccattatcgcgccccgcaggtcttacgtttgaagtactccctgtacaaggcttagctactttctaatctactaatgtttctattcaactctcttatgattgcagatactgagattggaaccaaaatttagaactccaaa

SEQ ID NO: 107004 - DNA, 943 bp, Aquilegia coerulea
  Intron number 1 from transcript AcoGoldSmith_v1.000820m (l ocus AcoGoldSmith_v1.000820m.g) derived from phytozome v7. 0 (chr-ID scaffold_41; pos 1087619 to 1088561 reverse stra nd)
cctggtctttgttctaaggtttctagacaggttagttctttcaattatctccattccatactaatttcatctaagccaataaaatcaaacagatcattgttttcatggtggctatacttattatatccttaatttattcagagaaaccatgttagagaagagatgttaccaaatatcgaaaacagggatctgcattaggcatttggctgtaggattgtgtgtaactaccagtaacgtccttatcgtaaactttctaaattttattttattattacttgcaattgatcatatgagcattagttgaggttggtgttttagttgaaattgttcaacatcatgaacaagtaaatcaaaagaggttatactttgattcacatgtatattacaccaaagaggttgatgtttttagttcaacttgttcatgatcatggaattgtatatgatttggttataattcttctgtgccgttaaagtcatttagaatagatcattataaatggttattgtatattgttttcaactgtcactaaattgtatattctcttaattgattcacacaaaccatggtcattagctatgtctatgtgtaaatgtgtatgcaccagttatgcccccaacatgtcatctcttttatgtttttctaattgatcctttttttttcaataatatacataaagggaaatttctccatgtcatttgaatgattgactattgtgtgcataagagggtatgcattcctttaccccatcagagtgttagtgcatatgtcaaatgttacaataaataaattatcatgtatgtttaagcaacttgtgtaaaaactagaagacttagtgacttgttgagtcagttttttggaaatttcttgtattctcggttattcattattttgttttaaagctgcatcttacctgtatggaataaacacaggttggtctatact

SEQ ID NO: 107005 - DNA, 530 bp, Aquilegia coerulea
  Intron number 1 from transcript AcoGoldSmith_v1.026437m (l ocus AcoGoldSmith_v1.026437m.g) derived from phytozome v7. 0 (chr-ID scaffold_17; pos 2309073 to 2309602 reverse stra nd)
ggttttagggtcaaaattttgttgaagaatgttctattatgaacacagagtgctttaatattatttggttactgaagatattgtagtatattttttctgctatatttacaaaatcttatgctatttgattgtacagaaggaagttgaaccatcaaagctcataactagtgaaccaaattaaaacactctgggcccaatacgacaagcccaataatattttaatggaccacatatctcaaagcccataattcgttttttaacagatctctctttcttcttcttcttcttctcaaatctcaataataattcgattcaatctatctgggttaaaatcaatttcctcttttttttctcaaatcaaatctcgaattcacttacaacttgacttgatcgaaccctaattattcaaatttcaatattttataatcgatttgaatttcaagaagaagaacgtagtgagtgaattagtgaggcattggatttgaaaaaaaatggtagggagagaagtttcagaaagttgtgtggatagc

SEQ ID NO: 107006 - DNA, 440 bp, Aquilegia coerulea; identical to SEQ ID NO: 106693
  Intron number 2 from transcript AcoGoldSmith_v1.010518m (l ocus AcoGoldSmith_v1.010249m.g) derived from phytozome v7. 0 (chr-ID scaffold_14; pos 1965704 to 1966143)

SEQ ID NO: 107007 - DNA, 336 bp, Aquilegia coerulea
  Intron number 1 from transcript AcoGoldSmith_v1.017226m (l ocus AcoGoldSmith_v1.017226m.g) derived from phytozome v7. 0 (chr-ID scaffold_20; pos 595238 to 595573)
gatttatcatccatctcttgttaccgctgttttgggtaaattggtccatttctaaattaatcttgttttgtgtcgttgtcgaatcaatcttctagtttgttagtttaaggccattggtttgctatacttacaagtaaatcacattgatgctatacaattagtttagaagcaactttgtaaaagagatattacgagtattatgttgcttatatttttgtcttagatttatccagtttgttatatgtgctcattcaatcaaataaaattaaaagagaaaatttactctcccttgatatgtcagaggacgttgctcacttagttgtggaatctttggtg

SEQ ID NO: 107008 - DNA, 595 bp, Aquilegia coerulea
  Intron number 1 from transcript AcoGoldSmith_v1.006523m (l ocus AcoGoldSmith_v1.006523m.g) derived from phytozome v7. 0 (chr-ID scaffold_41; pos 763268 to 763862)
gaggagaaagattgaatcacagagaggtagcttttttggatttttttttctaatctgttcttattatcaacatgggtttattaattcagaaatgggattttttaaacttatgcttgattctgcaaattgatttggattctatcaaagggtagtcttgatttttattttatttttcctggttttgttggaaaaggtgcttcctttgtcattaaatttcgattcattatcatgggattcttggcatttattcacctataatttccacaaatggttcattttccgtggacctttaacatgtttggggtatttgtatctttatgtggatgtagtttgtggtattccatattcaattcactctagattatagttttgagaaattattttcaataactactatcaactagctagttttttggtttttgccgattattgaacagccacagcaaaatactttatataaaaatttatttagttttcttcattatagacacaaccaaaaacgttttttgtatgtctgcaaaataaggttctaatgcatctttactctgatgtgttgatagcgttcttgtattacaaggcgagcagcaaacctcga

SEQ ID NO: 107009 - DNA, 1003 bp, Aquilegia coerulea
  Intron number 2 from transcript AcoGoldSmith_v1.017621m (l ocus AcoGoldSmith_v1.017621m.g) derived from phytozome v7. 0 (chr-ID scaffold_14; pos 922243 to 923245)
aaaggaacgaaagaaagaaggagaagaaacaacaggtaatggtgctttactgtatttttttttgggggggtaaaattttgaaatttttggttaactgttagaaaattttatgacattgtgcccagtattgcaagtttttgttcaagttttaaactttatgatttaaagaggggagagggggagaggagtgaacattgatagagttcaaagtgttaggtgctgaaggattatttaaatgaaatcatggtggaaaccattcataagtagtagaatttaataaaaaaaaatgggcaatgcagaaacaagaggtaatggtgagatgttgaaagtttgtagttaaagtttcaagtttcaaacttttttgcttagttgttaattgttagaaaattttatgccattgttcccaacacttggagttttttatgaagtttcaaagttacatctattagatttgagtaaacaaagaaacccatttgcatttaaatgatttcaaaaaaggttacaatgacacaaaattggtgatttgtaaatactgaaagaaagctgtgaggttcgccatgaattggagtaggatgctagaagatataaggatcaacatgtgtgagatctgatggcagaaacatttcatatcaagaatttgagaatttattgtatttaactagggtattgaggacacaaaaatgtctgcacatatattaattctatcttacgtgttatgggagcatggacataccattttttattgaacttttgagacactcagaaaaacatttcatctattatagtctgtcattggagttcatgtttttgatacactgtcgtcattggtctgtaaatgttatcgtatttctaaactgttaatcattcacatctacttttaatcgtattatacctttgttcttttttgtatttatgttagaagtcatattgctgctcatgggtgcaatttaaccaattgacaatggcaggctgctgttgaaaaggggaaagatatagggtttga

SEQ ID NO: 107010 - DNA, 671 bp, Aquilegia coerulea
  Intron number 1 from transcript AcoGoldSmith_v1.010794m (l ocus AcoGoldSmith_v1.010794m.g) derived from phytozome v7. 0 (chr-ID scaffold_4; pos 6790191 to 6790861)
gcggaggttagactcgattagattcgatttgtgtttaattattactatttaatttgaattagatttgtgtgaatttcaatttggtgattaatgtttgttgtttggagttgtaattgtaatcttaattaatgaatggattgaggattttagggttgaattttttttgggttttgatgagaaatttcttgtgttagttttcgttttgggggtttagttgttggagtgttgaacagtcattttcttaataaaatacacacatcatgttaactgatgactttttaaagtattttaaatggtttagaaagttttcagttgataagggcatgcttatttttatccagcaaaagattgaaacaaaattagaagaaaaattggtactgtaactctgtaaggtgggaactacacttttgatgtaaggttggtttcgacagtttgagatcacattggacatgattctattaccaaataattgtcaagagattgacatattggcgtgtcaaatatttcctttgtcgttagatgagagactaaggatgttttggttcttagttgtatttatgttgtatttcactctattttctttcgtttcttcgaaatagtaaagtaaagtagacaagtagtattatgattaccatggtattaacctgctcagttgaatgtgcttgcaggtc

SEQ ID NO: 107011 - DNA, 974 bp, Aquilegia coerulea
  Intron number 1 from transcript AcoGoldSmith_v1.025199m (l ocus AcoGoldSmith_v1.025199m.g) derived from phytozome v7. 0 (chr-ID scaffold_66; pos 117993 to 118966 reverse strand )
tcttggagcatttcactctactactactactacaggtacaatccaccatcctaactcaagtcagtataaagaaacctttatttgctagaaacttgtaggttaccaataaatggaataagcattttagtctttgaaaatcagtattttctaaaagtatttgttaatgtcttacagacaatgagtttgccttctcaatttccttttgttgtttgtggcaactgattatcaaataattttcataatgtgcgtcataggtccttatattttgcggaatgccaagaaacaataattacacaaattggtacttatcatgattcacttctaatgtctagtgtttagtaatcatgtatgtttttgccgttctgaactatttcagattgtgctttccagtttcccattgttgttttgaaattctctttttgtatgtttatatcctgtaggtgtaattctaggttagagcgaagatgcgagatcttatatcatttcaagacaagtttccatctgatgttcacaaactttaaactagtcttatgaagattaatgaatgaaaaccctgatggatactggatgttcaatgaatgttgtgtactacactagtgcttagaacacttagggaggaagttagattgataacatgttaaaatacttttaggcagtaaagcatttgattagtttgaatctaagatcttgattttattttcaattaaagttatgtatgtgatgagagacgacttaattatttgtttatttatttattttaaggaaggagaaaaaaggacttgaactcactggcaggtagttgggatttcgtgtctgtattgtagttttgttcatgtatgagataaattttgttcaatttatttagtcatcactactcagtttgattttgaagctttgtactgttttgcccttgcaatttgcatatttgctgtctgatgagcttgtctgtgtgtgtgttatactaggtcaaagaa

SEQ ID NO: 107012 - DNA, 440 bp, Aquilegia coerulea
  Intron number 2 from transcript AcoGoldSmith_v1.022048m (l ocus AcoGoldSmith_v1.022048m.g) derived from phytozome v7. 0 (chr-ID scaffold_4; pos 6060323 to 6060762)
tcaccatccactggtaattttgcataaaagacgtgcataatttggcatgtatgaaccatttacttatgctcccggtggtgctcgtcaggcctacatagtatattgatcgatttatgcatgcacgatttatgcatgcacgatttatgcatgcacacaacgtacctgtgtacttcaggccgtcggtctagtttgttttctaaactactcttaagtcttaacaaaactaaaagattagttgttcggttcgttcgagttaaatattgattcaaataattaacttttgtaaatctgaataagctgtttacaagtcattgttaaccttttaataaggccataacacactacacactatttcttttttctgtgttcttatttttctccttatttttctttttttcttctttgcttattgttgtgaattgtgattcatcttcacaggc

SEQ ID NO: 107013 - DNA, 890 bp, Aquilegia coerulea
  Intron number 2 from transcript AcoGoldSmith_v1.012904m (l ocus AcoGoldSmith_v1.012904m.g) derived from phytozome v7. 0 (chr-ID scaffold_17; pos 202017 to 202906 reverse strand )
gaaactgttcttagtggtgatatcatacagcccatgtcaattccagcaatgaatttttgcaacaatttggaagcggaatctaatatcaacttgcgtccttgcttatcgtctgagatctctgcgaaagaagaaacaactaaaacatcgctgatagattcaggaaattctgctacaatgagttttgagagcagtgaagttggacattatgttggagaaccaaagcttttgaatttatttgtgtaatctaattatcatagaaatattctttttcgtgctagtgtacttctctatttatgcaaaaagaaattattattcttttgtcgactccacattgatataatttgctttattctgtgggaattgttataagttaatacattttctatcagagtttttgtgaacaatacattatactcaaattgaaaatcactcaagttctcacaatttgcatcttcatacttatcgaaaaaagaaaaaaaaacatcacttcaattgtaaaccgtcaggatctgcataattggatacatttcggcaaaacatcacttcaattactgtaacacaaattactattaggcacccttcttcagaataggtctccacatgtacaggtcttcgagataaacagtggtatgtatcaacttgtactcggcaaagatacattttaatcgcattcaaactagcagtaccaaatccagaaacatttaaatttcagaacacagaaacatgcacttttgactagtaattgcagatgttgtacatatatacattagcagatcagctttgctttcaactatattgtatacactatatgaaactgtggaagccatttctctaacctaagcataaaaattacagggtattaaataaatcttcacgatttccgaagaggc

SEQ ID NO: 107014 - DNA, 604 bp, Aquilegia coerulea
  Intron number 3 from transcript AcoGoldSmith_v1.015036m (l ocus AcoGoldSmith_v1.015036m.g) derived from phytozome v7. 0 (chr-ID scaffold_38; pos 1146028 to 1146631 reverse stra nd)
agtagttacattggcggaagtaatcttgaagaaacggtttaagatattgctattctcgtaattttcttttgacagtcgttatgaggataattatcttccaatggccctgcaatcctatcaatgttttttgtcattgttactgagtatagtcaagaggatctgacatatagaagtatagaactcttccaattttcacatatcctagaaaatgctgtttacatcaatggataaatagatttctaccttcagtatccatagattacatgctttaatatgagaattgatttagtgtggcgcaattttgttctaatcgccagagtatatttgaataacatatagagcactttctatttacagaattatttcaatgtttgattgtccactcgatgaaccattatgttttgcctgatactgacatacaagtatcagatgtcactttccatgctttttctgttgacactaacaaaaaccaggatatagaaagttgcaaatattaaatattagttagatggggattcttccaaattaattatacatgttcatgtgataaagttcttctttctatatagccatcaactttgttgctgtttcggaagctcttggc

SEQ ID NO: 107015 - DNA, 821 bp, Aquilegia coerulea
  Intron number 1 from transcript AcoGoldSmith_v1.019335m (l ocus AcoGoldSmith_v1.019335m.g) derived from phytozome v7. 0 (chr-ID scaffold_38; pos 1643498 to 1644318 reverse stra nd)
agcaacaaatccaataaatctaagtgtagtcctgggtgtattgattttttttggaaagggagtgtgtgcgagttgtttatttcaagaataagctggatctaaccagctgcacttattctttaatcactaggaaagaagggtgcacgatctcgcgaattacttctgaatagattaagaaatcatatgtacgaaccatagcctttcgtgattcattggtaaataaactttgattctctattaaccaataataggggaacctaaacatggttaaagctaaattgtttgaagtctgggcgcaacatgggtgctcttctaccgctatgttagtatggagatggtttcaaaatgaatagttgcatttatccgatatagaacactcatatggataaaatgattgaaccctttactggaactggaaaaatgggaatcccattttatccaatgcggaattgacgacctatgtataaagtaagcggaatttttggattgaagaaaaagaaacaactttgccgataattacagatttttgtctggtcggaagagtcctccgaatattctggtcttggatcaacgatccctttccatattgggaatccgaacagagaagagaggatatgctcattccataaataaaaaagagatatgggaaggcccgcaagtaagtgagcgtgagagccaaatgaattgaaagattcatgtttggttcgggaagagatcatggaatttggaaatgaatgagaagataatctactttcattaagtgatttattagataatcgaaaacagagaatttgagtactattcgaaattcagaagagctg

SEQ ID NO: 107016 - DNA, 466 bp, Aquilegia coerulea
  Intron number 2 from transcript AcoGoldSmith_v1.005590m (l ocus AcoGoldSmith_v1.005590m.g) derived from phytozome v7. 0 (chr-ID scaffold_17; pos 2353128 to 2353593 reverse stra nd)
tgcaaggtaaacagcttacctattatgatagcacataagttagtgtatcagatacttgctaacctcatattcacagcattaatttttgggcagtattcgttactaaaaagtaaaaacaaagcatctgcgaaaatagcaattttaattttttttttcccacacttatagtttcactttcttctaaatgtaaacagaaagtgttctcggtctttgattatagagaaagtgtagctgattgagttgtagataagtagggcgctatatgtcttgcctagtgagctcattcgatgatcctgttaagtttcttatgaaatagtttttacctcattttcttggcagagattcggcctgactcgttactcttcagctttggcattgctgacaagtgttaagtttcttatgaaatagtttttacctcattttcttggcagagattcggcctgactcgttactcttcagctttggc

SEQ ID NO: 107017 - DNA, 786 bp, Aquilegia coerulea
  Intron number 1 from transcript AcoGoldSmith_v1.005590m (l ocus AcoGoldSmith_v1.005590m.g) derived from phytozome v7. 0 (chr-ID scaffold_17; pos 2353731 to 2354516 reverse stra nd)
ccctttttcaccaacaacagaggagtatcttcagggtaaggagtgataagttttctccttttttataactgtatggttattttaatttatgtttttttcctgataactgagctggatatctagtatctacatcgttgttgtatatgcaatgtgcaaatatagattggtattgtcagtgtaattatctgctataattattcaaagggattctaattgtttttgtttatcacgacttcgaatttgagttttatttcatataatatgattgttaagtggacatataaattaagtattggttttctggtagttttttagttgatgtgttaatcatgttctgtctaggtttttcatttcttcatcaagaaagataaaattttgtgatattttttggaacataattggttgtttgaaaaagaaataaatggttgtcgacaccatggagatcatcgtacctaaaagaaattatttcaggtggactccatttaacatttttcagcaattttcaatgaattttaagctaacttgccagttaccattgattttaaactaacttttcgagctttaatttattgacaatactagtaattttgacagtactagtaactcgagctcatccttcctaaagcacaacctatgttggcatatgagtgactggaggacactttttgtcaaaccatgttggttttattttgttcgattatttcacatctttaaagattcaacaacatggtaatcatttgtgatttggcaggaataccaaacacttttaccaggtcccaaaaggag

SEQ ID NO: 107018 - DNA, 795 bp, Aquilegia coerulea
  Intron number 2 from transcript AcoGoldSmith_v1.011563m (l ocus AcoGoldSmith_v1.011563m.g) derived from phytozome v7. 0 (chr-ID scaffold_17; pos 3923694 to 3924488)
agtaccagacgtgtcaggacaacggataatagcaggttcattttttttttttttattttatatcttcaactctactattatgtacttcttcatgctagctgatcaatattgatacagaacaagcttcaaaaatattatatatgatataagtgaaacttattgggtccaattgtcatgtttgtattcatgattaaaagtctcgttaatgatgaatattaatccactttcggtatcttttccctatagtcgtggaatgtctgttcatcactcacaaagtacttcaactacaccgttttgctatatctgtctgctgttgtaaatagctttctatggccattcaatgttttcaatttcgtaattaagagcaaattttatctttgatttttatttgattcttgcaaaacggtatttgagcaaatgtttttttattacttgaattacgattatctttatttctcttctattcaaactaaatcttccatttcaaatttggataatctaatctggttaatatcgcagtcatcatttcttttatccatcctttctataagttgacaagttgtatgtccaactaatgaaatcattgttgctattagtataatttattgcacaagtggtccaaaaagttcgaactccttacattttactgtacattggttcgataaagagggcataatagtaatgcaacttgcagcaaagcatatgcacattgcacaagtctgaaattaatttatggcttatatttcacatctgttttcaggaaagctcttacgggaaattaaaagtttgtggcga

SEQ ID NO: 107019 - DNA, 542 bp, Aquilegia coerulea
  Intron number 1 from transcript AcoGoldSmith_v1.015031m (l ocus AcoGoldSmith_v1.015031m.g) derived from phytozome v7. 0 (chr-ID scaffold_14; pos 1280643 to 1281184 reverse stra nd)
gaagaatcccagcaggtatgcttattttgcatttagcgacaattttgtgttttgtattactcttcttattccttacattgtagtagttaagtttatttttgggtaccatgaatcgtttagttggtttcacatatttagaaagctcagaagtgaatgtatttctaatatggtagatttgaattaatacccaagtatgcgtagactcactaacgatggcatacttttatgtaattagaaatgccatgtatataagaaaagaaacagtaatgagaattctactgaaattttaacgagaagaagaaaaaatagaccccctgcagtttttgaaatgacgctttgatggtctaggtgatattgctatttgctaatgggtctagagaagcaatgctatctcttctggtctcattgtcattttatatatattgagtgctctccagtgatcctagattttctattattgatttttcatttttgtatacctgctaactgagttcttatgctggtaatgacaaatgtgttactatttggtaaaaacagtgtat

SEQ ID NO: 107020 - DNA, 637 bp, Aquilegia coerulea
  Intron number 1 from transcript AcoGoldSmith_v1.021161m (l ocus AcoGoldSmith_v1.021161m.g) derived from phytozome v7. 0 (chr-ID scaffold_23; pos 3390941 to 3391577)
acaagtaggaggtgaatcatcttcaggtgttagaggtactttaatttgtttcaattaattaaaaaaaaatcaatgaaatagtgttttgttatgaaaatactagtattaaaatttaaaaatcatcttctctatgccttatcttagtagtttttcatgtacttgtattagtgtcatcaactctatctaaataaagcatatattgaacagttgaactatatataaacatgacaattataagaacatgtattcatttcttttgtttctatccttatcctttgtcaatttcattttttattatctcccaaatcaacattaatttagttgatctttagtttgatttaataaatatacaaagtatatagaagcttcctctagagttatccttttttttttatagtggattacattaccaaaagaattgattacgtcttccactgaaactcgataaactagaaaacaaatgcatgaagagaaggaaaaaaaaatatgttctgactacttttcgacatttttacagtaaaagaagaagttggaagtattgcagcaactactataactactacagaagttcaaccagctccaagagatgagaatacttactatgcaggaggaggaggagaaggaagtgttgctgtta

SEQ ID NO: 107021 - DNA, 851 bp, Aquilegia coerulea
  Intron number 3 from transcript AcoGoldSmith_v1.002798m (l ocus AcoGoldSmith_v1.002798m.g) derived from phytozome v7. 0 (chr-ID scaffold_4; pos 7292345 to 7293195)
caagctttcctggtttggcggagaattcttgcagggtgagaaaattttatatacttcatttattttgttttaattattcttgagatttttttttttatctccctggttataggaatagctcatcccttgatctgtttgaaattttgtatcttttttttattaatatattgatcgtttacctctctaaaaaaacacaattatccttgagatttgcttcctacataaaaataatgatacatgtattggtctggcagatattgcttgttaattgctagtactagtcattattcacaaacttatatcatctctcataacaattggtgggttacttgcaaatcgtggtggtaatgtaatggaaaacaatggagatacattgataatccgtgtaaaagagattgttatttaactttagacactatgtttcgatgaggaatctgcttggaaaagttggatagatgaaggatgtttactgtgacaatgatacctgcgtatcttgcacaacttcatgattaataggaagagaacgatgacattagatcaagatagttgctcaaaaaacatccctctcaatgttatatagaattcaatatgaccgtggaagccttgttctaagagtagtcgtaatccctctatttttattgggcttgactcattcaacctgttcagtactgttgtctacttgtcaccaatttttttacatggtcctgatacatcttcgattggctggtatgaagccgaaagaagtttatgggcatatgaccggattggcttgtaaaagttgcatgcattgttatcatctccgacaagcgttatgtttatatggggcttttatatgtgcagactcgaggaaa

SEQ ID NO: 107022 - DNA, 971 bp, Aquilegia coerulea
  Intron number 1 from transcript AcoGoldSmith_v1.010150m (l ocus AcoGoldSmith_v1.010150m.g) derived from phytozome v7. 0 (chr-ID scaffold_20; pos 1273566 to 1274536)
aactgtatgtctccttgcctatctgtattctttgatattatcaatctacaactatacatgcagaattatatgttgaaagcaggcatgccactttttcaacatttgttaagtgatgtaactattaatgacgatttgtagtgtttgctcctggcgtgaattctttccttgtattttttttcttcttctcccatttaacttcatttgtcatgtgtagttaactagttatctatccatgcagacagctttttcacatttgaacagattattaacttcaaaataaaattaaaatagctgcctagccctttcaaagtgaaaagtcaaactcatctagatgttggtcctccaccaaaaggatttgaggtctacttattaagattatagtactaagctaagcttcttgtgctttatgttgctccacattagcttcaatatgtttgaatgaaaaagctgaaccgtacactctgtttgacaaggccggtgagttggatattgaaaggcaattgatgcctgttcctttggtttgaataaaaaaggaaatgtaaaaagaattttatgaggcaggttgtggtgaggcccaccaaattatttgcgtaaaacattttaatagagttatgagttattgccatgttactccggaaaggttaagtttcctgtgcgcacaggtaaagaatttgagtttgatgacattgctccataatataacttacagttcctggtggctgttgaaaattgtcaacttatttgcatggttcgtaatatcagtgatatccatcatgacgatcctttgttgcgtacttgcatgctatgtttttgacttttgtctagaattgatttttctctttatcctccactgcttctcgcacgttggttctgcaaataatagattcattccctttcacagttgtcacaattttgttgatcaatattcaataacacttcttttgtgcatattcgaaggtatcctactggcc

SEQ ID NO: 107023 - DNA, 772 bp, Aquilegia coerulea
  Intron number 1 from transcript AcoGoldSmith_v1.012969m (l ocus AcoGoldSmith_v1.012969m.g) derived from phytozome v7. 0 (chr-ID scaffold_4; pos 4009435 to 4010206 reverse stran d)
attattggtcttttttaaggagaatcaagtcaacgaggctttccattttttcgagaaatggttaccaaaagtgttcaaccagatgttgttacatacaactctttgattcatggcctatgtgttgtaaataacgccaataatgcggaagcgatttgttcacaacgtgatctacactaataaaggtgtaacctttgtcgaagataataccttgaagaaactaacttgtagacaataatatgaagaactaactactagaataacaatcaagtatatgtaactagaaagtaaaacacgataaagaaattcaagcactcacaacacaagatttaacgtggttcggcgtaagcctacgtccacggggcaagataataaagtttcactgtgaagaagaaaagggtgatacaaagagcactaactcgcactcctccacctcacaaacaagctctcaaatctctcaagaacaagttattcctcacttttctttcttcaatctctcttcaagaaaatctctctcaagaatacctagatctcaactttatacctcacttcacctttctcaaggagacaaacaactattgaggatttaggatactaaaccaatccctaagaccttatatttatagcctttagggtgtacaaaacaaattcctaataggaataccaaacctaatcaaattggaagtcgtattccaataccaaattctaaatccttaatatggacttagaaatccaaatatgaaacggatttcttagggaaccggtttccaacact

SEQ ID NO: 107024 - DNA, 773 bp, Aquilegia coerulea
  Intron number 1 from transcript AcoGoldSmith_v1.001236m (l ocus AcoGoldSmith_v1.001236m.g) derived from phytozome v7. 0 (chr-ID scaffold_5; pos 8246293 to 8247065)
gattctgctgtttttctcaggatttatttacttgggtatgttcacattttttttttattttcatcttttgggtattatttgttttatatgtatgttttaatcatatcaatgctagccttgattctctttctttcttccaatttgtttactattgtggaatttggttattaatttttttttttttagagtactatcaaaattcatgctttggtttgtgactttttgtatgagttcattggcatacttttttttttttaattctctgtatgcaaaaattctgactcatttccgagttcatggatgtgagattgtttgatgaatttgtctaagcctctttggttatttggccctgtatttttcgtttcttgtatactgattaagagtcacaggctcgtccctaagaatgtctggtcggcgttttttaatctccatcaattaggtgcaaatggttttgaacactgaatttgtcacttttgggccaagccccaacttaacccgaacaagtatacatatatcatttgttttatgtgatgaatgataaattttgttgcttaggtatcctgactataattctcctacatggagttctaatgcctttatacgattattgacatgttactttaaatcccgtattttttatgattaatcttctttctcaggactgctttgtagtaaacaccttgtggtatttctccagtcttgaatgtgtgacctgagtaattctatttgtctatgcaggttgaagatatttgtaccagtgacgattcttgcac

SEQ ID NO: 107025 - DNA, 933 bp, Aquilegia coerulea
  Intron number 1 from transcript AcoGoldSmith_v1.005880m (l ocus AcoGoldSmith_v1.005880m.g) derived from phytozome v7. 0 (chr-ID scaffold_20; pos 1007886 to 1008818 reverse stra nd)
gagttatagctgatctttctcttctgcaaatcaaggtactgtaatgtaattgttttatatatctaatacagtatatatcttttaaatacatcttcacaactaggtttatattactcacacaatcacgttcaacatagttagctagggatttgtttgaaaaaaaaatttaatttatattttgtttgagaaatttcaatataatggaattttatgtatacattagcatgtatatatgtttatattatatccatccactgctagtcccttgccggggttaatcatgcattttaaagctgtattcaatcaaaaaattttgttgtttcaagtatttagaatgggacaggtgaagaaggtggagaactcagagtttagcagaggaggagaatgggtttagttttgatgatggtagcaagataggggtttggtttcaaagagtttatttatttgaattaaaagcaagaaagatatatagaatcgcttgaggatagagaatgagtaatggactgagagaggtaagggtttcaagtttcaacagaacacggatagagtgagtgtgagaagaaaaaaggggaaggatagaaaaaagaagtggatggatgtacacattattagtcccacccggtcttaagaccttcaaatctccaatgtcagctgaaaaagagaaattaattgattggggatgagcgtttattggtaatactattgtaggaaatgttcaagtttctattttatcttgtttccaatacccctaactcttttactgacgatgctttgtcaattattcaagatgtttatcttcatcatatgattagctttaaaatgtgattggtgattgtgaagtaataatcatttgatcaccatgttgagtaattaatgtgttttttttatgatcacctaggtgtcctttgcgaatttctatcattttgaaattgg

SEQ ID NO: 107026 - DNA, 849 bp, Aquilegia coerulea
  Intron number 1 from transcript AcoGoldSmith_v1.016827m (l ocus AcoGoldSmith_v1.016827m.g) derived from phytozome v7. 0 (chr-ID scaffold_53; pos 192682 to 193530)
aatcttaccctgctgctcagtacattttccataaggtaatgagtacattagtttaatttctatgtttcattagaaagggttgcattgcgttttgcttaatgaatttagataccgttttcttaatgagtttatggcatagagttacagaactatgtgaaaactgcgttagtacttttgtgttgtttataagccgattaatggtcatttttattgctacgatagctctataggagctgaaaaaaatgtgaaaatttactgtcaaagtaatcagaagaaccccatttgagattacagaatattattttcttccaaattctcattggaaaaagctgcaaataccctaaactttatgaagctttgagatttgcagagtgttatggttgttttttctattagaccctggaattaggagaagctggttattgttgtattatgctatatcggaaaaaatggttcgagatcagtgcactacaagcttttaaattatccaaaccacgacctcatgggttcaatttttctgcaaacctctatgttgccttgcttctggtccaatgtgaagtacacacatgtacaacacaaaacagaccttttcttttggatcggtaagacaatttttttgaaagatgtgatattaggtatcacacaaaaccccaaaagaagtacatcaggcagtcacaatacaaaacagacctgttactgtaaattcttaagacctgatagtttcttgaaaagtagaaatttataagcaatgccaaatgagcttaaaactgcatcacgactgataatgcttcactttggaacttgaatgaaacaggatactggagagtttacgttggaacttgaaaagcc

SEQ ID NO: 107027 - DNA, 443 bp, Aquilegia coerulea
  Intron number 1 from transcript AcoGoldSmith_v1.011667m (l ocus AcoGoldSmith_v1.011667m.g) derived from phytozome v7. 0 (chr-ID scaffold_17; pos 3308044 to 3308486)
tagggacgactgagtttcttagagcttcgaaagaggtattgattttattttcttttggtgtggtacgatgtgattagtttttcttcaatgatttcgttatttttagcttattagtgcatagatccttgaatttccaaacgtgatttgatgcaaaaaatttatttttatgggtgtttttagtttgatctttcaagttttacgctgaaaattattttattggttcctgatcatttatttgagatgagaattcaaaatgcttatttttgttttttcaaaagcatttttaaatgaaattattcatcaggtggtttcgtagtctagaaatgaacgaaatgaaaattttaatttattatgctattcatgtttatttgatgaaataattaacaattttttctatttatggaacagaattcgatctatcagatcagagaaagagagacaag

SEQ ID NO: 107028 - DNA, 547 bp, Aquilegia coerulea
  Intron number 1 from transcript AcoGoldSmith_v1.008165m (l ocus AcoGoldSmith_v1.008165m.g) derived from phytozome v7. 0 (chr-ID scaffold_135; pos 72064 to 72610)
aaaccctcactcaaaacccttggtaagattattatctcatctcaatctcaatctcattacttcttcttcttgtttttccctcattttctatatctttagctattgatatttagtaaagatttctgtgtattttgtaatttatatcattacgactgcataggtttaaggtttttttttttttttttaatatgaatgaatgattcccacaacattttggtgttcttaatatatgaaaacgaaatccatagtttgagctttgttgtactatttacaaattaaaaccaaccattatttgttctttctatgtgtattttaaactaattttattcattttttagctcaaaatattcctaccataatccacaaattctaatgtttttatggtattttgaacgttgtgataataataacaaaccatttgttccaaacttctttaattaaatagctgccacagtgtacccatgtagtatatgttattaattaagactgtgaggcctcttatattgcaatatttttgttgggcagagctatacatcttgttcccaca

SEQ ID NO: 107029 - DNA, 363 bp, Aquilegia coerulea
  Intron number 4 from transcript AcoGoldSmith_v1.008165m (l ocus AcoGoldSmith_v1.008165m.g) derived from phytozome v7. 0 (chr-ID scaffold_135; pos 73571 to 73933)
agagagctgccaccgaaagttcatcatctgatcgtgtaagttatacttattttccaagccttttgcgaaatgcatctaatactcttcatatagctaatgctccgtaaaagcttcaaacaatcaaataagcctttatttatgtcttgttattctcaagtttgttgttaatgtgacttttcattcatggaaactcacatgacttgttttgtattaaccttcaaaaattaaggactgggattttgttgatgttattgttgtaggcttttgatcatacgtggaacctgtttatgcatttaattttctaactagaataatgttctcatttcagctccgccgagctaggaaaactgaaaacctgaaagc

SEQ ID NO: 107030 - DNA, 347 bp, Aquilegia coerulea; identical to SEQ ID NO: 106985
  Intron number 1 from transcript AcoGoldSmith_v1.011556m (l ocus AcoGoldSmith_v1.011552m.g) derived from phytozome v7. 0 (chr-ID scaffold_17; pos 4477409 to 4477755)

SEQ ID NO: 107031 - DNA, 940 bp, Aquilegia coerulea
  Intron number 4 from transcript AcoGoldSmith_v1.010787m (l ocus AcoGoldSmith_v1.010787m.g) derived from phytozome v7. 0 (chr-ID scaffold_17; pos 3915267 to 3916206 reverse stra nd)
aagaggttgcaacccctgctgcagttgacactaaggtaatattatatatatataaattaaatgtcagattattaattcagtattctcttatgcctcatctttgaggtaaccactgttgatacacattcttcttaagggatgtttatgtagctgctaaatgcttacatattgtaatatactaatattgtttcatggacggtaaattttgattcctgacatgtaatgaggtaataaaatattgggttgttgcctgtttggttgaaggggattgtatggggggaatctatcaaatgggaactataactttttctatagatttttatttgctgtaagagaaccaagttttctgtaagaaattgagtagtcccattaggtgaatttaacaaaatggtgacgtttttgacattttttgttaatgatcaatcccatcctttctttattgcaaggagtcgtaactctttttaacctaacattaccattgtgcaattaaatgggtaacatttgcaggttctcttactagagtttagaaagtatgaactagagatgttatcgtcattttattgctaatattgcttgtaactttgtttactgaatttcacattctcacttcatgaaacttgtgtctgcatattgtcagcgtacattgtggggatgatatgatttagtaatattataatgagatatttaagattttgtgtgacaatagctctagattatgatttgaaacttaagtgttagtttatatttgtttatgaattttgataggaactttgattatttgaataatgttttggataaactgtgcatattgattgtttattttatttattttggctggagtattagtaaaattttcatgtcaaattaagtcctatcccctgattcttgttaagttttggaatatgctcatgtttgttatttgtatttcaggccgtagctg

SEQ ID NO: 107032 - DNA, 715 bp, Aquilegia coerulea
  Intron number 1 from transcript AcoGoldSmith_v1.026998m (l ocus AcoGoldSmith_v1.026998m.g) derived from phytozome v7. 0 (chr-ID scaffold_66; pos 1025454 to 1026168)
gtcatcttcgagattattccggttctttccaaagagtaagttttcttcctcctcttgtatatctccatttgttcatctgtctttaactggagtaatcttcttacttttgttaatgtataaatttaattgattatttcttttatgagtgtaattttgtttactaaggacattctacatgccttttatctttttgcactatcaccactatgaattttactccgatcacctctcatcagctataatacaactcagcaaaaaaaatgttcaaatctatactgacatttatcagtttgtatcctaagttcctaactaccaatacatcgcaatttattttggattcttccctttgatcatcttgtaaccttttttcttacttgaatatttatattaattcaaaaataaattatgttaacgcacaatttgttttattttactaacaattttgttaaataaaccatactgttgactgttcaagaaaaccttcacaattggtatcaagactttatgctccttctatgttggttactacataccacagtcaatagcatttgcatcccttattaatgttggtgattttttttccttctacgtgataagtatgtattttgtgcatttagtttttcttctatgcattagtctttaattctttatggattcaggatgacttttctagttgatctaaagatgttgtcctactttatgaatgcagggcaag

SEQ ID NO: 107033 - DNA, 430 bp, Aquilegia coerulea
  Intron number 1 from transcript AcoGoldSmith_v1.005673m (l ocus AcoGoldSmith_v1.005673m.g) derived from phytozome v7. 0 (chr-ID scaffold_45; pos 922736 to 923165)
atcgcttcaaaattcaatttttactctgtttcaaggtaacacactttacttacactactttatatgttgttgcatgttaagatcatgatgtttcttcttagaatctggtattgattcatgtatttattagtaatcttatataaaaatctaatttttgttctgctttgatgttcagttggaaaaagttaatttttttttttgtgatttttgaacttaaagatgatcatgaatggttttttttattaaatattagttcaaaaagaaatattgttgtggaatttttttgttagtgttagtgttggttattttcagagtaaaaaataactgttataataaattgattttatcatcaatggttatcatgaatgttagttctgaatgttgtaatgttctgaagtcttttttgagaggcgaaaccaggtcggatcag

SEQ ID NO: 107034 - DNA, 300 bp, Aquilegia coerulea
  Intron number 2 from transcript AcoGoldSmith_v1.008410m (l ocus AcoGoldSmith_v1.008410m.g) derived from phytozome v7. 0 (chr-ID scaffold_14; pos 2433130 to 2433429 reverse stra nd)
gataacaaaaaaagtccagatatttcatcaggtaaaccatttttattttatttcttagataaataagagaaatttagattatttttcaccaatttgctatgaagttaaatgagttacattgtcttatttggaataagaagagattttgatgtttttgtatttgcgagatttgattaaatatgttggaaggagaaatttataaacaaagtcccccaatagtgttatcagcatctcgccaatgaggggttattgctttgtttgagcaggtaatatatttttgcaggtgcatctgaccgtaga

SEQ ID NO: 107035 - DNA, 845 bp, Aquilegia coerulea
  Intron number 1 from transcript AcoGoldSmith_v1.009308m (l ocus AcoGoldSmith_v1.009308m.g) derived from phytozome v7. 0 (chr-ID scaffold_5; pos 2581590 to 2582434 reverse stran d)
gccttggaaggtaaatcttgtttaatccaacttatgtttagatacagatattgaatggcattgtttacgggaaaaacacttaactgagtagcacacactactataattaggatatatttgtatattcacatctcccgaatgacctaggcttttgcacatttagtgagaatgcagagctccacaacttcagatatctaaacctaattgacgaggatccatttttaatagaaaacatttaaaatagcacaatccagctactttgatttggacatcaaggaggaaaagtaatcataggattatagtttgcataccatattccagctgtagctattgtgttatgttttgggggtgggggatcacaggatttccatagtcttaagaaagttaagcctgcctctgatgtatttttgtaccatttttttttcttttgacttttgagaggttggcgagcgatttcagtagcaatagttaattagttgagtacaatcagggaagaggtatccacttcacaatgagaaaaataagaacaaaagtaggcacttgaaaaaacaaagtaacaactacactcagctcggaaattctattttgttgtttgaaactgcacatctagaatattttgatgtatgcttcaaagataacataaattttcatattgttggaaactcgtatattcaattatttttatctgatgcttatgagtgaagccgcagagttctctaccccacatccatctccttcaaaaaaaaaattatgaatatccatttgaaagatctgccatcatctactaaaaagcgatgctcttcttgtcagatacgggaattggctgaaaaagaacctgagaacgg

SEQ ID NO: 107036 - DNA, 986 bp, Aquilegia coerulea
  Intron number 1 from transcript AcoGoldSmith_v1.004300m (l ocus AcoGoldSmith_v1.004300m.g) derived from phytozome v7. 0 (chr-ID scaffold_14; pos 1584453 to 1585438 reverse stra nd)
agagagaagcttgggctaatttcaatcagttccaggtttggtgttattattattcttcaccttgtttgaattcttctgcaatagtatttgtttaggcaacctctaggctgttaggtacttgacggggtactaggtacacttatccattgcatgacaagttgacaacagaggttgatttttgttaagtccattttgtgttaaaatagcaatctgtctcacagtgaaactcactagtcactacaaagtgtcctgttgttacgaataagcgtacatctaaaatgtgtcattgcgtgtgttggggtgcgtccctgtttcaatatatggttgcatgcagtatatagaaaaaaactcaattggaacaggacgactattaatctgtactaaatgataatagagatcttgttatgtacataatgcacaagaattcctagataccgtgttggacatggtttttgtgtagggtgctttctccagttgagacaggttcatgctacttaagaaagacattactctcttagtctaattagagtttatatttttgagtaggaaaatctgtggttcctgcaggagaaataaatctagagggttgcatcgctaggattatttgctaaacatggaaatgatacttatttcagtaatagctcactatccgtgtctgacttttgtcaaacacttctagtgttttctgttttaactcttaattttgtactgtaaaacataattacttctaatattactcttggactcaattccattgttgatctcaaatttccaattatatatgacaagaattccttatttctgtatcatatgaaagttggttgacctatgcattacaatgtaagggttagatgtgttcatcaaataatttagtggttggccaatgtgtactcttctatgattcagggtgttacttatttaaagattgccaatcacatatttactaattgagaatgtcaacttaacccagaattggctaaaaaaca

SEQ ID NO: 107037 - DNA, 731 bp, Aquilegia coerulea
  Intron number 2 from transcript AcoGoldSmith_v1.000395m (l ocus AcoGoldSmith_v1.000395m.g) derived from phytozome v7. 0 (chr-ID scaffold_20; pos 2964753 to 2965483)
tttctgagtcgattcggtaagttgtgttgatgctagttatgatatatttttacaaggattatgttggtgaaattgtggtggatttagtgctccttattgtttctagaaacccattgacatcataaaagaattgcaaaactattttttccattgctaaataggccaacaaaatagtgtctttagttgatcaacaaatcaattatgtatttccagacaagtggaagccttatatattacttacacgtggacacataacttattacctatgctatgcttgttgtcttgagttaatgttacttactgaaggtcttaagcagtatgtgggcacttaggcacaatattcggtttactataatggtaattaaagtattaaactagttttgcttgcaggattttgcctttttatcttctattgctctttttttttagtctggtttgagctttattgaagaaaaagaaagaaacatacaaacttacctagcagttagtgagtaactcacataacaagaacagaaaaagaaaggtctctctgtctgctcatttctgcatcgtgagtcatataatgacttgtatgtaacatttttcactttctaattttcagacgctagtaacgataataataagttcaaaaaaaaaacaaaaacaaaaacttctatactagaaaacatagtgccttgattttaacgtgttattgtctttgactttatctttaatacttgagttgtgcaggt

SEQ ID NO: 107038 - DNA, 635 bp, Aquilegia coerulea
  Intron number 3 from transcript AcoGoldSmith_v1.005488m (l ocus AcoGoldSmith_v1.005488m.g) derived from phytozome v7. 0 (chr-ID scaffold_17; pos 2817535 to 2818169)
ttgctgagacaaagaagcttgaagatactttaacggtaccaatgaatgggaccttaggttccctatgttagccatttctttttctgttctttacatgcaagattctcataatagaggctatgaaattatgaagggagatttataattgaatatattatcccaatactcacttgtgggtcccatttagaaagtctttagaatgaggcccatcagttgattctcatcacctgaggtttcttcatgcgaagcaaagatatacatattagagtgttagactggccaaatattgaatagttataaatttataagaaatagttccagtacctaaaggtgtaaagtcattgaccctcttggtttattagatctttcaccatattttgtattatgtgagaagcaattttgtaattttgtcatgacaaataaaatttattgttgtgtgactgttctggtttttgaaaggtcttatatctactcaatcgcataataaacgaaatgacttgtgataattgtttctttgtaattatttgacacataataatcatggtagtgttcttttgattttatgttctgttgcctaatttgcacttttgttttatgcaattctgcaggaagaagaacaagctcgaaatagtgtg

SEQ ID NO: 107039 - DNA, 936 bp, Aquilegia coerulea
  Intron number 1 from transcript AcoGoldSmith_v1.016999m (l ocus AcoGoldSmith_v1.016999m.g) derived from phytozome v7. 0 (chr-ID scaffold_20; pos 2137334 to 2138269)
ggccgagagaacttcccaaattcactaaagcagaggtaaagtttatttattttccattaaacccattgttctaattataatttgcttacatgggtatttcttagatttcaatttccttttcttttatacaaaaaagtaacaaaaaaaaaaggtgtttgcttgatacactatgaatctatgatactggttttttttattagtatgacaaaaggtttttcgttgcatttgtttgtaggcaatattttccactaaaactagtactaaaaaagaattggtgtattagaagaaagacataaatttgccatttttatcatttatctgttctagttgtgatttgggatattaatgtagtttgtggtctaccatataacctttgcttaaaagaaatgtttgtgttagttattaacactgttgtagtatgtattcaatttttttttctagtagatggaaaatgtttaatttttcgggtgtactgtaattgttcacttctttttatgtagcagtggatatcaatgtttgggtttttgaagataataagtatatatttggccaagagtaacatgtaacttgttattgatagaaggaaatatatagcattgttcatagatttgcacgagaagatataagtgccaacagaggaaaatgtgaacaagcttagcgagctttctgggttaactagggggttcaatttgagagggtgattgacaaacattgaaagtttcttggcagctattgttgtttggaatttgaaaacattattaccatatgtatgtccacaagatacatgattaatagtatttctgtttctttgaatatgttcacaattcaaggtaggtctgacaatttttcggatgtttgacctaccgccgtagaggggagataggaatccttgctctcaaccacttacaatttcttacctttctacagatagagcat

SEQ ID NO: 107040 - DNA, 658 bp, Aquilegia coerulea
  Intron number 2 from transcript AcoGoldSmith_v1.011349m (l ocus AcoGoldSmith_v1.011349m.g) derived from phytozome v7. 0 (chr-ID scaffold_14; pos 5788939 to 5789596)
cctggtaatttaatttcttcattcatccatacacaactacattttatgcaatatatgcatgctagatcatatcccatatatcattgcttagcttattctcaatttcttttgacttgccgcctattagtttgtttaaactctaagtagatcttatgaggaaatcatggcgtagtgttagtgtctttttgtggccaaacttttaaacttgaggatagatatgtagatttaatatctttagtaatgtccagattcaagaaaagagattcaattttcctattgatcgattacaatacatccatgatccatatatcatggtttatgtttatgttaattttttctagaaaattttctacatggaggttgtcgtttaatttcttaccctgcgcgcaaatggaaattaagaacactcctccaaaaattatactgaaactacggtacggttctgggttcaaatgtcttgctaagatttgttgtcgtcgtttaaaaacacatatgaacacactttatggatcagcacagccgtcaatggctggctaggggtgtacaatattttcagtataagtacgttgctgaaggccgccccaaatgtatccttcttgtgttttaactctattggtaatattaatataccattgtaggtttatcaccagcaggaggg

SEQ ID NO: 107041 - DNA, 724 bp, Aquilegia coerulea
  Intron number 2 from transcript AcoGoldSmith_v1.009924m (l ocus AcoGoldSmith_v1.007751m.g) derived from phytozome v7. 0 (chr-ID scaffold_76; pos 52706 to 53429)
tttctctaccactgcttctgcttcttatccttcttgtaaatgctcttttctcctctcttactcatatctctgaatctttaattttgcagctttacttgagtttctgttttattttcagaccaactactagtttttgttttcaatctatctgatatatttctgcttttagctcatcaatgtctgctttatctttaattgtttgcctaggtttctatggtttttaaataatttcttcctgtacttaatgattctttagagttcacttatattcttgttttcccaaaaaattctatggggtttttggattcaataatttatccttactttgattgattgaatataggtcatatcttcaattatctgatttggggttattttgattcttacatttgtccatctgctttctagattgatgtaaaaaatgtgtttcttttaccatggtccgattcgagcttttttgtttctttttttggttaatgtgtttgtttgatggaatatttttgggtttcaacttagtttattcaaatctttcaattgggattcatgggttcaatctcaacttaaggctgtaggaatttgatctcatttgctttaagtttctttgatgtgtttgcgcgcattcaataattaagttattgttttgttttgccatgatctaaagtgggtttgttttgttttttggttagtagtgggtaggggttcttgtttcaatttaaggctctcc

SEQ ID NO: 107042 - DNA, 495 bp, Aquilegia coerulea
  Intron number 2 from transcript AcoGoldSmith_v1.011359m (l ocus AcoGoldSmith_v1.011359m.g) derived from phytozome v7. 0 (chr-ID scaffold_14; pos 4314094 to 4314588)
atttaaacctggatcggcgtactggatttgttaaggtaagcgaaccctttatcggaaagttattttcatactcatgcagtgcattacagaattatgtcctggactaatagtctaacacttgtgtcatatatcaaaaacccctctatcagtacttcacttgtgtgaaaatagtgtgaatgatctgatggtcaaggtacacgcaactccaaaaattatgtactaggaactctcttaaaaaacttgccattccaacaagcagtgttgtgtttcatgtgtgattaactgattacagtatgtctgtttgagaatataccttttttgtgtccctaataattgttttgtggagtgtgaagactaaagaattttgaaaatttaaaattcttcaatttaattgatagaatactttcattaggtgcaaacaagcataatagaacaacacttaaatgcagttataagttacaactaactgcaaactccttttctttccccagggct

SEQ ID NO: 107043 - DNA, 542 bp, Aquilegia coerulea
  Intron number 1 from transcript AcoGoldSmith_v1.007028m (l ocus AcoGoldSmith_v1.007028m.g) derived from phytozome v7. 0 (chr-ID scaffold_14; pos 1839503 to 1840044 reverse stra nd)
ggaaaacaacacaacaaaggtctgattgcactctgtttttttttataaaaaaaaaatcctatttttttcttacttgaagttgaaattttcactttgatcttcaaaatttctcttgggtagtaagtatttcggtttaattctttttttttttttttttgttgaagtttattatgttttttaatcaagcttttagctagaattgggtagtttttagatgattttaatcaattgaatttgttctatatgagtttaaataaagtaatttcgattctttttcataatcaaaatttagattttattcttgtatgtttttataaaagtttcattttttttttgtcataaagctagcttcttgtgattagtgtctactagtatgacgtgtttacaagctagataggtttcttctgcaagtattccatgttattgacagatgggttgctttaatttttattattacttgaagaagttttgaaattactatagttattggaagttgaatgttttcttctcttttaatggcagatagtacacaaaggtgtgaa

SEQ ID NO: 107044 - DNA, 611 bp, Aquilegia coerulea
  Intron number 1 from transcript AcoGoldSmith_v1.011846m (l ocus AcoGoldSmith_v1.011846m.g) derived from phytozome v7. 0 (chr-ID scaffold_38; pos 17467 to 18077 reverse strand)
gctcttattaagaagcttcgcaaggcggtatgaatttcatattcaattttttattttttatttttgttttgtttattgcttgaaatcgtctgtttccaataaatctgatggtttgggtttgtatttagattggattattttttttatgttgataatggtttatttggttatattttggatgttgtatagtagtctgtagatgttttagggtttataattgtttttatgctgagaatgtttatattaatgacatttgataatacttattacaagtcattttgaatgatcaatgaatgtaaaatgagggcgttgaatttttggttatttggtattgtgatagctttattattttttagttattattttaattgtagaatccaattcaaaagaaaaaattgatgtttgtgatgttgaagattgttttggtatatactttatctcaaattttagttgttgtctgtattgtttttattcagaagatgatatttcagaaatttagtgatggctgtttttgtggggtttttacaattcttttgtagtagtttgtgtaatcaattttatttttaatctgagcagaagcgtgaggcccctgctggtgagaagcctgaacc

SEQ ID NO: 107045 - DNA, 632 bp, Aquilegia coerulea
  Intron number 1 from transcript AcoGoldSmith_v1.004219m (l ocus AcoGoldSmith_v1.004219m.g) derived from phytozome v7. 0 (chr-ID scaffold_45; pos 215313 to 215944)
aaaagtatagaagagagagaattttactcattttggtaggttatactaacaggtgagaaatactaatgagtttgctttaattgttttggaaattgagttgttttcgtgttgatgagattcgacaacacgccgttcttgtttttaaagaaaaacagagtagtgccgttttattcagagaagaaaaaaaaggggcggaattaattgtttttacggctgagttgttgtaaaaagatttgaaaacagagttttgtaattataactggcatttaaagctcgttggaactgtgaattcaacaaaagctttctttataagtttatcttttctttcttttctctgttgttctggttttgctctgctttagcttgaacactcatccaatgtgtgtaattcaactactaaaataacccctttcaagcatttcatcaaacaccaacaacttattacttattgtagttttcataataaagatatctttttttttttttaacattagttctaaaggtattatagatctggggatatatttcaatccctttcaattagttctataagtttgattgaattttgtctcatttcttgtctgttttatgtttcagatctaaacaaaaaagaatctgttagatataacgga

SEQ ID NO: 107046 - DNA, 851 bp, Aquilegia coerulea
  Intron number 1 from transcript AcoGoldSmith_v1.005084m (l ocus AcoGoldSmith_v1.005084m.g) derived from phytozome v7. 0 (chr-ID scaffold_17; pos 2673084 to 2673934 reverse stra nd)
ctgttgattcacaaatttcaggtgagagatttgaatttttttttttgttaatttgatttcgtcattaattgaatttgatttgaaattctctcattagattagctgattagctggtttagagatcgatatatgcttaaaggaacgatctttagtttttttatttgttactttgatttggattttgtgtgaatttagatatcttgttaataaagcctttgcacacatgaagtagcgagaattgaattctcgaagaaaacagacaattgtattgcaatttatttttaattctagtgaaaagtattgattgtttcgatttatattgtttacacaatttagatgatttgaagttttgggtccttttttagaaatcttatggtatattgatactgttatagtttgaacctgaacctcattattttagctatgacattactggtggcgactgacgaattcccattagtgccttatagggagtttatagaatggtgatagtgtgattctttttataagaatatatttgtatcaccggtatggtagattaaccaatgttgagctaatggttaatgtttaaatttttgtccactcttgaaggggggaatgttggtccaaagaagtcacttatcaaaaaaaaagaggagaagatgtacttattgtttatagaggtgtatttactatttagaatgaaaaacgtgttttattagcctataaatgggttttttttttttttttatgttattgtgcatgtaccaacccttttatttaggtgcatgtccaaaatagttgaaaaataactaacattatgtgcttctattacaggacttcgagagaagcatcaattggaactagaaaag

SEQ ID NO: 107047 - DNA, 754 bp, Aquilegia coerulea
  Intron number 2 from transcript AcoGoldSmith_v1.011434m (l ocus AcoGoldSmith_v1.011434m.g) derived from phytozome v7. 0 (chr-ID scaffold_5; pos 2797350 to 2798103)
tccgataaccagcggtttgcttttgtattagacaggcaagttctattcttcaaaatggttgattcaaagcacttgtttttatcctcatgtacgtttattaaaacttactgtttttggttgatcaatatatacatatcagtgttcaaagaggcggaaactaagaatcttttatgtttgtgaaccttgatcaataatcaaaggcaagcatcaatattcacatataggtttgaagcatattcactggaacttgaatggtttgatatgggcatatattttttgattaacgaaatttttgtatgatagctgactgggatgccagattggatgattctaacattttctttttccctgaggtttcctagcatcctaaccaactctaatggactaatgcttctatagactcaagctggacaatgcttagctctttgtaattattgttgtattttttattaactcgaaataaattgataagataaaggagtcttacaaaatctaatgaagaacatgtatgcttaaactttatcagtagatttgtttcttgaggcatgtgctaatctgaagttcaagatactgatgatgtttagcgaaataaattgacaacaaaaaaaagtcagttgccattggtttccatttcattgaaagtaacagtagatcactcattttattcatgcacatatttgttattttacggctcatctttgtactgtttgacctcattgcagttgcataccgctgtataacttcagctacacat

SEQ ID NO: 107048 - DNA, 960 bp, Aquilegia coerulea
  Intron number 1 from transcript AcoGoldSmith_v1.003582m (l ocus AcoGoldSmith_v1.003582m.g) derived from phytozome v7. 0 (chr-ID scaffold_41; pos 188234 to 189193)
agtactatcggattgctgacaatctactcaaacaggtagcttttcttagaattcaatcaaaatttcattttgttttcaacttatacttctttgcgtttcattgctagaatggataggttttagtttttaagttcaatagtgtaatttgaaattgcactggttctgttgagtatagtagctgaatttcatagttttagggcaaatttgaaattaaaattgaagaattgtagaaaattggaggtaaatgaaagtacacatctatgccagtgcccagtgttggttgagacttgagacgtttacaggtttatgttttgaacaattttaagtggagagtttttacgaatacatgaaagcactacattagtagatcatagttctttgttgtaaaagttctatgatcagaagtgcaataggcctacattagcctagatagtgtgtaagtgcaataggaacataagacctaggttgggaaatcttccttttgagttatgactaattccaagagctgtgaatgaaacaagattatataagactctttttttgcttttatgaacacattatacaaaaaatctggtagttcttctcatgtagtttagcgttttcctttgctgctagttcaatttattcctcttatacagttttgacgaattgcactatgttctttagtcacataatggtgtaatgtgaacgacttccatatgttaatcagttgaccatgttcatggtcttgtggtgcatcaggcattacctcattttccatcatcttaggttctcatttcttgttgttggattaaaaaagtcctgccgaaatctatttctcagaagtccagttaggctattatttttattgatttatcattagaattttcaatagaatgtctgttgcttaatactgttgtgctaacttcgggactgatgctataataataatgcaggctgccatcttccgaggcgagaaaa

SEQ ID NO: 107049 - DNA, 813 bp, Aquilegia coerulea
  Intron number 1 from transcript AcoGoldSmith_v1.019701m (l ocus AcoGoldSmith_v1.019701m.g) derived from phytozome v7. 0 (chr-ID scaffold_14; pos 2505138 to 2505950 reverse stra nd)
gttttgtgattggtagccctctctgtcttctttttaattaatttttaatagatgagagaattaattgaattgatggattttgatacacttttttgggtgatctgctggtacttccataatgcatacgtttttgcacgttgcaatcatattaataaacgtataaaaccatgaatcgtgcttgcgaaataagcatctcatagtttgcagtagaacttctcaaactaatacttaccactaaaaccataaataaatcagttcatccaatagttggtttttcaagaatttaaaactttcttccttgtgaaaccaactatgtagaaggcatctgtctattaactttgacagtgtgtcatctaactctgacacactccaaaggtttcagatactggtatttacaaaatgcagttccttgagataatctttttctacgtagaaattattttcaacagatcaactgtgacttatgcttcgttttttcgacgtatattagttcttatggaagtaaatacttggtttatggacaaggtattgttgaatgaacattgggagagagtagatggggaattgttctaatataaacggataatttcttttttcctgtaactgtaacttttaactttcactaatataaacatgcatagaattactgttctggagatttcattgtatattatatatgtagtatagtaagacatgcctgtgccatgaacttagctttgtttttctagaactgatttgctctccatgtttaacacttttcccatttctttctaccacttgcagtttgtgatccaaagagccttctcttcgtgt

SEQ ID NO: 107050 - DNA, 650 bp, Aquilegia coerulea
  Intron number 1 from transcript AcoGoldSmith_v1.023829m (l ocus AcoGoldSmith_v1.023829m.g) derived from phytozome v7. 0 (chr-ID scaffold_45; pos 1822623 to 1823272 reverse stra nd)
gtcctctagtaagtttattagagaaaggtgtaaaatttttgcacttttgaaatagcatcaaacttttgcataaattttgttcataaaactaattatcaagagtttcaagcatattaaattaggctaaatttcatgcaaatttttgcggggtaaccaagcagggcctcaatatcaatatacctacatgacattttgactctcggacaccaactatgatttaaactaagtatgggtacaacaatacaagagagtacgtacccatgccttcattattttgtccatttgattttttcttttctatattattctaattccaaatagcaggcacttggcaaattaataggtaccaaaatttcaaagcatttaaataaatatcccaaccatcacccatatgtggtcttctctatataaacctcacaatctcttccttctttttctccaagcaactcacaatctcacatcttttcttatcacatacatataccatacccccaaagaaacaaatggccaattcagttgtcgttaaagttgcattatattggtgctagtagcatgcatgttggtgactgcaccatatccagcagaaggtgcgtactttgagaccctgtattaactatcttagtgtacggttctagccctcttccacccgc

SEQ ID NO: 107051 - DNA, 703 bp, Aquilegia coerulea
  Intron number 1 from transcript AcoGoldSmith_v1.006119m (l ocus AcoGoldSmith_v1.006119m.g) derived from phytozome v7. 0 (chr-ID scaffold_14; pos 2048340 to 2049042 reverse stra nd)
ggttcaaggtaagttcttttttctttaatgggtttggtagtattttgtgatattaaagttaagtttttctcaattttttgatttgggtatgtaaggtttgtgtattctcttcaatcttattgtgggcaatcttagttgcttctgcatatttactttttagctttaatgggttcagttcatagtaattctgtaatatttttggattaagtagtgctaattcatgaaaaatctgcaaatagggctaactttgtctatttctcaatgttgtacttgtatatggagtatggacaagaggctttctaggactttggtcttttgtgattaattttgaaacttttgttactagatttaatcacagctactattgatttagaatcctaagcaaaataaaattttagccaagtttacatgtttcttggtatttcagatttgaacgtttttgaagtttgaagaacttatttttcaaaaggagaggcaatggttaattttaattggcctcaccagaattcttcttatcataaaccctcaaataattgtatgtttttaaacattagatggaatttctttctaatctgtacgttttttccttttctttgcatataacatgatattcaaattgttgttacattttacgtttttttttccttgatctgaattggtaataagattctgaagcttatctccttttttgtttccaagggtt

SEQ ID NO: 107052 - DNA, 802 bp, Aquilegia coerulea
  Intron number 2 from transcript AcoGoldSmith_v1.022437m (l ocus AcoGoldSmith_v1.022437m.g) derived from phytozome v7. 0 (chr-ID scaffold_45; pos 1114988 to 1115789 reverse stra nd)
ttaaaagattcactttagaatctccaatcattgtatgtctatttagttcaccaaatctgtttcatttaaattgttttgttttctttgtattgtatataatcaattgatcaatgattgatatctaccatagtttgcaatatagtttttttctgtgtggttaagtaaaatgagaataatgaaagtactacttaattataagtggaagagacacagaaatcaatcaaagcaagagaggagaattatacaaaggactacttgttgttcctttacatgatcatgtaccaaccacaaatggaggaacccaatgtccttgatcaacttggcttctgggaacaaaatgcctctaaaacattgtcgacattgtcaatttttcatggacagccattttcatattctcaaaatgtcacaaaattgtaagggtaaaaagaaaaatacgtttcctgcttgaggaggttttatttgtttccggaaggggggggggggggtggtcccaaggattctgattagtaatatgctctagacttatttaaggcattaccacgcaaaaaaggcatggtgaaatctcttgtattgacattgcatttattaaatcaagccttacctacttccgatgtgaagcctttacatctctttaattatatacatataatctgttttgtggataaaaacattttgtatttcctttgatgtgttgtcttactaatttattcagcgtgtttaattagcattgtctccaacaatgttcaggcatcttttcacatgttaggaatatctgattgatatatgaacttctattgtagac

SEQ ID NO: 107053 - DNA, 869 bp, Aquilegia coerulea
  Intron number 3 from transcript AcoGoldSmith_v1.009510m (l ocus AcoGoldSmith_v1.009510m.g) derived from phytozome v7. 0 (chr-ID scaffold_17; pos 4532250 to 4533118)
atctttggaggtatgacacaacattttatatcattgtatgtgttacggatgtcattacttgcagctattgcatggcttttaaatttggtcattgttgccgcaaatttattatagtagtgataattgtgccaactagcaactgccaacgaccatctccctataaatagagccccacgattacacgagaatcatcaacatagagtggatgttcagttctgcctcaaacatcaatatctgtttacgctatggttttaaacaccattgctagctcatttggtagcaaatttatctgtgtggtcagtcataggttaaccatcagtgcattctttttcccaaaattaatttaaatataattgaaagaatcaaacattgtactattgtagaacatagacatccaatctaaggcccatataacatttaactgcatccgcttgcctttaagtgcatgttttggtaatatgtaagtatgtaaccaggtctcacctggaccttcaagatctgcttggatgttgcttttcagttaggggtttgatttgtggaaacggctatagaaccacagagcacccttcccaaactgcaaatgatcttccatttcccccttaaacatcctatgtggcatcccaaaaaccctaaaaaacctctatgatgtattattgtagctcttcttgtattgattctttgccatattagtgtatgtccaatgggaaaaacaatagtttattccaatgggcacacaatgattgaaactttcttcctttaattatctttgtgaacattatctctatttttttcttgatttttttttttccgtttcttctgttgtcaactgcgcagttgaaggcatcgattctgtcaggagggaaaagctt

SEQ ID NO: 107054 - DNA, 902 bp, Aquilegia coerulea
  Intron number 1 from transcript AcoGoldSmith_v1.016546m (l ocus AcoGoldSmith_v1.016546m.g) derived from phytozome v7. 0 (chr-ID scaffold_45; pos 1576174 to 1577075 reverse stra nd)
gaaaggtactcattcttttctttttgttcgtttggtcttcaatgcatcaatggttcaaattgtattgcacaagtatagccgcagatttactgaactttgcctcacactctgttgcattcgtcatacttttgataacaccactattgaaagggacataggatttttgctgctctccctagatgagtgtgatgaataacatatatcatatgatgtttgggtagtaaacacctcaagtaatgcaatctacgagactgatatctataagcaaagataaactaacgtctaagaaatatatgactctaaaattgtagatggatcctaaatggagacactggtcaggctgaaagtaaagaacaaaatattgttgtgctttgtggaactatgacaccgaaacaggtgaaatttgaaatttgggttgtctgagagaattgagatttgctacaatgcaaaacaagatggaaggaactaaatggtttgtgtttatgtagtggaaacactgctggagcaaatataacttgattttcatctaaaaggttgtaactggacaagtgaaaacaaaaatcactaccttagatttgtatgaattccaaaatcacattgcaatgtttcaggttgaatataggtctccagagcggaactttcgttcagaatccttgaataattcacgcaggcattttgcctgtaacccttgtgaacaaataaaggaaaaaagaagatgaattaaagcattaataatagtaccgataacaaatctttccctttgtttgtctgcatgcagaccttaccttactcaactggacatactcatatatacgtatatactatataatagcctgatagaaatagcattggtttgaatttttttatattgctgcaggttattgactttgaccttccaatca

SEQ ID NO: 107055 - DNA, 731 bp, Aquilegia coerulea
  Intron number 1 from transcript AcoGoldSmith_v1.015894m (l ocus AcoGoldSmith_v1.015894m.g) derived from phytozome v7. 0 (chr-ID scaffold_20; pos 1773801 to 1774531)
gcagcacctcctcctcctcgttcacatcctatcgtgtaggtttcttttggtaattcagttgttatttctatggattcgaagatttgaatttttatggatttaggattttagttgaaattcatactaataagtgtagaattttattgatttttagttttatgagataagaaatttggttttgaaaatcaaagataagaaattggttttaagaattcaaaattttgaaatttttggtatagtggaataaaattggagtttcgaatcttttaaatttttttgtatgagtttgattccagattccagagggtttcaatctgattttactattggtaagaatataaatgaaaaacatgcaatgtactaaatttttttttcgtatttttggaatcaaaaattgaaattaattcctttagttttgaattaagtatctagtttgtctcaattgaccaattgggtgaatgatacttaaaggattttttatggaaacaaggattgcatctatatattagtttacatgacttggattttctcttagaatcatatatgcttaatgattcttgaaacatactaaaccctagatatcgtgttgtgttggttaagcagttggtttgattgaactttgaattcttcattttccctgcctaagtcgtagaattatataatatctaatttttgcatgcttgtttcttgctttagaaagcctgagtccccaagatcgcggccaaggtcta

SEQ ID NO: 107056 - DNA, 740 bp, Aquilegia coerulea
  Intron number 1 from transcript AcoGoldSmith_v1.000281m (l ocus AcoGoldSmith_v1.000281m.g) derived from phytozome v7. 0 (chr-ID scaffold_14; pos 2342101 to 2342840 reverse stra nd)
tttggcgtgcacctgaagacgctgagcagagacaggtgtgcctttatttttcatatagcttgctataaaattcatttttcactgtaaacaattttagttatatatggttagctttaaaattaatatatgatgattaaggacgaggttggatgtgctcaaggtagataaaagagttgattggactgacacctcatgttatcaggccttatccttatgacttacgatagtgtgtaaattatgatggcgttagaattattatagctgttacacccagatgagacacttgattctactttgagatctgagcagattgacacatcgactgaccaggtttgtattaacaatctgatcttccttttcccaatggatgtgggtttttcacacttgtatcaattcgtggagcttttctaatgcctgcgatctttatcgtttgggtggtttaaactagactccacagatcacactctatagtattttgacttacgagactgatgtagtgcctttgtacaaaatattcattcatcgagtcagtagttttgcgtgagtattgcattagaatggaagttcaatgaatgatgtacggatataatccatctatacaaggtctcttagtgcctgtgaagtatttctttctgtttttgttttcttagtagtttcttcatcggttttgatcagcttattgatatatgtttttgctacatttaggctcaaattactgcgtacgtggaatattttggtca

SEQ ID NO: 107057 - DNA, 257 bp, Aquilegia coerulea
  Intron number 1 from transcript AcoGoldSmith_v1.002095m (l ocus AcoGoldSmith_v1.002095m.g) derived from phytozome v7. 0 (chr-ID scaffold_5; pos 1961342 to 1961598 reverse stran d)
tgattctatcaactctaatcactggtaattttctaagaacatcaaaccgttatattatatatattatatagaagattaaaagtcaaagtttatttctctcttttgtttcaattctagggtttctttgatgattagattatttagtttttttttgtgataattgatgttttttttgttaatttgattgtagaattttatggataaaattgaatttttgttaaagagtttttgttgaattttgatcaggcaagcgaaag

SEQ ID NO: 107058 - DNA, 610 bp, Aquilegia coerulea
  Intron number 1 from transcript AcoGoldSmith_v1.012116m (l ocus AcoGoldSmith_v1.012116m.g) derived from phytozome v7. 0 (chr-ID scaffold_42; pos 1332233 to 1332842)
ctctcttcatcttcttttaggtatgtttcatcttcatctcctcttgctttatttttattgaactttgggttgtttttgttaaattttttattcttcttcttcctcttctcatgttgtttcgaaaattatcaaaaccctaatttgggggttttcaataactgttctttgtaatgtcaaattggttctaatttatgttgatttagtaattttcatgacaaagtgcgagctttttttgttaaaaatattgaatttttttcgaaaccttaacctaatttggggattttgtaaaccctaactatatcatggggatttgttaaaccctatatttatagattatgtcaaactgtaactctaattttgaaattgattgttaattattaaaaaaaaatgtaaactttagttcaattatctttgttaataagttgtagtttttggtttatatggatatttgaattttacaaaatctctggggttcagtatgtttctatgaccaccactttgttatcttaactttaaatcaccttcattccagattttgtaattgttgttttcttgtatgaattattttgaaaaattcagagaacagtccaatatttttaaagaagaagat

SEQ ID NO: 107059 - DNA, 581 bp, Aquilegia coerulea
  Intron number 3 from transcript AcoGoldSmith_v1.017025m (l ocus AcoGoldSmith_v1.017025m.g) derived from phytozome v7. 0 (chr-ID scaffold_4; pos 7683060 to 7683640)
aggtgaaaatagagaacaaaacgtggaaagttgatgtaagtaagatactttttttttttttttctaattaagcagaatttcagtagaatttttatattttattattgtaatttccaataatatacccacctgtcttcaaaagaagctattttcgtgaaattgcgacattgcatagcaggcaaacagaaattaaggttttatgtatcatgaaagatttggtagcaaaattgacttgttctcaacccgatgaagaaagaaaaatggacttcacggatatttttctcagttttaactatctattatcctcattctaaatcatttactgtttgtttttgatttctgaaaataaacatgactagagtttgatcgctcctaaagtatttgaaatgtaacccttcaaggtttgaaagagaaaaagccaattgcatcccatttaagatatctacatcataaataagtgtctttttagtttacacgcctcgttttggttatgaaaaacaaatgtgattttaactttcttcattggatttcttttcctccttttaggcagggagtagaacacttgatcttgaactgactac

SEQ ID NO: 107060 - DNA, 746 bp, Aquilegia coerulea
  Intron number 1 from transcript AcoGoldSmith_v1.016889m (l ocus AcoGoldSmith_v1.016889m.g) derived from phytozome v7. 0 (chr-ID scaffold_42; pos 797634 to 798379)
gtggcgcaggttttggttagttacgttcaacttattgatctttttttttttcttcagttttgtgttttaattagttctttctgaaaaaaaaaaataatatgcctagaccagattgctatgaaatgatgctgaactaaataactcacaggacttcgtccacaaactagcctagaaagttttgtatactattatgttaggatgttcttcgcattaaggagataatgtacgtacagtcacacacacacatgcaaatcagtttcattgaatagtctaccgttgatctgtgagggtggtcgataatatgttaattaatgtcaatggcggagccaaattaaagtggtcaacattgttttaatcatttgttgtcaaaggcggcatgaatgtggttatggtagtagaagcttagaggaacctaattggcctgcctgatccctggcaagagagtgtacgtaggttcacagctgttcggcttagcctgagtcagtttaaaaaggaactaaatttgatctgtttctccccaggtattcacctctgttggtaaatgccaaattaatgtcccactggcaaacaacaaacacactattttattataaccgggataccacatcgaatgcatattcatattatttatcataatcgaagaaaaaaaaaaaaaaaagaatttcatcatctaatatattatcgttgttgatactgtttctgatttaacaggctggtatttcattaggtcctacctttttaggaca

SEQ ID NO: 107061 - DNA, 592 bp, Aquilegia coerulea
  Intron number 3 from transcript AcoGoldSmith_v1.001057m (l ocus AcoGoldSmith_v1.001057m.g) derived from phytozome v7. 0 (chr-ID scaffold_20; pos 3964666 to 3965257 reverse stra nd)
gcctattctaaaattgagaacaggtctaatttgtattctttatgtaaaatgtacatcttaaactttaagagggaatttatgttctagatttcatttcagacactgagagttaatccccttcttatgtattcaaaagaaaaaagttctggaacaagtgtcactttggtattggaagtattctctttcttgtacaatagtatcatgcgtatatacatttcaagagttaaatatctattggcgaataattatagtatcttccttgaaaattaaatggtcattgcatctttaagtgttggatatctcctagtgtatcattagcttcatggaggttcaatatcagatcagtacattaaattttatttggaccaaggcaaaaagtgaagtgacctgtgagttaattttatatgttccaatgttgtcatactgagttttgcagggtttgtttttttttttttttttacatagaatacattttttatgaagtattacatagataagcttcgttttataccaagttttgtttttctgaagacaactttttaatgaatttttatgtttgcatttattgattgaatagatacaagaaactcct

SEQ ID NO: 107062 - DNA, 713 bp, Aquilegia coerulea
  Intron number 1 from transcript AcoGoldSmith_v1.009447m (l ocus AcoGoldSmith_v1.009447m.g) derived from phytozome v7. 0 (chr-ID scaffold_20; pos 258079 to 258791)
cagtggttgcgccttgcggccaagggtatgttgtgggccatctggcttttgaggattttcatcttgttttgtggtagagttggcgccttgtgtgatgttagtgtcatctaccgtagatcaataattacacgcaacacatgattaaaataaggttgtttcatattaataatgcagttacaggttatagagaagttgtgcatagcttgatctctttttagtataggtacttagtaacttaggtagtccaaaaagtcatttttctgatagtcacatactgacacatacttcatcttctcaggagagaataccagattccgtagacttgttacagactacaaaaataatgaagtgactgtaggatttgtgagctctcgtaaaatcaaccatggttctttgcttctttttgaattttgatttgaagtacttctctgtctttgtccaccttccatttttccattacccttggtttatgtcggatcatttgcgaaaaccttgattaatttgagtgtacatgcatagtggtacaaaaatatctatttgcgctggccttaaaacacctaaaatatcatgggtttccaacaccagcaccttaataaaacaaaacaaatgcatcatcaccagagcaccagcatctttcaatccaactttgctatcaataatttacaacatacacaaagactacatatatttccagattgcaataatactatcca

SEQ ID NO: 107063 - DNA, 571 bp, Aquilegia coerulea
  Intron number 2 from transcript AcoGoldSmith_v1.002491m (l ocus AcoGoldSmith_v1.002491m.g) derived from phytozome v7. 0 (chr-ID scaffold_4; pos 7269189 to 7269759 reverse stran d)
agatcgaaggtggatttgcttgtgctcttgatctcgtaagtattttatctatataaatgtgtattatttcagtagaaactgaagtaatagttaaatcttatatgtcttcaacaattgtgaattactagttctagttgctgctttagaactattcttgttgcagcttgatttccattttgatattttgtttatatcataaaatgcattttctattgcgatgaattgacaaatgtctagcatactggactaaagtgtaattatcttgtattattttcttagaaatggataattggatatgttggcttagttatataattctgcatgtacacttccaaaatattctaggtttccactaatagcggaattgaagagttgcatcttatcattttgctcatattttgcatatcaacttgctttagttgattggattttgtttgagtttgactttcagcaagttttggcgtctacctatttagtttgaatacttatgtacattttttatgtagaaaggtaaaattgtttattccaagaaaaattgctcataattttctgtattgcgcaggtgaagcat

SEQ ID NO: 107064 - DNA, 307 bp, Aquilegia coerulea
  Intron number 2 from transcript AcoGoldSmith_v1.008203m (l ocus AcoGoldSmith_v1.008203m.g) derived from phytozome v7. 0 (chr-ID scaffold_5; pos 735390 to 735696)
tccttgtgttgtctggaagagacggcgttgttgcggtaatgaatcaacctgtacatttgattatgatttacacagtttcagttggtttttcttttataaaactatttctttcacattatcttagatctgagttgcatgtagtatttgtacctaatttagagtttcttcaatttatgtcccttttcattaaaatgatgtagctttctatctagttggtactagactactatcaccataataactgatgtcttcttattcactatttgtttcagcttggtggtccatacatccctctcaagacaggaag

SEQ ID NO: 107065 - DNA, 508 bp, Aquilegia coerulea
  Intron number 2 from transcript AcoGoldSmith_v1.019314m (l ocus AcoGoldSmith_v1.019314m.g) derived from phytozome v7. 0 (chr-ID scaffold_5; pos 2612129 to 2612636)
acaactgagcttgatccaagtatgtatttacaaatccctcctaaagtttctcttcatatttgtgttcttctgtgtatttttaagtactgtagaaggtaacaagaaaacttatggtatgaacacaatcctatagttgaacaagttatgggattcacttctgtggatctccacaaggtaaaactcctaggcacaatccatgtccatgcttcacatggtggtgagtgaatgcaggcaagtccatgtgcctagaagatgcagtccatgtgtgcttagtaaggccatgtagtcttgcctgtaaattattttaagtcaatcaaaagtctgtcttcagatgtctgagattgaaagcaatcatttagatcagaaaacaatattgggtgacgatgcataaaatcttaggaatttcactttgatctgctttgccattgatatgattttcaatactgaactatcttgctaagtcaatattctggttaacatcgatttttttcttgtgtttttgcaggtc

SEQ ID NO: 107066 - DNA, 968 bp, Aquilegia coerulea
  Intron number 3 from transcript AcoGoldSmith_v1.014278m (l ocus AcoGoldSmith_v1.014278m.g) derived from phytozome v7. 0 (chr-ID scaffold_89; pos 482591 to 483558)
gaacctgcgtggtggaaattcggtgacgagaagtcgtaagtgtcagagttttatgcattctcgatttagtatttcattcagcttgttgaatatccacttcaagcatacctttagtgtcttgtgcccttattgaaagtaattcaagcaaatcacttatgtatcctcgtggatttttgcgttgaaaacatatgatattcataaatgcaatcacacatctagatgtccatgttgggattgtaggcttctacgacagccactcctttgagtgcctgtcgttagagtgtaagacctagcatccctttatgcagatgggcttatccatgcatgttaacgagaaggatggatcaggttgaccttgtatccagtggatgtaatgtataattatatatattaatgcaaaataaagaaacactgaaatgctaaataaaaaacactgaaatgagtaaatgactatgaacaaaagagtgttttctaaaagaaagagttggttgaaatttgtccaactatctccaggaacctatcctagtgacagggctgggctgtgtcttacactcttactacgccagtggatgtaatattaatgctaaataacgaaacactgaaaatcctatgaacaatagagtgctttctaaaagaaagactagtttcaaattgccctgtctccaggaacctatcgaagtgacagggctggggtggatactctaccttctagaggggtcctacgaaagggaataagagtttgggcttataaaaaaatttaacatatccatatcattctgcttagggtttgttagtatctacatgttcttgattcatgaatgtatccttttacttctctttagtgaaaattgtaccataaattgcatcatagctgcactgtgtacaatagtgaagtaattatactctagaatcagttggacgtattttatttatttgaattttcattcttttccccagatactttcgac

SEQ ID NO: 107067 - DNA, 539 bp, Aquilegia coerulea
  Intron number 1 from transcript AcoGoldSmith_v1.008448m (l ocus AcoGoldSmith_v1.008445m.g) derived from phytozome v7. 0 (chr-ID scaffold_14; pos 571115 to 571653)
tgtcgttgctgtacctcgcgatatcatattctcaggtaatttcttttctctcacccttcactcttaattattatgcagcattagcatttcttgtgtacacataacataacacattgcttttgtttaatttggtattttgaaactttaaatttaattagtttttgcttctgcacattggtccaaattcaaataaaccatttctggtattattatgtagcgaaaaatggactctagttgaaacagttgtagcataggcctcggtatgagttattagatttttgttatagcctttatcaatgattctgtctttaagaatctgaaaaggcaaaatagaataatcaatgaaattatggggtgtcattgttatagcctttatcaatgactggaacaatttccattacgctgagatcagtttgaaatgtctcccttgataatatgtactataactatatactctgcacagaatgtatattcataatatagtgcaacttaccgttgtttgacgctttttgtttgttttcttccctactgtagagttg

SEQ ID NO: 107068 - DNA, 662 bp, Aquilegia coerulea
  Intron number 2 from transcript AcoGoldSmith_v1.018354m (l ocus AcoGoldSmith_v1.018354m.g) derived from phytozome v7. 0 (chr-ID scaffold_5; pos 7425849 to 7426510 reverse stran d)
acgagcagctagtgtcccagaatacatctctaaaggtgatacttgtgttaatagaggaacattaacccgattgtttgatcataacatatgctctaccatatgtccatacaccattaatttctgaaataggagtcaatccaatgattgtgacctaattttctaaatgggatcttgtatagactttatggtatcccccacaaaatagatgtgaaatattcatgatttgcttttagcagatttctctcttgctacttgggagttctccgaggctatagtaatcaagatttgcaataatctggttgataatatatgcatatgtctcttcattgcattaatttgattgttccagcatatagtataaaagtttcaagatgttcctattatagatagtccacccataataatcccatttttgagctatattcttatcatcctttgcaatattgtggctgacaaatagttgtgttagataatctcatggggtttttttccttctttttatgttcaagtagacataaaagtttcatgtacttatagggctcacatgtgagacttaagactccattagtttattcatgtaattatcttttccatcattcatgatgataatatgtctaaggctgggaccctgcaggaaaggcttggggaaaatcctgtaggac

SEQ ID NO: 107069 - DNA, 745 bp, Aquilegia coerulea
  Intron number 1 from transcript AcoGoldSmith_v1.000341m (l ocus AcoGoldSmith_v1.000341m.g) derived from phytozome v7. 0 (chr-ID scaffold_14; pos 3192921 to 3193665 reverse stra nd)
ggaagtgaccaacaataagttctggcatcatccaggtttgggaagtttagccgtttgttttaaaattttgtttattaattactgccatttctgttatctcattttaagtttctttggcctagtttatatttaaagaagccttcatatatggtcatcgtgacccaaattataatactaaggcttagtaaatagccatccaatgagatttggagcatgattccacttcacatcacctcttcactctcagccatgcatcacattgctcttcaaagatgttttttttaatcaaccaagaagttagcaccttactcatcaacctagggctgctacccaccctactcttgaagaataagcgaatgcactttagaatcatcaagcgggatgatggatgagggcctggggctccatcaaagaatttgggattagtaaaatgtttcactcaaaactatacccgtcatgtatgaaggcaaggatgaataggaatcaggcaacaaacttcctggtattgtacatcagtgttaagatcaaatacagttgctatatcattcattagtggctctctttggaggataaaattattttataattcacaaaattttgtgtttgggaaaacatgaattatatacaataaatgttgaggttgattggttttgtacaatttttttatttgatatctgtatattttaagtttgagataatctaattttgtacaacttatttgacttccagaggacgcagagctcca

SEQ ID NO: 107070 - DNA, 811 bp, Aquilegia coerulea
  Intron number 4 from transcript AcoGoldSmith_v1.002815m (l ocus AcoGoldSmith_v1.002815m.g) derived from phytozome v7. 0 (chr-ID scaffold_17; pos 3079083 to 3079893)
aaattcaggcatgttaaaaaataattaaacgaatttttttatgtagctgcgtatataatgttcagcctctgaacaactgattcaggtcaatggctaaatgtcagaactttgattttgtgtggcgacatggaaagattgcaccttgtcgtgatcacacagttaagagtgagcagatgctcaagtggataattttctgagattagtgttgtcatatatatctctctaggaaaatgacttttgtcaccttagttcagaaggactctttatagtggataataaactcttactccatggaagaatggtttgaatagatagttcccttaaaatgctgtgacagagaacctctttgaaaatttatatcttctcaaggctttagttttaaagtgtaatagcacaaagaacaatgtcaaagtccaaagttaaatcccagcaccctggtgtgggcaatctgatctgaaaagtgaatcaatcacatgacatttctaatatcatgtatctttataattatttttcagatttatcatgctcatatagccatatggccatgtgcattttcttttatgactattcatgcatcattttgtcataaatttggtttgttcttttgtgggttttctcgattgaagttctgtgttgtttattcatcaaaatatctaccgcgaagttccttaatgtatgagggtttccgtttgtcattatatacaatttggttctcatattgcctaccttatcttgaagatttctgaaccaaagtatctaattgagactttaatccacttcacttaattaggtctttgttgtccttttttag

SEQ ID NO: 107071 - DNA, 913 bp, Aquilegia coerulea
  Intron number 2 from transcript AcoGoldSmith_v1.007324m (l ocus AcoGoldSmith_v1.007324m.g) derived from phytozome v7. 0 (chr-ID scaffold_14; pos 4764867 to 4765779)
cttttgtgagttagcaccattattgttttttatgcgtgattgtgtagtctttaaaattcatagatatctgttattttcagtattaatcaactatgttaaagcaactatggattgcaatctccatgaaataaaactaatctaaagccaaatagttataactcaagcaagcattatgagttaggtgttctgttcactatccaagacaacctccccctcgtaaaataaagtctctataaaaagaaaaatgtactaacaaatttagagcataatttccagtctttactgttataaaggtttatgtacttcttaatgatttatgtagctcggttttcattttgtcacaagtgtgagtaggatgagttgatgtgactttcgtgaagaaggtttttaagttttatgagtgcccaaaggtacttaatcttgtgatcatcattattctacactaagtatcatctaactatagtagacaaaagtgtgtcaactttgtgaaaatgagccctggcatgcatatcaacacaaacacaatactgtcacaggcatatcatattgtttcatggaatgccctttagtacctcatccacatctgtgatatatcatccaacccttgttgcacttacaccccaaaatttgagcaaagcaaattaacatattgaccaacggtactgcatcatgatgagccattatatttcagtaaatatttgagttccaagacagaatttattagagaaacagaaacatcatgatgtgttccaaaaatcagccaatggttttgggctcttgtttgaccagttttcttacatcgaaacccagaacatagtcttagcaatgcatattgtgaaacctttataaatatttgagtaagctctttgttctgacagtgcattatagagggtggaccaaaagcacccaacac

SEQ ID NO: 107072 - DNA, 325 bp, Aquilegia coerulea
  Intron number 2 from transcript AcoGoldSmith_v1.017600m (l ocus AcoGoldSmith_v1.017600m.g) derived from phytozome v7. 0 (chr-ID scaffold_105; pos 139953 to 140277)
tttcaaaaatcaaagtgatccaattagcacctaatgtactcttctatctaattttttttgctcgtatcatataacttttctgtggaactttactttttgaccaaaataatatcactgtatagtatataaaccttttatcttttctggtgttactgttggttttctgctgtgttatgttgagattgaagaactttcttcttgatgtaatagctttgcagttatatcaatggaataccttttgtttatgataaagaatcaaattagtaaggaagttatttttccttctacaggtggacctgagatcgaattcaaaatctgttgcatc

SEQ ID NO: 107073 - DNA, 813 bp, Aquilegia coerulea
  Intron number 1 from transcript AcoGoldSmith_v1.010525m (l ocus AcoGoldSmith_v1.010525m.g) derived from phytozome v7. 0 (chr-ID scaffold_14; pos 5053954 to 5054766)
ctttctctgttgaatctatagtgttaaaaaaccaggtatatcttcttagttctaaaaataaattttcaaatatttctttgcaatttgccaatttgtattaatcgagaggtgatcaatgcaggtttagtttctaatctgtaagatttcttttattaagttttgatttcttgatttcaatggaattataaattctagcttgttttaaatatctttgaaggattttggttataattattggttttgttctttcacgcctagtttcaacagatcttctgaaattatgttaaatgagatttttgatgctttagaatataattctcgaataaaaaactttgtttctcttattctttgggaaaacttttgttaatctatggaagatcaatgcaggatagttcatatggttgttactggcttagccaattgaagtgagaatcgagctgacttttttagaacagaatgacaagaaatgtagaaagatatgttgtttctcaactgatgtgttatgtattatggataaactttgaaactttaagatgagtggaaagatgatccagttgtgaaagtcgatatttttatattgcactatttaatttggaatgagaatagtaactgctatgaatcaggacaagaaaattttggacaaagcgcaagattttgactagtagtttttaattttttattaatgttcacatcggttgaatttggaatccactttttgtaatgataattattgttcagatcacaaactttggttttattgatttgttcttcagggagttgataaagatttatctcttgtgtaggtactcaaca

SEQ ID NO: 107074 - DNA, 676 bp, Aquilegia coerulea
  Intron number 4 from transcript AcoGoldSmith_v1.010525m (l ocus AcoGoldSmith_v1.010525m.g) derived from phytozome v7. 0 (chr-ID scaffold_14; pos 5055609 to 5056284)
ggagtagttctcaggtacaaaacttatctaacctttacttcaaaacaattgtctgtacatacaagtgatcactatctatattacagggaggcagagacatgtacacttgtcatagccaagtcataaataaattatatatacggagtgtggacatttatctttaaccactgagtactttaggcagttacctagttgtacatttttataatgtgttgctgaaggattaaggagggtaatttgcggacactcaggtaggcagggatactagcttactacaagatagtgcgtttgacaccatcaattatgagtttgagaatgacaaaagactattatgacttcattgattttataattaagttttgcagcaatggaatttacagaagtgaatccatcttcatccttttctgacgctgcatattatgtaagctgaatgtttaggttctaagcatagtgaaattctaagagctttgtgtccatggggaatcaaaatctaatcttgaaacatatgtattcttaacaaatttgtagtttgagaatccagagcattacacatgttaatgaggtcttgggtctgatctttattgcttcatatgatgtagttaaaagctcttcaatgttttcgtatctgaagataacatatcgtttctgtgtgaattgcaggttctttggcaggaca

SEQ ID NO: 107075 - DNA, 881 bp, Aquilegia coerulea
  Intron number 3 from transcript AcoGoldSmith_v1.016133m (l ocus AcoGoldSmith_v1.016133m.g) derived from phytozome v7. 0 (chr-ID scaffold_76; pos 563690 to 564570)
aatcttatagggctcgagtttctataaactttgaggtttgatcttcactctttgaaattacagtaaattggaatttttattcttatgtatatacactttttgggagtttctgttgcgcattttatgatactgaatttgctagaagctggaaaagtagttacttcgtaatttgtgtagacaatagttatgtattagaccattgtttcgtggaatcagtttatcttcatccccatcctacacgaacaacctaggtctgataacaatgtatgcaatggccgttatatggtgtttccttggattggaaacatgacaatatggctgttcttggtagagattgaaaaacgcccaactaagtataggagggatattcatattatatgtcattatatttaaaccactccatggtcatggcatacaaaaaacatatgtttgcttcactcatgaaaggattatgtttcatgtctctgacgttgcatgttggtacggtggtacctgtccaaatgggattggatttggtagacttcatagtgtttagttatgagttgatgccctgatcgatcagttttacatgtctctgactcttctcaaggtgaatttagttctgcccaggattcatatatccagaacgcccttattttggttttagagtcccttcaaataataatgagataataataataataataaataaaaattggagggtgttttcattcactaaatgattccaatcctcagcataagtgattatgcccttgcaaataggggtatcctttaaatttttttgttggttattcaacgtattctgtgtcgtaactttgtaatttttgtccgttttcttttacacaggggtatcaatatcaacttggtgatttccaattgag

SEQ ID NO: 107076 - DNA, 889 bp, Aquilegia coerulea
  Intron number 2 from transcript AcoGoldSmith_v1.011039m (l ocus AcoGoldSmith_v1.011039m.g) derived from phytozome v7. 0 (chr-ID scaffold_76; pos 149456 to 150344)
tactaaacaggtatttctttctgcttgtggttcttatttttacaaataggagagagtcagagtatgtaggtgcattactagaatttgacttaattctagacttgatgttgtttttaaagaatttgagctgtttcttcacttgatacatggtctggcattttctgattaatttgaagaaatttgggtgttcagtataaaataaggccaaacatttcaaccacgcactcggatttgggggaggggttgagatgtgagaagagggaattattggtgtgatcaaggaaatgaactgtgattgttgttaaatgagggtaatctcctatggttctttgtttgacgaaattaaatttgtttttggccaaagggggaaagaaaaaaaatgtctatgaaatgcccaacctcttaaaagagtgcgaatgagcctgtggctcaatggtagcacccctctcacaaagtggagaggttgtgggttcgaaacacgttaacagctgattgttgatataagtttccacacgtaatttaaaggggtaggggtcccctcaaccccgcttgccaattaaaaaaaaaaaaaaaaaaaaaaacctcttaaaagagtgggggttactgtccagagttactatatctatattttgtgtgaggatggacggatggtgaactcgtcaactatttttgttatatttctctaataagtcaatgttgaatgcaactctacattactacctctgttgttatgaattaaaagggacaagctctttgtttttgaaaagcttgtcaagctatgtttggttgcttgagtataaggcctgatttgctttcttctttttagctactacattctaatatatttatcacaggcttgtgcttttagggactcttacgaaaagtttaa

SEQ ID NO: 107077 - DNA, 592 bp, Aquilegia coerulea
  Intron number 2 from transcript AcoGoldSmith_v1.023668m (l ocus AcoGoldSmith_v1.023668m.g) derived from phytozome v7. 0 (chr-ID scaffold_90; pos 504594 to 505185 reverse strand )
aaggcttgcaagatagagtcattctactgaagagagtaagttttatattataagacaataaacggtcgttttacatgtaattaattcagatttattgtctcaaaagtcaaaacactgacagcactttacttaaatttgatgtataatcgaattggtaagaacaattaagggataacatgcagttgagtcccccttcaccaccaaaccacggtacttgtctcagaagaaggtaaagtaggtaaaaagtatactctgaattattttggactttaaaagtggtattgcacagattggaaaatggaaacactgtctatgaacacccctccctcctgttctcctttatccctttcctctctcctgacctttgcagttggttatatacttgtatgtattgtcttgttatgaaaagaatatttgatttattatgggatgaaggacaagatattagaatctgcattttaacttcaactttcgagttttgtttcagttgcctgaactgtataactcgaaacctcttatgtgttccatgaacgtgcataatgataattttgacacctttctcacttctatcaacagttgtcaggggatataa

SEQ ID NO: 107078 - DNA, 680 bp, Aquilegia coerulea
  Intron number 1 from transcript AcoGoldSmith_v1.023668m (l ocus AcoGoldSmith_v1.023668m.g) derived from phytozome v7. 0 (chr-ID scaffold_90; pos 505276 to 505955 reverse strand )
gcaggattacggttacactgctttgctgattattgagcgtctgtttttagtagtctttggtgtagatcttgttgtagcatactgtagttgttttattcgcctggaatatctcatcacttggctttgtttgtactcatctatttcttatgaatgtactatggtcatttacctcttaaaaaaaaagatacactttacctgtaatatatacattatttacatacctaggagaaggtgctatttatttgctgcggtaagatttgtgatatgaaagtaaggtcagatgatgaacttgaaagtcttggaaacagtgcagggcctgatctggtggaaaggaccttggtattcgccatatttagtcatatataaactctcttttgcacattctttaaacgttaaaagggaagtttctagacactaaacaaggagtcatcacagaaataaattaacatgacaatattgctgccttgtctcatgtaataaatgagtcttggtatgtctttgatcattctactagttaacttgctttcttcttgtttgcactagtggcgacattttttcttctaccattgagcttttttgacatttaatacacatgaaaggtgtctttgattattcttgcatggaggtactatcatcacatgtttcaccctttctatgcagggagtaccgtcgcaatagaa

SEQ ID NO: 107079 - DNA, 640 bp, Aquilegia coerulea
  Intron number 3 from transcript AcoGoldSmith_v1.023984m (l ocus AcoGoldSmith_v1.023984m.g) derived from phytozome v7. 0 (chr-ID scaffold_23; pos 3767861 to 3768500 reverse stra nd)
ctttttaacatacaaggtaaaacattctgttttattagttctgattctagttatggacgcgtcggatctttttcttgatccttgcacaaattctgcttctacttttcctgatacacaatataagatttgtgatagaaattgtgttctgtttttatctttgatttctttttacccgaaccaataatcctgctcttgaaatatcactttgttctgttgcactttttaatgatgtggttcttcaatatttcgttttggcttatattattggtaagcttcatgtactttttttttttttttggtagataagcagggttgttttagaggtcccttaccccatttcattaaggtaaaaagagctagttacattcggatatagtgcctatagagtcctcatacactattttcctaatgtcctccgagaaagaactgggaattacatcgatgcttgtatgagtaggaactgtggatgcaagtatatcagcaagcctattacattctctaaatatatgcaaaatatgaaaaccttccaacaacccaatcagttgaaagcttcatgtacttgtttgtcctggtgaccgtctggtttgcatgtattttttttgcagggtctaatctttatttctggattgccattattcca

SEQ ID NO: 107080 - DNA, 951 bp, Aquilegia coerulea
  Intron number 1 from transcript AcoGoldSmith_v1.001246m (l ocus AcoGoldSmith_v1.001246m.g) derived from phytozome v7. 0 (chr-ID scaffold_4; pos 7575438 to 7576388)
ctctttagagtctctcggttttactttagattcaggtacttcgattcgtttttctctctgctttcttctttcgatttgttttcatttcgaatgttcaatctatacttctttctatcattatctcttgaatttgaaaactgcatagtgagattttctttagatctgatctagttttgttcatttcttctctttaaaatgataattttgaatctctatatgatcttttgtttttctcatttagttcaaatcgtttaaaatgttgaaatgtgatttgtaatctagttttcaagatctgttaataattttgaattgttgaatattgttagaacctgtatcttcattcggatttgaaatggttttgtttggattcgaagtttagatctcaagagaaaagcaatgtcattaatagatctggttttggatctttagtatagcttgaatatgaactagtttagatctattgttcattttatagatctaaaagttcttgtaaaataaggattagatctaattcttgctgcatttagtcatatctgtttttgctcaagtgatgttagtagacatggtgagtggtttagatgtttaaatcgaataagtataggtatctgagtgttagagtgtactctatttcttagatcttgacaactttaaacaagtatctgattcgaaaagattagagcgagattgaataagtgcttgtattatgatttatgagatctgagttttttattaaaaaaatgaataaaatttatttatgtgccaagctttggaattgaaatatcgaatagatcttgctttataatgttattgttggaaagtgttattctgttagcaaccttactttgaatgatctaccagatgtttttggttctaaaagtgtgttgttattagttgttcatttcgataacctgataattgactttatttggatgtatctgatgaatcagcata

SEQ ID NO: 107081 - DNA, 809 bp, Aquilegia coerulea
  Intron number 1 from transcript AcoGoldSmith_v1.022491m (l ocus AcoGoldSmith_v1.022491m.g) derived from phytozome v7. 0 (chr-ID scaffold_17; pos 1621097 to 1621905)
acgcgcgtacaacgaggttttcctaacaatgaactcaaggcgagataaccatggacatccaatatcacaaaattaatgtcaaacaatcgagtgtcggtttcatagataaccatttgacacccctttaaggactaaaacagacgacttttctctttcttgatctcttttaacgcagtaaaaggtgaagtttgatcaaataagtggaattagaagggggctgtggttagatgagataagtctgctgcagaattaaataaaactttgggcagtacatttgatttgacatcattgtgagtttgtgacagcttacataatacaagagacatatataaagtgtattaacatggtcatagaattagcattttcgattaagtaatggtcaaataaacttataaataaatcatgagatttttggacatacccccatttgaaagtcgaaatttgtgatacccgatttgaaaaaaaaaattgagatacctcccaattcaagacagaagagctttccggccgtaggtgagttttatgatggacggctaagacatctacatgagatattcatacagtatgattataaatgacatgatgtattatttcaaatgctcttaattatagtactgaaacgttttcaaatactaacatgaatgcttactagcagtggtgtatatcatccagctgtttatattgattactgagaaaacttgtatgctttattttgaaaattaaataacatagtgctgttcataatgttactgtggtggttctctttctctaatttgatgaatataatttggctcttgacattgtaggac

SEQ ID NO: 107082 - DNA, 524 bp, Aquilegia coerulea
  Intron number 2 from transcript AcoGoldSmith_v1.022601m (l ocus AcoGoldSmith_v1.022601m.g) derived from phytozome v7. 0 (chr-ID scaffold_38; pos 215804 to 216327 reverse strand )
cttaagcccgtgagtttttctgcccttctttttttctttttttttttattcttaacatgttacagcaattaagcttgatcattgctgggatccttagacctaagctttgaagtttgaacaccatcatcgtgtagtcggattttctttatggatagatgttaaggcctgaattgtaagcagtggtttcctaggtattttgcagaagtgattttacttcaaacaaatatttgcgttttcaagatatttcagttataatagaactttgaattgtgacatgtctcaatggctcacaatgcaatgcatgtggattttatattcaaattgtcctttagctattatgattattatgaacaaaataacatgtttccagttgcatcttttcgtcccaaaaggatatacattttcttttttttctcaaatcgcgtgtagatgtagtgtaccttaagaaatagaaccatcttcttgataatgctattgttttttattcagaacatcgactttgccagcgttatttgtttttggaa

SEQ ID NO: 107083 - DNA, 1064 bp, Aquilegia coerulea
  Intron number 1 from transcript AcoGoldSmith_v1.010750m (l ocus AcoGoldSmith_v1.010750m.g) derived from phytozome v7. 0 (chr-ID scaffold_33; pos 928806 to 929869)
ctgtaatcactggtcatccttttgatactgttaaggtaatcttcttttttttttttatttatttatcatttatacttaaccccccatttgatttttaattaatgtttcaaacttttctttgtttttagtctttgattgaatgttttactgtacttatatattaaggcctaattgagattgtaagaagcaagaaaaagggaaaatgggatgttgttgatatgagaataggaattttcaagtgcggtttttgttattttaaccagaagttgcgcgaaggtgaagtttgtaggttagggtagtacaatgcgaaaatgaagtaagagacttgagaaatcgtgcgcaattttgtgtgcaaaatgtagctaggtattttaagatgaatgttaagaaaatgagaagttggattactttgtttatgtattgggtgtacataaagataggaactgagctttgatgacaatcatattgctaaattattatccttagtgatttaatttttgtgtgccgcaacattatacttaaaatcaaccgttgccgacctgaaaaggtgattatttggcttgtagtcaacacgacaacaaactccaaattcttaaaatgtaggaaatatgttgagaattgtttgagatgatcttaccatttaataaactgtaattgctctatagatctcagatgtttttttcaagagaaatccaactcctgttgtgagattggaaagtccattaatttctggattgatgcatgaactcatagactgagatctacgattgtaatggagaagacaggaaacaccaatgtacttttcgaaagtggtttagaaaaggaaggcataagaaggtgtcttgagatttttgtgtgtgtactcgcatgaccattatggtttataaagatacagtttttcaagtttatcaattaatggctaatgtagctacaggtgatcagatttatctaggtttctgtgtggtactgaaagataacatgaaacagaagggtaaggacccgtttcaagtttatgctttatgttgtcaggagagagctctcagcttcccaaggccaagggggtg

SEQ ID NO: 107084 - DNA, 1061 bp, Aquilegia coerulea
  Intron number 2 from transcript AcoGoldSmith_v1.010750m (l ocus AcoGoldSmith_v1.010750m.g) derived from phytozome v7. 0 (chr-ID scaffold_33; pos 930525 to 931585)
tgcattgcacgggtagaattttacaaaacgagggagtatgtttcttatacttttccaaaacccattcagtttttctcttttcacacactgggatttcaactcatataaagataactaagtcataagactcaaagaggaaatactgttctctttgtcatttgcccttacgaatattagctaaatattggggatgacggtattctaaaatgtcgctcacgaaatttactatacttgaacgtaaaaaccaagaggccaactgatctttatgttagggtccatccctgctagctcttttctttgcctggacaatgtttttaactatcaagactggaaactcaagatagagggaagtgatatggtccaacaatgtattatgtcatgtgtgtgagaggggggaagctacaggccagcacctatccagactacagcagctctgattttatttctggtggagtattccctttgcatagcgaggggttgtttccaatgtgcctaccatgtctttgggggtatgttcatctggtatatgctagtaggattaccacttattacttctggcctgaaaaatctgtatcatgagagggacaattgttagcatcacattctcgcttcaaagttcaaacaatacctcattggaaggtgtaatcttgttaactgtgtgttgcatttgtcaatgtacatgcttaattgtaggtggttactgggaaccttccatatagaagacaacattatttggttctatttaaactcccccgcccctcgtcctcctcctccccacccccaccacccaaacaacacccactcatcccaaacagacacagacacagacacagacacacacgcacacgcacacgcacacgcatacacacacaccaatgatcttgaatatcagcatttatgcaaggatctctgcatagtaatgtgccactcaagatttttcacactgtatatgatcttatgtcgtatatgtattggcatattgactttttcacatccaattctgtactaatttagttgttttaacaggtgagaggactttacagaggtgcaacatcatcttt

SEQ ID NO: 107085 - DNA, 388 bp, Aquilegia coerulea
  Intron number 1 from transcript AcoGoldSmith_v1.010142m (l ocus AcoGoldSmith_v1.010142m.g) derived from phytozome v7. 0 (chr-ID scaffold_4; pos 7262672 to 7263059 reverse stran d)
ttcttcttcattacttctctcgaagtttgtagaaggtatgttctacatattaatcattttttcacacgtgttaactttctatccaagtaaacagacttaacagacgtgtggttccaaaacaagaattctttctttcattaatgattaatcaatctctttagtttaattctttctttgatttcatgttttagttgctacgtttcttcaaatataccttctattccaacttgtcttttcgaaagatttcaaactgcaattcttgtttttaagtaagaattcatccatgtttcttgttgttgattcttataagctttctttcttattgaaatcctagggtttttgttcactttctgtgttagtactgtttgcaagaattgaacaaggaaag

SEQ ID NO: 107086 - DNA, 531 bp, Aquilegia coerulea
  Intron number 2 from transcript AcoGoldSmith_v1.009130m (l ocus AcoGoldSmith_v1.009130m.g) derived from phytozome v7. 0 (chr-ID scaffold_42; pos 1158804 to 1159334)
ctggtgattcttttattcattctatttcatcacaggtcagtgtttttcatcatcttctgagttctgatgaatgatttttattcaaaatttttagttttcttcttcttggaagtattgaaacttatttgttacctttagaataagcatcttctatagtgaagagttttagttcagtataagcatcattatactttaatttcgtaaaacttgtatatggaactcgtatacgagtaatgtattatattgacttttgagacatatatgagctactcgtataaatctacactggataatgtttaggccaaggatttattaagttttttttccttatttgatgacacataagaacaaacattaatggacagttagcaataaatttgtagttttgattgttcttatttatgtcatcagtcaatgtaagtagtattagtagtagatctacagttgaattatgtaattccaaatttgatattgtttcatttctatgacataaaaggttttgagctggaaacctcgtgcagtttattatcc

SEQ ID NO: 107087 - DNA, 450 bp, Aquilegia coerulea
  Intron number 3 from transcript AcoGoldSmith_v1.009130m (l ocus AcoGoldSmith_v1.009130m.g) derived from phytozome v7. 0 (chr-ID scaffold_42; pos 1159423 to 1159872)
gaaactgacgagaatacaaagggcgtaagaactaggtacattgttttctgttttgcttttgaacatggatgcttgtcaatgattatgacaacagcattatctcctcgtagtagatgtttgggataaattaagcaaattgcttatgatatatcgcttgtagtttggtctgatcagctcagttagtgtcttattttgtttacgctattacttaagttgctagtactacatgagaagcatacattccactattcgtttgtgactatctgaaagattggttttagagtttccacacacccatttatcctaggaaacaccttaatatttcttcattttgaaattatacagaaaattatatgagatggttaagaaattattgtttctcttggtggaaattatattgactattgctatattatccatttatacggaacagttcaggaacatttctcg

SEQ ID NO: 107088 - DNA, 742 bp, Aquilegia coerulea
  Intron number 2 from transcript AcoGoldSmith_v1.002664m (l ocus AcoGoldSmith_v1.002664m.g) derived from phytozome v7. 0 (chr-ID scaffold_14; pos 3381514 to 3382255 reverse stra nd)
ggattcttcgtgttggaaatcattcttcttttcaggttagtttcattgagattttcttctccaatcttcatttttcaataatttgaattgaattctacttcactacttacgcacatagcaaaaagattaaaaaattttgaagtgtgttttacctatataagaacatcatcggtttgatgcaaaactagttaatgggaccattttgttgtaattcacttttatcatgatttgacattgtagtgggacatttgaaccaagattcgattaaggaccatttaaagcaaatattttaaatttaagatagtttaacgcactgttcaagaatgttttgctttatgttaattagagctgtatcctgtagaagataatgaaatcacacattttcagtggttactaacagaagtcctggaaaaaatttcgaagacattctcaaataagacatgatagggcctgtgttctataccaaccacatgagtatatatatactaagtaaagtaggccaatattaccagcatttcgaatactaaataccaccaccaactatatcttgaattcttgacatatgtatatgacatgactcaagagtcaagaactcaacccacctagtatatgagggtaaaccactgatacaaaccatattaactggagcaaacatacttggagctagtttaagataatgtatagcattggaatgcagtttagctcacatactttttctatcaaatgcaggatttacttagaa

SEQ ID NO: 107089 - DNA, 777 bp, Aquilegia coerulea
  Intron number 1 from transcript AcoGoldSmith_v1.004168m (l ocus AcoGoldSmith_v1.004187m.g) derived from phytozome v7. 0 (chr-ID scaffold_17; pos 1366028 to 1366804)
cccattgaaggttctcttctcaagtgaattttaaggtttgtcagactatttcacttatttttttatttttttattcatatttagttctgttgtatactcttgattgtttatgattgattttaatctggagtagaactataggattgcttaaaataaattacataagtttaacaaatttccaaatggcaatcttgttaatttaaggattaaggttgttggtcaactgaaaagcagattattgtttgagcaatgccgaagttactaatttattctgattcattcttaatctggagtagaactattagcattgtccacaaacttttttaatattcttgattaatccgcaaatgacaaggttgttaattcaaactatttaatttaggttgttggtccactgaatacataatattgtttgagcaatgttaaatttaagtttaaactcgaatggaaagaagattattgtttgagcaatgccaaatttagctttttctgtaagcaacttattgttttttttttttttatatagtttccaaaacactctgtaacggaagaaacttggcttatgctgtccatgtgtgccttttaatataatcacatcatcgtagttataattgtttcttttttctctacccttatctttgccaatgtttattgttctgaaattgagaaagtgaacaagcaaagttgaggtgcttaaatcacataggcactaaaaaagaaatcaacttgttcttctttgcagaagaaagttagtcaaatccgtgccactagctggaa

SEQ ID NO: 107090 - DNA, 1008 bp, Aquilegia coerulea
  Intron number 1 from transcript AcoGoldSmith_v1.006922m (l ocus AcoGoldSmith_v1.006922m.g) derived from phytozome v7. 0 (chr-ID scaffold_76; pos 751579 to 752586 reverse strand )
ctgctattgaattgccaactcctcctgttactaaggtaaacacgtttcgttctgatcttcttacttgtgttctatttgtttgaatttgaaagaaagtaatggttgtgtatatcagtttatgtttgtaattaaggtttatgttgttctaattaagttctaatgtcaaattaatggttaaaggaagttcgtttgttaaaatgattcacacaatgttctatataagtatcgataaaagctataattaactgtaatctaaatcccttaatttgctggacaatcaaaggaaatttattggaattacaagtgattataattgaaaagattaatcaacttcactgacaacatatgggagtacaagctagaagtggatgttttcttagcaaattgagaatcgtttccgattttcacagcatacttagcaaaaaaaaaaaaaaacataacatatgtcatgactgaagtctgagccacagtgtgtacaattatgctaaggccatatgtcggttgagcatatacactactagtcagttttcaaactgctcagaagcttggattacagtgttgaggtgccaactattatattgcgtaatagcatgaatactgtacatccaccctttcctcaggtgcataatcttttggccaatgtatatggcattttatctattcattaagcatgtggttaaagaggtacgcacgaccttagttgatacatagagtacatataaagactgcatcacttaaaacttttaaaaaaataaattcagaagttagaatactgtttatttttaaataagtgaacagtaggatttattaatctgcttttggtcattgtcaattcaaaacttagaacttggatcctcatctaaggaacaaccatggaaagctgtgaagtaaaaatttatctttggtctgtgaatcgttgagttgctctcataaaaagctaaaatttggatgtttttcttttctgttatttcagttcaagattgcactttgccaattgtcagtgaccga

SEQ ID NO: 107091 - DNA, 611 bp, Aquilegia coerulea
  Intron number 1 from transcript AcoGoldSmith_v1.026964m (l ocus AcoGoldSmith_v1.026964m.g) derived from phytozome v7. 0 (chr-ID scaffold_14; pos 5244734 to 5245344)
gattgattgaaggtatatttcttctattcttcttctctgcttttattaaaaagtttttttaactatagagttaaaatgggattcttcatgattcttcatgattccttgctttttgttcttttatacaaaagcatcacttttccagttttgtttttttgttttctgaattgggtccattaaaaactttagaagaagtgttagtagcaacttaaagtttttttttttcatttgattggaaatgctaatgagcaactgtttattatagagttgtagacatatcactccaataaaagacaaccttggggaatcaaataatgttatggaagagaacaaaaccttgttgtttgatacaattttttttttttttttttccgataatttaacttcaaggtaggctttttccttaattccttgaaaagggaatgaagtgatactcttatgctgtgataatctggatgtaatacggaattggtgtttatagatatagataaaaatagactgcagtcgtattgtttgtttgattgtatttgaagttttcggcagtatcaattttatatactcttatgtttaatttagaaaacacatgctcttttcaggggaaaaggaatact

SEQ ID NO: 107092 - DNA, 903 bp, Aquilegia coerulea
  Intron number 1 from transcript AcoGoldSmith_v1.006598m (l ocus AcoGoldSmith_v1.004718m.g) derived from phytozome v7. 0 (chr-ID scaffold_41; pos 1190110 to 1191012 reverse stra nd)
tgaactattctatttgaaaccctagatagcaacaggtaaatatgttttctttgtgttggtttttgatctttgattgattgattattagtttttatttaagtaatgcatgcacttaaatttgattgttagatcaatagaaaattcaattaagctaagctgagctgactgttatatttgcccattatatatgatgcatttagaatgtttaaatgctgtagaatgttgcgaaactggaatcttgttatctcagctctgaagttaacgttgtaattctgggattggtttatgtaatgaaaatatcattttattttatttttcaattcgttagtgttagttatgagtgagtttctgcaggagtatccagttataaggatggaaattgggcaagattcataattcatatttgaagagaacaaaattgacacaagaactctaaaatttggctcgggatattttgacccaaatatttgagaatctttacgattatagtttaaataatcatgtttaccctgtcgttaatgcatgaccagtataactcatatagattcaaatgcaacctataaataagtatttccgttcctttctcagaaacagtctgtgcaatcagttttatatgtaatgctagtttgtgtagtttgtgtatatctagcaatggtgtgttttctgaaagagctgatactgttgctcttgatgcagcttaaacagtgcatctgttgctcatacttcattatacttgtgcaccgttgaatgattgacaatggcaggcaatggcctgccgtctttgggtcgtgtgaagcttactgatttaatagccactgacggactcccatctgattcttataaaatatctgtaactactttgacacagtcattagcgcagtactctgctgcaatcattcaact

SEQ ID NO: 107093 - DNA, 942 bp, Aquilegia coerulea
  Intron number 4 from transcript AcoGoldSmith_v1.025484m (l ocus AcoGoldSmith_v1.025484m.g) derived from phytozome v7. 0 (chr-ID scaffold_4; pos 3309732 to 3310673 reverse stran d)
tcctcgtcgtgattctaggtaattttttattttttgaacacactcttttaagtatttttttaatatgtgcaaatggaagaatccatttggttatgttggatcctttgatttttataatggttcttaaacttgtgtttaacaactacatttggtaagttaagcgtgtgatactaatatattcattgttacacatgttgatccatgtcccaacggcagcaaaacaatcacagttttttccaaatctgttgagattaagtattgattcctaaatgagtccatatttgtaccgtccctctaaatgcgatggacatgaagtgaaaattgatgtgaaaactagatgaatcaacacattctgatagtagttgttttgtgaacactatgaccttcctttagaaactacgaattctatcgattgtcttaaatgtaaatggttgttggaacttggaagcacgtgcacaaggtttttcactttctaaaaatcaattccgtcagaatgtattcagactacaccatacagaatgtattcagacgaaactcaagcgttatagcttattagtacttgtacagttgtactcactcaaacattatagcttattagtacaagcctcactcaagcattatagcttattagtacaagccttgtgttgctcagatgctgtaaatcttgtatgtgtttcaattttaatatgggtattcttgttaaagtgtttgttagacaagctttgacatcccaaataaggaaaatctgggacacaaattaagtaccgctttttgcttggaaattaattgttgttgttagaaaatgtcttacagatttttgagaatattaactcgatgtgtttttttattatttttaagaaactattttctatatctttttatttatatgtgatttactggtatcaagggtggatacaattgatccagctttacgaagaccag

SEQ ID NO: 107094 - DNA, 1033 bp, Aquilegia coerulea
  Intron number 2 from transcript AcoGoldSmith_v1.011517m (l ocus AcoGoldSmith_v1.011517m.g) derived from phytozome v7. 0 (chr-ID scaffold_76; pos 38102 to 39134 reverse strand)
atatttacctcaagcttctcgttaaggtttgttccaaatcttattattattattattttcatttggaaaccttatttatatctatctattgataaaatggagattgtatagatttttttttaataaaatgttaatttttagtcatttttgtacctaaattgtgttataagattattgctttttgtgggggaagaacaaatgataatggttaaattataagatttagatgatgtggactgttggctttgatatcacaattttaagtaagggtttaagggttatgtgaacacctttaagctttaactactgagtggttgcttggaaagacttgttaccttgtcagttatattttaagttgttaagaattgtactatgtttgttgtggtcttgtggaagaggtataaataatttcaactgaaatgaaagaatttcaaaggaaaaagggatgtcagttggtgtgaaatcagttgaattgaagtaaactatacaatcaactagtaatacaaatgagtaacaaattggtttcttggatcctttcattagatgaactaatgttgttatgtatctgagatccaactgttggttaatggacatataatctaacacattgctggttctaaaacacattgctagctgtctgaatgtcaaatactatgatgaggtttctttttgtaatatgcattatctagtcctcttcgttgactgcagtcattgctgtcatctttaacctaagattatttttattttcaattgttgacagttttggattttgaattcatgtactgataactgtttcaccatctagctcaatacattctcctaatatgtttgatttggtattaatgttgtgatttaatcattcatgtatgcatttccttcacatctctagtggatatattggatacattagtgttgttggtttccttctttacttttttttgtgttattggaagtaaattgaacatgtttctttttccttgtctgtctttgtattccagctatacaggtttttggttaggagaactagcagtaa

SEQ ID NO: 107095 - DNA, 379 bp, Aquilegia coerulea
  Intron number 1 from transcript AcoGoldSmith_v1.025052m (l ocus AcoGoldSmith_v1.025052m.g) derived from phytozome v7. 0 (chr-ID scaffold_42; pos 905742 to 906120 reverse strand )
tcaacaagttcaatcacagacgaacagctttcaatgtaagttcttttttttttttttatttggtttcaattgaaataaaaatgaagaaaatgggtatttttatttttaatattattagtagttttattatgtaatgcagtttgcattttttatttgggaaaaactttgaacgtgcaacaagaatagttgatcaaagtggtgttaagagaatttctggagaaccaagtggtcgttgtgtatttcaggttttttttacttatcatttgatttcatttgtttttaatttttattgggtttttttattgatttgagatttgggtattgtaggttgttggtgaatctagaacaaaagaagagtatttttgctttgcggagcatt

SEQ ID NO: 107096 - DNA, 478 bp, Aquilegia coerulea
  Intron number 1 from transcript AcoGoldSmith_v1.002835m (l ocus AcoGoldSmith_v1.002835m.g) derived from phytozome v7. 0 (chr-ID scaffold_14; pos 2008927 to 2009404)
gacctgatgtaaagttcttactttttcaagtcttcaactcttcttcttcttttgattctaaattgtattttatttaattgattatttgttaaatacccattgtgatttttcatagttttttcgtgtaatgttttatataatttgtaaaaatgagaactttttttaattgtactgaaactattgttatatatttatacgattgatgatacattgaaaagcatatgtagtaattgaactattctgttaattttttttgaaaatcaagttatctgtgctataaacttgagaaagctgcatgtgttattcataaagaagtaatttttataacaaacgcaacttcaacagttcaacttagcttaggccttgaagcactttggttatgtgaatacctgttttaattattttagctgagaagtacttgtgccattatgcgtggtaatagtcttacctaattttttctttatgcaggcaaaggcag

SEQ ID NO: 107097 - DNA, 940 bp, Aquilegia coerulea
  Intron number 1 from transcript AcoGoldSmith_v1.021160m (l ocus AcoGoldSmith_v1.021160m.g) derived from phytozome v7. 0 (chr-ID scaffold_41; pos 1511067 to 1512006)
ggagtttagaatatagctccaaagccaaaggttggtggtatgaacaatatactttgtgagaaaactcttaatcaattatacaaggttatgttgaaaattttcaactatggtttcaattttcaactctgttaaaatattgctcttagaagaaccacaatacgtatattatcactttagtctaaaattttagaagtaaatggggtatttaggttttggtcccgacctaatttggttttggtgcaacgtaatgtttttattaggttttaccctttcttttacctcatgatgtgtactttgatctggatgtggggtggatgtcatttggtcatagtgaccccctttccaaagtacacatttcaaagcaaaaagactaaaatctaatacgtaaacacgttaagttgaatcaaaaccgaattaggccaatattaggagaaccaaaacctaaatatgcactagtaaattaactcgtagatggttttctttagtattgatatactgcggttcccagtcagacattttcatttcagaaattcacgtgtaaccatgactgtgaaaccaggcatagagaaattattattttctgctcctttctagaatagttggtgtaagcaggaggcccatttgagctttcagctagatatgactctatctaaacctttcgggcctatattgttcgcttgatttatttttaagaaaatgttttgaaagaagtcattcggggtaagatgacaactgatgcacatcttcaattcacagtgcatttgtctgcactgtgaatttaacaaaaaaaaaaaaaaaaacccagtgcatttgtctgcatctaggatagtgagcatgaaggtgtttttattcactaatttttgtgttctaataatttgcatgttattttagaattaccctttttttccttgtggcaatgcagagttcagggagcggatac

SEQ ID NO: 107098 - DNA, 687 bp, Aquilegia coerulea
  Intron number 1 from transcript AcoGoldSmith_v1.009516m (l ocus AcoGoldSmith_v1.009516m.g) derived from phytozome v7. 0 (chr-ID scaffold_5; pos 9064909 to 9065595 reverse stran d)
tgttgctgctgtcaccaaccttggtggacctgatagtaagtccatctctcaccatcttcttcttcaccttcttcctctgctctcaacctctcaggttgttcacttatgatgctgatccaacactgttatttgccaagtggcacactagtacatcaacaagggaagcgactagggaggcatgtttgtttggctaattttggtgaaaatatttttttctttgttattccaatgttgttgtgtaattcttgatttgttcaaatgttattaagattatgcagtttttttttttttttttatgatcggaaaactatgtatgtcactatcatcaaactactgtatgtataatatatatatcatgtgctaactaattctaattcttgtcaagttttaattaattgatggattttcataaaacaaacccaaactgtaatcttgacattttggtttttccatatctaaattctggcaatcgatttccgtaactagctatcttgtgttagttcttacgtagctcagctatcttattaattgtcaaggctaagagagctattttcctatagctcagcacattcagatcctatgcgcactgtctattatttactagtactactatattgcctaatgttgttatcatctcttctatattccattattacagaagcaacacccaagtcagtgctgagggtg

SEQ ID NO: 107099 - DNA, 662 bp, Aquilegia coerulea
  Intron number 1 from transcript AcoGoldSmith_v1.010079m (l ocus AcoGoldSmith_v1.010079m.g) derived from phytozome v7. 0 (chr-ID scaffold_4; pos 5920510 to 5921171)
cagtgaagatcgatcgaagaagaacttgaatcgtgagagaacctttctttcttcaatcactttgttatttcaatcgaacctttctttcttcaatcactttgttatttcaatctctcatgttcttgcggttcaaaaaattttgttacagaatgttgagcatgattagggtttttgttatattcattaatgtagaaataatttataagtttttagtttaaaaactatgagattatgtagatctacagtttgtaattcggtgtagatctttgttttgattagtttcttatgtagagaaatatttggttattgattagtaaaatgagattatatttggggaaaatggttcgaaaggcatgtttttttattaatatatatgaaaagtctgattttgaagtgaagtctagcttctggattcattggtgtatccaattggtcatttgattcactgattttcgattactcatccacactttgttagggttagggttttttatgtgtgaatatctaaatcaattgattattcgtgagtgtaattttttgtttgaataagtttgtttcgctacattttgtttaatggaaatagtttttatgttatgtgatttttaatgaatttgtctgattttgtaggcgagaggattgaagaagcatttgaagaggctcaa

SEQ ID NO: 107100 - DNA, 992 bp, Aquilegia coerulea
  Intron number 3 from transcript AcoGoldSmith_v1.010079m (l ocus AcoGoldSmith_v1.010079m.g) derived from phytozome v7. 0 (chr-ID scaffold_4; pos 5921481 to 5922472)
ggtatgcatatatcttgttttcacccattaattaacttatgctatttacttgttgtagattatattatttgggcctccttttgctgtgtagaaaattagtattctagttttttcattttatgttgtttgttttgaaaggggatttgatgatttcttaccttgagatgaaaataatttatttgtttatgtataaacatttcctaatcaaggacctaataatgaagcttattatgaaagaatgaatggataatgaaatttctttcagtctgattggtgaatatatattttatacaccctagaaaagtgttaatatttgtataggaataatttattttctcctattttaaaataaaaaagaagaatgatgcagttttgtatttgacaaagagttctaaaagtggccatggtatctaattttggagttttaaaattcctgaaaaatattttgaatgttgatttacttttggtatgtaaatccttgtaaaacaggtcaacactataaatatttaatccttgtaaaacagcatgccagtatttcaatcttttgggaaaccaatgctgactaacttcaactcttgtgcattcatttgtctgtgtcaattagttaagccataagttgcagtttagaaatgaaacacaaattatttgattgaaggaaaataagctaccaaaatttacgtagaagctgcttgtaattatttcttggttgtgctgcatcttatacttgataaatattttgttgatggtgaataattaataaaactagcagtctagcatccttgactccttgtctttgctgcaaccttttttttttgcttcattggcctgctgaagcttcacttgtaatttatttgttatttgctgaatattgaatggggcctgaaatgtgatgctgtgtttatagatatggtttattcaagtatgcatctggtgtcgcacttcgatacatatctattttgttgtctgtttgagttatttttaatctgtgacag

SEQ ID NO: 107101 - DNA, 682 bp, Aquilegia coerulea
  Intron number 1 from transcript AcoGoldSmith_v1.001354m (l ocus AcoGoldSmith_v1.001354m.g) derived from phytozome v7. 0 (chr-ID scaffold_14; pos 966708 to 967389 reverse strand )
gggtcaagatttgggtgggtttactttacacccatgtatgttgaacccaagtttctaatgggccgtgtgtgtagattgggtgggcttaatcaaatacagatccgatgtcgatcactacagtactactcagtttcagagacagaggtcagagagtgagagagcgctttgtatttgatttcaaaatttggggtttttttttctttttctctttcttctgcaaaaaccccattaaacaatttcaaatctctgatctttttcgaatcataaagaaagaaagaaaaagaattcattcgaaaccactctctctctctctctctctctctctcttgtgaaaatggcttctttcagaagccaaaacaaacccccattaaacactaacctatctaattcatctcttcaaagcccatctatggtaactctctctctctctctctccttctctctgttgattttttttttctttacttttcttagtgatttgagctcaattctaggtttttatttttattttttttatttgcagaaaaaagctggtggtggtaatgaaatcaggaaaattggaagtgggaaattactaaatactacccgtagtactcggcaaccggttcaagtttcaactacaaatgttgattctggaagtaatgcaggttcagattgtggtgaaattgagtatacaaaagaa

SEQ ID NO: 107102 - DNA, 730 bp, Aquilegia coerulea
  Intron number 1 from transcript AcoGoldSmith_v1.019141m (l ocus AcoGoldSmith_v1.019141m.g) derived from phytozome v7. 0 (chr-ID scaffold_5; pos 2262730 to 2263459 reverse stran d)
gcaatattggacaggtaatttaatcattttatgcacctagggttttatagtttttataatctagctagcttgtccatgctgattgaattaattaataggatatattttgctaatttagatgtggtgttcttattttttagaactttggttttgatcttaattattcgcaaaattcactaatttattagaggtgttcaaaacttcaaatatataaaattatgagtggcgaaatgctcaaataaatgtttgaggatttaattgaattactttctattgtatatgttactagtatggtatgatatgtataagcagtataatacagatggtatattgccttttccgcaaacagggttgtttaatttattcagtttaataactttggtttccaagcaagttctcacaaaattctcaatctattggaaatggtccaaattatgattgtgccaaattgatcatataaatctaggacaatttatttcaactacttttggtaaggtatgaagagtacctattatatgcaaaataatgcagatggtgtattgcctttttcggcaaccaaataaaatgatggtaccttatatgtttaattatctgttaacctaattgtatgttaattttgagactaatttgttgaattatgtaacgaaaatgtgttgaataggtattaattgtttttttattgttattatatgcaggttaagattggggatttggggttggcagcaatagt

SEQ ID NO: 107103 - DNA, 958 bp, Aquilegia coerulea
  Intron number 2 from transcript AcoGoldSmith_v1.027050m (l ocus AcoGoldSmith_v1.027050m.g) derived from phytozome v7. 0 (chr-ID scaffold_14; pos 796111 to 797068)
tattgctgcaattaacgcaagaagttccactggaggtaaattgataagatgagaaagtttattttcttactaattttgtgcaaaatatcatttataataataaagataagaaggtttgatatcttttgctattataaatttataatgcatatattagaattaagtgaaatgggagtatctctagctaaacatctgcatggaaatcagtttctaagtagttgttgtttcattgactctcgacatgatgttgccgtacaaattaagtttgaagaacgctaaccaaggattaaagaagttacacagaagtcagaattcaatcttcatttctaggaggaaatagacaattggttaacacttaacagcctaatgataccttcatagtttatgttatcgcaaaagtaggaatatttaggtatagtggagacgttgaacaagccatttacagcatatggcattttctctacaaaagctagttgtttatgtggataccagattctttgtatggtggagtagaaataccaagctttcatctctcggggttggattagcttgcaagtttattagatagagagggtgcgatgttcataatatgatgggacactctctttacttgcaaagtataactaaaacagatgcaagtacgcaactcaagttcttgacatctgtctaagttctacttgtaacaaagtgaacaatttgaatctcaagttccatagcctttttaaattcatgtctctttaactcaacatagctgttatttgctagaattgtttcaaaaaatatgtgaccttcaatataataatagtattatgtatcgacacaactgtcaactgtgtaacatctcaacaaacaccttatagtcgtatacattgaattatttgctgtgggttgtatgttgtcttgagtgataatttcattaacagatctacattgggaaagtagcgctatcagtcaaaat

SEQ ID NO: 107104 - DNA, 715 bp, Aquilegia coerulea
  Intron number 1 from transcript AcoGoldSmith_v1.000850m (l ocus AcoGoldSmith_v1.000850m.g) derived from phytozome v7. 0 (chr-ID scaffold_17; pos 2694661 to 2695375)
ctcatccaggttagcttttcaacttctcatcaatattttttcattcattatagagctttgatgcaatcaaattcatggaagtttgagttgatattggctaaggaagatgtcttcccctgctttatgccttttagattatcagtctagactctagatcgttgaagttgtcggtgactcggtgttaatgactttctttttgtagtcttactccaacactccagtaccaagatgtaatacttttcaaagtatgttagatcgttatcatgccttagagaggtacagcaataatgttccatgcaccttttgtatctgagtaccatctgtagtgatattaatttctaccgcgtgaagtcttatcatgtctcccctcatacttctgtttggaacaacttttgtaacaattgaacatagaagccatttaagttggtttcatttatgaagtgttaatcacctgcaggccaaggggatgttgataatacaataaattgacagaggccaaaaagctggtcatcacatgatagaaattagtatggcctgatgataaagttggtcatcatatgatagaaatgcgacgatttctctatatgaaaaccacttaagttagaagaaaatacgattttaatgctaattacaatccgttcaacaaattcagtggaacacggtgaaattgttcattctattttgttccaagttgattttattgtttgagcagaaa

SEQ ID NO: 107105 - DNA, 681 bp, Aquilegia coerulea
  Intron number 1 from transcript AcoGoldSmith_v1.005419m (l ocus AcoGoldSmith_v1.005419m.g) derived from phytozome v7. 0 (chr-ID scaffold_4; pos 1836482 to 1837162)
tattttgcctgttaagttcccacaattttttactggttagttttttttgtttttttttgcattctcatttgtttgagtggtactcatttccaaaaatttcaaagaagggttttcagtatgaaggaaaatgtctatttgtatgaatgtgtagaagataaattgcttaagctggaaagcatcaaaccgcatgattttcttatatagaacctttaattgtgttcctgcaacatttctgattatttctagtaaaatgcttatagcactattgaaattatggctaataattttaaggtaaatgggtgtttgtcatattaataaaaaaaatgtgtgatgtctgtatcgtggccattaaagttgacttcatgagatcaatcttttggaagggcgtgagagtaggctcttaccataaatgatcacgatgagctttgggatctctgattgatctatcttcaaaacaatgtaaggtgaaaactggaaacactagatttgagaccaaatatttctggttctataattcttctatgtcacaataaatttgctatagagatataattatatacctttattgtccctacagttccattctgagaaaaggtattacagttgagggtgtcaaaccgtggttattttgtcatcaacatttgaaattgttttctttcctctcttaggcaagagaaagcc

SEQ ID NO: 107106 - DNA, 815 bp, Aquilegia coerulea
  Intron number 1 from transcript AcoGoldSmith_v1.008054m (l ocus AcoGoldSmith_v1.008054m.g) derived from phytozome v7. 0 (chr-ID scaffold_76; pos 289060 to 289874)
cagcatttggtaagtaatctgggttttttttcatgatttttcatagcttatattgttttttagcaaataatttgcaatttctgccttgaagaagataatgtttgaaagcttcacttctttgtgattaatggcataatatgagtgttatggttacatgatcattgatgggttttctttgaattgggatgataaggtttctgatagcagttttagtaatttagttatttatgctggaaactgtgctttagattgttataattaagttgatgacttgagggtaagcattgttttgctagaaaacttcttgatttaggtataaattgtatataaagtaaaatgaaaacgaatggagggttcaatctagttgggttgaataaagggttaacctagagaacaatgtgaatttgccaacatggaggagacttgtttctacttggttgaggtgatcatttgtttgtgaatcaattttcacccaaccccctgatgctagcgacctagcttgcaataaactaacatttgtgacaacattcttcgctcattttactgatttaattagcccattgtctgttgtggtgagagggggatagtgtttatgtgttttctttgttccttgtggcttggattttagttcggaaaaccctcatggcacacatgctatctatgggggttcttttgcatatactaagacaagttggattatttagtagcactcttgacttaatgaagatcatttgcattagttaaaatatctcaccttgttatcttattttctgctgacaggaaaatcagaccttgaaggtattctacattcaggt

SEQ ID NO: 107107 - DNA, 964 bp, Aquilegia coerulea
  Intron number 2 from transcript AcoGoldSmith_v1.010928m (l ocus AcoGoldSmith_v1.010928m.g) derived from phytozome v7. 0 (chr-ID scaffold_4; pos 6480042 to 6481005)
atcttcgtaagcttttttgtattgtttttgaagttttgtgttcttaaccaaaatgttatgaaatttccttttaaacattagtcggttcaactactaaagtttgcttccagatttccctgcctatatcgattttgcataatactgaaccataaaaaaggagagagaagtttgtttgttcaattgagttgatatcgttcgaaactaagagctcctttggacacaagatacatgtgccggtatattaggaataatttgatacacttaatatggaaacattaaataataaacattttatatatgtgaaggattagttcttccaaaatcgcttactttatcttgatagtagatagagaacatctgggaaaatgctgatgctcttaaattttgaaattgaccttttcaattaagtgagtttgtttgaaagataagaaagagagagagcatttttgctacgttgcataacatcacatacaaaaaaatgggtactatgctgatgggattgatcaactttaagtatgagacctaccttctaaggtgctcatagttataccctgacagccacccacttgtcaataaattttgggcaaactgaaattgattactgcctggtaatgaatattcttgtaaatccaaatgtacttgaaaatgggcttgaccttttgtacacgagatgcaaatttgtaatgtcgaatttgcgataggaaatatgcctgaattggaaaagtgaaagttgcattgttttttcataacttatggaggattcaaatctcttggatagaactttttaggactgcattctaagatttgtcattgtaaggtagtaaaagggacttattcatgtcatcccaaccaccaagctttttatttttaaattgggattgaattacttattctcttgggtctaagtataagtgaagttgccttgctggaaatttaaaacaaagttttatccactctttcagct

SEQ ID NO: 107108 - DNA, 336 bp, Aquilegia coerulea
  Intron number 1 from transcript AcoGoldSmith_v1.027680m (l ocus AcoGoldSmith_v1.027680m.g) derived from phytozome v7. 0 (chr-ID scaffold_14; pos 2955881 to 2956216 reverse stra nd)
taatcttcttctcttccttcttcgaagtaatagtgggtaacaacaagcctagaaaacaaaaaggccatcatcaacatcatcatcgagggcaatccagtaaaattcgagagctttctcggtaaatttcatcttccctttcttttcttctctgcttatatatagttttaatcaaacccgaacatgttatgtgattgaaacttgtttacagtgaagaccacaatgataatggagactcacttccaactgcacaaggtacttagaacaaaaacttaagggatttttgagaattacttgttaatttaaaatgtctgacaagttttttttttgttgttgcag

SEQ ID NO: 107109 - DNA, 542 bp, Aquilegia coerulea
  Intron number 2 from transcript AcoGoldSmith_v1.027641m (l ocus AcoGoldSmith_v1.027641m.g) derived from phytozome v7. 0 (chr-ID scaffold_4; pos 8155842 to 8156383)
ggaaaaaggtaagatgaattcgtttagtatatatactattgatcatagcttcattaaaattgagaactgcctatacttagatctttcatgcaatcctgtacacttcaatggaattgagaaactagaatatgaatgtaaactttacttacagaaagctacatatggcactggatttgaatctgccttgtgaacattgcttgcctgaaacagaacatagagtattaaaaacaaatcgattactcaaaatgctcataaattaagattaatgataagccaatctaaatatttagaacatagcttttttccccagaattaagaacagaagaatgaaatacatgagcagggtagtaaagaatataactgcaaatacatgcctataactgttttttcgtgcgtctttttcttggtaaacttaaatgtgtaattggacactaaaatcaaacaataatatgtgatccaaaaccaccagtaaataaaaccatggtttgttctatttgccacattcaggttgtcgcaaatctatccagcatttacccaaagga

SEQ ID NO: 107110 - DNA, 826 bp, Aquilegia coerulea
  Intron number 2 from transcript AcoGoldSmith_v1.008302m (l ocus AcoGoldSmith_v1.008302m.g) derived from phytozome v7. 0 (chr-ID scaffold_23; pos 1794537 to 1795362)
attctcgactagttgattgggaaggaatccagaaggtattgtttgtgaccttggttctttagaaaccatattcaaaattttagttgtttataattgtctaggtgtggagacaaaaaatggatgtgacctaagcctcatggcatcatactgaaagattactcaaacagatatataatagatttgagaaacatttatttaaaacaaaccaagggcataagaaatcttagaataatatggatgtagcttggccaagatccgttgtttttggacgtcacctggtaggagtaggacatagaagaagtcttttatgttttcattaaataaattttgaaaaaagaagatttcacataacttaaggtaatgtcagagcttttatttctaggattggtttttgagggatttgtcattctgaaaacaaatcgaaatgtgctttctcaatttagtgaatccaacttgatcatctttcatataaatggttttcattaataaaagtttttttcagcttaaaaaaatggtaacttgaatgtggttcttgtcagaaattatattttgattgtccatgtaggattccttactgtgagatgatcatgatctttcaaacaacacattattttttacttctggaaaccatgctagcatctactgggactgtttaactttttgctaatatgatcattgagtacacaaaagattataacaacaatgggttacttgttaatatattgatatagctcatgcataacttaacttccacattgcttgtaagactcattctctattttgatttgggatttacagtcacgctctgttcgagacttcgataaaa

SEQ ID NO: 107111 - DNA, 478 bp, Aquilegia coerulea
  Intron number 1 from transcript AcoGoldSmith_v1.004105m (l ocus AcoGoldSmith_v1.003802m.g) derived from phytozome v7. 0 (chr-ID scaffold_23; pos 3795325 to 3795802 reverse stra nd)
ctttcttgctcttctacatcaaaacttcctccaaggtctcttgttgattgttttttttaattattcattccttgatttttgcagtatttatatgttcttttgatgttcttaaaagattctttgattttcttactgatttgctctgtttgactctgttattcattttgttaattagtaattagaatgtcttttactgcttgaagaatgttaccagtaaattattattcttaatttattagtacaattgttattatttcttctttatgctagatttgtagttatatttctcaaaatctatagctctctctatgtattcaagtaagtatttgtgtatgtatgattgtatcagtatgcatgcatattcatgcactataaaattctattacaagtttcaatttgtttactccatgcccaatcatgtctactttcatgttgatgttgttgcagccatcaaacagtttgtgcacccttcttcccc

SEQ ID NO: 107112 - DNA, 374 bp, Aquilegia coerulea
  Intron number 4 from transcript AcoGoldSmith_v1.001783m (l ocus AcoGoldSmith_v1.001783m.g) derived from phytozome v7. 0 (chr-ID scaffold_5; pos 3728215 to 3728588 reverse stran d)
acgctaccaatgttagttttgtagttattggttgtcggtgaccttgtattggtttaaatgtcaaatttcatcaataaaaaagttttaatgggtattaatacatttttttcattacaattcacacaagggtatttcaaattttcttcgcatgttgtcactattcactcactactagctactgctcattcatctggtggtcttgccaagtaatgaaattattttttgtgcgcaattcatatttgatatgacatcatctcgttttgttgagaaaacatgtgaaacacctacattgtagtagttaaagtaatttatgtttctttgttgtattatgaatctcaggggacagtaaccaacgaattttctgcacaaacctc

SEQ ID NO: 107113 - DNA, 730 bp, Aquilegia coerulea
  Intron number 1 from transcript AcoGoldSmith_v1.003794m (l ocus AcoGoldSmith_v1.003794m.g) derived from phytozome v7. 0 (chr-ID scaffold_62; pos 396528 to 397257)
ctgcaaggtattgaagcttgagattaattatattgcttttatcataattattattaggaaaccatgtattagaactagtccttgaagaaaactactttatctattggttccataccatttgtgattattttgcaactgttacattggtctcaccgttgttcgaaggttcaaacaatgttgatggccttaattaaatgcatgcctattgtattgtattgttttgttgtcttccgaaatttatgaagctttcagtctttcatggtggttgttgtcaagaaacaagtgagatttgatcaaacatatgatgctttagttaaaattgagaagtcaaaatcatcactggagtggtgaaggaaaatggaattttgtagactcaatccaagaaattctgaagattatatatcattctatttaaaattcaaaattatctaaggaaaagggaaataaatattctagagtcaactcaagttattctaaggatcagaagcctatttaactaaaacaatagttcatctttctatatataattaagctaagaacatccttcccaaggtgaatggaaagatatcattaagattttcttcagtcataagaatatacaatatattcaaaagtatcttgataccacttacattttcctgtttcctgtgatattgactcctctgtttcagtctcactgtttttgtcaaaatatgttgtttatatacttttctgtattgttttatgtagg

SEQ ID NO: 107114 - DNA, 983 bp, Aquilegia coerulea
  Intron number 1 from transcript AcoGoldSmith_v1.019431m (l ocus AcoGoldSmith_v1.019431m.g) derived from phytozome v7. 0 (chr-ID scaffold_5; pos 6337618 to 6338600)
ggtgaatcaacgacggtcgaagcaacggaacggtggtgtgagggtattattggaatatttgaagaaacttatttcatactccaacggaagaagacattgcacgtatcttagctcaaaatgaagctcaaggttttccaggaatgcttgggagctaagtaatgactgcatgcattggacatggaagaattgcccctctacatgggtgggtcaatatagtggtcacaaaaaacagctagcggttatccttgaagcagtggttgatcaaagattatggtactggcatgcatactgtaaatgcagaaaagtgaatggagtggtgaagaagatggtcggagattgaattgggaagagatttgaggatgagaagtggttgagctatcttagaagatagttgcctacgtatctgagaatgatcaggtcccaaattcaagcctacgtagttcatatttataggtgatttgggacaacaactagcttattaattaatgagaattgattgaaaagaatattgtaactgaaaagataaacgtgtgaaataagagtgagctcggagtgtggtcgagcaaaataagccccagctcgagcaaaaaggtgttcaggtcgtttgacgacgaattatcagagaatccaagtcggatcatgaaggttttagtgagctcgaggtgaagtcgagtaaaaaggtgttcacctcatttgacgtcgaatgtgtaatatataaattgtgttcgaagtggtcgcttaagtaagctcaagagagcttgaatatatgggtatatacacatactttggtgtatctggttcaaacaacgacttaaacgtgctttcaacattcaaatgttttccaaccacttttatcaagtaatcttcctgaatgtaggtatattgtcaatggtaacaaacatactatgggatattatctagcagatgacatcaaatatgaagcaaattaactttaatatccgacaatcaacaacacgcaaggg

SEQ ID NO: 107115 - DNA, 427 bp, Aquilegia coerulea
  Intron number 1 from transcript AcoGoldSmith_v1.006457m (l ocus AcoGoldSmith_v1.006457m.g) derived from phytozome v7. 0 (chr-ID scaffold_23; pos 3318783 to 3319209)
aaaagagataaacgccgctcaagtgtttctctctggtgagttttctcttctacccattcttcaattagggtttcttcattcttttttctttcaatctgaatcaaatctgcaatcattgatcttgttttctcaatttgtattgctattgctttgtatagttattgaaaggtgttttttcttcatattagttgaaatagatctgttcatagttaagattggattggatttcttcttcgaatgttattaatttgaatctgaacttagtaaacttttttttttttttgcaaatctgagttatgaagatttattcaaatggttttgtttaaatgttatattggtaaagtgattgaataaaatgtggggtttgatttatttattaattttgtatggattttgttttaggtgaaggaggaggagaagaagaaga

SEQ ID NO: 107116 - DNA, 854 bp, Aquilegia coerulea
  Intron number 2 from transcript AcoGoldSmith_v1.006457m (l ocus AcoGoldSmith_v1.006457m.g) derived from phytozome v7. 0 (chr-ID scaffold_23; pos 3319260 to 3320113)
cccaaggaagcgtgcttctcgccacaggggaaagggtaatgctattttgttagtcatttgattgtattgtattgtggttactatttgtctatggtgtttaaagggtgagctttgatgaatcatgaaaccgcttcatttctaatctattttcatattttgaaactatttgttgtttattgagtttgattgataaatccattaattgaaaggttcaaaatctattcatttccaatgtttgtatgatattactagttcttatcatttagacttgtcttaacagcccagcatattgagtcaatttttgttttaattatgccaaacatttactcaaactaagatagtatgtatggttatgattgcctttgttggttgttcaatcattaaaagacctatcatagttgcgaacttgctatcaatacataatatgagcatcctaaagtttttgattataatattagaactacctactaaacaaccatagtgatttgctatccacagtcttggtgtaaacttcaccactgtaattatttgcaaggtaaataaatatgttacttcaactgttaaaaaaaaaaatactccaataacattcttcaactttatttttctattgctaccctacttgtttgttttgttcttttggagcatttcgctaaatatatcttctcttctttcatttttataaatgacttaaaatttgaagtcaatattcttaatacttgattttttctaagtattatggttcccactgttcataacttcaatgtattaggaacaatttcagaagaatgtttaatgcttattctcctttgtttaacatttgtttttgtgtggtgcagtgaaggcattccctagag

SEQ ID NO: 107117 - DNA, 1006 bp, Aquilegia coerulea
  Intron number 1 from transcript AcoGoldSmith_v1.011009m (l ocus AcoGoldSmith_v1.011009m.g) derived from phytozome v7. 0 (chr-ID scaffold_17; pos 3955708 to 3956713 reverse stra nd)
gaaacaacgaggaaacaagttcttaataacacaaggtatgttgggcaaagatcacgacatggaatggcacatagcacctgtggaccatatcagatctaatcttgatcaacctagagcgtggagaccaatgccttggtttacatatttacattttacacataaagcaaggaaaaacattcagtaatctgaagaaaacatgtacaagacaacttgcgaccaaaatgttttttctcacgttatattcaacgtgctgcagcagatgcagattagatatatatgactgaataggtcttaggataattagctagattaataaaatttgggtgcaacttgatgatgatgggtttgcagtagtttagactttagattgtgatttcatcatgaggtccaccattagatttgcacattgcacatggttgacaaaagttttaccatgattactacagtattaagattaagataatccactgtcaatctcaatcacaaaactatacagtatatgctgtatggtagctttctagtgtaatcttgcctttaccaacattgcacaatcaacttaaatgatcaactgcaatgttggagcaaattgcagaatgcagatcagaacaaaaaagataactgaatttagagatttgcattatttgatatgcgtttctccaaattgacggttcagatttgttttgaatagctccaaacttccccgtgttcaaataatctggcccattctatcgactgtgtaaagcccacatataaacccagcccaatatatgctcagacttgtatattagtccggcccattattattatgagattgtctttctctctcacactgactgtactgtagctgtactgcataaacttgaaaaccagcattagaagcgcgataacaagggttttgaaatttcgagttcaatttcctatgtaattcgatctctaaatcaacattttaatcaaatgggtttttctattagatcaacaatacccatcaagaaattcttgagatctt

SEQ ID NO: 107118 - DNA, 803 bp, Aquilegia coerulea
  Intron number 2 from transcript AcoGoldSmith_v1.002803m (l ocus AcoGoldSmith_v1.002803m.g) derived from phytozome v7. 0 (chr-ID scaffold_14; pos 1031469 to 1032271 reverse stra nd)
tcttgaagagaagggtaaaagaggtgaactagaaggtaacctttgatagctttacgtctatttatatactcataagttctttcagtagtgagtattacgatatgagttaattgatactattgcacattcattatttgtatgattaatggtactgtatccaggtgttgttatagtttattgcacatcgatacttttagaaaatcaaatacctggatacttctaccattcaaattttcaagctgtgattcacatttattttgaagagaatgttattgtgttcgtacatgtaaaatatttgattggtttatagttttcacatttattggatttgaaactggggatgttttggagttgtagttgcctgtttctaaatttaattatgccctctcacttcatgatgcattcatttgccacatgacttttgactctttgaggccatactaatttcacacagatgttgacatccacacgtattcatctatacgcatttaagatcattgaagtatagttgagttagaaatataccactcactaaacaagagtacaagacttaataaaagtttttatgtttttagtaataacaaaattgtaagataggaagagatccaagttgaattttttacctcgtactgaacatgattgcataaaacatcatattatatcagaaacaaatacactttatgctcatttatcaaattccatttattctatgtgtcattcacacattcttcagaatgctatatgaaaagatctaatgcacttttctacttgcagagcgcacatattctgctccagagaagtgg

SEQ ID NO: 107119 - DNA, 612 bp, Aquilegia coerulea; identical to SEQ ID NO: 106294
  Intron number 1 from transcript AcoGoldSmith_v1.003744m (l ocus AcoGoldSmith_v1.003744m.g) derived from phytozome v7. 0 (chr-ID scaffold_45; pos 231438 to 232049)

SEQ ID NO: 107120 - DNA, 637 bp, Aquilegia coerulea
  Intron number 3 from transcript AcoGoldSmith_v1.008023m (l ocus AcoGoldSmith_v1.008023m.g) derived from phytozome v7. 0 (chr-ID scaffold_38; pos 1474368 to 1475004)
aacgtcttaaagtcgatctggaggaaagggtaagttctttttctgctctgccaatccatacatgtaatggtttcaaggatatatttatcattcctttctccttttcaattattttcataatacatatgatctcttttcatctgaccctggttgttaaatgatttttttttcaatagatgtcattgcaaggctgagtaatgaattgctaacagttccaatgcaatagaagtattaaaataatgctatttacctagccttttatacacagttcacgaggcatagagttggttgaaaaaatgatgcttagttcatacatgtattttaacacgagtcttgatatgtcagtcatctgtacactttgatcaccatggcgctcatttttctctcattcttttctgttagagtgattgtagttctaataactgagctctattgccagcgtgtctaccatattgaataatgcattttggttaaatagttttggagaatgcactaattctctacatgctacaaaatgttgtgtattgttattaccagttttttgaattttagtataatgatggatttgattaaaagaacaaaatttattgttattctgacagggtgaaagcttctataatccgtatattgctgaggt

SEQ ID NO: 107121 - DNA, 1037 bp, Aquilegia coerulea
  Intron number 1 from transcript AcoGoldSmith_v1.024007m (l ocus AcoGoldSmith_v1.024007m.g) derived from phytozome v7. 0 (chr-ID scaffold_20; pos 1296507 to 1297543)
gatcaaacccgaaataaaaaaaagtccattttgatttggcccaataataagttctttatagcccaacccaataataaaacgttttgttttgtttcgttttctttttctccaaaaccctaaaacattcaattccctccaaatttgttgtgatttcatgtcacttcgatttcttcaactcaactcagcatcgattgaataccagatctaaagttttcatcaagaaattctactcaaaacacaatggcaattctaaatcaaaatggtattcttttaactttaaaaccctatcttctttcttttcgtttacaatttgatttcaatactaactgttaaaaaaattgattgatgaaggtgttgctcatcaagaaggtttatattcaaatttgttaattggacctaaaaaggtattattctcatttgattacatttttcctcattttgtttgatttaaatcttaactgaattagcttatctttaaatacttctgtttagaatttgattggtagtaattaatgattttaaaatgcaatttgttcttattttaaaggttttggtagtagtgccatgatgaactaacattactactaaaaagcggtcaaataaacttattagcgaaaattgtaaaagttaggtaagagaaatttttcattttaaacaaataattgcatacgaagatattgcttttacttgcagactacaaaataaagtctgatgatactgtttatagatactggaactaaccaaaatagtttaatataaacatacactctataggcaccttgttgtggacttgtggtatatcaaagttggaaaatacgtacatcctagtcgttgaacatgaaatttcatgtgttgctaagacttaaatatgtcagaatctagttcttttggactcttcattgtagtctcaaaggggtatgggaagaaattaaccattctttgagattttagcttggttattaaagaggtttataaataaacatcaccatcttctccctctagtcttactagtcgtggttttatattacaggaagctt

SEQ ID NO: 107122 - DNA, 890 bp, Aquilegia coerulea
  Intron number 1 from transcript AcoGoldSmith_v1.007396m (l ocus AcoGoldSmith_v1.007396m.g) derived from phytozome v7. 0 (chr-ID scaffold_23; pos 3183746 to 3184635)
tctgggattctctcccctttcaaattttcaagaaggttgtttctctctctctctccatgtatcttactttactagtgctagtactgtaatgcaattttgttttaaatctttggacacctcccaagtcccatcccttagatccatcataactagttctgtttttttaatttgattggttgcttaaatcagataaggtttcgtcatcttattagcaataggatatataccatatatatggtcatacatactcatatcatatggacaaacaatcccagtataatgattgtacctaatttgaaacatcttgaatataactcttcggaaaaatatgaaatgaatcaggataaattttttgtatagccacttatgtctctttgtacttgggcaaggtttcagtagttatttaactggtgatcacaaacaaatatccccgtatctggtattacagtattattttttttttgttaataagtagcactttattaatcactggcagagatttacatcccaggttgtgaaaagccaaaactacttcacaagcactgagcaggtaattaatacaagggaagtacataaagggagaaaaaaaatacaggaaacattaaatcatattaggcgtgcttgatataatattcaaagattgcaacacaaattttgattgtaatgggctttgaagaggttgatcgattagagtagttttgtcttataaatctcactttaatgtcagtgtgtagatgacgaattgaaattcgatcaacttttgatagcttggtaaagtaatgagtgccaatttttgttttttaattcatctttgacaatgaacttttgtgtcagaagtcaccaacgtaacatgaactcttagtctactgtcggcattctttgcagggaaa

SEQ ID NO: 107123 - DNA, 648 bp, Aquilegia coerulea
  Intron number 2 from transcript AcoGoldSmith_v1.011855m (l ocus AcoGoldSmith_v1.011855m.g) derived from phytozome v7. 0 (chr-ID scaffold_5; pos 1659163 to 1659810)
tttatatccaggtatgtttgtttacagctttgaagtttgaaaatttccattttagtttggtttagtaagcattctttgctaagtttcactgttgaaaacgataaggtgcatgtattattattctttcaaattttcgtacatgggtccccgataacatgcgccgggtacgtattagtccttcaagcgctttgaccggcgttgtgttttttcaaaagccaaataccaaaacctaacccgtgaaaccctggatttggtttttccaagatacctaaaacggcgcattttagtcaatcttgattcattgatgaatcacgatacagtagtgacaaagacaaaccacacgtgcaagtgcaacctacactttttaatgatcctttttaaggttaattgtaatgatgatgatgatgatgatgatatgaattgatgatcaccatgatcatgatattatgcagcttttttgccaatttttttcttatatttttattttgccgaataggtgatattttatttttgagtagcacattattttgttctttcatatgaatgaattttgaaaaccagtttatctgctaatttcgccaaaaatcaactattctaatattaaggcaaatgttctgaaattatatgatgcagggaattgagaatact

SEQ ID NO: 107124 - DNA, 496 bp, Aquilegia coerulea
  Intron number 2 from transcript AcoGoldSmith_v1.023071m (l ocus AcoGoldSmith_v1.023071m.g) derived from phytozome v7. 0 (chr-ID scaffold_17; pos 775178 to 775673)
ctttttgtgtttggaaaaagagctaagcaggtattttttagttggacttatgtattagtagtttaatattgtatgaaaattgctgcaattttgtatcttcaactctggaaacaagataagttagtgaaatttctgacgttggtatgtgaaatgacttattagagtaggtttgcggttaagatgtctttgccttgaatttgtagagtttgtagtatcatttctgcatctgttcatctgctttaatgtgtgtcctgatgtgaatagatgttggtttgaatctgtgcaagatatgccacatttgtagtgttctttgtgaaaaaagcatattttgtgaattatgtagcctatgactatatataatcatccagatgagcttcaattgccatggatcgtttttcttctccattttccaatgctaaagtatatgtggtaatggtgattttattgtataacaaacatagactctgtatgttctttgctgttgctgattttgtag

SEQ ID NO: 107125 - DNA, 726 bp, Aquilegia coerulea
  Intron number 1 from transcript AcoGoldSmith_v1.014907m (l ocus AcoGoldSmith_v1.014907m.g) derived from phytozome v7. 0 (chr-ID scaffold_4; pos 6758126 to 6758851)
tgcaacagagtttgattctctcagatagtctcaaggtaattagtccttcttcagtccttttcactgtgctcttaatctcatatgtaccatggaattgggtttttgcattttgattgaaactaagctatggtatgttcttcaaaacctgcgtcataccaactcgcaacaaaggtttagtcatctatcagcctccccctaatgtgtccttactccttacagtggataattggactagctgggggaataagattagtggtataatgaattaggtgctattagaacagaagattttgtttattacaaaatcaggaaaagaaaaagaaaaaaaagggtcatatatttgattatttggcctatcagattacgagtttattatcactccacatagaacatgtatgttattgttgatactctaatcttttttgttcacttcattagcatgtgtattggtgatttcattgtgaactttaaatgggaacaagtgctttggattaatggtgtgttctgtgtcggttaatattccaatgtatttcgataaaattttggactcaatctttccatatataaattgtggggaagccctttggcaagacatatgaacttcaatataaataaatcttgttaattttgttgcgaaccatttacatcaataattattcctgaaatgtaaaaggtgtcttgttgaatacaggatttgaagcatctgaggacgcaattatactctgc

SEQ ID NO: 107126 - DNA, 806 bp, Aquilegia coerulea
  Intron number 2 from transcript AcoGoldSmith_v1.007975m (l ocus AcoGoldSmith_v1.007975m.g) derived from phytozome v7. 0 (chr-ID scaffold_20; pos 713161 to 713966 reverse strand )
tcattacacttttacaggtagccatatgcagtagtacgtcatagtttgtactttttgatttgccttatttctgaaggtcttcaggagtttaatccaagccctttttaaactttgactctttgacatgtgtatatacagttccttctacatttaataatattcaaactttgactctttgacatgtgtgtgtataaattataaagttcagccactgaagatactttgaacatgctattaaatctttcagtcagtgctgggacacaatgaattgggaaaatgcctttggtttatagtttttataaagttgtgggcgatatccttctacgtggtttctgtattgttcttgtttcttttgtaacctctagacaacagcgtattctatttctcacctccacatcctagtttgtgggctttagttagatagcattgggtaactccaaattattgtgtgcatcagagttttatcagcttcaccactttcatcttgccccctcagctaatggaatttatccataaaatgaagttattcaatatgtactctttagtatgtgcctgacaatatctatgaagtatgcattatatgtgcataggagggtatttgcttaaccacatgcattttaccctccgggttggtgggtaaattttattcaaagtatggcgctgttcagtggttttacatctattctttatttgcttcttgcttgtatattgtcttgcgattgaaatgctgtgtgcaaataatttgcaaagttaagaatttttatattgttgctagtttaataagaacatactttcgtacattgcag

SEQ ID NO: 107127 - DNA, 802 bp, Aquilegia coerulea
  Intron number 1 from transcript AcoGoldSmith_v1.007975m (l ocus AcoGoldSmith_v1.007975m.g) derived from phytozome v7. 0 (chr-ID scaffold_20; pos 714016 to 714817 reverse strand )
ggttgtgcaggtttggttatttttctaatgttttttaattcattttcttgtttagtaattgttgcttgatcgaagttaacaacacaaaagggacttgccgacttgtgtttgaaataattttggtgattttgggtaggttttagatttgaatttcgatctaaagtttgagactttgggtttagatggaaatcataactaataaaacttaaaagagaagtcatgaatatatgaatactttgttgaagtttgagaatttaattaatttgtgttgtttttttttctctgtattgggaatttatgtagagattagaaagcatgggtatgcggttcatcgcgtgtagaagggtttgcttgattcggttaatagaatctcggataattagaataataaggagcaaactaatagtataatattgagcatgaaaactgcaatttttttgaagttttgttggggctgagttgcaatatatattttcatttttttattaagcacattttttgggaaattttacagtcctttgtcaagtatacaaacatgaaaaatagtgattattaatttccgggcgctaattaaacagacctgccaacctgacagacccaacctgaacccgacctgattgccacccctaattttgctatctccttgttaaatggtgcaatactgttatagacttatagtacttgggaagttgggatggactttttgttgcatatttaccatatgtccatttttatgtttgattaactattattttagctttcactgataatgttctacgttttctttgcagtacttttggtg

SEQ ID NO: 107128 - DNA, 845 bp, Aquilegia coerulea
  Intron number 1 from transcript AcoGoldSmith_v1.009235m (l ocus AcoGoldSmith_v1.009235m.g) derived from phytozome v7. 0 (chr-ID scaffold_82; pos 355305 to 356149)
gactatctcctatactcatttcagagcttgtcacggtaagaattttctatttttggtcaatccttgttcttttggctttattgcttttcttaaaattaatttagctgaactttatatttgtggtgttatgtcttgtcttgctttatctggatttggagtttgaaaaccaatttgatttcatgagccgtgtccaatattacatgtggtagttaggaacatggaaaaacttttgctttatagctgtggcttacatcggtgaataattataaaggaatatcatataccaaatgattatagagagcaattcatgtgtaactggtcatcggcactatgtaaaggttatctgacatgatttactaacttttgttgctcctgtgcatatttagagtttctatcacattcctaaaaaatcaatgcagtaacattcttgaaaagtaaagaatgcagaacactatcttagctagctaaatactgtaacattatcaataagtatcgtgtaaacatcttatactctttgctaaacacacaacataagtgcgattgcacctgcgaccatggcaaacccattatcaagagttatctagtccacaaagctgggccattaaccgtgccaagaatattacactcatactaattcgtaaaatctttttatttttcatattcggagtaaaataatacatcaagatgatggattgatgtttattcaagggcttataggtgtatgactattaaaatttgttttaaagaccctagtataacatgttgtctgcagacgtgtattaacacatattgtataatgtcaatatgctttttttcttctatctaggttatcacaagagtaaact

SEQ ID NO: 107129 - DNA, 411 bp, Aquilegia coerulea
  Intron number 1 from transcript AcoGoldSmith_v1.011621m (l ocus AcoGoldSmith_v1.011519m.g) derived from phytozome v7. 0 (chr-ID scaffold_20; pos 894104 to 894514)
catatcttgggaatcaaagtgatctatttttgcttgtaattttcatccacttaagatcataagatatgcttatcttcttaatatttcatttccccagaaattaaagagttttcttcttatcttctgctaaccatctaggtattcttttctattttttttttttttttttcaatttcaaaataaagatctttgtataactgggaaaatgattccactgagattctcaaattttttttttttttttttttgttttaaatcaaaagggtgtgtaattatattgattctaagtaaaaaaatggaatgtttaaccccaaccctgatctagggtttcttcttctttctggttcatgaacattgttcttggggtaatttgtaagtttgtttggttaatgttgtgcaggtgagtgttcc

SEQ ID NO: 107130 - DNA, 1047 bp, Aquilegia coerulea
  Intron number 1 from transcript AcoGoldSmith_v1.002329m (l ocus AcoGoldSmith_v1.002329m.g) derived from phytozome v7. 0 (chr-ID scaffold_17; pos 3487002 to 3488048)
tctgggtcttcttcaatagagaatttcagacaagcgtaagtgtttttattacaattataattttttaattgtttttgtttatggtggtagtaatgttagtttctgttcaaatccaatccatcagacaataataatgtagaaaatttctctgtttgtaaactaataagaattacttatcatcaaattgaaattcaaaaactgaactttacaatgttgaactggaaaagctgaacatacttactaactaaactatttctacaacacattcccatatggggaaatgaatagaacacttatgattgctgtatacagtaatcaaattatgtgtatgaggcctgtaggttgagaagtggacaacttatgattgccttccgtaatgcatcctttacagtaggtgggtgagattaactttggttgaaatatgtgaagaaaatcttgccatcgctgtgttataggagaagtccttccagaggaaaggacgaccattaggagacctaaggttcctgagttggaggacatagggcaccgtgatgtcgtattgatgaattttgttggaatacgagattcaggagtcttaacacccagcagaaaactgaaaacatagattcgtgagtccttatttttgttgtgagaaacacctattgttgaccgtaagaagtgggtttcccttgccttgatgaaggtttaagatttcaaaagagcgatcccagtttaaagatgaatactaaatagtaaacatccactttaaaaatttcttatgcgggagcccctgaacaaaacttctgaatcatatcttctaaaccatctgaaatatcctccacattctaacaataatacgtagcttctccttgaaataaacgtaacagcacaaaattacagatcagagtctcgataatatgattgtagtgatgtcagactatctagttcaatatcatttcatattctgttagacttggtataagatttatatatctggctattctttctttgattgacatgtttgttctaataggtttcctattgtggagcctgattcaggtcatacca

SEQ ID NO: 107131 - DNA, 1035 bp, Aquilegia coerulea
  Intron number 1 from transcript AcoGoldSmith_v1.021555m (l ocus AcoGoldSmith_v1.021555m.g) derived from phytozome v7. 0 (chr-ID scaffold_42; pos 2272405 to 2273439 reverse stra nd)
ttcaccaccaccaccaaatacaaacaccaacagaggtaagtatatatgttattgtgacagaagttgttatagtttcttaactagatttagttagatttttagcgttgagccaactcttatgcattttaattctgagtttatttccaacatccgatggctctcctcgtgtggtaataatgtgacagagtcatggcccatatggactgttcttgttctgggtaacgaccaacacagaatactggtaggctttgcaatatttgtagaatttagtaacactagctgctttattagttcatttttaggccattttgaagatataggtcatttcactgcaagaaattttaaatgtataaattaagttctaaatataaacttctgcaatcagttattattttgaacttagatttacctttggaacaccgtattcttaaccgcggtgcatcatcaatctttatagttgaacttgactcccagagtgtatctaaccaagtatttgttataactaaccatgttattattaaaatgttgatttgtaactacgacactgatagttatatttcaccagggccaaagacagattcatcaaaaaaagttgtcgctatagtagtctctatagtaatggcagtgatactattttcaactattgctgtctacctttatttgcgaagaatgaaggagcctgagaaaaaagttgatggtatttagctgcgattcatacatacactacttgaaatttatcagtaattcctttcctttagaaattatcatgcattcctaatgtgtattatgatgattgttgttattgcaattacaaagaggtggaagatataggaagtacagaactgcagttcaacttgaggaccatacgagatgccacaaacaacttctgtgataccaacaagcttggaaaaggtggcttttgaattgtttacaaggtagtattttctgtaaataaaggttatatacttttgtcaatatcttataattatttatggagaaaaataagaaagacgctatcttttctttttggttgaa

SEQ ID NO: 107132 - DNA, 594 bp, Aquilegia coerulea
  Intron number 1 from transcript AcoGoldSmith_v1.003776m (l ocus AcoGoldSmith_v1.003776m.g) derived from phytozome v7. 0 (chr-ID scaffold_42; pos 284709 to 285302)
atccggggctttacttgggtaagtgtttttcttgagctaaataatgatttttgtttgttgttctgtttttgcatattcatttttgtcacatatcatggcgtgacatgattctgtcacgccatgatagttggccttacagcaagaccagaggatctgccctcttcaaaatctctgcagtactactgacgttgtatctgctacaggctactgctataccctgttgttgttctgccagtgcctcatccacatgagtagtagtcctgcaaaaatgtgctgctccaatccttctccttaatcacataagtatttctagaaagaaacccatgccaatagtgttgctttagtcatctttaacactgctgccacttagttcctcagttttaatacatcagtccacctagtcgtcattgtctgccacgccaacctgatgcctttatcttcctaagtactagtttattgtgatttgtgaaagcctggcctctgaatattgcctaaagtttagtgaatcaaatgcactagtatatatatgccattggcattacaggataaaatttccagtcttcttaatacgaaattacatgttttgtgtaggtt

SEQ ID NO: 107133 - DNA, 544 bp, Aquilegia coerulea; identical to SEQ ID NO: 106699
  Intron number 2 from transcript AcoGoldSmith_v1.008093m (l ocus AcoGoldSmith_v1.008113m.g) derived from phytozome v7. 0 (chr-ID scaffold_14; pos 1871242 to 1871785 reverse stra nd)

SEQ ID NO: 107134 - DNA, 675 bp, Aquilegia coerulea
  Intron number 1 from transcript AcoGoldSmith_v1.024771m (l ocus AcoGoldSmith_v1.024771m.g) derived from phytozome v7. 0 (chr-ID scaffold_4; pos 5874318 to 5874992 reverse stran d)
gaagagtaagcaaacacttaccttcttcatttctttctttctttctcaccttatatatataaaaaatgtttcgtttttattgattttaagttgaaattaaagaaacccattgttttatttaacctgaatatatcattaaatgtttggttaatttatttttcaatcagtttgagattttgattcagaagaaaaactgacttgggtataaattgaattagggaattggtttttattgatttaaatagttttagaatttattattgaacaaaaaagacaatattttgtatatcatacttaactcaaatgaactgaaatttttattataaatttgtttaagccgttaaggtgggatatatctttcttagacatgagagggaagctgaatttgaagatttcttagtttttgcctggcattgtataacatttgatagcaaatttggttgatgcgataataccttttaattatacttctagttttggtattacacctaggggaattctacatgaatgtatgtgaggagccttattagatattatgatggattacgtacagtaatgctgttgttgatgtcatgatttatattttataagtgtaagttctaatatgaattttttttttgtatttgcatttgattgaatcgcgtaggaatcctcccgtgacatttccgcgtacta

SEQ ID NO: 107135 - DNA, 1019 bp, Aquilegia coerulea
  Intron number 1 from transcript AcoGoldSmith_v1.019597m (l ocus AcoGoldSmith_v1.019597m.g) derived from phytozome v7. 0 (chr-ID scaffold_29; pos 2174312 to 2175330 reverse stra nd)
aaggctttccactggtacactacactactattttcttaattccatcaaataatcaatcacacttctctttcaattaattttctttatttcttattatgatgttcgatttgggttttttttttttgttttttttccataattcatttttgttttatgtcagtattacctaaaataaaatttctaatatggaagtaggaatagtagtttctgtggaatagatgtttgtaatttggttatagatgttttcggtggaagcttgtgcttgaaactcataaaatattaaaatgccacttaagcacatttactgatactttatcatgttgttaactagctatgtctgttatttgagtgaagacctgatcttaaaaaattgatttggttgctataaaattcagacacacctttgcaagtacgaaagtgagaagtgacatgagtttctgatcgcagtttgttcaatttgagtggtctcaatggacgtgcaaatcatcttcaattgtttagcataaaattagaagttagtgttggcatcatcatttgggacgatctgcagaggatggttgtgggcttagtaggcggacattgcaaaccttgataattaaaataatagtagcttgactataggacatcttagcacaaatctacctaaattttttatgtacttttgagacctcagtctgcataggatggttatggcaattagttggacattgcaaagccttgagaattaaaatttcatattaatattagcttgacaatagaacattttaacacgaatttgcctaaattttatgtacttttgagactttagtctgcatagtgtggttatggcaattagatggacattgcaaagccttgagaattagatgattatggtaatcttttatgtacttttttcgtgctcctatttctgaaggttagtcatcttctaagtgatattgatcatcataaaatgggatgctgccatatattaaatttcttatttatattctgttttatcttcttaattgaaagggggaagg

SEQ ID NO: 107136 - DNA, 538 bp, Aquilegia coerulea; identical to SEQ ID NO: 106575
  Intron number 1 from transcript AcoGoldSmith_v1.010190m (l ocus AcoGoldSmith_v1.010169m.g) derived from phytozome v7. 0 (chr-ID scaffold_5; pos 729224 to 729761)

SEQ ID NO: 107137 - DNA, 337 bp, Aquilegia coerulea
  Intron number 2 from transcript AcoGoldSmith_v1.013694m (l ocus AcoGoldSmith_v1.013694m.g) derived from phytozome v7. 0 (chr-ID scaffold_4; pos 8825754 to 8826090 reverse stran d)
agaaaagagccaaacttatccaaagaagtttacttgtaagtcttcttcttcttcccctttttcttctaatcaaagggtatttcagatttttaattaaagggtgttttgagatccaatttccatttttttttgtttttatgggtgatttgatagatttaatttgaaatgaagattcccttttttttcctggttttgtttctctttcaatgatatctaaagaattttttttcaatgatatctgaagtttccttgttttatatcagtattgaaatgtttagagtttctttgtaataatgaatggttgatggtattttttgcagttggttagtcctggtgc

SEQ ID NO: 107138 - DNA, 668 bp, Aquilegia coerulea
  Intron number 1 from transcript AcoGoldSmith_v1.016202m (l ocus AcoGoldSmith_v1.016202m.g) derived from phytozome v7. 0 (chr-ID scaffold_17; pos 2300283 to 2300950 reverse stra nd)
gtaaaaagttcgacaaaggtatttgcaatttatataacttttactacaaatatagtacaattcgttcttctcgtctttgttaatgcttttatttttgttatatagtacaatgttatcttaccaagttaatggtatctaataaaatcttcaattattgaaaaaatgttgatggtttcgaagttctggtaggaagagtgtgacgatggtgcgagtagacaatcgctgaacatttatgataagctcataaggggtttttttttttttttttttctgttgctgggaaaataaagtaaaatagtatagctttttgcttctctagcctttctatgattatgattattactattgaaaaaaaaattggttagtaggtggctcttgctcatttatcaaatgcacacgagtaaataacaagtacaaactaagaagctttctgtcagttattgtagcttttctgttactctatccaactccatcaaatatcaaaaatgcacttgattttttttttttgcttgcagtgtagcgatttttcaataaaacacgtcgtactaaatcttgttttatcaaatattgcacatatcttagaatatattctttggaatatacttattattatatgatttcttttttgttcagtctctcgtgttgaagtagaaggtgagcacttcaat

SEQ ID NO: 107139 - DNA, 616 bp, Aquilegia coerulea
  Intron number 1 from transcript AcoGoldSmith_v1.027004m (l ocus AcoGoldSmith_v1.027004m.g) derived from phytozome v7. 0 (chr-ID scaffold_5; pos 3849250 to 3849865)
gagtaccaacacaaacactaacaagggtaacatgtttctgacactataaattccacgcaccaatcagatgaaacagactgttacagtaacataagtagaaattcctattaatatatactttaaaaaaggtatagagaaatcacatctgttgataaaagcatggtagaaccaatttatccaaaaccatttcagggaaacaataatgttcagggaaattggtctgaccatattgatgaacttcttagactatttacctgccaaaagaaattggtctgaacatgttgatgaacttcttagacattacagtttgaactatgtgatcatgtaaactcaaagcacttcaatttatttgctgacataaaacgctctacaaatgtagacaaatcataagacctagcattttcatcacaaatgatattcttcagtttgtaacttgggccaaaatacggcccaatgctttgttctgcaattttcatttcatttctttgcaaaattcaaacttctctcgctctcttcaattccttcttcttcttcttcttcttggtatacaagctttcttactctttctctctcttctttcaatttcttgatagggttttgcctaatttccattaca

SEQ ID NO: 107140 - DNA, 638 bp, Aquilegia coerulea
  Intron number 2 from transcript AcoGoldSmith_v1.018364m (l ocus AcoGoldSmith_v1.018364m.g) derived from phytozome v7. 0 (chr-ID scaffold_5; pos 5538854 to 5539491)
ctactgcttgcacaacagaggcagagctgcgaaacgtcttaaagagagcgacctagtccacgactcagccactgatttaatattgtttgttcattttgattgcagctacctgaggtaatattattttaagggaagggttccagccttccagggactcagaaaatgtttgactcaattttgactcaatcctatttaaggtacttcaatatgttggataggaatgattttttgtaggatgaatgttctcattttgtacgacatcttcaccaaaatttatcataatctgaattttctaaccctagaaaaatcatattacaagttaatgtattgtgaaacgttcatttttaccgttgaatttaatattacattttatgggtctaaatatattcaaatgaggtgattttttatgtagtagatctttatagtaaggacatcatatctacataaaatcatgccaatccaacatgtacaagtaccctaaataggattgagtcaaacatttcctgagtccctggaacccctcccttattttaattttattctgtaacaaatctaaaatagagatgacacatcagagaatggacaagttgctcgttgacattgccagagaacataaatagaaggggactaaaactgag

SEQ ID NO: 107141 - DNA, 621 bp, Aquilegia coerulea
  Intron number 1 from transcript AcoGoldSmith_v1.013797m (l ocus AcoGoldSmith_v1.013797m.g) derived from phytozome v7. 0 (chr-ID scaffold_65; pos 1169031 to 1169651)
acccttgcatcggtcagttctgaccatccaaaacgtaaatctagatcaggacaactgtgatccattaagaggctactaaataacatgtgaaaggacttctgagcttgtgccataggttgcatatccagattcctcgttccaatggtatccccccccccctcctctggggatgctgatttggaccaattttgaggtgtgtccagattaccttacctctcttgttacttaatccttgtgttttagagcatgactgcattagctattagttatctcttttataaaatataatttagttagggggggggggggggggggggggggctctgaagaaaaagaaaatctgcaatgtgttggcaagcaataggcaacaactcccaacatggatgaggtgagaatgtgagatggtcaattaggtcttcgtgctatgtttatgacacagcttccatgtgttaaaacaaaagttccatttatgaaggaatcaaactccattctgtcaattgaataatcttacgcctctatgtcatatggctttgacgctttcccctctctgatttcacatatactgtaaactttgctgctcaactttacctttttcttttgtagttatcttgtctgattact

SEQ ID NO: 107142 - DNA, 710 bp, Aquilegia coerulea
  Intron number 1 from transcript AcoGoldSmith_v1.023242m (l ocus AcoGoldSmith_v1.023242m.g) derived from phytozome v7. 0 (chr-ID scaffold_41; pos 643026 to 643735 reverse strand )
acaccaatcactttgagtagcttaatcactacatttgaaatattcaaatcacaaacctagcttgaaatgttataatgtgtttgtttgagtcaacattttctagaaggaaatccatcctgaactcagtgaaacttgacttgatgataatgaaactatgaaagtaccatctttagccttgactgtaccatgcattcctgattagaatatatgtgaagataacaatctacatcatatatattatataatgtacatactcaagtattaaaattcttcaactacacttaattatagagacaatttaataagtatttcacaattatagattctgattaagtttagcgtggacttctggaaactgctacacatgatacatgaagtatcctcacattatcaaacataatgttcttgttttatctcggacaatttgataaaatttgtttaaaatgaactaactattgataataaaaacaaagtcaactttaggatttccataagtcaaataagtttgtaatgaacatcttcaaggtgtattgcttcaaatcttagtttgttcaattctatcttcttttaagactttccaacgcaatacatatatctctttgtcagtctaatttggtcagttttcgtatcaaatgatgtatattcccctgttcttcctttctccttctctccttcttttcatcatgttcaatatcacagtcaatatccca

SEQ ID NO: 107143 - DNA, 824 bp, Aquilegia coerulea
  Intron number 1 from transcript AcoGoldSmith_v1.020270m (l ocus AcoGoldSmith_v1.020270m.g) derived from phytozome v7. 0 (chr-ID scaffold_23; pos 3118646 to 3119469)
gcgcgacgagtgttccttcaatctggaaggtaatttcataattcttgcagtcttggccattgaagacaatattattcaacaaatatcttccccgtggtacatgaatagttgctgaataatccgagttacatgctgatgtccatgcttggagaaaagccttagtagaatctgtttttccattagacttagcacctagtttaagaacattatactctatacttgcttttgatgatgagaaaaacaaaacaagtagaagaaaaactacagagatcattgttatcttctccatgctaaaaaataaataactatcaatcaaggttattacataaaccattcaatcaaaatttatatacagagaggttcaggtttcattagtttagttgatacagaagattagagcacctagacttctatacagtaatggttactgtcaaatagaaaacaattttctcggaaaataattttccatgaaaatttaaaaatttgtccgaaacttaagggttactagtaacacgtcagcaattttctctttccttactagggtttaaagggggttttaatttcatctgagtttcttcttcactcttcttctctgcatttcttctaaaaccctaaacccttttccatgaaatctctaaccccattaaccatattttttcgttccacatcatcatcttcttcatcactttctctttccccaaattttctttcttctactaagcatttgtttttattctattcaactactacaactgaaaatttacaaagaaacaaatcatcttcaacaagaggtggtggaggagaaaaagaaacatttcaatcat

SEQ ID NO: 107144 - DNA, 959 bp, Aquilegia coerulea
  Intron number 2 from transcript AcoGoldSmith_v1.019488m (l ocus AcoGoldSmith_v1.019488m.g) derived from phytozome v7. 0 (chr-ID scaffold_14; pos 630635 to 631593)
attttctcctcaaatacggtatgatgttcaatgtaatgaattactgtttgaaatgaaagaaagaagtggatataatagaacactgccatctagtagttctctagcttgtagccaatatggttggtgtgtatctaagttttttcattcatgtactgtataaccatgcataggaaatgaatgtatctggcagtgtagtgactgtaggggcaggcttacaatttttatccttttgcaaatttgtacttgacacaaaaatctcgttgacgagcatttttatttataaatctacattttggatgtttttttgtgatatgtatctgggattctgggctaactacaaagtacaaactattgtgatatgaattcgtagctatatggactgtaccttttctcacttatgttgttgttgtttctactttctaccaccagaaatagtgaagatgagaacttgcttgatcttgttaaaatcttcattcacagtgaggaccgttttttttttcttttctatatgacttgaagaacatggctataaagaaaataggatccttaagcaagtaatacagcctgtatgatcctcataagtttcattttgacagtcttgctacctggtaaataatttggatattgtagctacattatctttgtaataaagcattacctacgttgttttgatttattttctactgcagtggctgtaacatatataatgtccaccacaacattcaagttctgtttacatatacacaaatacacaatgccaatgccatggagaagtgatttatagttggcaaatgcaacattcagttttttcaagtctaagtaattagtgtaaggcccggcccggcccaatagatcaagtgcccaagtctctaaagtgaggtggcatgttacgtggactttttcttctctctcttgtttccacagtttactgtagttgttcagctgaaaagaaagggaaa

SEQ ID NO: 107145 - DNA, 692 bp, Aquilegia coerulea
  Intron number 1 from transcript AcoGoldSmith_v1.023830m (l ocus AcoGoldSmith_v1.023830m.g) derived from phytozome v7. 0 (chr-ID scaffold_143; pos 80878 to 81569)
tgaagaagaggaagaagaagtgttggttttttaaggttatatctaaaacattctggatattgacatggtttggagtttggcttggtggttgtgagtttgggttccccacgaacccatgccaatacatagataatatatattcttttgatttatctatgaccgggtcgggcctcagggccttggtgctcttgaaaaaaaataaaaactttttactttttctttttttcaaatttcgaatttgtgccctagcatttaaattgattaaaacgtgtttatttcaaccctagccgttctttactgttatggcttgatttggggagagatttcctccaccattaacggctcttttttgaattataaaaagagtggtggagaaaagagaaatgcaaaacaaaaatggttttctcttagttttcttgagcaagaaagagtgttgaaagtgagatcgaatttcttccttgtgcaaaaggaattcgaaaaaaatttgggttgttttatcctggggacggcgtgactactactgcttgcacaacataagcagagccgagaaacgtcttaaagagagcgacctagtccgtgacttagccattgatttaatctgtttgttcattttgattgcagctacctgaggtaatattattttaattttattctataacaagaataagaggaaggagagacggggagtgaag

SEQ ID NO: 107146 - DNA, 815 bp, Aquilegia coerulea
  Intron number 1 from transcript AcoGoldSmith_v1.007203m (l ocus AcoGoldSmith_v1.007203m.g) derived from phytozome v7. 0 (chr-ID scaffold_14; pos 864630 to 865444)
ggttaaagagtaatttctttaattaaaaatctcatcttttttgtttatatgttttagggtttttgttaattgtttgattttgagaattttagataaagagaagtttgactaaagtgtttagtgaggttatttgagtgtttggattcaatgttattaagcttgaatctaaatgaattatacttagtaagtgtgcattttgagtttgaattgcattggattactcactatatagcttgataagtttgagtctactgttttgcataattacggtattagtagtaattattaagaaaacaattcaatggaatcgaagaaaaaagtactaaactcgaggaaatttagtacacatgacataagatttgatgaaagcaagttataaatctcttgttacctgttgaccagaactgcatatatttatattaggatagttcatacttcaaatacttcattgccttagttttagaaaatctataacattatcactttacctagttttttgttaattgttatatatagtagttctttcacaagaacccaacgataattgatttttttgaaagaaaccaaggttataaaagtttcaggggcaaagtcatacagcgaaacatttccaattatttccttccactaattttcaacaatttatatatatatatataaaggtccagtataatctacaccatattgtttatctagtttacataatgcttcacaatattttgtactatttatttttacatatgcttcttcaatatttacttaacctaatttattttgtagggtgcctcaagaggttgtgtcaactggaggaaagt

SEQ ID NO: 107147 - DNA, 605 bp, Aquilegia coerulea
  Intron number 2 from transcript AcoGoldSmith_v1.007203m (l ocus AcoGoldSmith_v1.007203m.g) derived from phytozome v7. 0 (chr-ID scaffold_14; pos 865461 to 866065)
ggtcaaaagtaagtgatattcaaaatagtttttgtcttagatctacagtagttattatgtttccttgttattatatcaatgaccgtacaatatggcaaatgaagtggtgagaacacaagagtcatattaggctcactttaattggattgacaactcctccaacgaacaaaatgttgacacatcaaactgttagattctttggtaacataagatctcaatgaaatataccatgtggttgtgcagtgaaatctgaaatagcacagacattcactgtgcaatgtgccaatcctttgattgtggaacaaaatttggatgacctaaaatttatatatagttagaatcctgatatatcagatgccgtgacttaactgctgtattaatcttgaattcttcatgcatgaattaactcgtgtatggatcaatttcttttttaataacaatactgtggaagaaaagagagttattcaagaaaagcatctctgagatttagtatcatttggtctacacctaataatataaggcattgtcagaggaagctacatgagaagtgcttattatgttgccagatcttatggtaataatctaacttacttttaattcagtgg

SEQ ID NO: 107148 - DNA, 474 bp, Aquilegia coerulea
  Intron number 1 from transcript AcoGoldSmith_v1.002130m (l ocus AcoGoldSmith_v1.001711m.g) derived from phytozome v7. 0 (chr-ID scaffold_20; pos 2061892 to 2062365 reverse stra nd)
atctcattgaatcgaagcagcttcctggtaatataaacaaactaatctctttcccccatttctttatttttttctattgcaagttttcaacaacccccactttcttgattttccctaaaaacaaaaaaaaaataataatttttttcatattaattcaattattttgaataaagattggttttttaactatacccatttcttaaaaatgaattatgaataatacccattagataattattctaaaagaagattctttattccaaattgttgacgttgaagtttgagataattttgaatattgactattatgaaataattgacaagttttttttggttataaaaagaggtgtttgtgttgttgtttttgtgttttgtgtttgtgttttagaacaaatcttctactagcttttctggtatttctagcttctctcattcgcagagaaaagcttcagctacaattattgttggtttaag

SEQ ID NO: 107149 - DNA, 801 bp, Aquilegia coerulea
  Intron number 3 from transcript AcoGoldSmith_v1.009066m (l ocus AcoGoldSmith_v1.009066m.g) derived from phytozome v7. 0 (chr-ID scaffold_76; pos 18154 to 18954 reverse strand)
ttaacattgttgcttcgattgaagcttcattgcaggtattacacattatttggttatgctttcgcacatgatgacttttagttctgaaaggattatgctatttcttttatgtacgcaacttccaaataatggaagctatacgatgatatgacatacgtgatgatggcattaataaagatgatatatgaagttactaaggttaacatatctagtaaagagggcctgagctgagtctatccatcttctttgtagtagtgtcagtttggatgtgtcttttgtgggaccttcctgctgcagtttgcaatgtagtttactagtttcaactacaatcttacacttgtggtcaagactccctaactaacagtaagaggccagcttaactaacttagatcaaagtcaagttatatgattatgatagggaaaaagaggggaacttgtaaaactttaaaagatattgaaatgttcatataaaaagacgtaatggtgtgaggaactaagcatagaccaaatattgaaaaacaaaaacaatacaagaactcgaccattacatcccttggtccccctttatttgtctgtcatttagtagtgtattatggtgaggacttggcactttttttttgatgaaagaaaaccgaaccttgaatcctttagtggcttttataatttagttgttaatgtcattgaacttcttatcacctcttcacacaacataagattctggtacatatgatccaaagagatcaaaggatcctctcatctaaaatagtgtttaatatgcagggcctagctgctgttagaccg

SEQ ID NO: 107150 - DNA, 358 bp, Aquilegia coerulea
  Intron number 1 from transcript AcoGoldSmith_v1.009066m (l ocus AcoGoldSmith_v1.009066m.g) derived from phytozome v7. 0 (chr-ID scaffold_76; pos 19431 to 19788 reverse strand)
actacccttgtgcttctccttctcttcgagaatcggtttgttcttttatctcaactctttcaattcaatttacttgaatttagttggataatctttgatattgaatttagtttcataaatattgtaattttttgttgggtttgcgaaaatgcaattaatatgaacctaccctttgtttatttacttatttactatttattggtagtttttttcgatattattgaagaaaagagagtgaagatagagatgacaaagtcttgcagtattcaatctatgcagatcaagtaaaagaaaaaagaaaactcatatttatttattcatctttctgtgactgtgcagttatattgcgcagtttgtc

SEQ ID NO: 107151 - DNA, 621 bp, Aquilegia coerulea
  Intron number 1 from transcript AcoGoldSmith_v1.006423m (l ocus AcoGoldSmith_v1.006423m.g) derived from phytozome v7. 0 (chr-ID scaffold_20; pos 2718836 to 2719456 reverse stra nd)
actataaagaagtatttcttcaagtgttttcagtggtaagtgagatttctcactcttttgtacctctttttgttgattgttttctatttatacttgaaatagaaaaaacccatactttattttggggaaaattcccttttttccactctgatttcaaattttttttcatagctaagcagtaggtattttttgggaaaaatgatatggcacaacttgaaaaatacagtctttgttttgagtttgtgcctttgtgatggtaacttaatggttcaaatgtttgatctttggatataaacttgtctaaaccttcttacctagatttcataataagaagtcttggtggaagaaaggatagattaagcatctggtatggtgccttgtgaaattggttgcggcaggggattttatcttatcccggagctgcatcagtgcaactctatgtaaccatgttatagctttcttcttgattgaaaacatcatgcccatcttttgatgatgacattgaatattatacaaatgccgacacattattatttttgccttcttttttgatttgctgtttatttctttatatttgtttatgcagggcttcaaaatctttgtctgttttcttggttagag

SEQ ID NO: 107152 - DNA, 616 bp, Aquilegia coerulea
  Intron number 1 from transcript AcoGoldSmith_v1.009782m (l ocus AcoGoldSmith_v1.009782m.g) derived from phytozome v7. 0 (chr-ID scaffold_20; pos 3375782 to 3376397 reverse stra nd)
tgttatctctaccgttcatagaagacaataagaaggtcagtttttcttattctaagtaattattgttttgaaataaatctccctgttacgatttagtacttttttttttcttattaaagtaattattctttttttcaattgttttgtttgaagtaattagggttttcatcaattagaattaatgattattttattggctttgttaattcaaatttgaatttaagtatttgatgcaatttggtgaaactgtgttttaatttattctaaaaccaaataattttgttctatgaattggggataattcgtttataggtttagttataagtgaaaagaataaaagaaaagtaattcagagggaataaattatatacactttttgagttttcagaggtgaaaagtgtgtcaaggatcagttcctcgcacagtcttgctacatcattttaagaaaatattgtgttcagtgatttaagcatttttttttatcgcaccgaatttatgaagctctgctaatgttttaaattaaccctacaagaacgagttcatgaaattgatgtttaatagttattttgaattgaaattgatgtttaatagttattttgaattgcaggttagcata

SEQ ID NO: 107153 - DNA, 749 bp, Aquilegia coerulea
  Intron number 1 from transcript AcoGoldSmith_v1.003893m (l ocus AcoGoldSmith_v1.003893m.g) derived from phytozome v7. 0 (chr-ID scaffold_42; pos 646986 to 647734)
ggtcagtcaattcaattcaactcaactcaactcaactttttttttttttttttttacaattctattgtttttaatatttctgttgttttcaattattggaaaaacttagggttttggaattacaagtgcataaatgcaataaattttttgactttaaaatttaaaagtagaagaaagttcgattttggtttttgattcttacacagaatggatggcggctgcagactaataagtaataattatggtcttttaacatttacccttttccgagataattatagattattatgagattgtgtaggcagcgtattagttcaaagtaaatgaacattagttgtgttcctagttgggggcttaattatatcagtcactcaagtgaattggattttttttttgttgttgtccaatactgtctttcaaacacatctttgtgttgcgctggcactgaaagtgtcatcgggtggactaactcaggctataaaagagttgaaacgcttggaaaagttggaataaagaatcactgcagactggtttatatataatttttgtcttgatttacttttattaaatggggttgatgccttgtttattgtaatgttgaactaaatcctatcacccataatgttttatagatccacttgtttattgatttatggctatcttcacaacatttgttactcaacaatactttatcactttatatatgagtgttgacctgatggtgtttatcttcttgcagtgaagtgttc

SEQ ID NO: 107154 - DNA, 741 bp, Aquilegia coerulea
  Intron number 2 from transcript AcoGoldSmith_v1.006008m (l ocus AcoGoldSmith_v1.006008m.g) derived from phytozome v7. 0 (chr-ID scaffold_76; pos 370882 to 371622 reverse strand )
cacgaacacaaccataaacctcaaggagaagaaaggtagattttttgttcgcatattgcatttgattccaatttctgttttcaatattcttcaaactgctttccttgcatttgttaagcctgacactctgaatcgtaattatagtgtcccttacgataattatgcgtggctttctgtttgatctaaaagtccaactgatatgtgcatattgtattggacacaatctctaaacacgatgtatacttttaaaacaattatgtatatctggaagttgtagaatctattgaaatagtgaacatttatgtggtagctctttaacaagaagcatttcaatgtgttttatgtttgcttcaagtctccaacacagtagatagaagctcaccgtgcttaaaacccttttccacttgtgtcaataatctgtttttgttttttttttattgttttttttttcatttaaaggttacgtggtggcttcatatcattattcaatcataattcaaaattgatcagtgtttctctagcatcagtttgaaattaatttggagccaggaggctttcttttgtttttcttcatttcatgggtataaccgtataatgtttgtttgtagtgtcagtattgtcatttattacattgctagtgttccacgtgttgaagtcttgtattttattttgtatattgtgttatgttcatgtatcgaagttgatatattttagcttgactgtgttgtgcagcctgtaact

SEQ ID NO: 107155 - DNA, 572 bp, Aquilegia coerulea
  Intron number 1 from transcript AcoGoldSmith_v1.001627m (l ocus AcoGoldSmith_v1.001627m.g) derived from phytozome v7. 0 (chr-ID scaffold_14; pos 1209976 to 1210547)
tcgatctttcaactcattgaagattaatcagtaaggtatattcaattaagttgatctctgaaataaaaaattcaatgtaattttgattgtgtttgctaagtttttatgagttgtttgtttgatttcattgtgttaaacctctgtctgtttctcaatttaagttttttcttcatgcaaaattattagttaaatttggttttgccgatctctgatttttttcgcaatttaatctatttttgtttcggttgttttcattgaattctttgttgctctaagcttagcttagcttagcgctctctctctctctctctctctctctccctctccctctccctctccctctgtgtgtatgcgaatagcatgaattttttctgtttaattgcaattcatgcttctataatttgctataactaaaataactgatagctaggatgagtgggcaccattactagatcatacctcttgcgtaaagttgttatttcttcgctttgaattactatgtgatgaatgattgatacttttttttttttttttcagaagattttgttgaaggattctgcaacgtacaggga

SEQ ID NO: 107156 - DNA, 402 bp, Aquilegia coerulea
  Intron number 2 from transcript AcoGoldSmith_v1.001627m (l ocus AcoGoldSmith_v1.001627m.g) derived from phytozome v7. 0 (chr-ID scaffold_14; pos 1210980 to 1211381)
ccgatacgcgcgcggagtggtttatcgcgttacaggtagctaacttattccttgggtatcttttatgtttaataattttgcttatgttgtatagctttattcttctaattctatcaagatgtttagataatgcttcagtttaatatgctctcggactttgtttatgtattttaaaagtggtacttctcaaccagctggtaaagcgggatagtacctacaaagaatttacctatcaaattttggtagattgaaacatgttccaaatgaggcctgacgccatgatatttatcttgtaggaattttatctttgacatatattttcagaactgcaaattttatcctttatgtggaatttacgagatttgattgattctgatactgtatttcgtttttgaaccaggg

SEQ ID NO: 107157 - DNA, 850 bp, Aquilegia coerulea
  Intron number 1 from transcript AcoGoldSmith_v1.010805m (l ocus AcoGoldSmith_v1.010805m.g) derived from phytozome v7. 0 (chr-ID scaffold_17; pos 2729474 to 2730323)
tagaagaacgttttgtcactgtgggtgagcaacaggcaagtattcaaacatcaaaaccacttctagttagtttatagtcatttgaactgtgtgcagcttttgctgtgggctaggagttccatatcttcctggataatttatatatatgtcacgtatctgttgctaggtgttgcactgttgcctgtagttacaggtgtaccactaacacaagctgtagcactttatcttcttcttcttcttctccttcttcttcttttttcgagagaggtgagctataccactttttcaaaacaagccatagcgagtaatttattagaagatgaggatttttaaccttcacccccaacatctttgagaagaaaaaagcagtatgcgacgattatgtgctatttattgcaaagcgtaaaccatttatggtatatattgtgtttatcattatcttcgctaaatttattttcagctagagatataatgcaagtaaaatcttaatttccctattccaataatgattattgaaagaaactggcagctgaccttgcattggaagtagatagttatctgtactgtacttagatacttcttttgacaatgttctgatagaacttaaactatgctacattttgctatactagttatatactctcttttattcttggctgttattttgcaattctttttgacagaataggttcctcattagcagttagtacaagttactacagtttggaaagatattaaataatggaaagtactattttatttattttttgcttggtggaaagtactaatttaagtatcctaggatcttggcaaaatctaataatactgtaattgctttgtgatacaggcc

SEQ ID NO: 107158 - DNA, 721 bp, Aquilegia coerulea
  Intron number 1 from transcript AcoGoldSmith_v1.008792m (l ocus AcoGoldSmith_v1.008792m.g) derived from phytozome v7. 0 (chr-ID scaffold_4; pos 8536766 to 8537486)
cagtgcaaacctttatcagaacaagaggtttttttttaattcaaaattttttctaatttcttcgattcatttcttgattagatacaaatgttgaccttttggttctcaattaggttaattaccaatagatcagctttgtttattggagtaggaatatgagagaatgaaagattctactgtagattccatggtttttgatctgtattatgttgtagttcaagttgaggcaatagattgttttttggaaaattgggaatttttttttttttttttctaaaatagtgatagattattgtttttgatatttggatctatttacattctatcatggcaggataaatttgtattatttgtattgagtgtgttgatttttttacaatgaggtgtaaatagctgaatattcatatgatatacatgttcacaatggaagaaacaagtagattgtgtagggtttgtaataatcttctaaagaaccaattaggaagcgctcaaggactagttactaagataatttttaatggtaaggaaatcgttggaggtattatgtactaaagaatttaagataacatttaaataatcacttatgtaggaatttcaaactaaaattttcttctaattattatgcattttgtgggaacactagtaagatatgtttggtttcattcgtggacttggaaattgtgtaggtgaggacattgtgtgagaaggctaaggagatatt

SEQ ID NO: 107159 - DNA, 405 bp, Aquilegia coerulea
  Intron number 1 from transcript AcoGoldSmith_v1.010577m (l ocus AcoGoldSmith_v1.010577m.g) derived from phytozome v7. 0 (chr-ID scaffold_45; pos 1268057 to 1268461 reverse stra nd)
ctttcttcctgaaactggtgttcgtcacttctcaggtatttcttctcttctcctctctcctcagctagtcttcgttaatgccttgtttattattcagatctgactagtttgaatgaaattgtttgtgaaaataagctaagatttatagttaaaaatgttctgatttgagtcaataaagtaatctgttcaaaaccctcattttgatttgctcgttattatcatttctttgaaaagttaaaataaaacgatctattggggttgttttgattgtttttttgtgtgaaggggttcgactttcgagttgattttttttttttattgtttctgattgattgattggtttgtggggttgtttggttttagctttgatttgtgattgattgattaagttcattcttcttgtag

SEQ ID NO: 107160 - DNA, 659 bp, Aquilegia coerulea
  Intron number 1 from transcript AcoGoldSmith_v1.005867m (l ocus AcoGoldSmith_v1.005867m.g) derived from phytozome v7. 0 (chr-ID scaffold_113; pos 173431 to 174089 reverse stran d)
cttattcgataatcaaaccaggcttagatcttcaggtaattcatttcgttaattttctttcatattcacttgaaataatcatgtatatgagtttcaacatagattgtatatatatatgagcttgtttgattacaaaagaagctccttcttgtctcaaaactttgtatgagaatgctattttaggatcaaaaagctataatatctaaaccatgccagtaaacatatagttgactttaaagaaacaaaaaatggcagttgatcatcaggggatggagccaagtatctgaaccttgccattgggagattacaaccgaaaaactaatggtgattttcccatctttcggtggcctaccgcccctatctgccacctttggatccatcccggttgatcattttttcttttagattggcaagcggggttgagaggacccctacccctttaaattacgtgtagaaacttatatcaacaatcagctgttgacatgtttcgaacccacaacctctccactttgtgagaggggtgctaccattgagccacaggctcattcgcatccttgttgaatgttgatcattatacatttctacattgaacaaatggccaaacatattgttattaacgaacaatttcttttacttgcttgatttcgttttccagcaag

SEQ ID NO: 107161 - DNA, 1001 bp, Aquilegia coerulea
  Intron number 2 from transcript AcoGoldSmith_v1.015653m (l ocus AcoGoldSmith_v1.015653m.g) derived from phytozome v7. 0 (chr-ID scaffold_38; pos 91772 to 92772)
caaaaattcgatttactcttatttctttcgacttggtatgattgttgtttatttttaactgggtgtaaatctgcaatgcatagaagcttttattttcaccaagttgattcttagtaatgtggtttagtttcaccataatgtgtgttgattatatcaattgttaagctgcttttatttttgcgaaaacgggcactctggattcaggccacattatatgtaaaacttatgaatgtggccaaataccaagtaaccaacattttacaaaatccccgagtgcgctcgatccaataaactttacaactatgatctgtgaggcccatctctccatatgaaatctgatacctgttatattggaattaatttaagtgaaagattggattgcgattgcattctgtaagttgaagaaatatgtgttaatctgtaagggttatatttatgacatcaggaacttaaagtttatcttatagcccttagatttactacacgtgcacattcatataggaagttagaaatcatcaattgtgttttccttaaaagacaagcaaatgaaacgttttaataaaattatcagaagaaaatcgagaatgaagttttcattgtacgcattcactgtattcgtttagtctatttgattttcttacctagtctggaaactaaaggatagcttcacttggttttgatatcaaattcttaaacctttttacgttcatatataatcattttccacgtcatgctattccatctccataatctaccaacgatcaaattaaagcttattaataagtgtactttaatgtgggagtcaacatcagtcagttgtgttaatatatctttcttctaccaactatacattcattagtgtatttttggctcagaatcttttgaattgacatttttggatatattgttgcaaatttagaatttgaatctcaacctataaagccacttcggtaggctactgtaccgtaaattaatgttaaaagtctatattgcacaggaaa

SEQ ID NO: 107162 - DNA, 467 bp, Aquilegia coerulea
  Intron number 3 from transcript AcoGoldSmith_v1.016712m (l ocus AcoGoldSmith_v1.016712m.g) derived from phytozome v7. 0 (chr-ID scaffold_14; pos 888573 to 889039)
gtttcctgaaggtattttttattttggtattgtttgaatactgtttcattcatcctaggataggaaacagtgtctttgttgatagtcattctcttttttattatttttggtttttcattcaagaagaattattgaaaatcggtataccattatacttatccaaaatataagacatagcatcttatttatagacttatatttgcatgaatgtaagtaaacttaagtagagctgtaaaggcactagtctgaatcatgtggctcagtgttagtttgttcttcagtattcttttttatccttcaaggcattaatttaaccaatcactttcaggttttttttttcatatatgatggggatcttttgtggtatttctcaaggaccagccacatttttcttccatgtataatcttttcgcatttgattttttatggcagggaaaatcatttttactgcaccatcacgaccttta

SEQ ID NO: 107163 - DNA, 652 bp, Aquilegia coerulea
  Intron number 1 from transcript AcoGoldSmith_v1.027057m (l ocus AcoGoldSmith_v1.027057m.g) derived from phytozome v7. 0 (chr-ID scaffold_76; pos 718464 to 719115 reverse strand )
ttcagacccaccatcaaaccatcagtagttatcaggttagttatagtgttatactgcattcaatcaaccattggtgaacctatacatcagatataaatgtggttcttgttttatgtttctctgttttatatggcaaatcaaatgatgttcatgttgttttgtgtggttttctgttaaaggtaagtgaccacgaaagagagcttcgaaaggtcaccttcatagaaagggtacaagaatacatcaggtacagtataaacaaagtacttcttaatgatctatactttggcctagttacttctggatttgttgaattaagaactactaaattcataactaacagaagtctcttctttccatctggtgaactattttatcgcaaaatgtatagtccaagtggtccaagactttcatctccatcgcttctcagcagtccaaatttaggagccatcgtatctcaagccaggatcaagggatggcacatagatccacatgaggtctgcttcataatataaccatattttcgtcaagcatatttgcattgacaatcatataaacgtaactttcattctataaaatgatcaatgaatccacacttccatgtgtagacataatctgatattcttttaatgtttattccaacagatcaaattac

SEQ ID NO: 107164 - DNA, 567 bp, Aquilegia coerulea
  Intron number 1 from transcript AcoGoldSmith_v1.006868m (l ocus AcoGoldSmith_v1.006868m.g) derived from phytozome v7. 0 (chr-ID scaffold_4; pos 9437999 to 9438565)
tacaactcttcaatcccattttttcttattcaaaggtacacaatttttttttttttttttttgcttcagttttctttactaaactgttacattgttttgacttttgattcagttatggatttccatttatttaaatctattttagatcattattgtattatttttgttagaatcagaagatattcaattaccaatgtaatcaatttcatttatatatcttcaattttgtaatttgttctgtatattagttgaattcttcactaatttgtctctgttataagtttgattgctttttaggattgcccatttgattatttaggtgaaattttggagttttattgttactatcagttaacaactcaaattttgatatatattttgtttatatcagtatattatttgttttgtttgatttaaggaatgaagagtttttgggtttttatggttgtgtttatttcaatatgttttaatcttagttggatcagtctggtaacatcttgtttgatcacattttgcgtattgcatatttcaggttattgtatattgtactgaaattcatagactgga

SEQ ID NO: 107165 - DNA, 613 bp, Aquilegia coerulea
  Intron number 1 from transcript AcoGoldSmith_v1.010185m (l ocus AcoGoldSmith_v1.010185m.g) derived from phytozome v7. 0 (chr-ID scaffold_38; pos 1320156 to 1320768 reverse stra nd)
gaaacctgttcacaaagtcttaggcggtggaaaacgtataaactctctctctttattcatttttttctgttttattgcaagttatgtttatttttcatagattgagcttatgattttattgattaagttgcttaaagtttagaaatccgttgtttttatcattttaaatctacttgaattgttagattgaatttgaactcattgaatggattcaatgagatttatctatgggtttaataagtaaagaaagtgattactcgactcttgatttaaatacactatttagcagttagcactgagaagtaatgaaatcaacaaataggaatggaaactaacaaatttgaagattacttagaagtagtgaaataaatttgagtttcggcagtaattgatattgaatgtgatggtttcaagtgtttaagatgtaatgttgtaatcacgggtgagattcgggaaataccttgaatatcagtggttaattgattgctttcaagtaatgtgagaggtccaatttgtaaactgttgtgcatatatgcttcaatacttttaatggtttgtagcagcatagtgagtgacttcaacttaattctttttaattcaaatgcagctgctg

SEQ ID NO: 107166 - DNA, 951 bp, Aquilegia coerulea
  Intron number 1 from transcript AcoGoldSmith_v1.016299m (l ocus AcoGoldSmith_v1.016299m.g) derived from phytozome v7. 0 (chr-ID scaffold_20; pos 2444205 to 2445155)
atgtatatatattgttttcaaaaatcaaagatcttcttcccaaacattcaggttctgacttttgatttccattttaaatgaatccctcctcatttatgagttcttcttccattatctcaatttgcagcgatgtagctggagtcgtaggtacattctctttatttctataattttctttctatttctttcctctattcatgtttcttgcatctgatggcatgatgatttggggtttctggtttggtccgaagactaaccataaattagtacgaaaacttgaataacatttgaatttagaagtaatatataatgcacacccattatagttttcaggctgtcttcaatatctgaaattcttatcacaattttctctttcttcgaccaaaacaatatagcaacagcaaaggcataaaacaaatcttatttatacatccaaacacatgtattgacttcatgtagaacttggtgacaccaaaaataaacttattacagagtctgtatacaataaatcaaatcatggtgtaatcatgtactgtagtcatgtttatcatttgctgggcttgaatttacgtgggctgaatgttagattagatatgggctatgaaagcctagtcactagagcggactttatgaggttgttcgagatggttggagaagctaaaaactctgaaactcacgtcttttataaactcgccaaaaccccccaacaaaccaaagaaaatcaaaatgtattcttcttcttcaaaccttcttcatcgttcttcttctctcaaatctttgggtgttaaaagggagatgatgattcgaagtttaattgggatgttgaaattgatgaaaacatccattctaaagatacccattttgttaatcaagaagaatttacttttgattttagtgggcaattagagaaaactactttaactgctgatgaactctttgattgtggaaaga

SEQ ID NO: 107167 - DNA, 277 bp, Aquilegia coerulea
  Intron number 1 from transcript AcoGoldSmith_v1.012115m (l ocus AcoGoldSmith_v1.012115m.g) derived from phytozome v7. 0 (chr-ID scaffold_62; pos 304823 to 305099 reverse strand )
gctgttcgcactggtggcaagggtagcattagaaggtgaaactttccttctgaattaaactttgacacattttgatatgtctttatctggatcgcaatcaatagaatattttaattttccatgttatataactgctgtgtcttatatagaagattgccttagtttttgtattgttctcactgctaaaaatgtattgaaagttcatttgatattattactgttctgcgcgctcttaactacagaaagaagaaagcagttcataagagcaataccactg

SEQ ID NO: 107168 - DNA, 334 bp, Aquilegia coerulea
  Intron number 2 from transcript AcoGoldSmith_v1.018272m (l ocus AcoGoldSmith_v1.018272m.g) derived from phytozome v7. 0 (chr-ID scaffold_45; pos 808049 to 808382 reverse strand )
cctccctacccatttcagtttgagcagtcagcaggttcttcaatgccaccatctctacaagcagattccagaggttgattcaaatgtctcttcttccattgatggaaggtataatcactggctattaaatttgatttctgaaatcaagtgttggatactcaagttgattattcctctataatcttgagcattcaacttttttggaagtttgagttccagtggcgtaataattaaattctcaatcttagttataatatatattgacgattattcattttccgtttgtgctcttctcaatcaaggattaagaagactaaaggtgaaaaggaggaag

SEQ ID NO: 107169 - DNA, 924 bp, Aquilegia coerulea
  Intron number 1 from transcript AcoGoldSmith_v1.014216m (l ocus AcoGoldSmith_v1.014216m.g) derived from phytozome v7. 0 (chr-ID scaffold_4; pos 550217 to 551140)
aaggtaagaaatgactttgtgtttgttttctttcacttctattgtatatttttgctgtcttttaaatgattgggttcttcattttcgtagccttattgtaggggtactacatgcaatatccaattacaacacgacacatgacataccattactatcaatcaggtcgcccataacacgacgtcacataatccgaccagagcaactcgagcatatgaccgttggcgacctcaatatggacatgtgcgctaaatcaatgttaagaagatatcctcgttcattacacattaattaccaaatatctcgtaattaatggatgtcggagaattcacatgatcccatgatctacgtccttccaccttctataaaaccgacagaactacgatggcttaatctctaagttccactccctcgagctagagtacgtaggcaatctcgatctcacaaggtgcagccacccccgatctcaaaccgccatcttggtcaatcttcttgcgacctgacctggattaatgcattaatctagaaacaggttaatacatttggcgccgactgaaaggattcgattttatcgaaaaaccaaccctcccacccaactcaaatctcaaacttttgtccacttagccaatggccaaccaagaaaagattatctgagatctaaggaaccagcttactcgtttacaagatgagaacacccaacttaaggctcatgcaactgatgctgacaccaataacgatcagacagaagtcgtcactatcgataacaacaaccacaagtacgaagaggtcagctaacaactcgcataattcaaggcctcccaggccgcaagccagacttggacgaggttgcactgcagaacagctcgcaatccagtctttgtagcactttcaggagtccccatttaccaaggaaatcctggagcacga

SEQ ID NO: 107170 - DNA, 732 bp, Aquilegia coerulea
  Intron number 1 from transcript AcoGoldSmith_v1.014865m (l ocus AcoGoldSmith_v1.014865m.g) derived from phytozome v7. 0 (chr-ID scaffold_14; pos 971118 to 971849)
ctgctttcgcctttcttgctaactggtaaatttaaattcaagtttccaatttttttttttttcttgattttttatttataatttctgttttaatatgaaaaataattgacacccttaagttagagatttgattagatatgctaattaattagatacagtcatacagtaagggttttcatattgacctagggtgattattgagttattgttttattttaatttttaataaataattaaattttccgatcaaagatatggttcgagatttgttaattaatgagtaatgctgtaatggatatgtctataatattaatagcaattccaacaatttacttgtaagacctagggctctaaatttgttttgcttgttgatattgcacttcaatgtttattgtaaaggtggacaacacgagaaagacgtaggtttttagacgggaagggcacaagactgtgtaaatgttgcaacgagatcaaaataggtttaaactttgttctgcttcctgtagagaataggttttctgaaaggaatgatgaacatgtttatttgaagaaatattttgtaagcttgttaagttacaatgcaaagatgcttgtaaatatatatagactagttgatatgctggaatagtgcataccttgtaacttataattagaatgctgagatgctgtaaagatttgtaatgtgtgttctggaaaaaaaaattcatttctctctctttcttgtagtgaaag

SEQ ID NO: 107171 - DNA, 826 bp, Aquilegia coerulea
  Intron number 3 from transcript AcoGoldSmith_v1.004910m (l ocus AcoGoldSmith_v1.004910m.g) derived from phytozome v7. 0 (chr-ID scaffold_17; pos 315357 to 316182)
tggggcattcactcacacattgtctggtcatcgtggtaagatatttatggcatgatttgcttttttaatttttgataactagtagaagtcttctttttatacctttattttcttacccatgtataaattcaggtcattgtaaaacagtcattccctgttaaattttgctatggaaacaagttttaagcatttgtagaaacaccctcaactcgccttgtcaaaacctaccaacacacttctgcagatataggcatcactaatgctctttgtgtctagacactgctatacataggcacatgtatgcatataagctataaaacaatatgtttgttagttgaattatcttatttaattgtagtgcattatatcatgcacagtaacattttacaaaccttaattacctactgggcaagggcaacacttcttttatctgcaaacgtacattagaaaagttaacactgcttgcagtagtagtactacttggattaatcagtgtttggtggaaactggctactttactgaattcttgtgggtagaaattggcatttggcactataaactactaatgctactacatgtcatatagatgccaacttctaaagaaattcccttgtgcatagtactgtatatcaaaattcaaaacagttataagtgagtgcaactacgtggttaagaatcagtttatttatgtctttactggtgtaaacatgtttttctttttgtgtattataagcaccttacattgtataccatttattaaaatctttgtttaggaggttttaaatcattgagtaagatgtttgtcctattgtctttacaatggcag

SEQ ID NO: 107172 - DNA, 405 bp, Aquilegia coerulea
  Intron number 1 from transcript AcoGoldSmith_v1.000234m (l ocus AcoGoldSmith_v1.000234m.g) derived from phytozome v7. 0 (chr-ID scaffold_17; pos 4605101 to 4605505)
tctgcagtctttcagctgacacccactcgaaccaggtgacttttgttgattcaagtgttcttttctacttatgtttgatttaatttcagttgtttttttggttatatcggcattagagtaatgtgatttcagttttttcttcttaatatatcgaaaattcacattttaagtgtttttaaagggttttgcgatatcatttgcttgaaatttaggggaaattctctttgtgttatttagacacacaaattgcattataattcgacaatcgtttacatccaattcgtggacatggaattatgtgcagtgatttgatttcaattgatgtctttcaatttttttttttggctacttgataattaaaagtgttgcttttgttttataggtgtgatttagttattgtggcga

SEQ ID NO: 107173 - DNA, 947 bp, Aquilegia coerulea
  Intron number 1 from transcript AcoGoldSmith_v1.024920m (l ocus AcoGoldSmith_v1.024920m.g) derived from phytozome v7. 0 (chr-ID scaffold_4; pos 8027024 to 8027970 reverse stran d)
agagtcctagaccaagctgttctgatactgcttctgtaagttttgtaccccctttgttttgttatgttaatgagtttgttgttttgattgtttctatctttcttaagaatttgttggaaaatatgtggatgttttaatccgtggagaaaaactgatggtaacaataggtagaatgtggatattatgttgagaacattatcctcatcacaacttgaatcattataatgtaagacataacagatggtttgtcgtatatttgcatagactgatagtttttcatgtttttagtgtttatacaatccatgaattaaggttatggaattaaaaggatatttatgctcttcacaaatactctttttttttctgatagatctattattttattaatcccccaaatagtagacattgtttgaaaatttgagttatgtttatctaatctccatgaaaaaaaaattatctcctaaaattctgaatttgagtacttgccatttcactaatatatgggttgccatttcactaatatatgggtattaatcctttgaataagcttaatgtaaatttaaacacactttggtagcagttaatttgcatatttacactttactccagtcaggcttgcgtcctcaggagatgtaggttcttaattaatgtgttgtgccttacactgtgattggtattaatcaaaatattgcagaggaaacttgattttttttatgttgagtgtgggttatggtgtgtcacgtcttggtataagctaaagtcaaactttgttgtatgctcaaatgttctttctcatctccctccattccctattatcataatgaattacggtgtatgtttttgagttaatagtactttgtaattgtcatatttgatgtatggggtggtaacaagtgtaatgtatattcccaggttctgtcagataccaaagcttctccaaggaggga

SEQ ID NO: 107174 - DNA, 720 bp, Aquilegia coerulea
  Intron number 1 from transcript AcoGoldSmith_v1.001084m (l ocus AcoGoldSmith_v1.001084m.g) derived from phytozome v7. 0 (chr-ID scaffold_94; pos 359783 to 360502 reverse strand )
tattccagaaccttcaactaatccaccaactaaaggtaattcttcatcttatccattaattaattatttaataatcttaatctgtttatcttatttgaattttttttataaaaaaagcagaattttgatagttgttttcttggattatgataatcagtaacatcaacttgatggattgagtgtgtttggaagttggaacttaatttgtgtgtaatgttttgttgtcagggatgtgacttttctggctttctttttcaatatcttatctgtaaatctttgaatgtaaaacttgttaaaagttgttttggacggttgattcatctcaactttggaatagtttattcataattgtcaattggcggaaatagtcattcgtaattcatatgttttgtgatagaattgtagtatttgttctcttgtgaatgttactttggtctttttatatatgtaatgtcttttctttaacttgaaagtgaaatgtcaattggaacttagattacaaagtcgcatacagataaataaagtgttatatgttgtggtccagatatgggacacattgttctatatgtttggtttgaatacctactactgctggcttacatttttcttttctttttccttttctaatttctgtctctgagggactttggatggtataatcttcacttgtttggttaactgatatattttggtaccatggctttttcaggtctccagatc

SEQ ID NO: 107175 - DNA, 627 bp, Aquilegia coerulea
  Intron number 1 from transcript AcoGoldSmith_v1.011944m (l ocus AcoGoldSmith_v1.011944m.g) derived from phytozome v7. 0 (chr-ID scaffold_17; pos 3980281 to 3980907 reverse stra nd)
tcgaagcgaggtttgttttctctcttcttctctaaatcttcatattaggatttatattatgttttgatttcactttaaactttgatgttaatcgatcatgtcaattagtttactgattcctagttgatttagttttgttttgtacttttgttagatctttccgtttgactgatttctcagaacgagtaatctaaactgtgatgtagtttgatttagttcatgaactctattataagtttatatagatttgggtttatttcaccgatttgcaagttaaataatttactcaaatatggatttgaattggaaactctaagaaatgggagtgagcatggttcaggttgactattagttgaaatgttgattaaacttgtctgtgtgggaagagagggatgggatttgggatttgatctagactgatattttcgggaaaaaattggaaatttgttcatggtgactatagaaatgaaatgtagatgttatttaaatttgtttatttgatttgggttttatagttgttgttaagatcaatttagctaccaattgttacatttatctaatgtagtcattattttgggtttatttaaacttgtaggacgtggaggttctgctggaaacaagtttcga

SEQ ID NO: 107176 - DNA, 946 bp, Aquilegia coerulea
  Intron number 1 from transcript AcoGoldSmith_v1.002688m (l ocus AcoGoldSmith_v1.002688m.g) derived from phytozome v7. 0 (chr-ID scaffold_38; pos 1916241 to 1917186)
gacttgctgtcatcacaactcattgcaagtaagctttatctcttgtagatcaattcaattattagcatataaatcttcggcagaggggtgttttttttttttgaggggtaggggtgggggttcaaaaagtatcgaataaatgataggcagatgtataagattttacttatattggatctgatcagttaaatctaagtattgatggtgtttgagtaatattttttttgatggcaaagttaaacaagttgcggcatggcatgaaatccattttataacaaaacacttgcaattttcttcgaggatgtcatctatagcatactggcacatatgatacatacatagttatgaagtgacaatcacagacttcttctcttgatgcaatgaaatggtatcaaactgttttgcattgtaggtagatgatatatagtgaccgagaaacatgtatttttcttcatgaagtctaataatagtatcccacatgaatgagcgacacattttgatgtatcagaaaacataggaatgaggtgccccttctcttctgttctgttttcttttggttagtctttttcattgttaggtggtgtacttgcaatcatcttcgtgaaattctcatttattaattggcttggagctgggtatctttagtaaacactagtttccccaagacttatatagatgaaagttgtttggaaacattgtgaaaacttaacgttattgagttgatatttttttccttgttcatttatctaatgagtatgtatacgcattccagtttaattaaatggtataaaaatgcttcaatttctgtatttcttagtgtttctatatttttgtgattcctttgttgagtttacgcctgataattggagattatatattgataacttacgaagcttcttatctcattgcaggaatttgactgagctagatatacaggagaacggct

SEQ ID NO: 107177 - DNA, 870 bp, Aquilegia coerulea
  Intron number 3 from transcript AcoGoldSmith_v1.010641m (l ocus AcoGoldSmith_v1.010641m.g) derived from phytozome v7. 0 (chr-ID scaffold_17; pos 976029 to 976898)
aggaacgaggtataatgtgctgtttatttgtttgcttaacttgtctgtttctaatataaatctgcttttataacgtcttagtgcacttttaaattgcattcagctcaagcttgggattacatgtatctcttttttactatataggaggcagctcagcctactttgagttggttgatatctaacctagcatacctaagtagccaatgccagtaaaccttgatattaagagactgcttttccacttttggaatgcggaaacggaaaacatatcatttctccaacaggaaaattgctagcatttgcattgaaacttaaacggatcagcttcacactgctttttcttcatctcatgcatagagtcttcggttagaaattgctaatatacttatatagaaggtcaaacaactggtcattcagatttatacaactaacaagtcatggaattttgtggaggaagccacatgaaccatcttaagaacatttggtgtttccaagttacttataaccataaaataagatttgcatggtgaagttatcattgttgtttgaattacatttctgtatttgcttactgtcatcagttatgaataggtttcttcgagggaaaaaacctattgaattttatagtctgatctcctaatcatttctaaaaacattggcccaatccctctttcgaactgccacttagaaaacgactgaaaaaataaattatagagtttattaccattaaaacttttgaagtaattctacccctcgagaagtctaattatttgacttgcactcaaggttttaatatggggatctactggagattcatatgtttgatgtttttaatgaatacagcggagaagaagagaagagagcaacatc

SEQ ID NO: 107178 - DNA, 500 bp, Aquilegia coerulea
  Intron number 1 from transcript AcoGoldSmith_v1.013981m (l ocus AcoGoldSmith_v1.013981m.g) derived from phytozome v7. 0 (chr-ID scaffold_14; pos 1625819 to 1626318 reverse stra nd)
ggtttgttgttctaatcgggtacgtattagttattactatgtgtttcccttccttccttccttcatttttttcttgctttttttttatgtgggttttgttaaatttccaattttgcaaaatgatttttttcacacattaaattttgtgtttttgataacttgtctaaaatgggttttgtgtatttggggtttttgttaacaatgttggttttgtgtaattgaagttttgttgtaacatgtgttaagatgcattgtgggatttgcgtgttttttaagtgtagggatttgagttttgtgtattttggggttttcttaacatgaatctgcaaataaagtttgtttattctgaggtaaaaactatagttgtgtagtttgcagtagtacaatattctgcaccattttgtgtgttctgtgttgtatgtctttttaatgtttgatgtccagcatttagttggatttgatatcttctgcagttctactctctaaatatcgttccagga

SEQ ID NO: 107179 - DNA, 285 bp, Aquilegia coerulea
  Intron number 1 from transcript AcoGoldSmith_v1.006332m (l ocus AcoGoldSmith_v1.006332m.g) derived from phytozome v7. 0 (chr-ID scaffold_4; pos 7626589 to 7626873)
tcatcaagtagattttctgattcaggtaccaatttcaatttcttttctctttttcaattgttgggttctcttaaaatcttaaatttaatataccctttttgttaatttgattttcttttgatatattaatcacaagtaaagaaatgatgttttggcttatttgcttttaaagatttgattttgatattcagtagtatgttttaatgagaaataatgaatacccattgctatatttgatgcgaagaagtgtgaagttgctatatttgtttctctgcagcttcactt

SEQ ID NO: 107180 - DNA, 695 bp, Aquilegia coerulea
  Intron number 1 from transcript AcoGoldSmith_v1.001615m (l ocus AcoGoldSmith_v1.001615m.g) derived from phytozome v7. 0 (chr-ID scaffold_5; pos 564071 to 564765 reverse strand)
cttcggatgtaagttttacttctcaaatcggtctttatcttgttcaatactttgcgatctatttgttttgcttgagtaacttgtttaattgtttgatctgtataaaatagctaatttcgttgtatttgtgatgtgtattcttgaaatcgattacttttttgacttgattttgttgtttgatcttcaagtaatgttagtctgctatccataatgctgtattgtgtagaaattaaaatttagggtttaagaatatattttgttctttgagatctgtgtttatctgttggtttccactttgtaaattatgcatttggctgttatgactatagttaagaagcatacctaagttagagatataaggtaattgaaacatcttatgctagtgatgtaaagtaattgaaccatataggtgaacctgtacagttaagtttcaaggtttaaggaattgatttcaattttttttaatagaattatgcgttgtgttgtattgctatatttatctggtctagatctacttactatttgatcataactttgaatttatttgtctttttattaaagaggcaaaactgtttaactttttctgtaagtgacttggttgtttagatatcaataatttgatttttgaaacttatgtgggtttttgctaataatttgcaggcattggacaagatccgatttgagagcttgactga

SEQ ID NO: 107181 - DNA, 508 bp, Aquilegia coerulea
  Intron number 3 from transcript AcoGoldSmith_v1.014010m (l ocus AcoGoldSmith_v1.014010m.g) derived from phytozome v7. 0 (chr-ID scaffold_20; pos 373746 to 374253 reverse strand )
ggtatgtatgctaatcatgcatacgacgagtgatataaatactctgcccaataatatggtgttcagaaccatatataatgggcgcctgaacaaatttacgcatcgtgacagggggatataaacatgcatctaaaatcaatcctagacagagaacaccaaccattgctactctttgaagttgtttttcctcatagtttatgcaactggattttctaacacaataacagcataaatgcaccaatcacaattaaccaaaaagaaagtctcttctatgctaaagctagaaataaaaccttcagatccaacatcaaaattcctgaaaccagctttgtttactgctttaccttgcaccgaccaaaaaaaaacctagcaattgatctgaagttggagaaccattcccttttaaccagatgttcctatcctgaccttcaaaaaaatacctagtaattgatctgaagttggagaaccattcccttctaaccagatgtttgtgcttttgcagtttttc

SEQ ID NO: 107182 - DNA, 935 bp, Aquilegia coerulea
  Intron number 1 from transcript AcoGoldSmith_v1.003868m (l ocus AcoGoldSmith_v1.003868m.g) derived from phytozome v7. 0 (chr-ID scaffold_66; pos 482991 to 483925)
tggctcagcattttgacgttgttgctcgttgtcaggtatgtattcattttgattaatttttagcaattttttttcttaaatttcgagttagtttgttttactataaattttagtatgtgcttctgagaaattcgatggcatggcacctttggcaatgtatcagattgtttttttttttaagttcatatactgtatgctctgagcgatctagttgcatcttaaggacaacatcaggggtaacagttttaggatttccttgcctctccaaatccagccatagatttttatccatgccgtacctctacttactacaagttaaacttcagtgtgggtgcattatgttaaacattgctaattcactgaagcatattggaagctttgtggataatcttggatttatttcgaccagttgttttagctctaaattggttctaattaacaactactttagttaggaaaaagtacatattggttctaaacattgttttctcataatcaaattataacttttaccattttattatttatgttactattacgggtaaaatcataaagctaagcacatacactcaataaatatttgttcgcttctcataagacactttattaaccactagtaatgcacgatttcatgttttaggcccctcagtgcaaagatgactggaagaattgaaatatccctgctatatgttgttgctattttataccaaaagaaaagtatcacggtctcatataaatgttataaagttataatggcgaacatttgagatgtacctttttgcttcgggattatctaacactttctccaagtgggtgaatgtgtacctaaataatagtatgataaagggggttgagagagttaggtaaatacatatacttgtactgctccttatgtagctctaaaacttgtattgctaactttcagggtggagcaa

SEQ ID NO: 107183 - DNA, 778 bp, Aquilegia coerulea
  Intron number 2 from transcript AcoGoldSmith_v1.009153m (l ocus AcoGoldSmith_v1.009153m.g) derived from phytozome v7. 0 (chr-ID scaffold_17; pos 3125127 to 3125904 reverse stra nd)
ttgccaaggtagagttatggtataacatatgcttcctttctgaaagttgtttatgtaatcttcaggtttttttatgcatctttgatcggcttaaatcattttatctgtaattataatttcaaggatattagtgtggcaaaatatgcacagaccactagtaatctttatatatgtatgaagcataaactcatgaattgttgtgtgaaaaatgttaaggtgatttgagtctgatagacattacttacatccgttcaacatcataatcaatcccatttctgagtgtgtcttttgtatgttggaaaaaaaaactgtagccaatgggaacctagactgttgtgattagtgtcttttccgtgggtcagcatctagacaggaagcagccggttgaccctgctcccccaccgaacatcaccctcttgtctgcatacactcacacatgccgaatgcatatatactagtttagttattataatatatgcttgtgattcacttacaattatttgatatgggttccaagtttattgttttgttagccaatgcttagaaacttacaatcttgtttgctggttgacttcgtaataaacttgtgagtcttgagtttgcaagttatttatgtcagcaagtttaaatcagtattggcttgagaaattgcatgcctagttcctatgtttccttcttttttctctctgtttctttgcacttcattactgtaatataagcttttgagttttctttgcttgcaggactgtataaaggcacttcagaagcaattcccaga

SEQ ID NO: 107184 - DNA, 816 bp, Aquilegia coerulea
  Intron number 2 from transcript AcoGoldSmith_v1.019253m (l ocus AcoGoldSmith_v1.019253m.g) derived from phytozome v7. 0 (chr-ID scaffold_4; pos 8759051 to 8759866)
aaggtggaactaggcctcttcgacgctcacttcaagtaagtggattagattcttgcgtagccacttttcaggttaaatgtgttttgaacataggttcttttgcttaaactattatagtgtatagtgtatactactgcactaaaactttaccaaaggtataatgatgactttacaaaagtataatgatgatcgttcacaaattacggcaactacttcgatagaatttctgcagttcttccccaataatatacacaagatgaaattaaaagaaccataactggattattcaaatttcaggatataggattaacaatagatggtatgagttggtctctttgagtgttttccatctttttccacgcatgaaactaattagacactttaatcttgcttttaagtactttttagtgtcatcaaagggacctatggtgcatgtttattcccaatcatggatgtcctagattcaagctgatgtttacattcacattcacattcacattcatcctatcagaagaaaattttcttcttggtcagtgagtcagtaggatatccactcagcttaattgcttttgcttcaaaatattaaagtttgtatccaccaaatcctagtgggggggacctaagataagatactctgatcttgtgatgtaatatatctcaagaacgcattgtagaaaaaaaaaatgcatcatcaagcttaaatgtttagaagatttatataatttgattcatatagtattgaagagcttaccatatataataatataatgtacttcaatagggactagatcctgtaacagtagcagcagtgttctc

SEQ ID NO: 107185 - DNA, 980 bp, Aquilegia coerulea
  Intron number 1 from transcript AcoGoldSmith_v1.027637m (l ocus AcoGoldSmith_v1.027637m.g) derived from phytozome v7. 0 (chr-ID scaffold_82; pos 358716 to 359695 reverse strand )
aagttcaagatcgctgtgatcgagttggattgtaagtcaattgaatatgtggcgaccaatcagaattgccttatttgatagatcttttctcaactgatagatacttacattacgttgatgaaaaatgtgcaccgcataatatctgcaaccactcatcatctagtatttttctgttgtttcgtgaatattgttggtgaaatataagttgagagcttttctctgcccacattcagtgaaatcacacaattaataccacaactttgtaagaggcaaaacacttctgacataatttatttgatttgtaaagaatcaattctttatgcttaatttttctttgtttgttctagcaattaacttttgacagtttcttttcattagacctgaagttgagaaaataaaaattagcttcaatcgaaaggagacttcacaagaagtttttttgccattgcttataaacatcccactgttttgatataaattatagcattatttcacttttaggtcgattctcaaagttcatgcatgggtatagtttactaagaccttattagtcattggattttactctgttgagttgtctatgttccgtccattacaaccacctctctgtatggtaataagctccacacattaaggggtgttaatgtgtgaatgtgtgatatatataagatatattcgttactagtttagtttgaaagctctcgtccttgaactggattaagctttacactcttttgaatggctcatgtgtcacagcagggaaacatataacctctaaggtgcttcacgtgttcttgctcaaaactgcacttgtttatatatgatgcaagaaaacaaaacaaactcttaatgaattcctcatcttgtatcaatttataagatactttagcattgatacatctattttcactgcagtaattccttggaatttttttcttctttcaggggattgaagattattagagaagcaggtgactatt

SEQ ID NO: 107186 - DNA, 474 bp, Aquilegia coerulea
  Intron number 1 from transcript AcoGoldSmith_v1.012501m (l ocus AcoGoldSmith_v1.012501m.g) derived from phytozome v7. 0 (chr-ID scaffold_38; pos 2109001 to 2109474 reverse stra nd)
tcaaatatcttaaataggcctccaaataacaagttattgggccattaatccaacaaactactgatgtagcattctatgcggtagatgctcacatgtgggggtttcgcgattcttgctcagagcaccacttcgttgataatgcagttgacatgagtacaaaccacactaccctttcagacaacaaaggcacgaagaaaaccctggaaaaaaaagaaggaaaagcagagaagtctatcacttaaggagcatgccatgactcgatcattagcaatgactcatgagcattgcacaggtgtgttttacacgtgttaatcatatattaaaagtttgtctactgtccaaaaacacttcatttgttcttttttatttataaaatgccccttttaatcaactagaaagagatcaaagaagtgaatcttgtgaaaataatggttgatagggatatctcggtgttgcctgaaggttgcatctcta

SEQ ID NO: 107187 - DNA, 522 bp, Aquilegia coerulea
  Intron number 1 from transcript AcoGoldSmith_v1.027215m (l ocus AcoGoldSmith_v1.027215m.g) derived from phytozome v7. 0 (chr-ID scaffold_20; pos 280433 to 280954)
ggaaccttgggatttaccaagtaagaatttttctctcttttgttgaaattgggaaaatgggtattgagatttgggttaatttgatgtatgggttttggattttgagcttaatttggtaaaaaactgttcatttttctaattgaagttgtcttaatatggataattattggttttttagctaaaattgggtgttattttggaaattttttatgggttttgacttttgaccttgatctccaattagcttgaactgatcactatgttttcttttatagctttatttgtcatgtaattgttgtaatttgttgatttagggttcttatttagatattgttattgttcatttggagaaaatttggtttgatcttgatcctttgcttcatgaggttctaatttagttttggaacttatgaacttcactgcccagttagaaaactgtttccctaaattcttttccctcattctcaattttcctgactttgaacacttttggattgcttgcaggtttatcagtgattaaaa

SEQ ID NO: 107188 - DNA, 646 bp, Aquilegia coerulea
  Intron number 1 from transcript AcoGoldSmith_v1.022190m (l ocus AcoGoldSmith_v1.022190m.g) derived from phytozome v7. 0 (chr-ID scaffold_23; pos 3057866 to 3058511)
gaagtgtgatgttaaaatggttccattctggtgtagtggtgtgggtgactgggtggcataaacatttgagtgatttgctcgtcaatttcctctgaagtctaaaaccatccaaaaccacatttgtacattttgtgacataaacagttctgcactcaacatacttcgaaaacgttaaaagaataaagcattactttgtaccataaagtgcaattttggggcctgagtacttgaattacactactttttactagtttgaaaatttacttaactttacttaaagattcccattagaaagactaataaacttgataatcactactgttttgcaggtttacaagactcatttggcctttattgagttggaaaccaagtgcactagtccatggtcatattgcaattatcaatatataggtcccccgtcccagttacaaatctatctaagataatctcttgatctcttccattaatttgagttgtacgggattggagatattttgtctaaagaatacagtatgttgcatgctataaattcatggccttccatctccaaatctaacatcattaacaaaccttgacactcaaaatgaaaagttatcttggtttctcaatgttcattatcagtgagactcaaaagccttatcttgct

SEQ ID NO: 107189 - DNA, 820 bp, Aquilegia coerulea
  Intron number 1 from transcript AcoGoldSmith_v1.009771m (l ocus AcoGoldSmith_v1.009771m.g) derived from phytozome v7. 0 (chr-ID scaffold_14; pos 2936129 to 2936948)
tctgtaattatttgctcatctttcatttaatttatactaattttccttaatgaatattagcaaaatataactttggtactatgttggtatttactaattactaccatgaaaactatgctttacagatttgtctgacacgttgcagtctttgaaaattttcctgcaacatatattcatttgtctcctacataattaacaccaatcttaaatacttcatagcgatcttttgttgcttatatacatgagtttgttgtaaattgtgagcagagtacttaaacggtgtacaatattgaataaaagttaacaatctggacatgaaaacatagagatgagaaaaatttcaaagtcaatcctatatcattgtaagaatgcttgtaagtatacatttatggataaacattcactggaaaaactttaaatctctggttgcttttatgtctgacaagcattactgccatgtaaggctactggtatttggtatatactgtattatctttttttcctctggcaaaattttagtatgtggaatctttataacctatcttgatggtggaatagaatccatttaaaaggaaggtgcatgaatctcattagaaagaagtgtgtgcacaaggtttctaaacaagcattttaaaagaagacgaaactaaactggatttggcaatagacattgatatgatacatgccttcatagttgatagaatagatatccccaggtagaaaccagatagtagttgagacaaactttgattttgaaaatatgaggcttctatttttccaagtcttacttttttaactacatttctgtttgataggtcca

SEQ ID NO: 107190 - DNA, 735 bp, Aquilegia coerulea
  Intron number 1 from transcript AcoGoldSmith_v1.003731m (l ocus AcoGoldSmith_v1.003731m.g) derived from phytozome v7. 0 (chr-ID scaffold_20; pos 4221016 to 4221750 reverse stra nd)
aaacctcttctctctcttcctaaaccttgttacaggtatatatatatatatatatataatttctctctcttgagtcttggactacttccacatatgacatatcattatcattctcttatcaaattcaatctgtttatgtatatgtacagtatgtcgcataaattttaaattcaaatgccttgtctggcaaatgccaatggaggggtatttcattccctaaagtaaacaccctatatatatatatattcatgaattttaaattttgcatcatgtatgggtggtggatttaattttataccacctcctcccctctcctcccccaaattatattcaattagtttacggttattctggcctggcctgatggcctcccactcaagagtcaagtcactgaacttgctttcatttagctgccattgtcatgtaaagtgtaaacccaatcccctgtatagccacccactcatgactcaccactgtccctgcccaccaccctaatcatcatccaatccaatgccattcacacatgtttaatttttttttttatataaaacactactgatttctgatacatactataacatatatattgtaaccatgccatgcctctcttctctttcttttttctttgccgcttacccaatttcaagttaatttgctacgactttttcctcacaaattctcaacttgtacttactctcaggaaagttggtcataccccatagggactcagacact

SEQ ID NO: 107191 - DNA, 245 bp, Aquilegia coerulea
  Intron number 1 from transcript AcoGoldSmith_v1.010417m (l ocus AcoGoldSmith_v1.010417m.g) derived from phytozome v7. 0 (chr-ID scaffold_20; pos 3879124 to 3879368 reverse stra nd)
tggagctcaggaacgcttataagaagcttgcactggtaataatttttatttattttttcttcctttttaaacagtttttggaaagatgattgatttattgaaaatgggtttgatttgattgctatgttaatgtataaaaacaagattttcacgattttatagatcaatttgctgtttttttattttttattttttttgttaatctaaattgggaaaaaaaattattggtgaaatctcttgcagaa

SEQ ID NO: 107192 - DNA, 467 bp, Aquilegia coerulea
  Intron number 1 from transcript AcoGoldSmith_v1.024387m (l ocus AcoGoldSmith_v1.024387m.g) derived from phytozome v7. 0 (chr-ID scaffold_20; pos 828147 to 828613)
ggtggttccaaacttccgggttaattggtctcagttccgaccggcccacattccagatttccggtccatattatatccttgcgaatcaagcaaacatgcacaagtatttttccttctgaatcacgtaatgctctgaaataaaactcctacttataaaaacttaacagaaatcttgtggatttttttattctctgtgttagtgtgttgaaaatgggtgttatgaaccgttttgaacttttgatgttcttgaagataatgacatttgtttatatcagttaactgaattacataataatattatcaagaagaaggcagacgccaaagcaggtaaatttcgatttgaactttttttttttctttcttattttgtttttattaattgtgttaatctgatttatagaacattaattgattgattaattaatttttttttttacaattgtagagaaaaaaaaaactggggtgac

SEQ ID NO: 107193 - DNA, 716 bp, Aquilegia coerulea
  Intron number 2 from transcript AcoGoldSmith_v1.005428m (l ocus AcoGoldSmith_v1.005428m.g) derived from phytozome v7. 0 (chr-ID scaffold_4; pos 3621671 to 3622386 reverse stran d)
tccaagcttatatctcttatcgtgtcatcactaaggtactactctttctttctttctttcattttgattttttattctatttaattaggtttttaattgaagtatttttgcatattatagcaaattgattgattgaagatgaatttatatgttttaaggtatttatttactgtgatcacaagttattgagtagacaaaaagaaaattgaatgaatttggatagcagtgttgatgattgcatgtgatcaccacattgtgatgtgagggtatttcagtgtttgtttcttgggttttgaaatggacattctgagtacaagttacttaattgatggtgaataaaggaaagtaaaagatttttgaaacaattaattagggattttgtggtattctgttgaatttctatgcttgtaaacaaaaattattattatctaggtatgaagtcattgaatattttgagaacctacttacaattatgactttctatgatttaatgctttactggattgttcatgaatgtttcctttttctggaatgatttttgctggagaagcaagagtgacgtgggagaaatttaaggattccaaatataggattataatctatgtttcgttagttttatctctgactctctgaggctatgtttgatgtaaagcaaaagattacagcttatatatcaattcatttttgttaacgatagggctttagagggggagttg

SEQ ID NO: 107194 - DNA, 477 bp, Aquilegia coerulea
  Intron number 1 from transcript AcoGoldSmith_v1.003222m (l ocus AcoGoldSmith_v1.003222m.g) derived from phytozome v7. 0 (chr-ID scaffold_122; pos 86262 to 86738)
cactgatacaatccccaagcttcaacaatcgacaggtttgttttcaaattcatttcttcattgtttgaagattttaatttcaaatatttgatttaattatgaatttgtgtttaaaagatattgtgtgttatggattgtgatcttgttatggggattccattatgcgaaattatgcttggaatgtttcttcaagagtttggcataattaccagatgaacaatttgtaattatgccaaacttagttgttatttatgcgaaatctttgtttttatctcaatttaactctataatgtctctgccactaaatcttgtaccttttcttagagttcatttggtagaagacagatatggttttgtctgttaggctaatttacctctctattcatgtcggtaatgttactgcatttgtctaggttaacagtgggtaattggtttgaatatttcaggtagttgacgttgagaacaggagctcaaacg

SEQ ID NO: 107195 - DNA, 940 bp, Aquilegia coerulea
  Intron number 3 from transcript AcoGoldSmith_v1.015296m (l ocus AcoGoldSmith_v1.015296m.g) derived from phytozome v7. 0 (chr-ID scaffold_23; pos 953000 to 953939 reverse strand )
actcgaaggattgttggcttgtgattaacaacaaggtaccctaatccaaatcaaaatcatcttttgtgtactttataccggaagtttttgtaatatttattaacttaacttagataacaagagtttctttatatcaatcccttgacctaccttactgctagttgactcccttaaccagtacaacaagcacattcaggatcaaacgttgaaatttaaagcagtcagaagttttaagtgcatgtcctcaaaagattctacctttcccactagtgttgagacttgtgcaacatccaaaactgtacattatattgctatcattgtaactctgccactttaggattcttgaagaccaaagtaacttcacaattctgccaagtaccagatcactacataagattagttataatctaatctaaaaaagtttcaaaaaatcttcgacacaacctctaattcgacatgcattcaatactactcaataatatatttttttgactaagtaagcagatcatgtattaatgaaaaagaatcattgtcaggtacatcctagttaataacattcttagaggctaaccagatgaaagaactgaatcaaaaggctttcaccttccagtggctagtattacaccatttggaaagttggaaaagtgtgcatacttatgaattataagaacaattaatcaagggcatcacaagattgttgttaaatattttttctttcagttaacatcttaatctctaaaaaaaaattcccgctaaaaatgaaacacagaagttgaaagataaaacatttcttctagctcctttatagagtgtggagcctatgaatgagatatttcagatatcttctgcagctatcaaacttagaccttaggaaatcttgacactgacatgttgtgttaaagttcaattgatcgattcttcttatgtttggaacaggttt

SEQ ID NO: 107196 - DNA, 569 bp, Aquilegia coerulea
  Intron number 1 from transcript AcoGoldSmith_v1.021285m (l ocus AcoGoldSmith_v1.021285m.g) derived from phytozome v7. 0 (chr-ID scaffold_50; pos 130215 to 130783)
ttgatttgcaattcttgcttgggattacctaacaggtgttatgtctagtttgtaatcctcttctattataaacaggtgttatgtacttatgtctagtttgtaaatcagggatatatgttgttttttttggctgaagattaatatatgttgcttcaactcactccacttcaacaaactctttttttttttttttttttttcttttttctttttgcaattagcaagctggactcttcaacaaactcttcattttagcttctatcaatggttgggttttaaggtatgttcacctatcctttatcctttgcgtggttttgattagtagttacaatttgggaatctattacttcattttgcattacattagaaattttgattttgacttcaaattaagaaattgtatgattatagttcatggtgtatttgggtttaaattatattttgattgtccacagattcatgggtactaaatgtgttgcggtgtaagaaaattaatcgaaaaatcttgtgactaaatttgtgatctgcctgatagtatacttgattctattgtgtctttagttccattga

SEQ ID NO: 107197 - DNA, 623 bp, Aquilegia coerulea
  Intron number 2 from transcript AcoGoldSmith_v1.008961m (l ocus AcoGoldSmith_v1.008961m.g) derived from phytozome v7. 0 (chr-ID scaffold_38; pos 870864 to 871486)
gtgaaaagagagtttctgttcaggtatttttttactgccttttggttgtattttactggatatggtcaattttcagttgggtttttatttgccgtgataaagttgtaatctttctaattcaatctacttttttaggatagcaatgccataaatgaattatcttaggaagaaaatgtgaattgtgtgctttgaatgtgaccttgatgggatctgtaaactttgggagcacattaggtttccatttattaccaaacatttatttttaaaatatttgtgaaaacattgtattatttgtaattaagtgattatatgtaaatcactggaagattttgattaaatttttgagaggataacatgtataaatatgaacattgttcagacaaaagttgtggatgttcgctgttcagtgttcactgaaaactgtgctatgtaatatgaaggtctgattgaacacaaatcattatcttttcttttatgcctgaaattttagatagttggttttggtttgtactgtatgttatgagttatgattgattaaacttgtagcattatgatactagtagaaaaacaaaaatctctatataagatgacttgaatcaataattttcttgtttttgtttaga

SEQ ID NO: 107198 - DNA, 642 bp, Aquilegia coerulea
  Intron number 2 from transcript AcoGoldSmith_v1.019088m (l ocus AcoGoldSmith_v1.019088m.g) derived from phytozome v7. 0 (chr-ID scaffold_23; pos 3680061 to 3680702)
tgcataaggtaagcatttaaactgaaccgctgttttactttgtctactcgaatgcatgactttgtctacttagaaaattaagtttttcttgtactgtcaacaattcatgaagactttcaattcaacatgcaaatgggagtagcaaaccattgttcgtaatttgaacagatgctacatggattctaaagttaatgtgttaatatttagaaaagtacagtttgccttttatttgttttgcaagtgatttttaatgttacatgatcatttttgttttcgttgtcattcattccccactatttatgtgtagtttgtatatgtgcgagtactttttgagaaaaaaactatatactttagtttatcttcaatgatgatgcctgcttgaggataacccgatgcagggttgttgttataacctaaaaaatgatggcatttgaacaatatttacttttttgacaataggagtgctttatatttccattttttgggttcatgtttttttttttggtaaagggttcgtgattaaaaattaggaactgtacttcaattagcaattcatatttatttccattgtttatattttaaaattcgtttgtattggaattgattatttaatctcatggatgcaggtgttaaaaaaagtta

SEQ ID NO: 107199 - DNA, 440 bp, Aquilegia coerulea
  Intron number 2 from transcript AcoGoldSmith_v1.000007m (l ocus AcoGoldSmith_v1.000007m.g) derived from phytozome v7. 0 (chr-ID scaffold_17; pos 3317546 to 3317985)
aagcaaaaggcaaatatcacccaattagttactgtgtaagtgactaagtcctttctttgctcaattatcaactaagcttttctgtaattactatcgtgaaggcctggaatttcgttattagtctcatttgtcgtcaaaatttgacatgtggatcataagttgtgggtatgttaaatatcaaaaactaaaaatttactattttccattttcccctgccgcatgtacattatttctctggtctacatatacatgtagctttggccctcatttttgttttttctttcacatacttagttcttaaacattgttaagttcactactcatgtttctctgtgtatttaaatttgagttattatttccctctaaatcacgttaacagttttattgtgcgtcgaatactcacaggttagttgaagcgcacatattttcctttgttgttg

SEQ ID NO: 107200 - DNA, 714 bp, Aquilegia coerulea
  Intron number 4 from transcript AcoGoldSmith_v1.000007m (l ocus AcoGoldSmith_v1.000007m.g) derived from phytozome v7. 0 (chr-ID scaffold_17; pos 3318203 to 3318916)
ctgtggaagtccttgtatctggggtaaaacttcattggctcttaattttctcatgggctatttcaatgttacttaaagcttatgtactcgtgctggtaatctgataagagaagtggaaaagacattattatatgtttactctctctggtgtacactagtcttgaggagccgtatatctaaactgtatttcttttttaagtctactggttataaaaaatatacacaatgataaaccgtgtcattgcttaaggaatatatgcaatgcactccgtgctcccacttcattattgtttaaatgtttaatactttcatgtacgattcaaaatcaaataattggaagggaaagatttaagtactggaagttgcctagttcttcttgtttactctttttttttccagcagaatggatacttctgtgaaggtttcttaatttttgcgttcactttgcaatggtgaaaaaattgagaagttattcactttggatatgagatgatatgattatgtaactaaagatgttgagattgaatatcttttaaatattagatataactaagtatatgaggtggcagttatgaaccaactgaaaatatagaaaatataatatatattgggcagataataaagaatacagtttgttagtttcctgtagaaatgtgagagtatgttttgttgtttacagccaattgacaagcaatctctccttgattctgggat

SEQ ID NO: 107201 - DNA, 1013 bp, Aquilegia coerulea
  Intron number 1 from transcript AcoGoldSmith_v1.005347m (l ocus AcoGoldSmith_v1.005347m.g) derived from phytozome v7. 0 (chr-ID scaffold_38; pos 1227610 to 1228622 reverse stra nd)
ggtcttgcagaaaatcaggtttgtttcatttattcattatcttttcttgtttgtatacagttatatgaagagttataggtatatggttgtatttacaagttcttgtttaattttgcagctttgctttgacttgattgaaaactggcttaagggacatccagaagcttcaatttgtacaactgaaggtgttgttgacttcaaggatattgcaaactttcaagattatcatggcttgtcagctttcagaaatgtatgcaacacattacttttcatctcttttagcttatactcagtgttaatctgtcaaaaagactgcaactacaacagtacctctggtgtctgtctggaaactaccagaggtataagtgtataacacctatctttgatgtttcgccgtgcatctaagcttagttttcaggcatcctaatgacctaatctaagtcgaacggcatccaaacaccagaaaccgagttttggtgtctagctgttgttgaatcagataataggatacgtcgatcataatgttagttcatcaacattgaagcaccctagattgtgttcttgcaataatttaggtcaagtggcaccttgtcttttaatcttttaattcctggaccacccctttgacaaaatggggcttaaggcagtgcaaagtctaaatgtaatcccactagtcttcgatatatgaaagcaacttgtgtctaaatgatacgcgacacagtcatctgacgttgctttaatctttgaacacctaattaataagctgatatccgatttaacgatacaatatttccaatggagtagttagttattattataaagaaataaacaaacaaaataaaataatgctacacggttgtgtcgtattctccgccgactgggttttaattatgagaacatgacacagccacaattataatttactaagctctgttgccttgatcattgatgtattgttaatggtggtttaactcattgaactgtttgataatctacaggctgttgcaaagttt

SEQ ID NO: 107202 - DNA, 482 bp, Aquilegia coerulea
  Intron number 1 from transcript AcoGoldSmith_v1.025950m (l ocus AcoGoldSmith_v1.025950m.g) derived from phytozome v7. 0 (chr-ID scaffold_14; pos 2281508 to 2281989 reverse stra nd)
ctaagagcgcagaattatacgataagcttgacaaggtgagtgaaaaagttactcaattcttcttttttgaattgcatgtttgttgattgtggatttatatacatgtttgtatggttcatcggttgtgttcggttgcaaggcttggatgaaataacttgcatagtttttcctaaagtttcaacaaaagtcacctattttcgaacagtatcatcatctcaaattgatgaaaataaattcttttgattctcgtgtactttgattactatatctttttcagtaatggttttcagcattaataagaataaacataagtcagacagtcagtccttgtgttcccctctaatacacaagatgacataacatttacgaaattgaagattcaatagcacacgtaaatttttactgtaaacgctgaagagatgcccgctgaatatatgcatttggtgagtacattttgcagatcggccaaggaacttacagca

SEQ ID NO: 107203 - DNA, 1015 bp, Aquilegia coerulea
  Intron number 1 from transcript AcoGoldSmith_v1.025280m (l ocus AcoGoldSmith_v1.025280m.g) derived from phytozome v7. 0 (chr-ID scaffold_85; pos 531089 to 532103)
gttgaaacaccaattggttaaggaataaggatagtctgttctgtaatatgataaattcttagtcttttttttatatattggctaatacaaaaagtgttcagttattatgtatttagaactgcaacaattttttgttgataacactgaataatcaagaaaacaaaatcacattaacaaacttttgttgaggtcttttggctgatttggtgtttggacttgaaggtgatgatgctacttagagtatgtagctcgaagaatctttaggggtttgcgcgacattgagggtagatccttaagttaaaagtagacaacttgggcatgtggtagcatacgacttaattaaagttgaagattaatgctgcttaatctttaattaagcaggttagcatggagattataaaaacaaaaaaaaaaaaaaaaaaacaggttagcatggcgtttaatagtttttgtctcttggcctcatatatagtgcaatctcttgataatcttattaagtaaacagtgcaacaaccctttgcgaaagcaacttctccactgacacttttatttaaaatgatacattatggagcaacagctaatgtgttatactgacctcttggatcttggatagttttaaggatttggctgatttggtgttttgacttgaaggtgatgatgctacttagagtatgtagctcgaagaatctttaggggtttgcgcgacattgagagcagatttttaaacttaaagtttgaagataattaatggctctagtcccattgttaaatatatagaacaactgcctttatccaaaaataagaatacttatttccataagaaagatgtcaagtaaggcgattccttgcagattttcttcatgttctaattctctaaatcccatttctcgtcacaaatttgctaccacaaaacctctttgctttcctataagatcagctgcttatgataactatagaattaataagcaagaaattgtgcctgaggtgacagcaagtcccgtccgcagaagtatta

SEQ ID NO: 107204 - DNA, 586 bp, Aquilegia coerulea
  Intron number 1 from transcript AcoGoldSmith_v1.003629m (l ocus AcoGoldSmith_v1.003629m.g) derived from phytozome v7. 0 (chr-ID scaffold_14; pos 4076171 to 4076756 reverse stra nd)
ggtaaataaattagttcatagttcatactgacttctatttcaatttcaagttttgtgttttgttattaaatatgttgtctttgatgttattatggaaatgggggtttgctaatgataggatttaatctttgtttatgtattttgatgatttttcttcgttttgtgaatttgtaatgtaggatttaatatgacagtgttgttaattttgtgtttaggcttgttctgaattgtaatgtatgttgtattatttatcaaatattgtatctgtcattaaaggggcgatttttttgttattttctgaatttgaagattgtactgtatagtactttgtattaggtaaacagttacagatttactgtacaaaacccaggttagttatgctaagtactgtgttctaataagatttctggctgtcattttaataaacaccgcattgctactgcatgatgaattcgtagtaaaattctaatgaaactttgtagctgctgacttgctgcaaagtttgaatgaaactgcacatctctttttattttgacctcgacttcactctgaaaactaattaatgagaactttacctcttgcagga

SEQ ID NO: 107205 - DNA, 706 bp, Aquilegia coerulea
  Intron number 2 from transcript AcoGoldSmith_v1.010627m (l ocus AcoGoldSmith_v1.010627m.g) derived from phytozome v7. 0 (chr-ID scaffold_45; pos 1901669 to 1902374 reverse stra nd)
ggaggtggtaaaggttggtttcttttccatctagtatttgattttgttactttatattatttgatatattaatggcaatttaaacaacatgtaattgtagacatgttttgtattagagatgtggaagaatcatttgtaaatgagtgcatttagggtaatgtaggattagtaccaacctgataactttagttgaatttaaaccaggggaaagtcaactaagatggtttgcttgtgtgtaaagtagagattgtacacttcccaagttgagggatctaagttgcaagaggtaccaaggaggatgtggaatgatttatttgggtagaattcagggatgctattaaaaacttttaggtaaatagctaagcaatatcattcacttagctaaatctcaaccctttgaacaaatgtagtgttgacaaagaaaaaaatttggatgaggtggtgtttggctgtttgctactttgctatgacataagatatactattggcagtgatttgcttggtttaacgcaattgcataagtactccaaaatttggaatacttttgctgcaatatatatacttttgcatgagtttattcttataaatttatgacaattaaatatatgtgctcaactagggcacttttcattttttgtttgtgaaatgtatttatccattctgtctctttggagttaagtaatgtgttactttcttgcagctgctg

SEQ ID NO: 107206 - DNA, 765 bp, Aquilegia coerulea
  Intron number 1 from transcript AcoGoldSmith_v1.011714m (l ocus AcoGoldSmith_v1.011714m.g) derived from phytozome v7. 0 (chr-ID scaffold_14; pos 5435936 to 5436700)
gctgctgctgttcccccttctgattctcccactatgtatgtgaaactcttctttgtttcgatttgttcttctttcttcttgtgattatttacttgattttaatgttagatcattcataactcttaggtatttgttgtacttttataaattgaagcgttgtgtgtgtaaaattctgaaattcatgataattgaaagaaaaggggttgttggtgtcaaaaaacaagttttaattcaatctgatagcatctattagtaaatgaagctcacaaatatttgataaggtgtttgattactagagaataacattttctacttaatcaaaaaaggagttttagagaaagggaaataataataagaaattgaagggaagagaagagaaacccaccctgacatggacaggcaaacaaaatgtatactgggtttttggacaaattcgcccaaatgactctcttcacttgtggattagactgatgagattagccaaataggatgtataggattcattaaacatgcttcataccattgtggggattgtttacgaaatttaacaccaaccactttgggatcgctgaatgaatcatgttctatatcttattctattcagtgccaaatttctaactagtttttacatctacttctgatcttgatgaattatatatgtgatacatgtaatgaatgctactaataaataatggagtgactttttcccttttcactatcttcttgacagatttgacaagattataaataaagagataccttcca

SEQ ID NO: 107207 - DNA, 948 bp, Aquilegia coerulea
  Intron number 1 from transcript AcoGoldSmith_v1.007376m (l ocus AcoGoldSmith_v1.007376m.g) derived from phytozome v7. 0 (chr-ID scaffold_4; pos 8871196 to 8872143)
aagacaacaccaaccctctagaaagagaaaacaaggtatgttttcttaagacagagaagtaaatttattattgtttcattattccagtttgtttatttgttgtaaatcgttattggggttgtttcaattaccaaatttcatcataaaaatttaaactttattgagttttatcagtttgaatgttcttgtgtgaatgttgttttattcaatggagtagttgggaatttttttcatctattagttgttttatgaacgaattgttccattataaaggtttacctttttgaagaagaaggagaatttcattaaaaagtatacctttttggatgtttttccctgtaatttgtagaagaaaagactatacttgcatttgatagggtatgttttgacaagttgagattgaagataaactcgaatgttggagactaggaattttggaaggacaaaatgaagaagtggtttttgtcattagcttgtcgccaattgggttgagggattgaattgactacagaaataaaagttttgttaacagatattattattagacaattgaatagcttggctttgaaacaacaatgttaattttacgaatttctttaatgtatcttaaacaaaaatataactcgaataagcattttccttatcctgaaggtagtcgatgtgtgcaggagcaggagagcaatgggtattatatgttatatatacatcacacacaaaaatactaggttttttttttgctcaatttgttcaacgtgccaagttgctccgtatagagactccctgtcctagtctgtgatgataaagataatttaacgctatctaaatcttaagtggaatactgataaccttttatatttcaaacttaagatgcattcgcatgaaatttgctgtactcatattttttttgttcctagttacactatctaaccctttgagaaatttgtgcag

SEQ ID NO: 107208 - DNA, 724 bp, Aquilegia coerulea
  Intron number 2 from transcript AcoGoldSmith_v1.008888m (l ocus AcoGoldSmith_v1.008888m.g) derived from phytozome v7. 0 (chr-ID scaffold_14; pos 4446301 to 4447024 reverse stra nd)
tgtttttcaggttgaaccttgttgcaaccataaaggtaacctgtttacctcaattaaagcaagcgatggaatgaatcgattttgtgattgtttattctttgaatggatatcagtttatatatcctgcatcaatttagtttctcttgcagtggtaattattcattgttagagtttggacacatgcaacaaaatggtcaaagtttaactagttaggaaaatgttcaataatccactgttcactagtgctaaagtaaagtgaaatataaatgacctgatgattaggtggtcttggtgattgcagaaatctaagttatatttcagtctgaagatacaaaaggagtacaaattgtgaatctcttttttgtatacatacaacagaaaataagggatgaaaagggaaaacttgtctttgatgctgtttgtaagtttataataagtgttgcttgaaagtgatcatgaagataagggaaaacttaaaattggaaataccattctcaaatctcttccctttttctcatgtctgcagtgaatttctctgtggcttaattttatttgtatgtggatttactagttacttcagcttgtggttgtcttctaaataatcctagcaatttatatgtttatattatgagatgttcatatactgctgatatcaagctagtgtttcctctatcaacaaagtgtttaatggtattgtatttttatctaatgcaggatcgagcca

SEQ ID NO: 107209 - DNA, 552 bp, Aquilegia coerulea
  Intron number 2 from transcript AcoGoldSmith_v1.007100m (l ocus AcoGoldSmith_v1.007100m.g) derived from phytozome v7. 0 (chr-ID scaffold_50; pos 1621290 to 1621841 reverse stra nd)
aggtactcccttttgtatcttcttttcatgctaaaacagttaatatccaccatcaaatcattattcttcatctgattggaatttgaagtaaagaatttttaataaagattttgaaaataaaacttggattacaagaaaaagcttggatcctcaacgccttggagcaacttgtatgctgaagactctgtagataaggatgttgaggcttgcagacatttggtactaacatataaaaattattgaaatgcatttttggtaatcgtcttgtttattaactgtaatcgatttccatacacgtgttcaagtgctgcattaatccattaactgatttttttcttcttatttttttgaatttttcattatgttatatttggttatagaatttaggcgatgttgtttgtggattctgagttgtcaccccactcattcttatttctaagaagtacactgcattgtctcctcctttacatttcgaatcatttattgtgaataaaaatctggttaccaattttcaacatcttttccttacagactttgtcagagtccagacat

SEQ ID NO: 107210 - DNA, 436 bp, Aquilegia coerulea
  Intron number 1 from transcript AcoGoldSmith_v1.001917m (l ocus AcoGoldSmith_v1.001917m.g) derived from phytozome v7. 0 (chr-ID scaffold_4; pos 447433 to 447868)
ttttaaacgagtaagttggttttgattttttacttgatgtatatgttcaatttgatggttttcttcaaaatgaatgtttattaatcatgttgctgcgcgtagaatagtttgtagttgcatagttaggtgtaatggtgatgatgatgtattgatgttagtacaagttgattcatactgttttgagtttggtttggtttggcggggtgggatgggatggcgggcggcatttggaatgttattgcaatctatttttttagctgatggaaaatcaaaatttactctacccaacaacagaaacacagaaatcacgttgagtttttcatgggtttggtttcttctactgtttatttattgtaattcttctgggaagtcttatcatgtaatttatttttgtttggcagcttttaggtattcatattggactagagtggagaag

SEQ ID NO: 107211 - DNA, 899 bp, Aquilegia coerulea
  Intron number 1 from transcript AcoGoldSmith_v1.019105m (l ocus AcoGoldSmith_v1.019105m.g) derived from phytozome v7. 0 (chr-ID scaffold_4; pos 9147302 to 9148200 reverse stran d)
ggtctgagcagattcaggtaaattaaatcacattcttatcatttctctaatcaatgttttgtgaatatttcgtgctaaatctattagtcttactttggtcagtagatcaaaatgagtgatctttttgtgggtaatttgattaaaacttgtgaattgtcctctagggatgcatgaatttggaggtaaatattattttttcatgtctgtcttgggtggagacaaccttcttctacctttctattctttggtcatttgtctttcttttcttcttatgtacaactttgaaatcacacgagtgaactcagtaaatggtttgttaatttgcttgctggaggaatcataatttattgtatacacgttcacagtccaaccaaatgatgtagttcttaaactcttaagagttccaatgatttggtgactcacggattcttcttgtccaaagagaatgttagtttctgtctttatatttgttgttccatttgttccataacgtagttctggtctacagtagtttcatgcagtcataccctttatctagcttgcagcaaaataaaatgcttagattaagttagaggggacaagtgcagtacaaagttcagcttaattgaaaatgtgttatactatgttatcctgtgcctcctttgctgtattactaattgaatacctggtagaaaaatataggaagttcattacagcactgaaaatttctcaaataattttgtggcatgtttgatcgttacttttactacgttgtggggttcacatgatatatctcagtttattatccttttccattcctgtagattatactacaggtattttatgcaagagtatctatctgagctttgtttttttttttttcaggtattggaaggcttagaccctgttaggaaaaggcc

SEQ ID NO: 107212 - DNA, 706 bp, Aquilegia coerulea
  Intron number 1 from transcript AcoGoldSmith_v1.003627m (l ocus AcoGoldSmith_v1.003627m.g) derived from phytozome v7. 0 (chr-ID scaffold_14; pos 4407175 to 4407880)
agtttaatcatcaaatcaaaggtaaaggtaaaggtaagctagctaacaaaataatataagctttttattcactatagtcccatttcttgctttggggtagtatgatttcagctttgttttgctatgtatgaagaaaaaacgaatgaatgaaaaccagattataagctgctttgccactaacccccccacatagcttgtactaaaaccagtttataatttttttttttttttttgaggaggaggaggtgaagggtggggattttttcttttcatttttcatgattgggttcaaattagttcaaaaggaatgaaggatttgagttgatattaataattgtgtctaattaataattgtgttaaacgacatggagtgattgcttggtagttggtatgctgcaaaaagttccaggatgaaactggaaaacgacaaaagtgtttgtaaaacacctctttaaagatcacaataagcttggtagaaaccataatatttcattttaactgattttttgattttagtatttatcgaatagctcagaacaaagtcatcacaaccatgccaagtagtttatgaattcacgttttaattttgtatgaattgatattatcggattatctgcagtgtgctcaagttaatttattgttatgaaattttttgttttaatcattggataatcttgacaatttgcagagaaagaaatcctaatag

SEQ ID NO: 107213 - DNA, 658 bp, Aquilegia coerulea
  Intron number 2 from transcript AcoGoldSmith_v1.003627m (l ocus AcoGoldSmith_v1.003627m.g) derived from phytozome v7. 0 (chr-ID scaffold_14; pos 4408566 to 4409223)
tgtggaaagaccaagttcgttatttcatagaagaggtacttttctggactttttatgtaaataaatggcaacccacttatattgtggttttgcagcatgatatattcttaaatgctttttgttcagaacacctctcttgcgagtcctctcatttatattttgtgattaatgtcgatctcctttttccgttatttgattaagactaagttacacatagctaggactgttttcttctattgagcttcagaaggtgtttttaactgtattggttttattttcatcaaaaaaagtccagtacctttgagatgggataaagagctgtgaaaattgctcaccgctctctaactatgcgtagtgtgagtgtgaacaatgtgttttgcatgatgatgtattaattaaaaggtctgaaaattgctagccacttttaaatgtgcgtactgtgagtgtgaacaatgtgataatatcttaataaaaagaaatgcaatcatgccagaactgaaagttatgctttgtttatgtatctaagttcttttaaattttgattgtacatagtagtatactagtatatatctcaacaatactatactgaagcaataaaattctgcggcttactcattctccaggttataggtgagccagtttatatcgtcgggaactc

SEQ ID NO: 107214 - DNA, 834 bp, Aquilegia coerulea
  Intron number 1 from transcript AcoGoldSmith_v1.012545m (l ocus AcoGoldSmith_v1.012545m.g) derived from phytozome v7. 0 (chr-ID scaffold_33; pos 728793 to 729626 reverse strand )
aagatcaccaagctggcgttaaggttgttcaccaagtaagtgatatatttacatttcagcttttcagattttgagatagtcatggcaatgttgtcgaccatattgatatctcaccttggaactcattcacacaattgtattaccatgtaatggtggaagttctaaagaagccgaaaatgctattagtgatggtgtagatgaaaccatcgtccaaggacaacaacgagtgtcggtgaaaccatcgtccaaagaactctaggaagagatggatcttgttcttcaaaaccgtccctcccccaaggttttaacctactcacatcaattcaacatctgcaatttttcttttgcaaattcctagacgtcacgcctgatgatttgaaacatctcactttgcttgaacaactgaaaatattgtactgtcgtatattggctaaacgttttggacaaggagaaatctcaagctctagtccacaagtttacaacatctccataggtacaccattcacaaacctcttcctttctcttaactaattgcattgcaaatattatttcaaattagcacctcaaaccttgctttgatttccatttacctttttttgtttccttgtaatttcatattgggatgatatttccttttctagcatattttttttcttgtttggcctgtttatatttcgtttgttgctaaactaggattatattttctttcgtgaaattgctaataagtctgccaaaatttcacctgtatgcaaatattaattatgtagccataactagcccaatctattctatcatgcagcggacatcagtctgcgttggaaggggacagaaaag

SEQ ID NO: 107215 - DNA, 995 bp, Aquilegia coerulea
  Intron number 2 from transcript AcoGoldSmith_v1.019632m (l ocus AcoGoldSmith_v1.019632m.g) derived from phytozome v7. 0 (chr-ID scaffold_17; pos 3191221 to 3192215)
acaccttcgatttcttccttgcgttatacccaactgtaagtgttccattctactgcttttccaatttccagaacagaatgcaatttccatcaattcggaatttcggatctgatactgttatttgaccaatatatccttttattaggtttttgctgtaaatttcgtttgaatgtttttgagggtgttaaagtcactgtaccaattttatttgttgggtttgttgagtgaggagtgaggagtgaggacttggttttaagggttagttgagaaactgaacaaggtgatcgcattaaaatagggtaacctttaaaggaaggggacaatatgagttttgtccatattcgaaatatatgcgacagatgatgacggtatgcatattggtcccattcattgaagatcatcctaaattctaatcctatctttctttggcttggaagttgaaattgagaaaaaaaaataattacatgaatttagtgggttttttgtttttggtaaagatattgcattttgcattaacagtcagatataaccaaatttgtttgagaaagcaacctatacttgcatgcatgtgtgacttcacagttttgcttagtcaattatccaccggcatatgatttggtgggtggtgcccatatattgcgagtgctgtgaggtttgacaattttatcacaggatggcatttgagatcagttgtcaacttcagagttgagaccatacatcatacagttgatagtcattaaattctccttttgacaaaaggattcaacagtgtagactaagacgtttgttagcaaagtattctttgtcgaaaaactgctagtttatgaagttattttgtatttttgttagtaaagaaacggagaactcaccctgttccctgtggagcagtctgctccaattcaaaaaattgtagatactcagagaaactagatcctaactgctgtcattttggttttgcaggtactctagacacctcttgtacaaaagctcagtct

SEQ ID NO: 107216 - DNA, 634 bp, Aquilegia coerulea
  Intron number 2 from transcript AcoGoldSmith_v1.005228m (l ocus AcoGoldSmith_v1.005228m.g) derived from phytozome v7. 0 (chr-ID scaffold_20; pos 1062988 to 1063621)
tttgctgctaaaggtgttggcgaatctgctaagaagtaagctttataatttaaaacttatttgagtgattttattttatattatatgtttgattcaattcaattatatagtttgtttctagatctgatttgattcacaaagttttgaggtatttatttgaaactgtaattatgttttttgtttgaagtaaaagttgacttttcatgtaactgtgtttcttttggtttgagtcttctttaaggtttgatctagtttgtttgttctttataatccaaaattgttataaaattcatctcaaaattgtttttactagggataataatggaatatgttagatcctttattggtgtttgagagcaattagcaaaatattcgtgtagtttcacgctttcttacaagcatgctaccttgtgactctttcaatttaaataacactttagtggggagactttttttatcaaagctacagtaattgtatatactttatttagagtatatacattcaaaatatgtcttttggtcggtatcatgtgatggaaaattgtctaaagaactttttgttctcattattgttttggaaatccctgttgattctttatactaatgtacctttcctttttggaatacaggggat

SEQ ID NO: 107217 - DNA, 431 bp, Aquilegia coerulea
  Intron number 2 from transcript AcoGoldSmith_v1.011918m (l ocus AcoGoldSmith_v1.011918m.g) derived from phytozome v7. 0 (chr-ID scaffold_20; pos 1790254 to 1790684 reverse stra nd)
aaatcttcatatagttccagtttctgcctttggtggtgagtttttatcattttgaagaatgcttaagaagaaaacactctactaaaaatgatcagatttttgctagtgacaaattttatatgtttttttttaataatcgagaatcgagtaacctgagttaactatagaaatgcttaaattgttgaataaaattgtaattggtagatattagtatataagaattttaggcaaacatgtcctgtgatgctttagatttagccaattttcttaagtcaaagtgtctatataatgtgatcaacatattgttttgccaatactgtagcgagacacatagataacctaactattgatttgtgaagaaatctcattatgtttgtgattgcttttatgtcacagaaagtcagaaacgcatcagtgttgttgtgaaagcc

SEQ ID NO: 107218 - DNA, 677 bp, Aquilegia coerulea
  Intron number 1 from transcript AcoGoldSmith_v1.012190m (l ocus AcoGoldSmith_v1.012190m.g) derived from phytozome v7. 0 (chr-ID scaffold_5; pos 6140707 to 6141383)
gtccgcgaccagaactgacactcgcaactttggtaaacacacaaagacttagtcttgttttccccaagtctaagctactttttgtcaaaatttaaagcatgatatggtaaaatggggagttttcaaataacttgattgcactggaatatttgattgcatgtcaaagcattttcattgttttttcagtgaaagcatcctcacatatcttctttcttgcgtgtactgatttcaacttgttcaaaaggagatgtttgcatttttttctaattatttgcacacatcaacaaggaaagtcctttaaagaaactaaaagtatgaagtgtgtgtcagattacattcatcgtgcattaagcctctactcattatttaaatacacacagttatattgattgctccattgcttgttcagttttgatatgggccaaatttgatctgttaatacaaacgatcattgatggttatgcagttatgcttatgaacacttcgagtatttgaaattaaagtagatagataaataaatttaggccaatgcatcaaccagccagtcttgcttgatttgtaaggtgatagcagcagcatattgccatcctcactgttgattggtactttcctatgttgcctccataaacgtccttatcgtgttttctggcaggaacgtcagggtgcatctcaactca

SEQ ID NO: 107219 - DNA, 945 bp, Aquilegia coerulea
  Intron number 1 from transcript AcoGoldSmith_v1.010614m (l ocus AcoGoldSmith_v1.010614m.g) derived from phytozome v7. 0 (chr-ID scaffold_17; pos 2372476 to 2373420 reverse stra nd)
caaacgtggaattcttctcgtttctgatatttttggtaaatacccactttgatttttatcctctaatttactgtttttcatgttttttcactatttttgttatgttaagtaattagtgttttttttttgggattttatatgtttttcttattttctgattatgggtgtttaattaattcaatgaaaattttcttataaggtttatcagaaattcaaaattcagaagttctgtatagattaaatggaacatttcatatttggctttgattcttcttttgatttgtgtggtcagtgttctaatttagaaattgagtatggttcggtgaaaacacttttattagttaatttgggtattttgttaattgttattttgtaatatttgtttacataattgcattaaatatcacaatagcatcaaagttattaccagatattatgttaaagatatgtacagtatctatacttatgttttttggttgtctgggaaagattaccttgcaatgcccgagtggaatcaattactgtttcagattttgtttaccaacctttaagccaagggatagaaatttaggcttaattatgctatacaaattatttacctattgctctctcctgctgagcaactgggaaataaaggtctgtaatctgtatccttttctgtgtttgtttatccccatgcttcagtgatagctcctacataaatctgtgtcatactgtcatcgaatccgaattctataaagagaaaatggatttaaagtttaaactgaacttagttctagcttaatttattttatatgtattaatatcatgaaaaatgtgtattgaagattgattatctatctatttaaccggttattttcattcttttttttttctttcaacattgtcatctttctaactcgtatgaggtgtcttttgcaggatttgaagcaccaaaattgaggt

SEQ ID NO: 107220 - DNA, 960 bp, Aquilegia coerulea
  Intron number 1 from transcript AcoGoldSmith_v1.004331m (l ocus AcoGoldSmith_v1.004331m.g) derived from phytozome v7. 0 (chr-ID scaffold_17; pos 3950571 to 3951530 reverse stra nd)
gataagttatctgcttctcaacctgataaggtaagaattgatgttcttcattatattacattaataccctatttgtaattgatgttctttggtttggtatcatttcatttcatcattcagacaataccttgttcaagtgatataaaagactaatttaaaatctgcttttctgtgaattttttatccggaaagatcatgaatagattaggacatccgaatgtcctgtgatgtgcttattttctacgcttacaattctgaaccaggacaccaagtagagaaaagcctactgaacatgctaaagctcttgccacttcactcacactgaatttttgtctttggggttttatctaaggttattataagccacctcaaagcatgcgtaatgatcgctgagcatctaatttgatccaccatgcttcctcgataaataacataatctacagattcaagatgaagtcctgttcccagaatatcaggcgtcagcctgatatctgattcgtgtacttcattggaatcagaattttaggaattcctttccttcaaaccaaagcagtacaatttgccttatggtttccagtaactgacctttgaaactagccttggatgggccccaagttgttgtggtcatgaccccctggaccttggaatgtgtgtcagtcaatgccagggaataagggcttaggggttgtcatttagtagtatgctttctcgtcacttttaaggttttatgaatgtattaaacctgatttcttcaacatagttttttcgtgtttcattattccactttttttctcttggaacttcctgtttcaaacttgacttaagtttgttgagccttttattttttaccgtacttcgtcacttcacatccagttctttgtattttacatagaatattttggttgacgtggttatgtggttatgcaatagaaatattgggaagccggtggtaactgcaac

SEQ ID NO: 107221 - DNA, 770 bp, Aquilegia coerulea
  Intron number 2 from transcript AcoGoldSmith_v1.011205m (l ocus AcoGoldSmith_v1.011205m.g) derived from phytozome v7. 0 (chr-ID scaffold_45; pos 651387 to 652156 reverse strand )
ttgaaatcgccgggaaacctgctggtatgattccttccattaataaactatatacagtacagtacattatcagcagaattagttcttcttaatcgacaggttgaatatcttttgtttacttaacgagtctagacactgtcacctaaattgtgtgtagtagagagtgtccatgcttgatgattgcttatgagaattttcactacttaaatatatgtgtatggatatccaattcggcaattcgttaccttagaaaaaagatgctataatattctcttctgcagtacgtttagttgaagtgcttaagttgtagattatttttgagtacattgtttttttcccttttcttgcagaaagaccaattcgatggtgtttaattggatacattgtacttataatgtaaattatctaaaacatttatactctctttgattggacaatgaaggactttcactgtactaatatttagggtgactatttgaatagaaaacttgtatttatgttttctcagtacatactacaatacatttgaaagaaatttcatccagttgagctgtaaattgaatgctaatataatatgcccaatccctctgtcttctttctctgaatcatgagtcgtagtcatcccttgcttcatcaaacattgaatctttatccaccaatttttattgtaatattgtgtttttgatacagaggtctaacatcacatctggattttcttttgttatgcgcttacaggtcgtattgtcataggcctttttggcaaaactgtt

SEQ ID NO: 107222 - DNA, 306 bp, Aquilegia coerulea
  Intron number 1 from transcript AcoGoldSmith_v1.000596m (l ocus AcoGoldSmith_v1.000596m.g) derived from phytozome v7. 0 (chr-ID scaffold_20; pos 3933914 to 3934219)
attttgtctgtcagtttggttttggtaattctcaggtgaattttgttggttacagatagaaaagtaaattcgaagattagggttttagattttaagtgaaagaattcaagaaagcttgatttcttgaaatttaattggttctttctgatttggtgaaatttttctattggtttgttttgaatttaatgaagttctgaagttaatgttttctttcctattatgaatcttacccaaagagtactcatctttgagtttttctaaaactgtgattttcatgacagattttgttgatcattgactgaaaca

SEQ ID NO: 107223 - DNA, 647 bp, Aquilegia coerulea
  Intron number 2 from transcript AcoGoldSmith_v1.018522m (l ocus AcoGoldSmith_v1.018522m.g) derived from phytozome v7. 0 (chr-ID scaffold_17; pos 2740742 to 2741388 reverse stra nd)
ttgctctcaattgtaaattctcttttcccactttgttcttcttcttttatttcttaacattgtattgctttttagttactgttcttgtttggtgcaaattgcaaaattggatatttttcatctagttaaacagggtttaagctcttctttattcttaacttctatttatagattttggggttttcttgttttttagataaattcccattttcgtcgcataatcaagaagtactaatatttacatgatagaaagggagaaaattcagtgttttgggtttgtttaagatttgatggatattctctttcatatagtattctgttgattaatggtttataagtttattctcctgcatttggggtttttcgaaaagtttctttagcgtatttgggtgcactttcttcccctcataattgaactagtggtattggtgatagtgtagtttcaacattcgtacttcgtagttcatattggtgatatgttttcccatccatttctttgtttggaactgaatgggttaccgtgatatgggtcgtggtttttgtttatctgaagtttgttaaaatcctttcattttgagtgttatttgattttgggtatgttttctttgtcggtttgcagattttgcttgtttccagggtctcttgtt

SEQ ID NO: 107224 - DNA, 982 bp, Aquilegia coerulea
  Intron number 1 from transcript AcoGoldSmith_v1.010513m (l ocus AcoGoldSmith_v1.010513m.g) derived from phytozome v7. 0 (chr-ID scaffold_4; pos 6419707 to 6420688)
ttgaagagtgaggatattgaaggaattgcgaaaaggtttacattttatcgatatttgttcttatttttttatatgatattatgattaattgttttatatgatcattggtttgaattgtagtgacagtaagtcatcacttgatataatttgggttcgcattacaatgaagtttcgattgttaggatcttagtatctaaccacgttttatgccaactggccttgggttgggaatgcactgcacccgattcaccatcatgacatataccttgtaaaaccaggtgcagggactcgaaaaatactggggtgttataaaatttaaaacaaatgattcggcctgaaccaaagcctcgaggtgttacttaatttgaacatttacaaaattatcattttgtgacagtataactgcataagatgatgatttaatccctcaatatcctcgaggtcgtaatctggggtgttctactaccttcacaacgaacaactggtcattttatcaaccaagtccaaaagaaataagatttttttgatatatgttttcattcactatctctaattgttatttctaaaatttctaccgcttaataggaattaattatcacaataaagttatgacacctgttcaactacgatccaagtcagctctcagtttttgagttcagcaggctgcatgcatgacaattgacaagaatagggtttttaggacttgggagttgggtatatttgatattgaaagtgtacttgatcgcctacatgctgactttgctatatttgatatgtttcaatgcctcttatcctctgttttctgttgggaacattcgttagaattataaattatctcttgattggtgaaaaattgagtatacagaatgtatgtctcaggggtttgctaccttttcccttattatttgtttcctattttcgaaaattaattttctttgcttgtctgaacatttctttctgtgcgcattttgactttccagat

SEQ ID NO: 107225 - DNA, 739 bp, Aquilegia coerulea
  Intron number 1 from transcript AcoGoldSmith_v1.014088m (l ocus AcoGoldSmith_v1.014088m.g) derived from phytozome v7. 0 (chr-ID scaffold_351; pos 6858 to 7596 reverse strand)
acgttctcaaaacgttcaaggaggcttctttgtaggtaagtcttaagtttggattagtgtttatggttattattaatcatcaaaactgcaaagttcccttattgggtttgtaaggaagttgcttataagataaaatatactacaatttcaaatggggtgatagtggttttgatagttaagatggtaaagtttgtagtagttgaatgtatagaacatgattcaagattctgctgcatgtatctatattgaattaatggttttgctaaatttaggctctggggtgtgtttgtgctttgttcaacaagctagggagtagaatgtatcgttgatttagaatatcttagaaatggatatctcatatcacttcctcttcccgcagactatactgacatgcgattagctttagactatgagaacatgacacctcggacatccatcgtgtcaaccatagtgggtttattttgtatgcacagtttagatttgagttttgaccctcatgaaattgaaaagtaacacaaactgaaattggatttatcaaaacttgtctgtcacatttgggtagtgagtatgattttgcacattgggttacttctaatttccatgtcttatgtttggctgctatatatgcatacaaaattgttggtcttgggtaactggagatctatatatgttaactgcttacctagcagatgtttaagactgacaattttattggctttatcatctttgtagatcacac

SEQ ID NO: 107226 - DNA, 642 bp, Aquilegia coerulea
  Intron number 1 from transcript AcoGoldSmith_v1.011684m (l ocus AcoGoldSmith_v1.011684m.g) derived from phytozome v7. 0 (chr-ID scaffold_4; pos 7838231 to 7838872 reverse stran d)
atcgaattgcaatcatttctcttcagctaattcaggtcaactctttctttctctctctcaaaggatttttttttgaattgatttgaattaattttgattttggggttgtgaatttttgttttaggttgcatatgaatcttttaattaagagaatttcaatttgtttttgaattttgacttataatttatatatattgaatataatccatgcttttgatgaattttttttgcttaattataattctgtttgtgttgtatatgttgtagtaaagtttattgatgtatgatggtttgattgattgtgaaattaggtttatatatgaagatgttcagctcaagggatagaatcaaatgaacttattagcgtaaagaataaagagtgtgtatttttaagtggagaaaaagtagtactccgtaatcccgtattatattagagaagacagcgaattttcagttattgaatttggatataattaaccagtaagcacaactctgggatccattttatacagtatagacggaaatttagacggtgaaaataaatggagtgaaattgtgtttgactagagaaggacgtatcttcgagtttttacttgcacttaatctggttagctttgctttttaatccaatttacatcaacc

SEQ ID NO: 107227 - DNA, 949 bp, Aquilegia coerulea
  Intron number 1 from transcript AcoGoldSmith_v1.010401m (l ocus AcoGoldSmith_v1.010401m.g) derived from phytozome v7. 0 (chr-ID scaffold_17; pos 4408243 to 4409191)
tgttgaaggaagatcttggccttctcccattcgaggtacaatacaaccattactagtaccaacaatagtttccttttaaatgaaaattacaattattattattattttattaatatcgcagaaaaaaaaaattttatttgtcgactttgggtataggtaatttattgccaatatcaaatcaaaagctagatttgtttttttatttttttaatatgaagagagaaaattttcatttttttttctcagaaaaaggtccacaatttgctatgtagactgtagagtatgtttgattacagatttacagggacaatgagctcaaattttacgaaaatttgcttagtaaaaattgataaagaatccaggttcagtcctattgaaattgaagtcttaactaacatacagttatgtgatttcgcaatggtttttgccaacaacaattcaacaatacaattttaattcttctcattaatctcgcaaaaaaaaaaaaaaaaacactttactttttgacttcgggtataggtaatttattgttactatcaacaatcaggattcaggaacaaagaaaaatcccctttaaaaatgctagaatttattttattgatataaagagagtaattcttcagttttcagaaaggtccacaattttccatgtagggtatgtttgattacagggaaattgagctcaaattttgcaaaaatgtgctaagtaaaaacttggaaaataatccaggttcagtgactatagacttctagtgaagtcttaactaacatgtagttatctgacttcccaatgatttttgccagaatatcaattttctgctcaaatcaacagacccttaattttatattgaacgatacgtttatgattgattatgccttacgattggcctatcttcatatatgcatcctgatattaatggtagcctctgtgaaggtcgactttggatcc

SEQ ID NO: 107228 - DNA, 775 bp, Aquilegia coerulea
  Intron number 1 from transcript AcoGoldSmith_v1.022328m (l ocus AcoGoldSmith_v1.022328m.g) derived from phytozome v7. 0 (chr-ID scaffold_33; pos 366509 to 367283 reverse strand )
cttacaaccaaacattatagtatatgtaaattaagaagattttatgtttttgtgttaacaaatatttcataatcttgttatagatttcattacagattttgccttcatttaatttccatttatatgtatgcacattaactgataaaagtcttggtcatattgtttggagaatgcattcctaactctatgtggcatggtggaaaccagtctttcacctttgtacatactactagaaatataaagttgatagttttctttttctttttgatttcataaaataaataatttaatttttttttttttttttttttttaacaaaatttaaaattatcaggctcttgatcagatccataaaatatttttgattttatcaactcctttattagaaaatggagaatcaatacttaagaaattttgtatgttaaatggtatggatctgactacaagaagaaaaattagaagcataaatcatggctaacctggtaacttggatatccatacatgttgaaattataaaaggggaaaaaaatcttttttggcaattcaatgtttggttggtgatcttgtcccaaaacttcaaatccgataacatactggcctagattctaatttcgggttatgaagggaacacaaatcaaatatccttattatgatattatttgtttagtcaataaatttgaaaggaaattctactaataataattccaagattgtgatcattaattatattatattttcagttactactgctactagaggtgaggaagctttgagc

SEQ ID NO: 107229 - DNA, 477 bp, Aquilegia coerulea
  Intron number 1 from transcript AcoGoldSmith_v1.010616m (l ocus AcoGoldSmith_v1.010616m.g) derived from phytozome v7. 0 (chr-ID scaffold_20; pos 2696505 to 2696981)
tcttcacctcaagagtaattttccttctttctttctattcttaatttgatatttttaatcataatttttctatctgtttataattgttcttccttgatcaacaacaaattcataaaatctgttgattttgttaatagaatgatttcattgacttgaaatctcgtttgaggtttgcttaattttagtgttttttcactatgagaccagagaaggtaaccttcatagttcgttagctatcaaaggggtttaaacattcaaaatattgaagagaagtgtaaacttaagtattaacaaatctataatggatcaagagagtaatcgccagttatttggaatcacatatcataagttaggagagatgcaacataaagggattcagacatttagaggatactttgatattgttttatgaatactgtatctattgtttactttgtttcagattctataactcgcttcctccaataagcaaggcgt

SEQ ID NO: 107230 - DNA, 589 bp, Aquilegia coerulea
  Intron number 4 from transcript AcoGoldSmith_v1.006599m (l ocus AcoGoldSmith_v1.006599m.g) derived from phytozome v7. 0 (chr-ID scaffold_14; pos 5431136 to 5431724)
gaattggtggacccaaggtcagtttcctctcttacctctgacatacaggttgtctagcgatcatgtgttggtttgttaagtacaatctagtcgactgttctcttaaataaataactaccctgtacattgttgcctctattctcttgacatttatatttgattgacatctaatctcagtcttctgagagtttgtaacaatacatattgatctcctcgaggacaatttataaaaacgtaatggaacttatgctacttttttctaggaaaataaagtgtttaaagtgtggaactatgataccaattgaatagacgtggtgtgaattcatgaggcttttaatccttctgttttctttacaaatatgttcttatcaggcctgtatgttcttgatcactgtttaattgacaacctcaaatgaggcgtgggattttattttgggtcagattaaccaacaaaaggcccaatgatattgttcctaactttatcaccatcagataaaaaatcataaaattgacacagtttcatgttttctttttgttccaatttttatgccatttatgttgtttcagattgacagacctctacagaggc

SEQ ID NO: 107231 - DNA, 848 bp, Aquilegia coerulea
  Intron number 1 from transcript AcoGoldSmith_v1.022567m (l ocus AcoGoldSmith_v1.022567m.g) derived from phytozome v7. 0 (chr-ID scaffold_14; pos 518697 to 519544)
ctagaagggcagacgcatttgaaaagttagacaaagtgagttacgcaaaacttgttgtgtatcttcaattttatgtacatttttgttttaactttcaaatgccctcaatcaccttgcaaattgtacttaaatatgtttttttttctgcaacttctgcacatcttggttaaaccatttgtgttgggcaaggattatctgataaaccaattaatgattggaagttgtatcattgtcaagctagaaggggaacttttatacaagattgacacacgatgtttgttattataatccatttgaaagctaaggtttcaagattaagtagggttacaagtaaaagatatatgcctcctcttgaattacactatgccagaaatgtttaattgtacattatatctaaaacgattcatgacggatttgttgatgtctttgagggggaggtgtgacgtaataaataaaaaaagatgtggtatgcatatgaagttctttaaaactttggatcaatacgtatcctcgccaaaatgtagtaagaaatgtaacccatctacacaagtgttgattatgaccccacaacaccccttggccaagaagatcactttacaaactgaagagttggacttctgatcaccttaggtgatactataaattctgggatggtcttttttaatggtgatatgatgaccattttcgtaactttcactctctccaatttgtggtattttcatgcagaccgtatgaccagtagttaaattcaaattttcattagtgtgcttaagttgaatatgatttatttatttatttctttttccaatgcagatcggacaaggaacctatagcagtgtgtacagagc

SEQ ID NO: 107232 - DNA, 488 bp, Aquilegia coerulea
  Intron number 2 from transcript AcoGoldSmith_v1.006709m (l ocus AcoGoldSmith_v1.006709m.g) derived from phytozome v7. 0 (chr-ID scaffold_14; pos 494062 to 494549)
ctgctggaatccttgatatcactggcagaaactttgtacgcacatcgatatcttttgtgtgttttttattttcttatatttcaagtacacagcatatactaatgttatgtacatattcttcctagtacaaaatttcatatgattaacaaaaaataattcaaaagtactatgatgaccaactgaccctattttcttttattattccacctctaagatcttgaatgcacacttcatgagtgtatttgaaggtagatagtcacgtttctgttgagtcattatgggtcacacctcatgatcgagctgatctgatcacttctgctccatttatggttccatccgatccaaattgatccattgaatcataaatatagtgaactacaatcatgttgtatctgtttatttatccctttatggttggtttgttaaatgtcgtgaaccaattttgttgatcaggtggggcgcataccattcaatcaacagataaagaa

SEQ ID NO: 107233 - DNA, 895 bp, Aquilegia coerulea
  Intron number 3 from transcript AcoGoldSmith_v1.022067m (l ocus AcoGoldSmith_v1.022067m.g) derived from phytozome v7. 0 (chr-ID scaffold_20; pos 3409581 to 3410475 reverse stra nd)
actacggaggtaccttatatcgcatagttctggttgattacgttatgttcttaatttcttatcatagtggtttatgattggagccaacatcctccatcaaattctgaatactcgttataaaaaaaatcctgtatcctccttgaatgagagtaacataattttcagatttatcttcttgatccatgaatacatatcaaagaagctatatccatattagtatattactgtgaataatgctgcttttcaaatatggtgtaagagcaaccagccttcattatattcgatgtcagggtgttggtaggttctttctgttttggaaattgttttccccatgttgccaaattacgttagtggttgtcagaacaatttctcatctttcccatgatttaaagatattagtcctaacttagcattcttactatattgagattttgaatgccagtgtcattgtttagtattatgctctaacttacacgttcttcgagtgagatagtgtaccttatcttattagctgtgtttttgagttcatatgcaaggcaatcacaaaaatgacagggatctcatcttcgtaaacagttccatctgctgtttagaaaatgataacctatttgattatgcctaaattggtgtaattatctaggtttcagagtttatgttttgtacacctaaacaacatagaagaagcgatatccatttgattatctcgacccactttttgcttgtagatgccattcgggacctactaaatagactttcaagtttcaatccattgctgtctgcgtagagtgtagggtctttgttgcttatgcttcagattcagtcttgtttatcgtttaaagctcgacttttgtgttttacaggagaaccttttgttgacggtaaggttgttccatac

SEQ ID NO: 107234 - DNA, 557 bp, Aquilegia coerulea
  Intron number 1 from transcript AcoGoldSmith_v1.011460m (l ocus AcoGoldSmith_v1.011460m.g) derived from phytozome v7. 0 (chr-ID scaffold_41; pos 107077 to 107633)
ttactcttcttccttctctaggttaacgaaggcaggtaattaatctctctccacttctccatttcaatacttttttcatgtatgaatcttctatctgtaatgtttatacttgttgttgttcttttaaatctagggtttagctttaaaatgataagaatccttgaataaaaatctgttttttatgttttgttgttgaattagttagaccttaatggatttgggtttttgtaattttgtgttttagaatgatttgtgggttttgattgttgttgttttttcgaaacggtgggtaaatcatttaatgttaagattaaaaatgtatgatggaatgttttgagggttttgattgattttagttttgaaactgtagatgaatcatttgatgttaatgacttgaacatcttcataaaaaatcattgttttagctagatggtatatttagtaagacaggattgagtttggtttaagtgagttgtggattgaataaggactattagatttgattttgatattcagtagttaatattacgtttctttgttgtgtcagaagattcaag

SEQ ID NO: 107235 - DNA, 650 bp, Aquilegia coerulea
  Intron number 1 from transcript AcoGoldSmith_v1.000925m (l ocus AcoGoldSmith_v1.000925m.g) derived from phytozome v7. 0 (chr-ID scaffold_17; pos 4744296 to 4744945 reverse stra nd)
cactcttcttcgcaagttcgaattgcatctaatccgtaagttttgtttctttcgatctctccattgttgttttgatttaatttgagatcttcacatcattttaaacacattcgtgtttgcaaatcggttcaattctgcaaattttggtgattttgaagttatttagtgttgaatttgtaagagtattgattagatcagaacaagtgaattattaaaatggtaatgccaaattaagaagttcattaagaagaaagctgattagtagctaagaggccagatcggatatggtttggtgaattgaattccgtttctgcattgcaaatgagttggaaattttctcccaaatcaacttaaactcccaaggaacctgaggaattgttttttttcttggggttcattgaagtaaaattggtaatgagatatgtctttattataggaatggaatatatacatatacatactgttgactgttgtgtcagatgagttagaattgcataatatcttaataaggatctcatatattaactttttttgttcttttctctttatttatcacaatacctttgcttatatcagaagatgacttgaaataaggtcttctcgttgtttttataggagtgtttctaactgcaaaatcatcattctggggc

SEQ ID NO: 107236 - DNA, 727 bp, Aquilegia coerulea
  Intron number 1 from transcript AcoGoldSmith_v1.004029m (l ocus AcoGoldSmith_v1.004029m.g) derived from phytozome v7. 0 (chr-ID scaffold_4; pos 8423481 to 8424207)
atctgtaagttcaatttttctctcttttttagctcatggggtgttgtttttatcttaattctgggcaaaaagtatatcttgggattcattttgattattccaatgttgggttttgttaaagttatcaaattttcaagttttttttgtagatttcttcgaattgtttgtatagatataggtttcattttgagagaatttaacaaagggtccactttgattctcgtatttggtgaattttcctgaagtttaaggtttatagttcgatgtaggtgtggtggtaaagttctattattttgaaagttattaaaaaatttcaaaggtttagcttgagaaaatctaggttaaggttcattttgatcttgatattgtttgtttgtgttaaatttttgtgttagtttgatgtctattcaatgtttaaatagtccagtagaagtggactgtgattattttggatgttttattcttgattcatggtgtttataatttaaagttaattatggattttctagattaatacaaacttccaaaattattagttttaatgattgcgagtctcttctgaaacacacaatgttataattaagccaaatagaaagttaatttgctttgcattagagatcaatgagtcatgtatgtagcaaggtttttttatagtagatctttttatttgttaagacatgtgatttgcgttgttcttaaatctgtatcagagggttttgtttgcaca

SEQ ID NO: 107237 - DNA, 585 bp, Aquilegia coerulea
  Intron number 1 from transcript AcoGoldSmith_v1.026636m (l ocus AcoGoldSmith_v1.026636m.g) derived from phytozome v7. 0 (chr-ID scaffold_14; pos 688652 to 689236 reverse strand )
ccataccgttgagaaaggagccggtcataagcaaggtttgtttcttgattgcttcatctgatctctccatcttatgttgcgtttcattcgaatttttcttatattgtgtttcgattcgatatgttcagcgtattagatgtttaagaagttcttttcattgtggtttgatttctttttattattaattaaaatgatgttttaatcgaatttgcgctttctttgtcttgcgttatgttttaatctaatttctccttttgatttgatttgttttgattcgatatttaagtttgatttgtgttatatctgtgtatcgatcttgttgagacaatttattggatttagtctgtaatctaagttgcagatctattttgatttatgacgtgagtttcttgtttagtcgtagttattgtaaaattgcatttcactccatttttatgatcctatttgcttgatgacctgtttgaaaattttgtctttgatcggttttgtctaaactcttttcagtgtctatataatcttgattttttaattgtttgctatgttttgatctctctgttattcaaaatcttgtaggacctaacctga

SEQ ID NO: 107238 - DNA, 450 bp, Aquilegia coerulea
  Intron number 1 from transcript AcoGoldSmith_v1.003575m (l ocus AcoGoldSmith_v1.003584m.g) derived from phytozome v7. 0 (chr-ID scaffold_14; pos 2942613 to 2943062 reverse stra nd)
ccaaacaataaattaaggtaaagattcaaactttacaaaattttcgaactttctttctctcaccttaaaaatcttcttcaattctctattccttaattaagcttttctgtatgttttcttatcttcttcacctttgccgcctttcttctttcgcttttctcttcatgtgtttttaaattttaattagttctggagatctgcccagctttttatttatttatttaattatgttttagtttgacaattttaaaatttgagattgaaataggttttttctgaatttgaatttgaatttgaagttgtgattctaattttaatgaatggtatatgtttcttgattcaggtatcaaagcgcgaattacataataagtagatttgaaattgaatttgaattaggttagaaaattcagaaaattgttgaaattttagggttctacgttttgaggtggg

SEQ ID NO: 107239 - DNA, 438 bp, Aquilegia coerulea
  Intron number 1 from transcript AcoGoldSmith_v1.023985m (l ocus AcoGoldSmith_v1.023985m.g) derived from phytozome v7. 0 (chr-ID scaffold_23; pos 3981396 to 3981833)
tgtattttgcccaggagaggctactttgagacacagttatattacttacaaagcgttacacccaaatagaccagcctgcaatagcagctataggagctatactattaattgtttgccccccaccccccaccccccacccccctaaagcacatctagcataatcttctttgtagcaggaatgcaggatcactataatttcctttatgcatagtgtttgccactatcgaactcaacctttattttcctatatgcaaggatcccatgtacacagattctattgcaaaagaaattactattactattcttttgagttttgattccttttaagtatgcatgttgtgggaaagattgaaaaggtgtagaaggtgtaataaattgtaggcaaataaaaaactgtatcgacatctcgttttttcccagcccatatttgcagtggac

SEQ ID NO: 107240 - DNA, 392 bp, Aquilegia coerulea
  Intron number 1 from transcript AcoGoldSmith_v1.013995m (l ocus AcoGoldSmith_v1.013995m.g) derived from phytozome v7. 0 (chr-ID scaffold_5; pos 4752429 to 4752820 reverse stran d)
atcagctgatacttctccaccagaatcaaacacaggtaacagaatcaattattttcacatttaacatgttcttagaattgtgtgttaaggactgaggattggactatatttgagtattcagaaaactactgttacttgatgcaggtgatggaaaaggcaactctacgaacgttgttgtcattgttgttccaataattgttgcactagtcttatcagccatatgctcctatttcatattgatgaggatacggaggaacaagaagaaaaagataccagaactcatttgtaagttcaattatattagcccgagacaaactaattcaaagagattttaaatgaaaatgttatccctgtatctttaaattaattatttattttttatatttttgtag

SEQ ID NO: 107241 - DNA, 859 bp, Aquilegia coerulea
  Intron number 2 from transcript AcoGoldSmith_v1.001428m (l ocus AcoGoldSmith_v1.001428m.g) derived from phytozome v7. 0 (chr-ID scaffold_20; pos 3317239 to 3318097)
catttggggctgaagttgctgatttggttagaggggtaagcataaatcttgctaccaccacaatatgtatttgagtggctgtccctgatattattttttatggaagcttacaactatacgttgttttgtctttgtatttcacttgcttcgtgataagcaggtagttaaacttcaataaaaagataagtcttaattgtcaacttgctagaactaataacacagataatttcacccccaagataggcattcacttgttcgcacaatagacccagacttccactgtacattaagctgaccaatagaaagcatgctttattgactttattctgaaatattggacttatgacagtatgcaaattcatattactagtgatgcagattggtggatgttctttgcattatagttgataaccgactaaggctgtgtttggttcatggaatcataattctttgtaacaaaagatacgtaggaaacagtggagatttagaaaggaggtttagtttatttacgaaagttaaatcttgtttcgatgtttgttttttcaagatcttctattttaattagctttttggaataaggttctaggatgaacaaatagaatttcatggatgcatgattccttataattatgcaaaccaaacacagaattactgcttctctgccagatgatgtggttatgttgctgtggtcatatttggtcaaggaaaatttattgttcttgtagagaataacatatactgaattttatcttatggttctaattattgttacgacttaaagagttattgtgttaaggtttggtgtttgtttggttttaatgtaggtatcaaaattaagccatttgagtaagcttgctcg

SEQ ID NO: 107242 - DNA, 497 bp, Aquilegia coerulea
  Intron number 1 from transcript AcoGoldSmith_v1.000298m (l ocus AcoGoldSmith_v1.000298m.g) derived from phytozome v7. 0 (chr-ID scaffold_17; pos 4035515 to 4036011)
ttaaacaacgaaacaagcttgcttcttcgttattggtatcttaattcgatcttataaaccttttaaatttcgtttcttgattatttctttttccacctctctgtaggtagctattatgttgattaatttaattacatgtttgattaatttgattaaggtttttgaaggattgttttgttgtttttgtgattttaatgggttttaagatagaatttggtttttgtgaatatgaatttattctattcggattgtctgtgactttgtttgtttgaattacagagttttttctttttttgttaaaaatttattgtagggtttatttggaaaatttattttatttaaattgaatgaaattgggattatggtgtttggttgaagaatttagaaatgagcaagttttattttagtttctgttattgcaatttttgtctctgaattagttgattgaatcaatgcttgcaggtgaaggagtgagtgagagaaaactatagcaaaga

SEQ ID NO: 107243 - DNA, 1038 bp, Aquilegia coerulea
  Intron number 2 from transcript AcoGoldSmith_v1.000298m (l ocus AcoGoldSmith_v1.000298m.g) derived from phytozome v7. 0 (chr-ID scaffold_17; pos 4036195 to 4037232)
aatctggtgagaactactctttttttttttaactcgtaactctttttatgtgtactgtcttatcacttttatggattgcatacttacatattctcaacattggaattaaatgaaaagaaagattgagaaggtacagactatgctattactcaaagaatccaaagggaaattaatttgatgctcattttgcaattggacaagcatcaattatttcaagaatctcataaatgttgcctcattacatttttcttgcaaaaatacctgcataaagaacaatatgcttcattataaacaaggaagtttttcagcagacccagaaaactgaaaagtgactgtttaatatttgtttttatcctaaggattatattggaatatttttaaaggcctatcacatgcgggagcaaatactaactaaatggtagcatctcaccattgaagctattgccctttgactcttggctagatgctgtccaagcctcaagcgataaaacttataacacccacccaagtaatcgtgcagtgaattattattactactactactactactatctttttttttttttttgaaattccacattgtcttatttttccacaatctaaatgatcatcttttacaacaattcactgtcctctatggtgaaaagagcatgtctacacccttcaggaagggttcatatattactctgattcaccgttatctgctgattcagcacaaaacgttacctaggtttgtgttgcttttgaaaaactcatgattatgtttgatcagcaccataaagaactttacctatgaaagaaaaagagatatgttacttctgacggtcatttaggtgagtattcttagaagtatagaactaataatcaactgcatattgtgcactaaagactttaagcttgttaggcatgtgacttaatattcctttaacttttgatgagaacaaactgtgcttcctaagctgtataggtataatttttgtgagctgattgcagttctatgcagggaaaaagccttctgaactatttggaaagttcacg

SEQ ID NO: 107244 - DNA, 685 bp, Aquilegia coerulea
  Intron number 2 from transcript AcoGoldSmith_v1.004147m (l ocus AcoGoldSmith_v1.004147m.g) derived from phytozome v7. 0 (chr-ID scaffold_17; pos 2279562 to 2280246 reverse stra nd)
catcacagggtatggtaagttcttatgaacccgtcttataattgttttgctctacagtttggtgttctgtattcatattattcttcaaaggtaatatttgtattatgtatctcgatcaggactgctccgatattcccttttgaatagttatttcatatatgtttgttaccaacaattttttaacttctcccatcatttgaaactcttatctttaatgtctactgtgtatctgaaatattcaggaagccggaagtgcaatatgttttattttcatatatttttgcgaaatatttaggagacagtagtgtttagtattctttccatactcagaaaaaatatgttctggatcgcatgttatgtctcaagttaatcaatcatggttgcatcatgcatgataggaaccggtgtgacatgatcttgattattatctacaataagtcaataaccaaatatatatcggcttcgtaaggtttgtggtcagcaagttttaaacatatggtggtaagagttacattgccaaaattcattggattttatttggcaataccacttttgatgcttcttctagactttgggatcatgttattgtcttgttcaaataattgtcccactaagtgggattggaagaatgttaattttcatatgcaatatgcctgatatagatactatattttacagggcattt

SEQ ID NO: 107245 - DNA, 741 bp, Aquilegia coerulea
  Intron number 1 from transcript AcoGoldSmith_v1.004147m (l ocus AcoGoldSmith_v1.004147m.g) derived from phytozome v7. 0 (chr-ID scaffold_17; pos 2280530 to 2281270 reverse stra nd)
gtttttctgagaggaagaagaggttagtggatgatttatgtctcttatcagtttatagataagtgttattaaccttttgcagattgggctttttgcattctctatgtgttatatatgtggctttgttttattcaggaacctgataacaaagtaattgacattttatttgaaatttacatcagagtttgactgattatgtcaacccgtatgtagagaattatatatagggctttgaggtggcttgggtgacattatgtactggtagtaatgcacaccaaattcttgggatggctcataattgtataatttaattgaaaaatggttagatgcattaatactagctctgataggaaatgcctaccaagaaaaccaaaatccataagacaagtttaagcttatttatttactggaagacttctgctatatctgctttcatacatagaacaagcataccctctgcctctttgtctcgcaaacaatttttagtattgctattttgtttatgcatgtgtaagtgtgtaccagactttatggcggatctgtgtattggattttagttgtgtactaaaaattgctattttgtttgtattggattttagttatgtactattgtcttagtatggaagtagcaaagtcaagtaccacaagtgacgctatttttttagctcttatgtcatttatcttttactgatcactagtttttgtcattataattgtgtagggagggttctgcccgtggtt

SEQ ID NO: 107246 - DNA, 803 bp, Aquilegia coerulea
  Intron number 4 from transcript AcoGoldSmith_v1.000069m (l ocus AcoGoldSmith_v1.000069m.g) derived from phytozome v7. 0 (chr-ID scaffold_20; pos 225966 to 226768 reverse strand )
gttgaaggtaagtgacggtcttacctataaaagtgtctaagctacaattgtttcagactttcagtaatgtagttgcataaataaaaggtagatgacaccaccaatcaattttcatatccaacaaccattgatattattacatttcttacattatagaaattgccttgattcctaaaacctaaattggtaatgacctttcctgccaaattagatcagtctatataggcggccaagtgacgtaactgtaaaaagaaatggttttagatgcagggttcttcttctaactcagagatcagagatggatggagatatttgtatagggatataatatgcaatttcattacttcaagttgttgattacaactttgttttcatctgcacaagtcactgttaaacattcaaccaacacttctaattctggttgttgttgtccttgatttgcagtacagtgaaatgcaataatagactggctgctcactttgatggtgggcatcagggcatgtacaatgtattaaaaaaaattaaatcaagcacatggaacattttaaattaacatttcataattccccaaaaaaaaaaatttaaacaaaaatcactttatgatgttttttctttgaaaacatttttggaaaattttgggatacttaaaagagttgcatacatgcatactcactaaaagacaaagttattttctttgagaatattcggacttttgactttagcgcttgactttttgactttctgactttctgttactgactaatgcagaggactacacagaagaatcacaatcagttgcacac

SEQ ID NO: 107247 - DNA, 607 bp, Aquilegia coerulea
  Intron number 1 from transcript AcoGoldSmith_v1.014367m (l ocus AcoGoldSmith_v1.014367m.g) derived from phytozome v7. 0 (chr-ID scaffold_20; pos 1634312 to 1634918)
ctcaaccttccattgttgttcgagatacggtaagcttacttgacaccatattggcattttattagaaaataattgatatattaccattcaccatagaacaaaattagtaatatttatgttcgcgcagtcatcaaaagaaagcaaaagaatattatttgaatttgttgaaaaattattgatattgaaggagaccgtaccaagataagcagaaagcaagtatgcgcgagcttaactcagcaagaacttgctaaatctgaatttgagtgtcaaggatttatcaggttatcacatatgagcattgatagtacttttcgagctattttaaatttaattctatcgagtttcttcctcccctctaaatttaggatatatgagctaatcgaaataagatgtcaataaactttcgtaacttttacactttttcataaagaaggaccacatataaacatatgctgaatttcaaaaacaatgcagccctgctgaagaagcaaaagttactaaagggagaggggctcacataccatcccaatttactttatctttcttttgagctttttgagatcccattttgctttttgaactgcagctgcatatcttacccagagag

SEQ ID NO: 107248 - DNA, 632 bp, Aquilegia coerulea
  Intron number 1 from transcript AcoGoldSmith_v1.000520m (l ocus AcoGoldSmith_v1.000520m.g) derived from phytozome v7. 0 (chr-ID scaffold_17; pos 4143899 to 4144530)
cctgtatgtaaaacttcatttttttctctaaagtttgaattatttttttaacattttttatttattaaagattggatctttttcaatttctttatgaaaagaatttgttataaatgttatctagttgaatggattgtcttacttttatcaaaatgtgtctttttaattgttaaagtaagcatggactcggcattagtaattaggttcttggaatgttctataaattacttcatgtacgtattaattatattgcaattactgtatgtatacattttgttggcaaccacattgttttcgacgacattggtggtggtttattctgagaggtgagatgtcacacaatgcattgcagaatataatgatggtgttgcatgctgaattggtagttgtttgcgatatgtgttggtgatattaaataagtgtaaattgcacatatctaatgtctaatatttgtacctcctatcagtaaaattcttacctatgttataattttttttctactccaggcagagagagttttgatatttgtgttttagagaatagatatttttatcattgttttgtcttctcctgctttctgaatttatttgcactacggaaatcctttgaattatatctgtattctcaatcag

SEQ ID NO: 107249 - DNA, 755 bp, Aquilegia coerulea
  Intron number 2 from transcript AcoGoldSmith_v1.014492m (l ocus AcoGoldSmith_v1.014492m.g) derived from phytozome v7. 0 (chr-ID scaffold_41; pos 1041217 to 1041971 reverse stra nd)
aattctgataaattaagacaagttttcacattaatgtaagattctaacttttgtgacattaccttactacacaaccagtatttttgtcctaatctagtcttcttatttgtgtttcagacaatcagcgctaatcgcgattgctggagtaatgccttttgtgtctatacttgggctacgtatgacatcttcatatcctcttaataataaaacaaaacctactctctaattcaaattgcaagcttctccctagatgactgttgtgcctttttattaataatttattgattttctttcattgcagtgttttcatattgtggacaccagcatgcaatcactatgtgagtttttttttttttttttttttttaatttacggagtattagtttgttgttgttcattgagaaataaaagataagacaagtcagcttgtagacaccatgtgcaattttaactttaaagctgtttttaagtcctaagatatcgtaggatgagcaatctccatcctgattaagctttatacagatctacagcctcaatattcaataagcattactaggagcacattttagatacttttgtccctgacagattgaaattttctcaaaactagatttgttatctaaattacgtaatagtatgttaagcttatgtagtagtatggttactgatatggtttggttttgatacttctattttattgaccctatcataatattacagagttatctttggtggctggctactcgtcgcaatta

SEQ ID NO: 107250 - DNA, 827 bp, Aquilegia coerulea
  Intron number 1 from transcript AcoGoldSmith_v1.008606m (l ocus AcoGoldSmith_v1.008606m.g) derived from phytozome v7. 0 (chr-ID scaffold_17; pos 1805764 to 1806590)
atcgaataacaatccaactcttcggcgcagggtgagttccatgcaactctttattttcttctttctgagattccttttgtcagttgtttctctaatttgagatctgttatcagtaatttatctgtatatgttttgcttataatatgtatagctttcttctgttgaatttggttatgttcatctatcattgtgaagattgatttgaactaaaatgctaaattatatgtttgaaacaatagatctgagtcgtttatctatcaattgatctggcacattaaacttgttatccatggatatgaacatgataaattccataaaggactcttggtcatcttaaatatactaccagaggttgcatcgatatggtcttaaatttgatgtgccggcttgtgacaaaaattactgtgcatgcataaattgagtctgcaattcttgcaagaatatccaatggaggaactaggaggaacattttttttcttgtatatgtatccaataccaacttgatttcgaattaactgtagtttctgtgcttaagagactcaacttcagaagttcttgttgtttccaaaagaagcaccctatagagtttactcagtagtatctcatatattgacctcgttaggtttacacgttcaattgtatcgatcaaagaccctttacaggatccaacatgaacttgtagagaatggaaaactttggaacacttgtgaaagtcacaagtttgaggtcttcgttgcttgctctgtatccagtaatccatctattttaattgagatacttatctaactctatcttcacatacgctctgcagcaaaaggtggagaaaa

SEQ ID NO: 107251 - DNA, 875 bp, Aquilegia coerulea
  Intron number 1 from transcript AcoGoldSmith_v1.006905m (l ocus AcoGoldSmith_v1.006905m.g) derived from phytozome v7. 0 (chr-ID scaffold_20; pos 3207655 to 3208529)
aaagaagaaactcccactttctccccattacagaggtatgcatatgtgtgaaattcatactcattttgttgtttttctacaaaattttttcttcttttagtcatttattcaaacatttggtctgtagagttttggaggtacaatgtagttactatatgttatgggtctagaaactaaaactgaaaaaagggtaagttgattgtgtaggtatgaatacttagcgtgtcgtgtagaaattttgtgtaacaggttacaggtgagtattatcttttagacatcacaaaggtgcaaattatggatagaaattggattagagcaaaattctattataatgttctgtctaatatagttattagtaactttgcaaattaataatagctcaaaagaaacgaaaagatagaaatgtagtacttactgattcatgtatttttgataaagttttaatatatggtctacttttttgtgttactggccattctttgttccccaacatacattcattattttgtctaagaattatagtatacgggctcatgttgtatatttcctgacctagagaacgcttgaaatttgcattgaacatgattattatgcagctggctctgtaagactgtatttgctttaataagagggagtcaaccacttgaatcattttcatattatttcaaacctgcgttttccatttgaatagataatactcatttggcattgtaaatgttcagcaaggttttgattaagttacgatgctttttttccctccaaaataacaaccatgaaagttggaaggcagtagtgacagtttattacttgattcagatgatatttgctctagttaattttacgttttttgttgtcaccatatcgtacaacagctg

SEQ ID NO: 107252 - DNA, 702 bp, Aquilegia coerulea
  Intron number 1 from transcript AcoGoldSmith_v1.003081m (l ocus AcoGoldSmith_v1.003081m.g) derived from phytozome v7. 0 (chr-ID scaffold_20; pos 4150928 to 4151629 reverse stra nd)
tggtggttggactactttcagatcagcaacagttggtaattttttttcaacttgatgtttattagtaattttgagaatctttcatttcatcacgtgtactgtgtttggtttgtgactcgatctgtaatgtaaaatgttaacccgtgaccagtgaccagtgaccagtgagtaatttaatctagattcattcaagtcttcatctacaacttcctagaaatccaacttgctgcctgcctttgcctagtgcctagctttatttgtcatttttcagtgaataatggtgcacgtgaaacttgtagttgctacttgtaatagatgatcagatgattcaccaaacaaaaaaaaaaaaaagaagagaaagtgatatactgtatagagagctgtggcagaaaaagaaaaatgatcaccaacaccaagcaacaagtcttcctgttttgatgagtggtgatctgtgatcagtaagaaagaattgaagggccaagtatagtgcagtaatgtgtttattagttatcaaattgtgttacctagtaaatgataaaatccgaacagagcacacagagcacttatttgtatatatatccacattcaacctaatcaactagtttatctgttcatccaatttaatatacggtactgatgttcagacaaattttcttttgcaatgcagcggtttctggagaaggcttcctaacacgtgatata

SEQ ID NO: 107253 - DNA, 683 bp, Aquilegia coerulea
  Intron number 1 from transcript AcoGoldSmith_v1.012627m (l ocus AcoGoldSmith_v1.012627m.g) derived from phytozome v7. 0 (chr-ID scaffold_20; pos 184024 to 184706 reverse strand )
tgacctatcaaataattcaataagtgagttgcaaggtaagttgttatcagatcaattcttgattcttgccattttttcattgatataacttgtactaatttctttatccatgccaattgtaggtctggataggttatctagattaacaaaattacacttcttaaagttagaaaaaaattacttcaacaacagcattctaccatctttgggtgcactcatctcccttaatactcttgaccttggtaggaatatgttggacggatcattgtctcaacttccacaaggtaatgttaatctccaagttttgagtagcttaattactatgatagtttgtgttttttcttaatttttttttcaatgatgtctagcctcgagatgaaatcattagacactgatctctacattttaattaacaaaaagtgtttgaattaccaattaattcttaggggcaatagaagcttgattaattttgacacattcattacattgacaaaattaagcaactcggaagtctcaagtttaagggacaatctaagtagcttcttgccattacattctatagtttcaaaaaaatatactaatctgtagtagttatgagattaacttaaaacatcttccaagtggtaagactttcattattgcattctgattgttgtcataacttacatgtagtttggagtaat

SEQ ID NO: 107254 - DNA, 762 bp, Aquilegia coerulea
  Intron number 1 from transcript AcoGoldSmith_v1.001443m (l ocus AcoGoldSmith_v1.001443m.g) derived from phytozome v7. 0 (chr-ID scaffold_17; pos 946441 to 947202)
tattaatccacctgttaattctctctcctttggtaattttttttattcaattcaatctcctcttccttgatcttaagaaagaatttaattttataagtatgattttatttttatttttttatatatcccgagcttcgatatgttttaaataactattggatcaattacacgtgggaaatttgattttgatctgttttttgacatctttatctatgctgataacccttgttttattgatttagcacaattatacaacctataaagaatctgttttaaggcactgcaatcatgttaacttataaaaccaacaaaaagtatagctttaacactacatgatgcaatagctgtcgcaatttctaatttttcgtagataggtttttatactaattactaacctgaatgatttgattacatacacaacagtctattaataactaacgccgtgattgtgttgtgagttaaaacttaaaagacacgttactgttcttaatgttttctacaaactgaaaagtattgtgtaagttccaaaagaagtaagctcatacatgatacatatatatccgggaattatgaagaacaacacaatggcgcagaatggcgtttttagctaatgagtgtgctgctcatattgacgtgtttagtcaatcattataccatttattttgtggggttataaattttatctgcattaccaattatcgatctcattttttttgttttatatttcttctctttcagtattaaccagcctaaaggagagct

SEQ ID NO: 107255 - DNA, 551 bp, Aquilegia coerulea
  Intron number 1 from transcript AcoGoldSmith_v1.016633m (l ocus AcoGoldSmith_v1.016633m.g) derived from phytozome v7. 0 (chr-ID scaffold_76; pos 525638 to 526188)
cctaactctcctcctgccattgtgagccctctcaggtatattttcagatctttatcactatcaagtggttttcgaagatttttgaatccagctgtgtctttttctttccactatatacctctgcacgttcagcctgtctgcacgttccaaatagggagatgctaaaatgttaatattttcatttagttgtggatatatggggattacttatcatagtgaaacattttctcaccacatcaataaagacccaacgttcagatatatttactccctcagtccctaacaatctgataattgtacctaattataaaatacatgtgaattgtgttaagtatagatactagttcaatcttacgccattagccaatcaacaaccattctaaagaatggaagaattgcttggtatagtccatttgtggtctttagcctcatccactttgtggtggtcttcagtaagaatggaagaattgcttggtatagtccatttgtttcttttcattctctactatttcaggatctaaattttgttttggtcttgttgtcagcacctt

SEQ ID NO: 107256 - DNA, 735 bp, Aquilegia coerulea
  Intron number 1 from transcript AcoGoldSmith_v1.006766m (l ocus AcoGoldSmith_v1.006766m.g) derived from phytozome v7. 0 (chr-ID scaffold_17; pos 3442363 to 3443097 reverse stra nd)
tcaaagtcattttccccgcaacactctctaaagaggtaaaactatcaaacttcttctgggtttcttgtgttttcgtttacttgctctgtatttgtgtgttttaagtgcttcgatctgtttttatttttttttctactaatttcgtttgtggggtttctctgtattgtgaatggactcatttagaacaatgggttgtttttaatttgttaatttgatgattttagaggtattaacttgtgtaaatgctctgtttttcatgttaattgtatctcattgttttcgatctaaacaagtttgggattattcaagaattttcttatcttaattgatttaataggactataggagaagaaaagtaaaacgtgggttctctttagatttgttaaaaaaatgtgtgtgtgtgtttttgaatggaattgaagttaaggttttaattagtcttcttgtcttgttcgtttgctagcaattagatgttatgggatattgattatcaactgtttgagctgtagtggaaaagaagttctgattgttgttataggagttaatttatctcctaacccttttatggttcccacttcttcacaaatttggaacaagagcccatgttttgtggtcgaaattctttttgtagttgagattttgtgagaaagagaaaagagaggtttggtttctgcggtttttattaatcaattttttttttcactggatccaacaatttttttgggatattgcaga

SEQ ID NO: 107257 - DNA, 964 bp, Aquilegia coerulea
  Intron number 2 from transcript AcoGoldSmith_v1.003917m (l ocus AcoGoldSmith_v1.003917m.g) derived from phytozome v7. 0 (chr-ID scaffold_17; pos 1385005 to 1385968)
tgcaaaagcaccaagagacaaagaacatccatgtcacttttgacttgtacctacatactactctgtgaatattttaatatgcttgtttagcttgttagatttaccaacattggtaaataacagtcttttttcgagggaaaaagaatctgttatgcaatgaaaacccgaccgagcaatactgtatttagtttgaaatattttaaagaattctacattaatgcttatttaaattttgttctaattctacccttctgcatatattcattcataatgcatcacatactttatgaatctgacagtagcacttggcatccatgcctttgatagattgattatattgtcgattttgctctatacgactttatgaatatgacagtaacacttggaatccatgcctcagtagctaaactttgacccttgtctcaaacataaaatgtcagtacactatgaaggccacatcatgatttctcgaaaaactagaaacatcctctcaactctaaatatcattaaaagttccaacacacagtgttctcattgaaagtggaccaccaatttggctaggaactacgcataagtccaagtatgtcatgttggtggagggagtccagataccccttctgtattttccttcaaccttgtttacgtcaaattttgaatttcctttagaaagatatttattatacactaaactggaaaacactagatcattcttctaatgccacttggtgaaaactcgctgagcctggcttcatagccatcgaactactggggggctctactttctttttttggactcatgttataagcataaatggctggaaacattaactctgaactttacttctatgatggaaaaacgaaaggaagtttgttattgtggtgaataattcttcttgcctaattatcatgccacgccagtgttttcataccttcccttgttttttgttttttttttgtccagggc

SEQ ID NO: 107258 - DNA, 892 bp, Aquilegia coerulea
  Intron number 3 from transcript AcoGoldSmith_v1.005608m (l ocus AcoGoldSmith_v1.005608m.g) derived from phytozome v7. 0 (chr-ID scaffold_14; pos 4085287 to 4086178 reverse stra nd)
taactgtgggccgggaggctgcaattggagttcaggtttgcctactgcttgcataagtaccaactatgcacagcatatcttgaagtttgagatcgactcagtaaaactctatgataaaataaatagtgagttgggactgcctctctctgtatttggttcaaagcaaaacaagatcattaaagaaacattagatccaaaatggattagaacttggatgttcaggcgaagatttattatgcatactttccaagcctaaatgaagccatatataaatatataatgctactcatggagatgtaggaatcatttgacgagtgtgcaggttatgtgctgtctggcaagtagcattattcgagatatgttgatgacagctgcatgaaaagcacttaacatataatgataactatagtaagaacaataggggaaaggcgaaaacttttcacttgatagaagcttggaagtttgattaacttaattcctcaattaaaggtgtaaagtaagaattccatcttgctgacagatatagcttattttcatacttttatcggaaagttaggagggcctctatgatatctccttatagtgttggtgtttcctgagcttcatgtcattgctgaaggacagattctgcatcttaatatttgtatcttcatatctccatatctccatacatcttctgcgatcgaccttgtttaaacaatatgttgagcagacttacatgttcccgaactcacaagtcctatccaaatcattctaatatatacttgacctaaagaaacatatctacgatgtgcttctatgctaattttcagaagatgagattcctatttacgagtttcatttgtttcttgctcttgtctttgcagtcacttgtcagggtagtagaatcctc

SEQ ID NO: 107259 - DNA, 514 bp, Aquilegia coerulea
  Intron number 2 from transcript AcoGoldSmith_v1.022620m (l ocus AcoGoldSmith_v1.022620m.g) derived from phytozome v7. 0 (chr-ID scaffold_14; pos 490361 to 490874)
ctaatcaatcttcggtatgttgtctcctatctccttgtaaacattcacaactgttgagggaaattttttttgaagaaactttctaacatctagtaattaacttacatgctttggagattttcacttgtatttttacaatatttcactttctgaattttgttaatataatcttatgctttttatagtgttcaacatttttgctttagctagctctctctatgtacttataatgagctagatatagtttcctcaaaattgaatcataaacctctatcaaactcgccagccttcaaacacaagcccttcaaaatccaatgcaacccatgcaagctaggttctggccctttgttgaatactctgtcttaatggacacacatgaacctaatttgtttatcattcataattacatttttatttcatcaagtagcaattttgagtatgatatttttttgaagaaaattgtaaattgatcatcaatcttactataaatcaggaatcagaagaggagatagct

SEQ ID NO: 107260 - DNA, 667 bp, Aquilegia coerulea
  Intron number 1 from transcript AcoGoldSmith_v1.017887m (l ocus AcoGoldSmith_v1.017887m.g) derived from phytozome v7. 0 (chr-ID scaffold_189; pos 6391 to 7057)
gtctaggagtctgtgttggaaatgtttttgagtgttcaaaacatttgtatctgaatgagaaattaaagtcctaagttatccactgatcatgactaacttgtgttatagtagataaatatgcattgtatttggtccaacccatcccaatgggtgtgtctttccccaatagacacatactttgtagacacctattctgaataggtgtgtatgttcccaacagatgtgtacattgtattgggtcaaatgtctattcaaatatgtattgaatagacatgtgcctttttgaaaaggtgtctttctactatataagtgtgtcttgtgtttgtatccaattcactttcaaatcaaattgtttttccatcttctagtgtttgtgttttgccatgagagagtataacaaagaattggttcgccgtcttctatgcgtttgaagtgctgctacgctaagaaggatagatcgttgtatcctgtgagacaatccttcattgataaaccgtttgacacatgtacgggacgaataatgtcttaaggagagatttttatctcgactcgatctaaatcttgtcccttcatccatttattctggtttgcatcatttatttcattttatttattttagaacactaatatatcgatgtatatttccctacagtctgtagaaacaata

SEQ ID NO: 107261 - DNA, 660 bp, Aquilegia coerulea; identical to SEQ ID NO: 106788
  Intron number 1 from transcript AcoGoldSmith_v1.007849m (l ocus AcoGoldSmith_v1.007849m.g) derived from phytozome v7. 0 (chr-ID scaffold_14; pos 3178361 to 3179020)

SEQ ID NO: 107262 - DNA, 913 bp, Aquilegia coerulea
  Intron number 1 from transcript AcoGoldSmith_v1.005178m (l ocus AcoGoldSmith_v1.005178m.g) derived from phytozome v7. 0 (chr-ID scaffold_53; pos 336824 to 337736 reverse strand )
agcattcttcaatatctgaatctgttacaaataaagtgagtaattgaattggttgtttcattgatctgtttttgaatattcatcttcgaatcatgtcttttgatttcgatctgtttgttttgaaggattgatttgttctttagatctaaaaatttgacaaggacataataattgtagctatgttttgataattggtttcagattcatttgatgtgattgatgtttcgttcgaaaaacatttcagagattttacttcaagatgtgtagttttgtgatcgatgttaatgatcagctagcctatatattgtctcaactgtttgggaagtttatgttaaagcatgttatctactgtagttcaaattcaatgtagtggtagtggaggaattggtggttttagtggtggtggtggtgacgttgactgtggtgggagtggtggtggagggagtgtcgtcagtgtggacgcaagaaaggaagttctgttaactgatttttttttttttggggggggggggggggttagacaaatcatttcaattaggggtattggttagataaactttgaatggatggaaacttggggggtgcttaacggaaggggggttaacgccaaggttggacaacattggggggttcacgccaaagccggtcaaaacgtgggggggtcatgaccaattttccctttctttttagtagtataatatgtattctttattttttataatacaccgggtcgatttcaattgatatttattctgtgtagtatgataacatgttggctattaagaaatttttaaatggtaccaaactatgattatgtctacaaatttaaatggtaccaaggtatttttcggctgtgatccgtagtttttttattgcaggttcttcctgtggatttgcgagaacttaatctgac

SEQ ID NO: 107263 - DNA, 602 bp, Aquilegia coerulea
  Intron number 1 from transcript AcoGoldSmith_v1.026897m (l ocus AcoGoldSmith_v1.026897m.g) derived from phytozome v7. 0 (chr-ID scaffold_14; pos 4286683 to 4287284 reverse stra nd)
gagggagggggtgtggacttgtattggccttttgttaaatcaaacaatgtttaagggactataaataatatactacttgggcctagactacaaacaaattattttaaaaaccaggtgtttaactcaatttccttgtaaataaagagcgttaaaaaccacgagatttctctgttccttaacaagcaaggcaaagagaaagagaaagagaaagagatcaaataatcaatcaaaacaacacatttcttacacagaagacgaaccttcttccatcttttaattcaatctccaccgtttgattctctttcttcatcattaaatcaatcatctcaattcaatttcaaccgtcgatcttaaataaatgaataaaccttcttgaaatgtctccggctttggtcgacattcgaactccatcaaaacattcatcttcttcttcttcttttcaccaaaaccctaaccctaaatctcagatcttttcttcttcttcatcatcatctatgaaatcttcgattcgaaatgcaaacgaaggtggatttgattataactttgctccaccaattgttaatgaagaagcaacgaaattacgatcggtttcaggtcgttca

SEQ ID NO: 107264 - DNA, 1005 bp, Aquilegia coerulea
  Intron number 1 from transcript AcoGoldSmith_v1.003429m (l ocus AcoGoldSmith_v1.002354m.g) derived from phytozome v7. 0 (chr-ID scaffold_4; pos 7611786 to 7612790)
agtggtcccattggaaaggtctcatctatctgtaaaaaacttactcaaacagacttgttgaaaatctacgagtatttgaattttgttaattcaaaggcttgacagtttttctgttcatacatgtcagattccctctcctcattatttctttacagtattctatttgcattttgccattgattttgacttatgttagaccataggattaaacaattttaaacatgaacaaaagtttcaccaaaagaaaaaagatattaaacccatcagtggataaaactaaaactacgacccttagatagttgagggttttaaatcacttgattcttctggattcatttacttatagtgggaaaatctgctctattttatatattggtttgtttttagctaaaatgaattttgaaattatgaaactctagatgcatggggatttttgataaataaatatcccgcaattgaagcttgactttgttaatggaatacattgatgccaccgtgcctctgtttcctatatttgatggcctggcgtgatcttagaagttatctaatgctcttattcttttttatcataaatcagtccaagctccaaatttcttctcgagttattatgcactcaatattttaatttcaaaacaccatgctcctgaagcttacacctagagtcttactgcttatgccatcacgaacggatgttatgaacgtatcagaaacccatttgtaggtattacaattgtggcagcatcagctggcgatataggttgctgatgtctgtttctggatgagatagctgctgacttaggatttgcatttttttagcagagtgatcttagttagagctctaaaattttgatgaattgcccatcttacaatatgccatgccatgttttatgcacactgccaagcgtatatgtgtgtcttacactcaacttgttcttttcttttatttgaggatgattttgaaagtagtgtcttacactcaatgcttacaggtctacaagcgcagct

SEQ ID NO: 107265 - DNA, 515 bp, Aquilegia coerulea
  Intron number 1 from transcript AcoGoldSmith_v1.012096m (l ocus AcoGoldSmith_v1.012096m.g) derived from phytozome v7. 0 (chr-ID scaffold_14; pos 2920139 to 2920653 reverse stra nd)
gcctcaaggttagtaatctatgttgtttttatgcatcaggaatctttatgaatgtttatgaatatgattcaatgttgaagtttattgctttaataagataaatttagattgatctatatgaaatttcttctctgcaagtttaccataatttgtgaattttgagaatggtctatttatcttgtcctgtggaattgtcggacatagtggatgatatgcatagctactaagttcttggaagttaatcatgtttagtagttgaattggtagctgaatagtgtcaagtttgtttccgttgattgattagtttctgaggatttattataacaacttgacatttatttatatgttttgtgtgtttgaattcatttgtttctttgatactttttcttaagcaagttttgattatttttttgtaaggaaagactccttgaatgttctgttggtcgttcctttagtcttctgttttcactaattattttctcacgcagacaaagcaaacggcccaaagacaataa

SEQ ID NO: 107266 - DNA, 457 bp, Aquilegia coerulea
  Intron number 1 from transcript AcoGoldSmith_v1.010242m (l ocus AcoGoldSmith_v1.010242m.g) derived from phytozome v7. 0 (chr-ID scaffold_136; pos 79345 to 79801 reverse strand)
ggtaattataattaataatcttctctctctctctctttctctctttctctttctctatatcttctcttgatctctctctcactctctctttttacctatatgttctagttctaaacaaactactttcttaagagtaagagccataacatagtaagaaaatgtataaatgttaattatatagttataaggtctacttcaaattttataaatacccttcattcctttttctgcatctctctattacaaagagattgcttgaaaaaaaaaggcgataaaaaccgttttctctattttttttttatttgtagtttcttcaaagggtcagtaatcagtataatctaagtagtccaaaaagtttaacatgtactgaatttgttgttgtaaccatttttttttctaatatgtttgatatgatttttcagcttaatcacggattttccgagtctagcaattgcgg

SEQ ID NO: 107267 - DNA, 1039 bp, Aquilegia coerulea
  Intron number 1 from transcript AcoGoldSmith_v1.027295m (l ocus AcoGoldSmith_v1.027295m.g) derived from phytozome v7. 0 (chr-ID scaffold_5; pos 3781142 to 3782180)
ttcactcctcaggtcaattttatttctatatttatcaaagtctgtgctttgtttttatataatttcagtattttttttatgtggggttttgcgattttctgcttgtaattgtttttcttacagtaggttggatgttaataaattgtataactgctgtttgaaaaaatgctcaagtaaatttgatttcttttcattcaaatggtatcgtcgtctgggaaaactatatattagttcaattgactgcaagaaagaactagggagaaaacagtgatgaaaaccatttcttaatatgaaatggagatcactgtgtttggcacttctggtgtatagttcttattacataagtgaatgaaaattggaaattttgattcctcaggacatgttttttgagattaccgatgcattgaaaaccaaactggaagtcagaaggtcatctttatcaattccatggtgtttcaaacaagttgacatgcccatggatatatccgatgagtagattatctccatatttgcgtaccagtgtgatagggattttgatagtcagtacatcataattaatggacacaaatcgtcaaaccgagcagcaggaaattcctgcgaatgacacttgccccaagttacatagtaattgacgttgaagtataaagtgagcatcaatcactatacttcgctgtgttctgattaagtgcctattaaattttgtagagtagaaatcgagagagaagtgagttgtgtgagtaagaaaggaaagtagagaaagagagagcgagaaataagggagtgaaagagaaaaatgacttttcttctttagaaagaaagttattttccttgaatttccaaataaatgaggaatttacttgctcctgtaaccaacaaattccaatgaatcttattttgatcatctgcatacagtgtatgatgataaaagattccatattaagaagaatgattctgtgtcttgcttctggtaaaattacttgcacattttgcggttaacagtcccttttacaggttcccacagttccattacaaagaccag

SEQ ID NO: 107268 - DNA, 793 bp, Aquilegia coerulea
  Intron number 1 from transcript AcoGoldSmith_v1.021602m (l ocus AcoGoldSmith_v1.021602m.g) derived from phytozome v7. 0 (chr-ID scaffold_351; pos 14035 to 14827 reverse strand)
tattttttttgaaggtttgtccttctcctctaccaacaacattgaaaaaattagtatcttcatttcattcagattttcactcagcttgctttatgccattgtcagtgctaaattttgattaagtgttgacttactggtacgctttgtatacatgaagtgttgatccacggtttaaggttttctcaacaactatgttgggtcaacatttatattgatgaacttttagaatagaactttttctggagcattagttcccaaactttgattttcgttagctcctttcttttttcctaatttaaaagacgcctttgaaacaacacaacatctatttctcatgggaaccaatagttttcatccattccacttgtctctttaattgaaaattttcttattatatatctaattaggagaagatattggaaaaattgttacaatactaatcttttcaagttgttggaaaaattggtcatgtcttatggtttggtattacattatgaaattttgttctaaagcaacgggctaggagcagtatgaatatattatgtagagcagcaaattcatgacctcaagtatcaatcacatttaaacctacaactattaacacccttataaagatgagctatttatatgagagttgccccttgagttaacatttgtggtgctgttttttacttttgtcattaagaacattaattattattagcaagcaaaattaactattcagttgatcaaattgatcccctacaagtgctgattgttggtgttttaataggctgacatctgccagcttggt

SEQ ID NO: 107269 - DNA, 974 bp, Aquilegia coerulea; identical to SEQ ID NO: 106889
  Intron number 1 from transcript AcoGoldSmith_v1.007135m (l ocus AcoGoldSmith_v1.007135m.g) derived from phytozome v7. 0 (chr-ID scaffold_17; pos 4467503 to 4468476)

SEQ ID NO: 107270 - DNA, 652 bp, Aquilegia coerulea
  Intron number 1 from transcript AcoGoldSmith_v1.011738m (l ocus AcoGoldSmith_v1.011578m.g) derived from phytozome v7. 0 (chr-ID scaffold_29; pos 2161689 to 2162340)
cttttttctttttttctttctatctctcgtctaaggtattcttcttgtttttctcgcattcttctctctctttctttctcatttctttcagatctaggtttgtgttagggtttcgaatccattattattattattattattctaaatcattgataaagagatctgttgtttagatctgaatcgagatcatcgttgtgttttttaatctgatttggttttcgaagacagaaatatcatctattcatcttagatctgaggttgtattacttagatattcctcgattttatcatctattgttcttgttgatttatctatctatctacattgtatttggcttgattcgatttttttttttttttttgattaacattatatctaattaataactggtttcttttttttgctgaaaagcttacattttgttttatgcatgatgatttttttttctagatcctctattttgtttgttcaattagagcaaccaccatttgtttaggtgtcttctgtatcttttgatctgcttatattaacctaaaaacatgcattttgattgtgtttgtttctgatcctcttttcatgtttaatatatcagccttgaagatggggctgtctttcacaaaacttttcagccgcctttttgccaagaaagag

SEQ ID NO: 107271 - DNA, 674 bp, Aquilegia coerulea
  Intron number 3 from transcript AcoGoldSmith_v1.010124m (l ocus AcoGoldSmith_v1.010124m.g) derived from phytozome v7. 0 (chr-ID scaffold_17; pos 3119282 to 3119955 reverse stra nd)
gcaaaacccttgtttctcgaactcaaggaactaaggtatataatttttgcaattcattttaccctatatgttgttattattgaatcaagaaagtttgaatattaaatggatgtgtagatatagaaaaccgtaatctatagtgttaaagcttttgtatttgaatctaggttttttagaatgttatttaggattatctgcatatttcttgatttcagttatactcaattgcattgatttttgtaaatgacagtgaatagatttttgattgagacttaatttgtttatttttgtaatttctgttttgaccaaagatattaaaaaggaaaacttagtgttagaaataggtttatgaagcagatacatctgtttcactcaactacaatttttcaaatctcaaagagtctaataactggaagagattttaatttgtacttgtaagttttcagcgtcaaatacaacatacaaaaccaacaaatattctaatcactcgcgcaatagaaatgatatctgtttttgttaaaagggaattttatcttctaatgttctaatcacttgttttccgagagactgatacaagcaatgcatgcaatttgtgtacatgttatagtgatgaaattttccttactatttgtttttcagattgcttctgaagggctgaagcaccgtgtgtttga

SEQ ID NO: 107272 - DNA, 773 bp, Aquilegia coerulea
  Intron number 2 from transcript AcoGoldSmith_v1.004507m (l ocus AcoGoldSmith_v1.004507m.g) derived from phytozome v7. 0 (chr-ID scaffold_14; pos 5376006 to 5376778)
gcgtttctgcactttcaaaacttcgttctcgcattgtaagtgaaatcgatcttgttagttattattactgtctttagattcttcatttcgatttattaacgatcattatttcatcgcgagtgttttttttttcttctttctttttgacattttgagagtttgatcgctgttgaagaagtcctgtttcctttttagtttattattattattattattcatttccacaaaaatcgataatgttgaaagacatagatagtaaggcggttttgaattcttggtgcaatacaatccctaatctcaatgcacaacaatcaaatgacctttactttttatttagatctgagttgtgttagcattgaaagtgttgttttgtaaaaatatgcttttaggtaaacaaatgtagttcagttagatgttttcgttttgatagatgatagtagagattatattaaatcaaaagcaaagtaggttgagccgaggttactgacaaatacatatagaaaacaatcaatcaagaatccgggatgccggtataacaaattcctccatctagtagcaaaatattaaaaagtatactccctacttcctaactgtacaaataatttgaacccttaaacgcaaggttttacttaaaagaaaaagggcataatattagtttttatatcatttaattagatagttgctactagtatcgattatgtcatgtgattgcatatttctgttgtctacttcttattacaggctcaacagcctcatattaacacctctgtgcg

SEQ ID NO: 107273 - DNA, 574 bp, Aquilegia coerulea
  Intron number 1 from transcript AcoGoldSmith_v1.005724m (l ocus AcoGoldSmith_v1.005724m.g) derived from phytozome v7. 0 (chr-ID scaffold_14; pos 2368017 to 2368590 reverse stra nd)
aaaagtggtttacttctctaaacaaggtattttacttatttaacttcatagattcttcaatacatgctattatttcatttttatttaggggttttgtgtatactttgtattttagtgtgttttgagcttttggtttttgcaattttttttttttgttgagattgatcttacaatcacccaattttaggcttagctactacattgtgtgattaatttaaaacccttcattctctattatttttgtgatttctgagaatgttgcgtcttggggttttgggtattttctgtttaagttttgaaacaaatggtttatgtattttgaattgtgttgaagaaggtatgcctttgaatgatgaatgggaatgagcttaggtatccaattaaggatgagttttaaaaatgtttgtaatttgcatgctctaaagaattgtttgcatttatttccattaaataatggatcactagaatgtcgtacacaaaactttaagatcaatggttaaattgtgaatcatggttgatagataatcaatttgcatggtttactttcaggaaacagaggtcctcgcacaaaacc

SEQ ID NO: 107274 - DNA, 448 bp, Aquilegia coerulea
  Intron number 1 from transcript AcoGoldSmith_v1.005460m (l ocus AcoGoldSmith_v1.005460m.g) derived from phytozome v7. 0 (chr-ID scaffold_29; pos 2214991 to 2215438)
aaggttctccaaaatcaaccattgttgcattcattcaaacaattaatttgttcttaaattgaaaatataaacaagaaaatatgaaatttaaaaatctcaaattcaaacatgttaaagaaacaaatgatcgtgaaatcttcttacctttagcttagcttagctttgatttcagaagaaagaagattggtttgttttctattctaccttccagatctgtaaaaacactccttcgagaatcgataactagatgcgatcgcgagaacattacgacaataaatatgttatgtatgggcttcttaggaattgggacttaagcccggctcattaattatatcatcatcatcaacagtaaagtaaagcccatgccccatgggattactttcttgttcaattcttcctgatttcctgctcagttgatcttctttctttcttctggatcgaaagagat

SEQ ID NO: 107275 - DNA, 989 bp, Aquilegia coerulea
  Intron number 1 from transcript AcoGoldSmith_v1.009824m (l ocus AcoGoldSmith_v1.009824m.g) derived from phytozome v7. 0 (chr-ID scaffold_14; pos 3670122 to 3671110 reverse stra nd)
caaagctttgaatccaacatacttcagtaattcaggtatacttttaaatttaaaaattagttttagactttaagctttaaattttttttcttgattttattctttactgttaagtgttaaaaatttaaaaatacattttgttagttgtatcaatttaattttagaacattgttaatattttagaaaagaaaatagataattttatattgtagaaaaactggttgtttggtttgttggatatttggaattttggattgattgttaaaaatatctaatttgcataattgtcaagtgtaacaaccctgttacttgattcaacaattaaaccagaaaagaaacataaatctcaagttcattatgaacaagagcctaatcttatagttcaaagaactagagcctcaaaacttcattaattttctgaataatccttcttacaatctattatgcctttttatctctcatctcccactaactccctacccctctgatgtagtgacacttgtcactatctcctacattctatctcctacattcttattacaatgacaaatactaatatacccctactcaacatagtcatgtatgggacatgacatcaagttattgatatttgtatatgtaatttttttttaatgttatttcatatgatcaccgagggcctcattggtatgtgtcgttaagtacatataaaaataatctggggccaccaaaatctcagatacggcactgcccttgcatcactctctgctagtctctactagactcgtaattgagttgggtttttttcactttctttacttgtttgaaatgacgataataaccttaaatcatcacactttaatgacgagaatacccttttccctccaaaagtatttatcctctcttccctctttctagctaggatctatttctacctgacgagttattttttgttatggggtggtgtgtacaaagggcagggacgtagtcaaatcgagctgacgagttat

SEQ ID NO: 107276 - DNA, 901 bp, Aquilegia coerulea
  Intron number 1 from transcript AcoGoldSmith_v1.010214m (l ocus AcoGoldSmith_v1.010214m.g) derived from phytozome v7. 0 (chr-ID scaffold_38; pos 1313614 to 1314514)
gaaacctgttcacaaggttttaggcggtggaaagcgtaagttttttttttctctttctcgatatatatgtaggtttagggtttatgtggtttatggttgattgaagttttaatttaatcgattgatttgcttagaagctaagaaatgtgtatttttatagatctgatgttatagatagattgagctagtgatttgaatgaaaaagttgcttagaagttaagaaatgagtatttttgtcataattaagcttttagaagccttttagttcaattaaactctcaatttagttcaagagatctttgattttgtttatattggtttgaatttgaagtatatgtaaagagatctagctaaagattcgaacttgggttttgaaaatgcaatctgaagtttaattgtatatttattgaagggttttatgtctaactaaggtttaaattaacatgtgtaaacttgacataagaactcattaagtaattaacatttacaagtatagtcttagatatagtacaaggatctagcagagtatgtatcccgtgattgagttgatagttgagttgatagtttctaacaaccaagctaggggcaggaattctacctttgcttacatctagttctgcccaaatttatccttgcataataaaacaaattgctgaattaggagagtgtttacccaatggttgcatactactaagacgggtgctcttttgttcgagttaataagagcaggcaaagatgatcaggttgggggaactcaggttccttataaaatcatactctagtaaatatcctataatttatcattatgtaaccttgaacatgatatcagttaattgacagttgatgtgtattcattattcactggttgaggacatgctttgaattctatatgcagctgctg

SEQ ID NO: 107277 - DNA, 748 bp, Aquilegia coerulea
  Intron number 3 from transcript AcoGoldSmith_v1.002474m (l ocus AcoGoldSmith_v1.002474m.g) derived from phytozome v7. 0 (chr-ID scaffold_45; pos 247693 to 248440)
cgttcgttggtaagacgattaaattgttaaataatgtgtcatattgcgagattcttaacgattatgtcttagaacacattgtcactgattgagattcaattctcatagatggaagttaggcattgttgcattgttatgacatttatttttttaaattattgtattgatagacttctttctgaatccactgatttgtttctgcatgtgtgaacgaaatgaggtgttagatttaaatttttaattgtggtgccttttcctgaattagtttgcaggcatatctctgagggtcaataggtatagaggatgtggctaatgatgaaccaataagatgccatttcatcctagaaagaagaagatgtatctataaatacgttcataacacccaagttaaagtgtagagataacaaattgatattttgatgagcttcgaaatccaatcattctctattatgcgtcccactgaaatgagtgatgccttttgtggttatataggttatttggcactatattaatatgtagttataggaatatactgaatacatatatgccattattagtcatctcttgttattcatgttataattggatatcgatccattaatcaaatcaaaatatatcgtaatcctgtagtggtggagaccatgctgcctatatttcttgaccagtgctgacaaaccgtcaaatagttgtcaaaaaaaaaaaacaaaaaaaaactcaagtttgatctactgcaattttgaacaggtgg

SEQ ID NO: 107278 - DNA, 633 bp, Aquilegia coerulea
  Intron number 1 from transcript AcoGoldSmith_v1.016716m (l ocus AcoGoldSmith_v1.016716m.g) derived from phytozome v7. 0 (chr-ID scaffold_29; pos 1174479 to 1175111 reverse stra nd)
tcttcatctctcctctttccctctacttctcgttggttagtattcctttttttttttttttccatttattaaacacaaattgaactaatacgaatacgattattcataacaattgataaatccttacaagtagtcagtcagtagagtgattgacatgattgccgttactttgacgcgaatgttgctagtatttagttgcattattcactcattaccaaagcttactttacttataagacaatgtccatttcctaaccaatgtgatttacgacattctttgtcatcagacctcagaatcacatcccaacccctatttattattatgtggatttttttctcccctcaaatctaaaagctttgttagagtaaattactgcaatgctaaaagtaggatattgaaagcgaagagagtataaaaaacaagtgaaccaaatttttattattgaaattggtaacatgttgtgaagaacatctggagaattcttctaaaactgctgttaggcatattaacacttattacgtgttttagtattttttttataagatttaaaccaaatttacaccttatatttgatcttaatcaagctcattattttctccttttaacaggaagtgggtcagaaatacttctat

SEQ ID NO: 107279 - DNA, 474 bp, Aquilegia coerulea
  Intron number 1 from transcript AcoGoldSmith_v1.011615m (l ocus AcoGoldSmith_v1.011615m.g) derived from phytozome v7. 0 (chr-ID scaffold_14; pos 512768 to 513241 reverse strand )
aggaactcaagtacagtttcaagagaaactatcaggtcatcttcttattcatctcatctcatctcatcattctgtaactgtaatttaactagggttttaagttaattttcttaatcaaaattatttttgtcggaattccgtttttaattatgaattgctaattgttttcttaggatattcatttgtattttttatatttatcataataatttgttatttcttaaattatgttgttcttttataaatattttgatttgctacaactatgacaattctcgcacctttgacattactattgatttgcttgttttagagtatcattattacgtcgataatcagaaaaccaatactgtacattttgtgtcaaaatttatatggcacctgtattatgactgtctgcgtcttcaattatcatgttattagtttcttacatgttccctgtataacgtgcagttcctccagcgagtgtttact

SEQ ID NO: 107280 - DNA, 667 bp, Aquilegia coerulea
  Intron number 1 from transcript AcoGoldSmith_v1.006807m (l ocus AcoGoldSmith_v1.006807m.g) derived from phytozome v7. 0 (chr-ID scaffold_14; pos 5501279 to 5501945)
tcctccaacgcgaattctagggtttcagttgagaggtaatttttcagatcgaaaacaaaattttctctctgttttatttgtttttagatcgaatttcgttgtaatttgatctacatttgcttttaatcggtttaggttttagttattatatcagattgaaggtgtgttatgtttgataaacgttattctttgatttgatcttcgtttttttcttgttagaattgatcttcgaatttcatgtttgttacaaatcattgtggtttacatggttttattaatgtagatcttgtttgatctttgatttcatccttcccatcaaacatttcaatcatgtgttgttattgattaccacaccatattggttataggaatgaaatgtttatctgtttgagatataatggctattcaaaggcttctattgttttaggtgaaatggaatgcatttgttcaatcaatgttgatgttgatagtgatcactattgaatagatttgttatattggatccatgaatgtatcgtatcaaatattgtttcaatgtggtcatccctagatagatttgtccatcattcataagataatctgattttgttcgttatggccaaattgtcattcttcatcaatttttttctaattttttttcttacatgtttaccgcagataatagaag

SEQ ID NO: 107281 - DNA, 192 bp, Aquilegia coerulea
  Intron number 1 from transcript AcoGoldSmith_v1.003500m (l ocus AcoGoldSmith_v1.003500m.g) derived from phytozome v7. 0 (chr-ID scaffold_38; pos 2014586 to 2014777)
tttgccttttcttcatcattcaattcaaaaatgtattccatcttacttctagcaactttcttgtaattttttcgtgcgttattcaatctataagactgttgttgaggttgttgttgcgcaaagaatatgtctgtcgaagcacacgtatagattgattaattgagttgttttttgattgccaatgtaggcaaa

SEQ ID NO: 107282 - DNA, 642 bp, Aquilegia coerulea
  Intron number 1 from transcript AcoGoldSmith_v1.004962m (l ocus AcoGoldSmith_v1.004962m.g) derived from phytozome v7. 0 (chr-ID scaffold_33; pos 1729609 to 1730250)
aggtacagattaaagtttggtatatctgctattttttttttggtaaatactgtgatagtatactttggatttggttttataattggtggatttaatttagtatctgatggagatttttttggaatcatgatttgtttcttttttctttttctttttctatctgatggatttaatttaggatctgtgatcatattctatcaattcaatctgcttcgagatttctttgttgtatacttagaatgttaattgactttttttaacatatttgattattattattattattattactattattattattattattattattatgtaatgtatgtatagtggactccattttgatttaatgttaatgatcatcaaataaaatgatattggataagtttatattgggattttatgtgttcttgagggtagcttatgtgaaaagtggcgtttagtttttgataatgatgtttaattgtactatgcatgggagtaatgagtatgtgactggaagtccttatttcacattgatgttcaattgtttcttttaccctgtgtcttcaattgttttccttctctgtttctcataattggtctccttctttctttctttcttgaattggcctgttgcaaacagttgtgctcctaatt

SEQ ID NO: 107283 - DNA, 829 bp, Aquilegia coerulea
  Intron number 1 from transcript AcoGoldSmith_v1.020144m (l ocus AcoGoldSmith_v1.020144m.g) derived from phytozome v7. 0 (chr-ID scaffold_4; pos 6610255 to 6611083 reverse stran d)
cgtgttcacgaaaaaacaaaaaaagaaagctgagagtacgtgagtagtatgtagcgtttgttcattctgtaggatgaacacatgcatgattacacgaagaacagaagatggaatctgtaagtaactaaggtggtatatatatcagtgtttgttctcttcaaacacatgttcaaatcactgtcaatctcagtcacatattgttaacaggctagaagtgtgtctatgcatggcaatgaacactcagatgagagatgaatatatagatgatgccgcctgtaggtgttggactttacaacagtcaacattatattaattgctcgtaccgttgcagcgttgctgtaaacatgagcttttattacaactgttaccacattgacagcatttccttcattgttatggcctgtacattttttgggtcgttgctcctgcagaccgcagttgtctagcacctagacagtatattggacggagacccagatgacagtctcctccagttatgccatagcactctagtcgagttgatgggtttgtcgcacaagtcaaggaagaacttgtaggacaatgtgatggattgcttaactgttgttacacaacctatcatatcatcgtgtcgtgatatcgtgatatcgatcttttgcatgcagtgttaccaacaaatcaaccattgcagtaactagtaataactactctgcaaaattatattgagctttggtttagtttgtttgttaggcacaatatttcttctctttttgtttcaaaagttgggtttgttttctcttcaaacaaccttcaacaaaaaaaaaaaactccatggcggaaaatatcccag

SEQ ID NO: 107284 - DNA, 667 bp, Aquilegia coerulea
  Intron number 1 from transcript AcoGoldSmith_v1.007826m (l ocus AcoGoldSmith_v1.007826m.g) derived from phytozome v7. 0 (chr-ID scaffold_14; pos 754118 to 754784 reverse strand )
attgaagaaagctggtgcttctggaattagggctggtaatttgctaaatttttgtttgaaatttttagggttttttatttatttgaacttgtttagagcttatttgcttgtaattgtaggttagttaagtttgcactggttttatcaatctataattaagtaatttgaagacatttgtggaatttgagtaaatgatatgaaaatttggattgggttttgttgattgtcttgtgattttgaagagtttgatgatgttgttaagttctaattgctactgaatctagttggaattttggttttatttctgagtgttgtcgacttataccctttggtacactacccacttcctaagaagttttggtatacaattcaagggtgggatactggggcactgggctatgttgggttgcaatgcattccatgtgttttgtttttttttttgcttgaggtaacatcaatacatgtaaacaaaaaataagaatgcatcacagtccaatgtatggatttggtgataagtgacattttgttacatgtttggtacaaatttctcttcttgtgtaccatatttgcttactctgatatattactacctggatccatgctatagtgtctatggaacttattcgactgattttttgtgcaggatctggaggttattcttatttat

SEQ ID NO: 107285 - DNA, 832 bp, Aquilegia coerulea
  Intron number 2 from transcript AcoGoldSmith_v1.018393m (l ocus AcoGoldSmith_v1.018393m.g) derived from phytozome v7. 0 (chr-ID scaffold_17; pos 2232010 to 2232841)
tgagaaggacagaaattggaaagcttgtcaatttggtatgaattgtttctttcatcatttattaaacttttaatctcataagtttgtgcatttttttagtattgagatttgagggggtttagggaatcatcttgtcttgctccaaatcatggataaagcgcaatttttattcaagtttagaaattattttatggcagtaacgtgtttgttcaatttgcatcacgtataaatgttggtatcaaagcccttaaatacggtttttttttttttaattcgcctcacacatatctgctgtgttttgagaagcttagttgaagaatacaccttagttcaaacaatgtaattcatgtacttgctgaataaattcgaaaatcttctgccttatcttactgtagttgtaggatcgataacttcaaaaacaaatttccttttgttttctcagcaaatcagtatccatttcgaccctggccagttcatgatttttaatgtctgaaggcttatgaaattaataatgatttctcgtaaactttcttttcattagacataactacataagtaggccagtttctaccattaacaaggaaactaaaaatgcaatacctggtttaccaattgttcatatattatctgtgccacgtttgtgatgatacagaagttgaaaatacactagagtagtcattttctgcatttattcaggaaagatgatgcaagactgatttcttaaagaggtgtttgtgcgtgtgtgtgatttatcatccagttttactcaaactcttctctcttttcattaatttattgaattatttctaacagaggttcaagcactgaaagc

SEQ ID NO: 107286 - DNA, 993 bp, Aquilegia coerulea
  Intron number 3 from transcript AcoGoldSmith_v1.009467m (l ocus AcoGoldSmith_v1.009467m.g) derived from phytozome v7. 0 (chr-ID scaffold_14; pos 1132509 to 1133501 reverse stra nd)
gagttgtaagtattgattgaactcacatgttaatattttagttgaatagatggaaaatactgtgggatcgtaatattgataagtactagctaggacctgaaaatttttgtagaatatgtaacgacataaatctttatagttgcaaaatttaaaggtgggatcagttaatgtatggggagattgagcacttcaggattgtaccttgcactttgcaattttattttattttattttgtagctcaagcctgtaagtcatctcgacctacaattgtatgttttctgagtttttatgaattccattaccaagcaaaaacagaaataagaataaagtgttagaaaaatccattactctgattttaagcagcttcttttcatgactgctagttatttatgtagaggtcttcaattaactctatcagttctcagtgttcaatatatgcatttctaccaaaccatttgtataatttgtagttacccttttttggaagggagggggtaatgatggattttccagtgttgtaatacccggatcattggactcagaatttataactgcaattaaacagatttgttaaattaatggttcaggtttcaacaatatgtaaactagtttttatgggaaataggatctttcaatgattcgtcttttgtgggtggtggtggggcacatgagcagatcattttcacaaaatctgcccatcatgattttcttctaaaaggaaagacaagagacaaataaatggatcctgactctgtatgcttgtttatacttcatgtatttatttacacatccctcttctgtttgtgtgttggtaatgcacaactcaccgtgtctgttagcagtgtgattgttctggaacataggcaggatccctaatgattgcaatgaatttttttttttatatatatatatttcttgtaagtaatatttgattttagtaactgctctggtcggtttagtttagtttaacaatgttattctttcctgcaggc

SEQ ID NO: 107287 - DNA, 615 bp, Aquilegia coerulea
  Intron number 1 from transcript AcoGoldSmith_v1.021571m (l ocus AcoGoldSmith_v1.021571m.g) derived from phytozome v7. 0 (chr-ID scaffold_4; pos 6690535 to 6691149 reverse stran d)
tgtacatataatgtatattaactaaggaaaaaaagtttaactttatttttattaattattacttaatcaaaatccaaaatccaaaaccactcttttttcactttgttttgggtcttggcagaggttttttttttttttttttttagtttttttaactcattaaaccaaaaagattactaaaagaaaagaaaaaaaaaattcagaaaagcttagatttttcttcttccaaacaagccccagaacaaaaaaccaccttcgttacttagtttttttcttctcaaattctaaaaaaaacccaaaaaaattcataaaaattctggtttttttaaggttctttacaatttagaaagatcaaatccttgtttaagggaaaaaagtgaaaaaaaattcaactttttgggtttaagttgaaagaagcgtttcttcaaacacctaatgggtatttctatgttttgttgtggttttgaaactgtcggtttggtttggaagttttgaagatttggggtttttgttttcttctttgaggaacgtttttgattttttttttttttttttggttttgttttaaagttttggattgcatgggcgaccttgaagttttatctatacagccaa

SEQ ID NO: 107288 - DNA, 169 bp, Aquilegia coerulea
  Intron number 1 from transcript AcoGoldSmith_v1.008447m (l ocus AcoGoldSmith_v1.008447m.g) derived from phytozome v7. 0 (chr-ID scaffold_14; pos 4032374 to 4032542)
taaaaaaagtttacaataagtaccacaaactcaaggtattgtttgattttaatttcaataattgttttttcttattagataaaattatttgcttgaagaattgatttattttcatgttttttgttttagttcagactaaaaaaaattctgaatacgatcagtctcgtcg

SEQ ID NO: 107289 - DNA, 1055 bp, Aquilegia coerulea
  Intron number 1 from transcript AcoGoldSmith_v1.024449m (l ocus AcoGoldSmith_v1.024449m.g) derived from phytozome v7. 0 (chr-ID scaffold_5; pos 7832234 to 7833288)
tgggaagcctaagggtgtctgtggcactgagacaggtaaattattggttgtttttgttcatttattcttatatttcccttttcttctgattatctactgtcagagttcttacccacagaagaacccccatgaaaatacaactttagttgaaattctcggcttctaaattttgtccgttgggaagtcatgaaacacctattggctctgctgaagcctagtttcttccagcatacatagatctctctgtaaaaggagagtcagttccccttactgcaacaaatcaggactgtcagttgtcaccacatctctatcagttcagaggattcaactgtatgctgcatctctctatcaaataactttctttttaagtgaagattccatgcataccactctcacttctgatactatgctcctgcactgtgccatctttcacaaaagcaatctttcaaaggcaactttatgcactaaagaggattggacatccattaccaacattcagtttaatatgtctccccaaaagttccctgcaattcattatggtacaccaaagagaacaaccatatgactattcagttatctttttgtaaactagcctgtcatctccactcaatacttgtcaataatcactggtttccatagagtattagaagcactaaaccttcatagagcaacaattcataaggcattctgttataatcaaaaccaataggaggttcggaagaaacttagaaacctaaagtatgagtaggagaacactttcgggcacataaggaatattttttttctttttcttttttgaattggtataaacataatactctgcaatgatatgacttctgtaactgtcatttatacacgttgttcatattttacagcaaaatttgttctggatatcaaggaaaaactcaacttacacttgtcaccacttattagtaacaactttgaagtcttagacctttattctgtatcattttccaatgttcaaaagcttatacaggatcacattagattgctaaccttttcttgccccaggcctcttgaatcgctatttgtgg

SEQ ID NO: 107290 - DNA, 986 bp, Aquilegia coerulea
  Intron number 2 from transcript AcoGoldSmith_v1.019093m (l ocus AcoGoldSmith_v1.019093m.g) derived from phytozome v7. 0 (chr-ID scaffold_20; pos 3846719 to 3847704)
tttacgtcgttgaagtgcaggagtacttccatcgagtaagaaattttaatatctgaatcttgattcccattgatgacttgcttgatggtcttcttttattgttcttgttgtgcttcctttttgttttattttccaattcttcattatataaacaacattcattagttatctataattctatataggagggtgcatatgcccatgaaatggttgtctgatcctgctatctgtacagtcttttgttagatacttttgtctataattactctttagattgttatttgaaggaaactggacaatgtcaacctgtgcagagatccaaatcaaaatctgaacaattaactattttggtccccctaactttactcaaattttcagttgagtcctcaaagtttaaactgcttaatttggtcccaaatctttcaaaacgtttgcaaaatggtctcgccgttaccaagcatttaacaaagttgtctagtggcagtttactatcacacgtggtctgttaaattcaaattttaatattttgcttttgccgggttagcagagcatgtgagtggcacgcgcaacatcatattgtttaaaaatagaacacaaacccaaactgtgtaaaaatagaacccattttgtaaaaaagagaattgttaaatgcttggtaacagtgggaccattttgcaaacgtttcgaaagatttgggaccaaattgaccaatttaaactttggggactcaactgaaaatttgggcaaagttaggggaccaaaatagctaatttatcatcaaattcatgggtgaatcaagtgtataaattagtatcatgctgcgttcaggcttgttctgtaagctaccggcacagatctaaattgtgcagcataattgtatttgaaccgacctcttcgtttgaaattcgattttttccaggttttagacatatgatactgactttgtgaatggaaattttgaaggtatattaagcgaaatcaactgg

SEQ ID NO: 107291 - DNA, 670 bp, Aquilegia coerulea
  Intron number 1 from transcript AcoGoldSmith_v1.002892m (l ocus AcoGoldSmith_v1.002892m.g) derived from phytozome v7. 0 (chr-ID scaffold_23; pos 62621 to 63290)
gattctttttttcttggattggatagctctactcagtgagtccccacacttttttttttttttaaactgtcttctgttatctttagtgagaatttgggtgattgagttcttttggtttgatcaattttcaatgaagatgtttaatcagaattatcatattttttttattatcatattttgaaagtttacccagttttttttttcccctgatttgttctcttttgaagagatagtagggttctcttgattcttatatttagagtggtaatcaaaatttttacttcgttagaaatttagtgtagactcacaccctgtaattgttcctcaagtatatattttgatttaatgagacaatgatctttttttttttttttggaaataagaatgaagcaatgcatctgctaaagataaattgttgttccagctttatatgttaatgttattttctatttaggtgtaacacattgagatggatgacatccctttatgaagcatattcaaaccacttggggggctttcgctctttagaataataggctctatattgtagttctgtcatcagtataaagtttctttcttttaatgtctgccgggttagaagcattagtaaattatttgtggttttggttatttaggtccttaaaggcaactgttttggactcaaatctga

SEQ ID NO: 107292 - DNA, 738 bp, Aquilegia coerulea
  Intron number 3 from transcript AcoGoldSmith_v1.010905m (l ocus AcoGoldSmith_v1.010905m.g) derived from phytozome v7. 0 (chr-ID scaffold_17; pos 3638343 to 3639080 reverse stra nd)
ttgattttgaggtatgtgttactattaaatgtataaggctaaagtaatgtggaactagtctatagtgattgcattgggcatttgtaattctcattgacatgttgtgtgagaataagatgagtaaacatgatgatggttgtggagaggaaattattcaccggctttttaagagatcatgttctctcacttgtcgagtctcttttgtgggaacaggattactccaaaattagaggtctcaatttttgggatctgatgtttgcagtgtgataatgtaattttagcttaatctcttgtatctttcttgtttatagtgtgataatgtctcactggtcagtcacattgcattatcaatgtaacgtatctgccttgccaatctagaaaaagaaaagcctatgagtacaaaatcatctttaaattttctcttgatttatcaaaaataaactcgatacattattcttttattcccataatctcttctctagtattgttttggctaatattcttttaaacatgcaaattttgattttttgcatttgtgtacgaagtagaatgcacaattcaaggtatgtttagatgttccaagatcgtgttgaaggatatcgaatcatttgagtggtgcatttcattcagagctttcctagcatttcatcatactataacaaagaaacattaaatttgaagagaactgttcatactgagttactgacgtttgtgactttcaaacttccagggtatact

SEQ ID NO: 107293 - DNA, 738 bp, Aquilegia coerulea
  Intron number 1 from transcript AcoGoldSmith_v1.024827m (l ocus AcoGoldSmith_v1.024827m.g) derived from phytozome v7. 0 (chr-ID scaffold_17; pos 4169245 to 4169982)
gctgattgaagtctgggtaaaaaagaaaatcaaaggtatgttttgacaaaatttggatgaacattttgtgttgtttgcttagttagaacttgggaaatgtactggtttccatatccggctgttccttactcgatcaatttagcaaagaatttctttttttatgaacatctacactcaactacagccttaaatggatgctgggagaacaggagaaaatttgttggagcaacacatttgtataatgtctattctggcttggacatacttagacatctgattatctgacaccaagattatatagtctttttataatcatatcaaactagtgtggtgagtagatcgagcacaacaccatctatggtaatccaacagtggccaatctagaatgttgtggagagagtaaaagaagtagtcataggctatttgtagtattgccagtttggttgatttctgtgccttttgaagtaaattttttgttatttgcattaataattttttttttgtgtgtaaatataaaggataacgagactggcaagatattttgataatcaatacgttttcgttacgagttctgcagcgaattctaaatcttgctcagcttgcatgactctgtggctctgtgctcatgaatgtagttagaatttaccttgttaggttgtaggtcttggacatgttttatgtctgtgctctggtgcagatttcgaagctgacatgtctcgtgtgtttttgttgcagagg

SEQ ID NO: 107294 - DNA, 625 bp, Aquilegia coerulea
  Intron number 6 from transcript AcoGoldSmith_v1.001422m (l ocus AcoGoldSmith_v1.001422m.g) derived from phytozome v7. 0 (chr-ID scaffold_65; pos 1374598 to 1375222 reverse stra nd)
gattctctgtcctctctatctcagctgatagacatgtaagtttgtaacatctgtttaactttgatgtaatgatgtctggtattgaatttgacattttggaggctttacagacttgtgccttcaggcttgccttaatgcaaccttacgaacaactctttgaggcttcccctacccttctcaccacccattcccagaagttatgacttttacgaagttaaaataacaggcactttgtgttatatcatccagacatcctataatcttctattgttgtttatttctttctttttgctgtatttttgtcccttggactgaatagtcaattaattttatagacgagtggagacttatacctttttcttaaaagattgtctttcgtctagtggttgatagaataaactgttgtgaaaagatgtttgaagcttggaatcttatacaagtatcatttcattagagaaataccagattcttcatcacttttacaagtttggtaaatttgtaagggaagcgtattgattttgggaagcatattcatttgtgttcactatgagtgtttcagctgttgatgttggtcccttatcttggtgcagggatttgtctgctaacaatttgagtggacaattgc

SEQ ID NO: 107295 - DNA, 600 bp, Aquilegia coerulea
  Intron number 2 from transcript AcoGoldSmith_v1.011476m (l ocus AcoGoldSmith_v1.011476m.g) derived from phytozome v7. 0 (chr-ID scaffold_4; pos 9305811 to 9306410 reverse stran d)
attcgccaagtggacctggttttttatttccgaaggtatagaatgatactaattgtatctttcattttaaatatatagtttctgtccatgcataatcaattagtttagacataagggtggaaatcttaatttcaatagatgctgttaagcaaaagaaggagggagcaaaacctttcctactattttgaggagtttgtgtgtcttaatcatgtatcaatttcctgtgggaagaggcaaattgacgcagtctagcaagtaggttgaaaaggcaattctcatggttgatcaccgtttcatgaggatgtacgattgaaatctttcctttatgaatttgttatcgtcaatgcagaagaaaaaattataattttgtgagagaggaggctgtatctgtgttttgttttattttatttttattcttatattttttggagaggggtgaaatttagaatataatagttttatttcaactgaatcaccagcagtagggcaaactcactaagtcgtgctgagttaattttgttatcgacgaaagaaaaaagttcgaaaaatactttcgtaatcatgactatactattattacattgcagggaggttgggaga

SEQ ID NO: 107296 - DNA, 784 bp, Aquilegia coerulea
  Intron number 1 from transcript AcoGoldSmith_v1.011476m (l ocus AcoGoldSmith_v1.011476m.g) derived from phytozome v7. 0 (chr-ID scaffold_4; pos 9306459 to 9307242 reverse stran d)
gttgtcgccttgtcgctgggtaaatttaatctatctcattatatcatttttaataattgatctgattattgtgatctgatctgattatgttttttaataatatattttaatttggtttgaaaatgtcaattgcgtaatatagtctatatagactaggcattatagaatataacaatgctattatttttctattgcaaaatgatctgatccattcttatcttaaattttccaaacttttatatgtttgatttcacaatgtgtttagactttgtatagaaaatttgtgaatattagatcttcaagttgtgatcatcgatccaaccaatatccccattggattgtttgaggttaagaatccaaattttttcttacagtatcactttcctgctttcctgtaaatttgaaactcaatgtaccaaaatttgcgagggaaaagatatttttcatgtagattgccctatgttttatatgattgacggtgttgacaacacttacctaacctttgtcaatattttgttttcaacactcatggacatgcccttatctcaggggacatacttgtgttttggagtttggtttcattgtttgttttatagctcttgttgttttttgtttttctctgtgctttgggattgggatatcttattgtattatccttttatacttgcattttgaaaatttaaactggaactaaagattgaaaatgttacatgtataaattactatctcttaccttttgctccgattcttaacaggtgtattccattcaagtatatagattctg

SEQ ID NO: 107297 - DNA, 862 bp, Aquilegia coerulea
  Intron number 1 from transcript AcoGoldSmith_v1.004404m (l ocus AcoGoldSmith_v1.004404m.g) derived from phytozome v7. 0 (chr-ID scaffold_20; pos 265990 to 266851)
gatcattcaattctcttccaacaactacctctcaggtactcccttcttctgctgtacatttgtttgtgttttagtatttattacttcaattctcacataacatacccatttgtatatgttgcttcatttggtatgattttgttacttctactctcaattacccaatctttatttattaagattaatgatattgatagaaagctaaagtagctcaattttgaataatggtgtaatttgattaagtgaaatggtttagttcataaatactgaatacatttgatgcaatattattttcgggtttttcagattgtggtattgatcttgcatttgtgataaagcttgtttaatttgatgttgggcaatctgactaagatttggaatggatgtaattttttgtttgggggtttataatcttttgagtggtctaaatattgggtttggatgcaattaaggagatgatctggattgtgtcttgcatatctttagcgcaatttgcctaattttgactggattacgaagtgggaagtcctcaataggtacaattgtacaagttcaaacaagttagaccaaaatacatggttgaatttgaatttgttgaattaagatcagtctgagatgtggttttgaaatgaagagcaagaaaagttgtatatattgtgttcttcgatgcatttatttaaactgtaatagttttatgttcatgttttcccacgtacggattatgatcctttaatctgtagtacagtatatcatcttcaatgattgtaagaaatatcgctataatttgctcatgatcctgtattatatttttttcatgattggtacaggctgactggccagaagagagaatcacattggaaac

SEQ ID NO: 107298 - DNA, 979 bp, Aquilegia coerulea
  Intron number 1 from transcript AcoGoldSmith_v1.003909m (l ocus AcoGoldSmith_v1.003909m.g) derived from phytozome v7. 0 (chr-ID scaffold_4; pos 8741023 to 8742001)
ctgagtttattgaagctaagaacttgttgaattaggtatggtttttttactcctttttttttcaattgatggggttgtttgatttcttgttcattatgtaatgggatttcttttccattgtttgtgttcacttctttgatttgtttactgtgatttcaatttttgatatatgtataagggggtgagaggggatggggttaaacacatttcatttggcaaactttctttagatctttgaattcacattaaacaatgtaaattgagagacaagaacatctaaaagaatctttagtaatgtcgaactgaaaatgtatagtcaataagaagccccctttcatctgtaacagtagctttaatcgtctgacacataatgtggtggcaaagattccaatttcagctttaacatggcacccaagagctgcattgcgatgtttagtcaataagaattgaagccccctttcatctgtaacagtatgaaaatatatctcgctgggaaatttccatacttgaaattagctgatgactacgttgaaagtctgcagaagggatatatttgttttcctgtattagctgcttcaatttatggtgaattgatcggttttgtgttgcgctataataaacaaagatgcatacagaatgagctgagaaatattctaatatgaaatgtatacacattgacttctcacaagggttctttcttattcatttgttcaaatattttttcctacaatatcaaaactggttatatggttgcccatgtgatatgctttatctctatgatttcatatatatacagctttttctctgatgttattcctgaaatacacatatcattgtctgtatcagctctctgattaaatttttgctatcaataatgatgatatttgtttaatttaaattttctgctatgaatttctgaaaaacgtttatgtttcttattacagtgaacaaaaacagcaagggtgtgcatttgtattat

SEQ ID NO: 107299 - DNA, 494 bp, Aquilegia coerulea
  Intron number 1 from transcript AcoGoldSmith_v1.005817m (l ocus AcoGoldSmith_v1.005817m.g) derived from phytozome v7. 0 (chr-ID scaffold_38; pos 1203803 to 1204296)
cttgaagaggtaacattattttttccttccccctctttattagtttcattcccttgtcaaataatacttttgattcagaataagaaaatggcgatttagtgttcaaggaaactttttctttttgttcttgttcttctacttcagtacttctgttccaacaatttttttttttgggtggggggtaaaattttgtaccacaaaaaaaaataatgaatgaaataaaaaaacaattttctttgaagtggttgctgagtgattgggatctgaagaattgaatcttctgaactaattccagcaactggtggccttcctatttatacctacttcttcaggcatttcattaaattcaagaaacatctattctttttcttttatgtttcacttattattgttcttcacatcacttcagtttgtctttctctttatcatattctcttgctctatttcccttatctttaggttgatagaagatacaagcagtactgtaatcaaat

SEQ ID NO: 107300 - DNA, 731 bp, Aquilegia coerulea
  Intron number 2 from transcript AcoGoldSmith_v1.018683m (l ocus AcoGoldSmith_v1.018683m.g) derived from phytozome v7. 0 (chr-ID scaffold_4; pos 4510364 to 4511094)
gccaacttgtaagactttcttaaaactcatcttctcttcctcattttatgatcttaaataggcttgatgcaataagtttgaatgtaaagaaaaaacaaaaatattaacattttatgattattgtgaatgttaaatttgtggttgatgattagtgtatttacattgagagatcacctgcattttgacaaaaccattgcgaaagtagtacatttgcagatctgagtccatttcctgctcgtgtgtgtctaatcccttctatctagtcaccctcttatgtagtatgttttaacagatttgagttcaatcctaaaaccttattacactaaatttatattcctgataaaattggggaatgggaagcggtcggtccgatcttactacaaatatttgaaatcaaacagtttattgatggaaatgtaactgctttgcatatgccatatgcccatatgcccatatgcccatattgtaatggaaggcttacattgtaattgttgtaatgaataactaaaccatagattaagaagctatctagttactgaaatatacgtgggagaactacagaatatgcagatttgttgcagtaaccttaaatatagacccagtcacccagcgttacataagcaatgtgtaatcgcgaatttataatgtgatgccttttgctgcttgaaaatctaactcgaagttttcactatgcagggtatcccaaagaaattcattactaaacacgggaa

SEQ ID NO: 107301 - DNA, 527 bp, Aquilegia coerulea
  Intron number 1 from transcript AcoGoldSmith_v1.015258m (l ocus AcoGoldSmith_v1.015258m.g) derived from phytozome v7. 0 (chr-ID scaffold_4; pos 6015398 to 6015924 reverse stran d)
taattgcatatccactggtttccacactcgcaaaggtacgttttattcattatattttatttgtattttggatcttctttgtactatgtagtaacaaaatcgtgagtttttctattaattgccgaatcccattgcgcttaaattacataagacttttaatggattaatttcaggatcataatattaatatgcatttaattaatgaatttacaaagaggtttttaaagaggtatgttttgattatgagtttgggaatggaagtgattgattagggaggaaaaaaaatataaaataagagggcaatttatacttgcgattgggcattacccattggccaatgtaattttctagtcaatgttcaggggagtttattttgttagtttaatcaccaaatgagattgaaaagatatagacttgcaaaaatgaatgaaatatatcaaatgatgtgcggttatgtatatttagatttttttaatgaaatataatgtgggtttgtaacgtgtattggcatttttgtgcaggtcaat

SEQ ID NO: 107302 - DNA, 434 bp, Aquilegia coerulea
  Intron number 1 from transcript AcoGoldSmith_v1.003558m (l ocus AcoGoldSmith_v1.003558m.g) derived from phytozome v7. 0 (chr-ID scaffold_66; pos 358268 to 358701 reverse strand )
tcttctctgctcttctgaacacctcgtttaatcgggtgagtaatctctccaacagtttctttaattttattcttatcttcgtttttcgatctaatcgattcttattataattttttttttacaattttttcgattttttttttgatatttttagtgaagtagattgttttctgttgtgttcttcgtatatatatatattctttaattaatgaagaagttttgtttattaagtttgatacagttgttattgtttttgaattataggttttctacaatttcttcaggtttgattgatttagctgaaaaatgtttgaagttgaaatgatgaatttgttgttgttaacttgttattagggttttagcaattaattgttgaacaagttttcatgaattaaaacatgattattttcaattgttggatttataggttaaat

SEQ ID NO: 107303 - DNA, 964 bp, Aquilegia coerulea
  Intron number 1 from transcript AcoGoldSmith_v1.008960m (l ocus AcoGoldSmith_v1.008960m.g) derived from phytozome v7. 0 (chr-ID scaffold_5; pos 5465234 to 5466197 reverse stran d)
ccggaatcttatacacagagggtatgttgttttttagttgttgtttcaatggtagattgtagatactcactacactactcactagtatcatgaagttttctgtaatgttgatatttgtctcaaaatgtccacaaacattgcctaaaaaaagcctaaccttatcttgtacttgagctagagcatttggactatttcatgccctaatagagaaactaggattcccttttcatgttagatataaaatcttacattttactttatacgcatgtttgcattttaagtttgtaaatactgacaaactgttttctttcaaataacctgaaataattgaattgaaaaagattaaaattagtaagtagacatctattatacagcttatatatatatagagtgctatattaaataaaataatatcaaaatttataacaaggcatcttgattcttgagtaaaaacagtatagaagtgttttaccccaaaaggtgcaagaaattatagaaatatatatatatttgcaggattccatatcttttgagaagtagtagaagttccagtatgatgataagtttgaaaagaagagtcatttagctcttgactcctttctatgtgcataggaactcccttacctttttacttttgcagcctttagttgattgactacactcaacatatatattgactatatatgaactttaaaaaaggtttgtgtgatttttaataagtaatagaaaataattgaagcatgctaccatatcagaaagaagttagcctggagtcaaagtttaaaatcgcaccagaactccagaagtaataatatgatatgtgatggtggttttactcaataattggttcatcttttcatgtttggttcaccatagcatttttatatcttcatgtgtttatacattgttgattttggtttgttgtgtagggtgaccaagcttctatagtaggtggtgctataga

SEQ ID NO: 107304 - DNA, 522 bp, Aquilegia coerulea
  Intron number 1 from transcript AcoGoldSmith_v1.019470m (l ocus AcoGoldSmith_v1.019470m.g) derived from phytozome v7. 0 (chr-ID scaffold_17; pos 1335682 to 1336203 reverse stra nd)
ctgatctcattgctcgggtattcttcactcacttgctttcttttgttattattgcttttctttagttcaatttcttctggtaatcgttattatgctgatcaaccttgttatatcgagctaattatgtataatttgtttcaattttacaaaattaataaagtcacttaagacctaaaaatggtgttagcttcaggttccgaagcgagcccagaagtagaactttttaatttatcaactattacagcttaaatcatatatatcaatggtgttgtcccaagtaacaaacccgagaagtgaaactaaaatttaacttttgactggttataaagcattgtgggtgaaaaacctggctacaaccatatagattcagtatccataaaattctagctatgacgatgatggcaatatgtagtacttggcatgataattatattcttgatggaaaatgtgcaactctgtaatcactattgattcgaaaaccagattataggaaacattttgacgtgtttgttttgtggcagg

SEQ ID NO: 107305 - DNA, 710 bp, Aquilegia coerulea
  Intron number 1 from transcript AcoGoldSmith_v1.018340m (l ocus AcoGoldSmith_v1.018340m.g) derived from phytozome v7. 0 (chr-ID scaffold_53; pos 545024 to 545733)
ttcccccaagctcttattgtgtgcagcagtaataggtgttgggttttttggtaaagggaagtttttctttcaggaacgtacgtacgtagttagggcgtacgtacgtcctgtatgacagataactttctcgagatggaacgtacgtacgtagttaaggcgtacgtacgtcctcattgtgtttgctgcatatgggcctgtttaagcccattttcgtgtttgattgtaaggctatgttataaagccaattagaagttggaaaacctaatcgggaggtgagagagattgtgagaagccattagagagtttgagagaacttttgtgaggaagaacactttggtttcttcgtgagggcttgtgatcgtctccatccaagtgtgagagagagtttgtatcctcaatttgtgattgtctctttgagagatttggtgaggatttgagaggggaggaaacctagggtttatccatttgtttgagagctttgtactatcttctccaatagtaaaagttctatttgtttgtccgtggacgtaggcaatattagccgaaccacgttattttggtgtctctctctattatttgttgttgctaagtaggtttacttctttactacttgctttgtcatctttcatacactatttcaatcttgggtattggtgcataagtttccgctgcgcacaacaataggcgtcttcaccaggcttgacaatttt

SEQ ID NO: 107306 - DNA, 746 bp, Aquilegia coerulea
  Intron number 1 from transcript AcoGoldSmith_v1.004014m (l ocus AcoGoldSmith_v1.004014m.g) derived from phytozome v7. 0 (chr-ID scaffold_42; pos 1242740 to 1243485)
tttttgtactcactggtaatttttgttggaatttagtaaagagtaattatgtttgttgagtacacatgaaacttttgctacacttgaaggactgacataagaaatgtccatcgtcccccctttattgcactgaaaattacagttagaaacagcatagtattgtttcgcagataataacattatcaatatgtggcttaaggtgtttaaagtatgttagttgttatgttgcgtgcacttgttggtcttttgtttaatgtaatggagatcccccttaactaggaaactcactaaggaggactgacagtgagcattcaaatttaataatggtctttccgaaacctggcacagacaaaaaaggggttccctcatgccccaggaagctacactttctaactagatgaatgtaaagctttctattttaggccattgttaaactgtatgtaaaatactgccgtattatatgggtaaaatcgaagagtgttttacatttgttgttagttgtcttatattttaatttttccctggtgttgtttgatttactatctgatgccaagtgaccaaaattttctccaggaccagcacattgtctttgtcaagacttttctttcatgcgaatttcgttttgaaagttggcttttctcggcacctttacttttccgtaaagccaattttagcatcttatagaagacttttggattgtcaggttttgttaaaacttgaagcattctttgacagacccagtcgcc

SEQ ID NO: 107307 - DNA, 716 bp, Aquilegia coerulea
  Intron number 1 from transcript AcoGoldSmith_v1.020398m (l ocus AcoGoldSmith_v1.020398m.g) derived from phytozome v7. 0 (chr-ID scaffold_14; pos 4393182 to 4393897)
gttagttcagttattgcactttttttttttatccctttagtcatatgttctctgattagctctgtacaaaggttgtaggtatgtaataatatataggcagaacacaagatacacgaagccttgttcttagattgcggttggaggaggaaaaggggaaggtcctctttctttcaaagtagattgtatgcttctaaaagttgccgttttggttgatgcacttttagggggagcgtagtaagagcatctccagcagcgttaggcgtttaggtcatacatgcaccctaacctaggacgctcactaggctatcgtacctggaggctctaatattggtccctcaccatcttacgaattactatgtcaaattatatatctcatactaattttatgccgtgccgtgtctgggacagtttaggaaatttgtttgacttcaggtatttccagaaactttcatgtttttacacaaattaaaaaagaaaagaagaagaaacctaaaaaaaatgttaaattgaagtagctactaactcagcattctggccaatatattagttcagatcagtttataaggagatcaatctattttgttatttcaatttgtgaaccatagggactgtgaagtgctggcaataaccaagtgttgtatttatctttcagctcctcagaataccacatcaatttggaaggaggcatatacaactgagaaaaactcttcgttgcc

SEQ ID NO: 107308 - DNA, 1062 bp, Aquilegia coerulea
  Intron number 1 from transcript AcoGoldSmith_v1.009990m (l ocus AcoGoldSmith_v1.009984m.g) derived from phytozome v7. 0 (chr-ID scaffold_17; pos 2485677 to 2486738)
ttgcttttttatagagtgaagatttcaagcgaaaggtatctaaaagttagattttgaaaaattgggttacatatgaatttggtctttagatctgctgttttctgttttgattcattcagtgagaaagttctatgagtgatctttgattctttgaatctttgatttcgatttctttttctttttcgtgattatttgttgtttttctttctgttctcacttgtcaatataagctttttatgattttttttttttttaaggtatagataaggtttgcttctgttgtgttgaaatgcataaatatagaacttatagtctaaaatgaaatttcaaaagttcttaataccatttagatttaaggtttcaataaacagatgttttacttattggatatgtcttataattgtacacacattactacattagtatgccaaaaattgcagaaatcccattcaagtcgtcataacaaaaaacaaaaaatcagaatttgatggagaaagaaaaaaaaaaaaaaaaaaaaaaaaaagaactttatcaataacttgtaagattacacattgtatacagtacctcggttcacattcaatatttctatttaagtccatgggaaacacttcctagtacctatctttgaaatcccgatcaattggtttgggtttggactttggatcagaggaatctcatattgagtttgacttagataaccccaatctgaagctacctaggtttcatgctcgcatctctagctacttttgtttaacctctctaatttgtctttctttctttgcaaaagatagtttttggcaatagtaaatggtaaatatgattaacttttttctcatatgtcatccctcaacttttctttctaatgcaaccctgattcttctactgatgttttctgatattgaattcctggagttgatgcccttgttttaatgtgtgtgcgcctatttattattattctttgttagccttgggaaaagaagttagaaggttctggtatttattcgttttgttctatttcttgcagtaatagaagcaaataatattttcttgagcttagcc

SEQ ID NO: 107309 - DNA, 775 bp, Aquilegia coerulea
  Intron number 1 from transcript AcoGoldSmith_v1.016864m (l ocus AcoGoldSmith_v1.016864m.g) derived from phytozome v7. 0 (chr-ID scaffold_17; pos 4677826 to 4678600 reverse stra nd)
cgtccaaggtatatgattttcttgctgtgtttgtcatatttggaataagcactatgtagtatctacttcaccaccttactgaattgttctgtgtcaattctcattaataaatatagggaaatcgggtgaaaacagtgtttaagtaatactacggtagagataactagagataacatggacatatagagttaggaactcagaacaaagtgttaaaacccagacgaccaactgagctttcgtaaatgttacattttaagctgatcactcagtagtcagtttcaaataaataagcacacaatttaatgcttgaacatcctcattttcctatttaatacttttgtggagcatgagagcttgtgtagtagtctgtaatcacaccaacatttcccatatagtatacttttgtgcacatgagagcttgtgtagtcccaagtagatgtataatattctgttaaatatggaattgcatcacaccaacatttcccatataatgtttttagagccaaatcaagttttcttcaagtgaagagaggagtagctctggcagaacttagaaaagtagagtttattttatattatgatttatgtttcccttcattcgttccatcaattttttgtaatggaattataatttgctgagatacttgagaaattctgtcagctttccttcaaaatgtatttgatttgctagattcattcgagtctgctacggttatttcgttctgacttactgggttttcatattttatttggtttataggtgaaacttgaagtg

SEQ ID NO: 107310 - DNA, 575 bp, Aquilegia coerulea
  Intron number 1 from transcript AcoGoldSmith_v1.002925m (l ocus AcoGoldSmith_v1.002925m.g) derived from phytozome v7. 0 (chr-ID scaffold_17; pos 1416585 to 1417159 reverse stra nd)
tgcagatcttcgaaataaagcacaagtgattaaaggtatgtgtgtgtgcatttctttcattgttttaatgtttttcatttgtttgactttactacaataattaataaacatttcatctgccaaagaaatttttaagattttatcataactattgacacatcactatttatcatttgagttgttgatatgagttattttcgtattcgagttggtacttggtacactatctcaatttaagaaactctatggttattatggttgctattattaatatataaaccgttatcggaacttgggaaactaatcttctttgaatagtttctgagagctaaggagttagtttgtctaaagcttgaaacctataatatatcgagaaatgaatgcaattgaccgttcaattcaattgtacataaaataaatataatttttttgtataaattcattgcatgaccaatgtttttgttccaactttcgcagaaaagatcatttttttttctctaaaattaagtccagtgttcatggaaattattctattatattattgatctttcaagtcatgttttccactatgcagt

SEQ ID NO: 107311 - DNA, 649 bp, Aquilegia coerulea
  Intron number 1 from transcript AcoGoldSmith_v1.017484m (l ocus AcoGoldSmith_v1.017484m.g) derived from phytozome v7. 0 (chr-ID scaffold_94; pos 21047 to 21695)
gtggcagcagagtttcgtttcaaattggggaagaaattaattttagggcttcataacagcggaattttgattagatctcaaccgtcagattagatcgatctgagccagtcatctcctcaggggtaacataggtatatatcaaagtgttttgttttaattttgccacgcagatgccacgtagattttaagtgggccctgtagacggtggtctaacagcaaagttaacgagctggggtaagcttaaagaataaaaaacttctggggttagtgcaaattggaactatttttgctggggttttgaccaattcgccctatattttataatacaatctaaattataaccagcaaagggtgcataatttgactaggactaatatttagtatgactaggattaatagtatgactaggattaatagtatgattaggattaaaaccccaatcttcttccccgtccccatctttcttaatcttcttccccgtccccatctttctcaatcttcttccccgtccggtcgtccccatctttctcttcctctgtttttcaagtgttgctttaattgctctcatcaactgtaggttttctttctctctaattaaactagaattcaaaacccaaattcttcttctgccatgtttagataattgcaa

SEQ ID NO: 107312 - DNA, 456 bp, Aquilegia coerulea
  Intron number 2 from transcript AcoGoldSmith_v1.017484m (l ocus AcoGoldSmith_v1.017484m.g) derived from phytozome v7. 0 (chr-ID scaffold_94; pos 21788 to 22243)
aatccaatcaacactgttttggtaagtatttcataaaaacattgtttagttttctgatattatttgtgagattttatttttgatttttataataaagttggatttaaggtgtttaataactattcttcaactactgtaagatttaaatgtgtgctttgtttaggaaaaaaattaaaaatttgggaaatctagggttatctgagagtttaagattacagaaatctaggagctggttatattagttttcaaacttgtgtaacatcaaatatggggttttttgtgtgtattagtgtagttatttgaaagaataccctatttgtttaagttcaggcatgctattaggggttctttgatgttaggctagagtattactggtttgttgttattcttttgttttgatctctagatgtgtgtggttcaatagcttatctgaattgttatttctttttgtaccag

SEQ ID NO: 107313 - DNA, 589 bp, Aquilegia coerulea
  Intron number 1 from transcript AcoGoldSmith_v1.009554m (l ocus AcoGoldSmith_v1.009554m.g) derived from phytozome v7. 0 (chr-ID scaffold_4; pos 4950366 to 4950954 reverse stran d)
caggaaaggtatgtattacgtaaatcttaaaaaatggtagctaagaaaattaaaattactgtatatatttgatataatgtgctacaatgcagtatgattattgaaacatgccgataatttgtgtataatttgaaattaacacttaaatgttctaaaaaaaaacacataggaaagagaaacaagtttacaataagctattatgtggatcataaaatatttacaatacttacttgaagcatgcaactcatttatgttctaaactcaaaatttgcagactataagactgaaactttttccatattattctagaactgtagtacatgtttctgtcatgacccttagatttccaaaagaaaagtaacagaaacttcataatatttcaaaatggtctcgcagtattctcataaaggcccaaaaagtgtgtatatgttaacattccaagactggatggcctaagggagggtagagatccaagagcatcctcctttgggaaaaaaggtggaggaaagatatgtatagcagtatagcactataacctagattaaactaagtaaactttggttgaatttttttcaggtagagctcattg

SEQ ID NO: 107314 - DNA, 392 bp, Aquilegia coerulea
  Intron number 1 from transcript AcoGoldSmith_v1.001580m (l ocus AcoGoldSmith_v1.001580m.g) derived from phytozome v7. 0 (chr-ID scaffold_53; pos 268564 to 268955 reverse strand )
ttttcgatattcttcttcttcttcttcttcaactggtgcgttgtttcaactttcaatctcaaaactctgtgttttttttttaaattgttcttttggataattactttataatggtgaatttgattgatttagtcaggaaatgtgttttttttttttactttgttctttgcttgattgtgaagtagagtagcaatttctagggttatctttatgatctgaattgatttttacttactttttatttgtaaatgtggttggattatgacttgttacttcttgattttggttaattgaataatgtgtgaagaaatgtacacatttaattgttttaatttgtgattctgtttttctttgtaggtttgtgtgtgttagggaagaagttgttttacttt

SEQ ID NO: 107315 - DNA, 498 bp, Aquilegia coerulea
  Intron number 2 from transcript AcoGoldSmith_v1.008012m (l ocus AcoGoldSmith_v1.008012m.g) derived from phytozome v7. 0 (chr-ID scaffold_20; pos 1365768 to 1366265)
ggttgtaattcagaaggtaatgtttgattgtttgttggctctgtacttctgtttcattacacatcattcagtatattactatctttgttttataaacttagtcaattacttccttttctttcgtagttaattagttatcaaacctaggggtttacaaacctaaaaaaaagaccagagaattgactcctattacatttctgcccaagctatagaaaggtttaaatatcttattgatttgtttttcggtcaaatgttatagaaatgttggtcactacaataggtgaactactttaattaatgaatatctgttcttgcctgagcaatgtaaggatagctgccactgccatcatcgaatttgatttctgcactaccagtgtagtatgtcacacactaacacctataagtactatgaaataaaatgtttattacatgttcttatcttcacattatttgattatatttttattccatgctttcaggtctctgtaaattctaaaa

SEQ ID NO: 107316 - DNA, 512 bp, Aquilegia coerulea
  Intron number 3 from transcript AcoGoldSmith_v1.022709m (l ocus AcoGoldSmith_v1.022709m.g) derived from phytozome v7. 0 (chr-ID scaffold_4; pos 1979401 to 1979912)
aggtaaattcctttcttctttttagaactttaaaaaagtttatactatagaaaatacatgccattatgtgccttagaagatgcctagtaaattggcttcaatattggtaattttaggtataaacacatttcctttccaaaatggcaacaatggtacttgttctgtcactccaaattgacattcttagagctctttttgtgaccttcttttccaaaacacatttgctaaagataaataaagtaagaactgtatcattgagacatagactaccaaacacatgtatttgcctgcactataaaaattcttgattaatcctgtttcacttcagtttacccgattaatgacaagtccaggacttatttaatgagttctagaaacattttattcactgatgagcaattgagcatgaacatgataaggtttaataaatcaaaactatgtcactattgttgtcgttactcaacatcatttaataatctgtggataatgaatttcagattattgacaagccc

SEQ ID NO: 107317 - DNA, 510 bp, Aquilegia coerulea
  Intron number 1 from transcript AcoGoldSmith_v1.017106m (l ocus AcoGoldSmith_v1.017106m.g) derived from phytozome v7. 0 (chr-ID scaffold_4; pos 8353481 to 8353990 reverse stran d)
ttctggcaaggacttcagcttgggagattttctaagtaagttctcaaagcattatttgatttgaagaaattgctaaatttgattagttcttctatgtttagaactttttttttactaacctgtgatcactactttgtttcttcttttaaggtgatcatgagatgaagttataaaactagttgaacattagcaaatttctaagaatggtcataaaaaatctataacatttcaggaaattgcatattaaagtataaaggattctacccaaatctttttaaaaagtatattattcctagctcatcaatgaagaaattttgttagctttattttctttttgcctcttgtgatcatattaaaggtccaattggctcaggcagctaatttgttcactgggggattttgtaagtgaacaaatttgtttttgtgtgaccaattaaatttctcgcaatttacatatttttgttcattgatgcagtgtttaatacagatagcaaccattctgttgttcaa

SEQ ID NO: 107318 - DNA, 502 bp, Aquilegia coerulea
  Intron number 2 from transcript AcoGoldSmith_v1.003456m (l ocus AcoGoldSmith_v1.003456m.g) derived from phytozome v7. 0 (chr-ID scaffold_33; pos 1360990 to 1361491)
aaggtttgatttggttataacattttttttttttttttttttttgatttcggcattttattggtgtatgtgtataatcattttggactcattgaggtgatcaagtcatgttgatttgccaagtaatttgagtcattgttgggtggtaggagacgaagcgttggtttattttatagtatttatgttttttcattgctgttagaaatggatgtttaagcgttattatcattatcactgatgcaatcgaattttcttgaaggggtcttatatatctttgttttttgttgtttcgttctttctcattactcactattttcaatttttgtgtactatattcattagttttgtagaatatgcgagaattagcttagccattggtgaataggtggcgttattagagtttggaagagaatctattgagaaatgcatatttttatttgttttttctttctttctggtttgctcgagtaattttttctttcctccttttctaggcttatcag

SEQ ID NO: 107319 - DNA, 586 bp, Aquilegia coerulea
  Intron number 2 from transcript AcoGoldSmith_v1.006627m (l ocus AcoGoldSmith_v1.006627m.g) derived from phytozome v7. 0 (chr-ID scaffold_122; pos 34329 to 34914 reverse strand)
tcctttccagcaatatcaacattatcaaccaactagtaagtctggggccttttctttttcaatctttgaagtttccagtatgttgtttaagattgggggtttcttgatccatcttgctcccttctttgttgttttctatctggcttttctgaaagtttaaggagtttggtggggtttcttttcttttatcactatcttgtgttttctcagctttctctgttaatttgtctactttgtttgattccttttctttttttgttgattttgcgttttttttttttttgctagatctgatagttatgtttgtatagaaaattttattgtttccacccacccctgaccagttatattgatctgaaatctcctattttgattgtgtttggtcttcttgatttgattgtacctacactttccatttcagttgtataatgtattgtgatccttaattaaaatttgtcgtgaatctaaagttttaaggaatgggggttcaagattattgagaccagctgcttctcttacgtgttgctaatgtgatttggacttcaacgtgttttaacagtgctgcagtcaggatattggggtagga

SEQ ID NO: 107320 - DNA, 196 bp, Aquilegia coerulea
  Intron number 1 from transcript AcoGoldSmith_v1.006627m (l ocus AcoGoldSmith_v1.006627m.g) derived from phytozome v7. 0 (chr-ID scaffold_122; pos 35070 to 35265 reverse strand)
agcattttcagattcaacaaccacaagattttctggtcaatatcatttcttgtttttttttttttttctaactcttgataaagtttgattcttatttatacatatatagaaaagttctcagttttattcagatttcttatctgcttgtttctttttatgactcattttaatctcttatatgtttgtttttgtaggg

SEQ ID NO: 107321 - DNA, 842 bp, Aquilegia coerulea
  Intron number 4 from transcript AcoGoldSmith_v1.002065m (l ocus AcoGoldSmith_v1.002065m.g) derived from phytozome v7. 0 (chr-ID scaffold_42; pos 623286 to 624127)
gccatcctaaagcctctacaattagaataattcaagtatgtcttagcatcttgttgagtttacctgacttactttgcatcatatcatagtcatttctaaatataacccactcaatttgttttgaaatacttgatctatgaacaatcatgttatgtatatccaaatccgagaagggttatttagatacgccttttgcaccatcctcccctttacccttgccagttgctcatggcaacaaatgtgcctagtgttatttactatagttagcagatgaacatattacatcaatggttttgaagcagagtcgaattagttttaaaagattaaatactcaattggaagaaatcacagttctgatcaatatgcataatgttagatgcaatctgtgctgttctatggcatgcacgtttgatcataggccactacaggcatttttaagtttcaagtatttgcctcttgaatacttgattgcatgaaatactcagtttgaagtttattcatgtaagggttctcgcgtctatgattgctgatgctttgtttgatattttcttgatgttatcggttggtttaattatatctatgactaccttgtaaaaagatcttttattttcttagattcctcacccaagatcctctccagaaatagtgaggtaaaatttacatcagtgtgaactgtgaaatagggatacaaacaactctgcagtttttattactataatggttttaagggtcctttcgacatcaaccacaagtgtagattacatcacttacttattgattctcatgctcgcttttcttttattacaggacaaatatcttcagaaagctcatttttctaagca

SEQ ID NO: 107322 - DNA, 887 bp, Aquilegia coerulea
  Intron number 1 from transcript AcoGoldSmith_v1.009472m (l ocus AcoGoldSmith_v1.009472m.g) derived from phytozome v7. 0 (chr-ID scaffold_20; pos 1340907 to 1341793 reverse stra nd)
aaacctacctctagggttttgggtttgtttgaaaggtaaatattattattcttccgcctctctctcttttttccatcataatatatttagtttattggtttatttacatgtaaatctctgatgtaagttggtttgattttctgaaaattatattttgaaaattcgtcatttttatagtgtgactctaaaatgacccaagttccaaaatcagatcgatcaaacaaatctgggtttctctgattttatttatttttcaatgtgtaagtagtagtactagtagtagttcatatatccaccaattgtttgacaagttgtgtgtatgagagagagagttttgatttgtatttgtttttaggttttggtattttgtgagcagaaacactttaaattctatcggaatgggggtcaaagtgcgaagttcaatatccactgagttttgtttatgttatttaaatttgggcatttggcaacatgaaaattagacaatattaatgttatgattgccttttctatatgtttgtagctttagattcaataatggatactatgatattcttcatgaactaccttcttgatttcattgatcgcttagaggtttacgatgggtcgttacttactcattagtggttcaatgttcaatttcttcatgacatctgtggccaactgaaacacacacacaaaaacaaaaggaggggtttggggtactaagtcttgaatattggaagtgtatgagatgatgatattaggagtgattatatgtaaattgtaacgttgtgtgaactttgtattgcagtgtggaaagatacattcttcggtgagattaaaggatataggaattaacagtttggaacaagcacttgttaaatcttacaaacactgtagaggcc

SEQ ID NO: 107323 - DNA, 637 bp, Aquilegia coerulea
  Intron number 1 from transcript AcoGoldSmith_v1.010419m (l ocus AcoGoldSmith_v1.010419m.g) derived from phytozome v7. 0 (chr-ID scaffold_14; pos 1885359 to 1885995)
aatctcaagaagaacaggtacttttcttcattttcaatcatatcgttaaaaatctgtttcatggtcagttgttttttttattatactttattgaaacttgataaagattgaatttttaagaatttggtaatgtggggttttgtttttcagctactattgttcatgggtttatcgaattttatcttgaattggtaaagtagtgttcttaatggggtttgaatttgttgtttgaaatttgggatctggatcattgtttttggttgttagtgtgtttgcaaccattacgtcgagagggagaaaaattttgagttttttttttaatcaatccatgattatcgttattcattagtcacttccaaattgagtatgttatactgtaaaattatctatcaaaattatagaagatagtttttttttcatgcattttgcgaataagacatataagaaagaaaataacatttgttgtgcgggttaacaaattgttgcgtttgcttcaatgaaaaggatattaagaagtccctaatctctcatattttattttttcacaatgttcgtgcactttttaggtagattttattatgtttaaccccatacttaatgttgcagttgcgagaccaggaacttttgggtgccggca

SEQ ID NO: 107324 - DNA, 549 bp, Aquilegia coerulea
  Intron number 2 from transcript AcoGoldSmith_v1.008266m (l ocus AcoGoldSmith_v1.008266m.g) derived from phytozome v7. 0 (chr-ID scaffold_76; pos 785366 to 785914)
gagataaccctcataggcattcaggtatggtttagtctcaagtctatggtaccaaaagttgatataattacaagttgcttatagatcttgatgagtttacctttctctttaaaataattaggtcataatttcagtttccatttattgggtccttaaagatcgactatcttggccagatttactgcaaagtagaaatccactatcatatgcggtttcctttgaattttaggtcagttcatgatctttgttgaggtttatcctcaaaagtcacgaggtgtggcttaaccctgtcacattgccaatatgttatgttacttgagatcactgttctacctaatcaatcagtacgcttagtttccttgtctcttaccatgtaacccctacaaagtaaggtaaaccttgcctcaaaaaagagttacatgacttggtgttgtttttctgttgaagttaattgaggttttctttggatattacagcaatctgtcttcaacagactaataccttaccaatatcccttttcttcctcttactcaggttgtgaagaaacgt

SEQ ID NO: 107325 - DNA, 614 bp, Aquilegia coerulea
  Intron number 2 from transcript AcoGoldSmith_v1.027045m (l ocus AcoGoldSmith_v1.027045m.g) derived from phytozome v7. 0 (chr-ID scaffold_29; pos 1014208 to 1014821)
aaggcttacaacacaagaatactgaatttgatcaggtcatgtctgagatttttaatattttctatgctttgatcaaatttaattttcattttttttttacaaccattagaatttagaaagaaacaaactcatacttaaaatcacatttcaagaaaatctgttatactctaaattttgattgatattgggttttaacttatcaatctagataagttaagcaatgtatcaccccacatgaagttttgcaacatagatgtcttattatataaaatttatgatcagatttacaaataaataaaacttgcctgaaggaagctactatggagcttagtgtaaacatatcaaattacagtaatcatttctatatccatttcttgcagttatcataatgcagatgagaaatcctgttttgtgtaacactaattgtcgtatccaatgaatgtgaagatgcatgacacgtttggatattagaaactgaaactcagagaataagccacacgttcttaagaaaatgaagaatgattccagtttttctgtttggcatcactgaatgagttgtaatattgactgatattgtagttacaaagatcaacaactcaaaaagttatagtaac

SEQ ID NO: 107326 - DNA, 819 bp, Aquilegia coerulea
  Intron number 3 from transcript AcoGoldSmith_v1.013381m (l ocus AcoGoldSmith_v1.013381m.g) derived from phytozome v7. 0 (chr-ID scaffold_17; pos 1750134 to 1750952 reverse stra nd)
ctggcccaacctgcatcccctggacgagcaaatatgtatatgcacaaacctattatacagatcccattaggatgtgtttgtaatgtttatatgaaaattctgtatatatacagtgataaaagtctttgtatgtaatatccgaaaattcaaaacaaataatttttgagaaggacaccaatcatgtttttcttggtgagaaggacaatctcttttgagtcaaccctccataaagacaatctctttgaaagtcatggttgaaaaggataatctcttttgttgacttgttgaaaaggacaaagacttatgattttaggtagaatcatagtgtcaaaattttatgcaattccgactttgcccttttccactagggttaatcactccctacataggttatagtgttttgtacaaatttttttttcttatatattatttgacctaaaattatactatgactagtccttaagcccgtgcaatgcacgggtatatctgattgttttaaagtttttctttgggggggttttatattgcttttggtttgtaacttgtaatattttgtttagcccgttttcaaaagtctatgatctggtatgatttcatttagaattattataaatctttgagtaatgaaattaaatgattattatatatacatgaaaattaaacccaaaacatttgaagatatccaggagaatgggattttgcagtactctcaattctcaaagtctcaattagaatttagtctggctcggttgttgaggcttcatcactttgggaaacaatcttttcacagtagtccattagcaatcaagcgtctcttaa

SEQ ID NO: 107327 - DNA, 353 bp, Aquilegia coerulea
  Intron number 2 from transcript AcoGoldSmith_v1.020361m (l ocus AcoGoldSmith_v1.020361m.g) derived from phytozome v7. 0 (chr-ID scaffold_14; pos 2108515 to 2108867 reverse stra nd)
agaaatccaaagtctgattctttccgaaacagattgtaggtgattattattagtgctcttgttttttatttcaatccctctgtctttttataaggaggtacttatggagattatagatctctgtatataaggtttgaaaagttttcgataaattttcatagaagaatttgaatttgtgcagcaaatgcaccaaacacgctttttatttgaaaattgttttaggaaaagagtccctctattacaattagtaaaacatacgaagggtcttcccttattctagtctaaacttttgtcctaaactctgatgtaacttgacaggtgacggctgtttgagtttgggcactgtggattct

SEQ ID NO: 107328 - DNA, 912 bp, Aquilegia coerulea
  Intron number 1 from transcript AcoGoldSmith_v1.004918m (l ocus AcoGoldSmith_v1.004918m.g) derived from phytozome v7. 0 (chr-ID scaffold_76; pos 223267 to 224178)
ggagagaaggggaggaagagaagaaacaacatccggtgatggatagacttttaagattcgacatgggactttgaggagaatgttgatcctgtgttgattgcggtcattgccatttacggctcaagatgcagtttatttatgattgagattttttttgacttatcttcgatatcacttttattctgttaagtatgcggctctgtatctctatgccaattgtaattgttattcttatcatcagtgaaaattgtggtgacattgaaatcttaatgtgttaggactttctagaaagactcaaacttatacatgttacaactacacactcctataggtcatctagaatctgtgaatgacaatgcttttgtattttctccaaagttgattgtggaagtgttctatgttcaacgttattaccatatatctttgtttgatttattgcctggtgatgttgtgtttgttgtccacaggatgaatttctttgttgagtccctaaaagacaagccataaactatccacagacacgcacacacatattgattatatttgaattatgaacaaccgtacattctccaaaaaaaatttatagtagtatttgtcattcgcattgttgatatatgtgcaccttttaatttaattaatcatttttagggatatctattcttgttgcaactcctgggcgtcttttggaccacctaaagaatacagcatcatttgcacataataacctccgctggataatttttgatgaagcagataggtatgatatggtttagtggcataaatattagtgctatatcactttcacaatatcgaaagctgatacaagaactgactaattattctcgtttcgttagtactcatcatatctatctgcactttcccttgcattttgcaggattctggagctaggat

SEQ ID NO: 107329 - DNA, 734 bp, Aquilegia coerulea
  Intron number 1 from transcript AcoGoldSmith_v1.008585m (l ocus AcoGoldSmith_v1.008585m.g) derived from phytozome v7. 0 (chr-ID scaffold_114; pos 376947 to 377680)
ccttctgctcttcaactggccaaacgcgcaaagtaaattattttttatttttatttatttatttttggaattagtttatgttttaaagtgtaattgatatatttgtttgatgtgcttgttatatattgataataattgcgataaaagaggcattggtgacaagaatgaaaagtgagtgacagggggatattgggatagagtacaaaggtggggaatattgaggggaagacatagttggatacacataccctacattgttttaagacccactatgacgaaagatacctcattattttaccacaatttgcttgactgtgaaaattaattggcaatgtttttatatgtaaatatgtaattgttcttctaagatatatagtgggtgtgacatgcaatcaatctgtaaggaactttataggtcataactcataacataataaaacataacttgtatctgatcagtaggcgctgttgttttgtattggaattactatctttgttcagctgacatcaaataaacataaataatatagaaccgtgacacggtggggaccgacgttagaaagagagtttgaaaaaggaaaggagacggacaaaaaaaaaaaagacgaaaaggaggggacaaacacgagtttaagtcccacacgactatagatggacctcctaacgtaggtcgattaaacaacgaaacatactttgctaagttaaaatttgaattttggtgacttgtgcaaggc

SEQ ID NO: 107330 - DNA, 906 bp, Aquilegia coerulea
  Intron number 2 from transcript AcoGoldSmith_v1.010132m (l ocus AcoGoldSmith_v1.010132m.g) derived from phytozome v7. 0 (chr-ID scaffold_14; pos 3576521 to 3577426 reverse stra nd)
gtcaaatcagtgacgtctttcgagctttatcgtaagaatctctctctctcttttaaagtttaaattgtcacccattcttctcatgcatttgactttggtttgtgattcattgaattctacctagtaaactcaacatcccagtgtctcatccactatgtcttatgttatgaatatagagctacaagttgttcattgtaaagcttcttaccatgggttacaaacttacaactgaccaaaaaagagaagttcatgttatcatgttgaccattacaagtttatggtagtctgacaagtagggatgtcaatggactgttccagtaagaaatgttggctatctggaccatgctgtatggttgaagtgttgaacctattggattcataccaaatcctagcgtctaagttgtaacttgtaagccaggcccattaacacctcactgctgaatcttgttgtcagtgttggctaagtttaatatatccaagaataattagttagaaactagtatgatcaagttgttcttattgcatttttagtggaatttattcatttttgcaagtttgcattattttccagctgagatactgaatttaatatagtggaattaaggacttggtaaatgtttccatcccttccaaagaagatgcaaatatagataaaactttgcagtttggaatggcggcaaagttttcactgaatttccttctttttgggtagggatcttggtggaagaaccacctacctacgttcaagttctaaccagtaaaccaggaaaactcagaaatattcatagaggtgtagataccatgcacaaccttgtatggaattggggtttgctttgactttaaaaattcaatttttaagacttgaaaggatgcttacatattatgcctatgcttttccttgcagaa

SEQ ID NO: 107331 - DNA, 460 bp, Aquilegia coerulea
  Intron number 1 from transcript AcoGoldSmith_v1.008907m (l ocus AcoGoldSmith_v1.008907m.g) derived from phytozome v7. 0 (chr-ID scaffold_17; pos 2964325 to 2964784 reverse stra nd)
gaataccctattaagaaaataaagaattaaagattgtaagtgtgatcaaaatcataaattggattattttaccttttcatgttcaacttttcaagtttggttattttgtttattggtgttgtttctatttggtctttagttctctcattgatgtgtagaagttagaagaagaaagaaagcaccaagtttggggtttgtgaaagaggaaaataaaagtgaaagtgggtttttttttttttgtttttttttttttttaatttgataattatctatgttggataaagaagaagcagaaattaaggagatgaatctgttatggattttggggtttattggttttggcattttttgaatatggatttattaaaaatccaaactttggtttaattgttttctcaaataccaccttttgtaatcaatggcagttttcattgattcaaccaacaactctggtttctac

SEQ ID NO: 107332 - DNA, 813 bp, Aquilegia coerulea
  Intron number 1 from transcript AcoGoldSmith_v1.001304m (l ocus AcoGoldSmith_v1.001304m.g) derived from phytozome v7. 0 (chr-ID scaffold_14; pos 1656792 to 1657604 reverse stra nd)
aaattcaagtaagttcacttgttcaaagtttttgttgtgatttagtgtaactgaagtacccctttctgggaattcagtttttattgattaaatcctttatttcagttgatagagtagttacattgaaaagtagttaaagggggcaatgggaggcaggggaggggaagtttgcgaatatcgaaagggggtaggaagatgaccccttcttagtgcttgtagttggtgacttggtgtgaggtgaaaaggaacattgattttggttacctttatagaaagaaatatccgctgtatgttccaggaatgtttattactggattgtgtgattaatcgatttgtagtgtccaagttaatgagttgtgatatcaattttatacttagtacaaggcaaagagttagaactgtgaacttgtaggagaacaacttttatttggtgtttttctgactttaaaaaggccaacaataaaacactgagctttttatagtttttcacctgcttcaaactttgaaatctctaaatccccacattgccgtgagttgttccattctaaatatttatacgttataacatctgaatagtcagtcgagctctgatgtaggaaagaaagttttattgctcagctttgatcatatgactaaactctacctttccacaccagtaatgacagtttgaacgaaaaccaaacatctgttaatttattttttttaagttgtttcttttagtttcaacaatatctctacttatattctggttatattctcccgtgagttcttaaaacctgtaatcttttgcaggcgtacattgaagctgaaaac

SEQ ID NO: 107333 - DNA, 765 bp, Aquilegia coerulea
  Intron number 1 from transcript AcoGoldSmith_v1.002432m (l ocus AcoGoldSmith_v1.002432m.g) derived from phytozome v7. 0 (chr-ID scaffold_14; pos 2019276 to 2020040 reverse stra nd)
tttgccttttctatcaggtgtgtttattatcttctatgttctgttttgttgccttttaattaatattttgaactaatttatatatatgtttttccttttgatttttctatggatccattacttcaaaaagacacaatagaatttctttacagccaattattttttgattgttctggtaaatattggagtgtatctaagtttctttattcctcagctgttgcagaaacaaaaatgaaaagttcacactttttttttttttttttttggcttctataattcttagaatttggtagatctcagctgaaaagaggggtattaggaacactgttgctgtcctttaaattcctttttcctcagaattcagaaattgctcttttggatctatataactaaattaagtcccagtttcaactcgcaagcaattacggcaataaactgtctacaaggcttgtaatattgaaggcttgtgttatcaagtgacttgcagctaggttcacattagttgattagcctatagcactataaaaatgagtcctacataacgctgaaggtgtcgtaagactccccaaaaagtatttcctttcgataagcatgaagttgcttaattagagtgcagcattttagtcatattaccagaccgaaatgccatacgtgtgaatgttgttacaacttaatcctaaaactctacatcttgcttaatttagttatttcttcaattttttccttgcagtttctgcagtataaggttcacataacaaaaatttg

SEQ ID NO: 107334 - DNA, 384 bp, Aquilegia coerulea
  Intron number 1 from transcript AcoGoldSmith_v1.002913m (l ocus AcoGoldSmith_v1.002913m.g) derived from phytozome v7. 0 (chr-ID scaffold_53; pos 1590276 to 1590659 reverse stra nd)
aacccatctcagaaactctttatcttcttcatcaggtatgtcgttttaattgttttcttcttgtttctaatttcagtttattttattcttcttgtatagttgtataagataaagatctttttcacccaaaactaaaagggtagaaatgggtttaatatgatagatattcattatattttgaggttcatgaacaatctgttaatatgtttgactatgttatcatgcacctatgtgattattaggtgggcataatcaaattaaagcccagagattttgtaataagagtgttacattttggaattccgagtcttgatatttctttgttgttggttttatgtatatatctcactagtaaccatgtttgtttttctaattgcagttaca

SEQ ID NO: 107335 - DNA, 758 bp, Aquilegia coerulea
  Intron number 1 from transcript AcoGoldSmith_v1.025378m (l ocus AcoGoldSmith_v1.025378m.g) derived from phytozome v7. 0 (chr-ID scaffold_14; pos 5086777 to 5087534 reverse stra nd)
ctttcagtgcctatttcatactatcatatcagactgtaagtatctttcctttaccatatttacgtatagtgtcatgagaacagtttgttatttacttttctcagactggaagcatccttttgatgctctttctattcaacctcatgtagtctttttgtaaattattaccaccaagtcagtaccacttggattgaaaaaatagtgtttcttttgttatgttcaaatgttcaatactgtaacttattactgataaacataattcattctagtcttccatgcttacaatgttattgagttcaaagctgtatgttatgaattcaatgtgccttttatcactttacaagtatacaatttacaaatggaaaaaataagatttgggctgtgcaatgattggttttagctgctatacatggatatgaatttcaaattagagaatggttggcttagagaattggataacctgttttctaaatttagtagtgtgctttatgggattttgcaccatatcagaggggcagttcgagtcatgccttaacctgttaaccttatattggttgcagactttgattaagattaaaggaagttataattattttttatattatgtcaatcatacaattgaaaggatatcatccatttaggaattagatttgctctttatactacagtgtttgagagtcaaggttgctattttacatatatcgacaaaaaacataatttctcctgtcacatctcttctcccattatatttcaggtat

SEQ ID NO: 107336 - DNA, 697 bp, Aquilegia coerulea
  Intron number 1 from transcript AcoGoldSmith_v1.022814m (l ocus AcoGoldSmith_v1.022814m.g) derived from phytozome v7. 0 (chr-ID scaffold_17; pos 4261462 to 4262158)
caacttgacactgaagaactgccttcagtttgcaggtaatattgttcgcgttgacattaacacaactgcatctaatcttcaagtatttagtgccagtttcaagttttggaagtaattagtaagcagaattagcaataactagattgttacaacactccaaatgggaattgatactgcaatataaaaactatataatcaaataaacatattatacctgttgatagatataatttaaaataaatagacttagttaatttaatacttatctctttttttttttttttttttttttgtctggttggcaagcgaggttgtagggacccctaccccttttaaattacgtgtggaaacttatatcaacaatccgctgttgacgtgtttcgaacccacgacctctccactttgtgagaggggtgctacctctcaaggtccatatgtagcatttacagatgaaaaaaaagaaaaaccaatacctgatatatagcatctaagagtccgctactccgtaataaaaacacatggaaagagagactcgtgttatcacagatatgcctacacaaataagccgtagacagagtctcaatatgcctatctattatgagaaaatccaggaggtaaaatatttatattttgtttttcttttgtagtgactaatgagatatatttattccatgtttactatttatacagagagatc

SEQ ID NO: 107337 - DNA, 630 bp, Aquilegia coerulea
  Intron number 1 from transcript AcoGoldSmith_v1.017613m (l ocus AcoGoldSmith_v1.017613m.g) derived from phytozome v7. 0 (chr-ID scaffold_41; pos 825804 to 826433 reverse strand )
aaactgtaagcttttgatgaatttcctttaatttcagttctacctctgttctttttggtgatttacccaatttcagtaattcttacggattcgatcaaccttttctgtttacagtagtaaatgcattatcagaacctagattgcttcgttttgattctgttatacttacagcttgatttcgcattcagactagttttggtagagtaattttgtcatagacctgttatcatcaatgtaacagtgcaattcaaaaatttccaaattattgtgtatagtgaagagtgtatgttattatgtcaatgagaggagattaatcgaatttgagatggttgatgcttgaaaatgtttaaacatctcactgtcaacatttcatattgtttgccaatagagattcataacctattaagaactagtgcctcatttgttgagcacagaaatataaaatcattgttaccaaagaaatgtacaggaatgttggattggaatgatcttgtcgcttttgtttttaatatgatcttaactgcatttctttactttagtgattacttcagattaattggttacatttctgtttgtatgtatgggaatggaacagcaacgcgtttttgtcccgggaggaaacaaagagga

SEQ ID NO: 107338 - DNA, 766 bp, Aquilegia coerulea
  Intron number 1 from transcript AcoGoldSmith_v1.011920m (l ocus AcoGoldSmith_v1.011920m.g) derived from phytozome v7. 0 (chr-ID scaffold_20; pos 1466399 to 1467164)
gaaacgattctttcatctaattcttcgttgttaaggtaaaaaccctaattcatcttactctttctttttttattttttttcatagagattcaagttcgttctttattgtttttttggttaatttaaagatcgataatgtttttcttctttttattgttaatctttatcattgattcttgtttttttccctaggtttggtttaattgcattggtttttttttttttttgtttaattacatttagaagaaaaacagttcaatttgaacaaaacaaaacaaaaattatttaggggttaggttttttagaaacttattgagaattcataaggatattatggaattgtagtttcgattgttctgattagttggggtttaattgcattggggtttttttttttaattacatttagaagaagaacagttcaatttgaataaaacatagatattgtccttgtttgtgaaaatctaaagtctttcctgttataggattgtcatgaaatccaaaacatagttgtagatgcaagttcattataatctctttgcaaatctgaaccttgtttgtacctcactcttcacttaaatgcattacacagtttctacacaatgagataagtctgcaaagaaattgagcaaaaacatattagtatggtttaacagttcaatagcttagagtttaaacctgaattttaagtactgtttcatcttgaatcttgattttttttatacctatgggccctttcaggtattcaagatatttaacaagattg

SEQ ID NO: 107339 - DNA, 692 bp, Aquilegia coerulea
  Intron number 1 from transcript AcoGoldSmith_v1.010593m (l ocus AcoGoldSmith_v1.010593m.g) derived from phytozome v7. 0 (chr-ID scaffold_5; pos 6071862 to 6072553)
tggtgagtttggtttgtcttatatttttccaccttagctgaactgtcactcgctcactctgatgaaatatactagaaaagctaaaacttgatttatcaactcatacactggatacatctgtagatgccacacttattttgttgatttgtgtatggaagctcagagttactacatctttcctctgagttcttccacataatgatgcaaaattgtattaatgtgctttagtcgagacttccagttggttctcttgtttctccatgctaatgattttcataagtttgcattttgggttaatttgttgtatttgcttcttctgttggtaagattgtgtgaggttctctctcacattttcctatggcattataaccttaccttataaataaatctttaaattatcagtcttttttttctccggtgttaactttctgccatgttttctacgcatcctttctacttttctagtctttcagtcatcctgtgaaccgaacttacaatagtaaaggattgtatacttcctttccattgagaaataagcattttctcattatttgaaaacatacaagctactgtgttgactgctactctgttatatattttctctcttttatcaaagcaaatgtttcataatgtgtcggggttttttttcctgtttgctcatcaccttgttcttatcatctctgaacaggtag

SEQ ID NO: 107340 - DNA, 1012 bp, Aquilegia coerulea
  Intron number 1 from transcript AcoGoldSmith_v1.027872m (l ocus AcoGoldSmith_v1.027872m.g) derived from phytozome v7. 0 (chr-ID scaffold_20; pos 2297495 to 2298506 reverse stra nd)
ttagacgagcattgttgagaatttctgctggccaggtgagctgaattgttttcattgttattgaatttttttttaggaaaattttaatgtagatatagctctataaatagtaaaaatgggccttttttgtttgtttgattataatgaaaggtttgtcgtcttttttgtaatttatgccaatcataccaacacagaatgaaactgtcaattattatggtgatcagttttgtaaccttttatttatctggaaaatgtgtagaagtattgttttttttttttttttttccgagtctaatctgtatcggttcaatagaattcccctagttttctctgattctcacaatctcgaatgagtattacaacactgctattgattctaattacaagttttcccagtatagcacattgtatatcattcaaacttaatattacaaatgggaagaacatctgagccacagatgtttaactgatgttcaagataaaaaagtacaaagttcttatagaaactcttgaatttttttttcaaaatttaggctctgtgcctgagtctagagccagactcgtctaggtgcaggtgaatctcaaggacttaattgtagcctattctgggctctctaggtgcgccgagagcctatcctttcctttgactgcacagcccgcccgagtcaaatttgaacccttccccccttgtctgtctgtctgtttgaactgcattaaagcttttacatttaatgttttacttttcaaatttgaatctgattactttgcttctctcattatgaactcaattccgactagcattctgtgggcttgaccttcctgtggttgaatgcaaaagaaattcactttaacatattagcattatcataaagtggaatgtagaccatttcctagttaattgctgaattaatattttttcttatatagtataggataattttttgtttcactgtgttcattaacatatcattttttttatgcactttgacagctaggaaagcgaatagagtca

SEQ ID NO: 107341 - DNA, 911 bp, Aquilegia coerulea
  Intron number 1 from transcript AcoGoldSmith_v1.010708m (l ocus AcoGoldSmith_v1.010708m.g) derived from phytozome v7. 0 (chr-ID scaffold_14; pos 5730566 to 5731476)
tgaatttccttctgaaggaccggtttccgtgaaaggttggtctctcccataatgtcgttatatattcctttttcatatgttttttatattttgtattggtaatttagtttatgttcgaagctaagaatttctgttgtttcatactttgcgatagcttgagattgaatgtttcagtgtgcatatcattttattgaaaaaggttttttttttattaatattatttatttatttattcaatatatcacagctaggctctatggcttaaatcattactggcctcaaaggctatatcctgattgttgttgtcacctaagcattcacatagcctacatgtctcctgagcaacatattgctttatgaacacttgccacagtccactgaaggaggcacatcacctccacatcacatggaggtgatgtagcgaaacaagggctgaaggctaggtcattgtggagtacacgcctatgaaatataggagcaaaactccttcacgctggtagtaagtattgaacacacaacatttcacatgtgagagggacgcacgactactgagagccaaaaatcatctgttttgtcttccatcgtggtctgcagttatcacacacccataatactttgtctttgactggtatcttgtacatgattcacaatttttccttctcccttttctgttatggaatttggtaatagaacgaaattggaattgagacatgcttcatgcttgtgcaattaccctgtgaggacgcatgctgtttcctcacagtttttctcattgtgtatgccatttcaaactgtatttttcacagcctttgaattaaggatcataggttgcaactcctacatatgccatagtcgctttatactaacggtatgtgtcacaccaggaggtattgtggctttaggaaagtttg

SEQ ID NO: 107342 - DNA, 397 bp, Aquilegia coerulea
  Intron number 4 from transcript AcoGoldSmith_v1.001131m (l ocus AcoGoldSmith_v1.001131m.g) derived from phytozome v7. 0 (chr-ID scaffold_14; pos 542256 to 542652)
cttatcgatttctgagaggtgacaactttcttccctcaaattttattttggtttttcctacaaattttcttgatgtttgttctttctcctttgatcccacctcttcaataatgtattctgtcaaaaaacttaggtttaatgtgttttacggtgtctgcatcaattcatgatgttcttattaaacacgtatctgatggtattatttatcatgataacttggttttgacacagaactcattttccacacacatgtattcagtgagatgaactaatgctatatatggtccttggtgtattttgtattaataaaagtaccgagatgcggtttttttatgtgagctcaagatcttatctaattgtgacttttttttttataggaaaacgcttggggaggtag

SEQ ID NO: 107343 - DNA, 459 bp, Aquilegia coerulea
  Intron number 2 from transcript AcoGoldSmith_v1.012161m (l ocus AcoGoldSmith_v1.012161m.g) derived from phytozome v7. 0 (chr-ID scaffold_17; pos 1014669 to 1015127)
aggtaacaaacatcctccatttctgtttattttgattgttgtaaactctttgatacaactgcttccatattaatacaaagcataatttattatttggtatttggagttgtgtcgaagttgcatacactagtaatgaagcttatcagagtagcattgtgtttgttagattagagaacttatatataataattttgacctaaatgggtaagagtgtaggtttgaaggaattattaatttgtgcaattaagtccatgtagaacttggtaatgattgtacctcattgttaaccatcattacatacttttataacatcaactaaattctgttttttccaaaatcgttgttgcccagtgatataatatcaattggatgtgtttattactcatagctttataattttctgacattctataacgaactaattacaaatctttttgtttttctcttcgttacagccgc

SEQ ID NO: 107344 - DNA, 709 bp, Aquilegia coerulea
  Intron number 3 from transcript AcoGoldSmith_v1.012161m (l ocus AcoGoldSmith_v1.012161m.g) derived from phytozome v7. 0 (chr-ID scaffold_17; pos 1015141 to 1015849)
cacctgtaagtttctctctctctctctctcctctcttccatatttctttttgatgactagggcatatgtttaacacaataacacctaaatatatcaaatacaacattagtggttatatacataggtaagacggccagtttaggtaaataaagcaaagaattttatgaaaagaagcttttcttacctggattggtgttttacctaaatgatttctctccatggagatcatagaagataatcttcataaaaagtcagttcagtcaaaactaattgaaagctatgtctgagaggatttattacagtcaaatatctctgttaccacaacttttattactagactagaaatgatcatatgatctgatttctagtgatgatggtctgtcatgtaaatagacctgtatagtttgaacgctaagagttccaacctagtcaatgtccagtgtttcaatgtgaaatcattcccctcgtgcgcgcacacacacacccctccccataaaaaagaaaagaattaggcaaaaccattcaatttggacctttgatagtttggttgtgtatgtgtattgagaccttaaatgttgtccatgtgagcatgcagcctcgtgatggtccgtcgctctttcttttgtcataaactcacaataatccaatggtgtactctctctctctcctttcatttgcttatctaagctattgtaacaggttggcaaga

SEQ ID NO: 107345 - DNA, 866 bp, Aquilegia coerulea
  Intron number 2 from transcript AcoGoldSmith_v1.011420m (l ocus AcoGoldSmith_v1.011420m.g) derived from phytozome v7. 0 (chr-ID scaffold_14; pos 5173849 to 5174714 reverse stra nd)
ctggaaaatctagtcgaggcgcggtaatatttcatttcattctaatttatatgtagtttgcgcaatagtctgttgctagattgtaagatatgaatttgttgtattagatatgcacgttgtgagtcttctagatatatgaattgttggtgaattttactttcaactacttgttcgtaagtagaatatttttttttatcatgtaagtagtttaaaatagatgatggtctcacttccgtacccagggaagttgttaacctcatcacttccagaatgagctagcaccataattagatcaggccatcaattgcactagcaagacatccaatactggtttgggaagagacctatataagtctataacacaaccctaccctcaattgctcaacttatattttactgtgaatcaatgattaaaatgtttattataaactgattttgattccttttacgcacaattgtagtcttctacagccttctaggccagtatcaatatgtttatcattaaaatggtttcactttcatttagtatctttctttttgctgaaagtcatgatttcggaaagtctgctagtattgatcacattacagtttatgggtacaagtatgagaaggtttataaaagttagataatattgatcacattacagttttagcatgatttaatgatattgaaactcttcacaagtatgaataagaatgtgaacaattcatcacctacatacctactcattcaaactgcattctaaagggattgtcatttttcctttctctttctttgtttattaatttatatttattagagttaaactttttgagtttattctgtaagcatatcaagttttgcttttccctttgcagcctgtttc

SEQ ID NO: 107346 - DNA, 908 bp, Aquilegia coerulea
  Intron number 1 from transcript AcoGoldSmith_v1.004979m (l ocus AcoGoldSmith_v1.004979m.g) derived from phytozome v7. 0 (chr-ID scaffold_4; pos 8178314 to 8179221 reverse stran d)
cctaggtataaacttcatttgctctctaaagatgttttgatcgtgtagatttgtttttatgttactttttttttgttagatctgactagtgaatcgttctatttgatctaagttgatctttcgatctgaaaattgaattgaaaatgattagaaaccgagatcttatttaactattcgaagttttgtgttttggaatgattagtgaggttttgttgtttgatgttttgatatgtgaatctattttcttcatgattcacaatcgtaaaaagtgatgtttctagatggttaatttgtgattcaatgcggttgaatacattttgaattcgttgttgttttttcggaaatgcatcaatgttgaagattatgctgttgctgtattcttgatttccatcttatctatgttatttaattggtttgtcttaggatcaaaagtgtgaggaaatatggtttagtttttagttattttttctgagataattggtcagatttgttagttatttcatttttttacttgttatagtatgtatatgtgtggatcgatgggtgaagtttactatgtagcttttgtaatctgtatcttctttttaactacttctattcagtttggattccatattatttgaagaaattacgcatactaccctgtgctgtgcagaaattgcttctttttttttttttcttctcgttttacaatttcttcttcttcctacgtgctggcttttgtagattactatgatgatcttcttccattgtattatagtgtttctctgatcctcataccttattattttgcgtacatcattcccatggtataagatgataagaactgtgcatatcacatactgtataatagtatatattcttacgagtttttctttcttacagtgatactacagtaggggctgcac

SEQ ID NO: 107347 - DNA, 550 bp, Aquilegia coerulea
  Intron number 2 from transcript AcoGoldSmith_v1.011478m (l ocus AcoGoldSmith_v1.011478m.g) derived from phytozome v7. 0 (chr-ID scaffold_14; pos 5604892 to 5605441 reverse stra nd)
ttccaccaaagggagtgtccctccagcctcaactggtaacataattctttctttctgtaccttttgttcattaatttgtaaagtaaaaccaaacatgcatttgacataatacagtatcttcacatcttgtgttgtgaagaatatggaaaagaatattgcttcttgacacctcaccccataaagtgttctctcaagtgtgcacctagccagtgccttttttgaggaaagttatttgaagggataaaacatctcaatgaaacagatttttgggcgcattcataagtccagacccatcacacatgggaatatgggatatatatccctacaccaacaggcaacagcacccaccaatccaccatcatatgtatgtcctgtctcttggattttaaatccatgctcatttccctctcattacaacatacagtatatttccgaaataatgtagttggctattctcattaatcattattgcattgatctactttacatatttgacatcaatggtttaactcaaggaaccccatcaagttctagcaattctgtaccagat

SEQ ID NO: 107348 - DNA, 923 bp, Aquilegia coerulea
  Intron number 2 from transcript AcoGoldSmith_v1.026535m (l ocus AcoGoldSmith_v1.026535m.g) derived from phytozome v7. 0 (chr-ID scaffold_41; pos 1218293 to 1219215 reverse stra nd)
aggaagttccaatttatccaatatatagagatccggtaattcaatctgtcagctttgtttttttttttcctgataaaagaagtaatcttgatgaagttttatagttagtttgtgttggtataattaatgcagttagcaattgaatgtacaataacaaacttagtcaccgttttaattttatcttttctgtcttcaaatgaaacagtttctctagtttctaattgagttgtctttcagcaatatgtcaaatgttagtaaaatcattatttgcaaatcttgttttggtttgttatccataaatttgcagttggataatattgcatgagtgaaagctctttaacagcgttgtctttggcgtgatagctgtttttttgttgtaaggttgccttgaaatgaactgctagattcagttccagactttgctgccactagttaactactaaaatgtggccgtttgcacctccaagccatagctttgggttccaaataaattctgctctgtagtgttacgctttataataagcatagatcgaaattttcgcaaaatctcccaaaaaatattgattttaatgtgtttgaaagtagatgtattgggctatacaagattctgaaatctgaatattttgatgtttcaagaactcaagatctctgcaaaatcgagaatttgtacttttgagacaaaatagaactatttagtaataacattttttttggtttggagtgttggagggcggaggtggtggaaattaagtgatcatggaaatagcttaagttgacctcttgggggaataatacaagctcactttaaaatattcacaaatgttctcttttgataatgtggttatgcatgttcatacactggtacaccatgtggcatccatggaactatggaagactaacatgtatagtttttttctaggtcc

SEQ ID NO: 107349 - DNA, 980 bp, Aquilegia coerulea
  Intron number 1 from transcript AcoGoldSmith_v1.012869m (l ocus AcoGoldSmith_v1.012869m.g) derived from phytozome v7. 0 (chr-ID scaffold_17; pos 714365 to 715344 reverse strand )
acacgggacaataagggtggtgcaacagccaacaggtagtacctcacatggctgcacaacacaagggtattacagtgaacatagggagtgtggtgggttttggtgccaaccccttgggcagggtcttattgttctagtaaggcctatgtacacgttacgtgtcgaaatgaaacccatttggaatccaagtagtactagtttaccctggtgcaatacggacgaatattggaaatgctgccttttggagagattgaagcatcaagaatggaagtagtataaggagttcaaagaatctatagcagagagagctaatgcttctcaaaaaagcaaaactactgatgcaacagtttttgctaggcatgttgttaagaaagtaatgagttctagaccaccaaaacagattaggtttgggcatatgacagggttgtttgctttgctttcttgctcttccttgtgggtgagggatctcttctatacaagagattcaaactcaacaagaagttaaagaatgattaaacatagacgaaatcaaaattgacttgatagtaattttctctagggaagtaaacttatgatcatatgtattgtgtaaaatcaatagaactttttttttatttttattttattttcaaactttattgataagctcaacgaattacacaaaagtagaggacaaactttattgataaactcaaacttttttttttttttcaaacctttttttttttttttttttttaaatcaatagaacttgatcagtatcttctagttctgtgatttgaaatttaaacgaattttataagtaaaaatgtgaagtaaaaaaattggatgatttcataaactaattgacagtcatcgatccatccacccatccatccagattcataaagcatggtcacagtaacgaaaaatgtctgatagctaactcccattaatgttttccagaaagaatttattacctaacgtgcctctttgtccag

SEQ ID NO: 107350 - DNA, 797 bp, Aquilegia coerulea
  Intron number 2 from transcript AcoGoldSmith_v1.010831m (l ocus AcoGoldSmith_v1.010831m.g) derived from phytozome v7. 0 (chr-ID scaffold_14; pos 3614072 to 3614868)
tgaaactttgtagagtcaaagttgaggactttcaagtaagagatttaatatcaagttttcatttatttttaaatgttgaatcttttattgtgaattgagatgttgttagttgttaatttagtttaaaaactcataaaggttgaatctttattatccacacattaagttttatcatgatgagcttgggttgtgtttgttgaatcgatagttgtataggagcttaatatagagttacaactagattatgagaagggcatgtttcttttagtttttcatgttatttgcttgttagacatattggttccacttgttatgtatatatgttatataaaaagttcaaaattacttgttcactttgttttactagaaaatgttttgatgtattaaagtggaaatttttactatatgcaactttagtgctcgtaaacaaaaaataaataactttattatccccacctttaatttttgattcatgatatagcttgggttgaattgatgagttatattgggggtttacaacttgatagtgaagagggaatgtttctttattttcacgtcgtttgctctttatacatataggttccttaatttcttgttatgtatttatgttgtattaaaaaggtatatagcatttgggctgcaaattcatttgcttgacgatttagggtgattgagaatcaaatgataattgactatttcaaccagattgttcagctctttgtctgatgtttttttctagctttgatgtcttactatggcttgttctttctttccagatcactgatttactggttaac

SEQ ID NO: 107351 - DNA, 525 bp, Aquilegia coerulea
  Intron number 1 from transcript AcoGoldSmith_v1.000439m (l ocus AcoGoldSmith_v1.000439m.g) derived from phytozome v7. 0 (chr-ID scaffold_14; pos 1311522 to 1312046)
tcttcacttattgaaagtatcactgttgaacacaggtatctatcgtgttgtttatgattgaatgttttaagattgaaattgaattgatttatatgtgagctttgcactttgtttctattatccgtttgcttatctttatcgttgattgatgattgaatgcgtaaagatcgaaattgacttcatttatatgtaatatgttataaacctgcaaaagaaatgagaaaagaatgatatttagtttatagaggatttcaaatttctcattttttttttcttcttctgtaatatagtgtacaaaggtctagtttgtctctgtatcaatcctggatataagtttcggcattttatttgacttattccagctttctgaattaaatctagatgcttgattaaggtgctaatgatgtttctattattggcaacttgtttcttttgtatgtatttggacaacaatatttgaggagattgagacttatttgataaaaatgttgttgtgcagtcctcttgtgagaagagcaagtgcaa

SEQ ID NO: 107352 - DNA, 565 bp, Aquilegia coerulea
  Intron number 1 from transcript AcoGoldSmith_v1.000976m (l ocus AcoGoldSmith_v1.000976m.g) derived from phytozome v7. 0 (chr-ID scaffold_4; pos 4747667 to 4748231 reverse stran d)
tctctctcttgccgaacaacaacttcacctataaggtacttttcttcttcttcttcttcttcttattctttactttgaatctctttaacaacaatacttaggtttttttttcttgatttaaagatcgatcaattcatacttgtattgaatttctgttttgatttcattcaaaccttacttcaacactcgatgtgattacaatttgaagtaattggtgtttgttctcactttttgattcatttgtaacaatttcaccttaataacgatagatttttaaaatttatttacattattagctagttttcttaattctagatctattttgatctataattgaacaagtttctgattcctttgctagttttcacaaaattgtttatatgtttggttcattattgaagaatcaaacacataactgagtttgaactgatcacgaaatgatctttgaaatttgtgagtttgaactttataattgagtttgtgttatgatggtgaaagtgtttcgtcatgattcattcatactcacacaatttttctacttctattacttgatagatcgctccaa

SEQ ID NO: 107353 - DNA, 730 bp, Aquilegia coerulea
  Intron number 1 from transcript AcoGoldSmith_v1.010985m (l ocus AcoGoldSmith_v1.010985m.g) derived from phytozome v7. 0 (chr-ID scaffold_4; pos 3927575 to 3928304 reverse stran d)
gccaacgacacttttggaagttagtattaattttgaaagttttgttcttttgaaattgttttttttttttttgaattgtaatttgttaaagatgtgtttttcttcatgtaattggttttgtatttgaagtgaatttgattgattgaatagttagtttgattttttctttgatgatggattaggtttaattgggggagttttgagttttaggtgaattgtgttgtttttgagttaaattgaggttctatattacctgaatttgttgaaaatgtgttgtatttagtggaaaattaatggtcctacttcaaagctggtgttatgttagctaaagtgctaaacaatggggagttctgattgagttatttgcttttaaggtcttgagattttctactgtgtctgttactgaaagtgttatggtcgccgatttcaaaacaattgtgggtttgccaatttgtagcgttcaggagagttcataagctttgacctttacattgactatggttccttttttgttttctgaatagaattttagtcccagtaaaaaaaaaaattatttctatatcgaccaagttagtgtaattagtaattacactaaacttcagactgtgtctttttatatatgtggcgttcaccatcttctcttactagaatttcattactctatggaatatcatcttaacactgatgttttccagggaggatccccttttcatacttggaggatattcac

SEQ ID NO: 107354 - DNA, 621 bp, Aquilegia coerulea
  Intron number 1 from transcript AcoGoldSmith_v1.027736m (l ocus AcoGoldSmith_v1.027736m.g) derived from phytozome v7. 0 (chr-ID scaffold_20; pos 985546 to 986166)
gttaaccaggttttttatttttattattaaattaattgcaaataatttagtttatgttgaattattaataaattatgatgggtttttttttttatatatcaaaattatttgcttttaagttagaattgctctataaatgtttgctcaattaaggcatgagtgagacttatcacatgtgcaggagaattccatttatgaacatccattgaatgccgtagtaacgaaataagaaaggaaaagttacatgacaaaacattcattatgcttatttgttagctatgcaatgcattagatatagacagacatacagaattgacatatggtcataacttatcaaagatccaggtgcctttcatttcctaaaccaggtgagaggactagtcgtctaataacgagttcttcaaatcaaatacgaaatatagtgtcactcactatttatgtcaaaggatagcaggctaaatgaaggaggtttaacgtttttttaggggtggtcaacttgctgaagtttgtatatctgcttaagtcttatctgtgtttgacttatgtttcttctttcttgacgattaatcttgggctaacattttgtgagttgctctccagattaagagagaaatatccata

SEQ ID NO: 107355 - DNA, 903 bp, Aquilegia coerulea
  Intron number 2 from transcript AcoGoldSmith_v1.014315m (l ocus AcoGoldSmith_v1.014315m.g) derived from phytozome v7. 0 (chr-ID scaffold_20; pos 324765 to 325667)
ggaggatttggaatctggctcgaactaagaagcaggttgtttttcatgattttaactcatttctttttggattttttattttttattttgagttgtgtttgttttgatttgggatttttaagttgttcatcacactggaattacttaaatcaaagttagaatagcatttttgccactatatagattctgttggaattggtactcagtggatttcaacgagcaaatgctgtgattgttaatgattgtctatatttagattttcttaatggtcgtagaagagaaacacatggttttcagaatgttgttccctcctctaaaaaaggcatacactcttggaaacttttatatgctgtctgaagttgaatgattttgatcaatgaacaaatgttcgatttttcctaaattatagtgttattgttagtcatattggttatttggatatgcaccttcactttagatccttattaactattgagaaaaaattaaaattaccatgcacatttctctgtgcaggtttgtgttggatatgcgtgttattattgtagaatatgtgaaattgtaatccaataatttttttgttggaattagatccttattaactattgagtaagcactaagtcattcatccagcaaacaaatactgtatagactttagtgctgaactttacttcaatcagttttgacaggaaatacatttgtgtgtgtgctgtttatatatttattgattgactggcaatcatgtggcgaggctgaaggcactttataatgccggattccatgcctgttactatagtttctttatgcctttcaaaagtgttatgacttcatagtttggattctatgtatgtgaattgaaataactagactgctctgttccagattgagggtgaggaggctcagcgt

SEQ ID NO: 107356 - DNA, 521 bp, Aquilegia coerulea
  Intron number 2 from transcript AcoGoldSmith_v1.022326m (l ocus AcoGoldSmith_v1.022326m.g) derived from phytozome v7. 0 (chr-ID scaffold_53; pos 1656162 to 1656682 reverse stra nd)
tacacttcccttgaaaactggcattgcataaataggtgtgtgagtgttgaagtatttttctggtaatataattccacttaccatactgacaagagaatttatgctatttctaggaaacaacgacttgaccttatctcacaaattattcattacatgactggtcacatttagagaagtactcttaagacttagtaattggtgtaagaatcagttgtacacatttatcacacttttagaagaatgcgattcctattataaatatgctgcgcatcataagtttcttattcttggtatcaatgcaggatgttggctcacaaattcgtggagcagtctacaaaatctgatgtttacttgaaaaaacaaaaaacgaataagtcgtggtggtcactcggatggttgatatcttccttgattctagtttatttactgctttctccttttctttatttgatttttgatggtgatgcttgagttagagtgacagagtgatattatattcaggaccgctgattctgttgagg

SEQ ID NO: 107357 - DNA, 1028 bp, Aquilegia coerulea
  Intron number 1 from transcript AcoGoldSmith_v1.009232m (l ocus AcoGoldSmith_v1.009232m.g) derived from phytozome v7. 0 (chr-ID scaffold_4; pos 7103518 to 7104545 reverse stran d)
ggaattggcatttctgctatctgtaagtctcaaggaatgattttttttttccactttgattgtatattagatagagaacaataggtgaaaataatttaaatttagatgcattacccttgtttagtattatgacttgaagacactagcgaaaaaaagcgactatttctccagaacattaatattgtgattccatactagttgtttaaaatgttgattttagcctacaagtgttgtaggttttcaattcttcagaaataaacactattaaagaataacagaagatacccagtggttttattagttatttttgaatcccaattatggagacaaataggattgaactataatatttttagtcctgtctgttattggactgtgtgcagtctctctttctacagttctccaacgaaaatgctgaagtggtttggcttagaaattgttaggacttagtgttaagttcctttagtttaatgttaaggttaggattctaattttttttttaatcttagttctgttcgaaaaagatgatttcattggtgtatggcgacacattagctacatccatcttaggcatgccaattacgtacacattccttaatattctacatctactgcaagaaatacaaatctcattaaaactataactaatggtccagagcagtgttgagcatgacatggatcgcaccatgtaatgtaatcccttattgtgtcaatgactagtatactggaggtccttgttattgggaagcaatagactcgaaagaggaatcatgtttctctacaggatccattcttcagcataaaatatctatattcttacgaatcatcacaaagaatggaagtgtaatgacatcaatgaaacattccatgctaatagtactattgaaaattttcatcaactttaaggatatagtatcattcaaattttaaccattaatgatcttagaaatgttttcttctcttatacaacccaaaatcatactttatctttgacaggggaaagactagaattttctggacaaggtgaa

SEQ ID NO: 107358 - DNA, 1024 bp, Aquilegia coerulea
  Intron number 1 from transcript AcoGoldSmith_v1.006232m (l ocus AcoGoldSmith_v1.006232m.g) derived from phytozome v7. 0 (chr-ID scaffold_140; pos 164564 to 165587)
agttgatatcaaggagttcaactcaagtcttccaagtgagtaattgtcttctttttttttagcataattaaaatgtgattatattcatgtacaattttttatatcttaattttaaatttgatatttattttgttaattgcaatgcgttaatgtacatttgcatcagtatacacatataaaattacaattaaaatgcataccactcatatggtaagaagatcatcatcacgaacattccctttgcaagcaaacttcttctagtgttggatttcagtacaagcaaatagttgtatgagtatttggttgtaccaaacactgcttctagggggatcatcatggcctgggttttttaaactgttcaaatttgtctatgttttgttgtaattgggatgcataggtgtggtgactggtgagcaagagatattggttcatatgtttttgtcaacttatgatcattattgtgtaggtaatagagtgagaaaggaagttgacgttgggggctattaatatcaattaaatttttattttaaagatttaataaaaaaaaaaaagcaatctcagaagtctcttctagtctattgttgctttttatttgctttagtttgacatgaagtgataagttgtgcatagttctgagaaaatcatagtaacttactagagtcagcatcgccacactgtgtaccgcagaatgaaaaatatgttatagatacatcatcacactctgtactagtaagaagctagatatacctacttttccgaaacctcaacagattgtggtttaaatattctccatttgatttttctttcacttgaatgcttacatcaattgctttttttttttttctgtatccaacattaatttgttgccctttccacaattacctcactaagactttacgatcatttttattgaacactacagaaaataatctattgatcttcatttccaagtctaatgcatttttcttcaacattttcatgcattgcagaaccattgtctgcaactggtctgccatcatctcat

SEQ ID NO: 107359 - DNA, 1033 bp, Aquilegia coerulea
  Intron number 1 from transcript AcoGoldSmith_v1.013906m (l ocus AcoGoldSmith_v1.013906m.g) derived from phytozome v7. 0 (chr-ID scaffold_4; pos 6551998 to 6553030 reverse stran d)
acgtatcctacttctgcttggatttacgtatgtttgtatgtagcttttcttgataattataatattaacaacactatgatgtacgctatcgtagtcctttgaatttgtaactaccaccgaatgcttcaatgttacaaaccatatgattctggcaacagtgtttgacatgtacagcatacaataaatctttttttttttgtgtgtgtgtgtctttgctatttaaattatattcaaagaaaatataaaataatttagattcaaagaaatcagttgatttatctaataaattttatttgtttgctagttaaattgtagttatacctacactaaattgacactgtttgcatcagtgactaatatcacaatccaaaaatgaccaaattgtgtgcaagtaataatgactactagtagcattgtcaaatacatttttgactattatgtaactatatttattttcactctgttcttttttttttttttttttttggtataatcaaagctcgtgttgtatatattcttaagtgtcttaatgttgtctaataatttatttttacgaggcaggaatccttattttttggacataaaagtgtttatctcttttatcatatagatggagtagcttggttgatatatcacacccacaatctgtttctcttctgaaactgttgtttgtgggtatgaatagcaatggtggatagttctatcctaactttttttctgtatgtatggtgtccatttttctagcgtgcatgtcattttattcaatctaatggagtttcttagattacattatgagtcactggtgaaccgtttagtatttggatttgcaatgttaggaattttatttagtgtccatatttgttgcttctctccagtctgattatagatgaaattatccgggtctatacatcatattaattttcttgagtatctaataatttcctggtaattcttctgatttataatacttatttccaactcacaaaaactagaaggctgaatactttcgtatcaattttggtaggatacatca

SEQ ID NO: 107360 - DNA, 771 bp, Aquilegia coerulea
  Intron number 2 from transcript AcoGoldSmith_v1.021518m (l ocus AcoGoldSmith_v1.021518m.g) derived from phytozome v7. 0 (chr-ID scaffold_33; pos 922505 to 923275 reverse strand )
cctaggtacgctttacattccattcacttatccatttgattattattttttgattcatgcaatgtgattcgtagagtatatgatctatcccctgcacgacatatataagttaaaccgtcagacatcacaagcattggaccatctttggatcttaaatgtttctatggttattagtaacaagaatttataatatacctttagatgaattttgtctacacttacagacaccgtgagattttgtttctcatcccgagagcacctagcacgtaccatacagcctccggtatgccaatattgagcaatgtaacccttccgagtgcttcaaaccaaccaatcatgcttgttagtaatacgaatctatcgtaagcgttaactgatcttcaaaaccaagaaacatatttttgttccccctaagttagatcactactagattagtaaaaggagtatggcctaaataaaccgcacacaaaatcttaggatctgcataaagtccatacgggctataaatttttggcaagttgttttcgcttcgtgttacttataagctaatcgattttaataaactctaacttgaataactttgaattttgtaatgaacttatttgggattgataagaaattaattacaacaaagatcttctcaaatttagaaaatcttactttttttaattcagtacacaaatctaatgatgctaggtataaaccctaacttctttgtgctagttgtaaatgaattttgatagattttctttatcaatgtggctaggtata

SEQ ID NO: 107361 - DNA, 928 bp, Aquilegia coerulea
  Intron number 1 from transcript AcoGoldSmith_v1.008869m (l ocus AcoGoldSmith_v1.008869m.g) derived from phytozome v7. 0 (chr-ID scaffold_20; pos 1841638 to 1842565)
tgtggaagaaaggggatttcaagttatctacaaaggtgagaattttgatctttttcatgtttctggttatttatcaattatcatcatgcatgaatatcactgagttgcattcactgtaatattctcaagagtttgtatcaaaaattgaaacaaaatatgcaaactatgctgtcaaaggtgctgccagtgccgcgcaatgtctcaagacttgccaaggccctgaaggcggccgcttgggaagcccaggaattagcgatttgctttctccctgacagcataggttgcaatttgcaaacatgttaaacagacccttatcttgggtgacagtcatgcaggaagtgtacattgatacaaactgttcatgaatcatttgcataatattttaataatcttccatctacttgcaccaccctgtcaaggcggaagctgagggtttgagcccagtcagtcccgacctagtgtccgatgattccatcagttcatctctttcttagctcacccaccagaagttttgcctaaaacttgtgttgtaacttgtaaaggtaaccttccatgacattttgagcttgtccctatccgggcatccggacatcttcaaaatattacccaacttcttgctttagaagtttatgtgtgtttgcataatgcatccttgattcatgattttttagctatacttttcctcttcttcagtgattcacatactatttttatgaaaatcatttaagctcatagttccagtcatgttccccacgttcaattcacctttatatgggattcattgtagcgatatagtgtgcattctccttcatctgttaaattcaacacaattgatcttgtaatgttgataaactcacttttttcattttttttttttacttttctgactgcagttcacaggcaagtcagttggaattattggattagg

SEQ ID NO: 107362 - DNA, 799 bp, Aquilegia coerulea
  Intron number 1 from transcript AcoGoldSmith_v1.027640m (l ocus AcoGoldSmith_v1.027640m.g) derived from phytozome v7. 0 (chr-ID scaffold_23; pos 695209 to 696007 reverse strand )
tcacaagagttcaagcaagaggtaaatagtattcaactttctgactaaattattgacttattgttgcgggggtacaattgaagagacttgactaaagtattcttgtttggatacaacttgctaaactatgacattctttagaataattcgatatttcactgtgtgtgctactgtgctatatgttgaccaacttaaactaattctcttatttgaactaatgaagctacggaatgtttttggtagagatagggcaacaaattgaaaagtaaaggatattgataatgacaaaatacaagcaacaaatctattgaataatatcacttccacacattggtctccccctttttttgagttttgtacatctttaagtggctaaactaaggaattgtggttttaaatgatctttctctgtgatcttgctatcttgttgtgattgtttcccaatgaaattgaaaaggtctgctatttgttgaccaattgaacctaagaggaattcacagcaaatatagcttagaaaatcaatcattgtgtgattgttagagttaaggcaacaaattggaaagtacaaaatattaataaacaaggatacaagttaatcctttgaatagtctcatattccagtaattagtttttgtctgtgatattgctattctatcgttgcttccatataagattacaaagcgaaaagagttgctgttatatctattgcttgttgtagagttcggtattgctcgtaatattgtctattgtctggccacatttctttctcaggaaacatccttacaaaatcgcagtgagg

SEQ ID NO: 107363 - DNA, 691 bp, Aquilegia coerulea
  Intron number 1 from transcript AcoGoldSmith_v1.026401m (l ocus AcoGoldSmith_v1.026401m.g) derived from phytozome v7. 0 (chr-ID scaffold_66; pos 28147 to 28837)
gattgttctcatactggaagtgagttagaaagaattataatgaaattttcattgagactattcatatgtttgaatgtataatgcagtcttaaacagtttatacatcatgttttggatgtacattttttgcagcttgctaacactgaggaatatatagatggacaattcactgggaacctcggagaaattttgattcggtacgtgcctgctctgcatatgttttcccatttcttgtgaattcttaacaaatacaaaggaatccaaatgatatagtctgctcttttgttcaagcattaccaattaaattttaaaatatcacatcggcagtataggttgaagccacaagagtcacaatgagtgtcgggactgcagtcgacttgagataattggttgcatttgcatattcttcccctcaaaactagagtagaataaaagggcatttagattttggtttcctaaatatgttttcttaaagaaaaaagtataaaccttcttcgcttatatgtataaactgtttaagttttcctggattatgattttaagttggtatattaggcacaccaactgttttgcttttgcatgatgatttttgtttaaacagttgatccaggttttatagttgaatgtttaatccacttctatatttaatgcagttgtaacaatgttctctatcttcgaggcataccagagg

SEQ ID NO: 107364 - DNA, 424 bp, Aquilegia coerulea
  Intron number 1 from transcript AcoGoldSmith_v1.001839m (l ocus AcoGoldSmith_v1.001839m.g) derived from phytozome v7. 0 (chr-ID scaffold_14; pos 312142 to 312565 reverse strand )
cttgaagataccagaaagctatccgatctacttgtgtaagtcgatctcttctcttcaatttcttctgatcgatctctttgttgttttattttttcttgttattgtgttctaatttcgaaaaaaaaataagaaatgtaacatacattccggtgtgtgatcgcagttcaattatttttttttttccttatttcttcttttatatcttatgtaaagctttcagctgaaagaaaaaaaaaatgtttaaaaatggaaaaaaaaagaagagaaacaagtaaatgtagacactttatttatttgtggttttaaatcggttatgttcttcatcagtggttatacataactctttattctcttgcttgtcttttgatctggagaattactgtttttttttttttttttttttttgaatgtaggatcaacaaaa

SEQ ID NO: 107365 - DNA, 408 bp, Aquilegia coerulea
  Intron number 1 from transcript AcoGoldSmith_v1.007567m (l ocus AcoGoldSmith_v1.007567m.g) derived from phytozome v7. 0 (chr-ID scaffold_42; pos 1391813 to 1392220 reverse stra nd)
gaaagctgttgaagttagagcaaaatcaaagcaggttagttttatttatatattttttcttcttttgttacttttatatttcaaaattctttgttgttgttctttaaatcttcaattccttcaatgggtttttaattttctgcaaaatctataaagggtttcttttagaattttaattgattcattaacttgtctgtaatctgggtttatttgttctgttcttagttgtgtaaacttcaaagtataaacttcacattttgcaaaaacaaaataaaaaaaaaattatggggaattttttgatgaatttgaatgagtagatcgatcttataaaactgagtgattgaactttatttgggttttgatttattttcagagttttgagttgaagttgagaagagaagaaagtgc

SEQ ID NO: 107366 - DNA, 996 bp, Aquilegia coerulea
  Intron number 1 from transcript AcoGoldSmith_v1.022110m (l ocus AcoGoldSmith_v1.022110m.g) derived from phytozome v7. 0 (chr-ID scaffold_14; pos 785359 to 786354)
cgcagctcaaagaactttagaagcttcgtgttctggtgctctattaagcctccatccttctttcaaggtttccctctctctctctctctctttctcttctatattttttaattgattattgtaatttgatcttaatttgtttttcgcaattgcagaatttgggatttaaacgcaccagaatttcactaataggaaccaattttcaattgcaaaagtcttcttctatttgttcttttcgtttaggaagacgagatatcaaagggagcaagctaggtgagatttgggggcttttttgtttgtaatttttgttgaattattaaagatgttagctttattatccccttttctttgaattgggtggttgattttgtagtacaaatagttatctagaagtcaatgctcttgtataaattttcatgctacttaagttataggattgttttgaatccctagttggagctttgaacgactttcattcttcgattatttgaacctgacaatacaatactgtattaataaatgatgaaattattctcacgatttgtctggcaagaatgctgtagctagatcgtgacaaataaatagttcttataattttcaatttttcatgtaatgaactaaccagaatccatgaacaaagccacaggccatgaatttttttccactattgcgaatcatcttactgaaggaaaaatctcaccatgtgtgaactgtgaaaggtttatgcaatcttagtgtaccacgtgaggaaatggttattgtaaatatgcactgtgtacagatacaagatgtttgtagtgatacaggattttacaactcttttttctcccgctatagaagtttatttctataggaaacagttccaacttccaatttgttgatcatccataatcttttgattctaattatagtaagtggttcattggataaattaaaaacctttgtcgttaacactctgcagttgtcaaggctgttgctactccagattcagcactg

SEQ ID NO: 107367 - DNA, 556 bp, Aquilegia coerulea
  Intron number 1 from transcript AcoGoldSmith_v1.010273m (l ocus AcoGoldSmith_v1.010273m.g) derived from phytozome v7. 0 (chr-ID scaffold_4; pos 8862520 to 8863075 reverse stran d)
tacttccaaagtatgatctttttcttcctttctagggtttggattttgttaatattgtttatgagtttatgtctatttgattcaagtattagggtttttaagtatgaattttagaatttgggttttaatcaaaatcaaagtttatataggatttatgccattttatgatgttcatggtagatacttgtaattttttgttattttgtggggaactttttaagggttttgttttcattttgatattgtggatttgggtttttgagaaagatgtgttgttggtagaatcattactattttcttttagataatgttttgaatcaaattacattgaagcttttcttgaacattttgttgtagctttttaaatcaaaatttaattttgcaaagctttttgataaggctagaaagcatttctatttgggaaagttgattagcttttcaggtttagggtttctgtctttctgataaagagaactgatatgatgagtgatgattttatttctttttcttgtttaaaacagacagataaagcttcattactagctaaagtgataca

SEQ ID NO: 107368 - DNA, 687 bp, Aquilegia coerulea
  Intron number 2 from transcript AcoGoldSmith_v1.010622m (l ocus AcoGoldSmith_v1.010622m.g) derived from phytozome v7. 0 (chr-ID scaffold_20; pos 2110022 to 2110708 reverse stra nd)
gaagatacaggtttgtgttcttcaagctcatcaagattaatttaacttcaactcatattatgtttgattattttgttatgtgttgcacaaatgaggacatttgttatatcgagtacaaacggaggtgggagtttgtttcagtaggtttatcttgggagttgggacttgatttttctttccaaattgtggaagtaagtagagggtttggagttttagttctttttttataggaaattaggggtcttgtgattgattgattttggattagatggatctttatgtgctgcatattacattgtagaactcgatataagatagtctgtttttgttggaaacataagttagactttacttgtacttaggagatggtcctagagtccacaattagcactaattagtaatgcttggtggtagttgattgttataagttagagtaaatgtatttgcctagtttgaagcgtattagtagttataaatagatgtatgtgcaatgcacaaagtaagagtttaagttcttaagtgttttgtcttgtctatagtttctttgttctgtgtgcagcaagagaacaatcttcttctcttgcatatttctgagttgttttaattcaacagttttcaatagtttgtttttcatgagttggtaatggcttgtaaattaatttaattatatgtttgttgtaatgccag

SEQ ID NO: 107369 - DNA, 687 bp, Aquilegia coerulea
  Intron number 1 from transcript AcoGoldSmith_v1.007937m (l ocus AcoGoldSmith_v1.007937m.g) derived from phytozome v7. 0 (chr-ID scaffold_14; pos 2443205 to 2443891 reverse stra nd)
ggatacattggaaacaaggtcagtttcagttctttgttattcatttcacaatcacattgttttcatttcttcttccataatttgcaatagtacttgaacttcttcgagaaatgaattacaaaaattagtgaagttacatagggtctctctgaatcttagatcagaatcataattagactgagtgtgcacacttgggaaatgtctcaaccagtcagtaatgaagatctcatgaaaagttgaccactattatttgcattaccctgtcaatctagaatgtgtttcttctgcacttatcaattgttatattagtgttacaggtccgggttttaaaagttggatagatacaataatacaaactccttgttttgtgtcatattgtatatacatttctatctagtatctaccatggccaacatagatatgcttgtgcgcagaggcctgtattggtttttggaataattgtgtctagggctctaagcttatctttgtatattcacttggaacattttccaagtggatgcgtctctgagccagttatgtgtttgatatcttatattatagatcccttaataaaattcgctcctactttattagtgtttacaatccttttttaccataaccagttcatactaactatggaatatttttgctcaattttgaatgttccagggatcaatatctgtcagc

SEQ ID NO: 107370 - DNA, 793 bp, Aquilegia coerulea
  Intron number 2 from transcript AcoGoldSmith_v1.026176m (l ocus AcoGoldSmith_v1.026176m.g) derived from phytozome v7. 0 (chr-ID scaffold_14; pos 1601452 to 1602244)
cactagtcatcaacattggtgatactttcgtaggtattttatgattatgtatgtttactaattctttactttgattatttccattcaaacttaatttcaatgtgggattctataatttgaaagctataagttgataaagaacagtttctagcatcagtctaaatataccaataagtaggcagtaatagctattcaaactttcaagcttttcaaagactacgtcgttttttaattcataataattctacagtggatgtggccaaaatttcaattttataatattcaattattaaatttggttgtacttagttattttctatttaatgtttgtcgaaaataagtaaagacacgacaaaaaaaaagtttgaaatactataggttattatcgtgttgtgttggcttaaatataagttgagactcatgaatatatgtaatacagaaacaaataaagaatcccattcaaaattttggttttcatacataaatgtatttgtagggggtctagtgtacgtggttgaatggtcatccatcttaggcttgatgaatgttctgcaacactaattaaaccggccaagatcgatcaactactttcatgtcattgtttgtaggggtccatattatatatactgtataggccaagaactcgtgtggtctgtgtgatatgatgatgatcgatgaatgaatgtaaaaattttatgtacgtaatgaatgaatatatatgatatgagtcaggggaatcgtttgcttaatcatgtgtgattttgttgtttgtttgatatgtaggcattatcca

SEQ ID NO: 107371 - DNA, 469 bp, Aquilegia coerulea
  Intron number 1 from transcript AcoGoldSmith_v1.006513m (l ocus AcoGoldSmith_v1.006513m.g) derived from phytozome v7. 0 (chr-ID scaffold_17; pos 507665 to 508133 reverse strand )
gcactcagaaaacatccttttttaagccatttcaggtactaattaatattaatttgcctctgtttagatctttcatgaagctttatatacagcattatttgttagattgttgttttgtttttgttagatttgaaatataaactacaattggttaagaaagacgaatgttgttgaaattggtattgttggagagattttgattttgatttttttttcctggaaatgacattcatattggttaagaatctttgataatatcgaaaacactttgaacagaatttttttattactcttgatgagttctttttcctcatgctgatcattaggatgcttacggtttgccacgataacatgttttgacctgactcctgaccagttacttttgagaaattagagtggcttaatgttttgttccggttggttttgagttatatactgtattgactattcttttcaatatagcttcagg

SEQ ID NO: 107372 - DNA, 787 bp, Aquilegia coerulea
  Intron number 2 from transcript AcoGoldSmith_v1.011209m (l ocus AcoGoldSmith_v1.011209m.g) derived from phytozome v7. 0 (chr-ID scaffold_45; pos 1742974 to 1743760)
cacaacaaccaagctattgtcacttcttggccgtacttttctaactgcacttcattcattttcatgtactcttgttaaaaaaaaaataataataaattattgtatgttttttttgttttttttttatgaaataatagttttattccattttagaaagatagtcccattttagaacttccactctttagagacattacaggagaaaaccagcctcattaacagtatacacattgatgaagcaggcacctgcatcttccccaacagctctaaaaccctctgtctacagccctgaatcagtatccattagaaaccatagcacactgaaccaaaacagatcaataacaggtcaatgcatagcaattaaaacttgccagtccgataacagttgcgcaatgttgtaacttctcttaaaaggctaaaatgtgggccaaaatgttccagaaaatggcctaaaaggctaaaacagataccaaagcctggtcctatatggctggcttgaggccgcccaaaaataacccaaaattatggtgtcagaagctctgtataggcccagcaaatatattttctctttctgagtttgattttgatgctggatttggtctgtgccagtataaggatgtctatattttggactgtattccaagactttgataaaattgaattggatgcactcctttgtgcttagttcttctgacatgcttgatcatattattctggtaaatgagcttatgcttaattatatgtatgcacaggaattacggacatagagatacatttccttcagatt

SEQ ID NO: 107373 - DNA, 735 bp, Aquilegia coerulea
  Intron number 1 from transcript AcoGoldSmith_v1.002938m (l ocus AcoGoldSmith_v1.002950m.g) derived from phytozome v7. 0 (chr-ID scaffold_73; pos 449284 to 450018)
tctggcttgttgaattcaaagtcttgatacattttgtatgtttctgttaccctttgagctaatttaactatcccaacagaccccttaatgtatcttggtttgattttttaagttttaattgaacaagttttttttttttttatggcattttgcgttgaatattgtaattttagtctgtttttttttttttttgataaatttccttatatgatttgtagaagatgaattaaagtgtattaatttctaatttaatctgtttatgtttggataagattgacttgggaattatttataaatgtaaggtttaatgtatgttttagcctaaatgtaaatgccctaatgctaaatgtctcttgttttggttctagtagtcttttgtttttttttttgttttttctaaatactgtaatttatagtttttaatagttttttttaacatatataaacagagttctaagatgggtaattactagatatgccctttttctctgaagaaaacttgatcacaaacatgccttcattgtctcttcatttactcaaattttcctttggtagttaatgattagagtttattaatcttggagtttaatatgcttgtatctagatcaatgctataaatatagtcttttaatttctctggatgtttgagtatttgtgaggttactgtagatcatttcctcaaattgtataatttgttgccttcgtattagggggtgaaaaagagagcacataggt

SEQ ID NO: 107374 - DNA, 607 bp, Aquilegia coerulea
  Intron number 1 from transcript AcoGoldSmith_v1.003307m (l ocus AcoGoldSmith_v1.003307m.g) derived from phytozome v7. 0 (chr-ID scaffold_41; pos 812255 to 812861)
ctcggttacaagcaagaactaagccgtacactctcgtaagtcttctttctagttgtatttcaattttcaaccaatatgaacttttagtttcattcatttcatagaaatggattctttcatattgctactttctgttcaatgcacaacctctacatgtatttcttggatctataattttaattaatagtttagaagggcttataaaatgtgattttattctgtgatgcaaaaaggtgcacaatgccacaatgtacatggacaaaatatggtgcaactctaaattaaattccaatgtaacacacctcataggctcatatatactgtgcttactaaacattgggtccttctagggtgcaacgcggttcgacacaaaagttatcattccatataataacacaagccattccatttagtggccaagttgtcatttaggtcttaccgacttacctgattgatcgaatcgattaaatcaataattttgtagagtaattttgatgtcatttcgcagaagttcttattgttgttggttgtttgaactttggcgatgaagatttatgtgcatatatgtgtagggctgtatcgaattttgctgtgacattctctatca

SEQ ID NO: 107375 - DNA, 390 bp, Aquilegia coerulea
  Intron number 2 from transcript AcoGoldSmith_v1.007657m (l ocus AcoGoldSmith_v1.007657m.g) derived from phytozome v7. 0 (chr-ID scaffold_14; pos 1876766 to 1877155 reverse stra nd)
ggtaattcaatatcttttctctttcttaccttaaattactaacgaagagcaagggtgtattatgtttatttgatatccaaaatccgaggtagcaagctttcgatgagactagctaaaccctaaattccccaaacacagataaagaacccaaaacatagtcaatgataagatccggatctttcagggcctgtatgtaataggatttccctcttcgcaactgtgatgtggctttaagcttttgacactgtgtcatgaactcatgatatcaaatattcaaattagtgaaatctcttttgtttctttgactaatatgagatgtggatggttcagctaatatgttctaaatgtcttacaggtgatttcgacctttatacttattagcgccatatt

SEQ ID NO: 107376 - DNA, 469 bp, Aquilegia coerulea
  Intron number 1 from transcript AcoGoldSmith_v1.007657m (l ocus AcoGoldSmith_v1.007657m.g) derived from phytozome v7. 0 (chr-ID scaffold_14; pos 1877179 to 1877647 reverse stra nd)
tacagctcctagaagaaattctaaacgacccaagtgtaagtttttgctcaaaatcacaccttttgatgattttcaggtagattgctagatacccaaatgtttaaatgttctattgatgtggtttttctatatagtttagtgtattttgatgtttgttgaagatacccaaatgttaaatctatctatagatgggttttctatatagttttagttgattgatgaagttatgaagatacccacaagttttagttgattgatgagcaaaaaagtttgtgtattttgatgtttgatggtagtagatcttgattttggagagttgttttcgcttttatttgacttgatattttgctaatttgggttttgtagacttgattattttttaataaggttccatacttacattaatttttaattatatatctgtatgttttcagattcaaagtttactcagcaagagcttccagcttgc

SEQ ID NO: 107377 - DNA, 500 bp, Aquilegia coerulea
  Intron number 1 from transcript AcoGoldSmith_v1.007217m (l ocus AcoGoldSmith_v1.006252m.g) derived from phytozome v7. 0 (chr-ID scaffold_14; pos 2435133 to 2435632)
aattccgtcttctgaagctttctttctttctcgaggtaatctttctttcgtgatttgtttgattatttgttctttggaagtatgtgttggtttactcttgattgattgatttgtttgattttgttttttttctttcaatcttatagattgatattgaagttgctatctttcttgattctcttttgttgttgttgttagagattttgttttgttactgttgaagagctcaagatattaatggaatcatatttccttttgttttgttttttataaacatttaccactttttatccttttatattgtggtattcttatttagtagtaaaagtgttttcttttgttgttatgtttgtttgagctgaattaagaaagattagtttgtttgtttaagttcaaatagccaaggaatttgaagaaatggatttgagctatttctttgtttctttctttttctttttttttcagattaaagattctcgtagtaaaagcgtcatagatat

SEQ ID NO: 107378 - DNA, 143 bp, Aquilegia coerulea
  Intron number 1 from transcript AcoGoldSmith_v1.023243m (l ocus AcoGoldSmith_v1.023243m.g) derived from phytozome v7. 0 (chr-ID scaffold_53; pos 995516 to 995658 reverse strand )
ccaacatcaaggctcttcttgtggtatgatttgatttgattttatattagtttgttctttatatggataagttctatcaatgatatggttggtttttctttcttttgttgctctgaattaccaaatttctcttctggcagaac

SEQ ID NO: 107379 - DNA, 492 bp, Aquilegia coerulea
  Intron number 3 from transcript AcoGoldSmith_v1.010628m (l ocus AcoGoldSmith_v1.010628m.g) derived from phytozome v7. 0 (chr-ID scaffold_45; pos 1877760 to 1878251)
tgaagtcatttggaagcctaaaagtggactgataggtacgcaatgaataaagttgtcttgtctgcatttatcagttcaatatgaacttatttgagatcaccttgggatattttggtctagcattagtggttatttgattaacaatttgaagcatctatccatctatttacgtgtgtcaaggaaagtgcgggttatactaagcaatgaataaaaaccgaacctccagtagttttcacttatgttttgtagtcttgtttttttatttgttgctcaccttaagcattctatgcttttgtttaatcacatttcgtagtcatgtccaatagatcttctgtgatgtatcttgttggaactgtagagacctgtgctgaaaattctgttgatcctgggcagttgctatgcgaattttacttaaatagttaaatttcttttccttttgatgatgtgaacattttctttcaatgtgtaggcaaggaagagagagagtgtgag

SEQ ID NO: 107380 - DNA, 544 bp, Aquilegia coerulea
  Intron number 4 from transcript AcoGoldSmith_v1.010628m (l ocus AcoGoldSmith_v1.010628m.g) derived from phytozome v7. 0 (chr-ID scaffold_45; pos 1878295 to 1878838)
tcaatcctaataccacaacttctatcatacttcaggtgagataattttactctgcgcctttttattgtagttatcagagctacgatttcttcttcgtgtatcttgtttatcattatatttccttatcatgggctgagtacaataagatacgaagggatacctttgtattttattgccggaatagtcacttctctttttgtattaataagtgcattttacaacttgagatatttcgcatggaagaccatgttcagaaacaatgcaagttcttttaaactgctttcattgtctgatctcttttttctcttatttttccatttccaaacttttttcttaccctctattttgttttctgcaaatcaattctttgaatccaaataatgaccatatccacaatccaaatcaggccaaagctgttgttttcttctaaatcttcttgttttaaaataagttcttcctattattgtttcgtagtagttgttctttctgtagtttgatatcccgttccagtgttgatcatgtatactctttgtgcaggttatca

SEQ ID NO: 107381 - DNA, 434 bp, Aquilegia coerulea
  Intron number 1 from transcript AcoGoldSmith_v1.025995m (l ocus AcoGoldSmith_v1.025995m.g) derived from phytozome v7. 0 (chr-ID scaffold_45; pos 1541251 to 1541684 reverse stra nd)
attgtattggaggaattatcgggtgagtttttcattttctatgtttcatgattctattgcattgttgaacattatatatgtgtaacatttgatatacttcaaaagatatagttttgttcagaacttggtggaatgcttcttgaattttttacatttgggaataaagtcataaacaagaacataggacgacactgatcggaatgtatccattcgaaatgcatgttgacctcttttcttcacatagtcagaatgatgttcattagaattcgttgggccattcgagattccttagttcaaagcggccctttattagtagctacattatatggaatgcttccattatttgctgtggtcatctttttcttttcttaagtttttttttgcaaatttttgttgcagttatcaaataaaggtgtttgaactcctttcttcgt

SEQ ID NO: 107382 - DNA, 642 bp, Aquilegia coerulea
  Intron number 1 from transcript AcoGoldSmith_v1.007024m (l ocus AcoGoldSmith_v1.007024m.g) derived from phytozome v7. 0 (chr-ID scaffold_4; pos 5442507 to 5443148)
actcagttctggttactgttggagatattgctcaagtgagtctcatttcatattttcattttactaattttcttctaagttgatgaaattgtatttataaccttaatccttttgacgtgccgttttcgcactttttttctatacaatatcaataatgtgtgagttatatatattgtctagtgggtgggaaatgggaataatatgtcagcctagatgttgcttcaaaattttgccactaatttgtgctggtcaagattgtttgacttgaatcggtttttggtcaattgtcctaagactaaaatggaaatcttggttcttggatcaaccataatcagagattttcacaaagttgttgatggtcttccttgttcatagggttcagtcaaaaaatttcaccctcaaccctcttacagttagaccatgtggtggtgaactggtggtttatgtaaaagtgccagtaaaaggggccaacaagtagcccctggtccctggagtcctggaccctggcaatttgttaagagttcatcccacatttcgaaccaaaattaggtaactaagtatcctctgataatttagtatatatgataagattactccaatctgaattctgatcatttttcaatctgtgtatgtgatgaaggt

SEQ ID NO: 107383 - DNA, 997 bp, Aquilegia coerulea
  Intron number 1 from transcript AcoGoldSmith_v1.014721m (l ocus AcoGoldSmith_v1.014721m.g) derived from phytozome v7. 0 (chr-ID scaffold_38; pos 1579891 to 1580887)
attttgaaaaaggttataatcgtcaattttccacaaatatgttacattgtcatttctagggtttatgattattcagcatttttttctctctaatctgtacagatttcatggaaaaatgtactgaaatttagggttttatttttttttctgtggttttgatgattttggaaaaatacgttgttttgatgttgttgttttggttttacattcatgcatgttgaataaattttctattttaggggtttagtgttcttctttctttggagatcaagttctagaacattatattgtagttttgatgtagatatcactatacattgtagtagttgtatatatgtatgattttgctgcttttgactgttttattttcataacagttaagaaaaattccatttttttatgcttgtgggtttgtagtgtggtttttgtttcctctttcatagatggctgctaaagtttgtttgtatcagatttttttgggtgtttggctggagttaatttattgtgtagattttatttgacaactatatggtgtatcgttggtgttcaaatattactaaaacatcattatattttcaaaagtcaccagcttggacattaacacatctatcatataatttgtaagactaatggttttggtaatcaaagggattggccataagtcatctttttatatgaaaatgcttacagcttcttcttggatttggggaagtacagatgaacttacccatttaaatcgaattgcaaaattggcatacttgaagttagttgtacaataaatcaattcctatcctcttgtattggaattgtgtcaatatatatatatatatatatatgatagtttgtttttgatgtgtggacttcatgtccattgtttgtttgatggtcttttaatgatgtacattaatttggagggcattaaactgactgattgtttatttgtttcttgtttatcatcctggagcagactttatggaagaagttactacaggacaaa

SEQ ID NO: 107384 - DNA, 896 bp, Aquilegia coerulea
  Intron number 1 from transcript AcoGoldSmith_v1.023247m (l ocus AcoGoldSmith_v1.023247m.g) derived from phytozome v7. 0 (chr-ID scaffold_41; pos 118490 to 119385 reverse strand )
ctaccattggagtcttcactgttgtcattctctgtgtatgtttttctgattcttatttcattttatttgaattattgagttgtgggtagtttctttctattgcagaagcattaaatttaggtgtttttatagaaccccttaattggttttgacattgaatcacttaaatgtgtgaagaagtaacccctttgttctgtaactgttaatgggcatcttttgattttctcattactgtatattggtataattttcagaatttcaaaatggttacaagtaatgggtatctgttcgatttcttagagatgagatgagtagtttatgatttgattggtagataaaaatgttgtatctatggtgtgtggaatttgaagttggcaataataatttcacataattatgtgaaaatgcgcaataattttgtacccctttcttattagggtttttcaagttttggggcatatatggatcatttaattatgcttaaaaattgccgacaatagtatataaaacttgatttttcgggttgtgaagggaaaatgtaagttactaggatgagacagctgtttgttaagcacaacaagatcgacctcagtaacaaaatcatatatgttgttttgtagtagtgaacatctgttttgagtactatacaactgcttggagcaaattgaagctaattttgttagttgaaaaataaataaataactactagaggtagttaagcactttctaacaaattatatatagacacaatatgacttagttcagtggatggtatttttgtggagaaataatccattgattcagagtgttatcctctcaaattttattctgttcacttctgttgatatagtgttttctgaagtagtttgatggtttgtgtatggtcccttgtagtt

SEQ ID NO: 107385 - DNA, 806 bp, Aquilegia coerulea
  Intron number 1 from transcript AcoGoldSmith_v1.024428m (l ocus AcoGoldSmith_v1.024428m.g) derived from phytozome v7. 0 (chr-ID scaffold_23; pos 830174 to 830979 reverse strand )
tacaacttcactctgtcaccttttaaagaaatctggtgagtttgttcttaaggctacagtttaaattgaacatacttatccttaggtgtgcattactctggaataagattaatcagacatcttcggagaaatctctgtgttgataatcatatttggcataacacgaggcactagatcaggggaacacgttccagttagtttagcacaactagaacaataaatcacatgaccaaaacagatggaataaccaagagtcaggtttggaggtcaggaaagaagaaactgcatatgacacttgcgcaaaaaagagcagaaaaagtgaaacaagcaagggtgtcttagacgcagtgagagattaaagaatattgtgcgcacttaacagaacactggagtggcaaaagcactcatgttcataaacatgcatgcataacaactcaagccaaagacaagccatttctctcagtagttaatcaacacaaataacataaactcattctttatgtcaatttccacatctgtccttatcttcatttttgatctcctaattacctacccactttcaagatgttatccacataacacccacacctagtttacttcaggggagcagggagtcattcctgttaagcttctcaatcttattctactaattgaacttggcttatttaaaggttctaatttcattctgtaatattcagtttgttccatctaacaagtgcagacttccgaaatttggtcaatgtggataacaatattttctaatccttgcagggactgataccagtgttttacaatcatttatttgg

SEQ ID NO: 107386 - DNA, 854 bp, Aquilegia coerulea
  Intron number 1 from transcript AcoGoldSmith_v1.011102m (l ocus AcoGoldSmith_v1.011102m.g) derived from phytozome v7. 0 (chr-ID scaffold_42; pos 1381108 to 1381961 reverse stra nd)
gcttcttcaagttcaacttcaaagaaaacagacaagttattatccaactttttgcttgaaagagatagaaagatatcctttcttcttcaatcttgttgatctcttacaggtgagaaacaacattatttttcaactttatatgtgctgttttgttggtggagatctcaataacataccagatatatcatatagtttgttagttggtggtacttcttttgatattcattcttgctgatctctaaaaacctttggagataaaaatcagaagatctcaaagagcatgttgtttataattcattttgtaattgaagttatgtttgaactttgcaactttagctctctcatagtctcatttccatttttgtatttctcatccttccacatgataggagaaacaaattgaagcctgatatccatcatctatatacatatctatagaggaatacaagggcataggagagtttactcctatattgatagccagcttattactgcttacctgcaattacatgaactagacttgactaacattgatctattttattcttgttgtactgtcaatctagttttccacgatcgatgttaatttacccttttcttttattaactataaatcttaatctggaatatgtatgtaatttcgtctacattggtgtttctgaagttgttagtagttgttattgcttcactaaattaaccaactccgcggatgagctcaaagggttgttacttagtccaatatcaactcttctttaagagtttttgatcaactagatactgaactttgctacaaatctttgcaaatttttctttctacaggtttaggtgcagaataagttgaagttttattagtt

SEQ ID NO: 107387 - DNA, 395 bp, Aquilegia coerulea
  Intron number 2 from transcript AcoGoldSmith_v1.009374m (l ocus AcoGoldSmith_v1.009374m.g) derived from phytozome v7. 0 (chr-ID scaffold_41; pos 1392960 to 1393354)
tcttctcaaattcgataaagttaccgactttgcaggtaatcttacactcttcagttctaaattattctgttttttaattatagatttgaagaaacatttctttggggttgtggaaaaattgcatatacagtattttgatttttttcttagccatttttgttgtagagataaattatgtgaaactggaagtaaatttaatccatattcaagaacaatttccccctttttagctcaatccaataaactataaaagttctctacaaaggagaaaactaaacaagagttaagaattatggctttgaatggtaaacggtgtcatctattggatatgaattggaggttgtcatctgtgttttgcaggaagcacaaacttcattatactttctatagtgact

SEQ ID NO: 107388 - DNA, 816 bp, Aquilegia coerulea
  Intron number 1 from transcript AcoGoldSmith_v1.017420m (l ocus AcoGoldSmith_v1.017420m.g) derived from phytozome v7. 0 (chr-ID scaffold_4; pos 3671336 to 3672151)
tattaaaatcggttatcgtcatttcgattgtgctggtaactgataactacaccataatctatactttcttttaagatgtttgatgttaatcccaaaagaaaatatatatatatatatatatatatatatatatatatatatatatatatatatatatatatatatattgtggttgttaattttcatttgcttacattgattttgatcaactggaagttcatcaattttttggataataattctactgatgagtttgtaaatttaagatcaactatttcaggagtgttcctcaataattattacaactaattgaccgatataaatttatattattcggtagatgatattttcttgtaagtaataatcataacaaaatcagtttctgaattttggtcatattttgtattctcattgtaggttacttgtaatcacccttttatttgaacaagaggcatatttggattacaatctgtttgtgataagaagaaacaatgaattttatttaaatgcaatctgagctatttatatagtaaaataaataacaaacccaaaaaattccaaatgagggccgtgtaatgaggattttgtgaaagactaattgggttcacatccatataggccagtttgaatgacataggctcattttcttcttgtgttagatcttagtattgattcatctgtctctgtccacatcaagtttgattagttaaacctttatgtacaaaagaagctctccataggtaggttactgatgttttacaatacttttgcatgtatgcaggtgttggtgcaactgcgagtgccttggatcaagat

SEQ ID NO: 107389 - DNA, 327 bp, Aquilegia coerulea
  Intron number 1 from transcript AcoGoldSmith_v1.016951m (l ocus AcoGoldSmith_v1.016951m.g) derived from phytozome v7. 0 (chr-ID scaffold_20; pos 488882 to 489208)
acatttgtgtacttttaccaggaggtactgaaaaggccaaaaaacgagacattgtccttcatttgaagagtaatcatttagaaagaattagtgaatgccatccactatatttaccttcccactacgttttgttatttccacaaggtgatatgggttggtctcctgaaatgaaacattgggatgtaacaaaccaaaaattttatacaaacgaagacgatgaacacaggttgacacaacgggagtattttcgttatcgactgtttgatagaattacagaattttcttccttatttttggctggtcctttgtttcaagaatttatagtgg

SEQ ID NO: 107390 - DNA, 831 bp, Aquilegia coerulea
  Intron number 1 from transcript AcoGoldSmith_v1.013281m (l ocus AcoGoldSmith_v1.013281m.g) derived from phytozome v7. 0 (chr-ID scaffold_5; pos 3890924 to 3891754 reverse stran d)
cggaagggccagatagaatcagatattctagattcgtcagagcgagaaaacaggcagacttgcagtgcctttgagattggaaaagtggcagatgcaatcatgcaaatgacgttgccaaggctgcactaaaaagaaggaaaaccttattcgtaatgtatgtggagattgttgagaagttttaaccagttgtcaatccatgtattaatccaccaagatgcacgacatttccccatcgattcatatatgtcaatcctcagccacaccttggataatagtaagtgtattggtaagctttttgcatgacttcaatttcaatcaaaacatcagccattgtaatcagcaaaaatgatcaaaatagaggaatataataagaaattcttcaagttgcagcaagtctgcttgggatgatcagaatctgtttgataaaagttctacaaagcatgactaacatggtagttagctggtcaacattgttgacacagtcaaatcagaaaattgtaattgaagtttctattaattaaaccaaatcatgaaggagtagatgctaaacattcattcattcggttattcagttatcatcaagatgccaagaagaagtggtgtgatcattttgatattgtactattgaccttacaatctctctctctctctcatatcctaacaaattgcttctagcaagttaacaacatctacctactctacccctattgcattattacatatatgcaagtataaatactgtaagagttccctacttcccctccattctcttttcaatggattattcttgttgttactgtagtgaaggggagcataaggaggagaagaaaa

SEQ ID NO: 107391 - DNA, 410 bp, Aquilegia coerulea
  Intron number 3 from transcript AcoGoldSmith_v1.003050m (l ocus AcoGoldSmith_v1.003050m.g) derived from phytozome v7. 0 (chr-ID scaffold_14; pos 4525115 to 4525524)
ggtgcgtgttttatcatccgtttgcatgcactgtttgttagcttcactttccacaagaatattgttttttttatggcatgattaggttttaagctgttttacaattaagaagaaaattttcgaagcacttcataataagattttgcatagttctcagaactggaggaccttaatttgaagtaccctctccacctgaagggtggttccatggccaaaacctaaacctcggtgcatcattgtttttgaattgatgtcacatgatgcatgtaactcatttaccaacgtggcgttgaattggcctacataggttgaatttctaacatctcggggtagttacgaatgatggccttatctagttggtattattcatctcatggtcataatagttcaataaattctctattgacaga

SEQ ID NO: 107392 - DNA, 658 bp, Aquilegia coerulea
  Intron number 1 from transcript AcoGoldSmith_v1.012306m (l ocus AcoGoldSmith_v1.012306m.g) derived from phytozome v7. 0 (chr-ID scaffold_14; pos 2709202 to 2709859 reverse stra nd)
tgtgaaattttctcacagcataccaaggtgtgcaggtactttttttttttttttttttgaatgtccattaaaattgttttcatagatgtttgttttaatgaattttacagaattctttctcaattcgtcaactcgtcaaatgtgtcccaataaattgatcaaatttgtttatgactaaacaactgtgcattccattatcacacaaaatgagcaaaattgaccaagttagtccataagataaacgtgaagttgattttctgttgaatgagggtaagtttttagcctaaaatcgcacatagacacaagttattcttggcatggatcacattccatggtcctacacatcaatgtactggctatttatatgatttgaatttataaataaaccaatataatacatacgctttttcatttgatttttaaactttgtttgccaatgaatgccgcaacaacaataatattttcccaaatttactatgcctatataaaacttttttttttttttttgctgaaactctacctatagtgaagatgacaacaacaataatgcatgctgcatccaatttgtttgtagccgactaaaccttttgtttatatagaaagtagacaatcaacaccaacaaacaatataattgtggcaggtgaatcagggcccaag

SEQ ID NO: 107393 - DNA, 456 bp, Aquilegia coerulea
  Intron number 1 from transcript AcoGoldSmith_v1.003728m (l ocus AcoGoldSmith_v1.003728m.g) derived from phytozome v7. 0 (chr-ID scaffold_62; pos 390801 to 391256)
caaggtaattctactagttataattttgcaaattcctgaatattttcctcaaaatgttttgatcatttctaccctagctagagaattttgttgatattggtggcattttgggattatttaagggtctaaaattttactcaatttcaatttatttttttcctgtagaaagtgcttgagttaattaaagtatgttagaatgaatttaagtaccaaagaaaagagatcgactttgagtagtactgcgatgaagtgacaatttactatcaattaatctagtttatccatagtgagataagaaaaaaaaaactatgtacagtaccaaggatttgggatttctctagcctcctggcaacatcattaacttcacagtttattgtttgctagatgtcattggtattcttttcacgattacttctaagttctaaccatctcagctgtgttttatgaatatgcaga

SEQ ID NO: 107394 - DNA, 1022 bp, Aquilegia coerulea
  Intron number 3 from transcript AcoGoldSmith_v1.016415m (l ocus AcoGoldSmith_v1.016415m.g) derived from phytozome v7. 0 (chr-ID scaffold_65; pos 1128666 to 1129687 reverse stra nd)
gacttgttctttatcactgataacatgtaagtgtgtttgttctataatttgcttcttaacattttagttggagaaatatattatgttgtttttgcattatggtaaatgcggtagtgactagtgagttgcgactctttcaacttaagtgaaacatagggtaatggttattatcagtcactttacttgatcgtttgtattcaaaaacaatacctgtttgggtccattgttaataatttatttttgatggattggaaatttgatattgtaaaccgaatcctctaaaaggcacattcaagacccagttttcaaatataagaacattattgaggaaagaaggaaattattgttgttagtggctgatgtgtctattatatctgatgtaaggattggcttcattgaatccagtccaagtgtatcaccagttgcatattattgttgttattatatggaagctgtgggctctattttgttacactgagataaggtcaatggtgtaggcggaataatggtctaagcggatgggcttcaattgggtgacatgggtgccttaaaatttctgttaaagttaaagtagatttatctctgccaattagacacactcttatcttagtcaaatattttgtgtaatacataaccccatacaccgctttattaattattgtgtttttcaatatcttgttgcatattattctgctgatactggtatgtccaaagatctgaagagagatcaatataaatattttgtcagagaatggtgagaaactaaaatagagtccctttgaatccttagttcagttagttgtaactgtaatggaacataagttataatttaatcatttagctgttactcttggacaaccctttgcatttattggaaactattcttcctgccaaaagtaggtaaatgatgcaatgttttggattttgttgtaatttcaggtttcaattagtaagtggtaactaatatagtatccttatcgtctttaattttagggaccttttacacacaagaagaagacagg

SEQ ID NO: 107395 - DNA, 856 bp, Aquilegia coerulea
  Intron number 1 from transcript AcoGoldSmith_v1.015870m (l ocus AcoGoldSmith_v1.015870m.g) derived from phytozome v7. 0 (chr-ID scaffold_50; pos 1437948 to 1438803 reverse stra nd)
tacgcacattcgtctcgtgtccgtgtctctatgtcgtttgtcttagtctgttttgggtactggacgtacgtacctagttaggacgttcgtacgtccaagcagacagcaaacatgttttcgtcaggacgtacgtacctctttagggcgttcgtacgtccaagcagacagcaaacatgttttcgtcaggacgtacgtacctcttcagggcgttcgtacgtccaagcaggcaacgaacgttcaatgtgggttttcactatttcggcccattttccttggtttccaaccctaagtatatatagggtttctcttccaaagaacaagttagttctttggccgtccaattcatctagtattggagtttgtttaggttttggttttaggttgttttttggtgattgaactcatcttcttcttcccattcatcttcttctttcttcttctccattcatcttctccttcattattgaatagtgatttagcttcgagtcttcttgtgtgttcatcaagaagtcgagtgtcttgtgcgtacatcaaggtgctctggtgaagtcaaggtgttagagataaccaggagtgtcaactcgcagtgattgcaggtagttgataggtttgtacatctcttttcatctagtggatttatttgttgtcgcgaggacaaccgtggacgtttcccatattgggttttaccacgttaaaaattcctgtgtgttatttacattctgcgtatcgtttgatttgtttgaatattgaactgttacattagcactatttgtagtttctcatttgtgactatgggttgttcttaatgaacgactacttgctgaagagtggtaagacattatcagatttcccaaac

SEQ ID NO: 107396 - DNA, 863 bp, Aquilegia coerulea
  Intron number 1 from transcript AcoGoldSmith_v1.004254m (l ocus AcoGoldSmith_v1.004254m.g) derived from phytozome v7. 0 (chr-ID scaffold_14; pos 1857624 to 1858486 reverse stra nd)
aaggtaaatgacaaataatatataactaaacttgtatttttctagctagtaattatttttgttattttcaattaaattgaattgtttgtttctttgtttatggttacgtattgtgtttgaaaaagagtgagagagagagactagagaaagaagaagaataagaagattgttgactcatgttgttgaagagaagatcaagatatatagtgttgttgttgttgtgtttataaagaggtaaaaactgtgtaggttttgttgtggtcattcacaagtgattgacaactattaatggtctttacactgtttacagtttacaccacgtggttttctaatttctatgataagcttctctcacttatttttttcattacaaaatatcttataaataccccccctactacctcttcatctataacatctcattcaattcaattcactctttagtttctctctgctttcttgctttctgtgtttaagagccattcagagcagcagcttgcagagttccagttacctgtctgaatagataacttagctttgaagccttttgtagctagctttcaatcttatatagatatttgctttgtttgggcaatttatataggttgtagacacaactaagtccacaaccacttcaccaagatttcaggttttgatttgggtttttgtgacagtcttggggtgtgtgtttgagtaaaaaaaaaacaaacattgaaatagaaaactcattttcccccttctttctccctgtcttttttgtcacattttctccattgtagttctgtttcacaaactactgtactactacactgataggctaaagaagttgttgtttataacttgctgctatttgttttggaaag

SEQ ID NO: 107397 - DNA, 329 bp, Aquilegia coerulea
  Intron number 2 from transcript AcoGoldSmith_v1.001774m (l ocus AcoGoldSmith_v1.001774m.g) derived from phytozome v7. 0 (chr-ID scaffold_14; pos 5338204 to 5338532)
cactgcctgaacccacccattgctcacaggtaagggtaataaatgcctgggtattttacaaactagttcttaataatagggtaatatattctttatctttcctctatttactccaatgtgcaaaccattttgttgcttgctaatatgtaatagagtagctgctctgtcctttgagtttctctacaaagttatgcgcattattttgatatataagaagtatctcagagtgttcttcaccgtatttatgtgtggattgatgcctgtgttcttttcctgtctaaatactgggtttttctcgttttatattttaagggacttgaaagccgaga

SEQ ID NO: 107398 - DNA, 554 bp, Aquilegia coerulea
  Intron number 1 from transcript AcoGoldSmith_v1.022769m (l ocus AcoGoldSmith_v1.022769m.g) derived from phytozome v7. 0 (chr-ID scaffold_14; pos 2754925 to 2755478 reverse stra nd)
tcagaaacataagaccaaacgacaagtcaatttgggtattatttttattttttttagtatttctgtgtttttattttttttaaaaatttagtactttagattaattttgattaaaggagaacaaaaatattattttttagctatggttaggtataaagattaaacttgtgtagacactgtgtgaagttgaatataggaagacaggaagctatataagtatattgaagttttaaagcttgtacgctataaatgttataagatgtttttgtcccgatgaataattagataaaatgaagccttaatctcaattgtaatgcagcatacaaatatggctgacataccgttagttgaagttgaaagacattgtgtcagtcgaaaatgaagaaaattgacaataaaaagaaaatggttcattatcttaagcaatgaaatagaattaatcgtaatgtgatgatgttcgattgtgattaagtgatagtttgttactacaagacaggttagaaccactaaacttacactttattcattttgttgatggcttcttctagggagag

SEQ ID NO: 107399 - DNA, 776 bp, Aquilegia coerulea
  Intron number 1 from transcript AcoGoldSmith_v1.016499m (l ocus AcoGoldSmith_v1.016499m.g) derived from phytozome v7. 0 (chr-ID scaffold_33; pos 1911862 to 1912637 reverse stra nd)
taataaaggtactaaatacatttttttttaatattctcttgaattttaattccaatatgatacgggaaaattgaaattgtatattattcttttgagtatattggccttctactcttcatcctttttattattcttttattgcagtttggggtttctttcaatgctttgtgtttttcctttttggctttcagctttttgtcatgattatttttgtttgaagtttttcttaattgttaatcagttggtgctatgttcaatactataaatgtttaggaaatttttagcaacagagattataattcgattagatccgaactgattttgttctcacttaacttttctcattcgtatgaatcatgagaatcagcttaatggttgcctccctctattgtttttaaagttctgcaaagtgacttctatgtcgtacataattattagttactcttgtactttaattccaatgcaatatgactgtgatagtcaacgagagttctgcagtattgaattatttaaaaaataaaaaaaaatattttagaacttaacctatttaattcaataatggtaatggattttgattttaaccctcaaataacgcgagggtttccaatgatgcatgtatttagaagttatgattatcttttacaagattatatcttctttgcataccaaaacttgtgttttcttagtatcatatggtcttgttttcctagtattatacgctggtgttatatataatcttataagatttcggacatattgatgcagttggtagcagc

SEQ ID NO: 107400 - DNA, 794 bp, Aquilegia coerulea
  Intron number 1 from transcript AcoGoldSmith_v1.021693m (l ocus AcoGoldSmith_v1.021693m.g) derived from phytozome v7. 0 (chr-ID scaffold_20; pos 1168173 to 1168966 reverse stra nd)
agaaacctctcttcttctacgtcaatcttgctaaggtatacgtttttttcttcgcttcgataacataatcattgatctgtttgctttcattactcaggtttcttagttcgttttttcatgaaatctagctataataattactgttgattttctttaatttgttattagtttcggttgatttcatcgattgttgtgttatctggttttggattgagcttttaattgggatttttgaggcttaagaatgaaaattttgaaattagctttgtttttgtgtttaaagtaaggtttctagggttcttatggacattatttatgtgagagagtagtgattgtgagaaggaagaaagagagagagagagagagagacctgagtttacaactagaatactgattgcagtgagataataatgtatattcatttggaaattgtgtatatgctatgtttatttaagcatcacacctctttctagcattaggttttctgcgtatgttaattgacaaaatttcggaattaactttgtttctgtatttacaagtaaggtttctaaggttctaactgactttatttatgtaagagagtagtgaattagtgattgtgagaaggacgagagagagagagactgattgcagtgaggaacacgtagagttatagatatacagattattcatctttttatttgttaatattgtatatgctatgtttatttaagcattgcacgtctttctcactttaggctttcttcgaatgtttaattgagaaagcatttactgtatccttatcacagagatac

SEQ ID NO: 107401 - DNA, 675 bp, Aquilegia coerulea
  Intron number 1 from transcript AcoGoldSmith_v1.009313m (l ocus AcoGoldSmith_v1.008551m.g) derived from phytozome v7. 0 (chr-ID scaffold_17; pos 2609239 to 2609913)
agagaatttcagatcttcaattctttgcaaatcaggtatcaatcatgtttttatgtaatatagagaatttaaatctgcatacttgatcgttggtttagttcgagatgagattctgttgcaaatcgatcattatatcgaagaattttcaatcgattcatccgatttctctaattagttagtctttggttgaaaagtcggaaaagaggtgtaatgattgatcgctaaattgaggtttcattgatgattgttcatgaatggtttgatttcatggattactttgtacataagtatgagttgctaaaacaattgaagtgattaaatagaaattcggttacacaagttagttttgctctgttagtttgaaaaaatggacttttgtgaattttgtgtttattttgattttctttgattgatcatgaaatttactgtgaataagatcatttttttggacaattgcttgaatctttggttagtgcaataaacactatgtgcagtatgtactcagaacctacatgataattaagaacgaaatttagcctcattttaatttatcgtgaagatcaagcaagtcacagcttatatgtttgagttcttaaaaatccgtagtgttgatagaattgaggtaaaaatatttacttgtggattttgaatccttgtttttggtgattttgtagg

SEQ ID NO: 107402 - DNA, 661 bp, Aquilegia coerulea
  Intron number 2 from transcript AcoGoldSmith_v1.006656m (l ocus AcoGoldSmith_v1.006656m.g) derived from phytozome v7. 0 (chr-ID scaffold_45; pos 514326 to 514986 reverse strand )
aagaaggcgcaaagaaggcaattggatttactgaggtttgctatgttttcataagcctatttcctgttattcttagaagtttcacatatcttgttacctgcatttaaatttaatgctttctaggatcatagtattgtcctgtgtaagattttaatcaacccgcttccgcctttccctgggagctatatattcattttccagtgatatcaaaggaaagttttcgattggttgccttttgctaaagtgcatttttatattgttgatagaaaacactacatgaaataatagtatgccagcttcggttggagagaagtggctgaacagcgttaattggggctgaaacacttgattataaccgtgtttaaattatttggatggttgaggaggacattcaagaaagaggtgactggtttgtcgtatgcaaagatgttccggatagtacacattctctgtttttcataaatagttaagtacaatgatgctgggacacaagccttgttttttgacctcacgcgtgcccctacatgagtcacacaccacggcacatcatccgatacatcttcatattaacctttcttattctataagacatctttgtataaacttgcagtgtttctattttgtaggcaattgcattaattggaaaggaagggggacttaa

SEQ ID NO: 107403 - DNA, 544 bp, Aquilegia coerulea
  Intron number 1 from transcript AcoGoldSmith_v1.006656m (l ocus AcoGoldSmith_v1.006656m.g) derived from phytozome v7. 0 (chr-ID scaffold_45; pos 515005 to 515548 reverse strand )
caggttcttttgtccccctttttttcttgaattatctttaggtgtttgaagaaatgggggttttgttagttttgggataaaatgccgcattttattgaaactgttttcttgtttatttttgtggaataaatatatctaattatttgattatatcatgtttatggaaaagggtttgtttgaattttgaaaatgaagggggaattttgtcgttagggttttagtttttcttttgctattagttttaaacaatgttaagggtcattctcattcatactttccgtttcttatttagtcgaatttagaaatatgaattttcctacttggtgaagtgttgtatttacttgtatgggggtggtgattatgctaagtttggtgatatatatctttagtagactgtcagtatgccattattttagctgttagtgatatgatggttttttcttatggaagttgcaatgctagccattacgttaacaagacttacttttggaagttgaattataattacgtgtgctcatcatcagtgtaatattttgtcagactc

SEQ ID NO: 107404 - DNA, 555 bp, Aquilegia coerulea
  Intron number 1 from transcript AcoGoldSmith_v1.008031m (l ocus AcoGoldSmith_v1.008031m.g) derived from phytozome v7. 0 (chr-ID scaffold_5; pos 1834440 to 1834994 reverse stran d)
ttcacctcaaacatctacttctccgcttaatttaggtaattttctgctcacaattgtgttaattgcgattttggaatctagggttttacaagtttgggttcaattgttaattgttgaattttgtgggtttaaattagagttttaatcttagaaattgaaatttgtcttattaaatgggttttttgttattcattattaaagaaaatagactgaattgctggaattcactagttttgtttttactatttaagtccatagcccatagcttaagttgtttgtagatttggatacagaaaacaagattaatagttgtgttatatgttctagggatttcaattagttgtttatgattgattgagttggtagatagaaagattgattagtttgtgggatagtaaattatttttttgtagcataaaatctatgtggcattagtgttctgcgtagattttcctttttgtttatttgaagttgtaatttatcgatttttcataagtggtgtcaatatatctatttgtgctcttgactttgaatttcttctgtggattgtagttg

SEQ ID NO: 107405 - DNA, 614 bp, Aquilegia coerulea
  Intron number 2 from transcript AcoGoldSmith_v1.005657m (l ocus AcoGoldSmith_v1.005657m.g) derived from phytozome v7. 0 (chr-ID scaffold_17; pos 1117144 to 1117757)
agcagctaccttacttggtcggcaatattgttgaggtgattaattcgataatcttttatcagatttagtgtggttgctctgtggtatttgcatactgtatctattacttttactttataaaactcactttcagaattcaacagagttttgaacctcagtacctcactatgcttagggaaaaagagagcaattacttacaagtatcacttgtgaagtgaaactcattgagtaataagtttaaggatttttataaagtagattggccgcatcaaatgtctgttgtttattaagttgggtgtaagtgtttatactggatcgtgatatcgtggccttcacattgaattattttttgtttattctgaagagagtgccttcctctcacttaatctgattcattgtgtaaacattttttttttttgatttgtatgtcagtaaatgtaggatagcatagctgtctaggaaaagataggttaatgatcagtggtggggttctatttgatgacacaacctcttcatttataacagctagcttacatgtgtttattgtatcagtttttcttatatgcccttacttgagaacccactaattctgttcttcttattagattttggaa

SEQ ID NO: 107406 - DNA, 810 bp, Aquilegia coerulea
  Intron number 3 from transcript AcoGoldSmith_v1.005657m (l ocus AcoGoldSmith_v1.005657m.g) derived from phytozome v7. 0 (chr-ID scaffold_17; pos 1117822 to 1118631)
gaaagtgcgtcgtactaaagacatcaactcgacaagtgagccatgaatctttcaacttgatatttttactcaattgtgatatacaatttattttgattctttggtaatgtatgttagacatattgggaatcaactgtattactgtatatagtatcaatcttgtatttaaatttggcttttgctaaatagttcgtttcttgcttacaaattacaatcatgttgtaatgtacaacaaataaaaatgttcttaaaacatccattaaatatgatgtcatcttttaccaaagtttttaagtagccaaacacgctctgaagcgtattagtggtaatctagctgttggatgtaaattttcatattgtcgataacatttttaagcctttatcagacatcagaattttcacctttaaaattaaagtttactcaagtctgaaattgtttactgacctaattacttataggcatgcttaattgtgctggttgtgggttggcctgtctaatgaagattgtcatatagtatagggacacattgttagatacataacatgcgaatatctatgcctgtgttggtaccacttattttaaccgattcatgacaaaaatttgagcttctgttaattctctttgcgttacttacctgcaaaagttgtaagtacacatgaccagtcagaaagttaaagaaatggtgtaatggctattggggaaaatttgtaaatttgttaataaaggtctaataatgccggtaacagcaatttaattccttattcttggttgcagacaatctttctgcctgttgttgggcttgttgaccc

SEQ ID NO: 107407 - DNA, 824 bp, Aquilegia coerulea
  Intron number 1 from transcript AcoGoldSmith_v1.006129m (l ocus AcoGoldSmith_v1.006129m.g) derived from phytozome v7. 0 (chr-ID scaffold_17; pos 4073378 to 4074201)
atcttcttcaaagaagaatcaattgtctgctctcggtgagtttctgattaaaaaaaaccttttttgttcctcaattctattccaatttcatttgaatttcttctgtttattggaattaaggttgaaagagaatgtatttcatagaaaattttgattttttttagtaataaaaatgctggtatagctttgaatctttgattgttagttgtgaacttattctggagttcgacacaatttagaacagtagtactagtgtactggtgggtaggttaaattgaggatcaagagagaagaaatttcgacaaatggaacaagggaatgtacttgaaaaataaaaactgcgaattgggataaaatatcaatggtttagtgaacacattttctgatagggatttccatgaataaatcattttcatcagtaagcgctagtttacaatcatatttcttattaaatagtcttgtaagttgcagatatatagtgttttgggtttattttagattttgttcatactagtggtatattatggtggatgattcttattgttatagtcagcattacttaggatggcttgtgattcaactaccaaaattgaaataatgatgcacggcatgacttttgaatgagatatatatgagccaatgaccacactcttaacttgccagagcctgtttcttaagtccgttaaggtctgcgctgcattctttgctccgtactgactagagcacacattttccttgcagaagttgtattttaattattatttaaataaatcatgtacaaaatatgtcgtgtgtaaattaatgaaactattttgatgcaggaa

SEQ ID NO: 107408 - DNA, 546 bp, Aquilegia coerulea
  Intron number 2 from transcript AcoGoldSmith_v1.007171m (l ocus AcoGoldSmith_v1.007171m.g) derived from phytozome v7. 0 (chr-ID scaffold_53; pos 1393060 to 1393605)
ctttggtgctacaattggtgtaagttttatctatacttgataaacagaggattcttttcttcaaactatgtatagatttatttaaatttaactcaacagatataatacaatatatgttttaatttcatcatctgcaactgattctgcaatcgatcttaggcaaagtttaattcacaaatctttaccaatgactacactgttcctgcttaggttctctagtgagttaaatgggtaacacttcgtcgagtgtataagaaaactgtcaatccaaagaagcaaacaagtatattcactgacattatcaacaattcattctttagagtatacagcataggtgagtacacaattatgtcacaagaagcaaaattcaaataaaaactttggtgtcagttatgaacttttgacttaaacaatgatatgcagtcacttagcttctctcattacatatttacataccatatagattgaagaatgatgcgatgatgacattctgccagttatccctcattaggaaataatagcgagctcagggtcatctgtacaaac

SEQ ID NO: 107409 - DNA, 736 bp, Aquilegia coerulea
  Intron number 1 from transcript AcoGoldSmith_v1.008565m (l ocus AcoGoldSmith_v1.008565m.g) derived from phytozome v7. 0 (chr-ID scaffold_41; pos 789955 to 790690)
aaactctctcttacttcagatcttctcgcattttggtaagtttctttacatttcaaacttattaacttattgttcttcgatgttacacctttcattttcagcataaatgtttattgcacaatggttttggatttttttgaaataaaaccctaattttgttccaaagtgaagtttcttgaaaacatttgtcttcatttaactttgttttagagttttttttgagttacactactgccttatatgtgtttagtttaggttaatctttattactttgattaattgttgatttgctcaaaacggattactatttaatagtgctaagagtgggaaacttgaggttgaagttatcattttgatagtttttttagtaagtcaatgatgtttgactatagttgacttgggtttgactagtttgcgacaacatacaagtaggaaataacacactgaatactcaatccatagagtgactcaaaatgcctccacttgttttagttgaagagaacataatcaacatactgtataagaaacatatttcttaattcctatgtcatgagtgtaattgacgaaatttattaaaatacatttcttggtaagtcgccatttctttccaaatggtcttgttttgccattgtactataattcatcattgtttttagaggaatttggtcttctttatgttttctaggaataagtatcataagttgtgaaattattatttgctttccaggtggtaaag

SEQ ID NO: 107410 - DNA, 857 bp, Aquilegia coerulea
  Intron number 1 from transcript AcoGoldSmith_v1.003305m (l ocus AcoGoldSmith_v1.003305m.g) derived from phytozome v7. 0 (chr-ID scaffold_5; pos 2398554 to 2399410)
acctcttctccgatgtaagtaactcagtttgagctttagctttgtttatttgtgtttaatttagcaattagtttgttttagacctagaatttggttttcggagcttgaaccgaaggcattttccttttctgtcatatctttaacaagtatgaatacagtatgtgaaaattaatcttaaaaacatacattggaaccgttgttagtcagctattcttgacggataaactgtgaatggtatttaattaaactttgtgtgttactaattcagcaaaaaaacatgatacaaagtaagaattgtttttccctttagaaagcctagtatccccaataagccaatacatttgaggattaagttacttggttggattcatcctgggcatacgccataccagagttaatgttgacttcagttgagcattaaaagtcttgtgttgatcttgtgttaaacatcttaataaaaaattccattcaagcaacattttgtttttatgagcaagtttacatatgtacatacacgataatcacttttaagaagtcatgcctgatgcaggtgtataaatgatttatcaaaagatttacaattgtattatgaaaagaatttacgagtctgacatatttctttgtaaggttcagccagtagtacagatgttacatcactgcacgtgggaatactctaaatcaagatttaatataagatggcgtaattgcagaatttttttattcttttcttctttttttcctctgctcaatgatctggtcttatactgatgagagatatattatgtttgtgaattgtgatcatgtgtaacactactttccatttcaaaacaacattttgattgcatcaatttttcagg

SEQ ID NO: 107411 - DNA, 897 bp, Aquilegia coerulea
  Intron number 1 from transcript AcoGoldSmith_v1.002759m (l ocus AcoGoldSmith_v1.002759m.g) derived from phytozome v7. 0 (chr-ID scaffold_4; pos 6726797 to 6727693)
tttattgattttgagttgaatctgaacatttaaaggtaatctttttgatgtttcattcgttaattatcaaattgggaagctttaattgttcatttctttctgtttttatacttttatttaatcgatctgattattaatttgtttatgtggttgaaattttatatattcaagtatccttgtttatttaaggatatcgagaatgggtataatgttggaagctaaaaatttaatggtctctgagctgttttaaattcaatttcaaatgttttgattgatatggtgttttgtattggaattccataagaaatatacaaatggtgtttgtggcggtagtcaagttaggataataaaagaacattggggggaagaaaatgcgtatgagactgaagggtaaggttaagggctctttttttttttattgattcggattgttgggaatgtaaatttatgcatttataagagattctataagtggattattgtattagacagttagtacatgctgtaattgcttggtttggtcatcctttttaagtttgcgtttgcagactatatttgacagagcattagtcatacaaataacgttgggttaattttgcttttactatgatatgaaattcaaataatgcaatttataataaaatgaaattgcagttggggatgtcatcctttcattcataaccgattaaccgcttgaaatctatctaaattgttatcttcatattgctccctttcttttcacttaccttgttgattggtgctattacttaggaagattttgaactggaatgttttagcaataacttcacagttctttttttaaggactatgccaggatttttcaaacattttattctctttcttttttcaggaaatctccgttgtgagctacatata

SEQ ID NO: 107412 - DNA, 725 bp, Aquilegia coerulea
  Intron number 1 from transcript AcoGoldSmith_v1.011333m (l ocus AcoGoldSmith_v1.009779m.g) derived from phytozome v7. 0 (chr-ID scaffold_14; pos 3868230 to 3868954)
tcatcttcttccacttctcatccccaaaggtaaattaactgtcgtaactctactatatgtgatctatttattgttcatgtgtattagtggatggatcaattaagaagtcaatacttatgcttctatatcttttatggcacttgcctaaaacataattagttttattactagtatgaacatatatacagtacttgagatttctcatgtttgtgcagcagggcttttcattgatttgatttttgttactaattgacaatcgtgtgtatgttgtttatgattaaatcatttattagttagttacatgattatgctcttaaaaactttgaattttaaattaatccctagcaagaataataaaatgatggttattgctgctttaaacagcggctgagtttttgtactgaatagcatgccattcttttaccattgcattacattgttgtcccctcacagagtaggtgaacaacagaaatcaagcaataatgtgcactcataaaattgttttgcattggtttcccctgcattcacatatttgccctacaagagtaagatcaattgaaagctaaaactcaaccaccactgtttttgtgtattgagtattacattagttttctattcatttattcttcacaagacgaaaattgtatttggaattttagcgaatcgacaatctgtttatttcacttctagaattgttagagcatcttcaatctatccatatagtt

SEQ ID NO: 107413 - DNA, 615 bp, Aquilegia coerulea
  Intron number 1 from transcript AcoGoldSmith_v1.003969m (l ocus AcoGoldSmith_v1.003969m.g) derived from phytozome v7. 0 (chr-ID scaffold_14; pos 3443882 to 3444496)
gaaggtattgattctcagatcctttttttgaattctgataattcttattgaagaaaaaaaaaccgattaaaatgatttttttttcttcttcgaattagatgttttaaaggacatttgagtagttttataatttgattatattgggaattcattgattttaattttgatgttttttattaccctatgtgtgtaatgttgtatgtggaaaaataaaatataatgtaaacttgtttatttctttattaaatttaataatctggaaatttaacaagaggaggattgaggattgaggattgagaaagttaaaaatattttaattggtttaaattttgaagaatttgggcatgtaaatatatatttttaggttgttgttttgttgtaatgttaggttttgattttcttaatgttaatgtttctgcatttgtttttagggaattttttttttccgttttcaaattgagaattttttgtcgtttttgtgttataacatctttttgtggcgttgttggtagttggaatgtgaacatttctttccattgttaagactgttttagttttgtgttataatagattgtgtgttgcctgttatttgcatttcagaatcaagtgaggtgc

SEQ ID NO: 107414 - DNA, 742 bp, Aquilegia coerulea
  Intron number 1 from transcript AcoGoldSmith_v1.010539m (l ocus AcoGoldSmith_v1.010530m.g) derived from phytozome v7. 0 (chr-ID scaffold_23; pos 3463575 to 3464316 reverse stra nd)
tattgaaacaattgttgatccattcccatccagaagtaagcatttataagcatttatagatgctttgatttgatttcaacgtttatttgatgtttttcttagtaaagtttttttttttttttttttttctcttttctctttgttatgaattgattgattgaataattgaagaataattagtgataacttttttgtgtagtgtggtaatgcattttaactgtttgatgaattgtctgaatggaatttgtgtttctattttataatcattagtcacttcataacatgaattccgctttaatatttcatgatattgttaaaaattaagtaatataatgaacacttagatggtctaattacaatctaactatagcttcatcccttttaggaactagaagcacctttaataattctgtggaaactcaactgctgataattctcaactttatctgttgttttctcatatgtcgttatctgtaaattagtaaagtcatgggattgggctaaactatctctatttctaacaaatgcaatttattagaaaccaattcattaagaactagacatacacttgtagatagaattctcaacttttttttttttcttgaacttctgaacaagatagtatggattcttatttagttcttcatataatgtcctttttatgagtctaggtttgaatgtctatgtctactatctgatccggtctttcttcttttccatcagggtaattttctttctgaaa

SEQ ID NO: 107415 - DNA, 852 bp, Aquilegia coerulea
  Intron number 1 from transcript AcoGoldSmith_v1.004040m (l ocus AcoGoldSmith_v1.004040m.g) derived from phytozome v7. 0 (chr-ID scaffold_76; pos 332556 to 333407 reverse strand )
ctgttatacttggagctgatgtaagtttttaaatttttttctacttttgtgttttgggggtgttaatttgtcgtcttttagtatagttaaactacatatctagaatggaagtaataagagagtgtaaattctatgttaattgaatcaaggaaagtggtttttaattatgtcaatgaagtaaataggagaacgagattaatcagtttaatggattgagggttacattgttcaatgtgagtgaatgtagtgtgaatttccagtttccactaataggaaataagagagtttaaaattaattaatgcaagaaaggatctaaaccatttacatgtttgagagagacaaatatgtaaaccgtttatgtgtgctgaaaagacaatagtactagtaggtttcagatttgtgttgtgaaataggtttaaggtgccttgtcttatgctatctgagtttggatgcttgagctatggtgcatatatcaacaattctacttctatgtattcagttaagaatcgcgccaacaattcagaagtaaactcaaacccattcattgtcatgatctgcattaatttgcacactaaaagcattccttctctcttcttatcttgttgctactatggtttctgtatatatggatttgtgttggtagattaccaaatatggattgttttttttcgtttctctaacgtcttattgacttctgtgtattgcttaagcatcaaacaatcgcaaaattaatgtttcagatacattgttgtttgcagagaaataatatatgaatataaggcttaaagctctatagacactgtagttataatagctactccaattattgattcatctcgctgtgcactagg

SEQ ID NO: 107416 - DNA, 448 bp, Aquilegia coerulea
  Intron number 1 from transcript AcoGoldSmith_v1.012082m (l ocus AcoGoldSmith_v1.012082m.g) derived from phytozome v7. 0 (chr-ID scaffold_89; pos 263680 to 264127)
tagagattgtcaggtaaattgtttctttttgagattcattttctatgtatttgtttcttcaaatagattttgggtgtcactcagtactactcactctgattcataagccattaaaatttgattgggagatttgggtctcaatggctacaactcctacaagccatacaatatccatgttgtctcacaggtttccaaaaccgcctatgccgacaattacagatttgtacagtaatctaaacaattatttgggatcctaaggtgtatggccatcaggccatatacatgtggttctcaagtcgtattgtcaatgaaatggcgaaaatctggttaaatttaatgatacatatagctaatacatttataataatgtgcatttttggctctcggtataaatgtgtatgattgctctgcctgaattgatgcattgtgataaacagatctggagaat

SEQ ID NO: 107417 - DNA, 691 bp, Aquilegia coerulea
  Intron number 1 from transcript AcoGoldSmith_v1.002205m (l ocus AcoGoldSmith_v1.002205m.g) derived from phytozome v7. 0 (chr-ID scaffold_41; pos 1349428 to 1350118 reverse stra nd)
aagttcctaatcaaagtttctcgacaatcaaaaaggttggtttggtttggttagatctccaatttgttctgttttttgcttgtttgatttattcaattgtttgactttgtagattgattggatttattgttgaatacaacagtacaaatgttcttcattttgaggaaattgtatttgttttgttttgttttgtttttgggatctaggtttttcacatttcgaatttggttcattctgcaatatatgaaattaaactttggattggtatattggtaaatgttatgaatttttgctttaactaattgatgtgtgctccacagaaaagaatgttgttgagatgttgacagcattcaacattctatgcagacatgagcattaattttcaataattgggaccagctgagtgtaacataaatgaatcagtgtgaatttaacggatgcaggtgcacttgaatgcttaaagttttcattagctgttcatgtacagacctgtagaacttgttaatttgttcaattagtggcattatgttgttttcgaaatgacagtataaaatttgaattttattgtaactataaaacttcgatagattcaaatatgttgtttttgtagatccttttgtatctgggcatttatcttattctttggtagcaactaacgagttactcacaaagatttgttttcttccagaac

SEQ ID NO: 107418 - DNA, 435 bp, Aquilegia coerulea
  Intron number 2 from transcript AcoGoldSmith_v1.002623m (l ocus AcoGoldSmith_v1.002623m.g) derived from phytozome v7. 0 (chr-ID scaffold_14; pos 683614 to 684048 reverse strand )
gttcaatttagtaagtatccactctgctgaattcatctcttgaaatatttttgtctcttgtccatagcttgtgcttccactatattattgttcttagcagtatatacagtattgtgttttagtaataaatagacaaaattatgttatcagatatcaaatcatttgctatatactacgataactgaatggaagagaatgatgtagatgaacatggatgcctgtgctctcctgcttgaagagagcactggaaaatgttcttggaatatgttaatgtgcatcattggtttttagtttaataacttttcaatgaaacgaggcaactttcttgaaacaaaatcggtttctaacacaatatgatttaagatgtatggaaacaaattactgaccactactctcttaatttggcaggtacactaaagttgatagatcttgtca

SEQ ID NO: 107419 - DNA, 1009 bp, Aquilegia coerulea
  Intron number 2 from transcript AcoGoldSmith_v1.018655m (l ocus AcoGoldSmith_v1.018655m.g) derived from phytozome v7. 0 (chr-ID scaffold_18; pos 4566787 to 4567795)
ttgtgggtatggactatatcgattgtgtttttttttttccaatgttttaaagtataagttgatatatttatctcaaattatatttttgcaattttcaattgttgcactagtgtatttttaacacggtttgtttttcatctatacatgttggtacatagctaatgcctagttcagcccttcacatcataatatacattatttatggccttacaaaacatgtcttaagcttggttacaattcaaaattaagtattcctttcggcttgtgttcttgcataattaaactgcaaaacaattgggacctgtcttcaaaacaatttatagcaatgtttttttttttttttttttgtccatcttatggggataagttgaaatttagaattgaacttccaatgatgattatcactctattacatgagtaatcatgctatctagagaactacttaccatttctgcagctttccattgtagtttggtctctttgtcaattagtatattttggttaatggtgcatatcttttgcattgcccttgaaattgtttcactggttttggactttttaaagctaaattagatttctatttacttaaaagaaggataagctgataaggttaggtgatgaaggatctcacttccccattactagaaacgtaaaaacacaaatcctctctattaaggaccaattaccccagtatgtgcttatagcattggaatcagatacaatattatataaactacatgcattattcattatctgccttcttaaactacttcacaatacacaaagccattatccaggtttagtatacctggggtcatctctgactttacaatgaaacctttgtggtcaccactcctatctatcacactatgagtctgttgataacatcttatttcattgttattttctttatgtgtatatgtacaatgatttttgttatcagattagaaattcttatgctcctctgataaatcatttgtttatttcctgatgaaggtaaaattagctc

SEQ ID NO: 107420 - DNA, 793 bp, Aquilegia coerulea
  Intron number 1 from transcript AcoGoldSmith_v1.023234m (l ocus AcoGoldSmith_v1.023234m.g) derived from phytozome v7. 0 (chr-ID scaffold_70; pos 816041 to 816833 reverse strand )
gccttgccgtgtatctgcgacagaacatccagccagggtaattaagctactgcacattgttatgctaagaagagaagctaggtggagcaatgtttcaagaatttcacatatattctcgatcttttgagattaaatacctaattattcacacacacaaactcataaagtacctatagaattatacaaacatacatacgtgtacgaagtatggacttttttacatcacgtcgtattgatgcttatacatcttgaatcgaaattaaagttttattcgagattgaactttttcatacaagagtaattaaaatttgaaagtttaaccttatcaaaaattaaaattttaaatttcaaaactaaacaccatgatgtagtattgattgatgtaaactgacctgttgaagccgaagcgcaacaaatcgcaacagatagtggagaagccgaagcgcaacagatcgcaacagatagtggaggcttcgttgagaagagaagagaagagaagagggtttcgtattgtttacaaattaatgtttaattagggtgtttaattatggtttattgttttatcccgaccgtcagatcaaatatcaacatcctacggtccaaaatatctctcaaaattgtcttttaatagatgtttaatctctgtcgtacatctaaaatcagacggtccaaaatatctctcaaagttgcaaaaaatgttatacccttgccaggtaatacatacactctgtacttgaatccttagtaatggcatccagttccaggcagagctccagctcgtcttggacaccca

SEQ ID NO: 107421 - DNA, 437 bp, Aquilegia coerulea
  Intron number 1 from transcript AcoGoldSmith_v1.014493m (l ocus AcoGoldSmith_v1.014493m.g) derived from phytozome v7. 0 (chr-ID scaffold_51; pos 772380 to 772816 reverse strand )
tgattgtgggactttattttcacggtaattatcgttgtttctacagattattagacctaataagaacaagatcatggatgcaaatttctcattatccttatcatatatgttgttgaaatgtttttgtttgtatgttatgtgacatagtggccctctccttctatctcatcatttggcttatatgaagaaagggaaaatgaaccatatataagaagtcaaatagattgttagaaagccatctattggtgatttccatgcacttaactcataattttcttttgtgattggtactactagactatacaagtggttcttcttgttttcttgttgcttgaagtggtgttattgtcttctctattgactgatgtctaataatgtattgaccttcttctacttgaacaggagggatagctttatcactcatagagccttttgtg

SEQ ID NO: 107422 - DNA, 772 bp, Aquilegia coerulea
  Intron number 1 from transcript AcoGoldSmith_v1.019391m (l ocus AcoGoldSmith_v1.019391m.g) derived from phytozome v7. 0 (chr-ID scaffold_70; pos 763756 to 764527 reverse strand )
catatacttgataaagctacaaggtatgcttgattatgtaatatctcacaatttaaattttattcaacttgagatgtttttttactcttctgcatacttttgacctatttttttttttttttctgtgtgtgtgaccatggtgaaatttacttgttcgattatcttttatttgtcctatctgaacgctcaaaaaattgaaattagttagtatagtctctcagtttcatataaaccagcatgtcccgaatttattatgacaaaacaaattattaaaatgatcgagtatggtacaaaagtaatattgatgtgataacaatctatactactattataaacttgaataaaattcaggggtaagtcccggttaatgacaataaagctttagaattttgtcacctaattttgactaaaatacccttttagtcattgtttttgggtaaatttacataataccctttaaataatggttttattgtaatttaacatatatttatttatgggctgaatttttatttatgaacaaaaggtctaataattacaaaaataattaaattaacaaactacaaggagaataatgaatttacttaagaaataattatttcatacgatttaataaataagtgtaaatgtgtaattaataatatttgataaaattaataactataaactcgaatgctaatcagacacgaataaattaaaattaaccggtgcgtagcaccggctaaggcactagtttaatcaatatctgatccctatatattgtttgacagga

SEQ ID NO: 107423 - DNA, 676 bp, Aquilegia coerulea
  Intron number 1 from transcript AcoGoldSmith_v1.006785m (l ocus AcoGoldSmith_v1.004597m.g) derived from phytozome v7. 0 (chr-ID scaffold_49; pos 1233551 to 1234226 reverse stra nd)
gaacgaatattgtcacaatctgtaagtaaattcttcttttattcaacattgagttaacaaataactagtatgaaatctaaaaaaaaaatggtgttttgggttttgttttgaaatgggtatttggtattctgctttggattttaactaagtttaatgggtttctctctgttttctgtaaaaacttgtggattttgattttgaaatcattcctattcatgatggatttgttttggattctttgtttaacagctttacttgtgttttttgttcatgaactagttctatgaatcatgttgagaagattatagaatctaaagtaaaacaaaaagtccttctcaagtaatccatactctgtctcacttcttttttcataaaacatagcgtgacaaacaagaaatgacaaacaaaataaagggctttatttgttctaaaaaactagtttcctcataccatatctttggattcaattgcaagtcatgtttttaaagcaagtttgcaaatcaattcaacaatcaacatacctgaattaataaatttttaccatttttacaattttctttttcatttagtacttctagacttcttctagtcactattgatgaccagttcttcaaaataaaaacttctaaattttaattgggttttctctgtttttcttccttacaaatgcagcaag

SEQ ID NO: 107424 - DNA, 539 bp, Aquilegia coerulea
  Intron number 1 from transcript AcoGoldSmith_v1.003027m (l ocus AcoGoldSmith_v1.003027m.g) derived from phytozome v7. 0 (chr-ID scaffold_10; pos 1884007 to 1884545 reverse stra nd)
gcgttagttctcttctcttctcttctcttcttttttttttttttttttaattcatttctattttctttaattttgttggaatttagtatgttttgatctataaagtttgtttacttgctttaatgaattcactttatagagatactctagattaaagttttaattttagttgaaagtgatatctttctttgcaacttttggatctagttaatggattttatctggattttagagataccctttgatcagattaaagtttgtctcagcttaaaataaagttattcaaattctatctatattctttagtgactaattcaaaaataatttaatatagtttgagaatttaataatcaaaaactgcagataccaatttttctctattgaaagttgattatatttctaatttgctgcactttattatattttaaagctgaattatgaagaaaaaggggcaaaaaataaattttagtatttgctgattggtgatttgattgaattttacagctgaagctattgctctggctttccaacattacata

SEQ ID NO: 107425 - DNA, 672 bp, Aquilegia coerulea
  Intron number 1 from transcript AcoGoldSmith_v1.008371m (l ocus AcoGoldSmith_v1.008371m.g) derived from phytozome v7. 0 (chr-ID scaffold_10; pos 768292 to 768963)
tccatctgccaatcaacaggtataattttatttttttttttacccttttgtacaaagaaattaaagaagtatacctttttggtgggggtactgtttatgtgtatgatgcaatttttttttccttaaatttactcataatgagcttatttcaaggaatgaattcaaagatgcccatatgttatttccatgattatatatctttgttagttgtactttatttgtgtttgatggaaattctttcttggatctactcatttctgtttgattttaattattatgagttcattactagatttgagtgatgcccatttattatattgatgtgtaatgagtgggtctctttgatatatgtactatatacacttgtttatgaagaaattgctccttgaattctattcatgtatataattccattctgagtttgttcttaggtttcagtgatatatcatattgttactattatcatatgaatataccccctttggtagatgttctatagttatgagtatgatctagttgtttttaaatctacttatttctctagatccaatcactgttcttcatacagaatcattcttttttatattgggatatgttccttctttatggttagatctagcacttgacattaaataattctcactgcaactacttctctttgttatgtaatag

SEQ ID NO: 107426 - DNA, 475 bp, Aquilegia coerulea
  Intron number 1 from transcript AcoGoldSmith_v1.021798m (l ocus AcoGoldSmith_v1.021798m.g) derived from phytozome v7. 0 (chr-ID scaffold_27; pos 3216505 to 3216979)
acctcttacaggtcagttagaacttagatacatgcttataagttataacccaccatgtgtttgttttaatttcaataagatgttttttgtgataattgcatttgttcgatagagcagtgagcaagtatactaaaaagaactgtattgcttgctttgaattaattacataataaaaagtttcattatgataagaaaagggctagtagtgaaattttaagaccccttaaaagggctacttttctaggtctaccttttaattatcttattgcaacacaatttactgtatgttccttccactcagttcagtaaaacaaggtttactttctgcaacatatggaaatttacacactgatatactagcaaaaaagatttactttgcagaatatggaagcaaatttgtttgtacctagtttatacttgaaccgaatgttcttttctttcaaattttagggtgcaagtagtatacaaggcattg

SEQ ID NO: 107427 - DNA, 889 bp, Aquilegia coerulea
  Intron number 1 from transcript AcoGoldSmith_v1.010477m (l ocus AcoGoldSmith_v1.010477m.g) derived from phytozome v7. 0 (chr-ID scaffold_10; pos 2659298 to 2660186)
gcgaatttcttcaaacaggtaactggcttttctttacatttcaatttcctataatgggtagtaatttttttctttaaaattcctgttttaatcagctttttttgagaagagtagttcatttatggtagtttttagcatttcccaactttttcgttgtttctgagatgttggatctgtaattttaggatgaaatggtgatgggtttcttttaacatgcattgtttaggagaatttaagatagttggggaatatcgttttacaatttttgcatcttttgaatctaattgtagatcttatgctgccatttagagattctgtaaaacaatggaatgattactttgcagaaattgttcctcattttgttaaaattaaggtattcaagcttgtaaatcatgtgtttatacaagagatttcccggaaaaaaatgggggtgatgagcttaattgaattacttagttacacctttaagaacacaagaagccgggaagatgagaaactgggtaggagagagatatggcctattggttaaagttgtttttgttcttgatgaactgtagattagatctgtgtgcgatattaacttggatttgtttgggttggctgcttttcacaatttggtttcttttggttaaatggtcaattggttctttcagttaagaactattgcatcatttcttgtttgattatgacaggtttaattgttaatacttttatttagttaagctgattctgaagcaactttatgattgactcttcttgtactaaatagtttggcttctgtcattgataaataaaacaggattgactgaagtatttaataagctttaaactaatgctattttatacatgtgtaggttggaacgaggtattgaccacttcccggttcctt

SEQ ID NO: 107428 - DNA, 202 bp, Aquilegia coerulea
  Intron number 1 from transcript AcoGoldSmith_v1.006605m (l ocus AcoGoldSmith_v1.006605m.g) derived from phytozome v7. 0 (chr-ID scaffold_11; pos 2876895 to 2877096 reverse stra nd)
tgtaaaaaaaaaaaaaaaaaaaaaaaaaaactctggtacgtttcttctcttttggttttctattccctatatatatagatcttcatttacattttattcatcagagaaaaattgggttttgattagatttgtatgttagtttgtattgagctatcattgatgaaattttaattttgtgttttgttggaattttaggtttttg

SEQ ID NO: 107429 - DNA, 699 bp, Aquilegia coerulea
  Intron number 2 from transcript AcoGoldSmith_v1.009582m (l ocus AcoGoldSmith_v1.009582m.g) derived from phytozome v7. 0 (chr-ID scaffold_27; pos 1117865 to 1118563)
cgaagcttgaagcagaggtgagatttaaatgctacatgtcatgatctgttttgttggccttagaaacacatggactcatgttaagatctttatactaacttcttgcatgtatagttcgtaaatgaaattataataaaatatgatattaatacacacatttcacataggtttattggtttctcaagtattgaaatatgtatgtaaatacaataataccatcacttgaaaatgatgtcatctcatctgtagagttaattacgtacatgcaagaaataactctatagcttatgccctttgtactgaatgacttattatatgttgcaacctcacccaatttgcatctctattcagttgttcttcttgaagagtgcatcctacccactttactgctaaaatttgtagaaaattatttaggtttttgttctaaagttgatcttctttacgtcatgataagtatcaaaattaaagtaatttgatctggtttgctcagtttctttcaatttaatttgagccttgacaacaaataatgatatattcgtctacctttgtcacattcttacttttatatctggtgtatgcttctttatgtttcagatatcacatcgtatgtctcatgcttttgtgataatttatatgttaatcatacatttctaacatcgtaccatattgggtagcaggttgtacagaagataaaaattc

SEQ ID NO: 107430 - DNA, 276 bp, Aquilegia coerulea
  Intron number 1 from transcript AcoGoldSmith_v1.013227m (l ocus AcoGoldSmith_v1.013227m.g) derived from phytozome v7. 0 (chr-ID scaffold_10; pos 4031345 to 4031620)
ccctggaccaacgttgcgtattcctgtccctgtaggtttgtgacattaatgaattttaattttgatcctttgttcatgcattttctctaaattttttaatgttgaggtattgaagtgcaaatgtcaaattgaattttgcatggatgtaaaagatgacaagaataaagtgaaaccattgaatttattagcattaccttcataattgtttattcaataatcactattaatcatcttgttacaggtactgttgtaaagcgtaagaaaggaacagtttta

SEQ ID NO: 107431 - DNA, 530 bp, Aquilegia coerulea
  Intron number 2 from transcript AcoGoldSmith_v1.013227m (l ocus AcoGoldSmith_v1.013227m.g) derived from phytozome v7. 0 (chr-ID scaffold_10; pos 4031646 to 4032175)
aaattctagttgcaagaggtggacagggaggggtgagtcatccatttcatttttttttcctttgtgattaattaatgcatcatgtatgagttctataacggcgaagtaaaaggattgacgcatgacgattgttttatttactgtatgcctttcccaaatgctggggttcacaacataattcctctttagcccatcaaactctattgcaaccattaggggcatgtatctccatatgtattcatatattagtattccctcaaccatgtattttgcatgctcatacgcatcacttttacatctcagtatgcacttatttgatagttttttagttggccaacattcaaagtagtcaaatgtaaaccgatttctatgacaaacttaacacctagaagacggctgtattcttatgtcagatcttttgtatcgcctttgtgatatttattgaagtgaatatatatgaacgcatcctgataagcaagcatgagtcgtgattggtctttccttgttattggcagattagcttggtagaa

SEQ ID NO: 107432 - DNA, 274 bp, Aquilegia coerulea
  Intron number 1 from transcript AcoGoldSmith_v1.001339m (l ocus AcoGoldSmith_v1.001339m.g) derived from phytozome v7. 0 (chr-ID scaffold_123; pos 214972 to 215245 reverse stran d)
tatcttcacttagaggaccaattcaatctgctaaagtaatcattcttcttttctcactctttcttcagatctcgtgtttttttttttatattaatttttgagagatcttgtaggattttgataaagtttggccgatctttgattctgctcaatctagagattttcgcaaggtaatattttttatgaaaatttgtttcatttttttttgataattcaatttgaattttttagttaattggggtttaatttatttaggttgttcaaggaattataa

SEQ ID NO: 107433 - DNA, 596 bp, Aquilegia coerulea
  Intron number 1 from transcript AcoGoldSmith_v1.002536m (l ocus AcoGoldSmith_v1.001055m.g) derived from phytozome v7. 0 (chr-ID scaffold_37; pos 2395890 to 2396485)
tgaatttggagtgaactcctccgaccgatctactggtatccacgctaaccaatgcctgcccccattttttttcaccctttcattttactattatctatagtctgtagcatgtaggatactaaaaacaatgcatttctttctttccctttcacagttcactttcccattccccctttttttttttttttttctttttttttttttttaactttatcttttaaaataataatttcattagacccaaaaaaatgtatagttagaaaccccagaagtagtaggggtatactgtataatcaaaatcccaagctaattaagttctggctgggagtggggctgtggggtgggagtagtttgtggtgctactactctcttctctcttcttctctattactagtagtggaaaggggtagatgaggctaaataaagtaacagtataactctgcacactcacacaccattccattccatccaatccccaccaccaccaccccctcattctcttttattttcttctttcttctctatctaattcattcagtttgttttggggtggattgacaggaagttagcccaacaaggctataccaggagtgcta

SEQ ID NO: 107434 - DNA, 448 bp, Aquilegia coerulea
  Intron number 1 from transcript AcoGoldSmith_v1.001540m (l ocus AcoGoldSmith_v1.001540m.g) derived from phytozome v7. 0 (chr-ID scaffold_49; pos 1094079 to 1094526 reverse stra nd)
atcttgaagcactcgagccgcttcactggctctaggtaaactctttctctctctctctctctttctctggaattatcgaatatcgttcatgcttttctaaggtttcaatacattctacttaatctccattttcattagttttacttggatttaaggtttagggttttgggtgctttttcaaaatctgtgatatatttctctggaagattaattggattatgatctttctacttaaatactcttgctagtattgttgttcataatgtgtttaatttacttgaattgaagtgttttgagcttgtttggttgatttaaattgtggggttagtttgttttttcttatatttttttcagttttgtttcatgtttatgttgccatgattgggttatctgtattttggctgaagttagtttgttttgtgttgtgtatttgttaaagtgagtaaaa

SEQ ID NO: 107435 - DNA, 933 bp, Aquilegia coerulea
  Intron number 2 from transcript AcoGoldSmith_v1.025259m (l ocus AcoGoldSmith_v1.025259m.g) derived from phytozome v7. 0 (chr-ID scaffold_10; pos 4074103 to 4075035)
tacaattcctggtaagactggggtaagtcttcttcttcttcttcttcttctcatttaagattgattattaataaagtttgaatttttatttcatttaattgaagaaacctattgaaattgaaatttatgtttagttaatttacaggtttgtttgtgttgtttgccaaaatcaataaatgaaattaaaattattatatcgattattgcttcaagttttgcaactatgaaaacctaagtttagcatgattagttattcactgattgccctaggtcgaaggagctcttggatttgatgtttgattcctctttacatcgtggtggcatggatttaattatttatttatatcgttaccaaaaagtggtgaagcagattatgctaggaaaacatagaggaaatcaatgtttctaattaataatcagatagattgcttagcaataaccttgatttgttagttatgtgcaagtgtggctgcattgtgatgttattgagtctaaaagtaaatacactactactctcttattttggaagagtaatcaaatgtttaattgttcttcgttaacgtccaactacttgtaccggatggtagaaattgtagagtttatataattagcttacaaatcacccaagttaaatgaaaatgttcaagttgggctgtgaatttctagccgagttcagctctccgggtttgaataatattttcattggtttattaaagcaaacttcagggcatatattaatactttgtacattaaggcttagatcccttctttgtcctgtgaatgtgcatcattatcattatattttatgtctctggccctttttttctgaaactaatgaaagaacagtaattttgcctgttatgtggcattatcaattaacttgattactgtgctgcagactgactgggagggtggatacttcccattaacact

SEQ ID NO: 107436 - DNA, 162 bp, Aquilegia coerulea
  Intron number 1 from transcript AcoGoldSmith_v1.020060m (l ocus AcoGoldSmith_v1.020060m.g) derived from phytozome v7. 0 (chr-ID scaffold_11; pos 5903009 to 5903170 reverse stra nd)
tgttcttgctgttgatcgttctatatcatttacaggttcgtttcttttattcttcaatcaaacaaacttgttctgttctaattgattttataaatgactacttgtttttttatttattaatgaagattctttttctatttaattacagagttattagtgaag

SEQ ID NO: 107437 - DNA, 582 bp, Aquilegia coerulea
  Intron number 1 from transcript AcoGoldSmith_v1.024653m (l ocus AcoGoldSmith_v1.024653m.g) derived from phytozome v7. 0 (chr-ID scaffold_9; pos 1215922 to 1216503)
aaggttgatactattcttgaatctaaactagctagtgtacttttttattttttattttttattaagatagtagctaggtattcgtttatgaagtgtcttctttatgattttgtgacaatacaggtgttttcctattattttcatgcatgttaatatgtcagcaccactttgcttttgaatccaagtaaaactgaatttttttttttttgttgggattttgattccttttcattgtgtattaaaaaattgcttgttcccgaaattgtagagcagttaccattttctgggtgttcatttttgaatcttttgatttaatagaaagtgtgaagatttcaagatagtgtgtgataggtatacgtattcctattgatattgttaaggatagactcataaatgtctgtcttgtttttcaggtttagttcattaatctgcttcttagtgcagtgtttagccatccttgggttctttctttaactataccttctctgtcacttaggtaggtagtgaggtgcaccattgattttgtttgttctttcttataactattaatgtttcattccagttaaaactgcctcccgagct

SEQ ID NO: 107438 - DNA, 982 bp, Aquilegia coerulea
  Intron number 1 from transcript AcoGoldSmith_v1.023318m (l ocus AcoGoldSmith_v1.023318m.g) derived from phytozome v7. 0 (chr-ID scaffold_126; pos 421705 to 422686)
gagggtacgtaggcaaccacttgatggtccggccgctttggtttggttgttcgtcgatttttttgaagatcggctcagatttgggaaatcttcaccgaggtggagaattgttgggaaactggttctataagggaatccgtttcatatttggatttctaagtccatattaaggatttagaatttggtattggaatatgacttccaatttgattaagtttggtattcctattaggaatttgttttgtacaccttaaaggctataaatataaggtcttagggattggtttagtatcctcaatccatatttattgtttgtctccttctgagagttgttaggatttgtttggtgagtgagagatttgttgggagatttttttccattggttagatactttgtatctttgttgatttgttaataagaagctctcctctttggttggtggacgtaggcaatcgccgaaccacgtaaatcttgtgttttgtgtttgttttgtttttgttttgtttgattcatacactatttcaatcttggatattcgtgcataagtttccgctgcgcacaacaatggccataccaactaccaagcttgtgttaggacttaggaagaggttgcaacaatacaatcttaaacaataccatgattatttaagacttcaggaattcctgacatatatgccccaagatttaaggcaagagagggaaaggaatcgattccatcattccgtgtccatatgttacatagagcacaatgattaagatcatgcgacgtcgtacattgagattatcaataatgataactctttggtctttcccacaatagagaccataagaagaatcttacattggttggaatctttgcctcccattggaggttggtacttgttttgatctttcaagagagttgcatacatatatttgatagttaaaactaatcaaggatgcattatttgatttcaggtggtgtttgctgctacagttaca

SEQ ID NO: 107439 - DNA, 909 bp, Aquilegia coerulea
  Intron number 1 from transcript AcoGoldSmith_v1.010145m (l ocus AcoGoldSmith_v1.010145m.g) derived from phytozome v7. 0 (chr-ID scaffold_15; pos 1103450 to 1104358 reverse stra nd)
actgaggtattagaccgatttctatccttctttttgttgtttttgggtttttctgattcaattcgattttatttcttttccttaagtttaaatttatcaaattttaatcattactagtacttaaattggttcacagaaaacctatgatgaacattaaactgggaattttaatttggataatgaatgatttagggtttaaaatagtagaaatactgatctttgagtaaaggcaacctagctataaaatattattatcaactttgatccaagtaccaatgacgaaagaaatgatattgattcctaatgtttatcaaatagaaagaaagaaagacattttagtgctcaactatttagtttaaatatggctagttaaactgaaaatgaatagtgttttctatatgactaattttcatagcaaaactgatgcaaattttaacaaaaccttgctgctacgaaacaaatgttatgattgtggagtttggtttataccaagaaatgagtaattaccatgctcaaacccctcaagtgtcattattataatgcttatgatttattctgcaatctctagcttagtaccaagtgaagtgtatatcagaaaggtgcaaggaaactataatctgtatttacaaaggcagttttttgtttgttttaggtttgtctctcactttctcttgttgcttcattgaaccaacttgagactagaacaaacaatagtgatgaaatttggagtatggacataggcacatagcttgatttgatcttgttagttcgattgagttcacttttacactttatttctcccttgtttttttcctttgtgtatacaatgggttgctttcttctattgcaattagatttctgaattgttttatttggatgtctgcagtactgggttagccagggaaataa

SEQ ID NO: 107440 - DNA, 993 bp, Aquilegia coerulea
  Intron number 2 from transcript AcoGoldSmith_v1.008228m (l ocus AcoGoldSmith_v1.008228m.g) derived from phytozome v7. 0 (chr-ID scaffold_15; pos 3113589 to 3114581)
caatccagtttcttggtatgttaaccattttgtgctgttattatttatcatcacaattttccaactttaaaccatgtgtttagcctttttctggtgtctgtgacctgaaatcaactaattcatcaacatctctaaattttatcatcccaaggttatcggttgtcaaattatgctccaagatcatagaccaatacaaattatttattgtcaatgttttcattttctgtggattatgcttatattaatttagttttcatctgtttttaggatttttggttcctaagcaatcttctaaatgtaaaggagggcatgtagagttataatttatggaacttgtagctgatggaattctcttacagattagtcaaacctaacaacgttattaagtactttgaattctttgaaacattctcatcattataaatatttaaaaattggaacatgtaattctgatcagaaagagcaatattgtctttctgatcggaatctgtcttagcttataatgttccagatcattaattccagaaaatttgtttgttcaagttagaaagagggttttgtgaggtatagaaaaaccataaacaaaatgacaagtaaattttttagaaggaaaaatgcaccccatgaaagtaagaaatgtgttggtgctctcaaagaagatgcatttgcaaaacaattgggaacttttgctccaaggttatacgtacattgtattcaatgcagcaacattctgcaaaatttagtgaaagttgtcgatttaccaaaaaatgacccctgggatgtcagatgtggattgacattagtttcaccacatttgttttggtctccgactttctggttgttgccttaattgttaaaatctttcatgaataaatattccttatctgttaaaatctttcatgaatcagcattcctgtgtgcattttttggaagctattgctatacttcggtcaatttacctagtgtatactgtatatgataattggcagatca

SEQ ID NO: 107441 - DNA, 782 bp, Aquilegia coerulea
  Intron number 3 from transcript AcoGoldSmith_v1.002489m (l ocus AcoGoldSmith_v1.002489m.g) derived from phytozome v7. 0 (chr-ID scaffold_15; pos 2911225 to 2912006)
aacaggtttgttgctttcaggggttctgcttcattgtagcaggtgttgtttgtttttttacttttatattgttccatttgcaaataattccaatccaccaatcattgagataagtagtctttattcttttcgttgttcctgttgtctttcttttttttcttagtggactacatatgatagaaaattaaaagaaatttcaatcagtgcacgcaatgtggatgaagcaaatctatcttgttgttttggtggttaatttgactattgcttagctttaattgccaagttccgatatttatttaaattgagatattcctggtattgcaagattgatcttatgttgagcgcataactggttttgggtattccacggtgttcttacacagatcaagaaatgatggtgagctgtcaatttgctcagatgaaacttgatcatttaaagaatatgttgctcacatattgattgtttgatgtcatttgcatattgttaagtgtttggtgtgtgtcacaagagtgcattttagattaaaatacttccctttcgtggggattaataaggttcaatgagattagcttaggttggaagtgagatttttcctatttaattttatcatttcatagtttatataaattttaatgttatccttttgtggcaagtaatgcaatgcaatgcattatcatttttgttttcctttttctgttcttttgcctgctatgactcatggtggtaaactgtgtatgtttctacagttacgtgagttggataaaggtgtcgacatacttgt

SEQ ID NO: 107442 - DNA, 815 bp, Aquilegia coerulea
  Intron number 1 from transcript AcoGoldSmith_v1.027482m (l ocus AcoGoldSmith_v1.027482m.g) derived from phytozome v7. 0 (chr-ID scaffold_12; pos 5602175 to 5602989)
atcttgctgctgttcttgaatacttagctgctgaggtatataatataatcaatctttttatttctttttttttttttgggcatttaggattttttttttcttcaatttcatgaatttattggacttcttctaatttggggttcttgaatattaagcttttgggaattttttcaattttggggtgtgtttatttttcatcatttttagcttaattttgaaattatggtttataatattttacttccaatattttgaaagtaaggatttagggttcttttgttttttttttttttaaaatttggggttcttgaattttaggcttttagggattgtttcaatttggggtgtgtttatttttcataaatttggtgtttttagcttaattttgaaattagggttgataatattttgattctaatactttgaattttgatttgggggtttattattttgtcaattcaagtatttttaagaaatggatatcaattactttttctcaatttctatgaaataatagttttaacaatttttattagattaggttttgtgtgtttatttttcatcaatttggtgctttataacttaattttgaaattagggttgataatattttgctctctatactttgaattttgatatggggttttattatattgtcaattcaagtagttttaagaaatgggtatcaattaatttttctcaatttctatgaaataatacttttttcacaatttttattggattagggtttatgatttggggatctaatttttattatttggtattttctatataggtacttgaattggctggta

SEQ ID NO: 107443 - DNA, 660 bp, Aquilegia coerulea
  Intron number 1 from transcript AcoGoldSmith_v1.007858m (l ocus AcoGoldSmith_v1.007858m.g) derived from phytozome v7. 0 (chr-ID scaffold_21; pos 3893558 to 3894217)
gaagaagaagaagaagaattgattttctagctcaagtaagtaattctttctttcaaattgattttgtgatggattgatttgaaagatttagataatagaatttgattcttttgaagatatttcatatttgattctttaattaaaattttagttcaaagattaagctcttcaagtgtttgggcgtttggaagatatcaagtatattatatgaactgattttgtgagggttttagcgatttttgttataaataaatcaaatttgttttctatattgttaatgttttattgggtacattagtgcaaaagcaatgaaattggcacacaatcgtgtttctaaatcttgcgttaatggtgaaccaattagttttgatttcttatgtgaaatatggcgagcggttttaggtataagaaatttgtagtctattattactgttacatgccataatattagaatttgtttcccaacaacaagactgtaatgactgataaattgcatccttagcaatttttgtaaatgtagcttttattggtaaagaaaaaaaaaatggaaacccaaattatatgtatggaatcacttgattttgtctctcttaaacttttgctacttttcttgttatatcgacaggttgaaggagtaagaatatcatctctactttgagg

SEQ ID NO: 107444 - DNA, 785 bp, Aquilegia coerulea
  Intron number 1 from transcript AcoGoldSmith_v1.007949m (l ocus AcoGoldSmith_v1.007944m.g) derived from phytozome v7. 0 (chr-ID scaffold_9; pos 5383984 to 5384768 reverse stran d)
ccgtagagcttcttcgttctcttgcacaagaaggagtaagcaaaagcaatagtactttctagttttctactacttgaatgactcttgatcttcccacattgtcttgatttcaagttgcattattgtgtaggtaggtttgatttgttgtgtttttttgaaataataagatgaaatcaaagtcttgatttgatttaaacatcttgaagagtattttgagattatcagagtatctttactagagtactacatcaaattgcattatttaggcaatgtattgatcaaggtgtgatgtttctgtgtaactagtaatctgcacattgtttcccttaggtttcattttcatcaactatttgtatgagtttcatagattgtgagtgatcgtggtgattgagacgtgcagtcggggttttcttttgttattttgtaatttaagtactatccgagtgctaagggatcaggggttatccttgggattaactgcattatagtataccatatctgtcaaacaagttcaattgttccacattattgtgaagtacagaacaaacaagattgtgtaaaaaatatctctttcagtctttcatcaatgtataattatttgattattgccatacatgatactttatgctctattagtagctttaacttattaaccttataagtttcccttgcttaattatggatattgtaaatgttattgcaattcttgggttaatgatttttaggcttcttatatattcactggtttttcatatatattattcagcccaacattcaaagttgag

SEQ ID NO: 107445 - DNA, 440 bp, Aquilegia coerulea
  Intron number 2 from transcript AcoGoldSmith_v1.019140m (l ocus AcoGoldSmith_v1.019140m.g) derived from phytozome v7. 0 (chr-ID scaffold_10; pos 2272850 to 2273289 reverse stra nd)
gtgtcttgaaatactcttctggaggagttcttgaggtaaattttttcatttatttcccttgccaaaataagtaacggaagaagcatgtagatgttaagtgacattatgttttaatttctacggtgggttgacatatcttaattgggctcaagggtgccaatctagttgcaatttctagtgagcacgtagagttgtagatggctggagaccccctcatatcactcttttgattccttcctaattacacaaaataaactttttcacctgtgaagagtttttctggctaaaaaacagatagcatcaatattcattactgcatgctacaatttacgattctgccaaagtgtttttcttcaagagttgggatggctttaattcagcagagaatttttgttgtgcatgtagcctgcaaaactgtacaagctaaagcatctctcaaa

SEQ ID NO: 107446 - DNA, 635 bp, Aquilegia coerulea
  Intron number 2 from transcript AcoGoldSmith_v1.006527m (l ocus AcoGoldSmith_v1.006527m.g) derived from phytozome v7. 0 (chr-ID scaffold_21; pos 4380537 to 4381171)
cccttatatcatcaaaagtaagttttttttgtttttgcccccttacagctaatttttgtttttgatacactttgcaccaggtgtttattgttgtttgattaatgactattatattcaaaggggcttaaaaagatgtagtagatttgatcttttttagaaatatatgatatgtgtttatttgtgtttttttcaattgatttgatttttgtataactaaaacattagggaatcaatgagctagatgttttttgggcaatgcagctttgttttgtcctgcaaatgcttaattgcttatagtataacacgtaaaatcctactgtaattaaagtccattaatttttgtaaagttttattgatcttctcgaagatatgaacatcatggtttatataaattgtgccagttcttcttggtatgaccatgtactcatggctaatcttacgtatatgaactcatgggggtgttatctgtccccagattctatccctgctagctttgagtcatacttcactctttctttacctccatgctgacagcatgatatatttagtataacatgtaaaaaatggaagtggtatgatttctgtgattgatttttgtaggtggccactggcaaaaccacttccaggtgctaatc

SEQ ID NO: 107447 - DNA, 572 bp, Aquilegia coerulea
  Intron number 1 from transcript AcoGoldSmith_v1.002935m (l ocus AcoGoldSmith_v1.002935m.g) derived from phytozome v7. 0 (chr-ID scaffold_12; pos 3844051 to 3844622 reverse stra nd)
gatcgacaaccttcaaatctgcaactctaagtaagtaacatcatctcactctaatatctttgtggtcagaactgcaaattccctgcataaactcggcttgcaaagtgatttccagtgtcgaaatctcggcatatgccgctattttgagaatcgaaatttcactcgaaatcgaaattttaaactatggtatgaactattattctttttcttcttttctaagtggatttttttcttttttctttttaagattattctccatcttgaaaaagttcaaacgaaagcaagtatacatgtcaaaggtatagcatatataaaaattgacccaaatgataaaagataagaatccatcatgaagtagaaatggtgcattttctttagttacgttggatttcatcatcatgctctaaatcttttttagataaatttagctagtagattaagtgctttactttgaattaatgttttacatcattaagtacaaagcttgagtggattgacttgaagttgtagatatctgaaatatgctcaaaaagacatgtttgtttttatttgaaatgcagttgtaggtggtg

SEQ ID NO: 107448 - DNA, 782 bp, Aquilegia coerulea
  Intron number 2 from transcript AcoGoldSmith_v1.006876m (l ocus AcoGoldSmith_v1.006876m.g) derived from phytozome v7. 0 (chr-ID scaffold_54; pos 1205328 to 1206109)
tggcagagaaaaagctccatttactaacgatcgaggtaactaattgagctctataatctgattcccattatttaatttagatttctttgtaactaaatgtgtttgtaattttaggtaatttgatgagatttaggttatggtcaatgtgaactttgatgggtattttctcgatttctgtttaattgcttgcgcaattttagagtgatgatatatatacatatatatgtacatttatgcatgcacattaagtagaagaaaggtattaaggtatacttttccaacaatcagttggattaatgcattttctcactgtaccatagatggacttttcacttaggttggtgatctgttcattgatttgtgtttattaagaatttccttggggtttgattagaatggaatagcaaatgtttgcaatgtttctttgtataaacttaaggtgtatttttttgtatgagatatttcatataagtgcgactttagttccttagttgattttgtgatctcaattgaacgctcattgctggatataatatcattgggtttattgttagccacctatatccttctataagggggtttggactgttcatgttgttattgcttatacagttagcccaaaaatcgtgcattgttacagtgattaagttttgatcaacgagatatacaaaaataattgactcttcatatagtcttgacttatttctagacatattttactttaatgatctgtttttatatttttcatttcacctaatcttttgtacatgcagggtatagtt

SEQ ID NO: 107449 - DNA, 409 bp, Aquilegia coerulea
  Intron number 1 from transcript AcoGoldSmith_v1.005399m (l ocus AcoGoldSmith_v1.005399m.g) derived from phytozome v7. 0 (chr-ID scaffold_18; pos 3225789 to 3226197)
taggtagcttatttttacacaaattttacattttttttttccaaatttagtttgcttgatttgaattttaaatcccatcttttattttgctcaaattcattcgttaattatgtatgaaaactcccttaccctttttcatggaaaacacaacttgtttgaatttttattttgagattcattttgaatcgcattttttttagcatgactgaaatttctgagcttttttcttcctgaagaaactagtttttttttttttttttttttttggaatttcattttatgttataatgattattagttgaaattggagatgtttattgaattgaaaaaattgctttgtaaatttattgaattttttttcttcttatttttagcggcgtgggcataagaggaacgtaaacgaaacttg

SEQ ID NO: 107450 - DNA, 562 bp, Aquilegia coerulea
  Intron number 2 from transcript AcoGoldSmith_v1.005399m (l ocus AcoGoldSmith_v1.005399m.g) derived from phytozome v7. 0 (chr-ID scaffold_18; pos 3226566 to 3227127)
gaagagaggtataattatctttcttttcgatttgctcagtttatgttccagtcatgtgcttttcattataagtaggagcatgtaggtttgaattatggataaccataaattatcggaattggaacgtgcatgcagaaatgtgtaaaaatacagcacaattttttctttcttttatcatctatttgtaatgcacaggggagtaaagacaatcttcttttggtgctacccaaaattgtctatatttagttgaattaaaaacaaggccattcagtattggacatttaacaatatgaaaacaaaggtgacagtctggcagattacatcattgtaaaatacatataaattgatttagatttatttattgaaattgattttatcgtagacatatatttctcacatatattgattttacctcattgtaaaatccagacttgagagggtagtctttcctctttttttttgaaacatatttcttcactacaatgaaatgagggatgactaatacatgtggtatataaacttttgtttaggctggttcttgttaaggggctgaagtgggtgg

SEQ ID NO: 107451 - DNA, 152 bp, Aquilegia coerulea
  Intron number 1 from transcript AcoGoldSmith_v1.007547m (l ocus AcoGoldSmith_v1.007470m.g) derived from phytozome v7. 0 (chr-ID scaffold_30; pos 794882 to 795033)
tgtaagaaaatcaaactcaaaccttgggattaagttttttcttcttgttcttctctattttgttgttgttgaaatatatcataataacctaggtaatttcagagtttggagttcaattatttgtttaataatattgtatctaatcaggtaat

SEQ ID NO: 107452 - DNA, 905 bp, Aquilegia coerulea
  Intron number 1 from transcript AcoGoldSmith_v1.011430m (l ocus AcoGoldSmith_v1.011430m.g) derived from phytozome v7. 0 (chr-ID scaffold_72; pos 191911 to 192815 reverse strand )
cagagaagtttggacttgaagctggtctttggaaggtataaaacaaactaacaaagcatacccattctttatattttcaattcatgttttaattgatgtcttttttattgaattgaaggtttttttattttattttttgtatttccatcacttactgttaaatttacttgaaactgaataagagagttgaagaaagaccatgggcatacttgaaacatgattcttaaacataggagagtgtttccgtgtttcgccttaagtggaaaatgtgtagcttgtattgaatggataagataagaaattacttcttgatttttcattgaagatactttactgccttgcaattcacttttataaaacattttcttgggtcgtttgagattccatggcgacttgaagaacatatcgatttggaccatgtacaatagcttgcacataagaagtgcaggcacatttgtgtacctaatttgactttgatgaaacttatctaacactacatcaagaaaacactggaaataagacacagattgcaattatacaccagcggcaatttaccttactatatgtatgccctttttcaacctgcaactctgcatgtggtagtcggccatactcatcttcggtggattttagcaacttgcatatgaactgtggaactggaatggacttttagccaaatactcttacctattgctattatgaaaggttgcattggagagtgttttaaacatattatgttgagttagaacttaaaactcatttagatatgtctttttctcttcattttcttcgcccatttaatcgagatgaattttttatcagcaaaaaactttcattttcattttcttattagagtatcatggttcactcttcaattgaatacatgcagatattcaactcaaaag

SEQ ID NO: 107453 - DNA, 824 bp, Aquilegia coerulea
  Intron number 1 from transcript AcoGoldSmith_v1.017821m (l ocus AcoGoldSmith_v1.017821m.g) derived from phytozome v7. 0 (chr-ID scaffold_30; pos 2067393 to 2068216 reverse stra nd)
gaacatacaaatcaacagcaaatcgggtaagttttcagtttttgtgttttaatataatatatatcaaagaaatgcatttttaagtatttatatggtttcttggttattataatagattgcttggagttggagggtttatttttgtttaattttaatttcaatttattggttcttttgttttcttgcattcttttgctagctgattgttagcatgattcataaggttaaatctttaggtgttttaatcatggtgtttaatttgtcagaatgtatactgtctggattgatgattatattgtgttttaaagaacacattttaattaatctttttatctataagtttgaatgtcaattttgcaaatggatatttgtcaccatatttttcttctgatttaccaaaattttaaaccctgataattaattaatcgaacatttttatcacaaaaattgtttgtatacaatatatatttgaaatggaacagtggttctctttattatttctgtatctttccacaacaaggagcagagagtttgtgttgttatatgaggcagtaacatcaactaacatatatactttgaatttttgttttgggaaactcggaattttacatttaatttttctgtcatttaatgcttaggatagtttaaagtatgtctttgatcttcaagcattagtgtagactgtgaaccttgatgcttatgttaatgttgttacttcggatatatgttacaattttgtctagtttccagtttccactataggatttggataatgttattgactgttttaatcaaatttcaaggcttgtgctcctgcattcaca

SEQ ID NO: 107454 - DNA, 896 bp, Aquilegia coerulea
  Intron number 1 from transcript AcoGoldSmith_v1.007136m (l ocus AcoGoldSmith_v1.007136m.g) derived from phytozome v7. 0 (chr-ID scaffold_18; pos 339523 to 340418)
caatcgtgtcttttatcgaggttggcaggccgtaggtacgtctattcactctctcgtgcacacctgcttctttattttctccgtcactcttgtaaaattacagtattgacctcaaaacattttaacaacactgaatttattaaggttaaactcgtcatattacaagtccaatctgaataatgcgttagaatgaaaacaagatttccatgaacaggatactttacatgacatgtctcgcaatgggtattagtatactagtataatataagaaacttatttgtgaccatgtggctatcaaggtaggcgaagggcttctgtaaccttagactcgttatgctgctgttcgactgaactcgttggctctgcgtccaccgttctgtaaatacaaattgtttaggctcattgtgatactactatgaaactatgaaagtaccaaacattacagttacaactcaatactgttaatagtaaattgttgatggagatattctgtgaatttgctaatgtagttattagtaagacaagaaaatgttcctagctgatttgtgttcgaaacaaaatttcccattttacaatcaaaataaactttacagacatttgcatttcattcaattctgtgattcatagttacttttagctttagatctctaactgccttcctctacagtctagacattaaactctgtttttaagtttgtttcaaattgggcaagctttttatgtactacttttttgccgtattagaggtgtatctgcctaatcatgaacaagttagacagttcaatggggaaatgacaattattcacattattgagctgacttgtgctgtttctgcatatttttttttttttatgttcattgaatgtcagggtttacagaacaaataaaaaatcccc

SEQ ID NO: 107455 - DNA, 516 bp, Aquilegia coerulea
  Intron number 3 from transcript AcoGoldSmith_v1.013293m (l ocus AcoGoldSmith_v1.013293m.g) derived from phytozome v7. 0 (chr-ID scaffold_1; pos 3514011 to 3514526)
gaggttagtctttaatgttattttacttgatgtatgaaatgctatgtacaactataataaagtgaagtaccaagtttgatatgtgtttttcttgaaccttattcactctagtgtgagtgtaataagaacaatttccttaccttcatagaaatgactaaactttaagtatgttagactttaaaattttagtttatcgcattccattgaagttcttagcaagtgcaactgtaattacgagttattttgtgtgttagaagtacctaccaaagaatagttatgccaaacgggagggtttgttggactcttatgttcatactgattcttttgaagtgctcatccgacagaaatctgaaaaaaatctttgttttcccttaagaatcaagttcaagggctgtatgctgcatgttttttagcaagtccaaattcaagcatttgcctgaaactctaatctagctcttcaattttgcaatatgatgttgatcagttgatcttataggttgtagctgaagaaattgg

SEQ ID NO: 107456 - DNA, 422 bp, Aquilegia coerulea
  Intron number 1 from transcript AcoGoldSmith_v1.001328m (l ocus AcoGoldSmith_v1.001328m.g) derived from phytozome v7. 0 (chr-ID scaffold_77; pos 77921 to 78342)
ctggttctggaaaaactcttgcttttattataccggtaagttttttttttttatgaaagtggcacaaccatttattgttatagcttagaatttgaattgaggtattggtatactccatagattattatgaagctgtatgttgcttgtatttgatagaagcatgttgttctgtgtagcagcataagccataagatgtatttcgtagttgtttccttttttccattttttgtatatcattcttgtttctcattcatttgttatgtaaagagtaaagactctctggatattctactacttttacttcttcgtttctatttgaatgattatttatttagaaattggaaaacttcatgtgttaaagttcaaacgtagtaagtcactttctggtactttcaggttttagaaaagctatatagggcaag

SEQ ID NO: 107457 - DNA, 467 bp, Aquilegia coerulea
  Intron number 1 from transcript AcoGoldSmith_v1.008804m (l ocus AcoGoldSmith_v1.008804m.g) derived from phytozome v7. 0 (chr-ID scaffold_9; pos 2530870 to 2531336)
cagtgtaaacctttgtccgaacaagaggttctcttctttctttccaacctttttaacctctttatgcttgaaaacttgtcttttatgtatagattgggtagtcaattgttatggatctatgatttgagtggatcagtgttgatttaggagaaaattggttcactttgtcaattattcctcaatctcgagaaaaatggtgtcttgatggagtcagatcttgtagtttgtatcatttggatctttccataacaagcattatgccgtgaataagcactttttacaagaactttagtaattgaggagtgatgagatcatatatggcttagtgagaatgggcaacatgttttttattatctggtttcttgtttgtttgatatacttcattgaagttttatgtcatagttggcatgatttgatgtttacttactacaattttacttggtttgctggatttaggtcaggacatt

SEQ ID NO: 107458 - DNA, 727 bp, Aquilegia coerulea
  Intron number 1 from transcript AcoGoldSmith_v1.004409m (l ocus AcoGoldSmith_v1.004409m.g) derived from phytozome v7. 0 (chr-ID scaffold_21; pos 3566473 to 3567199)
aatatctgaaacactgttacatagatataaataaagtgagtaattgaattgattgatctgttcattttatagatctatgtttgaattttcattatcttcgaatcattgcttttagtttcgatctgtttgtttttattgattgattgttgtttagatctggaaatttcgacttgttcatatttggtttcagaattcagattcatttgatgtgattggtgtttcgttcgaaaaaaaattgtatatatttgagatgtttcattatctatgttaatgattgctatattagcttgctcgatcagctatatattgtctcaactgtttgggaaagcatgttttctagcctcaagttttgaagaatgttgttgtattatttattcttaatggatttttttttctttgtgcttgcttatattcattaatctctgcaaagtttaaatgttggccacttattagtctgaatgattttctccattttattttatccagcccaacattgattgctaattaattggttttcctactaaaattatttaattattttgaaggactttattgttgaaatcgcaactcaaacatgttattctttagaaatgtcttttttcggcctaattatctgattgtgcgtctatagttttaagtaaccagccattcctcgtaattaattttatgttagtgcactaattgttttccgtaacaggttggtgtgatttgtttttaataaataaaa

SEQ ID NO: 107459 - DNA, 646 bp, Aquilegia coerulea
  Intron number 2 from transcript AcoGoldSmith_v1.005645m (l ocus AcoGoldSmith_v1.005593m.g) derived from phytozome v7. 0 (chr-ID scaffold_9; pos 1747011 to 1747656 reverse stran d)
ttggtaattactgcttgtatacacatcactttatcttttgtatgggtttgcaatttttcttaggttttttcctaattttttctccctcaaatcaaccgtatttcccgattaaaaaaaactcatcttgtggaattttggttgagtttataaagtaaaacatggatagtgttgaaatttgcttcgaataatttatgtttaacatacatattatacatcttgtcatatgttccatatgccaaggggtttatagcaaatataagtggaataaggaggttttaagtggtattaggcagatacctgatggagtgttctttatccttgtattcattgttgtgtcgatgaggatataaactcttcttttgaatttgtatttgcttataaacccgcgttgggattcatgccatttcttctttaaatttatgggtgaagggagcagaaattcttgaaattatttgtctcatgaatgcagcttatgtcttaagtctctatcgtctttggtggaaagagatgttgaatgaaagaattggaaaatgtgcaagcctgttacaagagtaatttgcatgcacttgttcatgctcttggtattaatcagttatttaagtgacatgcagccccctcttctccgagcgattctgaagtcaagaag

SEQ ID NO: 107460 - DNA, 940 bp, Aquilegia coerulea
  Intron number 1 from transcript AcoGoldSmith_v1.011356m (l ocus AcoGoldSmith_v1.011370m.g) derived from phytozome v7. 0 (chr-ID scaffold_37; pos 975798 to 976737 reverse strand )
ctgctcaattctagttgattttgaatctatttcgggtaagatttcttctatcttcttcttcttattttctatttactactgtgttcagtttgatttgttcagttcgaagtgatttgcacattttttgttgaagtatacattcaattctttcttttctttatatttcttctatcttcttcctcttctttttatttcttgttgtgttcttcctattgtgttcttctactgcaaattttaatgaaaacttggttagggtttttcattttggattttttttttttatttaactgtttaattttgcaaaaagtttacgagtttaagttcaatttttgtttctagggtttttaatttggggtatttctctgtctattgaattctgctgtcattaggttaaattctccttttatattaatcaattatagcttttgtgattgtattattttggtagtgccatcatgttctacattctggatagtttgattttgtgattcatgttgttcatattgaatggaattgttcttttatccaatgtaaataaaccttttgtaattctctctctgctcccgagaaacacacaaccctagtcctctttctctctttcactctcctctctttcaaagaaaaagcagcagtggtcatcgctgttccttcgctcttcagcttcttcactcaattctcactggtaaatattctttttaataagaaactcaacccctatctctctctatctctctacttataattttcgaattaattgagttagggttctatgaagtattgaattgtcctaagtttgtgttaattttcaatccattcatcattagtaaattcaatgctctgttggggtgaatttttaattgaatggattttacttgtttaattgattgatactattgatgggaaaactgatttgtagtttatgtttattatataggcaaat

SEQ ID NO: 107461 - DNA, 392 bp, Aquilegia coerulea
  Intron number 1 from transcript AcoGoldSmith_v1.004939m (l ocus AcoGoldSmith_v1.004939m.g) derived from phytozome v7. 0 (chr-ID scaffold_15; pos 1301324 to 1301715)
ttctcaaagaggcgacaacattgttttccgtgattgtaattctctctttctttctctctctgtggatttgagatctgtttttaacaatttcaattcaattgatctcattgttgatcatttctgcatgtttgagaaaacctaatcttataattcatcacaattaatctaattatcaatcaattcaatcttcacatttcttagtaggtttgaagtagaaattaacacaagtttaatcaaactgttttttttttttttttttctagatctaattactgattaatctttggtttaaaagctgaagctcagtttttgcaatttacatttcaaacacattctgagatacatgtgttgtaactaagtagaatgttgtatactgtttgcagatcgtagtg

SEQ ID NO: 107462 - DNA, 224 bp, Aquilegia coerulea
  Intron number 1 from transcript AcoGoldSmith_v1.027702m (l ocus AcoGoldSmith_v1.027702m.g) derived from phytozome v7. 0 (chr-ID scaffold_1; pos 4122241 to 4122464 reverse stran d)
tgctcatttgctacaccagtaatagatttccaaatgtatgaaatttgttttaatcatatcataccatcttttgatttttctcttctgtatacttcatttgagggaaaaaaaagagaagacaatcttgaagttgggttttgttggatttttatgttatttgtttttttatgttgtttttgcttgaatccacactttctgattttgggtttttgtttggcaggatt

SEQ ID NO: 107463 - DNA, 964 bp, Aquilegia coerulea
  Intron number 2 from transcript AcoGoldSmith_v1.018605m (l ocus AcoGoldSmith_v1.018605m.g) derived from phytozome v7. 0 (chr-ID scaffold_1; pos 9023534 to 9024497 reverse stran d)
agaaaagctcaaaggagttcagtcgttcagagaaggtatatcagtatatctgacttctgagggtcacacgtacagtgtgtcactgagactctctgacttgtgtaaagcataattggtgggctttaatgttggtcagatttgagtggactcagaccgattaaaaagggttctaaacaaagtcagatatgtccaagatagcccaagcccaattcactatattttcttcttccttttgtttctttaaaatactacctgaaagtatctcaaagtctcaaacaaacgaatatgggatggaaatctttcatacttgcaagaaactgaggtacttcttaacttctcaattcatttcttcttctaaaaccctaatttctaccataaaccctatttcatttctctcttccacacaaaaccctaaacctcacatttctactatctctcactttctttctcgatcatgttctaccacttcatcttcttctggttcatttcaattaaaatctaaagtttctagaaggaatcttatgaataaaaaagctaatttagaaagagttcaagagattgtggaagtggttaagttagacaaaatcgatatggaacatgagttaaataaaatggggttagttctatgtcttgatttgattagtggagtttttagagttttgaatactaatgaagtttcaggatttcgtttttttaattgggttagagaaatgaatatttctttttataggaatgcggatttttgtagtttggctattgataatcttggtagagttgaagattatacattgatgttatatctattgaaagaattttcaagagaaacactttgtttgacagaaaaggcatttgaatttttacctgttttggattcgaatagggatttgggtagggattatgtgatgagagttttaaatatgttgaataaggttggagggtcttgtcgtaattctggaatttttgc

SEQ ID NO: 107464 - DNA, 312 bp, Aquilegia coerulea
  Intron number 1 from transcript AcoGoldSmith_v1.020435m (l ocus AcoGoldSmith_v1.020435m.g) derived from phytozome v7. 0 (chr-ID scaffold_9; pos 5087214 to 5087525)
cagctccccttgctcgtctgaccatcttattccaggtttgtttttgtttccaaataccattttcttagtggaaattactgtgtttttcaatttgggtatttgggatttttgtgattgaattgattcaaatgtccaaacttggtaaattgaaatgttggttggggataaaaagattcaactttggagtatttcttctaaaacattatttctaataattttaaggggatatatttaacagttttctttctgctgattaattaattattttggaataattattatgatttcattttttatctgtaggtccaaggt

SEQ ID NO: 107465 - DNA, 697 bp, Aquilegia coerulea
  Intron number 1 from transcript AcoGoldSmith_v1.008809m (l ocus AcoGoldSmith_v1.008809m.g) derived from phytozome v7. 0 (chr-ID scaffold_10; pos 3148709 to 3149405 reverse stra nd)
gaagttgatttgtggtaagtttgttttaaattttttatttatgtggtggtgtatttgattaacttatttgataaaagtttctggtttttgtttgatttaagtaaaaattagagagaaatacatataaggaagttgctggttttgtctgtttccgtgacgtctttgtgattgtgaattgccggcatttttgctggaaatttgctgggttttcacttgttttccaacttaacagaattcacaactttagtgtggatttcttgttattgaaattgcacaaaacaaatagagagagcgagagagagagagagagagagagagagagagagagagagagagagagagagagagagagagtgataagatagttcttctcttcattctctgattctgcttctggttggtttcttcagtctttccaatttcagttcatagattaagcttttgtggccgttttgaatattctctttacaattctcagttgggatttaagatcactttgatttgctttattgtcctcttgtgttttgatgttttggtatatttcttgaattggttcatttttttgttgtttcttcttgaaaaatcgtcatgtaattaccttaaaagctcgtttttggtttattgaatttcatttgaatttgtttttgttcattttggaacaggcttcctcaagcaatctcttattttctcttatata

SEQ ID NO: 107466 - DNA, 655 bp, Aquilegia coerulea
  Intron number 1 from transcript AcoGoldSmith_v1.002299m (l ocus AcoGoldSmith_v1.002299m.g) derived from phytozome v7. 0 (chr-ID scaffold_37; pos 550981 to 551635)
aatagccttcttcaacaagtgtttcagttgctttggttagttttcttttatgatctcattttcataatgtgtgcgaaagtttaatttgaagattttaagttaaacagatgttcttctaactgtagttttcaagtaaacaacatattatccttgtaatgaatgctcaaagttctgtttttaaagtgatcaacccttaattatttgtagttttgttgattaatgtgatgatttgttttcattaatcatagtatggatgactcttgaaagaaaattcaggtacttgttaagtaaatcttttttatttgtgtagaagatgagatgttgcagcagaatgaaacattattagcttgaatcttgcactgttttaccattggcataattttatggcatttttgaacatatggttgcattagaatgtattctggcctaaatattgaagatcgatcgtcctgctggttttggttttgtttagaaataagagattaaataagaaacatagaattgaggtacatggaatcaaaagcttaactttactgaggaatgcttttttgttgttgctttatgatttagattttattcatccaatgcaatttattgtacactggagatatattgatgatgacattcgtcttatttcagaagaacaaattaacca

SEQ ID NO: 107467 - DNA, 989 bp, Aquilegia coerulea
  Intron number 1 from transcript AcoGoldSmith_v1.021504m (l ocus AcoGoldSmith_v1.021504m.g) derived from phytozome v7. 0 (chr-ID scaffold_9; pos 4249591 to 4250579 reverse stran d)
ccaccccaagtccgaaaaagtgtgagtgtaagggacaactttgtgaatggttaatgttattcttctgtcaattgcaaaggatattgtatggaggatttaaagttttggacctgtgtttttcatcgaagattcttttggggggtttcagagttataattctttgagggaggaggaatggtgtaacgttctaccaagcttggtctgtgccaaatgaaatagtgggtgtgaatcttttattacaataagtgataatcacactaaattagctgatatttgttaaactgaatgaaactatttcaaccaggcagttgaaaccagaagctgagttgatgttacaatattttgaactgagcaaacgacatggaaacatgagctgatgttacaaattcttgaactgagcgaatgatatggaaacatatatgggtgttttttcttacaaaattttgattttccagaagatattcaaggcataattggattgttataaaagttagaagagaacacaacatatatttatttttgtctcattttcctgaattcccatcttcttccaatagtgtcctctattttctttggaaataattctccgcaacaaatcaaacacaccttaatcatttggatcgcccttttgacctgctgagtgaaacttctattgtctagagtggatttgtatcaatttgtgccagttgatcttgtcttgtttccattttaaatgagctttatacactaaacaggtattagttatcaatgtgtcgttgttatgacttatgagttacctgtctgcacatttcttggattgttggagaacttattttgttttaaatgatttaggcttgtttgattgtttacttgatttttgataatggataacatatgagctttagtctttagaggtttccttcagttcaagtttttctttgtatactctcaataatctttggctgatgtccaaaaatacttgcagataaataaaagaggcgaaactgttg

SEQ ID NO: 107468 - DNA, 668 bp, Aquilegia coerulea
  Intron number 3 from transcript AcoGoldSmith_v1.020538m (l ocus AcoGoldSmith_v1.020538m.g) derived from phytozome v7. 0 (chr-ID scaffold_11; pos 2390317 to 2390984)
tccaaagattcaagtacttgaaaatacgcaaggtaattgaataattttttcaatgtatagttgcacagtagaatttcctcctattatcacatcaagtctgtatagtttttgtatctttgaaagttgcggtgtgaactttagattggtgactggcatcttttcagaattccactgtatctcttcatctctttgcaccattttctcctatgtagagagtggagatttctcacactgaatttaagctgatcactagatcatcagctataagatacagtgtcgtggcccaaaatatgtgtttgtttttggttcattaatagccaaaattatgcgtactgatatattatttaagagaataattttgacgcattttcataccattaagctgactcttatatgcaatataagttagccgcatcttcacaatatccccatatgattattcaacttgccagtgcaacttctgtgtgctaaaaatgttattgaagcacctctggttatcttgcttggtaaaatggtacatatatctgctcatcagctacaataagccataactcacaaataggggaattttaactgcttttgttcttgcattatttggtgtcgtcacttactaagtaccatagaattgatcaggtcaatatctgcaagcagaggtggacggtggattc

SEQ ID NO: 107469 - DNA, 349 bp, Aquilegia coerulea
  Intron number 4 from transcript AcoGoldSmith_v1.001206m (l ocus AcoGoldSmith_v1.001206m.g) derived from phytozome v7. 0 (chr-ID scaffold_18; pos 1456364 to 1456712 reverse stra nd)
gggtgaagatacaatcatagcaaatcttgatacaggtcagtagtttattacttgtattttgctactaaaattacatgtcagtagtctattaatcaaagatattactgttctctttttgttacttgtgtttagccttttctacattacttgtagataagctaagtaaatatactacattaagattgttatatataagtggttcttctatcaaaatatataggtggtccttcattcgtcggcaaacaagcatggttgttccccttcttatgatcatttgctatagagtcttattgtttcctaatctatccttagtttttgttaatatctgtaatgtgttaaatgtaggcgt

SEQ ID NO: 107470 - DNA, 571 bp, Aquilegia coerulea
  Intron number 2 from transcript AcoGoldSmith_v1.007616m (l ocus AcoGoldSmith_v1.007616m.g) derived from phytozome v7. 0 (chr-ID scaffold_1; pos 2284141 to 2284711 reverse stran d)
aacacagctgtaaacaacaacagttctcagaaaaggtattcaaacttttttcttctttatctttcaagtactgggtttctctcttttattctatatttatttttcagtctttctttatgaaacattatcagcttttttctactgttattgatatatctcattaatgctactttaccatctttcatggtttcactgtcaaaattttcttttcttttttctttggtttggcagttttggtcttcaaccttctttttttactaccatttatagtatagtttcttatcttagtgatgagtttctgttcaagttatatattctgcagtacttttccttgtgagttgtgtgttgaactttaaattcaaagattttttatcttttgattgtgaaagcaaactgattaagatttgggtttttgtatttttcttaaaaacaatttgcaagtgttccatgtgatgtactgcttattaaacttttaattcagaaagtgaactggttaatttgtttgtgaacattatttaagttttgggttttcttgaaatatattcagaagtgctcctgctccagttgtggg

SEQ ID NO: 107471 - DNA, 836 bp, Aquilegia coerulea
  Intron number 2 from transcript AcoGoldSmith_v1.001793m (l ocus AcoGoldSmith_v1.001793m.g) derived from phytozome v7. 0 (chr-ID scaffold_11; pos 4222266 to 4223101 reverse stra nd)
ggaaaaatcgctcaattgacttcagtttcgataaggtacacttcacatggaagaaaattgattagtgaatttgcccaaaagggtttgcataattgttggttttaattggtaatagtttaggtattatcacaatgtgttggtacttatgattcaggtgtaatttatactaatacaagaatgagttgtatttggttgcaatggtagatggtagtaaacaacataattgagaatctggatgttgacattatatatgttttatatgggaagaattgaaaatgtaacacttgaaattgagtttataagagtttgcatatagaattatcaagctttctcattttgggcgagctgttttatatgatacgaattcaagatttaaacacaaaatctgttgtaaaagtatttgcatttattcttgaagcttcacatttttggacagcctttacttcatatattttatgaacaatcatcaccacaatagaagtagaaccctaatgtgtacctttttgggcagcctttgtttctttgtgtaccttttttgttgacacaaaattagtttatattgagcgatttgtgcttagtgaaggacttagctgattacattcatgaattgggtgttctgggtctagccttccacagagctcaatgttatgtgcatttatgtggtatataatcatccatggatgtcaatgataatgtttggtagtcattgtagattatacatttttttacttgtaatcaacccacagatagcagtttaatgtttttattaggtatttgacctttcctacacttttcattcaagtaggcgtactgcttgtaccgaaaaaacaacttag

SEQ ID NO: 107472 - DNA, 542 bp, Aquilegia coerulea
  Intron number 1 from transcript AcoGoldSmith_v1.000541m (l ocus AcoGoldSmith_v1.000539m.g) derived from phytozome v7. 0 (chr-ID scaffold_43; pos 316194 to 316735)
ttggtgagcttcaattcttcttgttttcaagtgttttttttttttaagttattctttgctttattcttccgatcggttgtgttttgtgatctaaagatcagttctttgatcggtttggggttttttgtattttgtttttttcctcttagtttgtttttattcagtagagaaatgataagtggtaattttgttttggggtttggtgtttttgatggtttctctgatgaattcttcagctcagttcttaggttttttcagaaatacttcacttttgtaagctgaattgtggtttttgaagttgaattttggttatttactatttttttaatagaattgtgtatttgaatttgaaattttgtagtggaattgtttcaattttgtattgtgggggtgatgctatgttggggcttttccctctcttttactcagtgattctgctttgatatttttttttttcaatactatttgaaaagtttgtaatccatttggttgttggatgtgttgtaggttataatttgaagggttgctagaaagagattgaa

SEQ ID NO: 107473 - DNA, 997 bp, Aquilegia coerulea
  Intron number 1 from transcript AcoGoldSmith_v1.018403m (l ocus AcoGoldSmith_v1.018403m.g) derived from phytozome v7. 0 (chr-ID scaffold_1; pos 3575150 to 3576146)
gaaaaattgaaactagtaggagtaggggtgttattcgagccgagcgagccgagctttgaatgttcatactcggctcgttttaatacgagtcgagcccgagccgagcccaatttatgaatcgagctttgttttatgttcaaactcggctcgcgagctatttatcaagctcgagctcgagctcgttaggctcgtttagctcgagccgagctcgagccctccaagctcgagttaagctcgaaccctccaagctcgtttagctcgagccgagctctcgccaatggtggctgaaggagtggaatcaaacaaatctttcaaagtattcaaccagtttggtgttctctcagcaacatacctgtattagcatatgcaattccacttcagtcggtctaatatagctataaattatgagtatttttgaagaaaaatcgaaactttattaccaagggtgaagaccaaagcaaggaattatacaagatggagactcctcacctattttctttactaaattccaatctttctgcaaacaaattgcaaaatttataaattcaaaacagagagagagaggagagagagagagaagagacaccattgacagcaaagtgaagaacaccagaatcaagagcagttcgaatgagttggggagctacgttatagattcttgggtcttgaaggtgacagtgggaagcggctaggtttccagaaccagaagatgagaagaaggagaagcttatgttatgtttatatactggggtaggataggaataagatatattagtgggggtaggctggtaatttaaattatttaactcgagctactcggctcggctcgagctcgagacgagccttaaatctgttcaaactcggctcgttttacaagatgagcgagcccgagccgagcttttttcgagccgaacacgagccgagctcgagctgctcagctcacataacacccctaagtaggagctagaactgttgtattacaagtcgatttgaacac

SEQ ID NO: 107474 - DNA, 679 bp, Aquilegia coerulea
  Intron number 2 from transcript AcoGoldSmith_v1.004325m (l ocus AcoGoldSmith_v1.004325m.g) derived from phytozome v7. 0 (chr-ID scaffold_11; pos 6168065 to 6168743 reverse stra nd)
tcagagcttccgagcttcagaaggaaggaaagaaggtaggtgtatccctaatttctattaagcactcctgcaataaaattttagttcttaaagagtacatgtggttttcttcctttttctggactttcagttcttaaatctgtgtcactgtttgccttttattatttgtatgaaagtgaatggtctgcattggcgtccaatgactatatctaactcagcttgcttgtcttactgcctaagctctttgacaatatttgacccaatagtggttcgaattacgtatcgttacttatgcctttagttgtatgataattgcatgtaatgatatagaatttcaggtgacaaagtcttagaacttgttcacgtctgaacagtgcatcctttgaaatttgttcttgaagtttaatagcacaacatgttacactcgagattttgtttttcatggttttagtacagaagattgtttgctggatgtactatgcttatgaaaactaggcaatttgtcaaacttatgcctcccaagtgtgaaactttgtcaagtagtgtacataacaggccatgtatctgacaatctcaatttttctctgatattgaattttttttagggcttagaattatgtagctcaatttccatgatactgtattctcttttcatcttatctgcagattatctttacaa

SEQ ID NO: 107475 - DNA, 877 bp, Aquilegia coerulea
  Intron number 1 from transcript AcoGoldSmith_v1.004325m (l ocus AcoGoldSmith_v1.004325m.g) derived from phytozome v7. 0 (chr-ID scaffold_11; pos 6168856 to 6169732 reverse stra nd)
ctctacacgtccttctattcaacttcagttcgcgggtatttttttttttttttttttagctctataggcacatttctgtttcttcaccaaaacaagtggaaacttaatttgggtatcattaatttctcagttttattcaatttactatgaaaaaaatggagggcaattgttaaattttatgttgagattgtgtatagtggatttggataattgggctgtctttagtttctaaatgggatttgttatattttaattttgtgaaaagttatttcggatcagtgaattgggttttatttgtgttaacttaaatctttgcatgtgtttatctcatggtctaaagtgatatgtgtgattagtttaattggagttgtcttgcttggttaatttcttgtaaaggagttgtgttttggagttttgttaagtttgtctgttgttaattgtgcatgacaattatttggttatctaaatcatctacatgatcacaattgtgcgattttttatttatttattattcttcatttttttttgttcttttattgaattatttgcatctagtacctaatgcatctactattaacatcttggttgttggttcattgattgatcttattttgtgcatatttgaagttgtttgtcactggagactttagtctagagttgcaaattagccctccatcttgtctcttggatgcctagattgatctcatggacgtttcaactttatttttgatgtagtgattacataaagaataaacatataatggtcaatgagaagattagaagaatttgagttcacatttactttgttatatttattcattccaattcctggaaaatttcaggttaaaacgatctgttagtggatacatacctcctt

SEQ ID NO: 107476 - DNA, 888 bp, Aquilegia coerulea
  Intron number 1 from transcript AcoGoldSmith_v1.008964m (l ocus AcoGoldSmith_v1.008964m.g) derived from phytozome v7. 0 (chr-ID scaffold_15; pos 4439459 to 4440346)
tgaacaatctctttcatttgctggcttcgatagtctatctctcttcttcatatcttttaagtggtttagtttatcaaattttgattgcaaatgaatcatcactctatatatctattgaaaaaagcaaaagatttctgattatagcatttttttttttcccaaaatttttatcaagaaattaagtactttgcgaagaaaacaaaatttcaaaactacccaacatcatcttccttataaatacacgacaggatgacgaagccatgattctcctctcctaataggttaaaatttgttgctttttggctgtatatggaatcaccaattttcctagttctacaggcccgtaaagggtgtattggccggtttaaatggtttaaaaaccagttctgtgttgaatgtttttatgagtatcctttctcctaattgattggctcgtttcctgaattatagccattgttggactatttccgtgattctgtattataaatattcatattggtcatctgtttcagttaaatgtgcgatgtggcttaaaatataaatggagaggaaaagtcatttgtaatttctaattaattagctgaatgcactcaaacttttagttgttaatttgctgcaagtatgtcgcctgggtgtgggggcagcagctacacaggtgttttagttgaaatgcccatgcaacgaagttgcatctgtttataactctctaattacatgggcagccacttcctcatttgttaaagagctttatttatcaatatagtagtccatagatttggtaattgtagagtgacactaatgatatatagtgggcctattcctaatatcattgtggattgtttgcactttgcagagaattcactgaagatccccaagaacatagttgat

SEQ ID NO: 107477 - DNA, 763 bp, Aquilegia coerulea
  Intron number 3 from transcript AcoGoldSmith_v1.002284m (l ocus AcoGoldSmith_v1.002284m.g) derived from phytozome v7. 0 (chr-ID scaffold_9; pos 4965265 to 4966027 reverse stran d)
tgttgtcgttgagtctactagatcagaacttggcggtaaattttattctatacaagtttttttgcttgttctttccagaatttgatgagagtttccgttgatgatgaatatgctttgttttacgccatgtctgtatcttggtttctgtgttatattccaaagttatctacttatgcatacattatatcaatgtatcagaaaatgaaatataacgagagaagaacgatttaattgtatgtgccatactccactttcagacaaggaaaataatagaacattgcttgctaaattgaatgatggatttctttttgggaaaaatgtgggtttggtcagaccctatcctgtatactcaatgaacccttacattcaaataacccattctgtcctcatttaagatagtattcaacttatatggcagaggaggatcaaaatgaattaacattaaacaaatcgccatctggcagcctctctaacagatcagcagctttatttgcctgcccttaacatgtgactaactcaaaagttcacaagagattgcaccaaacaatgtatagctgagactatgttctgacaggaccaaggggctgcttctttgtcgtccagaatttgccatttactactacaattcgagtcctttttcattcgaaatacatatatggaaattctttggaaattttagttttttaagtaggtaataagagctctatgataatgacattctgtaacaggaaaaggtatcccagtaagacaagtccttgggaaa

SEQ ID NO: 107478 - DNA, 835 bp, Aquilegia coerulea
  Intron number 1 from transcript AcoGoldSmith_v1.022518m (l ocus AcoGoldSmith_v1.022518m.g) derived from phytozome v7. 0 (chr-ID scaffold_6; pos 8795746 to 8796580 reverse stran d)
agtgatttacattacctagtcgataaaaagtaagcttttactggaatgtttgtaactctttctttttccactttctctttttcttcctcatagttttgactaaattcatgaaccccatcaatgaaatcattgtcatatataggacttggacatggatttgcagaaagaaatctaaaaccccaagaagattgttttgaaatgggtatgtgttgttgttgttgttgggttgattttaataagaaagaagaagaagaagaagaagaagaaggaaaggaagaactaaagagaaaagattgagaagtgagtttgatttgtttaaggagaagagaagaagaagaagctctccatctccccattcataggttttgtttgttttaactaattacaacttcttcatcttcatcatcatcatcatcatcatcatgttcatcggcactacttgtgttgtttctatgttttctaggaaacaaacatttctcgagatcatcaaagtacatattagatagacggttgacctgtattgggcccttttatttatggcccatcagcccagattaacctcgagatataaactctttctttattttgattactatataaactctttctgaaatccctctttcttcttcttctttctctctaattctcgaactggttttattgaatttggcaacttgcttgttgagggtaaagtttacaactttattacttttgaagttttgggtattcttttaattttaagaacaatcattaattcattaaaaaatattgatttatttatttatttatttattatgcagtaggggtgttgaagaagaagttgtttctagtagtg

SEQ ID NO: 107479 - DNA, 495 bp, Aquilegia coerulea
  Intron number 2 from transcript AcoGoldSmith_v1.007696m (l ocus AcoGoldSmith_v1.007696m.g) derived from phytozome v7. 0 (chr-ID scaffold_7; pos 4917122 to 4917616 reverse stran d)
ttttctggtctacctgacctcttattcaataaaaggtatgcaacccaatttctggcttatgaatgttattcttcagttaatctgatactgtcttagaattgttagtctttgtttcattttccaagcttaattgtctgtgtatcaaatagtaaggtggtctgggttctactttcatagactggtatagtataaactttgtttcttcacctttgatgttacttactgccattttgtccattccccgcagcttcatgcgctcacatatgaaacacaaccattaggtgttatgaatttttaatgactttatgttacagagagtgagcaaacatacatatgtatttttacacatgttctttaatataacgttgaacatagtaataataattcatgtgtttttctatcaaaaaatacatttctctgcgtgtgtgcttgcctattactttatacttaaaattgtcaggaaccaagactctcgaaaaaggagacacaatcctc

SEQ ID NO: 107480 - DNA, 360 bp, Aquilegia coerulea
  Intron number 1 from transcript AcoGoldSmith_v1.005897m (l ocus AcoGoldSmith_v1.005897m.g) derived from phytozome v7. 0 (chr-ID scaffold_30; pos 205261 to 205620 reverse strand )
ctgctttactgatactgagaattgcggatttggaggtatgtttatctctctttttccgatttgaatttgtgtttatttctctacatttctatttctttttttttttctactgaaattactcttttttgtcgaaataaaccctaaaaatccattcttcagttgtttgtcgatttaagagcaaataacgaatacccattactaatttatactcaattacatcatctagatgtcgtttttcttgatccctttggttaatggtctttaattgaactcgatttgagattaattgctagtattaggattagggtttgaatgtttttgtggtaaatttttgattttggggattttgatccaggtaag

SEQ ID NO: 107481 - DNA, 568 bp, Aquilegia coerulea
  Intron number 2 from transcript AcoGoldSmith_v1.016447m (l ocus AcoGoldSmith_v1.016447m.g) derived from phytozome v7. 0 (chr-ID scaffold_54; pos 1636795 to 1637362)
aggtaaaaatccccctttttttttctccaatttggtctgattcagtcttgattgtttgatgttaatatgtaagttgattgattgatagcctacctatgttgaaaagattcaatgacctgttaactgtacaggaatttgaatgcacaagagtgtttttattttattcagtgtaaaggtggattttttttttttttttcttcttctagcgacattgtctgcggaacagactttttcccatatacgaagacgatataattctaaataatgttgagtgcaagatactagaataagagagtaacggcaaatgttgagaaatgagataactcattaacaaatgttacacagactcatctgttcagtaaggttactagaacatctccatacaatgggaaaagccttgtgcacattctaaattcttaattttagtattttcaaattgtcagtgatgtatcatgttctatagtttttcagtttttcttttgctttttattgtttctttgctggctaggcttagtctctctatgtttgatttacaatcttattttggttggtgcaggttagcttaacg

SEQ ID NO: 107482 - DNA, 1021 bp, Aquilegia coerulea
  Intron number 3 from transcript AcoGoldSmith_v1.004396m (l ocus AcoGoldSmith_v1.004396m.g) derived from phytozome v7. 0 (chr-ID scaffold_15; pos 3143801 to 3144821)
gtgtgatcaacttaacagtcctgatctggttcaaggtagtctatatttgttcattttctaagttcattttttagcctttagtcgtacaaaaaagtggaagctagagcatggtgggggaacaatactcatgcaaagtatattgtgtcttttaatgtgttcatttagtccacttcaactcatgtcatcgtatggggcagtgaaaaaaggtggttagggttgttagtaggcagtcacaaatgggttcctcactgtacgagacactttttcttttggaaatccaactatgtagtacacttttgaagtttttaagaaaaaagtggtctgtggaacttatttatgagctgcttattagcatttctcagaaggaaagcatggaaaagtcaaagctttttgactcgattggtttgttgggctcaagagacttaactttgtccatataacagttcagacttcagagttttcttaataacctgtagttctcttctccccatcccattaagaatcttcttttatgcctttacccgaatttgttgttatctctccatgatgcaaaacatgagttttttattttccttgctattttgattagtccaatttggaatttctatttttgtggagattcttgattagcaaacaaatctaactctacaaataaaagagtcgtaatcaaagaagttggtggttatttgaacttgtcgcaatttccatgaatttgctatgtctttatacaccatcacaaacaacttcatgttatcttcgatgaggtcatcattcagtttccttcattttttatttttatttggttggtacagttgagtttccttgattatataggaaacccaatgaaaaatgaagtaggaaactcaaccaaacttggtcagacgtataaaacattttgggacttggtttacaattttacatacacttggccatctgtattaactgattctagatgcttaatcataatatgacttggtgaattcattaatttctatttttcgtcgccttgaagaaattcaca

SEQ ID NO: 107483 - DNA, 1001 bp, Aquilegia coerulea
  Intron number 1 from transcript AcoGoldSmith_v1.012451m (l ocus AcoGoldSmith_v1.012451m.g) derived from phytozome v7. 0 (chr-ID scaffold_9; pos 2657973 to 2658973)
ctttctctctcgatcagacgaactttgttagcaaggtacctcaaatcttttctctacccttctaatctactacttcttgtctattatttcgttgttgttactatgatttgatttgatttgttcatgtttatatgaatttattaatctgttcttatgtatttagaagaaccttaaccgatctgatctgtaatataggagtatttttggttagtgatatttattatgttgcttggattttgtgattacgaggttttaagtaagcttatgttggatttaagattttatagggattaacttaaattagaggaaaatcatttgttatctttactgtgatttaggacatgaaacaaacattattctgtcagagtttaccagctgacttactgaaaggtggattgatgattgttacttaacatgttaatagcattagtgcttttatatcatgattacttaaattatgtagctttgtttgttctgttaagtagaacaaattggaatctgtttggaatatacgtacaaacacgagtgatgttcacaattgaatttaatttgatttgatgtgacaagtttcttgttgggtacatgctgttgtttattctcaccatgaatagatataaattggttacgaaattgaagttaaaaccttaggtatgcgtaaattagtttttgtaaacagtacttgtggtttttgtccatgaaaactgaagagtatatagttatatacttgtatatagtgctttgtgtctgacctattaatggcaaattgtatacttcctgcgttttaataagctttttgaatgttagttaaaaagtcatttcagttgtgtatcttaccataatgagggtgttgaatacattggttattgttatcagtgagtggcatattgtgatctgtaatactgatgagttaggttgttgagttttaattgtttatttgcggctttgttgtttacattgagacctagacactgtatttatcttttctatcactgcagtgaagc

SEQ ID NO: 107484 - DNA, 895 bp, Aquilegia coerulea
  Intron number 1 from transcript AcoGoldSmith_v1.017346m (l ocus AcoGoldSmith_v1.017346m.g) derived from phytozome v7. 0 (chr-ID scaffold_54; pos 490761 to 491655)
ttttgcgtctttgaatactgttctcattggttgtatgttcatttttccctgtttttaattcatgatggtgcaattttatttgtttcaatattgtcctttaacttgttgatcaatgaaaaatgcaacccctaatttagaatggttcttcctttttatctggtaaatgttcatattacaatacttaatatatgattaattgtttgtttctagtatgatcttaggatgagatgatcacaattatctaatttacatgagcttattgacatagatacatttcaattatattctcttcgattaatttatgtttaaaggctactattatactatggatataaaacatacttgttcattggcacaaagtcatgcatatacagtagagaggaaattctgtaatcatctgtggagaacttcacactatgaatcttgttcagcgagatgggcgtattaagattgtgatcagtcttcggctcttgttcctcttggcagagattccaatataaaatcccagcataatcgggggcaatctcctcgtttttcccttcttgcatccagtatgcatcttcatctctttctactatctgaattttgtttgaaaccattgaagtctacagtatactagtctacataaattcataatgacttcctcttatgttgcgtattaccttcttttgatttgaatatacctaaatttgcattaatagtcgcttattattaaaaggattggatttggcatagaggagttgcacatttttaactaatattcatcaaaattgctagtagaaaactgccatttaatgtgacatcacaatatttatgtgaccttcgatgacagtattatacctcaactcgctaactaaatgaaacttgattatatgactaaggttttggcttgcag

SEQ ID NO: 107485 - DNA, 777 bp, Aquilegia coerulea
  Intron number 1 from transcript AcoGoldSmith_v1.000854m (l ocus AcoGoldSmith_v1.000854m.g) derived from phytozome v7. 0 (chr-ID scaffold_37; pos 1775298 to 1776074)
ttttctttcaatttcattaacgaaaaccttctcatgtaagttatcttcaacccctttgttggaattttaattagtttttgctaatttgtattaatttgaagttttacttgctttctactgattggtaataataatcatagttcattttgatttaataactgatttttagggttattttataatctgatgatttggggatttcttctgttagttatattttgtttttataatggatagatcacttaattttactgtgattgcagtttttgaggtttatttgaactttgtatagtattactactgaactgatcctttggattttggtatgagttgtttgattagctatagccttttgattttcacacctttttgtattactatatgtctatattcacgagtcccttacataatgaatggagattacataatcctgtttttaatttcaatcaaatcctgttttattgctggaagtggtaatttgatttcttttgttatcgagtttgaaatttaaatgcctctcgtcttttgttgtgtttatatattgacaagtaatgtgtgataatattgtgctcaacatttatactcatttcaacgacccttgtgaagttgtgtaatgcttactttaggtcatgattgtatgtttgaccatatattgcatgggtatagggatggattctaaattgtatagatgttattctttgaaatttaattgttttagtctacttatatggttccccatcaatctaattgattgtctatgtgtcttttagtaaacaa

SEQ ID NO: 107486 - DNA, 867 bp, Aquilegia coerulea
  Intron number 1 from transcript AcoGoldSmith_v1.004026m (l ocus AcoGoldSmith_v1.004026m.g) derived from phytozome v7. 0 (chr-ID scaffold_9; pos 4577231 to 4578097 reverse stran d)
aatcctgtctcggagataatccataccttcgggtaattcttcttcttctccatttcctagggtttctaattgttagattattaattattgttctagattagaaactataggtttgaatcttcttcgaacctgcttattgttctgcccttcatcgaattcacataggtttgaattacaaacgctaattatcaatttcaatttcacaaactaggggtgtgtttgattggtgggaataactacttgtgggaatttttatagttgaaaatattcccacataaaataatttccactaatgggtcgtttgattggaaataaaaacacaaggaaaatttcatgtgggaaagattttagttatttgattagacataaaaacatgaggaaaattttatgtgggaaagattttagttgtttgattagacaaaaaaaatattcccctgcaagtttgggaattctttttaggggtgggtcaaggaaagattcatgagaaatatttttatcatgaaatttttacatgacccaactttaccaatcaaacaggcatctgggaatttctggggtaatgtttgatgtgggaatttttcccacgaccaatcaaacagaccctaggtttttatttccatagccttaaattgaagatatttggtgggttacatcgctttttaaatagcatatcctaatttagtaattttgtttgtttttggatgagtttgtggtatgctggtagactggtagtgatattgttagctacataagttagaacttagaagtagacattaggtacatataacttttgggaattgttgtaactcactttattgtttattttttatattctcttatccagaccaaagcgaattttgataaaga

SEQ ID NO: 107487 - DNA, 138 bp, Aquilegia coerulea
  Intron number 1 from transcript AcoGoldSmith_v1.004853m (l ocus AcoGoldSmith_v1.004853m.g) derived from phytozome v7. 0 (chr-ID scaffold_10; pos 569866 to 570003)
ttgcttcaagatcactattacgaactcctcaacatgtaatgatctatcaaacattttcaatcaaattcatcaataaaacttaaaatcacagtgaaagaagaagtttatttcttattgttttttgtttttgcagcaaca

SEQ ID NO: 107488 - DNA, 580 bp, Aquilegia coerulea
  Intron number 3 from transcript AcoGoldSmith_v1.004674m (l ocus AcoGoldSmith_v1.004674m.g) derived from phytozome v7. 0 (chr-ID scaffold_10; pos 876073 to 876652 reverse strand )
aagctcaaggaagccttttgatctagtattaccaggtataaccatattcatgaagtgttattttattctctgtctattatggacgattgtttatactatatcaatttcctgtttttgacatcccaagtctgacaaatcatgccctcaaggtaccatatgtgtaccgcctatgaacatacacccttaatttatcatccattttggacatctttgactaacacgggtcaaggcgctcaaagatggatgagttgagagctgatatcgggtgtacactcccctcactgtgggtaccctaacaaaataaattgcttcattttttatctccaaactgaagtattattgtcatgtttaaataaaagaagaaaaagaggaaaaatataattttacttggagaaaattacttgtggccatgtttgttcagtttggttctgtgcattcatgagatataagcttctgattttgaataattggttatataatttcatctgatgatacttgtaaagcaacttcgagtgtttgagttggtttataatttttgtgcccagatttaggtccttacacactagactttgctccgagt

SEQ ID NO: 107489 - DNA, 392 bp, Aquilegia coerulea
  Intron number 2 from transcript AcoGoldSmith_v1.004674m (l ocus AcoGoldSmith_v1.004674m.g) derived from phytozome v7. 0 (chr-ID scaffold_10; pos 876745 to 877136 reverse strand )
ggaaatctgcaaaagctgctgctcaagttgaaaaggttcttcattcttacacgctatttaattataaaattttcacatttcaaatgttaattttaatatcactactcatcaagagtgacttactgcattttcttagttgagttttaaagtaattttcgacatacgttggcaatatctactaagtggattattcgcacatacagtgttttcattttctttttaacatgttaaactttcatacactttatattatgtttgttttcatctgaagaaatcaaagaggcaacacacacccttacaagtgtcagattttacaaagttactcaatttactagccttttttagtgcctttatttttttctctaatgattctcttaaatttgtagtggctt

SEQ ID NO: 107490 - DNA, 681 bp, Aquilegia coerulea
  Intron number 1 from transcript AcoGoldSmith_v1.011184m (l ocus AcoGoldSmith_v1.011184m.g) derived from phytozome v7. 0 (chr-ID scaffold_9; pos 2916642 to 2917322 reverse stran d)
tgtttctctttctgtgtccaattctttaatctcaggtactccattactccttctcttaattgcaatttttttttttaatactattgtgggttatttgatttctagcaagaatgtattgaagaagttgtaatgatcacatttctgatccatgttatgagctttaaaaagtttgggtaatggggggtggtggttgtgacttgtgagaaatttccttacatgggtagaagattagaagaacaaatattttggattttggattcataacttgatttagggttttatttctttggaaatagaattttaagtgatccccattgtctatttcaagcttggaaaaaaaaaaacaaaatgtccaaatagggtggggtaagatttacgcccaagtgccataattatgtgaatgaattttaataaagatgaaaagttagtcatgttgaaattaggtatagatagtgacaatgtggttgtgtgtgtgtgaatgagattattttgtttataatttatattatagtgccttcgcagttttattaggtttgtgtgttctagggtttctaaatacaacacatatcgttggcgacaagtgagaatatagtgaatgggagatcttgagaatgtcaaatttgtacatatgaacgctttcctgtattaattttgaataacttttgtgatcaggtaaagtaa

SEQ ID NO: 107491 - DNA, 620 bp, Aquilegia coerulea
  Intron number 2 from transcript AcoGoldSmith_v1.002314m (l ocus AcoGoldSmith_v1.002314m.g) derived from phytozome v7. 0 (chr-ID scaffold_30; pos 2150078 to 2150697 reverse stra nd)
ttctcgtcctactattcttcttctagatcgtggaggtttgttttcatttttataacaataaaaaaaaacatgcacatgttcattaattatttgttaatataattaatcttaatttgattatgattagctgttctgattaattttcctaattttgattattttttgcaagaaaaattatgaaagttagattctttgagtgatgaccatatctgtttttgtcttatgggctggcattaaatttgagtttctactgttgctatatatcttttcttattagttacagtacttaatatacttatgatcagctgttaagcttctaatttttatattttctgttatttattttattttttgaattgctttacctaatagtgagggctggtgtacactacggcatctgattattggctagtttcttgtctttggatcagttcgatttttatattgttgctattttctgttgtcggggaaatacatgctcacaaaacaagcagtcttgtgtgatgagaaaattttttagtattgtgtctcttttataatttctatttaatgtaggatacatgttgacttctttagtttttttctgcattcagagtgctacttcgcattgaaggtgtgga

SEQ ID NO: 107492 - DNA, 516 bp, Aquilegia coerulea
  Intron number 3 from transcript AcoGoldSmith_v1.026456m (l ocus AcoGoldSmith_v1.026456m.g) derived from phytozome v7. 0 (chr-ID scaffold_27; pos 1065968 to 1066483 reverse stra nd)
aggtaaattcctctcttctctttagaatcataaaaaagttatactatagaaaatacatgccattatgtgccttagaggatgccagcaaattggctccaatattagtaattttaagtataaacacatttcctttccaaaatgggcaacaatggtccttgttctgtcactcctaattgacattcttagagctctttttgtcaccttctttcccaaaacacatttgctaaagagaaataaagtaagatctgtattgtagcctattaaacacctgtatttcctaccttatgtttaatagcctgcactataaaaattcttgactaatcctgttttgcttgattgatgactagtccagtaagttttagtgagttctagaaacatttttttttctttgatgagcatgatcatgacatggtttaatctatcaaaagttcaaaattatgtgagtattgtaacaaatgtcgttacggcatcattgattaatctgtggataatgaatatcagattattgacaagcca

SEQ ID NO: 107493 - DNA, 880 bp, Aquilegia coerulea
  Intron number 4 from transcript AcoGoldSmith_v1.012897m (l ocus AcoGoldSmith_v1.012897m.g) derived from phytozome v7. 0 (chr-ID scaffold_10; pos 413149 to 414028 reverse strand )
taaattgcatcaccaatccttatctgtttgatcaggtttatttgattaaaatctgttcttctccattactacataattcatcctcattacatccctgtatagtttcagaaccccagcaaatccttcttattcatgcccaaattttacatttcatatccattgttattttatcgtattttggtggaaatgttatttagcacagttctgaaacttttattttgaaacctaaaacacgtgtaatcactttagatatcattagacttctgatgaaccctcttcctacatggaataacacaaaatgtgttatgtgtgtgtgccgttgatttgaaagagtagcatttctgtcacacccccaatttcaaactagctaaaaacccacgagcagtggcatatctagtcatctcgaaacccaaggcgtgtaattacttttgtaacttagtataattgcatcaaatattatatgactggatacaacttttaagggataaatttaatcatttgaaactaaagtcttggatgacttttgcaattacttgcatggagagaaatttcaaataagtttgaagctgtcctacctaccatttaatcatgcatatttttttgttttgatatagttttttcttgtgctttagtttttaatgcaaattcactatgtaatgttgaacagtgaagagtctttgatttctcaaagataaaatgcgatttttttatattataaatctatgaagaatatgatctgtcatgatactatatatcttttgttttagatcttatggagtttttgtatcagtttctaatgcttatgcactatttagattaagtaaaataaattttttgttcaacagttgctggaggtcagtccaatagatctagttacgag

SEQ ID NO: 107494 - DNA, 368 bp, Aquilegia coerulea
  Intron number 1 from transcript AcoGoldSmith_v1.000712m (l ocus AcoGoldSmith_v1.000712m.g) derived from phytozome v7. 0 (chr-ID scaffold_15; pos 74872 to 75239)
gatctgctccttctttgtctcaacaggtaattttttttttttttctctttttttttggttttcttcttgtgcagctatctttgattcgtaatatagctgcaatgtagttaatttttgacaatttgaagcaaaaaaagtcgtaaatttcagctcttgttgacgttttccaatggataattataaaaatttgaaatttttgcaatggtttgtgattgtgaaatgcttatgtatggaaagtgttttgatggaaatcattcattgtgtcactaaagagagaatcttttgtgagattttagaaaatttagttggtatatgcagtatttgttgctgtttttttgttggataatgaaatgttggttttgttacag

SEQ ID NO: 107495 - DNA, 836 bp, Aquilegia coerulea
  Intron number 2 from transcript AcoGoldSmith_v1.015460m (l ocus AcoGoldSmith_v1.015460m.g) derived from phytozome v7. 0 (chr-ID scaffold_51; pos 101724 to 102559 reverse strand )
tgctatttctcgtcgttcttgttggcttccagaaggtatagttcttattcttcatttattttgtttaatttgagtatctgttgatgggttatgttgttaatttgttatgtttgtttgtgtatgaaatgatgattgattggttggatgagattacattatgggtagcctttggtttttttgagtgaatttttgacgattgtgttggatgaaatcgatttggttagtcaacaatttaggtctgattggaattgtttttgtgcgcctggatctcatttgctattgatattttttatttttggtgtatgctatcatttattattaaaaaacttggacaaacagaaggagatattaaaattttgatcacttcacgtctttatctgaacttgtattgggtattttgtttaaagtaacattgtgtaaaattagtaaaatgattggtgagtggtgactaagaaatgcacgaatcaatataaaggacggcaaagaaaagaaagaacaaatggatcttcccgaaagagtatcccagtcaaagagcatgttctcaactcttacacctcatctccatagaaaaatggacacccaattccataaagttgctttagtctgctttctgtgataaagtcttggtgttagcaacaaaaggtcttcaatcagcaatagagttctctcattaggccaggtgagaaacgatgatctacctctatatgactagacttatatagaatttagctccagcttcaggttctagctctttagagtttggtaatggaattgcaatcccttcaaacatttgttgtttacacatttgtcttcattggctttgtcaatagttgagg

SEQ ID NO: 107496 - DNA, 720 bp, Aquilegia coerulea
  Intron number 1 from transcript AcoGoldSmith_v1.006452m (l ocus AcoGoldSmith_v1.006452m.g) derived from phytozome v7. 0 (chr-ID scaffold_72; pos 570190 to 570909)
ccgtaagtacactcaattcttcttaacaattctatttattttcatcttatttcttttgagcttttgattttcatccaatgtggatcaatcattatgcacaatgctacaatgtacttgcatttagtcagttttatgcatctttctgtacaattatggattaatttgtgaaaatgaattgttacttactacttaagagtactgcaattggattttgcagttcaattgatagtttgatactatttaagaggtagtaaatagacacatatctgatatcccctttgtgagttataaaacacgatgaacacttttgatgaattagttaaactggcaggagttgtttgaaatggttaggtctttacccatgagtatatgaagtaatacattatgtttatacagagttggctaagtggtttaggggactgcttgattgtgtggttgggcgcacgggtcaggggttcgattccccacttagaaaattctgccttaagtgggaggtcatggcggtggatagctgtgctagcctcccctgggattagtcccagtaaacaagttttttatcaactaaatgtcacataacacattatatattatgaagtgttttattgattttcaagtgtaaattagtatgtcgtgacgtgattctgttaaggatgctaagtgtagtttcttttgtgtgtttgcaaattgcatatggggatgatttgccaccacagcccaaac

SEQ ID NO: 107497 - DNA, 762 bp, Aquilegia coerulea
  Intron number 3 from transcript AcoGoldSmith_v1.006452m (l ocus AcoGoldSmith_v1.006452m.g) derived from phytozome v7. 0 (chr-ID scaffold_72; pos 571012 to 571773)
ttcttattaacatcagcgcttcttggttatgtaagttgtagtttcttttctaagcacttttgtttcaaactcatactgttaggttctacagaaagcacaatggtattacgcccttctattgttgccacccttggaacgacatcataggttgtagcagtgttgtccttttcctctgttatggccttatggatatcgttgaaatgtcctcttgaggaccttatattaaaatgatggcagcaatttacttgttaggttctatacttctatttgaagcaagtaaaactatcttatctaacgatacacaaacaatattggatgtattccatatttccaacaagcaaattccaccagctaaaatggatttaaaaactgacaaccgtcttaaaagtataatccgaatgtcagggcatcttctctgtctttgctatagcaccagcacccatttatgctttgtgcaagaaataaacaatgataaagagagttactcctccatgatttgtacatacatatatttggttttgtttttggtaatgttttatcaatttgaaatagtgtgatgttgctcctatgctacatttgaattggtcaccatacattattcatactgtatattaatccatgtcattgttattcatcaaaggcagcagttgagatattgttaaaatcttttatgttcgatgtttactgactttattccttgtcttttctcctgtatgtacacttccagatatattcacctcatttagattcacctcctccgag

SEQ ID NO: 107498 - DNA, 620 bp, Aquilegia coerulea
  Intron number 2 from transcript AcoGoldSmith_v1.004019m (l ocus AcoGoldSmith_v1.004019m.g) derived from phytozome v7. 0 (chr-ID scaffold_12; pos 3537057 to 3537676)
tctggctttgtaagtctcggccttgtcaattttatatgtttgtttgataaattaattaatcacattgagttatgtctaaaagaaatgaaaacatcctcctagttaaggaccactgatttctagatcaaaagaaatgaaaacatgctcagagccggccacagtaatggagagagccagtaaggaagctaccccaattttagaccagtggctagaaccaataaataagaccatatccatgtcaaacatcattagagccaaccgcatgaaccattataggcacgaaatgagatttaaccagcacccatatacaccaattacagaatgaaaattctttgatatcgcgcgtgttgtacgtgcataaagccttaaaaataagaacgagtactaaaaaccgatagcaaagcaatcccaatccatcttagagatgaggaattcgttgactcacgcagtgaaatcaaagttatccagtgagagaaggattcaacatgatagtatacatatacagaagagagcatcttgtggctcattattcattattcttatgtggttatacaaatttcggggtatgacaaacattttgtgtgtttacttgtaattgatgtcaggatagaggacagata

SEQ ID NO: 107499 - DNA, 843 bp, Aquilegia coerulea
  Intron number 4 from transcript AcoGoldSmith_v1.010209m (l ocus AcoGoldSmith_v1.009363m.g) derived from phytozome v7. 0 (chr-ID scaffold_9; pos 3119669 to 3120511 reverse stran d)
ctgacattgctgcagtcgttccttcgtcattggcagtatgtgaagatgtgaactcttgaatttatattattgatcatgatttaatcttcgtacaattatctagatagtaataattcaactgggcatgcatgctcataattttttttttttatttattttttttggcctgcaattggctgttaatcaggttaactcttttgaagattttttttttcacaaaatattaacattcgttcacagtatagtcttctttatgtggctcctgattcatcaacttaatatctatttagtcttttcctacttacgcgtacaaatagccagaaggatttttgttgtctagtcaggttcgtttgtcaataaaatattatgccttgaacattttgactattatcctaggaagggctgttatcaggtaaaaaagtttatggtgactttatcatgcaatcagtatctctggggcttgaattaattttgtgggttggatgagtaattttaataattttgttatgtccattcacataaatttgaagaacgtcgattgttgcctgaaaggaacaaacttaaaaaattatagtgcttatattacctctagaatttgtcactaagatattgagaaaagtagcatcaaatttgaatttattattaattcaaatcgagcaataaggtttgatcgttcataactcataagctgttcacaagttgtggtgctctactttcttgtcagttgtccttaaggaatgtcaaaacttaacaaattgaatattgaagaatgatttcttacagttttctatacaatacttctgtccagacacattgttgcagtcagcgtggtgttgagccagc

SEQ ID NO: 107500 - DNA, 915 bp, Aquilegia coerulea
  Intron number 1 from transcript AcoGoldSmith_v1.016626m (l ocus AcoGoldSmith_v1.016626m.g) derived from phytozome v7. 0 (chr-ID scaffold_28; pos 2104945 to 2105859 reverse stra nd)
atctccattgcaagtaagttttatgttacaatttttttttttattttgccaaataagaaaactgaattttatgttatctgggaaaaattgaatttgttgtaagtaggtcgattttgatgtagtttttaataaaatatatagataaattgaaggaaaaatgagctttatatatgtcatctggaaaataagtaggttgattttgatataatttctacatcaagaaataatggttttatgacaatttttggaagattaataaaaaatgcatgaaaatgaagattgaagaatgccatcaagattagtttgatctatgatttcatgcattagtgaaccaaagctcaccacatgttttaacatagaatattatagaattgcgaaagcctaggtgcagaaattattttccagaactttcaccaaatgggaagaaaacaaggttggcatgatagaattgtgaagcaaacaaagttgccgacattgcttgtgcaattgatttcaggggcatgtgcatgcagttttcgcatttgtttcttcccacttgtacgtgcgaaagcaaacaaagttttgcgcaattgcttgtgcaattgatttcattgtttctcctctgcagttagagaaaagacaaaccattttgtcctaatggcctttctttcaccactgcacacaaacacataatttgtggggatatgtttgaaaaactctaatggttatttgtgaagtatttatgtttgtttcttgacattagtttgcgacaaattttgtattgtgtctgatttgtcattttatactgtaatttttgtgttaagtttattgtttacaactttatacatttatgtttattctattgaactggggtgtcttaattatgtgatacaaaatttaggactgttgaagcagaggaggaaatatcaagtcggc

SEQ ID NO: 107501 - DNA, 1012 bp, Aquilegia coerulea
  Intron number 1 from transcript AcoGoldSmith_v1.005283m (l ocus AcoGoldSmith_v1.005283m.g) derived from phytozome v7. 0 (chr-ID scaffold_9; pos 2516322 to 2517333 reverse stran d)
gaccaagtgttgttcgtgttcaagctccagtagtaagttcatttgatctttattttataatttcaagtttatttcttcaatttgtgtgtttttttagaataccctttttgtattttttgatgaattggttgattttgaagttgttttatagtttgattcaacatttatcctttaattgatatcaattaatgatacccaattgatagttttgatgaaatttacaacttttaaggaatttattttagtatctgcgagtatgtatgttggaagatttgccagacattcagtaatttagctcaattaaattgaagaagtgattttgtggtttggttttcgatatttgggtattgtagtacaacaatgctgccacattttctataatactgttgcggcattttgtctatacgggaagaatgtgaatttgtttcaaagtgtttaggttagaaatgatgaaacttggattggttggcaaattgaattttcattgtagcttaagctatgatgttgctattgcatttgatatgaaatagatatgtttttggtattggctttctacaaggttttagggcattaagtatgtcaggcagctgttctctaattttattttatttagattttctacaaggttttagaacaagtgtctggatttcgaagagcatttctatttcaagttgttgccaggccaaccttctattcgtttgttttcttctatatcaatcaccccattctgacctatcttttagggtctgttctaatggtttcaacttgtgtaaaagtaattatcttctatcaattatgtgtagtaaactcaagacccccttgtttgctaaatggatttttttttcttttcttttatgtggcaagtttgactcacttatatccaatttctcttttctcctgaggtgaattttaaagtttctcaaatatttgattaactatgaatattttttcttctttgatttaacatctaacatgcatcatgccattttatttggcaggttgattctgtatc

SEQ ID NO: 107502 - DNA, 687 bp, Aquilegia coerulea
  Intron number 1 from transcript AcoGoldSmith_v1.002565m (l ocus AcoGoldSmith_v1.002565m.g) derived from phytozome v7. 0 (chr-ID scaffold_1; pos 836695 to 837381)
gaggttcgtggatctgatttccttccatcttctgatttgttatttctttattctattttaagttttattgcttgcaattaatattatagtttgatctagggttttcagtttgttttgtgtgttttgtattttgaaatcaatggtgtcagagccagagattttgagctatgtcatgtgtgatcttcaagtttgagttgtgagtgaagtgacttgcactaggtgtatggtctgtttgttcagttataagaactattttgaaggctaataagtttgttctaattggtaatttgtagtaatagagccatttcagcagttaattcatgaagtaggtatttctaggtttagtgatctcaatctgtattttattggtcatatcttatctcttttgatgttctgtttgttgattttatcgagtatagatcaatgtgcttgtagtgagaaagataggcagtaataaatttcagatttgagctttgtggcacacataaaatgtcgatgaatttatatcatattgctgagatactgttatttcattattgctctttgatttttgtttatagtttattttttcgtttgaaatgattttctcactaaaatgagtttaaggtgctataagaccctaatttccacttcttgtaatatccaatggcagagtcagattctggcagcttcaacaacagtgtagct

SEQ ID NO: 107503 - DNA, 517 bp, Aquilegia coerulea
  Intron number 1 from transcript AcoGoldSmith_v1.015728m (l ocus AcoGoldSmith_v1.015728m.g) derived from phytozome v7. 0 (chr-ID scaffold_1; pos 4023718 to 4024234)
tacaggcctaacgggatctctctgtcacattacaagtaagtcatctttatcatcataatagtttgttaaagatttcgaattttcatgatgttaactgttacaagccaattaagagacgctcgactggtaatggactactgtgaaaagattgtttcccaaagtgatgaagcctcaacaaccgagccagactaaattctaattgaaactttgagaattgagagtactgcaaaatcccattctcctggatatcttcaaatgttttgggtttaattttcatgtatatataataatcatttaatttcaatactcaaagatttataataattctaaatgaaatcataccagatcatagacttttgaaacgggctaaacaaaatattacaagttacaaaccaaaatcaatataaaacccccccaaaaaaaaactttaaaacaatcagatatgcccgtgcattgcacgggcctaaggactagttttctgttgtattctaagatccagaaaagcgtggacatttgg

SEQ ID NO: 107504 - DNA, 669 bp, Aquilegia coerulea
  Intron number 1 from transcript AcoGoldSmith_v1.013835m (l ocus AcoGoldSmith_v1.013835m.g) derived from phytozome v7. 0 (chr-ID scaffold_27; pos 1664602 to 1665270)
atattcagtgcaaaggatccacccgcaatttcttggtacatctgactagtttcatatctgaatggttcttttgagttctgttgaagaatatgttcacatatagcattttgatttactttctgttcaaagtattattgtggggaataaggttttcttgctttctattatatgttgtttcgatttaagtattattttgatcttttttataagatgttacctcatttccttgtataaacaatactacaagactctgaggttgtttgtttggccgcaaatccgcaagcaagtagtgaacctagacaactgctatttggatagctgtttaaaagttttgttaattttattatgtgtcccactcagcctccattcgttttttttattttttttactttattttcgatgttatgtatagttatcaataagaaaaagatataattaaattttccaggcccaagtttccattagatttgactcctgttttagctcgactgtgtagaatgtctctatgaagtgtagagtgtgcaactattgctcaaatttgtagttcaagttcttctaatgttcgcccatgttatttgtatggttacgccatcttgaaatgcctaatggtgtttaattttgttgtcaaactcagattgactggcaaagccttcaaattgaggttgctca

SEQ ID NO: 107505 - DNA, 585 bp, Aquilegia coerulea
  Intron number 1 from transcript AcoGoldSmith_v1.003598m (l ocus AcoGoldSmith_v1.003598m.g) derived from phytozome v7. 0 (chr-ID scaffold_133; pos 108947 to 109531)
cttctacctttggtgctttaatcgtattccctgaagtaagcaagctttttttctctaacccctttattgaatttgtagagttataatgggtgtttttttttttttttttttttcgaaaaaaatataattttattttagctaattagattatgtaattatatactgcacttgtgtatgactgaatagtgataagtaaggaggactacattgggtcagtgtgaatagaagagaaatttacttgatagctcggggttttgggagggtattggaagccggttagtacttagtaaacatttttgcaatgcataaataattaaatatacaagattgttcttggaaattttttgattatgaagggttgagaaatttactatataattttcggcattaataagtgattagtacatttgcgatgacagtaaaaaatgaaagtaacattctaagcaatgtttattatgaggtgatagtaattgtacatgataagtaggatttacgaatgataaataaaactctggtgttatatagatgaatgataaggagatagctaagtaggttcttgtgactgtaactgacagcataggtact

SEQ ID NO: 107506 - DNA, 848 bp, Aquilegia coerulea
  Intron number 2 from transcript AcoGoldSmith_v1.024600m (l ocus AcoGoldSmith_v1.024600m.g) derived from phytozome v7. 0 (chr-ID scaffold_30; pos 396243 to 397090)
gtggtttcaacaaagcaattcaaaattattcacaagttagttacacttctttccctatcttcttcttgtaatgtttatctttattatgccttgttttgtaaaattcccaattctgacgctcctgaatacctttcattgatcatatacacaactacattgtgaatatgtataagagcggtagtgaagtgggatgtctaagagtgcattcaagagaatcatgttagttgatttcggcatctcaagcataaaaacctgtctccttcactcgatatatacttagtagtggattttagtgaagatatcattatagtttcagcaactaaatgagattggccagattttgaacaagagtttcagcaactaaatgatgtcggccattttgaatccttttgatcatgtcaaaatatgtaatcactgataagaataggtagacctctaattattaaagtgtgtatgaagttttctagtcttaggaatgcatcattgaatcagcacactgtttatatagcacatggtcaaataatggttggtttgtttaccaaaataataaaagtgatggttggtttgaacgttctgccaaaaacgaaaattcattgtacagattatttgtttttacctgtcaaccgatgtgccaccttttcccgccgatgtagtgatttaatcaagtacttcgtattttttttcttcactttttagttctattattattattattattattattattactatcatcatatctattaccattcttaaatttcttctcttctcttctcatttcctttttcttgttcttttctttatggttttcagatattgcggttgtttagtgaatccactgagagcat

SEQ ID NO: 107507 - DNA, 959 bp, Aquilegia coerulea
  Intron number 1 from transcript AcoGoldSmith_v1.026391m (l ocus AcoGoldSmith_v1.026391m.g) derived from phytozome v7. 0 (chr-ID scaffold_109; pos 319935 to 320893 reverse stran d)
tttccttgtgaagaaagtgcagtttttaatgtgagtacatccgccgaattgagtaatgagtatgttgaatggttatagttcagtcgaattgatattctgaataatactgccttttcaattctcatccattggcgtggttttgaaaagggggtaaacctgtactcaggcaggcatctattgaacgttgtgcatccttgctgatgctgtacccttcttcattccgcacttctgctttaaactgtaaccacacaattaacatcctggtgactatcaagtagggtgtcaatcagtatttgaaaatccgaatgttgctgacaaccaaaccaagatctctttgatattggtgattctacatttctacctacaaagcatgctccttgtcaagctctagaagaaaatatgggtgcccttaagtagcctatcaattagtcagggcgccctattctactgaccacaaggcacaagtcctcaaacttaccaatttcttgggtgcagaaacaataaaagatatgaatgattccaacatatccttctggtgtagctactagctagtaggaaagaagccaatctcaaaagaatggcgcctgtttcttcactgtgctcccagtctaaacagactcaaatctgggattccacagcttcctcccagtttcaaagttttcattcttacttatcaccacaaatatatattttaccatattcacaaactttttatctctatacatgtttcctcaacttgctttcttgatttttgtttattgattcaggagttaaaagatgtagaaatccatttgttgtgcatatgaacaataaaaagcagcttgaacattcaagtatatggtaatccattcatttctggttagtttttgttgttcttgttgacttgttgctgttaatgaagtatggttttatttgtatttttagtttggatagtgtttgtctggaagaaaaagaagaag

SEQ ID NO: 107508 - DNA, 956 bp, Aquilegia coerulea
  Intron number 1 from transcript AcoGoldSmith_v1.002054m (l ocus AcoGoldSmith_v1.002054m.g) derived from phytozome v7. 0 (chr-ID scaffold_37; pos 2343312 to 2344267)
tatctatctctcactagtacgtacagtcaggtcaggtcagtcactagtacttgcttgttactcatttgttaccccctccctcagctccctccctcctaagtcctaacccttttttttttaattcaaatttcaaattgtggatgaggtatgaatatgaatatgatgcatttctagtcttatttaatacatcctcatcatttactacgtaatttcttatgttatgtatgatttatttatgttatgaacaaaggatatgataatttatttatttatttttggtcttattaagtgtggattgtggaggaggtatgtatgaattatgatgcatttctagttttatttgttttcaaattgtctttttttggtttctttaatagcattctacccttctacattattaaaaaacaaaagggttggaaaaaaaaaaaatatgcatatgggcatatgggcatatgggtgggtattcctctaatttagacttttaaaagcacatacaataatacaatatgtttttcttttcaaaaaggaaaaagcacatacaaatatacaatacaatatatattatgtttttcacttattaatggatactttcaagaaacctttatgtttcacctgcaactctgcaagctcatttcatcattcattcattcataaatgttgaaatggttctgaccttttatcattgaatactatcaactctgctagtactcaatagattgattgatacttgatagtcctctgtctctgatactccaatagtccaattttcatttcattcagcaagtttgaagtttgaacacatttactgtaataacaagttaagaaccaaaaaaagaagaaaaaacttgtctgcttgctgtcaagtgctgtgcatatacagtactcagtacactactgaagctaattaagttgccgttccttttgattttttacaaacagccaaacagttgcgtgca

SEQ ID NO: 107509 - DNA, 932 bp, Aquilegia coerulea
  Intron number 1 from transcript AcoGoldSmith_v1.013482m (l ocus AcoGoldSmith_v1.013482m.g) derived from phytozome v7. 0 (chr-ID scaffold_15; pos 2529465 to 2530396 reverse stra nd)
ggactgctgtccaagagggaactgtactttgcattgtcccaaatccggagcgtgtatagtgtatgcacaacagtctttagtaatgttcatatcttagtcttgtttgatgcatgcctttctgtacttttatcactgtatacaatcttagatgaggttccagccttcccaaggattgtatccgacacaaggatcttcatagatagtctggaactggaaaatcttcgatgaggttccagtctattgatgcatatactgtacatgcgttttgtagttttgttaccggtggtcttgctgtatcctatattcgtgttaaagacgatatctcccacacacaagatcatctgaagttgctgccaggaaggtgtttggccctccaggaaaagttctcttgaaagtgtggtcatcaatcatcatacatcaaatgccaaatgaaagtgtgttcaatttttgcataaaatctcaaaaaaattcaagatgattatatagcaagagatttgacaaaagcccaaaccaggcccaaataaaaaagcctgctaaaataatccatgaacgaatggcaaattggaaacattataactatccaagggtatttttgacatgaatcatgtatcctaactggctaactgccacttattttgtctcatcaaaccgtttagagaaaagcttcaaaccgttcttcaagaccaactgctatgttttcggaacattttagacctgtttcataaaatcacctacctaatcatcatcatcaccttaatcatgtcttaatctttaacattcttctcttgaaacccagaaaattgaaatcattttagacattttcgttttttcgtttttccttcaatattgtgtgtagatttgattgttttgagattagttaatcaaaatcatggctagaggtggatatcatataagggagcttgatcaaacac

SEQ ID NO: 107510 - DNA, 336 bp, Aquilegia coerulea
  Intron number 2 from transcript AcoGoldSmith_v1.013573m (l ocus AcoGoldSmith_v1.013573m.g) derived from phytozome v7. 0 (chr-ID scaffold_1; pos 11500543 to 11500878)
tattttgtactgctggttgttttttgggtagagaggtacaagggctcttcgtatgtttttcatctgatgatgtaaatgaaggcatgtctccatgggcagattattacatgatgtactgtcccaggcatgtaatactttggcaactaataccattattacaatttatcacaaaaaaaagaaaaaaataaattgtaaacagttcatctcttgctcgtcttgtgataaccatctttcactttctttgatttgaattcactttgagttgaataatttttgcttattttgccatgttgtctcgcagactcccaagaaacttgtatcttctttaaaaggtag

SEQ ID NO: 107511 - DNA, 983 bp, Aquilegia coerulea
  Intron number 1 from transcript AcoGoldSmith_v1.021227m (l ocus AcoGoldSmith_v1.021227m.g) derived from phytozome v7. 0 (chr-ID scaffold_1; pos 8681780 to 8682762)
tgaaacaggtacatgttttcagattctagttctaattcctcctctctctctctcttttttatacgatttttacgaaatcgaaaggctttaatctacttcggtttgagcctatctgtgagtcgaaataacttccttctataatcaacaagtaccggctttcacgcctatgttaggtgggtaatagaaaagaaaaaacatagcagaactcttgtattaaataacctagttgaagcatcagaggtagtcaagtctctggaggtgtgtaagactgagacttcctcaacttcctgcaaactttaaaactatgcctaatcttttgtgtctcatcaactccgtaagcagtagtttttgggtctggttggctggttgcaatagtgagccctccaaaatagcttgctgcttgccatactcttgcaccccttagccaccttgacttttctttttcttagaaaatgtggaaccgcgcgtgtaatgtactgtaaatgtgtaagatgatactaggaggcactaaagtagcttgcaaattaattcttaaaactaatcttctggtctgcactagggtatgggcttcatttcaagtcttcttgggtatcacaagtattctcccagatagagtacatagtgatgctcttatcactgcttgtttcccctgttaaaaatttgagcacactctttccctcctaaacatccaatacattccatcctttacagttaccggaatgtaattcttgctataagctaataagctattaaaagaaaatacaaaagtgaaactgaaactcattgacagggtttctactcagtcctgtgccatatcggttatggagctcctggacattgaagaaactatataaatttagtacctgctaaaacatcaaaaataagctttcatatgctccatttttcctcttccaactatcctatatactgtcgcttattaagttattataaactctactggttgatgctataggcagcaccat

SEQ ID NO: 107512 - DNA, 709 bp, Aquilegia coerulea
  Intron number 1 from transcript AcoGoldSmith_v1.003757m (l ocus AcoGoldSmith_v1.003757m.g) derived from phytozome v7. 0 (chr-ID scaffold_30; pos 1702662 to 1703370)
ttcgacgttcgacaacatctttccactgtttccaggttttcttttcgtttcctttgcatttttttttgtttctaggtttttgatggattagagaaaaattactacaaactgttaatttctttctactatttcttgatttaatcattaatatcacacattctgtttgtttaatggactaatttgtgatcaattcgaagttttgtggaaatgaaacaagaaatttttaaatttggacatgatattatttagggcctcaatacatgtgggttagttacttaattgatttggacgactttggttgattattgcattgtggaatgtggagaatcaaacattcttagaaagctgaatgtggaaatcaatgtgatattaattgagaatttatcttagttttcaacattatttagtgtaacggcgttcacgatggcttatatcaagtaaacaacatttagtgttacagagatgatgatctttatgtggcaaagattagcatatgaaagatccagctcaaatgaagtcttttactttcgattttgcatagaatattgacaatttaaaatgttttaaagtgagcagaatttttgttatgacaatatctgtggggttgataattgatattatccttgctattatctggttttggattcatatatgtagtatttgtaactgtaagtagtgattaatctctaaatcttctggtgcagataca

SEQ ID NO: 107513 - DNA, 392 bp, Aquilegia coerulea
  Intron number 1 from transcript AcoGoldSmith_v1.022599m (l ocus AcoGoldSmith_v1.022599m.g) derived from phytozome v7. 0 (chr-ID scaffold_49; pos 21792 to 22183)
gttgtaacaaaagtaagtttttagatcatggtgtgtaccagatttgcatcttttgattgatgcaatgtgcatgatgttccggtagcattgtcaaacacttgtgggtgaaagttcaatatttaggattctgaatcattatcaattttggtgctttttcatcaacagtaacatttattttgaccccctttatcttctcttctgcatgctggaatacttacaatgtggcaagcagaagagtaattagcctgaaagtaataaataaaagtggaccgattcttcatgcaaaatattttggtggaaaaatcatagtcaattgttttgcatatgttgaaatgttttttggttagattctggcagttgtataatcacaggttgctaattgaaatacgggt

SEQ ID NO: 107514 - DNA, 879 bp, Aquilegia coerulea
  Intron number 1 from transcript AcoGoldSmith_v1.003910m (l ocus AcoGoldSmith_v1.003910m.g) derived from phytozome v7. 0 (chr-ID scaffold_7; pos 1869180 to 1870058)
gcgttaagttagtaataagtatattttattttttttttctaattttctacagaatgaattgttgttgaaataattttggggagtttagctagttttattattatgtatagtcatgctaatttgattttagttggaaggattgtaagaagaaggtactttttaatagattgtttgacaaatataactgccacaaatgaagttgagtactaatctaaccaagtaattttagttttatttaaatcccgtgacgaccttgtctgtgtaagttttagaaaggattaaccaagatcaacatgttgacgggaagtgaaatgaaaacatacattgagaaataagttttaacaacttataaccccgactgaaaaaaaaaaaaaaaaaaaacccattgaaaaaaattgaagtgattgcaagtggattgaatctatgtatttattattggggaattcatctaattcatgggattgtttagcttagcatgaagtcgaaacaaaaatattttaaatgttagatgcaagtattatgttcttgaaataatactcctggactcctggttttgtttatgttgatttatgttatggttttgcaaaatcccatcttgttgtttttgaaagccctgtacagttggttgagtttctcaatcttctttacactactaatttcctcaactttgactgcatgttgttcatgtcaatcattgaactctttcactgcaactatgataagaagcttagatcctttttttagcgagaaagaggttatacaaataggaccttagtgtgcttggagtttttgtgtagttttccttagagaaacttccatgttttggtattctagcatctggaaggataaacttaatgccactttgcaggtggattcctg

SEQ ID NO: 107515 - DNA, 384 bp, Aquilegia coerulea
  Intron number 2 from transcript AcoGoldSmith_v1.011398m (l ocus AcoGoldSmith_v1.011398m.g) derived from phytozome v7. 0 (chr-ID scaffold_60; pos 1063020 to 1063403 reverse stra nd)
gttgactttaagaaggtaactcctactctaaaacagatcaagcatgctttgttatgaaataaataatgtaaatgattttcgcataagttttaaaatttgaataatgcaaatgtagttttggttttgctctttagtagtagtgctcttatcttcgctatcacaggagaaatcaccttgggagatgaatagtaggagaagattgaggcagcagtgaagaggaaagaagaggaactatatttaagtggtgggaagttatcaacaagctgcaaaaaggataatggccaaggtagtgcaaataattggatgaaagtgaaatcgttttggacccaaaatgaactgcgtctgtatgtttattagtatgatcttactcccaggctgtagact

SEQ ID NO: 107516 - DNA, 536 bp, Aquilegia coerulea
  Intron number 4 from transcript AcoGoldSmith_v1.007437m (l ocus AcoGoldSmith_v1.007437m.g) derived from phytozome v7. 0 (chr-ID scaffold_9; pos 1003218 to 1003753 reverse stran d)
gggatctgcagagaagccagccgcagcttgtaagtagcattcaattattctgattgattattctttattcataaagtttacaatgggcagcttatccagagaaccattttcatataccttcaatttatatcttctgtttctgtaagaactcaaaaaagagatttctgtttttatgatggaaaatttgggaagattgcgtggaacactctaaaatatctttttgatactactaaaggcatgttgacaggtttattatccaacacacacaacacaaaaaaaaattagacaacaataatattctttgccacacatgcatattgtaattttttatatggcttccatttttctttctaacttcgcgcttgaaatgttttgttttcacaaacaatgtcattccatgagaagtcagtggttgtaagaaacttatgtgttgccgttgggaagctggtgtttaggtattatgaaaaatgaaattatccctgttgtcatgcattgaatttggagcaaaaattgactggtgctgcattgctacacag

SEQ ID NO: 107517 - DNA, 556 bp, Aquilegia coerulea
  Intron number 3 from transcript AcoGoldSmith_v1.021818m (l ocus AcoGoldSmith_v1.021818m.g) derived from phytozome v7. 0 (chr-ID scaffold_6; pos 2713308 to 2713863 reverse stran d)
tgtgtgtcttcaagtttattacgtattctatctctcatttctatttaaatctttctccagtttctggtttgatgacattagaatttagatttttgcaatggcattaaatgtttggtaacggtgagaccattttgcaaacgtttcgaaagatttgggaccaaattgaccaatttaaacttttgggactcaactgaaaatttggacaaagttaggggaccaaaatagctaatttatcgttttcagttggattctcattgtatcatcatgattgtccactctggtatgattaattgttgtgacacactattggactcccagacaaatattgaattttaaattcaaaaactatactttcgaggtgcccaacattaaacaatctataacgtgttatgtgcttgggtttgaattttatttagcacatacccaaacctcagtttaaactccttcaattatgttgttgactgaattatttgcattttgccttttattttttcaggttgcaaattattttaactttccagattgtggcaaagatcatcaaacagtagactacaga

SEQ ID NO: 107518 - DNA, 595 bp, Aquilegia coerulea
  Intron number 3 from transcript AcoGoldSmith_v1.020061m (l ocus AcoGoldSmith_v1.020061m.g) derived from phytozome v7. 0 (chr-ID scaffold_11; pos 4121321 to 4121915 reverse stra nd)
gaacagtaagtcatccatatagaggattctgttatttttttattactttttacctaaaatgccaataaagttttgatgggatctacactaagtgctaagaagggttttagacatgttggttattctaggtcttatgctgttagagtgttgctagatccttgtactttgtaagtctcattttgtttgtttgtctatataatgttttagaaaatcataatttaatcttatcgcagaaatgaagcttaagtagttattagatactgtctctagagtcaaatgatgaaaactatgattcatgagcagattcactgaatgctaagttaaaatcggttttcattgactgcattgctcatcaatttacattgatttttgatgtttcaatgtttcataatgctagagagtgcaacgtataacctcaagtttggtagcaaacaatcttaagtggatacttttaactcatgccatgatgcccccagacttttgtctttcttcttgactttgtttgaaatagcgttgttctttaacatttagagcgttaactcatgccatggtcgtatctatgattccacaggggaacatttgtggccacgttctt

SEQ ID NO: 107519 - DNA, 837 bp, Aquilegia coerulea
  Intron number 1 from transcript AcoGoldSmith_v1.006664m (l ocus AcoGoldSmith_v1.006618m.g) derived from phytozome v7. 0 (chr-ID scaffold_27; pos 3504283 to 3505119 reverse stra nd)
gccgatcattgtgagtcaactcaaactcaaactcaaaaccctaattttacaaatcacaatgttaaaagttaaaacacttgtttacttatggatggtgatgtggctatatctgaaccgctaatatttttaggacaaaaatgcccttgtgctttttaaatcttggtttatactattatgatatatgaagggctatcttgtcataaaaaatgcatgtaaacttatctggtctgtttttataggagtggttgcttaatgcttattgttttctccacatacattttggttttttctttgttgttgcaaaaatggtatcatctctgcaactctactctcaattcacttttaaaataaattgtactactaaaaccagaagcaattgttgcttgaaaaaacttggttcaaatggtattcgttgtgagcaaattgtcgagaatcaacgagccattaaggtgaagaatggaaaggattctttagagatatgtagagtggtgaatggattgtggcagacgagtgggggttggggaaaaatcgatcgagacaaggctgttgacgcaatgctttcttatgctgataatggatttaccacttttgacatggctgatatctgttagctctccataaactctttactttctttcgagttttcttattgctagtttttattctagttaggctttggctttctaaatgatattatagttttatttttctatatatatttttttcatatcaaaacttgaaattctgtgctgtatctatgaatatagctttggttactttcaagggtttttgtttccagcatttgaaagcaaaagtcatgtttatttggttatgcag

SEQ ID NO: 107520 - DNA, 863 bp, Aquilegia coerulea
  Intron number 3 from transcript AcoGoldSmith_v1.009638m (l ocus AcoGoldSmith_v1.009638m.g) derived from phytozome v7. 0 (chr-ID scaffold_18; pos 3990547 to 3991409)
attgtacccaatctagaccagctgatcacaattcggtaagcctattatgttataatgtcttctttgtgttttatttggttgctattcaacacatgataaaaattctattggtttgttagttagagccttacgtcttgttattattagatatatatatgaaagaatgtgtattttgaacataaagtacaataaaattttggaagagtttatctcattattatgcaactatagtagcaaaatcaacagtgtgaatttatgaacgaatatccttcatattgtagccaataacaaatcaaacatgttaggcgacttttgtatctcaccgcttatgtgctttcgatcttatattacttttatttatatctcaccaacttttgaactcacaaaggaaaattgaccattcttattccaccatgtgtccaagaatttctatgatttagcacacgttacatgagcttccatattagtctacgctattgctatatctcccgtctgagtcttaaaattagaatttcagtggtacccatgttggagttttgtcgacttttctccacctttctccaccttcgtaatacataccttttgttcctacattgcattaatatctaagaacaatatcttataatataaatttatttcaaaagtttatacatagcacatttagaaaacttttatgagctatatcgggaatagggtaattttagaattaataaggacaagataaatcttaaaagtcatttgcgcaaaaaataaatactaaaatgagataaaaaggctggaactggaggaataccttagtttatcatccacattccatctaattggtctattttacttccagaaatctgtggcgaagtctccac

SEQ ID NO: 107521 - DNA, 739 bp, Aquilegia coerulea
  Intron number 3 from transcript AcoGoldSmith_v1.006108m (l ocus AcoGoldSmith_v1.006104m.g) derived from phytozome v7. 0 (chr-ID scaffold_30; pos 2471403 to 2472141 reverse stra nd)
cagaaggtaagcttttcttagcatttagctgatgctcttgagcttttgttccttgttgctccatgccttcaagtaggtcctccattttgaagttttagagtttggattagactaaaatttaaatttagtggacacaaacagtctgttcaacacaatactaggcgaataattaattctatcatcttcaccagctatttgatttatgatgttatgatgtgatgtcattttatgaatgtgttcttcgcccctttcccaaatttatgtatcaaaaggtgttttgtctgttacatggtgggtccattagttgtcttatagaaggtaacaattgtgcattgttgaagggttataagctaataactgctgaaaagctggtttaatatgttcctctcaatctctcattttctaaaagggaatggatttttattttttttttattctgaaaagtatggacagacaagttaaacattggacaaacaaagctaaaacggataaatattgttctaatatttgtagaatttaagctacacctttgagcattgtcatatctcatgcacactttcatagtctgttctattcatgcacaaaatataaaatttatacattacattgcatgtagtttagtttgattcattttcttaggttttggcatttgtatgcctgaatcatatattaaatctaacactctttttcttttgcccgtttaggaacttgactaccttgttggagcagtgtccaatcc

SEQ ID NO: 107522 - DNA, 849 bp, Aquilegia coerulea
  Intron number 1 from transcript AcoGoldSmith_v1.010652m (l ocus AcoGoldSmith_v1.008868m.g) derived from phytozome v7. 0 (chr-ID scaffold_6; pos 3613979 to 3614827)
tattaaaatcggttatcgtcatttcgattgtgctggtaactgctaactacaccatactccatactccatactccatacttgcttttaagatgtttgatgttattcccaaaagaaaaaaaaagaaagaaatatatagtcacagttgtggttgttaattttcatttgcttatttccctttatttttaaccaactgtaagttcatcaattttttggataataattctactgatgagtttgtaaatttaagatcaactatttcacgagtgctcatcaataattattacaactaatttatattattcggtagatgatattttcttgtaagtaataatcatagatgcttcctcatataataacaaaatcagtttctgaattttggtcctatttggtattctcattgtaggttacttgttgtaatcacacttttatatgaagtatgaacaagaggcacgtttggattacaatctgtttgtgataagaagaaacaatgaatttttatttaaatgcaatctgagctatttatatagtagaatgaaataacaaagctaaaaaattccaaatgagggccattgttttcagagatccttcacttgagtggttgtctggttgattcaccttatatatgatttacatacatattatgcaagaaatccctaattccagtatcactcgtctgataatgataatctactgattttttaggcccttataaactggtatatttgatttaatttatttatattttttacctccaaagaaataaaaaaaaaaaaaaatacatactatgtgcaaaacgctgctgatcctgaatcattattgccattaatttttttgcagctgattacaaaa

SEQ ID NO: 107523 - DNA, 836 bp, Aquilegia coerulea
  Intron number 1 from transcript AcoGoldSmith_v1.005199m (l ocus AcoGoldSmith_v1.005199m.g) derived from phytozome v7. 0 (chr-ID scaffold_28; pos 1368967 to 1369802)
tctcacctggggtttttgataaaagggtttttcaggtttgtttttctttttattacattgtattgaattcaatttattttccagttttttgaatttttgtgaattttattttattttttaaaattttttttgggtggaatttggtggtggattttcatgaatttagctttgattaaatttggaagtagaagacggcaaaattagaatttgtatcttgaaattatgataatttgtaagatagaaatacatgaattagctttgattaagttatgctgggtttctgccccaataacattgggaaggttttggtaatttgttgataatgatgattatacaaaattataactgcaagttgaaagaatggcaagatgaaaagaaactattgcaaatatagtttggaatgtatatcgcagctagttactttcattggtacagattgatagttgtagatgatgcccagcttgtgttgaataacagttttcgagtcatttttattagcgatagtatcgttgtctttcctgaaaaaagaaaaaggagttaagtttacttataatcaaaagatattgtggaaaaggtgtacaactgtgtcagacttagacacaaattcccgtgtcaagtttagttaggcttcagttgagttagtgactcaggtacttagttttgatgcgtacagaccaattttaatttatcttggactgtcgttgttgattgtagagtactagagttgagtccttgaaattggtatgaaagcacctttgcactttttactttctgatttgccctttgattatctatttattgaaccattgtcaccatgtctttccagggtttggatt

SEQ ID NO: 107524 - DNA, 1034 bp, Aquilegia coerulea
  Intron number 2 from transcript AcoGoldSmith_v1.011698m (l ocus AcoGoldSmith_v1.011698m.g) derived from phytozome v7. 0 (chr-ID scaffold_37; pos 1808493 to 1809526 reverse stra nd)
gtaacccaaaaagggtgtggcgtcgccgaaagttggtatgatgaaaagcttaattacatttctttataaatcatgtaggagatggagttaggttgtttcagtttatttggaatttttagttggaattacttgatatagtctttaatgggactaatctatattgaatttattaatatattgagattaaattgtaagaagtctgtttaagcttgatgttctgaaataagtcaatgtcttcactaaagtttcggaataggaatttggttgaacacttgaacctatatagtcctgatagattactgccaatgtgtatgtcaatttgtatggaactccatatacaaatgttgaaccatggttgtgtgcgagaaaaaaaaaggtcaagcgtaggttaaggccatttcaaacattagcacgattgataattaagccgttaaggaaagtgaataccactataccagattagaatctaactggaaatgctcgatcgtgatacacagtatattatcgagggggtacaaacggcaaggtaattttggattgtttgaaaatttcatcttaatgttgataatatttatgactaattgaaatgtgttgcaatattgtcagacgacacaaccttaagtcatatctggcattcctaccttgatacctacattgaacaggaggataaaatctgttttatagggtgtcattgtgtaaattgccttaaatgtcagaataaaagtgaaaacaaagtccaaattttgatgacaatacttattcaatatgatttgagttctcttcaacaaagtcaaggtaggctctctgccccgcagttttgcttagtgttctatgttcaaagaaactttacatagttctaacatgcatgattaaacacaaactgtagagctgatcaatttagaactctgtataatctcatttttaccaagatttttatggcaacagaacggttctcatgttatatgggatcatggttcatgttatgttcattgaagaattattgatgttcgtgtttttcttgtttcagacaaaga

SEQ ID NO: 107525 - DNA, 860 bp, Aquilegia coerulea
  Intron number 1 from transcript AcoGoldSmith_v1.004836m (l ocus AcoGoldSmith_v1.004836m.g) derived from phytozome v7. 0 (chr-ID scaffold_9; pos 5774936 to 5775795 reverse stran d)
ggtatgttcaattatatctataacttttttttttttctgtattattgaattgaatgctttggttttttcatcattttttagtttttcttaaataaataatctgagattttggtgttggagggattttgatttagtggtctggtttgaaatatttaggaaaattagatcaagtagtgtatgttagcttaggtctttggtgatttttgcgcgctttatcttggattaacagttgtacttgttggctcttatattgttggtttctcttaatttttatacgtaatcatatgaagcttaataataaaactgataatagaaaatcatttagtgtgttgctgattatgccgtaagagataagttactaggtagtgaatttcatgttgggctaggaattctgatcatccataagattaataagttgtctttgtcttgtcgtgtattttgcagttcaactgaaacttgaatttaggtatttacttctgctgttcttagcatgtagtttaaactttaaaggatataaactttatattattttaattgatcaagttctcagttatgcaaatccacagatggtaatattatacgctgattgtatattctgaagtgatatgtttaactatttttactcttgcaaaacatcattttttttatttttttgtattttgcattttgttctatttgttggatttggatattctctctctcagtctgaatctttattcaatctttattctgaacaacataaaaataactcttaatgcttttggaagtataagatatgttctgataactagtttctcatgttagatgatttgttccttaaccatgttttaatttatttttctccattagattggttggtt

SEQ ID NO: 107526 - DNA, 1032 bp, Aquilegia coerulea
  Intron number 4 from transcript AcoGoldSmith_v1.017164m (l ocus AcoGoldSmith_v1.017164m.g) derived from phytozome v7. 0 (chr-ID scaffold_18; pos 4597103 to 4598134)
gtggccataaagggtatagattttttttttacttagccaccctttatttaacctttccttgctatatatatattaatgcatatagggatgatattacaaagcctagactccatactgttaccactccatttcagctgattctgtaggacaatctcaataatgataggattgcattatattttaacctccacgacgatttcccaactatcacagaaattggttcattcacatatctaaagtgaattcctctccaaatctgaatttatatttcaatacccacttgatcagataaaatttccttctctgcctagcccccatgttttagtgaattacgcacttctgccactgcaacaagaatgaaggagagatatatggtagataagcaggttgtatatcataccttaaattagagtcttatgccacccttaggtgaaaactcaattttaggttatttcctttatgacaatttggaagctcaatgttaaacaagtattcaacttttctgctttagttgttcaaccattacaaatgtttttacataacaactgggctgaatcatgctctcaagttaatagtaggaagtttacagtacaaatcttgagatgtgaggttctgtcagtctccacttaatgcaatatggcttttcttcctatatagataataactgtgaacctcagtttggtgattattcattaatcagtaaaagtcttcttataaataaataagaataattatgaacgtcagattggttgtttactagtttggtgattatacatctccttagaagcaatacaaaattacaaatttcaaaatttatgtgcataaagaaacatataaattttgttattattctcgagttctattctattggaatgtatgtttaacctgcacatctgatttggtttgttattgacaaacgaatgaagaggatattgttcccattaatacacttttatctttttcatttgggtttctgtaattatatcttttattgaaggctgaagagtgtaatctatcatttccgagggaaca

SEQ ID NO: 107527 - DNA, 1039 bp, Aquilegia coerulea
  Intron number 2 from transcript AcoGoldSmith_v1.007957m (l ocus AcoGoldSmith_v1.007957m.g) derived from phytozome v7. 0 (chr-ID scaffold_10; pos 861935 to 862973)
ccttgaaccatcctaacatagttagatttaaagaggttggtaactgaattctagttctatttagtgggattttcattgttctcaaagcttgttttaaactagctgaaatgattcttgtccagttgtacttgctttgcaagggttgatttatctgcaagttactattcaaattgacttgttaagttagatttgattatattaaatacaggggaaactctagacttaggtttttgataagtttgttgatttgggagtgagtcaaattgagcttgttgattgttatttgatagaactaggacttttggttcaactcttcatatttgattgaaaatattgtgctcctaataaattgacagggaaaattggtcaaaaccccctaagttttgaccgggtttggcgagaaccccctaatgttgtccaagctcggtgtaaacccccttctgttaagcaccccctaagtttccgtccattcatagtttgtctgcccattatacccttaacttctgtcaatttgtctaaacccctcaaaaaatcgttaacaaaatttaaaaattgtaatccaaacggctacttaacttctgtcaaataagttgtgttaacgatttttggggggtttagacaaactatttgaattaagggtataatgggcaaacaaactatgaatggacggaaacttggggggtgcttaacagaagggggtttacgccaagcttggacaacattagggggttctcgccaaacccggtcaaaatgtggggggttttgaccaaatttccctaattgacaagagctcaatttttagcttcattgttggcttacgagtgcagttcggttgaaggaggtgttcgatatgatgtactcacaatagtaatcaatgagaacttcatattgttgtttgttggttcaagctgacaccttagagaaatggaagacctttttaatcagtttggaaatgggagttttgtggtgtatttgttatgcttaaaaatgggaacttctggcaggtactgttaacacctactcatctaggaatagtcat

SEQ ID NO: 107528 - DNA, 396 bp, Aquilegia coerulea
  Intron number 1 from transcript AcoGoldSmith_v1.000652m (l ocus AcoGoldSmith_v1.000652m.g) derived from phytozome v7. 0 (chr-ID scaffold_9; pos 4238341 to 4238736)
attggtttggttcacaagtctcgctattctcttcagtaagtactatttaaaattacactttttattgttgttgtttctgatgatcattgcttttataacgaaattcaagctttgggtattgtttaagagaagataagatattaatttgtatattttgaacgatttttctttagtttattttggaattttatgggggtttgggttttgttttgttttgttaatagtttaatggaaattctggttttgttctcataaaatagttctggaacttctgcaaattcatgaactcattttttttctttttttatattaaaatctggggttatgtagttttgatttatatatgtactggtttttgtagtgtcattgcagaagaataatcagtgttctggtgaa

SEQ ID NO: 107529 - DNA, 144 bp, Aquilegia coerulea
  Intron number 1 from transcript AcoGoldSmith_v1.007160m (l ocus AcoGoldSmith_v1.007160m.g) derived from phytozome v7. 0 (chr-ID scaffold_46; pos 871048 to 871191)
gagtcgtttggtatgtatctagtatttttttttttcttaaacaaattcttctgtttttatataatgaaaatgatggaagattgatccttagttttgattaacttttattggtttcaatcagttcttttttgaactcggagacaa

SEQ ID NO: 107530 - DNA, 306 bp, Aquilegia coerulea
  Intron number 1 from transcript AcoGoldSmith_v1.005731m (l ocus AcoGoldSmith_v1.005740m.g) derived from phytozome v7. 0 (chr-ID scaffold_9; pos 2546821 to 2547126 reverse stran d)
agtggttagtagttctacttctcttctcttctttcttttcttttttttttctatgtaaaactaatgattagtgaataaagcagctactttctgattaatcacttgatttaagaatttgggttgtgttctgtttttcttttgattcagtttgaattaatgatatagctccacaattataacttatgaaagaaatttagtagtatatcaatgatcaaacaaatccaagtttataaaatacataacctatgttctactatcaattttattgtaggagtagaaggactttatttgaggaaattagtatct

SEQ ID NO: 107531 - DNA, 652 bp, Aquilegia coerulea
  Intron number 1 from transcript AcoGoldSmith_v1.001595m (l ocus AcoGoldSmith_v1.001595m.g) derived from phytozome v7. 0 (chr-ID scaffold_10; pos 1070312 to 1070963)
aaaaatccctggaattctgttgttttatataaaaggttagtcttttttttctccaagtttgtttccatttcaagtttcaactctctctctctctctctctctctctctctctctctttggttagttgttctttaacaaacccacttttatattttcttccatttgtcactttagattctaaataatcttgttttttaatcattttatggctcaatgtgttgactttgttagtttaattgcttaattctaaagagtttaaaactgggttaatgctagtttgttttttcagtattcattacagcttcacttgattaaagtgcctccacttcttctttttcttcttctcaattcccattttatgacatttttggtaaaatttaaggtgaattgaaaaatccattttttttttttatatatttctgtatgttatgtggataccatttgaactgaattgttagaattatgtatgttgtagttgattttgtttgaaaattatggatttttttatctgttttttgagtaccctttttctcttttcactgtttttggtcctgaaagtgaagattctatgtgggaattttggttctctttgatttggttgtttttgaatgcttagtcactttatctttatatgggttttacagattggaga

SEQ ID NO: 107532 - DNA, 653 bp, Aquilegia coerulea
  Intron number 1 from transcript AcoGoldSmith_v1.007630m (l ocus AcoGoldSmith_v1.007630m.g) derived from phytozome v7. 0 (chr-ID scaffold_81; pos 196741 to 197393)
tctttcgattctctataacaggtgaaaacaatcactttttaaattatcagattaatattgcttattgtatgaccttgaaaccaattagggtttatgtggattttttagattaaattagagataattcgatttcattgaaatctttattagtgcaattaaataccaaattgcattctaaagttttgtttcatttatgtatatatatttgcaaacaagtcttattctgataatcattggatgtttcttgaattgagggaaataaaactgattagtggtaatcattatcattagttgtgtaatatttatttgttgataagagcttcaatatctgtcgaattaggattcctattaatgagaccataatttggtgtcgatattataatataacgatttatttttggggttgtttggtcaagtgaggcaacctcaatggaccttttatttttctttcaaatgttgcatttttcactttcaaatgaacgtccagtctttataatggagttttatagatactcctttttatccagtcttttataatttttgggtgaagaagccatgtttttatcaataagtataatagaatcttaagcgcttggttattttacatattagcaactgtagtttgacttcattttgttatcctatatgtagca

SEQ ID NO: 107533 - DNA, 692 bp, Aquilegia coerulea
  Intron number 3 from transcript AcoGoldSmith_v1.002769m (l ocus AcoGoldSmith_v1.002769m.g) derived from phytozome v7. 0 (chr-ID scaffold_9; pos 5002461 to 5003152)
gaagcaaacttgaggtgattcaattcctgatataatttgataatagctattgatgcagtcgtgcataaagatatgtactttgaaccgaattcaaagaactacggcgattttcgggattcgacaaccaatgttcttaaccaagaactcacacaaagagaagactcttctcaaaacacacaattcaattaaccaatcaacacctacttggccaatggcctacaactctttaaataggaaaaacaatccttggaaagcaaggaaacctaaacctagaccaattcaaatgaaaatagaaaacataattcgaaattaaaataaccctaaaatagaaataccctaaaacacctaaaaacaccaattaaacataaacctaaatatccccaataattctaaaaacatatagtagtaatcttagcacaaattaggggttgtaaaccctagaatgcatcagctatgttaccataatatctgcgcatttaggagtttttagcttatatgctcatatgcgtctgtgcaacatccatttatagccatgccattttacttgtgattatgtcgtacatatccttgctaaacttttcactaatttgctttttgataagaaaacaagctggagtcaagtctatttaaagtaaggattgtgtgtttgtacttgtttttcacgaattctttcatactatatgattcaggtt

SEQ ID NO: 107534 - DNA, 463 bp, Aquilegia coerulea
  Intron number 1 from transcript AcoGoldSmith_v1.022064m (l ocus AcoGoldSmith_v1.022064m.g) derived from phytozome v7. 0 (chr-ID scaffold_7; pos 6338189 to 6338651)
gtggacaacagcgtccgagaggaccgtgctcttctgtaagtatctatcagtacatctaattggtttactttattttattgttggtttggaataacaagcctttaaatgatatgttgttgtatatctgagtggaatagtggatccaacatgatattttttcgtagctaacaaacattaaactcaatatttcttctttatgaaatttgatagtgcttgagatcttatcaccaatagtactgccctagtcatgagtttttaattttactaattggtaggccattctcgtcattgcaaatgagtggattaacttttgcaaggacaaattatacataactcaaaattcaacttccaattctaatggcatgattttttctatatatgttaataataggtatacccttttgtgttggactattttcatttgcacagagacttgaaattgccatgtttgtatgttccagga

SEQ ID NO: 107535 - DNA, 852 bp, Aquilegia coerulea
  Intron number 1 from transcript AcoGoldSmith_v1.002833m (l ocus AcoGoldSmith_v1.002833m.g) derived from phytozome v7. 0 (chr-ID scaffold_72; pos 86253 to 87104)
gccttttacatattacacgctcgtgcaggtattaatctttatatatgatgttgtttctgttacagtacagactttgttcaagttttctcagataagcgtaacctacagtacagtagttaatatggttgtttagttgtaaatatattgtgtctttctatttgatgttgtgtcttgtgtgatttcattgttattggtacgctctctttagtcttcatatgtaaatgataagggtaaaaggtacccctgaagagccgtaggctgctagccgttgaggcaaggcttcatatgtaaatgattccaaccctgttttcatttgaaccaatataatagaaaaaaattaagaatttcatagccacttttgaatccatcgcgtgtcaatttcttacatttgtgctcgtgtctcttcgaatcacatgatttgacatgaacattattgagtggtgctttgtgtctagcatcaaagtggtatatatctaacttatgtcttccatgcataattcagggtaatacttgttatgtggttgttacatttgatatactttcactatattgaatcaatgttcatatgttggtgttggtacaatcatgcatgagcgcacactgacattttatagctactctatgttcaagcttttttttttatgatacacttaaggtgtatctattattataataatgtttgttaaccacttattgtacttcagtacttgtaaaccatgttattttattactttccttttgtttgatcacaatttaatgtgtcttgaatctcttccatgtaataaatcgtgttcacctgatctatgttgcttggcagatctctacgaaccttatttttggaagaaagcacaa

SEQ ID NO: 107536 - DNA, 643 bp, Aquilegia coerulea
  Intron number 1 from transcript AcoGoldSmith_v1.014271m (l ocus AcoGoldSmith_v1.014271m.g) derived from phytozome v7. 0 (chr-ID scaffold_1; pos 10120961 to 10121603 reverse str and)
cgcgattgcaaacttacggcttagtgtttctaggggtgtgggatgtttgtttgccaatctgtaggttgtcatatagtatatggcttggatgttttctcaatattgattcctagtaaaaattaagtattcgtatttcttatatagagattgatctgcaattgattttggcacagtatcagtaatattaagtatgttaggtggttaatctccaatcaaaagatttatagagggttgatcccctattagggaatcaaaccatggtttgcagatgccagctgtgctcagttggtaataactcccaacgatgataccaaaggtctcccagctgagctcagttggtaataacttatcagtaatattaagtatgttacgttgtcgttagaaacaagcttgccaataataatatacattgtttcgatccctaattagaagaaaaatggatatttaattgactcactatttacttgattggaaggttgagttggtccgttgctttatactctgttatgtatatccattaacttgtcttgtatttgtgaaatgatttgctattctccgaatgttttatgaatccttacgagggtgaattttcgttgtcctgtttctaggcaaaaaggaagctgttcaaacagagaaggctcct

SEQ ID NO: 107537 - DNA, 728 bp, Aquilegia coerulea
  Intron number 1 from transcript AcoGoldSmith_v1.002222m (l ocus AcoGoldSmith_v1.002222m.g) derived from phytozome v7. 0 (chr-ID scaffold_54; pos 1074500 to 1075227)
ttttcaagaaagcaaatcgtcctgtaactcttaaggtaagatttacttctatttaatggttaatctgatgatgatgatgatgatcgcatgcatgggtttttttgtgttttttttcttatatatatatataagacataataaaaccctagctttttataaagagacaaaaagaatatttgagatatgtggtttgtcactttctgtcttataataccttttatgttagattttcagataattgttgatgcaagattaaaagaatatatgaagaaaaaaattgttttttttatggtgtctctgtcacctcttttcatcttgttatttttagatttctattattgataataatatgttatttggaattcttttcacctctttttattaatttatttatttaataaaagtgatcatctttgattgtgtagtactgttcaattaataagaaaagctgtactatgtttgaatccaaaacaagaatcaaataaattcagtttcatgatttacgcagcttcccttaatctatctgtaaatctagtttcatacattccagattatggtggaactatactagttgaattagttcatgggtgccagaattctctaataccttaatttaattaggtcatcatatttttgttatcgtgaaccttaataggctatagttaaaaaggatccttttatgctaaaatcattatatatatgtttgattgttaatgcgcagtttgaag

SEQ ID NO: 107538 - DNA, 587 bp, Aquilegia coerulea
  Intron number 1 from transcript AcoGoldSmith_v1.008106m (l ocus AcoGoldSmith_v1.008106m.g) derived from phytozome v7. 0 (chr-ID scaffold_95; pos 421210 to 421796 reverse strand )
cacacgctcctcctcctcctctctttgcccctttggtaagtagtacagtaataacttcttcaattactacttgataatattattaattatcactctttctctttctctataattaattaattctaatctattggagcagtaatacaagagatatgtatacaaaacttacttgcctgccttcatacttcataccatcataccgccgcgtacttatacttgttgaatcaatctatcaatggatgtcattacagtactatagtttatttcttcaatttctgtgttttttttctttcattcaaataatagtataatactgtatatctgtatcctgtttccaaatgtagtctactactatgtacaatttctttcttattttcttaactaatccaaatatccattccaaaccagtaaaagtgttgttttgcttcctgttttccgaaaaaaaaaacaaaacccattccatcaccacctgctgcagccttcctttattaatcattaatctagtatttattattatatatgtgttcttcttttgtagatcgatcagcctgcctgtgtggctagataaaaagtctttaatcaatacc

SEQ ID NO: 107539 - DNA, 1021 bp, Aquilegia coerulea
  Intron number 2 from transcript AcoGoldSmith_v1.008185m (l ocus AcoGoldSmith_v1.008185m.g) derived from phytozome v7. 0 (chr-ID scaffold_9; pos 5050586 to 5051606)
ccagtgctggtgattctgatcctcgttacaagtgagtagttagttcttttatctctttctcatctttattaattcatagaatctttgataagtagttgagtctatgaaagtgtttatgtttgttaattgggatatagggttggagtgaaactttgttaatattcaagataatcaaacaattaacgctcttattgattagtagattctaagagcattcccaatggtaggttttaaattatttttagcaacttttagtaaaaaactcttgtcaatagtgggttttaacacacttttcaagcaaaacacttttatcttcttggcaaatttgccaaggagttaaaagtgccacataggaccattttattaattaaaaattagatttcatcacaatgtacactatattttttgggaaaagtgaaaccttaaattttaacccttgttttaaaaccaaccattggtaactctaaaagtgctaatcacttttaacataaattttatgctaaaaccttttctctctctcctatgtggcacccttaaaacccttttactattgggaatgctctaatctctttctcatctttttcattaattagcttcaatctgtgcaagctttgccaactagggtatttgggctatagtgaaaactagtatcaaataaaatcaaacgataatatgcacttagagaagcagaataaagtgctctattctgacaaatgtataacatgatgtgacaatggaaagtcatataacatgctgaaagaaggttaccaacttaatgtaactatagttctgtgcactgtgtaattagatttatagtctcaaactaaaattttccctggattagatgtgactgtagttttatcaatcattctaaattttcgaaatagctttctcttgagatcatactaacaatcatctaaacctatatcgctcaatttcgactaccttgtgtacctatttttcatgttttatatctctgggtgcagggattgtgttgaggagtgcaagataactggctgca

SEQ ID NO: 107540 - DNA, 787 bp, Aquilegia coerulea
  Intron number 3 from transcript AcoGoldSmith_v1.002348m (l ocus AcoGoldSmith_v1.002348m.g) derived from phytozome v7. 0 (chr-ID scaffold_1; pos 10613216 to 10614002)
aacaggtttgttgctttcaggggttctgcttcattgtagcaggtgttgtttgttttgttacttttatattgttccatttgcaaataattccaatccaccaatcattgagataagtagtctttattcttttcgttgttcctgttgtctttcttttttttcttagtggactacatatgatagaaaattaaaagaaatttcaatcagtgcacgcaatgtggatgaagcaaatctatcttgttgttttggtggttaatttgactattgcttagctttaattgccaagttccgatatttatttaaattgagatattcctggtattgcaagattgatcttatgttgagcgcattactggttttgggtattacacgttgttcttacacagatcaagaaatgatggtgagctgtcaatttgctcagatgaaaattgatcatttaaagaatatgttgctcacatattgattgtttgatgtcatttgcatattgttaagtgtttggtgtgtgtcacaagagtgcattttagattaaaatacttccctttcgtggggattaataaggttcaatgagattagcttaggttggaagtgagatttttcctatttaattttatcatttcatagtttatataaattttaatgttatccttttgtggcaagtaatgcaatgcaatgcaatgcattatcatttttgttttcctttttctgttcttttgcctgttatgactcatggtggtaaactgtgtatgtttctacagttacgtgagttggataaaggtgtcgacatacttgt

SEQ ID NO: 107541 - DNA, 576 bp, Aquilegia coerulea
  Intron number 3 from transcript AcoGoldSmith_v1.002394m (l ocus AcoGoldSmith_v1.002394m.g) derived from phytozome v7. 0 (chr-ID scaffold_108; pos 279122 to 279697)
tggctcaataaagaagacagagaaaggtgatcatttttactattcgtcacattttatactcttttctttcgcactagtattagtatcgataaattgttttatatggaataatgttctactctcactacaatcttctaatgcaatatgtgaccttcaataaaacatatggtgatttcatcaaataactatgtcaattaaaatataaagagtgtagattggacacaatttatcaatcaaaatgtattctattttttaccacaacaaatgcattagtgtattacaacttaccatttatcaatgtattttgctataagtctataacaatgtgattaatattcactatcgtgctatctggtaattattgtggcaattgataacttttcagaaaccaactttgacctatcctattcttgtttgatatctagcataatctgaatcaagtgtttcatatgtggtactaattttggttcttgttgaccatgacttcaataccatggtatgggcttcgtcttttgctgcaaaacatttgaattaaattcatttttgttgtttgtttttcaggagagctttctgttt

SEQ ID NO: 107542 - DNA, 606 bp, Aquilegia coerulea
  Intron number 1 from transcript AcoGoldSmith_v1.019329m (l ocus AcoGoldSmith_v1.019329m.g) derived from phytozome v7. 0 (chr-ID scaffold_9; pos 2731232 to 2731837)
gtccaccggtaatcgtattcaaaggaacctagttttatcttttgaaattaaatcatcttgtttgcaagttgctcgtctcgtctgccccatgaaaatatgataagaacaagaatgttagggagagcgggactgatcagacccctatatacagtttgcacaacatttgcaatcaaatcagcgttgagtggtagtctataggattagaagttaaaaggtgatcaatgtcaccaaggatattgaagtagacttagtgaattataatctagtccccaaatatgatttaaaatgttgattctttagcatgtagtttgcattgataataaaatgggtagctcatagctcgtcgatatcaagaaataggattacaagtatatgtgaacagtgaactatgattctatgacacatttttaccaccaatagacatattacttggagataatgcccatcagactttttatcttctctttcacgcaacaacgccatcactgattctgagttctatagaataatttttatgctaacctatgttaagatttgtttcttaaacctattatagaagtattgacgttagtatcccaatccacaggttcatacatccaaaaaagc

SEQ ID NO: 107543 - DNA, 541 bp, Aquilegia coerulea
  Intron number 1 from transcript AcoGoldSmith_v1.007621m (l ocus AcoGoldSmith_v1.007621m.g) derived from phytozome v7. 0 (chr-ID scaffold_1; pos 3877457 to 3877997)
caagaccttccagagtcttggagccaactactcttgtaagtgtattttctctctacttatagatacaactttgattatgtctctatatgtatatgtgatcttgatattctacctatagaagatcactacttacctttttaggtatgttttttcttgggtttatcaatatttgtaactctctcttagccatctctagctacttcactttgcatgcttattctcgtatgtatttcatgtgtctgtgatctggatggtggttctcttcttaattttatgtttaggataatatcataatttcaattatagttcatctatgctattaatgtttttcttgatttttcaattttttttttcttttcaatatgtgtttaattatttgctactctttcttctttttatgtttcttaatactattttttggattgttaaatttgttatatttgcaacagtagtcattctattttcgatgtcggctggggtaataattgtaataataataaaaggtactactttgtttgcagaggaggattagtaggagaag

SEQ ID NO: 107544 - DNA, 437 bp, Aquilegia coerulea
  Intron number 3 from transcript AcoGoldSmith_v1.000241m (l ocus AcoGoldSmith_v1.000241m.g) derived from phytozome v7. 0 (chr-ID scaffold_9; pos 4043631 to 4044067 reverse stran d)
cactgatttgaactcggatccacctcagcttgaaagtttactcagatgtatgtttgttacctttagtcttattacaccaattgagtttcattgcctttataatatgtcctcattgcattctataaatgaattaagtgactacaataaacccacctatcatttatagatacataacttattagtgaatttatgcctgtaatttactttatttttgttagtatgcaacatagctcagactttgcacttcacaaatggagtgttcttgttactcaggctgaatgtgatggttttggtagacataactatttttgattgttggatatgtcaaataattttgaaattaatttatttatgtgcagcggctgaatccgaatctcagtcttcacgttttcaaatattcaacaaagaactcatacgtgcctcatctttttcagagc

SEQ ID NO: 107545 - DNA, 989 bp, Aquilegia coerulea
  Intron number 1 from transcript AcoGoldSmith_v1.004455m (l ocus AcoGoldSmith_v1.004455m.g) derived from phytozome v7. 0 (chr-ID scaffold_7; pos 5724182 to 5725170)
tgctgttgttgctgttaaagatcaaggaagctgtggtgagtattgaaatttgcttttttttttttttagattatctgtgttgttcgatgattctcgagaatcatcggacggtatagatttgtttacagtttcttagttggtcaacggtataacaaccgttcatttcctactaaaaaggtagtagatgtagtggactgtaggagatataatctttatctaaattaaatcttttgtacataaaaagtcttcacttacaagggtaattttggtatttaaatatttccaattattttggtttttaggacagcttatttttttctttaaaaaaatatgaatttaattatttttattattataattattatttataatgataatttggaaattttaatttaatttaattggtttgggactttggattccatattaaaaaaagattcttttggggtaagatttgctttatgctgcttttgggtctagattcatctgaacagctggaagttaaaagtgaacaattattatggtagtgggcctgacacagattcatgaaaaagtccagtggacccagggtagtatattcctgttgggctgttgcctatgaatgtaaatgagtccatgggcaaggtcacaagccttcaagtccactataattcattgattttagtattaatgtttctgcaatgggtgaatgtttcttcacaaaggttacttgtagtttcaatagtgataaattgtgttttttcccacagaaatgaagttgaatgaggtgatgaaatcctataaaagttgaatttgcaccataatccacgaaattacatgtgtgtacactgtgcattcagtcattcacagtaaatacttaaggtcttaagggatgaaagatgatatattgaacaagttttaaatgtttagttggtggtttctgacctaattataataaaaatatttgaattctagggagttgctgggcattctcaaccattgcagctgtt

SEQ ID NO: 107546 - DNA, 697 bp, Aquilegia coerulea
  Intron number 1 from transcript AcoGoldSmith_v1.002683m (l ocus AcoGoldSmith_v1.002683m.g) derived from phytozome v7. 0 (chr-ID scaffold_1; pos 571168 to 571864 reverse strand)
tattcaaggaaaacgccattaataacgattcaaaggtaagagaattttaattaatgggttcaatttataatttttgtttatgtaatggatatattctaatctcttcaaatatagtgaatttaagagatgttagtgaatagattactgttggaattcagtttgaatttatcacagaggttattgaatatcaatgttattttacattacggtttgtagctcttgttataggttttgattgatttgataaagaaaatagggtagaatgaaatttcaagctaaacatagctttaggtcttttgaattgactatgatgaaacggggcattacaccctggttgatcatattaatctgaatagtttgaagcaaagcgaaacactgatgagttgccttgccttgttaaaatgaggatagaattttaggacagggtggagttagtgaagttttagacctgagaagttcatctttcctcagtattgatatttaaaacattttcgttagttttataagttgaatgtttagtagcctattcgagaattgatatttttaaatttggagagtatctctctatatttgctatcttctagttcgttgtgtgaattgatgtgacagtattgtttttggtattatgttgttcattttgtctacacttagtactgagtattgatatgtttattgaatgatggtttgttttgcagat

SEQ ID NO: 107547 - DNA, 444 bp, Aquilegia coerulea
  Intron number 1 from transcript AcoGoldSmith_v1.011165m (l ocus AcoGoldSmith_v1.011165m.g) derived from phytozome v7. 0 (chr-ID scaffold_9; pos 2382742 to 2383185 reverse stran d)
tgcttatttgttacactagtaacaagtttcctactgtgagttcatcatatccccttatgcttaagttaatttatcaattctttgtggggaatttttattgttatttgatataaaggcctgctttctctgagttctgaccattggagttgtggtttttcttgttggtataaattaatttagattcttttcttttacagtactagtaatttaacaggtttaatgcatttatccccagaatataacaaacacctttttctcattcatggggtggggggatcacaaagtgatttattttcccctcattgttgtttcatccttttgaagtggacaatttttaataattatagtaaagattccattaaagtataaaagtagctattttcaatctgattttgagttgtgtttgcaggattacatacctactgtttttgacaatttcagtgc

SEQ ID NO: 107548 - DNA, 734 bp, Aquilegia coerulea
  Intron number 1 from transcript AcoGoldSmith_v1.014779m (l ocus AcoGoldSmith_v1.014779m.g) derived from phytozome v7. 0 (chr-ID scaffold_51; pos 328623 to 329356)
ataagcttcgaaagaatctacgtactggcctgatcatcaactttttaatttttacttttcatcttcatgattccattcattcatatataacattaactttttattatttgcagttatagatcaagatccaatatacgattttccaaatcatcaaatcaccttacgagggactcgtttgatagatgctgggcaaatccgcaagaatttgaatgaaacgggcatagaatatgagataattaatatctattagttgacaagcaaaagaatataataaggactatttcttgtccaaccattgtttactttttattagtagaaggcatattatgattaattaaattttttttagattaaattcagtttcatgaatgaatattcgaaactttcttaagctttttttttcttagatgtaaataaattaagggctattttgtatttggtccctctagaagatggataattagcatgtggtatagagtttttagtttattagtgtttagtcctatttctgtcagttgactgttagtcaatcaggttgactgaggtcaaaccatccaatttttttaaatacctataataccctttgatatgaatttttataaaacaaccactagatatatcatcatctatgcttgatccaatgatccaatggttgcggtgtctccgccgccgcaaccaccaccgacaccaacaacacagaaatccgtggtcttgttgcttgtggaactggtgtt

SEQ ID NO: 107549 - DNA, 307 bp, Aquilegia coerulea
  Intron number 4 from transcript AcoGoldSmith_v1.002674m (l ocus AcoGoldSmith_v1.002007m.g) derived from phytozome v7. 0 (chr-ID scaffold_9; pos 1625766 to 1626072 reverse stran d)
aggtatataatgtagtttgtttgcaatttttctatttctgatacttccttccagtctttgctttaatatctactggatgtagctcttagttggatggcttgtgattatgcgttcaagagttcattcagttgaaaaagaaatattacttcaatttcaacttatgttgtttcgtcgcattttcttttcgacttcaagtcaactttatattggtcaaaatcaaactattagttgcttgagtggaatccattatttgcacttataatagactgttacatttctatttcttatgcagataacttttcgtagg

SEQ ID NO: 107550 - DNA, 440 bp, Aquilegia coerulea
  Intron number 3 from transcript AcoGoldSmith_v1.000474m (l ocus AcoGoldSmith_v1.000474m.g) derived from phytozome v7. 0 (chr-ID scaffold_11; pos 4436088 to 4436527 reverse stra nd)
cagagaggtatttcgctgttattctcttattaacagaaatgtttattgttagttgcggaatatgaatcgcagaaaaaaaagaaaaagaaaaaaaaaaggcacttaaacattggttagtaggacctttcaatctacattactaacctatcacaagggaataagtgtcttgttacaagttcaaagttgcttgatcattcacttagtgataactttaaattggcactttattagtcacacagttgcttgaccttatattttgtgagaaatgtttgtactctttatcaagttgttttgatcaaatcttatagttgttttcatccaaagaagcctaaagattgctatgttggatctttgtctattctttgctgtaaggagttacctacagaggtgttatttttgtattcattataggatactggtattgtgttttcttgaaaagg

SEQ ID NO: 107551 - DNA, 782 bp, Aquilegia coerulea
  Intron number 1 from transcript AcoGoldSmith_v1.000966m (l ocus AcoGoldSmith_v1.000966m.g) derived from phytozome v7. 0 (chr-ID scaffold_18; pos 1621502 to 1622283 reverse stra nd)
ctcgtagaaggtatcatttaatcaattgttattttcagctaatttttttcatgagggtagattttgttttaatctttctgaaaaatttaagagataggtaactgaaatcctgaaacatcatttgagcaagtctaaagggtagtttgatttagatgatacgtatccaagtcaaaagatgaacaatcgaaatagagtaaagttgtggcgattcacatactttgattgtgatcacaatagttagaatttgttagttcgaacttagcggcatggtatggttctctctcatagactcgcaagaatatgcatggtccaaattattcatttttctgttaaattaccagttattgtgaagttgattttacaatattgaagtcaacaaagtcaccatttcgataaaagtttggtctgaactatttaatatattaccaaaactgcgatacatattttcttgtgagttgttaaaatctgctatctacagttgtattgatttcctagttacttggaatattactagagctaacaagtttcagaatatatcccaattgatttgagtttatggatattatatcttgaggggagaatgttgaatacttgtttcatctagaaggtcgttgatcaaaattttgtcttggagttgtagattgctctcttaaatgaggccagattagtttatcaatgagatcttgttagtgttgaagaatagtttattctgttgatttgctaaatgggtgtttttttgagttgtcacttttttcgatactaagttgaacatgttggcagat

SEQ ID NO: 107552 - DNA, 858 bp, Aquilegia coerulea
  Intron number 1 from transcript AcoGoldSmith_v1.008084m (l ocus AcoGoldSmith_v1.008084m.g) derived from phytozome v7. 0 (chr-ID scaffold_118; pos 266896 to 267753)
ttcaaggtgcttctagaggaattgggcttgaatttgtgagtaatttctcttctttcttcccaaattgttacaagtcaagtaacctttttcatatttgtttacttccccatttttaaatatttgcattatcacatcatctggaatttttgttaatcttaaattgggtttgtttattggacaaatgtgatcttaagcatcatcataatttcaaaatacagtacagaatggtttcagaattgcgaagagtcgtatggttaatacttctatatctagtctgaagatgtcacaattaggtggtattttgagatcttgcaaagtggaagtgttggtttcaaactagaaactgtaacatgtagtagtgttaatcaattcactatagagtatagacaattggctaacatctaagaccctcgaaacccagtaatttgttcagtgtatctggagcacagacatttggatcgttcccttttatattttataagtttagaaaggagaaaaaaaaaagcaatgttttatatgcttttgactactcttgtagaacagtgatatttttcttttgtattgtagatgacataggagagaaaaaaacaaacaaagtttatgtgcatttgactactcttgttacctatgcatatgataaacattaacctgctttacatatgaatatgatttgataatgcaaacatttaacatgttcttcagtgtgatgctattatgttatacggcctctggtttaaattcacttcagtcacctgaaactctgtaagatatatttttgttcataatcatatcgaccaacacataacatattgcatcacttgttgaccgactagtaggtgaagcaattgttggggagaa

SEQ ID NO: 107553 - DNA, 696 bp, Aquilegia coerulea
  Intron number 2 from transcript AcoGoldSmith_v1.008752m (l ocus AcoGoldSmith_v1.008714m.g) derived from phytozome v7. 0 (chr-ID scaffold_9; pos 4911832 to 4912527 reverse stran d)
agtggaaacttcttcttgccggacttatttttcaggtttttatttattatttttttttatttttttttgcattcaatgcgttttagaatctagggttcttagttccttgatgtccttaattagattttcatgatttattgtaatctatttagatacatttgacagaagaagtctttttttttttttttttcttaacaaattcaaagttttttaaatatggttttggtgtctggtggtaatttaatttagctttagtttattttgaaaatgaaatctttttctgacgtcaaagagaaaaaaaaagtggaatctctctggcaagttggctttagctctagttacactggaaaatgattgcatcctgtaaaagtcacagaccttttcaaaatcaccacttttcaaccttaagttattttatttttgaagaattgtgggtaaaactatgcggatattattaacatgttaattagatatacaatttgaattatgtaagaatttagaaatgactttggtcgattagaatctgcatgctaatatttggattggtgtttctacttagatctggaaaaaaatcttatcatatctttatttattataaatttttaacgcccgtattgttctcctatgtcttaacatgtctgtagttgaaactgtagtggtcactatcatgatcttgtctctgtttacagtatattc

SEQ ID NO: 107554 - DNA, 608 bp, Aquilegia coerulea
  Intron number 3 from transcript AcoGoldSmith_v1.014632m (l ocus AcoGoldSmith_v1.014632m.g) derived from phytozome v7. 0 (chr-ID scaffold_37; pos 1656799 to 1657406)
tgtgccagtaagtaatatgttcaactcccactactgtttacctctgcgaagctagatctttgttttggaattgatgtacacaaagttactcataaaaataacattcaacgttatttaaacgcatgaagatggattttgattttggttgtccattgtcgtttacacatccagttacttcttagtatttaggaagacatgcgaaaaggtgaatgatgatggtgtgcatcaaatatgttaatagtgatgaactgacaattacttgaaaaggcaccaacaattaatcttcgcatggcatcctaacatactctgtacttactctccaatttgagcacactcacaaattttcttaatgacgatcccttggtggcatgtcttcatcttcagaaagatgatatgcttaaaggaaatccgtaactgttgttttttcagtatagtaattttagtctttttaagcttcatcactgtttatttgcagaaaccacccattaatttcccagctctaacagtcactaacctctttgatttaagtgatttatagaataatggaagtattgtgtttgcttatctttaagactgtaaaagtaatttcatttgataattgaaggtgt

SEQ ID NO: 107555 - DNA, 793 bp, Aquilegia coerulea
  Intron number 3 from transcript AcoGoldSmith_v1.025777m (l ocus AcoGoldSmith_v1.025777m.g) derived from phytozome v7. 0 (chr-ID scaffold_54; pos 543095 to 543887 reverse strand )
agaagtcgcatctgaagaagattactggttttcaggtaccgtgtcaaattgtactattcatacgtgctatgtctgaacacttttgatttctacttaattgaattttgcaaaccgtcatcggtccgttggtatgaacagacttgccaaatttagttcgtaatctcttatattcaatgacactaagctttccatgttcccttcttgctgataaaacagtttgccccaggaagattttcagaagtgctgattacatcggcggattcacgaattagggttgttgagagtactgatctagtccacaaatttaaaggtattgatagaaaatggcatggtctatgttattatttaggtttaatttcctttgtcccctcaaaagcgtttattttgttgttgtttagtagaactgtacaaatgtgtagcatacattatggcccctctttccatatactttcttatgtttatttgctcgggtgttttaaacatatcaagtttaccaaccatttagaccaaaccatttagaaaatcaacttttaagaagtaatattatattatacatgctttgctgatgtacgaaacaaaagatgttagagaaaatttgattaagtatgatacatagagggatgtgatgggttaagtgtgatcagttttgtttttgtttatatcgctctgcatactcattccaatattcgatggagtacaaaggtgatcaagctcctgtagtttagtggtgacatcaatcttttattgactgcaccttaccttaggaagtgagaacacttgtcaagacacagtc

SEQ ID NO: 107556 - DNA, 625 bp, Aquilegia coerulea
  Intron number 1 from transcript AcoGoldSmith_v1.014614m (l ocus AcoGoldSmith_v1.014614m.g) derived from phytozome v7. 0 (chr-ID scaffold_15; pos 4095654 to 4096278)
ggaaaacgatgtcatttttcacttttgagagtgctttactaataatggacgacgctcgcacatgtaattatggacgacgctcgcacaccaaggtatttactaataatgtagataatgcgagataaccttggacacttctaacctagtcacaaaatgatttcaaacaacaactgaatgccgatttcagattaaacaatcaaaattaatgcaatcgtgataattaatttgaattctcttgtcaaagttttttttagtttttttttttttatttttataaggtgtcaaaattaatgcaatcatgatgattgttccatcaaataagccatgaaatatgtataaaatcatggattatttattattcttcaccatatatgaaaatacaaaatccttcaaatcaaataaaataaacaattaattagtctatatatgtcatttcaaatttcaaaaaccttatatatatagtaatatagagccatgaaatatcattctcaatcaacccattattctaactacaatggattactctttcacaataatctttgtcattgtgttcatatcttttctttctgtcccatgttcttatgttcaagctcagaccacaactaaccattcagtttctgccatt

SEQ ID NO: 107557 - DNA, 639 bp, Aquilegia coerulea
  Intron number 1 from transcript AcoGoldSmith_v1.010369m (l ocus AcoGoldSmith_v1.009488m.g) derived from phytozome v7. 0 (chr-ID scaffold_15; pos 4377368 to 4378006 reverse stra nd)
attctccattaaagttctctatcaagatctttaaggttggtattcgatcaatctttttgttttgtgttgttgttgttagggttaagaatctgatataatcgattcttgtatttatctatcgatctgatcaagtgatcaattcatctctatttatcgcttttagtttggtagattcgaagtatttccaaaaagaatttagggttttcttgttttcttgtaattctatcggtgatagatcaattgtttatgttgcttattttaagttttgtttgttgatcaaggttttaaccatttaataaaagaaaattgaagaaattgttgttgttttgattcaattacttagttttcttcattatggttactgctcagttggtgaatctgatgctaatgcttagtttttattgatgagttcaataggattgagaattaattgtttatctgatcctttgttatgaaaacgtttcccaaaacagacattttctagggaattatgttttacattgatgaacaaatttttttgtttttgaattattattttgctgattgtttgcattttatattatttgtttatttgaattattattatattattaatctcgtttcttatattctgttgttcacagtgcgaataatctacat

SEQ ID NO: 107558 - DNA, 596 bp, Aquilegia coerulea
  Intron number 1 from transcript AcoGoldSmith_v1.008370m (l ocus AcoGoldSmith_v1.008371m.g) derived from phytozome v7. 0 (chr-ID scaffold_10; pos 767654 to 768249)
atttgaaattcatttcatttgaatttagattgcaagtaagtaactagagtacacttctctaaccctagtccttgtttctgtttatttaaagtgagaatagccagcttgttgtgaactggtttactactacttttcttcttctagtttctctgttttttgagtgtggtttttgatttttgtagatgtaatataactatatgtttagagaattttgggttttttttcttctgtaaaactgattgagtaatcatgaagtggagacagatgttttaattgaattataattattattattggtttgtagcttgttatttacattttgttgttatttttttttttttatttcatctatacttctgatgggctcagaaggagaagaaattgtgatgaaagagaaagatgaatcaattaaaatttataattggttgttcagaattagttcagtttcttctatacagctttgtccattgtgggctaatgctggtcatgggaattcagtttcttaaaaatcaatctcttaagtgaaactctccccctctcgctctctctttctcagtctcaactagtaactcatcaaactcttattgctttcagtc

SEQ ID NO: 107559 - DNA, 540 bp, Aquilegia coerulea
  Intron number 2 from transcript AcoGoldSmith_v1.009312m (l ocus AcoGoldSmith_v1.006380m.g) derived from phytozome v7. 0 (chr-ID scaffold_9; pos 1153652 to 1154191 reverse stran d)
tgggtatgttctagaacttctttttattggatttcatgtgatgggtatttgattttattttattcatcaagttttaatttttaaactttatttattttgaacaagtaggccacttaaaatacttaattcgtgctttgattgtaaatttcatcagaaaatagctcaaaatcaacttcaatttagctttgttaattttgaacagacataacacgacactaaaattgatttctattaatggagattcaaatttctactttaatagttcatgtttttaaaccaaaatctctcttgttttgagctctttttgcaaatttcatgtttctggagtctggaccataacaaacatttatactatccaaaatagcttcgattgaatttaattaagttcactcgagatcacatcctttctattttgaactaataatagactaggcctttcgataagttaactgtagtgaataagttggtagctgatatggccattgtgacaactgtcatttgttaatattaagatatctgttcttctttttctgtttgcag

SEQ ID NO: 107560 - DNA, 1001 bp, Aquilegia coerulea
  Intron number 1 from transcript AcoGoldSmith_v1.012156m (l ocus AcoGoldSmith_v1.012156m.g) derived from phytozome v7. 0 (chr-ID scaffold_10; pos 949890 to 950890)
ctgtgaacaagcatttagttacttggcagcaattggtgagggattttatttctttcttagttgcttgattttccattcaattatgtttacgtgtgatctatattctcggaccatggtaaaataaaatgagttgagcatgtcgtgacacacagataaagtgaacatgttttacacaaccttttttcttatgaagtcaggctttgactgcttacttgctcttgtctgatattgccatattacttttttcttgtttctctcattaagttagggaaatttacggatgggacatacattttctttgaaaatttcgatcttagaataatttggaatgccccccgacgttaagaacatctactaagtataaagatccaaatatttggaggttggacctatagctgcagagtgagttctcatgagcatttaaaaagttagagatattacagactgtagccttccgaaaccaaaagatccgaactgcttatagaagtgtagaagctcattctgcaaagtggcttacaataacttataatacataaactagaccttcaagaacatttagacttcttgtatgcattaccattttccttatcaatttgtatgttttacttttatgatgcaatctagaacttgccttcgtctctttctttggatattattttttctggactaaaattcctcatattactttctgtttatcatctcatgggggttaccctgctacttaaggactagtgatattttctgtcacaactactcttaaaatgaatgtacagttgtattggccaaattctttggtgtgaagtgtgaatcaatgtcatgttgcctagaaacttatttaaaccatattttcttcatagatattttaattatttgactatattatccattttgtactttgtgaaaatttccaccagtggaaccttgcttttagcctgaatctggtcacatcatagtcactaaacttctgcaaccttggggaaaattatggttgcaggtggatt

SEQ ID NO: 107561 - DNA, 742 bp, Aquilegia coerulea
  Intron number 3 from transcript AcoGoldSmith_v1.011872m (l ocus AcoGoldSmith_v1.011872m.g) derived from phytozome v7. 0 (chr-ID scaffold_7; pos 640543 to 641284)
gctcaggcgctcgtaagttcatcctgaagccatatttttcgattacagtactgcggttttattattgtcttcagcatttttatttggaaacaattagttatctaatgtgtatatggatatatcagtgcactatatattagtttcatacatatttcaaaatgatgcaattaaccttcttactctatctggattcggagaaggtgttcgctgaagaactttagtatgcagtacatatcttagaacttatggatcggagaccttgtcctcgcctccttgaaggctagaattaattttaggagtgctatccaatccatattccatactgctgcactatcttatgataacggatttttaattttatttatcaaaaaaaaagaaaaattgtttttcaatgtggatacatgtcctgttttgacccttgcgacttttgttttctaataatataattccgtgttcaattttcgtcaatgtggctcaagaacaaggattagataaatcagggcctgtcaggatttacctattccttgtttgtggcacaaaaaagatgatggctagaacagactcatccctgcttcaaattgttttaaattataccttcaagtcgtcaagacacaaatgacatattgttgactgattgatgaagctgttaacaaagtaaagtatgtgttaactataagtatataatcaaattaaatgcacttttccagaaaagtgcagattctgcgtggggagtggtagtgtg

SEQ ID NO: 107562 - DNA, 222 bp, Aquilegia coerulea
  Intron number 1 from transcript AcoGoldSmith_v1.002335m (l ocus AcoGoldSmith_v1.002335m.g) derived from phytozome v7. 0 (chr-ID scaffold_108; pos 210073 to 210294 reverse stran d)
ttcgcttcaagtctgatttgcttgacttcaatcaggttaattattcaaatatatatatatatatttttatattaatctaatctaatctaatgcatccattcaaactattgtacttattcactatgagtttgtttttctatatactgctttagtattttgaacgttattcaggattattcatgttgttctattttgtgaatcatatcttcttttcattaccag

SEQ ID NO: 107563 - DNA, 945 bp, Aquilegia coerulea
  Intron number 2 from transcript AcoGoldSmith_v1.005115m (l ocus AcoGoldSmith_v1.005094m.g) derived from phytozome v7. 0 (chr-ID scaffold_21; pos 3857375 to 3858319 reverse stra nd)
caagtatgttgtcttgtattaattactgtttattgattttgatctgaagttgttatttgtatgtgttttgttgtgttgtatacaatattttgtatttgttatatttttacgggacttaggatagatatattcgtttgtaaaagaaaatgtttaagacacaagcgaataggaaatcttgtatgtatttaactcattaatgtacagaaaatatgtcatacattcagagaagggatcagacaacaattagaactctagaatagtaatctggaaagtagcaattttgactggatttcttctagcttgctgttacttaatacctgggagttatagtaggacggtttgttattgtatcagatattgatgtagttctgattagatatgtgttgcagtaatgtacagcttttctaagaagactgtcaagcccataatacattcatgaatgttatagttctaccttgaggaagtgaaaccttttgctataatcatacttgagcccatattgaatgatattaatagtcttgctttacattgttataaagagttgagtttgcaattatttgtatctagtcaagtaagttaggatattctctttaagtactacctctgttgcatccttgcacttgaaggttactagaaaacgtagaaagcagaagaatggtctgggaataccagtagagactcttgttcatgatctcttgcatgatatgcagcaaccgttttgacatgttacagatggaaagctttcgactaatagattgcattttgttttgtctcattataattaattgttagaatgagatatctggcaatttaatatattcagttggttgcaatcaaaaagatgtaatgggccctgagcccctgaagacatgtttgaggtttctaattcctaatatttttttccgtacaggcaaattccaggggataactcctcctgggtctgtt

SEQ ID NO: 107564 - DNA, 790 bp, Aquilegia coerulea
  Intron number 1 from transcript AcoGoldSmith_v1.010086m (l ocus AcoGoldSmith_v1.010086m.g) derived from phytozome v7. 0 (chr-ID scaffold_9; pos 582829 to 583618)
tctctctctctctctctctttgaggttcgttctcctttctctttcttttcgattaatctttctaattagttaattaattcttcgaattttgatttcgaattgaataaagatttgatttttattatttttagtgttaattaggtcatctacgttataatttcttgtgtttgaagttcaattttgttgtttttagagcgatttagatttcaagaaagagagattttaagggtttcttggggatccaatccacctttcaaattgacattttttttctttcaagattagggatttgattggattcaggatttgacttcctttatgtgagaaattacgttttgtttgcagtaatttgacattggattagggctggttacttaaagtttaggttttttttctaattcattttagtcttgaggtttcttgctggttttcaaattggattttctataattgatgttaatttttcttaaagggttttattttcttttcagttttgcacattgcttagacctcgaaagactgcatttttcgttagccatgatgtgtctctcaaatttcaatatttaacaagttttgtaaattgacacacaattgtatattgtagcattttgtagttgttgtttgattgttaacaaagttagttaattgactgtagttatagtgaagaggtttggttttggaagactactctatgtgtgagtgtgatagattgtattgttttggacatatgatgatgcatattatgaaaattgcaggattatctagacgtgagtcatttatcgcgtgctag

SEQ ID NO: 107565 - DNA, 463 bp, Aquilegia coerulea
  Intron number 4 from transcript AcoGoldSmith_v1.010086m (l ocus AcoGoldSmith_v1.010086m.g) derived from phytozome v7. 0 (chr-ID scaffold_9; pos 584313 to 584775)
gttgtcaaaggattttccaaattcccctcccaaaggtgcgttttcatattttcagttttttttattgaattgccaaccacaggatcagacatatcgctattgtatagattgaaagtagatcactacttgataattcatggcctgaaatgtggtccttggcttttaaaaattaagttgagaggccttttttggagtctcatgtgatttggaccatcaattctccatcattctttggattaggaaatataaccaataaagtgtatgattgagattatctagttggttgattgttatcaactttgtgtgaaactctcataccaccgccttcttttttgaaacaatattgctgtgaagaagttatagtcgttgtttacgtatatatatcattcccagttatcaattatcattatgactttgatgctttttaatgtagggtattttcagacaaaaatttttcatccaa

SEQ ID NO: 107566 - DNA, 904 bp, Aquilegia coerulea
  Intron number 2 from transcript AcoGoldSmith_v1.008021m (l ocus AcoGoldSmith_v1.008021m.g) derived from phytozome v7. 0 (chr-ID scaffold_7; pos 5688424 to 5689327)
tggtattaatttcactttcactttcattatcatcttatatatgttttctaatatactaaaataccttccttcttaaattcaattagtactaggttttattttttagcttctataattatttggtttggaactgttcttcgaaatttgtatgctagtttaacactttgactataagattagaattgatttcaaagaagaacaccagcttatccaaggttataacatatgagtacaatgaaaacataagtaatcacagacagaatgttagattttttttttttatatataaaagtatgaatttcattaacccaatactcaagcatcgtcaggtatgggcaatacagaagaaatcaaactgaaacaggacagaatcaaacctaataaaaccctgaatcttcagctcccctgtcactagctaatctgcttccctcatctaccctggccagtcattcaacaggtcaccaaatctaatattcttcctaagatccaggctggttttatctatatttaaccactcccagatcatagactttttcatcatctcagttttgtgacggctgaaatccaggctagaaggcatcagttacagtggcagaaatcagtaatggggccattttacatcatgatatatgcttgagtaattttaaatatgtgataaactagggaaaaagttaagtcgagtggattcttaatggtatgtacacataaagatcctacattaaaggattgcatttatttgattttaaagagtaaaatggataccacacatctttctgaattctgattagtaatagactcagttgtcattctgcttgaattaatgtcgtttatttcacatattaatagcttttggtgtgctatttgataatgaaatcttgatgcctctcctgtgaacagaaaggcc

SEQ ID NO: 107567 - DNA, 583 bp, Aquilegia coerulea
  Intron number 2 from transcript AcoGoldSmith_v1.024931m (l ocus AcoGoldSmith_v1.024931m.g) derived from phytozome v7. 0 (chr-ID scaffold_18; pos 1003644 to 1004226)
aagtatttgggataccttcactcataagcatccaggtaattactagttcgtgcactgcactaaattctcgatcaaattcaaataaataaacatctgctgtgattattatctaataataagattaacattgcttgataacacacctgtacctaattatttcttttaatcagaattaaaattagaaaaatggtcacctactttggtcactattcagtaacaatgcagtatatagcatcattgactttttcctctattttgctgaaatacaagacaggttctcaattgcttatcaggactcaattgctccatgtacagtataatttgatattcttagctagtaacaaattatattaggatgtagatacaattcattgcccagcttatgtattaagtgataggcgacatttttagtgtgggttctgctgcaatctcagcaagttctcaactgcagtctgagactttcttttcaatcaaatgtgtaaatttaagttttggactgcacttagctggacactagttttgttataatgcattttgtatacaattgtgactggaaaaacagaacgagtagcaggcggtgcta

SEQ ID NO: 107568 - DNA, 561 bp, Aquilegia coerulea
  Intron number 2 from transcript AcoGoldSmith_v1.015914m (l ocus AcoGoldSmith_v1.015914m.g) derived from phytozome v7. 0 (chr-ID scaffold_72; pos 1118518 to 1119078 reverse stra nd)
aacgctttgtaagtgcctctccctcttctagctactttatgaaatttatgatacattgtcacattgctagttgccagctagttgtactaacatttgcccaaaaccgctatcatttggatcaacacacactgtgataaacgaaaattgcccactaaacaagcactattccagtagcaggccttagtgaacagccgaataagcaagctgttatccagtggctgaccttgtgaagaaacatttactatcaaattgcattcatactatttccaaaaccattacatttattggatattagcaaggatatgataccacagttattattctctggatatatataaattttttttttttttttttcgaagttcaaatacatattatttttgaaattcaaaaactgtaagtacaatcttgataagttggaaattgcactttggaatttggattggcaaaaatgcgaaatacttagtcatccataagctagcatgagttttacctttatttgatttagttacacatgagcgttggaatttgatatttgaatgcaataccagaccaacgtct

SEQ ID NO: 107569 - DNA, 515 bp, Aquilegia coerulea
  Intron number 1 from transcript AcoGoldSmith_v1.008434m (l ocus AcoGoldSmith_v1.008434m.g) derived from phytozome v7. 0 (chr-ID scaffold_15; pos 841853 to 842367)
ttaattgtgagttctcttttctttcttcttcttttcaaagtttgggtatttaatgcattgatgtgtggcttacttatacatttgcttagatttttgttcatgatttgaaatgtctgatatcagagataaatatacaaattcatctgcactttttagaaattttttggatgcgtttacacttgtctctcattgttaataatgttttccaagttcaaatcaacatgtgggagctacttattgattccattctatatataaaatgagatgccgtctttactaagttttgcacattttgaaaacattgtcattagagtccaccatattgttcaaattgcacgtacatgatacatttgaaagtgaatttgggaatccagatgtgtaaggtcatatatgtcgccaatcgtttagctagatgtacgtctttacctttggaggatggactaaagttgaactctcagtctctaacctctatcaaatgttaatgttattatcttttggtttctttccccttacag

SEQ ID NO: 107570 - DNA, 812 bp, Aquilegia coerulea
  Intron number 4 from transcript AcoGoldSmith_v1.011046m (l ocus AcoGoldSmith_v1.011046m.g) derived from phytozome v7. 0 (chr-ID scaffold_28; pos 844735 to 845546 reverse strand )
tttgatccattgctgtttctctttttctgtttgtggcaacttccttgactctgtgtcagtcgcttggatatgtcctagttccgtctgtaatctcttattgatgtagtgtcggctgggttcacctacactggctaagtaatggttgtgcaccatcaccccgtttgtgaatcataatactataaataatcttggtggattggaagttggaactgacatcattttcaggcgtgtcagcatcctttgttagttggaggacagtttgattgccttgagttgggattttttttttccttagtatttcttttagtgattcgtcttgtattttgttttctttgtgttatcagatatctcacccccttgcgtatttcttatgtattttgattctctatgacatgatttgattgtttatttttgaagaaataagtcatacatctttagaatacttcacttgtgcacacgcaatttctgcatggtggatctggttaagacttacattcatattgaatttgagggttattggtgcatggaaattttgttgaagttagttgccaaattagttgtttttctctacattttctgtcgttttatagtactaatgagcatctcaaaaaagtactagaaggtagaaacttaatggtaaaccatgcttagtaattttgattggctgtaccattctgaatattatttcattgatatttgtccatgtatattagtattattgttattattacacttgcactttatcctcaccaaaaattacttgctgaacatgttttggcttactgaacttatttgcaggcaacagcaaagtg

SEQ ID NO: 107571 - DNA, 1016 bp, Aquilegia coerulea
  Intron number 1 from transcript AcoGoldSmith_v1.011046m (l ocus AcoGoldSmith_v1.011046m.g) derived from phytozome v7. 0 (chr-ID scaffold_28; pos 847496 to 848511 reverse strand )
ccattcacaccagcaccaccaccactatctaatctgtaagtacacctaccttgaattacgggtatttgttgcttttgattttgaacttttttttttcaaatatggtgaataattgatgttttaactgatatattattatattttcaataaagattaggatttatggagaatgtttaagtgcaatgaaatcatgaaattagagtgtaatgtagagtacccaaactggcaaagttgcggtttttgaagaatttggcatttttttttattgaatttacaagaatttcaattttccttattgagggtatcatttgtttcattgttgaaatttttatgttaaaagcaataaatgtcgggttttatacatagattgaagaaattaatgtggggttatagaattcattataaatatgttatatgaaaggaaatatattagatggaatcactcaagcacattttttcgtcatttggaaagaagactgaagactcagttttattctcttgaattattatgtcttaaaaagttcctagcaataaatatgtatatttatagtcgtgtttattttattgccaatagtacgaaaattaagagttaagactactatgtttttcgtatgtagagttattatgttttaagaagtttctagcaataaatatgtattcataggcgtgcttattttattgccaataacaccgaaattgagactatactgcgtttttcttaagtagaatttataccgcattgctgtgtactatttagtattttctttgacgtaaaaatatcaatagccacatgaataaaaattcgttttaatttgagggatcctcttaaagactaaaatagaatctaggtattgtacaaatgtgtgacgattttcttcctcattagtcaacaactttactttcttcaccatttgcttttgatttaccgatagaaaatagttttttttttcatatagttaatcataggagatattgattcagggaaagggaggagaaagcaagagtggaaggctttt

SEQ ID NO: 107572 - DNA, 541 bp, Aquilegia coerulea
  Intron number 2 from transcript AcoGoldSmith_v1.009865m (l ocus AcoGoldSmith_v1.009865m.g) derived from phytozome v7. 0 (chr-ID scaffold_72; pos 169012 to 169552 reverse strand )
aagctgaagcagtatttgatcaagaattcgtgaatgtatgctatatcaacctttcccttagatacgaaatggacagagttctaagaagaactcaatgtcaagttccactttttctcagtttttggcatcacatccattcgatattgaatttaatatcttttaattatataaaaagccctatcatgtttatcgattatgtttgggaacatatcacctccgtccagttggaaagcttgaatacctcctcagaggaaatgcacaacaaataatttcataattctgaaaatcatggaccccccctggtttcatatagtgtccatgtatctttaccatattattaaactgaatgtataaagtgcgatatcttcatccaaagaatgtgacatctcaatttcagttttgtagcacctaaaatttgaggaaatcatattaagtgaattttgttttccctgtagatactgataagctacatatatattataatccctatttgatggtttaccataacaggttaagctgtctgaatacattgggaaaaaat

SEQ ID NO: 107573 - DNA, 904 bp, Aquilegia coerulea
  Intron number 1 from transcript AcoGoldSmith_v1.024364m (l ocus AcoGoldSmith_v1.024364m.g) derived from phytozome v7. 0 (chr-ID scaffold_28; pos 811343 to 812246 reverse strand )
attttggtgaaagtagcagcagcataagtggtagttctaattctttggtgttttctctcccagccaagttggggcatccaaaagtcaattctgccatttttgaaaggcctgtaataagtgaaccaaatatgaagcttgcaaaattcggatcaaggtgtccgcctggaggtgaaaatgcggttgttgtttacacagtttcgtctggtcggagagacaacattgattattctgaatatattgtttccatgttaaaatcatatcaaattgaggttgatgagcgagatactgctggacgagcctatatgagtgaattgcaaaccgtgctaggtaaaaaggctgtataccctcctgtagtatttgtgaaaggaaagcaactagtttttaaaatagttgagatggatacactagcttttttatttgttttttactgtctttgcctatgattaatagtttgtaagttgaaatttggaagactggctttttgtttttttactgtctatagtttcattggagatgatgataatgaatttgacatgattatgacatgttgctacttacaaaacactattatgacatgatctgcaaaataactccaacacgttacatgtaccatgcattagaaatggaacctgggcgacaacaaaaattcaatcgggcggttggtttatttatgtgataaagtcatatcatgaacctgtaaattaggaacattcatatatatcattagattcatatacagtaggacctctctaatttaatgtcatccgtggcataaacattagtcgaacatattattattttttattttgttgaagaaatttagggtttggcagacccctaccagtgtatgtatgtatatatatgtatagaaatccttaaaaattccctcccattagagtcatct

SEQ ID NO: 107574 - DNA, 472 bp, Aquilegia coerulea
  Intron number 1 from transcript AcoGoldSmith_v1.005805m (l ocus AcoGoldSmith_v1.005805m.g) derived from phytozome v7. 0 (chr-ID scaffold_18; pos 333460 to 333931)
attaagaaagatcattttgatacaaatcaggttagtagttagatcaaactacttctacttcgtttgttacttttgatttaaacccaataattatttagttgttcactttgctttgcttgttgaattatagaacaatattataacacattattatgtcttttatttgtgattgtaattgtattggaaattattgttctattgctcaaatgaattagatttgtattagagtgattttcttattgatagaatgcattatgatttaataatattatgtcgtgatcaatggtattcacatttattgattttgtgttataagtaggcttcagttctgtcaagtctaatttgggtctaaatgctttaaacatgtgtttattgctgcgacattaaattgagtccttgatgaagacttacaaacttgtttatttattggttaaaaggtgagtcttcaagatatatcggctgttcaatttga

SEQ ID NO: 107575 - DNA, 986 bp, Aquilegia coerulea
  Intron number 1 from transcript AcoGoldSmith_v1.008828m (l ocus AcoGoldSmith_v1.008828m.g) derived from phytozome v7. 0 (chr-ID scaffold_18; pos 101477 to 102462 reverse strand )
agttctcgacttgccaccggagtaagtacttctctctctatctatctatatctataaattattgtgagattacacacactatgactacattcttcactgaaacacaaaacacaatcagatctagaaaaacccctcttagggttagggttttctaatcaatcttaacaacccctttgattaactagctaaataattgtaattcactatattttacaagattatattctatctagtactttccagtataatcaataaactgatgatatgttaagaattatataattaatcaatgttatctgttgcattaaatcttaactttacaaacaaacaagaaggaattggcactttaccaagtgttttgttgtgatcagctgaggggtaaccagtagtgtttctcgatacttttaacttgcatcctcaatgactcagaagttttactaaagagaccgtcatttttctatgtatgaataatcgtattaggcatagcactgcccatgtattaggaggtaatggaaaaaaatatatgtcaaccatcagtcttaaatgagaatatcgtgttttagtttgttctacatttgtggtaatgtcggttcccatggtaccacacccctgcactatttgtgagagacaagtgaaatctggaatctttttcggacccaattaaatcatgaaatacgccctgcaattacaactattaacatgaagttgaaagtggaaatttgatgttaaggttctttgctacctttcatctcttcatctgttgctccctttggttgacaagttcttatatccaaagataaaataggtagaaagagaaagtacaatgtcatgtgatacttgttacttgcgcttctacccaactttgttacacttgatgttatatgtagagctgtcaagttccagacttcatgacaaaaccgaactagattttcttatagtttctcatggcagggtaccagtgttttctctgggtttacacggctttg

SEQ ID NO: 107576 - DNA, 568 bp, Aquilegia coerulea
  Intron number 1 from transcript AcoGoldSmith_v1.024619m (l ocus AcoGoldSmith_v1.024619m.g) derived from phytozome v7. 0 (chr-ID scaffold_37; pos 766349 to 766916 reverse strand )
tctacgcgttcacagccacacagagctacaaaagggtttcgcttggtatattcttgttttcatctctggtcgtggtcgtggttgattcaattccaattccaatgtatgttttgttttctttctctaattgtgttttctcaaattgttattcggataatttcactacattttataatttcatattagtttagatttcagaatcgagatctgttcttacattttgtaagttgattttgatttcgtttattttatttttgttccgattgttacgtttatcttcttattttattttaacaaatttgtgaaaaattcagaaaaatgagactgtctcttaatcttagatcgtatcaatttttgagaaaagatatgaaaaattgaaggctgaactgttattttcaaatttcatctattttttttttctgcgaaaaaaaagtttattccaaagattatttccaaatatttaggaaaacagattggcatctttacagttgtgagtgattgtgttttgttttttcatggtgtagatttttatagcatatttgggttcaattgtttttcagaaatcgga

SEQ ID NO: 107577 - DNA, 842 bp, Aquilegia coerulea
  Intron number 1 from transcript AcoGoldSmith_v1.005398m (l ocus AcoGoldSmith_v1.005398m.g) derived from phytozome v7. 0 (chr-ID scaffold_7; pos 4100971 to 4101812 reverse stran d)
ctgaattagcctattctcctttggttctcatacaggtatgtttttcaacagattttaagccacttttcaatacaaacatattgccattatgatccaaaggttgcacacacctaaagaaaaaatggaggttggtaaaataaagtctgcactgtcacatgtcgagctagaaacgcctatatagaactataatagcagactgaatgaatgacagttgagagtaacagatgagaccaccccgtggcaggaggaggagcttgtaattcatctgtagaaaactacagatagtattctgtattccccttggaagaagctgtctcattacattagctgactgaaggcaagaagtcttggtcaaacgtcagtacatcacatccattcacactatagttggacaagctttaaaacttgcaataatttcttacctttaagattttcttttgataaccaccttcgaaattattcaaatactcaaactattgcaataaaaatttctaccaaaaaaaaagttatatatgtgttggtgagtccacctctcatatttactactacagtaaaacctctatatagtcgtactggtgggaccaaattaaattatttagttaggtttgggtctaatttttacgtgactccaataaaataaggctattgctaaataccccaaccacatctaagttctaagttaggacttacaaccccatgaacagttcatagatgatagctcacctgtttttgtgcatgtgtttgaatgtttgatgtgttgcactgcgcggttctgatgtattataacttagactgattgttgtatatgtgcttattctttgtatccagttcacttggttcaa

SEQ ID NO: 107578 - DNA, 527 bp, Aquilegia coerulea
  Intron number 1 from transcript AcoGoldSmith_v1.021745m (l ocus AcoGoldSmith_v1.021745m.g) derived from phytozome v7. 0 (chr-ID scaffold_102; pos 465220 to 465746)
tcgaaagtggccggctggccagtaagtatgcaaatgtctttctctgctgtcattttagtaatgacaataaaaggtttgtactttctatagtattattgctcatactgtttgaagctgacacgcgactatggctatgttttttttttattcatgactactacttaagaagcttcaccgggcaacattgctggctccaaacaatctttataaatttccagtgtacagatcaagtaagtcagttaaatatttgatccaaaatcttgagtttggctgtattaccatttctttagaaccacagtacaaggaacaaagtcgaaaaggtgggagaaggcgggaaggaacacatttgtttggttctataatttggtttatctacatccttataattaaattccaaatttgtatacattttcataggttcatggaggaagaaaacagtatggattctgatccaaacattcgcaaggccactagtgcatcaatgggacaatcacctgtgaaagagcaaactaaaacctcaaagaaga

SEQ ID NO: 107579 - DNA, 954 bp, Aquilegia coerulea
  Intron number 1 from transcript AcoGoldSmith_v1.006859m (l ocus AcoGoldSmith_v1.006859m.g) derived from phytozome v7. 0 (chr-ID scaffold_18; pos 1881084 to 1882037 reverse stra nd)
taccatttgaaaagctgtgggataaattctttcgtgtaagtttttctttcctgcttagtaatttataggtctttatggctgcattccatgatactgtatgttgattatcacaaactggttctgtgtagtactgtagtatttaggaatgtcattgtgaattttacttttgtttaggcaaatatattgcaacttcataaaaatctatgtggtggaagctcttagctatgcactgcttcaacaaattcatacttgaagtgacataagcttgaggcattgcccctagactggactactagcaacttgaataaatacaacttgttgagcacgtggatgctatattgcattttgttagccttctatgatataattttacaacatcacaaagactcaaccattaaatgtaatttggggtagtcaaatctcatattgatggtttctttcatgggaggtgggacataaaattcgacagatgtgatatctatgtcaagtatgttttggtttgtggtgaggggattgttggtgtccagctaatatcccgcctctattgtatatcattgggtagagaaaaaaaataaacatatattgtttgtcattatacagcaaaaaatagttgaaaaggagataaagggagattaacattttaattttttccgtgttagctattatgttaccatccactatcagacattgatctgtagagtggaaaatttatcaagtatcattatgtattatcactaataatcccaatcagattaaaattcacagcctttcgattgatgaggtagtaaagagaagagattcaactaaaaaggttgaaagtgtaatttttgagtcaaggaacccgaagcgtagtcccaattgtcgttcatataactctttttacagtattgtccgttggtgttgtattccattttacaaacttaatttagacattttttttcttcttacagggcc

SEQ ID NO: 107580 - DNA, 469 bp, Aquilegia coerulea
  Intron number 1 from transcript AcoGoldSmith_v1.023977m (l ocus AcoGoldSmith_v1.023977m.g) derived from phytozome v7. 0 (chr-ID scaffold_10; pos 1387137 to 1387605 reverse stra nd)
tagagaaatttcagaaggttttagaccattagttggtaaacaatatgcaccaactattgcttcaacaatttcttgtcttttcttatttcttccacttcttattgtttcactcattttccataaaattaaagcttacttttctcttcaaaaaatcttaattttcattcaagtttatttatcaatttatttctcaattctctcttttgcttctcttgttactggtcttgaacctttgaaatttttctatgcaagttcacaatcaagttacatttgtttgcaagtgttacaaacacttgcatatgttttatatcttttgttacttgttatgtattttattttggttttttctactgatactgggcttgggttaaaagctttgggcttagttcaaactattgtgggctttgctgttgggttacattattatgtttcagtgtttcatagagctgtgttgcatcaaccacccaag

SEQ ID NO: 107581 - DNA, 707 bp, Aquilegia coerulea
  Intron number 1 from transcript AcoGoldSmith_v1.005203m (l ocus AcoGoldSmith_v1.005203m.g) derived from phytozome v7. 0 (chr-ID scaffold_21; pos 2664044 to 2664750 reverse stra nd)
aatccaccaaggtattatatatttcttcttattattgtgtttgaccttgtgatttggggtttttgggattttttctaaacatgtttgttttcaattcattttgttaagattagtgcaaagggcatgttcaacttaacttcacctgtttatttgattcttttcacttaagtaagatgtataagtgtattatatagtttataaagggtatggatagttttctcatatgtcttttatcctgtgggatttttcttttttgcagaatggggtgttttgttttgagttcaattcagtgtttgataaaaacaaaacatcccaaatgataaatatatatacacaccaaaggttgataagttcatttgaatcttatactatatttttcccttagtgaagatgttaggttgttttttttgataagatgttaggttgttaggattcaattgttaataatggagtttgagtgatagacctctccctgttctctctgcttttactaacacctttttttgctaggcaaatataagttttagaatggactgatattttttttggtcgatttttttttaatttatttaactccttgttcaaactgttatcatgttatacagaattgccctttaatttttcatgtagagtacaatagcaaggattcttgacagttttcattttttcttatgtgtgatgttcttgatgcagagttgtgattgata

SEQ ID NO: 107582 - DNA, 722 bp, Aquilegia coerulea
  Intron number 1 from transcript AcoGoldSmith_v1.027197m (l ocus AcoGoldSmith_v1.027197m.g) derived from phytozome v7. 0 (chr-ID scaffold_10; pos 4041698 to 4042419 reverse stra nd)
ataagaaagctgagtctggtgttgatcgtcgaaaggtaattctttctttcattcttttattgtttcagcttgatctgaaatagaaattattatgcaatgtgtctttgatttgttaactaagcagtgaattgcaacattttcacatttgttatgatttgatgattttagagattatagtttagcaatgtaggtaattgccaaacataatcacaattcacaagtgacaagatcatactagttgaacatatcttcgattcggaaaaaaaaaaattagtttcttaatttttatgtattttcatactgtggatctgagcatgtagaagtttcgatcttagctatagtttaatataatgtattttactgctaaagtgtttaggatttctatcattgctgaactttcgtaaagtgcttttcgctgagattcttttagttttgtaaaactgattttgatcctgcttttttttttttttcataaagtaagctaaagcctaaagtcctgcatcccaattagaatatgtagttactgattatttattttcttcgtgtgtatgactatacattcccgcattccaggcttgtgcatcagttcatgtacattattatgtttgattaatatacttttggatgtgtaaaccagcttttaccatggatttatcagtgctattatgaatttaattttataatattgctcactgaacttattgcatcttaaaggattggag

SEQ ID NO: 107583 - DNA, 928 bp, Aquilegia coerulea
  Intron number 2 from transcript AcoGoldSmith_v1.000649m (l ocus AcoGoldSmith_v1.000649m.g) derived from phytozome v7. 0 (chr-ID scaffold_10; pos 1280391 to 1281318)
gttctgcaagcgtgaaaagaatattagaaagtcaagtaagtattgattcctcaagttgcaaatattgtttttgaatatgtatttgaggttaaatatattgcacaattagagcattccattgtttagctccgtcaagttcttgtataaatggtattggagtagaagaactttttttttagatatttggagtagaaggactagttaatgcatggtgttttgttaaagagaactagagaaaacatgtgaaaacaaagaataggatgaaagacagaagttggtgagattacaaaaatttcaagtgacatggagagtgcaaggctgagagaaaaatctagttgatgtttaagcatggcatataaagcccctttgtcagttatgagttatgcttaaataatacctagatatggaagctgtcaagctgtgtggtattaaagtttcttggttcggctaaaagctacattttcagttgccaatcacttcttatctagtgtcaacttatgagaaaggaaaagggaactcactgcaaataggacactaaagaaacaaattgtgtactagtcttttgtcaaagattaaatgataccggtttttcatcctaaagaagcaggaagacgtgtttgtagtctaattggtgtttgttttattacaaattcctttctttgttctcctatgaactaaaagaggaaaatacagttctgttgaagggaatacccacaaaggtgggaaagcgagaaatcagtctgatggtttcttccacacctgctgaacatttgatatacttgtatagtgaattaaatgctattgaatttgtggaaagccatttatgccttaggacaatcatagtgcattctggtatttattattttttaatatgcttatcatttttggaacagccaaacgtatcgtctgccagtgttaatcttgcaac

SEQ ID NO: 107584 - DNA, 576 bp, Aquilegia coerulea
  Intron number 1 from transcript AcoGoldSmith_v1.000861m (l ocus AcoGoldSmith_v1.000861m.g) derived from phytozome v7. 0 (chr-ID scaffold_9; pos 1438034 to 1438609 reverse stran d)
atctccgacacaggaacttcggggtcattttgttggttagttatgttccctagacttattgttttgattgcttaaccatgttcttaaatttcagttttttttttcttgttgttctttgtttagattgttgaaggaatattggactgtatgtaaggtagatttgaagacactaacacacacttatccccgaataaaacaacatattagaattataaataaaccagatagcctataacaattataattatattcattcatgaaaaagttctgcagctaataaatttcgtgtgatctttgattggatacaattattttgttaatgtagtattaattagcttttttatccgtaccaacgtacttgattgaatgattgtccttaggataagttctttgttcatgctttaaacatagaccaatcatgcctttatcacgatttaacttgtacatttgattggaaacatgaattatacttaccgatataattcatgttttccagtcttctctagtttaaaatttgttgcatatgataactatgtttcacatcttgaagggcattacctaagcgcgactgcacaa

SEQ ID NO: 107585 - DNA, 1039 bp, Aquilegia coerulea
  Intron number 1 from transcript AcoGoldSmith_v1.025799m (l ocus AcoGoldSmith_v1.025799m.g) derived from phytozome v7. 0 (chr-ID scaffold_15; pos 1245569 to 1246607 reverse stra nd)
gctactggcaagctttttgagtattctagctcaaggtattatatatattacaatacatttcttcttcattctcatgtcttctttcagcttatatatatatatatattaatttcatggtgttttatgttgctttggaatatgtgatggagagaaattcaaaagcaactcagtcccaagatcctgatcctttctacaaatcttctctatagagaacaaacttcaacaacaagagaatacatatatgacaagatctaaacctaatgagatcttttcttcaaactatcagaagcaccatgagaagaaatagaatgagatctaaacctagcttatgtgtttatctgtggacatgagtgtgattgtgtgaaagaaaaccaagtttcattgaaagagatctcagcagtagaactgaactggtagaactaggtttggagatttagtttgttcttaaaaatattaaaataaactaattattgaaacaaaaacataagtactatgcctccatgactagaaagacagaaagtctcatttcatgtggtatgttctcttcaatcaatgaagtgatgtcattccactatctagggttcattatcattttagtaccctttgatgtgattatcaaggtattacctcttggaggcaccccatgagcttaatattgatgttagaattgaataatgtctttttaatgtttttagatttgtttttttaaatatttgttttgtttaatattagtggtttaacataaatatcattaccaaaaaaaaaaaaaaaaaaaaaaaacataaatacataatacacatttatagaagaaacttaattatgatatgtgttgaagttggtttcttgtagccttttgtttgcctttccataaactagctagaatggcgtagaaaggtgaacaatataactagaattttcaccgctcatttatttttatggttagcaatttagcaaaccattcacatccatggttattattatagaactttaactgcttacttaattccctttccctgccccttctctttctagggggaaa

SEQ ID NO: 107586 - DNA, 456 bp, Aquilegia coerulea
  Intron number 3 from transcript AcoGoldSmith_v1.006699m (l ocus AcoGoldSmith_v1.006699m.g) derived from phytozome v7. 0 (chr-ID scaffold_40; pos 1299254 to 1299709)
tggaggtaagtaatggtattgttctatgttttaggatttttgtcaaaaagaatgttctcaggcatgatggtgtaggactaaaagataaattgaatgttaaaaggttcattgcagtatttagttccattttggcaacagatggtttagatacatttcttccaaggttcaatccaacagtacgggtaaatgtcagtctatcataattcataaccagtccttattgacgtaaaatgattgatttaagatgacaagattgctatacatctgtattattgatgaatgtttataaatttgtcatgatatatttgatttttgaaccatgcattacatcattaacactttttagcgagcaaactaccttttctgtggttcttattgtttgttatcctatttcagtacagaattccaaacttgcaaattctgtctttactcactccttgtatgctctaattgcag

SEQ ID NO: 107587 - DNA, 286 bp, Aquilegia coerulea
  Intron number 1 from transcript AcoGoldSmith_v1.009441m (l ocus AcoGoldSmith_v1.009441m.g) derived from phytozome v7. 0 (chr-ID scaffold_15; pos 447627 to 447912)
ttacggggtaagacatagtaatggaagatcaaaaacgtttcaatagtactagttttccttttgattcttcttctaactcttcttcttcatcttcatcttcaaaatcttattcatttctttcaaattctaaatttctttctggtttttattgttgggattgggagtttttgactgctcttcttcttttcatatcatttgcataaatccccacaatccataatctcataataatcatctctctgtttttgttttgttttttttagtttttagattttttgtttagaaa

SEQ ID NO: 107588 - DNA, 939 bp, Aquilegia coerulea
  Intron number 2 from transcript AcoGoldSmith_v1.009441m (l ocus AcoGoldSmith_v1.009441m.g) derived from phytozome v7. 0 (chr-ID scaffold_15; pos 448082 to 449020)
atttctccagctttgttcgccaactcaacacctatgtacgtaattagctcttattatttacttttttttttcatagtattctttttaatagaatattctaaaaagttataaaagagtgcttaaattttaatcattttgaagttatcttcattaaaagagaaaccaattgaccaattgtttatatcttaaaggtggttgtttgttgttgtagttgagaatttgtagttttgatttgattatgataattgtattcaacaattttgacaaaaataaatatgaaaaaaaaatagaaagtttgaatcaagacgacaagacttgtttagcttctagatgaaaatgatgtttaattaagacttttttttttttttttaatttaaaaatagataaaattcacacacaagaccaagagagtgacttggtctactttgggtaaatatcaattaaacttaacatttagaacaataatagtacaacttctgtttgaatcatgttcaacagtttgaacaataatataaattgattcttcaccaaaaaataataaatgataatattgtaaataacgtaattctaaatatgagtgtttgttaataaatgtaattgaatgctcaattaatattaattatattccacgcaaaagccctgcaggaaggaatgtttatctcatcattaaatgcataatatgactactgtagaacaaattctacaggtcaaaatcttccaagatattgcaatatctgatctgttttctttggtttgaaaacggtttattgacgggatctctgtattgggacactgatagttgtttaaagtttcttgcaagattttgtgaagtttatgggctaatatgtaacagttgatataatgatatgtgtgttgcatgtctcatgtatatatatgttcattgtttccacagggtttccgaaagattgttcctggaag

SEQ ID NO: 107589 - DNA, 359 bp, Aquilegia coerulea
  Intron number 1 from transcript AcoGoldSmith_v1.008625m (l ocus AcoGoldSmith_v1.008625m.g) derived from phytozome v7. 0 (chr-ID scaffold_6; pos 5388714 to 5389072)
ggcttacacattcaaggatagaagaaaaagcttaaaactatcatggttgatattgtggtgtgcatatttcttaaggatttttgcctattgattcgtccctttttgtaaataaagatatttttggtttgttttgttagttttgagtgaatatcacttcagtttgtatcattttgttacatgtaatccattggagtatatgtttttcttttcttctttttttataaagcattgtatatgttgttgaattgtgtttaaatagttcttctttcatactgctcttaaattagttgaaaatattactgaaatgagttcattattttgcagacaaggaagattccaatttcttcaaccattgagat

SEQ ID NO: 107590 - DNA, 997 bp, Aquilegia coerulea
  Intron number 1 from transcript AcoGoldSmith_v1.007661m (l ocus AcoGoldSmith_v1.007661m.g) derived from phytozome v7. 0 (chr-ID scaffold_1; pos 486609 to 487605)
caatatcaaaaggtcagattttttttattattttttttaatttctattaggtatgtttaatttgtttgcttgattacttgtatattgatttaatacttacaagaattgtttgttgaagttaattataaattcgacatgattgtgtttgaaggaaggtttgttaataatgaaatatgtttaaatctaacaaagaaattaccctttttaatgggattcttgtggtgcatagggatattggtttccaaggatgtgttaatttgaacgttttatataattcgaaaatagtgaaaaggggagctccacttacccttgtacagttagatgtcgtaaacacattgttcaccgcaaaatcctaggtagtgcgtcaagcctacaacgtaagttaatgattgtcaagactgtattttgtaaatgactacatatgttgtcagatgttgaataaaaaaacttttaacctattcacatcacactatcacagtatcatactgtacatataactatataaattttccagttaacacctctttaatagtagaagaataaaaaataaactgtgaagatgtttccaagttgtctgccacttagcagcacatctaggtcgtgtactgattaacctgcatgacccctcataataggcagaactcaggaatcacgactagaagtttttaaaggcaagtggtggaacatcaaatgaaaatatagcctctggcttactaaaaccttggccaatgcattcattttgatgatcgatgtgctaaattttttgaagtggttaagtggctaataaattaaactacattccccatgatgttgaatgtaattgatctaagtagttaataacttaattttagacggaatctttaaataatttccaattcattcttaccttaaacaagtcactgaaaatttaataaatatatccggaaacattatttcaattgcttcacattttgtatttacagaagacgaagctcctgcccgagttggcttcttgggt

SEQ ID NO: 107591 - DNA, 1021 bp, Aquilegia coerulea
  Intron number 1 from transcript AcoGoldSmith_v1.020880m (l ocus AcoGoldSmith_v1.020880m.g) derived from phytozome v7. 0 (chr-ID scaffold_1; pos 710311 to 711331 reverse strand)
ctgctggtcataataagcgcaaaatcattcaacaggtatggattattttatgcgatttcatctttttagagaatttcttattatttatttttttattttttagagaattgtgtagagatttattataaattaatcagaatcaaactgattaattgattagggaaaaataattatacgatatattcatgattttgttgtatcaatgatcaaattgtatatgcctaggttattccaaaacaaagaaatataataagcttattgagttatgtttgttggtgaaactgaacatataagggattttgaaacgtggtggtagcactagttatcttaagaaatattagtggtgattttgaaattcttacgatctctaaatcagccttctatgtttcacatttcaaattgcctacgtatcacaattcaaaatgggtggtttgtgtttagtagaggatccctagtccacaatggggtcaattgcaaaatgagaattatgtccagccctgttgaacttctaagtgaacttaactgcaaaagggttctcattgttgtatataagagcattgtcacccttccttatggtgacaatactactttgtattttgaagattgacaattgaaatgccataatcatctaccaactaggccattgtggacgtctttaatttgtctaatttctgatcaacccttgtccatatagaacagactataaactttgtctccagcaaagccactggacattttcgcaattattttggccaatttagactttagagtgatgttcaggagcataatatactgaggtagaaataaactttctattacaagaaatttccattttttaattcattatcctgtaatcagaatcttaaatgggtcgcaaacttgttataagattagcttccaaggaaccagcctttactttttacctttcagtttctgcagttcatatatttattaacattagcatccttttgctcttttgtttttaggccgtctacagtgaactctgcaaaatagtggactc

SEQ ID NO: 107592 - DNA, 663 bp, Aquilegia coerulea
  Intron number 1 from transcript AcoGoldSmith_v1.005986m (l ocus AcoGoldSmith_v1.005986m.g) derived from phytozome v7. 0 (chr-ID scaffold_27; pos 2293496 to 2294158)
tataacctctaggaacgaaagtgtttgtaagaaacctttcacatgacaacaacaaattcaaaatcaaaattctaaaacatggtcacaaagtgaaaaatgaactaaagtatgagtcaatgaagtacaaatgagttctccagcataaacataagctccactgaaagattttgtagaaattaaactatccagtactctgtagagaaaaattgccctgtaatagagcttatataagattttgagaataaaatgacaagtttagaaaagattaaagagatagaagaagatataagattaccatccaatggcttgaaaagagttgtatgcaaagagatagaaattcgatggtcgtgacattattatttcaattttcaatcacgatctactgcagactgcagactgcagttctcactgtttctgactttctggctttctgctcagttatgttatgatctagcgcgcttggcttacttgtggtcgttaatcgcaaatcgcaatgcgtgtgacttcgtttatgacttttgctttggtatgttattgggttgggcccacaattgacgatccaactcatggatccagcccatagatatattgctggacagcccaagaataaccattcgtcagtcgtcagtcgtcactttcagagtttcagacaactttcgtttc

SEQ ID NO: 107593 - DNA, 948 bp, Aquilegia coerulea
  Intron number 1 from transcript AcoGoldSmith_v1.027631m (l ocus AcoGoldSmith_v1.027631m.g) derived from phytozome v7. 0 (chr-ID scaffold_30; pos 2695361 to 2696308 reverse stra nd)
atctcatctccaaggaatccaggtatcaagagaaggtaagggttgatcaataccttgttaattgatgagttgtagtaattttgaagaagaagaagaagaaaaagaaaaagcaaaaaaatgattttatattctataagtacagtataaggttttgaatccccatgttagtgaaatctgttatctttatattaaaagtcaacaatatcaagaatctccttcttttacgtttagttgtcaaaaactataaaattctctttccctaacttagatgtaagtttatgtgcattaggttaataggtgtaatcttttatttcttgggaattgtttttttcttttttagttttatttcttctcatttttgtctgtcagtaaggtaattaagtatgttttggatcaagaagccatggttaggggaagatgtaaatggacagattgtggagatggtcattgaagattggagattggagaataaacatgatccttgatatgaccacccaaaagattattgttattggggctattatctagttacaagtaaaaggcatatcatccctcattcataggccacagtcttatctttcaagtagtcaatcttttttcacttgatattggtctttcttttaccttttcttcattatgaaattaaggtataaatatgtttcattttattttgttaagtgaaccatatcatattgacttatatatctctaatcaaaacctggctatattgtaaggaagtaggtaacattattgttcttcatgtgatcttgttctcttaataatgaatatatgcttcatattttttttttttgatagaatatatgcttcatattgtattgtagttttcatgtgttaaaatgttttgtctggtgaactgaaaagaacaaaatttaactttgtgctacatatatatattatatgcagaaagagtcaggctaagaaggtggt

SEQ ID NO: 107594 - DNA, 674 bp, Aquilegia coerulea
  Intron number 1 from transcript AcoGoldSmith_v1.004925m (l ocus AcoGoldSmith_v1.003140m.g) derived from phytozome v7. 0 (chr-ID scaffold_28; pos 1419130 to 1419803)
caggtatgtgagtttaatcttttatattgtcttgtagtttgtgttttgagtaacattgtcttttgaaggtaaagcttctggtgtcatggcaaacttgtatataatcggtttcattgctaatctagagtacactatgcttactccaatctaattacgggaaaagactagacttttcactcacttcatcatgactacacgattaaacataaaacgtgcaagagatggcccgactggagcagggcggataattacaagtttataaaagtagatggtctgtgagaatttgcctgagactccatgtatatctcacatgagttttatctttaatttgacagattgcaagagtagagatgtagggtcattttagtttatgccaataagtgtcatagaagagtgagcttcttagtagagcagaaagtaaattctgaataatattaaggaagatagaccaaacactgggtgaagtcttctaccagaatacatatctagtttgtaattaatatggtagtaatacgctttaaccttaacaatacacgttttatatttacatcgagtcatttacctcaaataaaactaaaacaaacaaagtacagaggcttacctgtttaactcaaacgttttatttaaggcctaataggtcttcaattttttaattgcaggaggcaatcaagtgc

SEQ ID NO: 107595 - DNA, 601 bp, Aquilegia coerulea
  Intron number 2 from transcript AcoGoldSmith_v1.019437m (l ocus AcoGoldSmith_v1.019437m.g) derived from phytozome v7. 0 (chr-ID scaffold_18; pos 1573143 to 1573743 reverse stra nd)
tcttgatcattggagatcaaccaaggtaagcacttggtcttttgatttttttttgtttgtgtactgatagatgatcacttgaagaaatcctatctatgagattgtgcaaatatcagactaagtagaagataatggcatacggtatgataaagacaaatctaagtatcatttagagctgccataacagtaattccattttagtctttgaataccttatccattattattgaattaggaaatcatatatctatatattggggttcttgggttagtgcactcttgtccaacacgaaacatatcatctacatatgtaacactgctagatgtatgtcatgccagctttttctgtgctcactgccagtactagatgaggcggatattgttattagtgatctgttaataagatgatgcagtatttttaaggtggttaggctttgaaatcattgatttgatttacaaacatttggaaaaagtccatttggtgtctatttttcctctttcaatttttgttcttgctgtatttttcaactttatagtattaacattttttcgtttttggtaaatttggtcaggagggttttgcttttgctcactgtacaga

SEQ ID NO: 107596 - DNA, 670 bp, Aquilegia coerulea
  Intron number 1 from transcript AcoGoldSmith_v1.024495m (l ocus AcoGoldSmith_v1.024495m.g) derived from phytozome v7. 0 (chr-ID scaffold_9; pos 6686836 to 6687505 reverse stran d)
gaaggtgaggcatatcttctgtcaattttgtactgactttgctgtgtctttttgatggattgtgttttgattcaaaatcctgattaattgaaactatattgcattctatgtcttctgtcaattttatctactcatatgaattaattagtattgaggttgctatgccctttttatttgatttgtttgtcttgatggtttaaattatgttatagtaattggaatacacagaaatacgttttactgttttctttatctttgtttgtgagtttgattttttttttttagctttgaatcccttgatgtagctttgtttgctttctagtcgactagtcgtttcgttatattgtaaccacggatatctcaacccttggtaatcttagtataattttattcatcatctatataatatgatgatccttcacttctcaagaaataaatataaatagtaataatgttatagtcaatactttttggtgtttggatttgtgttcttaggtgttgtgtgtattaccttttttctctctctaatgataggtggagctatcaattctgtcaagaattagccatccgaatattatcacgctagctggattcgggaaatcaaaacattccagatatctagtttttgaatgtgccccaactcatagtctacattactaactaggatcta

SEQ ID NO: 107597 - DNA, 953 bp, Aquilegia coerulea
  Intron number 1 from transcript AcoGoldSmith_v1.014131m (l ocus AcoGoldSmith_v1.014131m.g) derived from phytozome v7. 0 (chr-ID scaffold_10; pos 389932 to 390884 reverse strand )
ggacttggattcagttgagctcgatttggataaaggtattttctctccagttacattcagcttctcaataaaatctattttcagtatttgttttttcttgccagtgatcaaatcatgcaggggtagtacgaactgtgggaacactatgatgctttagggaatataacttttcgtacataatactttttctttgtgggaaaaccattacaccatctccaatctagcttgaatgaatgaactaggatcaaatcttcagggtttgtcctgaagcaacaaggcaagctgaacaagcggtccacctattaatcattcaatcattcgatacatttacatgctaggtttctcgtaacaaaagaatccccatgtccccaagccttatatcaaccatttctcttccgcaatgaaatacataatttacatcataaatttgttagccgttacaaattacaaatacacatgacagatcaccatctgaagaacttaactaatcagatatacatccacaattccatcatttccatgaagttgtgcatctcacttcctagaacgccccctgattgttatacttgattctgtaactttcatgtatgttttccgagtgatatagtggcttatggtagataaataacagtaggtgatattgttgtcaaagcagtgagccagtgacaccgttgattgccacatgccatgtcaactgcaggatctgttgtgaaaaattggtcattggctccctaagagtatgctaaccttctctgtagtttaaactttttggaccctgataccattactttttctagaaatagtatgctacatgctattagtatgattcttgctcatataacactcaaggctgagtgggttctgagtttaaatgttcattatctactttgtttgaaaatccaaagagtgatctcttcaccttggctgcaggtggttttgcattgaagaaacaa

SEQ ID NO: 107598 - DNA, 988 bp, Aquilegia coerulea
  Intron number 1 from transcript AcoGoldSmith_v1.001516m (l ocus AcoGoldSmith_v1.001516m.g) derived from phytozome v7. 0 (chr-ID scaffold_9; pos 5259034 to 5260021)
ttaagcgtgttgttgtcaaggttttccgcattcttttcaactctttgtctattaattattttatgtttttgcatttttttttttttttttttttggtttagaattttttgattctttgtttcttgtttgtgtatagaaaccttaatcaattcaataataatttaacgatttgaatgctaaacagtaactctgttttctgagatttatgaattttgtctggattgattgattgattgattgctgtttggactgaaaatgtgttagatagagctccaatttgagttcaatctgaattcaaattaacatatttcttctaaattgagttcatttttatttgaagttacagtgaacactgacctgaatgttctattatgttttcaaagcttgaaagaagaaagaaagaaaaaaaaacaaaactaatgttacatttccagaaatggctgagacgaggtggattatgttgtcagaaacgatctaaagttaaatgtattgataaaagatgtggcttttatatttaagttattgaagaatatgtattgtgaatttcttttaaagtggtattttgataaattgatgtagatgtcattcagtaatttggcatatttaaatgctaaactcaattgatggtgatggactgatggttatgatcttttggtttgatgagatatagagcttaatttgggaaggaaaaaaaaattattcgtgatgtcattaattatgctaaggaataagattttcatattgtgacaatgaagattaaatgattagtccttttcggtttgcaaaagattatgactgtttactataaacacatagcttctcttttgtcttttttaaattgtacctccgcatattgttcttggggttaatccattcttaaggaataagggctttgtctcccttctgcaaaaggtagcattgacttctgaattgttgtttgttttatatcttatactgaaggttggaactgctgttgtcacccgatctg

SEQ ID NO: 107599 - DNA, 594 bp, Aquilegia coerulea
  Intron number 1 from transcript AcoGoldSmith_v1.005190m (l ocus AcoGoldSmith_v1.005190m.g) derived from phytozome v7. 0 (chr-ID scaffold_1; pos 7550906 to 7551499)
tggtcctgtttctactacttctgatctaggttctggtaagttaaactaaagacttcttccctttctcagttatgtttttgttcaagtttacatttttaaggttatttatcatgatgggtagttttaatttttgtgttaaaaaaaaaaaaatatttgcatttttctcttgatttttcaattttttttttttggtggagtggttgtagtgaggtcagtaatagagttctgtatgtatctttagctagctttgtctcttttttgaatttttcttcttctttataatcaagttggtatcaggtttttttttagtgttccatttgttgttctacatttttatggtttgaactattctgcaagtggtttgaaccctttgtataattttcttctccttttatactgtttgaatttaacttttatgaattattttagcgtttttagttgattgtgcatatgcgcaatttgaaatagatttcaccttatgtttatgtatgccttgttttaattgctgcattgtagctaaattgaatttgaagtgaagtttcctgcatgttcttgacttcttttttatgtcatataaaagcagtagaaggactg

SEQ ID NO: 107600 - DNA, 936 bp, Aquilegia coerulea
  Intron number 1 from transcript AcoGoldSmith_v1.002820m (l ocus AcoGoldSmith_v1.002820m.g) derived from phytozome v7. 0 (chr-ID scaffold_10; pos 756294 to 757229 reverse strand )
ctcttcaatctctatatctcgttctcagtaagtcataatcttcttttttggatctatttaatcaattcttgtagctaaactttacaattattagttttaccagtttaatttattgttattctgcgaatttgttaacgaaatttcataatttagtgtttgctaaagacgtgatttttataaatatttgtgaatttcgtttcagtagaccaatttatctctctcttgattagctctattgtgtatttatgttctgatttatcaaattctgtttaatatgaatatgtaaaattgtagagatagtatggtaacaaagaggaaataaggttaataggtcccttgtttttcatcagatttaaatgtttgacatttgtttcttagatggtgcttcataaaatacgacaatttgtggagaaaatattaacgggttatggtatgtcttggactaggatagaacttagaaggcgagtttgggtttgatgtatatgagtatttgacaagttttaaatttagttattattgaaagaaaatacttttctaacaagcatgcagtaaacgaaaggcgactcaaatgctgttctgttctcttactcgttaaagatagacaatatcaaacaaactatggaattttatttaagaaaaaatatctttgtactaacaatctggtattcgtggttgaatagtttaaatgtcacattatatcatattttctcatattcgttaacttgattgttatagtcttctgttgtctatccagttttgttatttgcagcatgtggtttggttttattttttctgtagtaaggatgtattttcactaagcaagttttagtagttcacttaactttagtacctgtctgattacttttatttgtataacttattatgttatgtaagattatatatattgaactttagtgttttctgtagagggcataa

SEQ ID NO: 107601 - DNA, 480 bp, Aquilegia coerulea
  Intron number 1 from transcript AcoGoldSmith_v1.021552m (l ocus AcoGoldSmith_v1.021552m.g) derived from phytozome v7. 0 (chr-ID scaffold_6; pos 7453472 to 7453951 reverse stran d)
aacccaatcaacactgttttcggtaagttttctgctgtcttgcttttatagatgtatatatctctattatgtatagttttgctatgtatgattatgttttgtccaccctaacctgtgcctcacaccttgttaatattgaagagaccatccagaccacattgatgcaccttaaaccttaattagtgcagttgtgactttgtaggtgataacttgaaacttgatcacttctgtacgaaaaaaatcgtttattaggttttttgcctatagctagttttgtttttgtaatggtttagtctctattcttaatggcttcaaagttcaaactgctctgcttgaaaaaaaaattaaattcacatgtcaggcaaataggggtcttaacctaataaacggtttttcgactgtatgaacgttggcttctgctggtagtaaattattgaacaatatacctgatttttctgacttgtttttggtttatctcag

SEQ ID NO: 107602 - DNA, 805 bp, Aquilegia coerulea
  Intron number 2 from transcript AcoGoldSmith_v1.008733m (l ocus AcoGoldSmith_v1.008733m.g) derived from phytozome v7. 0 (chr-ID scaffold_9; pos 5290641 to 5291445 reverse stran d)
aaaaggaggtaatatttattagttacttttttgcttttttttttttttttttttttgtcgacagtcttattgatatgaaggttttttttttttttgttgttgttgttgttgttggaccctttttttcccagaaagttgatcagttttgtggtcataagtacttggctttgaaatcccatagatcggtttttttgcaaattattcctgtgctttatacccaaacattgatcaagaattgcagatgtttaccaatctgttgccggactgcaatagccactgaaggaacttaacaaatgttttttaagaggccgaccttagaattactttgaatgtcgtcttattgacatagacggctatttggacatggctcggccaatgtaaaatttaacaaatattgggaccaagttcaacttgttgacaaactattagaaactttctcaaatacatattagaatcaaattgattgttgtatctacgtcccactcaccttaactgaatagtacacacctattacaaattctaatatcggaggaaggcaagtcatccatgtgctacaactaggtcattaccaatattatgaactaataagtgagtgtttcttcaactccatagagaaaacgtggtgatactgtctatgcttcttctcccgaatcccactgactaagtcaccccccacccctccccctctttttttactctttgtatctctctctagttatcaacctatgcttgtatgaagctgtaacattcctaagtagttcatggtggttgcaggtcggtctggctctgaagaagctctttgaag

SEQ ID NO: 107603 - DNA, 546 bp, Aquilegia coerulea
  Intron number 1 from transcript AcoGoldSmith_v1.024348m (l ocus AcoGoldSmith_v1.024348m.g) derived from phytozome v7. 0 (chr-ID scaffold_1; pos 9368078 to 9368623 reverse stran d)
ggtcttctctcatccaggtaaaaaacactactttgtattagtttatattgccttcttcaaaagatttatcagtttgcatgacttggtgatagtgtagttttatctgagtagtctctccttttgttctggcacataataatcttccattcatttcctttctctgcccttctgtttaacagtagtggatcttagcaacaagaccaatgatttggctgctttaaaagtcgaaaacttgcatattcatcttcatggaaaccagactgatttgtcattgactgcgaaaccaaaggacttggatcaacatgaagaagttgaagaaggggaaacagaaaggattttggttgaaaaatctggatgactttctttcctttgtcttgggctcttggcaatacttaaattacaatactattcacttcaattgtgtaatatgatttggaaatacatttatgtcagtttgattacatagaaattattgtgtttttgtattcatggtttcaattatcttgtaaagaccaaaattcagatagctcagatcttgaaaacata

SEQ ID NO: 107604 - DNA, 815 bp, Aquilegia coerulea
  Intron number 1 from transcript AcoGoldSmith_v1.002410m (l ocus AcoGoldSmith_v1.002410m.g) derived from phytozome v7. 0 (chr-ID scaffold_49; pos 1000778 to 1001592 reverse stra nd)
tgtgggtgttcttctatagaggattttcgacaagcgtaagtgctcattattccctttttttatctgtttgatttgattttaatttttaatgcattgtggtggttgtttggattaaaaatgtgtttttttaattattttggatattttgatatatgactaacttctacagcttgacataattagaagcttataattatattgcattaatgtaaaatgggagaaattggtagagctatttttaggaagaactgaagcttacggtttaaaggaaaaaaaaaattggacgaatttgaaatgtcacctctaacctcttgttttacaatgggttcatgttctcaatgaagttattatcatttgattaagccttaaataatgttgtaatcttatatggctatatagataattgattggttgaataaatttcgtacacacggcattattgtgatgacgtgaaagaagcacttgtaaaaaaattatttggaagagcaataggttgtgatttttactggtttatatgatttattatcttttcttatgttataggatcatttttcaagtctaattacaggaataatgtctgagatcttatagcaatagacaatctctatctaagtctacatggatgaggttatcttggttttttcccattgtagatcattgccctatgaaatatcaaatatgcactgatcgttggagtttaagaggggtgggtatcgtagaagtgacttttttttatggcaaattctttaccaatgcgccttccttttcttcttattgcaggtttccaattgtggagcctgattctggtcacacca

SEQ ID NO: 107605 - DNA, 562 bp, Aquilegia coerulea
  Intron number 1 from transcript AcoGoldSmith_v1.001959m (l ocus AcoGoldSmith_v1.001959m.g) derived from phytozome v7. 0 (chr-ID scaffold_37; pos 1508273 to 1508834)
cattgcatttacaatctcaatctggtatgtaaaattaatgttcacttcttctgaggggatccctttttttatttagtatttgttgatagatttaaatgttgcatttttattgattattgtgaattgaggattgatttattgaaatgtgagaaatttgaatatatctgatttttaagtcttcatatccaatgtttaagttgtttgtagaaattggttttttttttttttttttttaagtttgatattcaatgattattctttatactttttgggcaatgttatcgctagttatctagaataaaggtgagggagtctgtgatcaatgagccttgatgtctatagctttagatttttggggatctattgagggatatttgagtagaatttctttcagcaacgaataagatttatataattgttatgttgttcggtgagaaaactctacctgtggattctctacttcgattattttctttaatctaattttcatattagacatgcaatgctgattaaagagcaactgttgaaacagacaacaaagtagttgaggactcgagtactc

SEQ ID NO: 107606 - DNA, 746 bp, Aquilegia coerulea
  Intron number 2 from transcript AcoGoldSmith_v1.001549m (l ocus AcoGoldSmith_v1.001549m.g) derived from phytozome v7. 0 (chr-ID scaffold_1; pos 976383 to 977128)
aggcagagcagttaataaaggaggtccttgctgaggtactatcttttgtgatgtttattcaagtattagaaagttttttgtgttgattacatatgaatgtgaagtttagaatttgttaattgaattcttacggtttctttgattttgcactttgtcaatggtttgttttgaacttattggaatacttgtgtagaccatagttggtcccgatgctttgacgcctgtatggtactttgtatttgttacatataataatttctttttttatctgtcgaacttctccaaagggccactggtctttatttttctgtcacttatctattagtatgtcctcgtgcaagtatgcaatagattgatatacaatcttcttcctcattgtatcctgccaaacccaaaagtttttgcattttcttatggcattgagctattgaggcagtttttattttcagattaatgtaatattacattaattattgatttataataatgccccatctttgttctttcacttttgcccttgatatgggttggggcactgctgcttatattggtgatcatattaacccaattatgctagataaacattcgcctaatgactagctgtttctaatgttctagtcattggtaccgacctgctgagcctcatatctaccgttttaattgttctttatgtagtataatctcagtctcatttatcatttatttttgtaggctgaatcagggggttctgggctagctacgaaaag

SEQ ID NO: 107607 - DNA, 642 bp, Aquilegia coerulea
  Intron number 1 from transcript AcoGoldSmith_v1.003114m (l ocus AcoGoldSmith_v1.003114m.g) derived from phytozome v7. 0 (chr-ID scaffold_60; pos 790584 to 791225)
tgtagacttctgtgttactagtccacctaactggcgtatgttctcttctactactaacttggaaactctgtttaagtcacatttcttcatcaaatggttttgagtgttttactttcttttattttgaactaaaacctcaacttcttgttgttgttgttgttgttgttgttgtttttctttctaacatgaacacgtaccctgttttactctgttttctgattctccaaaagagaaaaatgtttttagtgacatttcatcaaatggttttaagtgttttcttataccctttctttgctttcaatgtttagctttgttaataatgttagatatttatgagcacaattagttcaatctgttcagctattattactttctatgtttgatgagtttgagggttttcatggaaactctaataaaaagtatcaaaaaatgctttatatagatatatttcattcagtggtcagtcagagggttttaactcatttgttttttttttcttttgatttcaatcttttaagtcatcttctttgttgttgttgctaaatatttatgagtttgaggggtttgtagtgtttctttcttccttgcactgaaatgttaacttgaatgcagcggaagccatttttctgggttttcagcatt

SEQ ID NO: 107608 - DNA, 901 bp, Aquilegia coerulea
  Intron number 1 from transcript AcoGoldSmith_v1.010100m (l ocus AcoGoldSmith_v1.010100m.g) derived from phytozome v7. 0 (chr-ID scaffold_10; pos 1962888 to 1963788)
aggttgatacaatgtcggactactcacaaccgtcgttcaagttcatgaaaatcgtttgaataaaaatccgattctagttggtacaggacctttcatggttccagtgtaacgatcatgcattatgtattgagtttctttttcaaagtttcctccatatggtgcatcaaattttatttatccttgaatttattagttaccgcaatttatggtcggaatgaaaaaaaaaggggtaaccctaaacattttcaaaacaaaggatgcccgagtttgcaaaatagctacttgaatctgtaatcttgaaaaacttatatagcaaccaagttctaaatagctactttgcttcatagcaactaagtcctaagtcccaagtcctaaacatgtaccaaccatctattataaaaatctataaaaatcatgaggatttgggataataatggttctcaagatttgcatagatgtttaaactttaaagaaaacaggtcaattaagagttgcaacacatttaccattaaagaatctgaataaataaccttggtgtgctccatacttccatgtggtccatagaaaaatgttgaactttcctgaactcctgtcacttgtgtgataatacaaaaaccaattatacataaaggccctgaaaacatttgagtctgtcaattattaaaactactagtcagtcacaactcacaactagatctcacaagaaaaagatctgagaagagtgaggatgatgagcagcaagaataataagcatcattttgttctagtacatggtcttggtcatggagcttggtgttggtataaggttagaacattacttgagtcattaggacatcaagtcactgcacttgatcttgcagcttctggggtgaacctgaagaaaatagatgaggttcataca

SEQ ID NO: 107609 - DNA, 1052 bp, Aquilegia coerulea
  Intron number 1 from transcript AcoGoldSmith_v1.001048m (l ocus AcoGoldSmith_v1.001048m.g) derived from phytozome v7. 0 (chr-ID scaffold_30; pos 2520855 to 2521906 reverse stra nd)
gagctactggtggtgctcctaagttctttcgcaaggtgattactaccaaatcttttcaatttcataataattaagctttttttttttttttttttttataatattcaaactttattgttattctgatttctaatatgttgataaagataaaaaaatttggtggatcaaagcaactaaggcagatctgattctgaatgactcaaaagactaatattttttggaatattgtacaatgaatctttgaggtactatttaattgggattatacaagaaatttttgagagtttagagttcaacttgaaaacattgagtggaagcaatatggagaatagcgatatcacagagtttagagttcctgtcattttgtggaaattttgatcacatattcccattacatgaagtcgaaatgaccatgagacctgtgtttttaaatggtccaaatagaaagggaactgttttaatttttaacaacgtttcatgagcttatggggcaaaatgtgtggactagctaattgttgtcatggagaatgtttctcatcctttattgtggaatgcatgtagtacaccatcttaaatttgagctcatttctctatctaaccaataaagctaaaatatataatttttttatattattattgttttttttttttttttaatttattggcaagcctgtttttaaacgagatcagtaactcaaagatgcactgtctaggattgaaccccagacctctggtatcatcgcctcatcacccagaggtgacctctggtattaagctacaagatacattgttgagaacattttctagtatattttacttttcatttcatttttgctttatcctaaagttactctctatttatattaagaaaacagagatatatatatgttaaaatattatcttccattttgtttagcatttgctgtagtcatttttatcgttctattacatttaggactatatcgcattgtttgtttgcttcaattgtgacattgatggtttcttcacttcttgcagcttgtggaaaacatcgaagagactgttggtgttgg

SEQ ID NO: 107610 - DNA, 615 bp, Aquilegia coerulea
  Intron number 1 from transcript AcoGoldSmith_v1.023826m (l ocus AcoGoldSmith_v1.023826m.g) derived from phytozome v7. 0 (chr-ID scaffold_54; pos 1224423 to 1225037 reverse stra nd)
acattggcatttcaggtatatatatatttgttatagtacgttgtgtgtgtgtgtatgaatttcaacaatgtatgtagtccatggattcatcagtgtgatagtgcagggtcttaaatccaaaaaattcaacaattaattacttgcgcaatcacactgattctatatatgactaaggattaattagactcgagtctcatttttcgtttgatcaagttgggaatattttttttcaaactaatgtaaaaatattagtctcaatgcacacataaattacacaaacttatcctcttctcatgaggtttttattccaaaatttagcaaattgttaatatctaactaatttcttgttctacaaaaaaaattcacaatttaggatttctaatataatcaaatactacttgattttataataaattttggaaaagatctgaaatggttttaaggagttgttactgctacagaactgttgatatgatgatgagatcatatagaatcaatgtagatggcatgaagacgattaatacgtagtccagcatatcaccaattaatatgcatgttatgtcattgggatgaagaaatactgatttttgacatggtataggtggagtaacagct

SEQ ID NO: 107611 - DNA, 842 bp, Aquilegia coerulea
  Intron number 2 from transcript AcoGoldSmith_v1.003887m (l ocus AcoGoldSmith_v1.003887m.g) derived from phytozome v7. 0 (chr-ID scaffold_7; pos 3844571 to 3845412 reverse stran d)
ggtttgagcttgattctagccatattgtgcaggtttgatttttttggacattttgatttctgtcttctttttttttctgttatatttgatgtttttttttttttgttgttgcctcaaagctaggagactttagtaggccattttttgtgttaaaacattgtttcattgtataccaacttgtgattgactttagtatgccctttcttagattttttttgttatatatatctaaatcaaaggtgtacactttgtattgattctaaagtttgacatatccatatcatcagctcatgcgcatgattgtagtgcaggataggggtctaattaaatttgaaaggaacacagtgcattcctggtaacatgctagagctagacacatctcatgtataataataatgatgaatcagaatcaaaattactttttaaactcaactacaaccctaaatccaatttctgcactaaaataattaactttttattctttataaatcttccaatgtagcttcagattttcgacctttaatgtgttgctacttacactagaaaatggcgatgatgagttaacttgtataaattcacttattgaatattttaatgttatcatcaactttacaactctgaactccttccaagtagtgcaacactggtacatcagtgttttacttgatcacaagatcgcaagtttggtgctgggattattgattaactttctcccttctgtgaattgaatgataatggtagaagactgtaatgcccttaaattgttgtgaaatacaaattttactttaatgtaaattacaaatttgtgttttgaacaggaacttgttggaattagttctggc

SEQ ID NO: 107612 - DNA, 943 bp, Aquilegia coerulea
  Intron number 3 from transcript AcoGoldSmith_v1.027284m (l ocus AcoGoldSmith_v1.027284m.g) derived from phytozome v7. 0 (chr-ID scaffold_43; pos 1222243 to 1223185 reverse stra nd)
gatttggtagtggaactctccaaggtcacttgttggtaagttttcgatacgctttaatttgaagtaagatagataggctcttaatttcatgatttcaagggttagataattttcattgttattattcaaagaaacatcagtacttcctcaaattgttaaaaaaaaaatttttttttgcaaaaccaatctggggttaggcagacccctaccagattttattataccaaaaatgagttacaaaatgccattgtatcaactattacattcctccaagaggtttacaaatcgttccatctttctccatagcaaacatggtctttgatccattaactactcagttgtagctttttgctacaagttcttctagggccaatgtatcttaaaacgtgttaagtcatctcaaaaactttatcacaatgtagctctcattttgacttaagttttggttgtttagtaagaaactctgaaaagaaggggttggggggggggggggggggtaaggaaatattgtgaactaaaacaatataagaaatccaaattccatatttttctgtatggtaatattgtatttgtatcgtacttatcatatggctttagatgctaaggcctacgttactgacaactataattataagtcagaggtatatatggtggagacagccaataatgttatgaaataatggatgggaatgtaaagaatttgagtttgatgtaatctaaggtaaatcgattaatgcttctatataaaactgcactttcttgggctctttgatgcttcctgatgtaaaagattgtttaaaaaagtttcctagaaatctttatttacgtcatttggttagtacttttatttaccagttttcatctttcaaaatgttaagcttaatccatgttttgtgaatttgttgaaaccagtcaggggaagaacgtttttctattgaattgg

SEQ ID NO: 107613 - DNA, 799 bp, Aquilegia coerulea
  Intron number 1 from transcript AcoGoldSmith_v1.005672m (l ocus AcoGoldSmith_v1.005672m.g) derived from phytozome v7. 0 (chr-ID scaffold_9; pos 1315146 to 1315944 reverse stran d)
ggtaaaagaagctccatttacagaggtgttactaggtgataattcaatatctctcctttaaaacccttgaaattgatggtttagaaacaaagttttatcagtaagattattaatttggaattagggttttaggaatagtgacattataggaagagctatagaatgtggatggtaactgtttgtattaattttccagttaattactagtgcttccattagtcttttttgtgtgattaaaaatttctttagaagatggatattatttgaaatcaaatcaagtatatccgttatttttatcgtatatggattccaattttagtatatccgcttcaatttgttaaaatacctttgaatttattaattaaaataaaacatccattatctacagttggatgaatgatcacggagagatcaaataatcaaatatcaatgcagctgaatggatgattattatcccgagttcccaactatatggatggagtgataggacaattatatctaattgaactaaaaatggtattggaatatgcattttgtggtggttagtcctccttaaaagcatggttgttttctatcctgttgtactaataaacttttaaaaacataatttttcttttttttctcacctcatccatgagtgaggttatgttgagtatacaagcacttgatgtttatttttagtttatggtatttcatttctcatctttacggttcttcttttaccactaaaacatatatttagatattttttactgtagttataaattgaaacttcacattcttgaataattaggcatag

SEQ ID NO: 107614 - DNA, 663 bp, Aquilegia coerulea
  Intron number 2 from transcript AcoGoldSmith_v1.003766m (l ocus AcoGoldSmith_v1.003766m.g) derived from phytozome v7. 0 (chr-ID scaffold_10; pos 140663 to 141325 reverse strand )
tattcttcgaaaccttcgtggtttggaccaaagaggtaattttgttttgttttcttctgtgttttgtctttcttctttcgtttcaaacaatgtgacttgcttttgctctacttgatatttgatttctagggtttttagtttcgtctgttaattaatggcattgtgtgtatgaatatgagagagatgcttaactagttaggtatggtgttttgtttgattgtgatatggttgggttaaggtaggcccaatttatcatggatgaaaagttggtaagttgtttggttaaattaggtgcaaactgtcacaattcatgagtaaagtttaaaattttgatcacgcaaatttgttgctgtactgtggtttgaattgattattaaaaaaaaaaaactgtggtttgaattacacttacacgcacttgggggtgtgcattgagagtcatcaaatatgccatatgacctatgtagtactacttgggggtttgaattactaaaaaaaatactatttcttaggaaagtactgaaatttgagctccaagttgagttccttgcgtttgttgaattgcttttctaatctttgttatacttttatcaaattacatatttaaaagagcaagttgttcttcttgcaggttattatttatcttttgcgtgatcaacttattaa

SEQ ID NO: 107615 - DNA, 785 bp, Aquilegia coerulea
  Intron number 1 from transcript AcoGoldSmith_v1.006910m (l ocus AcoGoldSmith_v1.006910m.g) derived from phytozome v7. 0 (chr-ID scaffold_37; pos 1154640 to 1155424)
cagaactttcgtcaaagatttcaacttcgattagtgtaaatccttaatctctattcttttctcttcattttgatataagttttgttagatttagtgaaatattgaagttcttagaactgtaatgtactcgtttttaccgaacagtagtgtgtgtgagtagtgttaatggaatttatctattgaattgtgttaatattactgtacatcttgaattctctttctctctctctctctctcttgattttaaactaattttctgcagatttagtgatgaacatgaacttgtaattctaaactatgtgttttgactagatagtagagattagagaaggtactatgttagtctattttggttgatttgcataattttgggaggttttgctcttgaaaattgttagagatttagtttgcaagtgctactttagtatgagtggaataactatgaggtctgatgtaaaattccgtttttaaactataaagttcttttgatatgaactcattagtttgatgtattgatagaaattggatgtatatgttgtggctgtagttggaattagatgtattgaaagtggtatgtttttcttttactaattgaattcccaaaaaaaaaaaaaaatccaagaattttttttttgttgaaacaagattttaatttttttatcctgtaagtatttgtctctgtcctgtatatggacaagattgcgaactttagtgactttagatttgaaatttttctttttattggatcagatattatttgcacttgaaaggaagcaagctgaatc

SEQ ID NO: 107616 - DNA, 885 bp, Aquilegia coerulea
  Intron number 5 from transcript AcoGoldSmith_v1.006910m (l ocus AcoGoldSmith_v1.006910m.g) derived from phytozome v7. 0 (chr-ID scaffold_37; pos 1156418 to 1157302)
ccgtgcgagaatagagcctggatttactactttgggtaggttttgaaaaaatctgtaggatttgattacattttgtgcttgagacttggtggctaatttttatgcaaatcatatataatgtaaagtctaaaaggtcataacaaaattagagaaaagaaaaagaaaggagaggccgctcaggaatacttgcttatagaatgcataacataataagttgcaattcatccaatcctctttgtattgatttctgatgtaggaagcatctgtttttatctttcaatttaagtcacatgaacatactctagttccctcccaccttgcgatattttttcactttaaattttatgtattccacaagttgttagtttcattcttattgttaagcaaagaaggatattctattaattactgaagcaaaaaaaaaaaaaaacaaagactatggtgatagattcttacttcattagttattgttatcggtctcatgccatggttgatgcccagtttttttttaatctaagttgtacgcaccatatcatttttgctcactttacacgtgatctaatgccaaagatggtagcttccagctaacctagcatgtaaaacctgtcggtgtttttatgcagagcaaaattcacccgccaccactctcacactttgacttattaataatgaatgcattagatgtaactcatgctctgattaacatatcaaaacacaagtaacatagtttgatatatatacgttctctcttttttcatttcctggtgttaccaatctttagatgaataccttgcactctcaatctagctgtagcaccttaaaagtgcgagctgtctgaatccatcttattctgttcattagtgtggcagaaattggaagaagaaa

SEQ ID NO: 107617 - DNA, 211 bp, Aquilegia coerulea
  Intron number 2 from transcript AcoGoldSmith_v1.014209m (l ocus AcoGoldSmith_v1.014209m.g) derived from phytozome v7. 0 (chr-ID scaffold_27; pos 873017 to 873227)
agagtaagtagggtttaaacgttaaaaagataatattatagagttggtttcttttcagaatagtatctatttagaaaggactaggtgttcttcctattgcaaaacatttacaggtgatcagtgtggatatcattatcctaaccatccaagcaaactcaaagtttacattatagtctaaatttaacgaaaaaattgtttcttatgcagttgg

SEQ ID NO: 107618 - DNA, 959 bp, Aquilegia coerulea
  Intron number 2 from transcript AcoGoldSmith_v1.011606m (l ocus AcoGoldSmith_v1.011606m.g) derived from phytozome v7. 0 (chr-ID scaffold_27; pos 908111 to 909069 reverse strand )
tctctcgtatttttctctccttttttttccataatttgattgattttattatgatgaaatttgattcttgattttataatttgatggtttcgaatcaattcacttgtctctatttagagatggggtttcgttattttcttgaatccaacatttagaagtatgtaattaaagctaattgagtcattttattagtaaacttagtttaaaagattctatttttataacttttatactttgatcactgtgaaagatgtgtcaatacgttgtccatggattttaagcccaattatgtagataaaattgatcatttggtctgtctgattgaattcttgcgcgtgttgaacatattttgttcatgtctcattgtatattgcttcatgatatttttaggaatccaaaaaaacctcgaggttatgataaagccgattagaaactctcaaactatggtttatcatatggttgtattcataaactttattgcatattgaagtcaaacaagtttcgctgttgcaaatcgtgttagcagaattttagtaaggaaaggggcaacagggtcgaggttgttagtgaacctagtatgtagtatgtctctttaggaggaagaagtgtgctgctatacgtaagtcaatactgaatgaacatggtatgttcttttccgatgtgccatttccacatttcaactatttgttgaaggaagactgaataggacaccacctaaaacttgggaatgttatccttattgataacttaccaaattgagtccatttaactgcaattcatatgtgtggactgtcgtttgttaaggggctcatgcatgatttatttcttccttatcaaaattagacaatgtttgttggctatggcatatgatgtattccttccctcattccacattattatctgtttcttcatcaccatcattaatttgtcttttttgtctgttatattctgtttcacag

SEQ ID NO: 107619 - DNA, 987 bp, Aquilegia coerulea
  Intron number 1 from transcript AcoGoldSmith_v1.005594m (l ocus AcoGoldSmith_v1.005594m.g) derived from phytozome v7. 0 (chr-ID scaffold_69; pos 59927 to 60913 reverse strand)
ctcttgtggtggtgctcacactcttttcttaacaggttcttcttttaaattcactctctattcattgatttcaactttgattaattaacaaaacaaattattagtaataaacttatacatgcaagagaatccaaaccaaagtgtattaatcactaatcaagaaaccctttgtagcgttatgttgatgctttaatctcctaccatgacatggtgccagaaggtgctccaaccataatcgccaaatggctttaagaggcatcaacctcgaaactcaattacacttaactgtttgattttatttgggcttgttacaaatcaaactaaggttaagtacttatcgaaagtctaatataaagtggccgcaaagcattgtgtgttttggtcctatttcaaatattctatatgaagaacttcatagtgttgggtcgatgattgcctcgccatgcttcgttcttagttcttataatattacttggcgccaaaggtgctccaactattattacaaaatggcttcaaaaggcaccaaaattcaagtcatttacactttaccattttattttatttgggttatgtacttactcaaatgtaaagtgtaggctgggaagcattttggaaatgtaatttaccgtttctcacagttgtggtgcttatgttgaaaacctattccgtgttttgatactaatccaattattttccttaaggaacttatggagatataaaggcactatttgtgaaataaatttcagcctcactcatagtgatacttgatagaaaagccttaccacttgcaattattgcgaaaagctctctgttaggactaaattttgaatttgtcagcaaactagaattatttctatcaactattccaccagttcttgaccatgatgcatttgatgttggagtctttttcatttcttttcttgccttttcttttaatattgtttaaactcataaattctctcatttgagcagaagctgggcgtgttt

SEQ ID NO: 107620 - DNA, 465 bp, Aquilegia coerulea
  Intron number 2 from transcript AcoGoldSmith_v1.003216m (l ocus AcoGoldSmith_v1.003216m.g) derived from phytozome v7. 0 (chr-ID scaffold_30; pos 2870938 to 2871402)
aaatcacttcgccgaatcattagcgcttttctcaagtaagtaacactaaccgcaaatcttctctcttcatcttcatcttcacaatcacaatctttctttgtttgtttgatttgatagtatatagattcttataaatctaattatttcgatttgcaaaacttctttcttgttttaaatggagtaatcgaagagtttgtataaaatcgaagaaaaaaagaaaaaacacttttaagcaaatgaattaaaattgaaatttgttttatgaaatgacctaatttacatattcaatcaattcttacaaactacatgccttggtaatcaaaacttaatccctgctgtatttcgttggtgattaaattaacctaatgacaaacactactgattagtggaattcacagtatgtacaagtttcatcagtatagtagatgtttaatactgtatatactttttgatatagttattcag

SEQ ID NO: 107621 - DNA, 701 bp, Aquilegia coerulea
  Intron number 1 from transcript AcoGoldSmith_v1.027003m (l ocus AcoGoldSmith_v1.027003m.g) derived from phytozome v7. 0 (chr-ID scaffold_6; pos 5403605 to 5404305)
ttcttcttcttcttcccttctcttttcaactaatagtaacacaattagaatccaaacccacattagaattagaagcagagcaattaactcatctatccaaccagtgccctacctgagattttgggggccctagttttttttttcttaagaacgtcaagatacctaaggcccttaaatttatttaaaaatgacaaaaaaaaaattaaataataatatacacatatctatgaatttgaagttatattagattgaggtttttgtttgattaattgagagaaggggaaacagagaaagtgaatttaagtttttttttctaagggagatagagccatggaagtgagaaagaaagctattacagtatgtcaagaagcctaattaatgaagtgaactgagcttcaattgaaagagagagtctcctcccatttggtttattaattgtattgggcttgggcagtaggctttattatagttaaactaaagaaaaaaatccaaatcaatataacatatgtatgggcttggtgagcaggaggccccctgagatttggaggccctaggcaaccgcctagctcgcctagccccaaatccggccctgtatccaaccttcgctgcttacatcttcttcttcttcttcttttctttctcctgcttcaaatgggtttgagaaaggaaagaagaagagaaggttggaggtagttacacgt

SEQ ID NO: 107622 - DNA, 855 bp, Aquilegia coerulea
  Intron number 1 from transcript AcoGoldSmith_v1.018660m (l ocus AcoGoldSmith_v1.018660m.g) derived from phytozome v7. 0 (chr-ID scaffold_54; pos 1471742 to 1472596)
aagcttttgaaccaacaaaggtcttatatcatctccaacttaatgggtttttctacccttctttttgtatctatacaaagctttgatgttaactttcttttctattttcagaaaaatttgtggcctcagcaagagcaacaacgatatcatggtggcagggcagacagtgtttttcgggtaggcacttttaatttttatttaccattatcgcgtagggctgatcagctgtttaagaaaaaacaattttctcaaattattgggtctgaacttgctctaatagttaacaaccatataaggataataatgaaaggggtttcttggtgatatgttattggttaaggtaccttttattatgtgatactgcaacctaactctctatagtttaggggatccggtgtcatttttttgtcaccctggtacccagcatgcgaaaatagcaatgcaaacacgagttatatcacactggataaccaatatatagcagtacttgtgaaactatgatctctcaattttcttaattgaagaattgtgaatcctttatatatgtcagattgtcagtgatgctctagtagaagcttaccactgtttcaagacgcttgtggttttgcatgttatttcgagattaatggctcaaatataccactttagtacaagcaaaaaacgcttcgatcagtgtttgctaaggagcgtatagtctcaattaactctaggctgagtagtctatattaataatttcctgaaaattttatattacactatatttgtatacctacattttctaattcatgcttgctgtatgcctgtattgaattgatgccagaatcagcattacaaatccagctcaagacctcctcc

SEQ ID NO: 107623 - DNA, 419 bp, Aquilegia coerulea
  Intron number 1 from transcript AcoGoldSmith_v1.002463m (l ocus AcoGoldSmith_v1.001716m.g) derived from phytozome v7. 0 (chr-ID scaffold_9; pos 1282104 to 1282522 reverse stran d)
ttcttatcagtgtcagtgatcctgaaactgacaaggtaagtagatcggaaactatcaactttgatttgaaatttcaacgcgatttaaacagtttctaattagggtatcgatgaaattctgataagttgaaatccatccatttgattatcaattgaatattgatggaagttcgtgtttgattataaattctgtcatgctgataagttgaatatttacaaatttacaaaaaattaaaaaaatctgatatattattctattgatcaattcatgctgctgctgctgcatcgatgaatgaagagcgttaaactttttaaacattcatattaatcttgacaatgatcaaatactggatattggtatattattaatttattattaattctttactttttaatttccaacaggaaggctttcaagaa

SEQ ID NO: 107624 - DNA, 363 bp, Aquilegia coerulea
  Intron number 1 from transcript AcoGoldSmith_v1.009202m (l ocus AcoGoldSmith_v1.009202m.g) derived from phytozome v7. 0 (chr-ID scaffold_11; pos 5778745 to 5779107 reverse stra nd)
tctttcaggtgagttcaattgtaaattgtggcttcattatccctggttcagtttttatgttcttaacattgtactgctacggtgctatttatttatttatttatttttgtttccaccttacaagcatatcttcaaacacttttgtaaatcataaaacttttaagtagcatgaacatttttaacttatgatctatggattttgattttgtaaatttggatactacaattgtttccggcatgctattggactgagggatggattgtagttttgacaacatattgaagattggtttcatgattaaactggtgtattggcattaccttgcagctcagtgaagagggagcaggtgaagaatcaagtgg

SEQ ID NO: 107625 - DNA, 446 bp, Aquilegia coerulea
  Intron number 2 from transcript AcoGoldSmith_v1.020890m (l ocus AcoGoldSmith_v1.020890m.g) derived from phytozome v7. 0 (chr-ID scaffold_7; pos 3770561 to 3771006 reverse stran d)
cagatagaacaccatcagcatataagaaacatcaggtcagtttttagctaatttttctctagataatgtttagtatagaaattaaaataagcataaattatcgtttgcacgagcttaggatttgaatagtagttactagagaacaaattaagtttagttgacgtatgtttgatctttttcatcttaattattatagctataagatcttagaagaacctacaagaccaaatatgatgcaaggatgagaatcttacaacttatgaccgaaaaccgtatttttttgttgttgctcaagaccccaaaacaaccctctaagatatatgtaaaaagcttttaacactttgttaacattggactactgaaatgataattctttttatttttttaattttttgacaaaaacttcttacattcaaattttggcgttgcaggtcactctatctgca

SEQ ID NO: 107626 - DNA, 940 bp, Aquilegia coerulea
  Intron number 1 from transcript AcoGoldSmith_v1.005518m (l ocus AcoGoldSmith_v1.005518m.g) derived from phytozome v7. 0 (chr-ID scaffold_30; pos 2659142 to 2660081 reverse stra nd)
ccgttgtatgtctctctctctctctctctctctctctctctctctctctcactctctctctctctcactctatataatgtagtgtggagcttaaagttgttgccttttatgtcttttgatcaaattaggaatttggggttttgggaaaactgctatatattgatgtttaagccagttttgttggtaaagaggttaaaccttgctaccccaattcacaaatggggcattttgactgcagtcgtggttgtcttatagctgcttcaaaactttattaatcctgcaatcccaaatggggtcctggaaatttattaaaaatgttgaaatttgttgttagaggaatggcataaattcactgatttgtcgaaagtgtcatacacatgtgaagtagatttgtcaaatacctaatgtgcgagtaaaaacattgattttgggtattataagatggtttcgttagtaaaggtttcctggaggggcaacaaaagaatggtgtaaatcatcatttacgttgtgtttgattggtagaaatgtattttcgtaagaaaaagaacatacaagagtattccatcaatccaatacccttaagttgtcactcatagttgaacgagcattatgctttacaggcatactaaggtatacatttcattgttaaaaagaaacagtagaaatgtagaagaagctactaagcccaaacttgcttttaccgacgtgagtgggttaagtcacgtatacgctattacgtgggttgtcatataatttgaagtgtgttattattattttttttttaatgatcaaaatctagctttaatacctatgattttgtcattttgacaatggtacatgatgttttgatagctccatatctgtttacacactgatgtcagcgtggtgccatagtaaaaatattttgatagctccatttatgtgaatcttcaggttgaga

SEQ ID NO: 107627 - DNA, 1023 bp, Aquilegia coerulea
  Intron number 2 from transcript AcoGoldSmith_v1.015292m (l ocus AcoGoldSmith_v1.015292m.g) derived from phytozome v7. 0 (chr-ID scaffold_18; pos 2181680 to 2182702 reverse stra nd)
cactttcgacgtcaacattcttgtattaatagcaggtatgtaaaagaccaaacatcgtttttctgtttcattattttccactctattgattgccaaaaacatcgataactttttgcgtgggggattgaatatgtcatttgagctcttcatcatttgttgctaataaattgttggccaaaacatcaatctatttatggtgtacacgttagaaagcataaactttgtggtgccttttgttatgtgtttcaactttcactatatttggccaaattaggcaccaagggcaacagctaatggaatgtgaactcttaaactagcatgaaccacacagacaaaccgtgttgatatcagaaactacttcaattgatctctaacacaactttaggtagtgaggttgcccaactgtacataaatgctgcacaagatatgaaatgtgcacggtgcacctataataaactcaatccaacatggttccaagttccaacttccaaagttagcactcatcactatccatcaagcccatctctattactttaaaaaggcgccccccaaaacgaggtggtttgtgaagcatgacatgtccctatcacaaacatacatgtttttgttataattaatatacagtatatagatactgataatttcggttttacctttaccttatttataatcagatcgtaaaaaagcctaggcccatacccaataatacctccacttatgcagcacgcacaagcgtgcaaatttacatagtttgaataatgggtcaatctgactaataagccaacttgtaggcccaaggcccatataaaccttaattgttgtccaatctgtcactttgactcaaggcccatataaaccttgttttatccacaacagtatatgtaaatatgattgtcagactaaaactggtctctttagcttcaccttgtggcttgttctatattttgtgtccattttcgcgcaactcacctaatgttttgtatggcagtgggaggtaccattggtttaagagattattgggaa

SEQ ID NO: 107628 - DNA, 278 bp, Aquilegia coerulea
  Intron number 1 from transcript AcoGoldSmith_v1.010453m (l ocus AcoGoldSmith_v1.010453m.g) derived from phytozome v7. 0 (chr-ID scaffold_10; pos 1710283 to 1710560)
gtttctgcactgttggagctggtaatctggtcagtctccttcttcttcttcttcttctttcctctgttttttttttttttttgattgtttttatgtgttttagaccatttggattaatgggtcgaaagtagtttttgttttgcttcattgatcaataaaaactagattttttttttcattaatgagattgatttgttatagaaatttgtgaattttgattacgctttgatgttgatgggttttattatttgtttgtttaaaggcaccaacagacccaa

SEQ ID NO: 107629 - DNA, 284 bp, Aquilegia coerulea
  Intron number 1 from transcript AcoGoldSmith_v1.010016m (l ocus AcoGoldSmith_v1.010016m.g) derived from phytozome v7. 0 (chr-ID scaffold_27; pos 3019144 to 3019427)
cgtaagttctctcacatagcataacaacacagatctctatgttttgttttatatcttgttcatcatgatctagtttttcttctatgtattcgataagatcaaagtgatcgcagatctcaaatcactaatagatgatttgttttttttctagggtttctatattgatcttgttacttagtattgattttgatcgatagatcgatctatagttttaatcattgtattggtttcaaatgaaagaaatcaaagtttttcttacttagatatttgtttttttttgcaga

SEQ ID NO: 107630 - DNA, 987 bp, Aquilegia coerulea
  Intron number 1 from transcript AcoGoldSmith_v1.012818m (l ocus AcoGoldSmith_v1.012818m.g) derived from phytozome v7. 0 (chr-ID scaffold_40; pos 198729 to 199715)
actctcgcacaatccgctaagttcttcaccacctggtatctctctctctctctctctctctctctctctctctctctctctgcttattgatattgaataagcttaattgtttgattgttgatctaaaatttagcaatttcgtaattaaattagggataattaaaaaaaaaatggagaaagtgttttattgctaatctcaatacaaatttccaaaatgaagaattttataacggatcgtttttttttctggcaaatctgaacacaagtttggacaatgtagttactaatttcgaccggtgagatctatttttttgtgcaaatttcttaatttatgctctcatatccacatgtattgtagagccaatttgttactactagttaaaaaatcgcctgtgtgcaattatttttatggggcctgcaatcattctatcatatatttttctataagatgatcatttttcgattatgctttcatagagagattagcgataagctactgagaaatgctagtttatagttttaagattcgggagagtcaaagtagaattagatcctatttccaaaatttgcagcttatacgccaaccattctttctatctggagtgttactttgaagctgatctgaactaaggcatgtggaagatcactgccattaaagaagaattaattaactctaaataaagagaaagagcggcttaaagagcaatgccatatgatgggccttaggtaatacaaaagtacttgacccctgccattaaagaagaattaattaactctaactactggtttttgcaaccaaacatcatggcacctttacactgaatcaagaaaaacattccagatacttgcttacttgagtttgtcgtgttagttcttatatagttttcaacatgttagtttttcttttcttattcagtttctcctaagtttataaactttgatagactcgcaggtataaggaaaagcgttgggattataagcaacttg

SEQ ID NO: 107631 - DNA, 566 bp, Aquilegia coerulea
  Intron number 1 from transcript AcoGoldSmith_v1.010653m (l ocus AcoGoldSmith_v1.010653m.g) derived from phytozome v7. 0 (chr-ID scaffold_9; pos 2369556 to 2370121)
caatctacagaagagaatttcattggtatgatatttattatacactttgtattcttatatatgactatttgtaaatcttgataataatggtagataaatttgaatttagggttcttattggaggatttggtgttgattagggataagtactgcttgtatctaatgtgtgtgtgtgtgtaattagttaatgtatgtgttaatttacctagtaatatctattttgctagtatttgaacggatgggtgccattcatcaacttgtaatgtatagttaactaatgtaatcttgaaattatataatatgatgacaatcaacaacatgttgcaagaccgaacagaccgtttggtgccattcattgattggtgttttataggttagtatcatagtatggtttccaaatgaatggattgagggggagagtttgatgattgcaatagtatgtgtacagtatagtgtaaacagtagttatgatgctcacgaaatgccaaaaaggaacctcatggcagaattatttgcacctcggatttattgatttgaatagttactgactgtttcttttcctccag

SEQ ID NO: 107632 - DNA, 227 bp, Aquilegia coerulea
  Intron number 1 from transcript AcoGoldSmith_v1.008362m (l ocus AcoGoldSmith_v1.008362m.g) derived from phytozome v7. 0 (chr-ID scaffold_11; pos 3669001 to 3669227)
cctggtggtactctcgcttctagatatttatctgggtatgggtatctttcttttctctcatcttttccaagatttgattttttatttttttttattgagattgttttttttttctttactagatcaccccaatacattgtatattgaattagattgaattcataatttggggatgggaatttaggttaaatttaattaatttgaacttaattatgttggtttcagta

SEQ ID NO: 107633 - DNA, 870 bp, Aquilegia coerulea
  Intron number 3 from transcript AcoGoldSmith_v1.011689m (l ocus AcoGoldSmith_v1.011689m.g) derived from phytozome v7. 0 (chr-ID scaffold_7; pos 7212626 to 7213495 reverse stran d)
gctgcacgcactattaccaaagtaccaaagccacagttaagatccctcaatttttttttttaatttcttttttctggcctttagtcctttacatctattttttttttggtcttgtgaatatccaacgccaaattatctataatatgttgtatgagggcttaaaagctgtgtgcacacggtggttatgtgtcattttctattattaaagaatagtctattgtactgaagtgaacttctagagtaggaatcatgtataactagtatagataatacaggaagggtgtgtgtgaaggaaaggagaagatctttcaatccttagaatggacatcaaacatctcaaggaaacagaatgtgcttgctcaagacctatttccaaggaccattcttatgtgaatttttgggtcagacataggatgctgccacagtgtagcctgtggaattgcatatgtgagctgggctctagcctgttattttgtttgtgaggatctccctcactttggggcacctacgagtttatacccttcttcgatgctacaatggaggagtttacttttaaggatagggaaaaacatctgtgtataatatactactcttgatgttgacttctcttgtactttagaaggatccttctttcttcatgtattcattcattacaagatatttaatccaatagaaaatggatcttaataataaaagtatcttccccagctgctttttctcgttcttagtctcgaattggttgctttacagtcaaagtgaatccttccattaattgttcttttttttttagttataacttataaacaagtaataattcaaacaaaagatggtctgaatgatgaattgttattttatgcagaattgaagcag

SEQ ID NO: 107634 - DNA, 663 bp, Aquilegia coerulea
  Intron number 1 from transcript AcoGoldSmith_v1.018948m (l ocus AcoGoldSmith_v1.018948m.g) derived from phytozome v7. 0 (chr-ID scaffold_15; pos 1496006 to 1496668 reverse stra nd)
gagaaggtttactcaagacaaactgggtggaactggtattgacactaagaaagaatataagtctggcaccaatgcaccatttagaagtaattctttttttcaacaactgcatacgaaggcaggcaggcaagcggccttattgatccaggcatagcagagagacaggtagggattgatccaggaatagtatacacttgtcgttctcgatatattctatcagctaagattgatcaaagcacttagtgattctaagggaagccccactatatctgtagatttgaggcatcccctttaatttaatttgaacttaatataaaaacacatagaaaatcataccgattctgtaattttgcaaaaaaatacaagaaacacttcacaaaaattgaaaatagacaattttgttttctgtaattttcaaaaataaacaagaaacacttcacaaacattgaacctagaatttttttttataattttcactaattaagttcaaatagaaagttttcattaatttccattgttaatctcatacaaacaacaattgaagaagaaaaaaaaattcactaattaagttcaaatagaaagttttcattaatttccattgttaatctcatacaaacaacaattgaagaagaaaaaacagattacacaaaggagaagattgag

SEQ ID NO: 107635 - DNA, 968 bp, Aquilegia coerulea
  Intron number 3 from transcript AcoGoldSmith_v1.011051m (l ocus AcoGoldSmith_v1.011051m.g) derived from phytozome v7. 0 (chr-ID scaffold_1; pos 7020715 to 7021682 reverse stran d)
gagtgcctaggaagtaagttgggtatgttaattgtggtttcataattttgttttttcgtcgttaacttctgtatgttttgtttggtattgagcattatagacgattattgcctattatcttattcaatgcttatacttatgttagaagcttagctcaactccctcgcaggagggtaccatcaacacctgactagattacgcagcgtcgctgtgtgtttgtttgtgtgctatacagtatatagtatatacatacacataaatatgctatgtaacatttatgatttatctgtatgtgtattagtgtgtgacacagatatgaattttgtctgaaacggggagaaaatacatgatagaagtcatagaaggggtgcacctcatgaagaaaaaattgtgatgaaaaaagtgctgttaattgtgttttattatcccccccccccctctctctctcttttcgaatagggggtgggggtgggtgggttgtgtacttgttatgggagagttggtcgtgattgaattgattaaaataataaaagcaatttattttcgaaatgatatcatataagttatatctatttgattttaagcatcattagacacatacaatggcctttaacgaatgactttttttgtggtatctgagtcatccaaacttggaatgcaccgatagaaatccttttagatgtgtactcaaatcgagttgactaatccatgagctcagtggacgataataatttgattcctgatgagagttggatgagtaaaattaaacccaggaccttgtgtacaatccacaatgacctggctggtggatttagggaattttttttgtttacgcctggtttagcgcgagtgagtgattcgtccgacagacagtcatctataatcagagatacctgcacatctttcttagttttgttttcttcaattttcttcacatatcataaaataaattctattgcctttgacag

SEQ ID NO: 107636 - DNA, 844 bp, Aquilegia coerulea
  Intron number 1 from transcript AcoGoldSmith_v1.000008m (l ocus AcoGoldSmith_v1.000008m.g) derived from phytozome v7. 0 (chr-ID scaffold_10; pos 1621618 to 1622461 reverse stra nd)
aggtttgctgctccttctccaagaatctgcttcaggtaaatatattttatattactgttatgtttacatatcatatatcacatggtatcggagatgagaaacacaaagaagaaaggaaaaccatactattctcgggcacacacacacacacacacacacacacacactggcacacattcacttatcatttatgtcatgctctcaatagttagattccaagtagctgaaggaagtattagtatcttcatcattgagatcttccatctcttttattagttttaacaaggggagtctagggccaagtaaaggatcatcttcttattccagtggttgatgtcaaaaggcaagaatcgcaggactgataagtggatattttctcttagattgcttttttgtttacgtacgtgattctggatatgtaggttgatcccatcagcataggaatatttatccagataagtttaagaaattgcagttgggtattatgttttgataaaattccacttttttcttaatcatttaaacacttccaaaagagtacgacactggtgtataaattatataaataacaacagcaaaatttgacgtcctaacgatacaatgggtgaaatttttggtggaatattctggatttccaagaggttgaaactttgattaataccaacactttcctaattaggcctttacgcaatggtcatgacttatgctattagctgatccctttaacctgaatattttttgtgttgatgaatatacagtagattggaattttgagtgattcatctgactttcttgtacttcattaacagtgaagtggacgaggaggcaattttgggtacacttt

SEQ ID NO: 107637 - DNA, 818 bp, Aquilegia coerulea
  Intron number 1 from transcript AcoGoldSmith_v1.001095m (l ocus AcoGoldSmith_v1.001095m.g) derived from phytozome v7. 0 (chr-ID scaffold_69; pos 902496 to 903313 reverse strand )
atctatcgattcttcattaaaaccaaatcaatcaggtaatcgatttcacattctctgatctattattcttcttcttcattttcaattcattcaattaacatcttaacttcaaaactatttttgcttcaagctgaatataaattacactaacatttgatatagatctacattacatttctatcttatacatattgttttttgttcgttttactacgaattttatatagatctagcttatttccatgatttaatcccctttttttcccttttgaattatttcattaaaacaattctaatgttatctttgattattaagcttgtttttattggaatgtgatgtagatctacattacttgtatgatttcctggtttaattttaataagtttatttgttttcatgttgtcggtgttctattaattttgaatgctgcaactctggaactgtattggttttttcatgtttggtgtttattatagttgttcatattctgttaaactcactaaatcttaaattgtaaaagatctttgttttattctataatataattaaattaaatgctactttggcttatattaaaacctacttttctactttggatccagtaatgggaattcaagaggttgtaatatattattttgtctaaagataatatcaaagtagagattttttgcgttttaggatctagatctatatttacctgtttatctagattatgttagatttggttgtatttgatctgaagccagagagtaatatatttaatgttcttttctttttatttgtgatttctacaggtagaccctttaggggtatttgc

SEQ ID NO: 107638 - DNA, 929 bp, Aquilegia coerulea
  Intron number 1 from transcript AcoGoldSmith_v1.003428m (l ocus AcoGoldSmith_v1.003428m.g) derived from phytozome v7. 0 (chr-ID scaffold_9; pos 6391962 to 6392890)
gggtatctcaatttttttttttaaatagggtatatccaaaaatctctatatttattgacaccaaagataagatcgaaagtgggagtgtagcagttgtagtacaactaagcacacattctattctccactgctgtgtctgtagttgtccttgtccttgtcctaggctcctggcttcttgtgtgagttgcgatagtatcactaattcactatcaacaacaattgtaatggatttagggaaagtttatgtaaagaaaataggctaagcactattctaatatatagatctaattaaaaaggcaaacatatcaagaaagctttattaatttttaattaaacaactttatcccttaaatagatatcatatctcactactttagtggagtaactaaatgtattacatatggtttgctaagggagtgagctaatcatattttctaagatcatttttactgtgtaaattatgctaattttttacttaattaggtccaatcattcaaacttcctgtggaataattgaagatgaatcttcagcctgtgtgtaatgtggattaacattctaaagcccaacaatagagacctgaatttcatttcatttaaaatacttatagcccaacaatagcccaaactcttaatcgagatctaaacccaatccatctcgatttgagaaacccaagcccatataaaagcccaaagattagaacttcggttcattcaaacgtacggaaaacaagaaatagaaagagaaactcgaatcgaaaagtgaactcagaagcaaagcaaataaagaaaagggaattcgagagaagtaaaaagagttttccaaaaccctaattttggagaaattgatcgagttctcgatcaattttttagttgaaatcaaatggattttgagagaagaaacgagaaagaagaagatcgaagtggtgaaa

SEQ ID NO: 107639 - DNA, 847 bp, Aquilegia coerulea
  Intron number 5 from transcript AcoGoldSmith_v1.000952m (l ocus AcoGoldSmith_v1.000953m.g) derived from phytozome v7. 0 (chr-ID scaffold_1; pos 3185827 to 3186673 reverse stran d)
aaggttattaattccctttatttgatagttgatgtttttaaatatggttgaattctttgattacacgaagaataattacataggaatgttcgttagtaggtacacctgaactttatagcatacaacattgttccgttaaggaaacacttaactcttggttgggtttaacgatggcgacaaagaacatataattaggttctgtaaaggtgacactaaaattctgattctcttaaacggcaaattcctttttggcgtgttataacattaaactagtttaaacaattcattgcgcattcatcctaggaaagttttgcgcatatgtccaagactccaagttctcaagaacaaagttgtttaccaagtgccttgcactgcatgaatgtcctcatgtgtgaatcttgaggacaataattaccaatgatactgaagattctttatgattgcctgctatttgtgattgtgataaattgaatagcgattttgctgggtggcgcttatgggcttttgctcattggaccatcactttgtcgcatttaaatgttataattactgttttgtcgtttcacctattcttttgttaatactgtaatgtattttaaatatactgttttcggtttttcctttttgaaatgtctatggatcaacattgccgttacaacatgcattttttttactgctgtttggtaaacatttaatattgtattagagctgtaaattttagttcacctcgccatttacatgagagtaatttatgttctcttggtttttagagcaagtaatatttatggataataactctttgatttgtgcagcctggtccggattccattggaatcattgctatttc

SEQ ID NO: 107640 - DNA, 465 bp, Aquilegia coerulea
  Intron number 1 from transcript AcoGoldSmith_v1.009585m (l ocus AcoGoldSmith_v1.005837m.g) derived from phytozome v7. 0 (chr-ID scaffold_30; pos 1261842 to 1262306)
tatcgcgaattgcaaatttagcttcaaaaccctaggtttgtttattaatttgtatcaaattgtcttcaattgaatttgtttaaattaggggttttagttaagttttgatttgtttactgtattgattatttattttttgaagtttaatttttgttagggtttattttgatttgaagtggaagttagggtttgtacgtttctgtcgtcattaactattcgttttcctcatttagatattgataggtatttgatcatactatatatcgttttcgctcatgtttaatggtgtaattataaagaaaatctataatgttttgtcttctattgaaattcaacgcatctttttttatttatataaattatcttgggtaacagttttttttttttcatatatataaacaaaaaataattaattttggtattattttagttaggtggagggtggtggtgcacctgtggcggctg

SEQ ID NO: 107641 - DNA, 693 bp, Aquilegia coerulea
  Intron number 2 from transcript AcoGoldSmith_v1.009585m (l ocus AcoGoldSmith_v1.005837m.g) derived from phytozome v7. 0 (chr-ID scaffold_30; pos 1262438 to 1263130)
gggcgtgaagcccttttcaccctctgctacaccaggtatatatatacgtaatagattttctgttttgtagttggattgaatacattggcagggttataaattacctctgctgacgaatattttcatctgtgatattttgtagttatgtgtgtttccagaaattgataatttttgttcgtaaccttgatttgaataattaattgtcgactatcgtttgttaccctttctgtgattgtttgcttatttaaacaaagaaaatatttcaacaaagaaacgatttcaagtttaatgccaatcaaggtttctattgtcaattttcttttttacagttaagaaaaacacgactagttgaacaataaaatctaattcgaagacaaagtagattgagcaaaccgtatcaaaaactggtatattgataaaatgcgaggttacgaggtttgattgcatcttatctgaatgattagttatcttgacacttaaagagatcaacatgttttgtttttcgactttgcacctaatcttcatagccccaatctttttttttcttcttgaaataagtaattgaatcagacacacatgtaattggcttaattggcaacatttacaatacatcatggtactgcatcttattaatttaattttttattgaatatttcaggtcccgggtttcttatttttctttgagttttagca

SEQ ID NO: 107642 - DNA, 548 bp, Aquilegia coerulea
  Intron number 1 from transcript AcoGoldSmith_v1.004020m (l ocus AcoGoldSmith_v1.004020m.g) derived from phytozome v7. 0 (chr-ID scaffold_30; pos 2325676 to 2326223)
aacaaccatctccaccaacaacaacatcttctcaggtaagtttttatgttttggtttgttcttggtcttgttgttgggttttgttttgttttctttgagtaattatgaattccataatctttatgcctacaaacaagctggtaagtttgctgttcttgatgcttttgttcaactttgttgttttgtagagttcagtttattatctagcttgaatgctctttcttgaagacattcatgagagtataaacatgtcgccaacgcgttcaatgacaactaccatgatgttgccatatggattatgagtttcttcttatgcttaattttcaaagttttcttgtctgtttgtttttccctgttgtcattctaccatttacctaccagtgataactattgatgttgaatgcacctaccctgagtgtatattatgtgctagtggtggattttattgattatgatgacttttgaattactgcaattggttcatagaattgacatgtaatattaataatgtaggtctcaccgaattcgcgagtttatcgtgtcacgac

SEQ ID NO: 107643 - DNA, 691 bp, Aquilegia coerulea
  Intron number 1 from transcript AcoGoldSmith_v1.000728m (l ocus AcoGoldSmith_v1.000728m.g) derived from phytozome v7. 0 (chr-ID scaffold_27; pos 2224825 to 2225515)
gtagcagcgaagagctttttcaggagtttaaaaaggttggttttttattgcaatttcgaataattttgtgttgtttggttttaaaaagtgaattttagtgggaaatgagtttacttgatgagtttggtggttttaattttatgctacattagtgatagggttagatatagagctggattattcgtaattagactacaattgtatgagttcaagctcatattttgcttgttatagtgttgaagtagtcttggaggtgaagattaactataattttgaaataattttgttctgtttggctttaaattgtaagaaaatgagtttattttacgagtgtggggattttgattacctgctttgctctagaattatatgagtttgagttcataatcgcttgttatagtgtatcatgtcaccttattgaacttgtcaacataatgttttcatgtttgaaaaacggtttgttattccctttagttatgcctttaaagatttttgataaaactcttatacgttttgtgtaaaatgcaatgcatttcttttccctttatgacaatgcaaatcctgggacatactagaccttgcatttgacgactactgcatgactctactcttgatgccattttttttttcttaatgaaggtttccaaacgcagccattgaacataacttatattcttcatttctctgcagc

SEQ ID NO: 107644 - DNA, 904 bp, Aquilegia coerulea
  Intron number 3 from transcript AcoGoldSmith_v1.009144m (l ocus AcoGoldSmith_v1.009132m.g) derived from phytozome v7. 0 (chr-ID scaffold_9; pos 818190 to 819093)
ctgactgtgagttatttatatttagagtataatcacacaatccctgttgagtcccatactcttcttttttaatgatatggcctttttaaatctctaagtgacccataatgacccataatttaacgttagaatagatagcggcaattatatgtatttgctggatgtggttggcttgttgcaactttcatatttttagaactgttggtgccttggggaaatctgttgaccctgattctccatgtgcatataaaagaccacattcctttacagtaaaaaggttcacaaattgttgttgtatccagtatcctactttgtcttcctaacatccttgtctttaattgactttcagacaacaaaatctctggatatttcaagtcctgtagttgtgaccaaagagccatttttctgcaatctgttgctttatgttagaaaaacaaacaagtgactattatccttcactttgtaaggtgtaatccgtgtcataggtaaatattttattctcacaattattataagtttcataaaaaaagagttttgggataatttcgaaatgccttcacccattggaatgaactcattttctgatgtaaatagtattagaggcacagttcaagcttacctgatgaagtacatatcagatgtcatgtatggaccattatagctcggaggatctttgagatgttaacaaataccatagtactcttgcgttgtttacagttgtcttgaagacagtaaaagatctgactggccggacaagctagaaagatgtttatataacatgaatgtttcaatttgtgttccatgtcagctcatttctccatagccataaatgtgaaaatgttaaaaattggttgatctatttggtgcaggtattcaactgctttggtagacagttttgcttgca

SEQ ID NO: 107645 - DNA, 623 bp, Aquilegia coerulea
  Intron number 2 from transcript AcoGoldSmith_v1.004307m (l ocus AcoGoldSmith_v1.001799m.g) derived from phytozome v7. 0 (chr-ID scaffold_118; pos 98258 to 98880)
ttgaaacagcagaagcccaactcgttcacattaaggtatgttatgttcatcttataaaaaaatttattattgtttttctctgatagataaattttagcttcttgtcttatatttggctttcttttgttttcttaattgttttcatggctctgagctggttgatcactaggtcttctcagccttactcttgttgacttacacttttttcaaactccttgagtacctaaaatatactcgatgaccacattgagatcctgcagagaatacaaaaatttcctcagtcgtaattcccataaatgttgcaatgagctacatccattccccttccccgtggtctgttcggtctcactgtaagctgctatgttatataaaatgcggcgtttcttcttcatggtgatctttgctaaacattataatttgtctggcatggttgtttttttatataaacaagtcttttcattcaactttgaatcatacatgcgagacctccctttgcttctgatcaccgcctttcttgtggtactataaatttattacatgcttacttaatgattttatcagtgaccttacatctgtctctttgtttagataaacagtattgggctgcattcctacactgaagt

SEQ ID NO: 107646 - DNA, 214 bp, Aquilegia coerulea
  Intron number 1 from transcript AcoGoldSmith_v1.000851m (l ocus AcoGoldSmith_v1.000851m.g) derived from phytozome v7. 0 (chr-ID scaffold_11; pos 3021229 to 3021442 reverse stra nd)
gtcgtcaagtaattataataatatatatatatatatttatatatatatatatatatatatatatatatatatatataaatagaatctccatttttttcttcaatttcttcaaattatcaaatgttttaataaaacctgatttgattaattgaattggttttgctcttgtttcttattaggaaggacgaccaggattaaaacaagctgcagagta

SEQ ID NO: 107647 - DNA, 960 bp, Aquilegia coerulea
  Intron number 1 from transcript AcoGoldSmith_v1.005310m (l ocus AcoGoldSmith_v1.005310m.g) derived from phytozome v7. 0 (chr-ID scaffold_15; pos 4237914 to 4238873 reverse stra nd)
ttgcctgcattttcttcttctttcgtttcacctcggtatatactcttcttcagttcagtttattacttgaatattgaaattcatgttagtgtatataatttgatgattaatgtcgtaaagtttgagactttttttggtaatgttgtgtgttgagaatttggcattttttgcaacatggattatataagaaaagcaaatgctggtaatggttttggtgatttaattggaagaaggagtttactaagtttatattgtaaagtttggaaaatgggaatatatttccttttagtttattgaagtagaagatatcaagcattagtatgtaatgtaagacataccattaatggtgctagctgcaaaatagaagccacataacggcattttccaggagccatttggtgaaaggaaatgaatacatgaaagactatcatataaccacacatctaaatatgctattcaccctttagcttttgcgttttcaagactttacttcacgtcaatgctaaatcgactctttcaactgtaatacttaatatttcggagaaacttgtttgatttttgggtggatgtctgaaggctattccaattttttctttcctatttctagaattagtacattctctttctacaagaactgcttcagaagcatttgagtgaacaccttgtcacccactagctaccctataattcttcttagtctcacagtacgatatttggtgaaatctcatgtactaattactattaaacttattggtcttgcttaaagtctctaatgttaacagtccattcaatttctgtacatacttatgagagccttgtgctgattctatattgtggatggctggacgcgtattatatgtttgatgtagtggatatgtattctatgtgtgttatgtatcaattgcatactgcaaatgtttatttactgaagctttaccggtgtcattaaatgtagctcca

SEQ ID NO: 107648 - DNA, 688 bp, Aquilegia coerulea
  Intron number 1 from transcript AcoGoldSmith_v1.010675m (l ocus AcoGoldSmith_v1.010675m.g) derived from phytozome v7. 0 (chr-ID scaffold_49; pos 812780 to 813467)
atccagccaagccacccgccgccaagtaagtcgatctccttgtgttccttatgctaacatgttatgtgggaggagttttgggatataattgagcactttttgtatgttcttcaaattgaaatatccaaataattattctactttttttttttttttttttttgtttcccataaagaaactttggttgctcaaaagaacttttatctcttttgctaaaaggaaaaaaaaaaaaaatgagttcaagtttattatcattctaaatttccttcaataatcattatttcttgttcttctttgtttgggtgatgggtgaaaagagtgtcatagactattacatgaatcaaacttgttactatatatgagttttatgttttaaattttttggcctctatgttggaaatcattgtaatcttcaatcctaacctccgccatggaaggaagaaaatgtttctataattggaaaaaaaaatgtatgatagagctaacaattaacaaatgaaaaaaaaatagagaactcttcatgtgtgttactttactaataacttaaatttctttttatcattttggtgtgtttatcttttgcttttggtgagtaaagtacatgtacactttggtggcattttttgtaattatgaagtgaatatggttttcagggcacaggtggtaggttggccacccgttcgatcat

SEQ ID NO: 107649 - DNA, 873 bp, Aquilegia coerulea
  Intron number 1 from transcript AcoGoldSmith_v1.020207m (l ocus AcoGoldSmith_v1.020207m.g) derived from phytozome v7. 0 (chr-ID scaffold_1; pos 2449899 to 2450771)
aaaagaggttatcttcttgttcattctctgcgatgaacaaagaaggtgaagaagaagaagaagaacagagaaagtagttttggttaacttctcttttaaggtaagacagttgtttttgtcttttctgggtggaggatagagtagtgtgttgtggaggattgagaatgctggtttctgtgttatttcatccaacggtggtaatcaaagatgttttttcatctaacggcgagagtttagtttgctgaattgaatgaggagagagaaaaatcagacaaacagcagatatgatgtgacggcttaaagctgtcataagggtagaaatgtccaattgaaaagtcaaagatagaattgtgcttgttggggaagattgcagtcaaatgtgctgatttgggaagaaacgttataaacctgtgcttattcgggaaattaccctatattttttgtagtatactcataattcaaaagttaataacataattccaaaaaaaaaaaaaaaattgtacatattagaagtttaacaaaatgtgtagcttttcttccttgctcttggacactagtcatcaaaatgccacgtgtcactttgcctacattcacctgcaaaacattaatttccagtttctatgcacctggccacagaaacttaacgtctacaccctctttcagccaccataaaaacttcctcgagatacaaatcacaagcatggtgagatgaaagtgggaacagactacagaggttaaaagttactattttagtttattttaaaattaaaatataaaatataaaatataaaagctgatttgagtaaagaaagaaaacattccagtccactgtccacccacaaaagaaaatgtcgtcatcttcttcttttacag

SEQ ID NO: 107650 - DNA, 882 bp, Aquilegia coerulea
  Intron number 1 from transcript AcoGoldSmith_v1.005620m (l ocus AcoGoldSmith_v1.005620m.g) derived from phytozome v7. 0 (chr-ID scaffold_10; pos 1809194 to 1810075 reverse stra nd)
atcttcgccaaaagatcaataagcaggttctttttttcttatttcttgtatcatctttgattaatctgaactctgaagaccaacttttgctgcatttgcatattcggatttttgtcaatatctttgtttcaagatttttttgtcgatttggtgttttttcgtattcatgatccaagggtctgtcatattgtcgtagttgaggagatagtttatccacattacaggaattttggagtctgtgtgtattcactgttatgaactgcgattttccactacagctatcatgggcagggatggatctaggtggggcgtggagggacagtcgcccccacagagctcaatttttttctataatatactactaagtagttatgcttttagtaaaatataagtatttgccccactaaatttttccgcatataggctatatatactttcgccaccccagactcagattcctggctccgtccctgatcatgggagtgatgtaggtatataagatagcaatttagtttctttcttggtactgtgaggattccattgaatggcctttgtgctttgtagaacttttcatatatatagaatgttggtagttatctcagtttccttcattgagaaaatgtgcgattcaatcttcttaaggaacctgaacgttgttgacgttctaaatattatgtgggtctttttggtagattgactgttttttttaaatttgctcttgctactctgtgctcgatgcataatcatgtatacatctgtgagttagaatataaacacgaaagtcttactcttaagctatgaaaatctggtattgatacatgttaatatctatttatctatagcattttgtttatgtaacaggtagaattccagtttagtgac

SEQ ID NO: 107651 - DNA, 873 bp, Aquilegia coerulea
  Intron number 1 from transcript AcoGoldSmith_v1.015764m (l ocus AcoGoldSmith_v1.015764m.g) derived from phytozome v7. 0 (chr-ID scaffold_12; pos 763362 to 764234 reverse strand )
caaaaaagtgttaatgcatctaactgttagtaaccacccataaatacgtgattgggagtacccttgcaaaatttagttattacaacccattccccactactcccacctataaatagttcatgtgcaagttgattgcagctcaaatttcatcgcatccacttgcaattagaggtgggatacgaaatctaaggaaaataactaccttagagatcgtcttcttccttagagctcgtcgtcttctcccttagagctcgtcttctccaattggaatacatgtttttgcttgaaaagagttccccatctcaatctaaagcttctcattcacctgttgtctcttgattttgctaaggtaagctttttttactgtgtttttttttgtatatctctcatggttttggttactttttttgctacactttgtcataaatcaattcttgattttgaaaatattgcttgaaatcttgattggggtataggttttctcaattctctattcagaattatgtctattagaaatataattacaagtatgaacagtttcaagtatgaactgatttggtaacttaaccttaatacttgaatctgcatgataaaattatcttaggttttgaatgaaaattggcttgtagaacatagatttttagcttattaccttgaattttaattatagaataatcaatttattttgtaacaatatctttttattatcaattctactagttgcgcatttggcaatgacaattacaacccaatttttctttcatcagataccgaaagaaccttgtgtgaattatgttagcgagaggaacacgtacatggactctgttttgaaaagagatcaaaaatgtaaatctaacttgcgaatgagagcag

SEQ ID NO: 107652 - DNA, 611 bp, Aquilegia coerulea
  Intron number 1 from transcript AcoGoldSmith_v1.013701m (l ocus AcoGoldSmith_v1.013701m.g) derived from phytozome v7. 0 (chr-ID scaffold_118; pos 66716 to 67326 reverse strand)
gatcaggtactacgtactattctgtttcatcttagcctgtgtaagagacaatacgatttaggtttatctgttatttacaaatatcgatgactttataatgcacataggcataaaaaacgagttttttgagtactttataaatttgacgcctctgtcagttgaaggcccttgttcaactggtgtttgcggagctgtacatatatatatagttcgaaatttaggctgtagctgcactagagttcttcctgttatcttgtccctggtgatctactatccacgtttgagctctttctgagctctttctgtctcttagatcaatgcccatagcatgattcctaagtttgtggtgagtccagcacctctaggcaaggtaactcagaatccaaattagactatggaggaacatgattgtttaaaaaaccaaattgttgtccttattttctaagcattgtgacggattttctagttttcgtatggtctgaattgcgaaagaatatgcatcaaaatacagggtctaacaacttgttactgcagacaacgatgcagcatatttactattaattcggttgtgacaatgacatttaattatattcacaggtgcttcttaacag

SEQ ID NO: 107653 - DNA, 474 bp, Aquilegia coerulea
  Intron number 1 from transcript AcoGoldSmith_v1.009393m (l ocus AcoGoldSmith_v1.007186m.g) derived from phytozome v7. 0 (chr-ID scaffold_10; pos 2950763 to 2951236)
attttcttgatctcgtcttctcaagaaaccctactgtaagtttttctatattacttttcttttcatcttcttcaactcattttaaacaatttgtttataaacattgttttatgatttctatgtaaaaaaaaaaaaaaaaaaaacccgttaaacccttttattcttaaataaacatttaaaaccctaacatttgattttgtttactattttactaaatagaaaaacaaatttcaatttggggggtttttggttaatttgtaattaaacccaaaaccttcttttaaaccctaatttttaattcatctagggtttcttatttgttaaaaaattggtaggttttttagatttattttcctttaattatctacatttcaatttggaagattttttttttttttttttttttttaatataattatttttttcagtattgaaagaggagaattagcttagaaacaaatatgtctgcattag

SEQ ID NO: 107654 - DNA, 635 bp, Aquilegia coerulea
  Intron number 1 from transcript AcoGoldSmith_v1.005801m (l ocus AcoGoldSmith_v1.005801m.g) derived from phytozome v7. 0 (chr-ID scaffold_30; pos 2762005 to 2762639)
ttcattgttagagtaagtttatgtctttcttaatatgggtatccacaatgttcaattgtagtcatggtatttcaatttggtattttggtacatccttgatataatattatttgcatatatgttatttccacgatggattgctttctcaccaattaccctattttgactcttgttgttatgccaaaactaagtttacatgttggaagaatttatccaaatcgttcttaaattaaacttccctggagggtcatgtgatgacacactagctttcaatcaaaaggtgttttgattctcatctgtttcccaatgagaaaccatgcatgtactaggttatgcgggcctcaccacctggtctcatttttctataaaatgtctgtattgtttattcggatatggttatggaataaagttaaaaataaaacctatatatatatatatataatcttgtccacttctatttcattgttgaagaagattaaggtgttttttttgttgagtatactttatctgtaatttaagcactcttcttacaatgattcacacggtctatatgcttgtcattattaagttattaatgcagatgttaaacatcctttgcaggatattgtagaacagctaacaccagttgcaattac

SEQ ID NO: 107655 - DNA, 951 bp, Aquilegia coerulea
  Intron number 5 from transcript AcoGoldSmith_v1.004798m (l ocus AcoGoldSmith_v1.004805m.g) derived from phytozome v7. 0 (chr-ID scaffold_37; pos 667173 to 668123 reverse strand )
accaggtcagtgtcggtaacattatttttgttgcttagcattccaaattattaatgtaagcggtctttcccaaaacgcattagttttgaactttgatttgtatcagtcaaggaaaagatatcatgagaaagagggggagttttgcagtgggatattgaaataaagaaccataaggtcaaaaatagaatgatatcgttaaatttattttaaataaagaaaagtatttaggaatagataaccattcctgatactttcccaggatattatcatagtttacacattcatgacatgttgctttcttcattaagaatactggtgattatccattatcagtcctaattttccattcaacgtaataatgatatctcaatattgtatagaaaaagcctaaagagaactgctcctctgcacaatgtatatattttcaattattgatagtcttgcaattgctatccaaatgttatggaatcttattaatgcatttgatcatagacctgtttgcattgaattggtctcgcaattgggatgtttctttgcttactactgtaatgcatttatgttagttgtcttcccacattttaacggaactaactgaaactcattttaaccggacatgcattatattaagttcttatttaatttggtccactaaatgctagagttcagggtgaatccctttaaagagaagactggtcctccattagaacattgcatttgtggctcaattgaaagtatatttgtcttgggaatgctcacataccatgtcatttagtgagctggggaccaatctttgaaaaagaaaaatacacttctagtagtttgactgtctgtctctgtgtgtatagcggtaaaaggatcagcacacttcatattctaaggccaactttttttgttttcctttggcaaacttttttagattccaccaccagagagtaccattggtaattcttg

SEQ ID NO: 107656 - DNA, 1031 bp, Aquilegia coerulea
  Intron number 1 from transcript AcoGoldSmith_v1.018823m (l ocus AcoGoldSmith_v1.018823m.g) derived from phytozome v7. 0 (chr-ID scaffold_7; pos 5181748 to 5182778 reverse stran d)
cccttgacatcagatctggcactcaggactccacggtactttcttgttttcttctttactttattgtctttgcagttaatagtgtgtgaaaactgggctatctatgggcacatgtgttttgggcttttatagtggacttcagaccattacattacaaccatataagacctcaagaaaaattagagacattatttgttcgggtagcccactagcccagcatttgttttcgcaacatgtcaataaggcaaatcaaatctagcattttgccgccttcttgctttagatgaactcccctaatgtatccaacttgtcttgatgttatgtgtgttatctatatatctatataatagctagacccatgcggtcccacattctctctcctaggtggcatcctaaatgatctccaagctcttacaatttttttattttaaaaaaaaaaaaaaaaaaaaaattggttactttaaaactaatttttgtttttctctatatttcttaaccatttttcattaaacaaataacctctacactttttatccactctcccactaaccacaaacctctcaaatcaaaataaaaacacaataaaatagtaaaaacatgaattaatcaaacataaataacacgggcagtctaatgaaactttttctcataccccggtgcgtagcgcgggttcccagcttgtgagatctaaatatgttaatatgactgttgaagaatagaacaaaacaagatgcatgtaaatttttttttgcaaaaaaaaataaaaataaaaataaaaatgcatgtaaaaccagaagtagaaaaacaaagaacacaaaatttgcatggttgcgcatattgcagtactgctactgtgctacaccaaggttttgtgtagtacttgtctatgtatactgtatttttcacagcaagaacctagaagattggaactcagagagtctcagacatattagtccattcatgcactggaaacttaattaaaatctgagttctggcaatctgctgtttgttcaatctgttaggttgatttc

SEQ ID NO: 107657 - DNA, 547 bp, Aquilegia coerulea
  Intron number 3 from transcript AcoGoldSmith_v1.007633m (l ocus AcoGoldSmith_v1.007633m.g) derived from phytozome v7. 0 (chr-ID scaffold_9; pos 53021 to 53567)
acgcagtaattttaaccttccatccctcattcactttctaatacgtatgatttctatgtcgcatcatttctcttacaggctttaccccctttttttttcaaacttacacacacagaaaaaaaaaaaaaaaaaaaaaactgtctctctcaatcatcatcaatatatataagtttatttaccctatatatcatgtcagcctggatcacatagcttgctataacacatttacaacaatggaactctacaccatgtcttttttcttctctttttatataagttacatcaactcttcacttacaaatttaatatgaattcaaacatgagtatctaaagcgctataccaaacactctatactctgtcagaatctgcatccattttattcaaaaaagacaaaatatatatatatatatatatatgttgatccattttacgtaacttaaaaataataatctacagtagttctgttaacactaagaatgagaccgacttgtcaaaaaatcggaaattcacctgagaatttatttttcttttcagattaagagggag

SEQ ID NO: 107658 - DNA, 987 bp, Aquilegia coerulea
  Intron number 3 from transcript AcoGoldSmith_v1.000438m (l ocus AcoGoldSmith_v1.000438m.g) derived from phytozome v7. 0 (chr-ID scaffold_1; pos 4517984 to 4518970 reverse stran d)
gacagctgaagaggtgaatgcttgttaccaaaataaattttatggatttaagattttcatatttactgtacaactactatgctttgaattatttgtaactttatatgcacatgaaacaagattttcgatttcacagaacatttaaatattggtggtttgtgcgtttgccaatcaaacaattaaaccatacagattcggggaaaatgagcttgattgtttgtctgaatacatttcatttctttggtagttgtaagagattattcaaagtgctcgtgattatattatcatgtgtcatatgtattctataggcaaatgttttttttttgtcttattaagaatatacttggtatggatataagtcaagtggaagatgattctgaatgtatatcttactaggctgaaccaatgagtttgatgtattcttattgaggtttggtttttggttttgtggatattgattgaagattgaaattgtatggcggcaaattctagttggattggatacacttgaagtttattccttttaacttaaatggtcctgtcaaacacttaaaccttagtcagtctggttttgtgcgtagtatattagtttcacatgtctcaaacctagccacttctctgtactcacttgcagaaaatgactgatgttgggtagaaacatgtcttttattcctcgagaggccaatatggaccttttgatctattagtttcacttttgcagtttttctagtgaattttgtgaactgtggagatctttttgtctaacttgcttatctgctacaaagctgtttagagtattgatatatccacccccccatggcattgtcgcctcatcctataccaatatgttgatgccattttctttcctggtttattttggtttccatttttggtagaagatatgattggttttttttcttttcttacaactcttggttggaactttttggtgtatctttttatgacagaaatattggtctgtgcagg

SEQ ID NO: 107659 - DNA, 909 bp, Aquilegia coerulea
  Intron number 1 from transcript AcoGoldSmith_v1.000438m (l ocus AcoGoldSmith_v1.000438m.g) derived from phytozome v7. 0 (chr-ID scaffold_1; pos 4519459 to 4520367 reverse stran d)
tattcaatacttactacattctgaagatcatttcagtgagtttgttctcaacttgtttaataaggttgatttgaagtggaaattgttttgtttaagtgagttttaagctttttgaagttgattttttttgaatgtttggggatttttcagtttgcaattgatttgatcggttgaattgtattgattagggtttattgggatgttaatttcaataaatttgtggattttaagttgtttattggcttaattattgaaagggttgtgaaaaaagtttgaatttttggtgtgtggggttaaagtgatggaattgataactttggttcttttttcagctttgttggcaatagggttaattaggtttgatcattatggatatataaatcaagtattttttatgtgaggagtagacattgttgtatggactatggatgatcatctcattggatccttattgttagtgtggtttaacctaatatctgaatacatgacgatctgacatggagatcattgtgattatgacttcaaatttaatttggttgtttcatgaatgtcataatggatggatgtctttgaatttcttctgtaaaaccctatatctagattaaacatagtctggggccatcttagattatttgttggttcggctaatttgctaatttgctaatttgatgtccattggagttgttgctgtagttgtgaatgtattttttcttcttcttattcaattgacattatttacatgtctagttaacctggaggttatatctcttttgttcgattctgatcaatatatatttgtttttaatttctcccctctgatgccctgttttatatttaatatttattgattttagctactgttttattgtctcaataggattcttccctcatttattgaggtggctgata

SEQ ID NO: 107660 - DNA, 755 bp, Aquilegia coerulea
  Intron number 1 from transcript AcoGoldSmith_v1.002531m (l ocus AcoGoldSmith_v1.002531m.g) derived from phytozome v7. 0 (chr-ID scaffold_37; pos 1185190 to 1185944)
caggtactaattagaaactgtttgctgctttggtatttcagaaatatattctttttgtactttttagaagattttggcaattgggtagttggaatttacatgatttatgtaatttgggagattggatttataatttatggagcaaatagatttgaaatataaacatggtttattttgctactaattactaaagataagatttttattagtaattcagcttgattgcttcatctggattctggagatcactttggattttttttttatcttttgatttcagttcatatgaaaataattagttatttcttaaagtgttcaagtttagttaatttcgaggttaatggtattgacttcatcatctggtttcaattgagttgctttattcaattacttatttgatttaaaacaaccttaaaactttcccaaaagaaaagatgggttttattaattaattaagcttattggtgaagaagacttttcattaaaacatatgttagtggaaattcttgtgttgtaagtcttatcaccaaaaggcgaagtttcttttggctagtctttctatttgagtgattgagtttttgtaaatgtttcactacagtagattgttttaattcattttcccttttctctttttaaatctttgttcttcttttgtgatgcggaatattcataattaagtaactagctttctttgcatgatttcttcatagtttgtttacgttgcaggtttggggcctggaagctggaatacaaac

SEQ ID NO: 107661 - DNA, 724 bp, Aquilegia coerulea
  Intron number 2 from transcript AcoGoldSmith_v1.025646m (l ocus AcoGoldSmith_v1.025646m.g) derived from phytozome v7. 0 (chr-ID scaffold_9; pos 2759268 to 2759991 reverse stran d)
agatattgtttctgctgcagttcgtggttttagtactcttatctcatcgtttgaagtttatttttagattaagagttgatctgaatttcaaaattagggctaatatgaaattctagtcgttctaattaattagttcaaaaaaatttagactagaagattcaaaatatgggctgaagttaggtggagttatgaagaatttttatttacaagcgtacaactaaattggcatgacagttcaaacttctagatttaggtctggtcttctggagtttaggattagctgtggtacagacctagggtttgccacaaagataaaattcaatttcactattaaattttgatgaaattgcaaaaatgggattctagaagtgaattttattaattagtttcaattgttattctttcgtatctgcaatcaatcatttctgtttttcttatttttcttgatgctgtttgtccttgaatcctgggcatctggcacttgtgcaattttggttgtcattgtctcttgtaaatttcaaacataggttgtaactttttgttgcttttatcatttatgcttatggagttatgttatcatgaatcctggttcttcttgtgcatgaaaccctatataatttgtctgtttaaataacgttattatgctccaaatatctgtcctttgttgtcaaataaacatattaccacttccatgctttcttacttgcaggcacggtttttgctt

SEQ ID NO: 107662 - DNA, 886 bp, Aquilegia coerulea
  Intron number 2 from transcript AcoGoldSmith_v1.009194m (l ocus AcoGoldSmith_v1.009194m.g) derived from phytozome v7. 0 (chr-ID scaffold_9; pos 2271570 to 2272455)
agcacaagtaagctcatagagatttttttttggggggtatattcttgtgtttgtgtgtgtatgtctaaaggatttaacatcattttggttatagtttttcctttttttgtttttttctagaatcattaagttttgttggttacttcgttctgattaattttcttcatttgtgttggctttttatttctttgtgattgattttttttttctctaaagtaccctatggatttagatttgattttaaacagttaaatcctgcaaagttgacatccatgtcaagaagtcaccttaaatacttctagttcatggttcatagttgctaaaaagtttattctataagacttgactacctggtcaaatcggtcaaaataaggacaagtctttgatttacttccagtgattttaaattaatccattgaaaatgtctgaatcctaatatggattactaactaaaatcagttgatgtgaattatctctatttttcacttacagtgaaaaaaataaaaataaataaaattggtttgtttagagggttggatccatcatccatatcaggtcaggtcttggatcgatcatttgaaactttgttcaattggatttgattttagatctgaatctgattcagatccaagtccattctattaggaccaatgtggaatcaggatccagtagttgccaaatcagatgtcatggttgaatttaaatcagatgagcttttaccctgccttggtaaccaacaaatgaaagtaaaaaaaaaaatgtgaagaatgcaaataaatagctagaatgtgatttaacaaaaaatatttagttatttctgctcactcatatataagtgtttccattttcagactggtgtctctggtggctagcgaagcgcagtttt

SEQ ID NO: 107663 - DNA, 999 bp, Aquilegia coerulea
  Intron number 2 from transcript AcoGoldSmith_v1.004881m (l ocus AcoGoldSmith_v1.002760m.g) derived from phytozome v7. 0 (chr-ID scaffold_37; pos 1826390 to 1827388 reverse stra nd)
attttcagtgctgtttcagctccaaacacaacaaggtgactatttccttacatgttactttgcttggtatgcttaggccttataaatgtctagttatgactttcaagtatcttattttttaatacctcataataataactaataagacaaggtttttataatttattgtaactcgtttcaaattcactagcttatgagttttgtacgagaaaaagaagagaggggtgggggggtgggggtggggattcagggtcaataggatggtcagaattgagagagtgatggtaggttctgtaccgtatatatccagaaattcttttcttgtgtgtgaatgaaattaggttgtgttgtattttagccaaagtcagccaaacattaaaacggaagaaaaaacaagtgaagagaattggagaaagcaaagaggagtgctgctgagaagaataaataaagtgcttcagcatcaacgggttataatggaaggagtagagactgggatgtgacaacagcagaatataagcaataaaaaggaagaaacaggagaaaaaagtgtatggatgaaggaatacttggattccgtaatttttgggtttcgacctaatctgaaacaaaacgactacagaaattatattgatttataaaacttgctgtcgcaaattgtaaggaaaaaacccaaagaagaatgtcatattataataccacaagcatacacaccaggcaatcacctgcatgcctcttctgtgtcaatatatgggcactgtacatccacatatccacgaggcatacgctttataacactgcttctgaatatatagatctctaacttcttttcagcctaataatgaattcataattttaaactatggacacagcatgcatcttaaatttgcagtacttggcacatttactgttagcaggtctaagacattgcttgattgctcaagtaattcggtaaatgacttcgagagacagttacaggagttttttcttgaagtcaaaacc

SEQ ID NO: 107664 - DNA, 809 bp, Aquilegia coerulea
  Intron number 1 from transcript AcoGoldSmith_v1.004881m (l ocus AcoGoldSmith_v1.002760m.g) derived from phytozome v7. 0 (chr-ID scaffold_37; pos 1827541 to 1828349 reverse stra nd)
tcgtttctacttccttctcttccttgtatcaataggtattactacaacaactctctctctctctctctctctctctctctctctctctcaatgtctttttagttatagaaaatcatatatatagactatcttcactccccaattcttaatttacgattcttattatttacactctagtttgattaatatttactactaataatcttgtaaacattttttataaaatgcaatcattttacatataaaaaccttttttgtacaacgaattggcaacagattgaagggtttaagtcttttcgctaaattttctgttgtggttggggttgcggatgagaatgaatgatattttgagtagttcatgttggttacttaaaaagtccaaaactcctgcaattgaagtggggcgcgaatatgtggtgtgggtatgcactaccattttcatgttttgttgctgttccaagctatggagtatttcaatttggttatgtcgagttctgtcatatatttagggtgatgggttcataagatgcttagatgtttctgaacgtaggaatgcatactttgtgctattccacctataggtcacttctgtaaaacttggtagtatagtatgctagggtggtgctggtcttgctcattacaacctcaaggcattggtgggccactttgacaacatcatttttctatgaaatttatacactactgtataggtgaattgatatcacggtttgaactttacatctgttggtaacattcttatattggacttttcaggacgagagatagcttctttttgcaaccgaatcatc

SEQ ID NO: 107665 - DNA, 618 bp, Aquilegia coerulea
  Intron number 1 from transcript AcoGoldSmith_v1.013561m (l ocus AcoGoldSmith_v1.013561m.g) derived from phytozome v7. 0 (chr-ID scaffold_1; pos 4625256 to 4625873)
ttggtgcaagctaacttgtttaatatcaacttgtgcgagcgaatttacctagaaataaacaaacaaacaaacaaacaattagtaacaacaaaataaaatagtttttttttttttatgaaatgggtattttgattgttagttatgcttttttgggattttgatgaaatgggtattttgtttaggtttgggaaattggatttgaagtgaatctacagcaacagtttgtcaatttagtgagtaattttgctgtttttgatttgtctgattggatttaagatgttgatatttgagtaattggatgacttgcccgtataaaggtttgattacgatcacaagatgtggaatcctctgctgctggtggtggtggaattgggagagatgaaagagaagagaattaaaagggaagagagtttaactcgaatcagtatattacattacaagaaataagagagatagactacctggttcaaatcaagagactgcgctgagattgatgaagagactgtgcgctgagattaagagagactgtgcgctgagactaatgcaaaaaaagaactaatggcaacaaaaaaggttgaagtagagaactagagattacaagaaattggcttgatttgc

SEQ ID NO: 107666 - DNA, 590 bp, Aquilegia coerulea
  Intron number 2 from transcript AcoGoldSmith_v1.016736m (l ocus AcoGoldSmith_v1.016736m.g) derived from phytozome v7. 0 (chr-ID scaffold_96; pos 328849 to 329438)
aggtttggacttttatccatgtaatttatagatcattcatgattcatgtatccaccttgggactcgaggattatattttgggtgtttgaaacagcctttatatgttttattcacctggatgattttatcatttcgttttacttgttttattggtagaagtttatggtcttctggttttgttctcattgctcagttcaaaagaaactcgaatgattttatccatcattttggttgcacaactttatgttttgtgttttggaaaaaagaaaagtaatataagctgaattgttacggtcatgtatttgtcgaaatgtcttgttggtggaacatagagggatgaatccaatctcttcacatgtcatttattaccagatttcaagaacacaaatcacatatggaactttatgacacctgtgctggactttcatcatgtttctgaaattcttttgaattatctgggcaccatagttcagcatttactactgttttttcttgttcaatttacccttttctgtgctagttttgatgcttatatatggctgcacttgggactttcccattttggaattcaggccgacataggtcttgta

SEQ ID NO: 107667 - DNA, 848 bp, Aquilegia coerulea
  Intron number 1 from transcript AcoGoldSmith_v1.019856m (l ocus AcoGoldSmith_v1.019856m.g) derived from phytozome v7. 0 (chr-ID scaffold_54; pos 152895 to 153742)
cacattatagcacagtcaccttgcactcttgcagtgtcatgcagtgcagtcattactcatttgtcttgcactcttgcccattaccaatatatatgggtagaccggcagactgaacattttaccctggagaacgtctttatagagaagtacattgtatcaaggattacatgcatttgtagatttaaggactgatttgaactcaaaccattcatttatctactgttcaacgcagagaatattatgtcttacactgtatcttgtcggcatttttatgtttcctatgacccactgatacaaattactaggcaaatatactattgaatgcgaaattaaataatagcagtaaataaagatgaacaaaaacacaagatctcgaagaaaactattttctttactgaatattatgaagattacaagaatctctgcctcacaatactctctagacaaactaaaccctatgtctcaatatttctaaacacactaaaccatagtggtttctctaaacaactaaataagtcgtttcactatgttttggtttatgccaaaacatcaatctaaacaaactaagcactacatgtttctctttccatattttggtttatgccaaaacatatatttataggccaaggatttcccttttcctaaaattctatcccttatggaacaaggaaacctatttaaggttttcttttctttgtcctacaaggaaaagaaactgctaaattcccaagtaggatacacctgtatcacccacgtttacacctgtaattatcgattagttagtgaaaaatatgtattttctcaaatgagcagtgtggttgtcctggagttacctgcaaggaagaaag

SEQ ID NO: 107668 - DNA, 944 bp, Aquilegia coerulea
  Intron number 2 from transcript AcoGoldSmith_v1.011023m (l ocus AcoGoldSmith_v1.011023m.g) derived from phytozome v7. 0 (chr-ID scaffold_37; pos 273556 to 274499 reverse strand )
aacttgaggtggatttttccaacaggtacatgaacttcatgttatcctttctcttggcatgcttcttagttcataatttcaaagtagttataaataagattcttcatttctagactagaagatttgccatcaaacgagacaagaaatcaaacatacatggtcagttgacttgctgatttgaccatatcccaatccatgcgatgaaatccatttacttggaaccttgtaaaaatctgggcttttaagttaaatatagtttctgaaacttttcctgagaaacaacactctagcattgatcttggggtgatctgattgtgacaaattccatacaaaatgatttcttatggatgtttaactgtctcatatcattctatatatgttgacattctttcgccatattggttgtctaaaattttacattgttctacattttgtgttatgtgaagcttttgttttccttatgtgtgtgcatttgggaaggtttgtagaactgtagatgagtactttccagtatattactatatgaaaagaagacatgttctgtaaattccattgaagtttgatttggctgaaaagaaatattatttacctatgtaaattaggttaatagcacaaacgttccggaatcatattggtcaaaatggcatgtgtaaggtgacaaaattattagctaaaagctatagatcatgttataattttcattggttctatgcttctattgatataaaagaaatgctttgacatgaataccatttaagggcaaacattacatggaatgctgttgttagcatttgatataaaatcacatattcactgacattgtagctcacatgttaaaacttgctgtctctttatatctcacatttatgtgttaaataattactttcaggatgatttgattaatgatgatatctgtttcctttgtttatgcaggtttcagtacc

SEQ ID NO: 107669 - DNA, 630 bp, Aquilegia coerulea
  Intron number 1 from transcript AcoGoldSmith_v1.014602m (l ocus AcoGoldSmith_v1.014602m.g) derived from phytozome v7. 0 (chr-ID scaffold_10; pos 502181 to 502810)
taacagctgccttgatacagccgttaaccgctctagtgagcggttcgttcgcctaaatgcaatgtatcctgaagtctgcagttgtatttctatcttgtggccgtagaggtcaagattccaaattgatgtgtggaaaaaataatatcttgtaattttatctgaaatattaaaataaataaattacctatttcgaagataagattgttattagaatttagaaataagatgattcttaaatttgtttgcctttctcacactaatcactcttgcacatggatgaaatttgtatagtattaaatagaaaaagttgactttttaagcccaactgtaaaaaaaaaaaaaaagaacagagttatatcaatagatagatgatttctaaaccagtttgacattaatgcctattgcctagggtctctgatgtttttattctgtttcttctatttctgcattattttatcttgagagtaattataccaaactagtagaaattgtgttattttggaacggaacaagaagatttagtacataagggcaaccgggaggagaactcatccagttgtttcttttatttcattttgattctctatttcattagctgcctattttgaaatagattctcagctacccatt

SEQ ID NO: 107670 - DNA, 973 bp, Aquilegia coerulea
  Intron number 1 from transcript AcoGoldSmith_v1.001537m (l ocus AcoGoldSmith_v1.001537m.g) derived from phytozome v7. 0 (chr-ID scaffold_6; pos 8756152 to 8757124)
cggattttcaccttcaggtactttgaatttcatgcaagctaagcatatattttgcttccggatcattatgtgttttggtagaacattaggttttagatgtaaacgaatattatcatatcaagaggggagggaaaatcaactaaaatgtaaactgtaaaggatacaattattactgtattattaagctgcatctacgtcgaaccctagttaaacaggctcctaggagaacacaaaagactccaaagaaatttgcactccctccattactattataataaggttataagtttagtcgtgttggatcagtttatagtttatacattacaatttgatgataaaatgaagaaacatataagagtttacaaaattccttgccttccagtttatgtgtgcttggaatgttctattaaagagtaaacatatttatcaacttttaaagattctgagaatgtattgccttttacctgtaggaaaggttatagtagctagtattaaccgtctttttgttccacgtttacataatgtttgttgttcaggtaactttatagcataagatgaccctgctctaaatgtctttatataatggtcttcacacttttcagctatactaatgaaaataaaaagtgaaagcagatcatttgttttgaatggaattttcaaatcaaatttttttttttatgctagagttataaggagtagcagattttaaggtgaattgacacttacgtgttttggacttttggtagagcattaggttttagatgtaaacgaatttgcatttgtttgattcaactgaatttgcatattattggtgccgtctctttcatttcatttactttacatgcatatttttttatcactaatgtttagtttgttttggatcttacttttttttttctatccaagttctccctctactacaagcatctaatcttttgatttttcgtcatgcagcttgaaaatattttcattc

SEQ ID NO: 107671 - DNA, 571 bp, Aquilegia coerulea
  Intron number 1 from transcript AcoGoldSmith_v1.023130m (l ocus AcoGoldSmith_v1.023130m.g) derived from phytozome v7. 0 (chr-ID scaffold_1; pos 3862760 to 3863330)
aatctcatcactggtaactacatattaattctctatcttattgaatccatgttgctgctacctacttgattaacgttggctagtaaaatgaattcaagtataccatgtcatggttgtgtcagacgtagagaagctaaaacctgatcacatacttctaaactttagtcttcttgcctagctacttctgatttgttataatatttgatgtgaaattcatgcattattgagctcatccaaaaacataaatcgtgatatgcataatttgttaactccactataaaatatttacatgatagttggatctactgcatatttgaatatctgccttttctcattgaatttttattttgatttacatgtttgttcaaaatagtgaaagttacaatgacttttgccaatatattattgtctgtgtttatgccaacataaccaaaattcaaggagcatgcagtctgaagattttgaggtttatttgctagcaaatgatgtccctcactctaggcggttttgaagaagtaccttttgccaagatgattaaattttcgtaaatttctctttgatgtctgtgtag

SEQ ID NO: 107672 - DNA, 396 bp, Aquilegia coerulea
  Intron number 3 from transcript AcoGoldSmith_v1.010843m (l ocus AcoGoldSmith_v1.010849m.g) derived from phytozome v7. 0 (chr-ID scaffold_11; pos 3746105 to 3746500)
ctaaaggccaggttggagtttattgttcttgataataagtaaatattgtaaatatctaattatctctgatatgattaacagttatgaatgttcattactagatgttgttgtagtctttcccctgatgaaattttcatcattttgttgtctcatgtggtcttcagaaaattagcacaggctgactatgaaataaaaacatactgcaagtgacacaatctagtcaacatggcagtttaatttttataacagtaaacatcagcatttgcaacatctttaagtttttttgattgtgtaaatcctatattgatatttctgtttatcttgagcctgctgatggaagttatcatgataattcctctaggtccttgggaggttagcagctcaaatttctactgt

SEQ ID NO: 107673 - DNA, 739 bp, Aquilegia coerulea
  Intron number 1 from transcript AcoGoldSmith_v1.002157m (l ocus AcoGoldSmith_v1.002157m.g) derived from phytozome v7. 0 (chr-ID scaffold_9; pos 3539973 to 3540711)
ggctctaggagtagagcttactagtttaaatttctgtaagttttcttactatgaatgaaagttctcgtttttttatctagtattactttgttattctttataatcttcgtttctgagctctttaacagtttatgtcatcaagtttattgctcttgaagattaatgtagtaccttgatgtttagttttctgctacaatcatctgtttttgttttcagttgattagttctttcaacttatttagattcagtgcttgtataagatgcacacactgacacattttgccatgatgtggatgaacagaacactcaaagtgtctttgtagttatggatttcagccaacagaagtgttaggggtttatcaatttgagaacttgattgtttatttgttgagctgtatgtcgatatagcctcttctatgtaagtctctttctttgggtgatttgtatgtaagtctgatacatagttgtttaatcttttttgtgaatttacaaatagaaagagtagtagtctttgaactggtttctagtttagaaacataattcctataaattgacacaatcttaagcatataatatgaaataagttgtctttcatcactatgcttgggcatttctacgaaatgtttctctgtccattccaagctttttactccaaatcgaaattattttctttttgctactaaatgattccataaattgtctagttgcagatagactcgattagggattttttgtctgt

SEQ ID NO: 107674 - DNA, 808 bp, Aquilegia coerulea
  Intron number 1 from transcript AcoGoldSmith_v1.018723m (l ocus AcoGoldSmith_v1.018723m.g) derived from phytozome v7. 0 (chr-ID scaffold_12; pos 5724763 to 5725570)
gtgaagaagtattctttgtaaacaaggtatgtttcatttttcttaatgggggttcttttgtttttaaataatctgatgaactgaaccattttaatcatttatttccttgattttttttttttttttggaataatttgatttcaataataatgggatttttcatttttttttacttgttttaatcatgaaaaaatgatgaaattctttcatttaatttgcacctattttgcacagatgtggggtttttgttattaatgtctgcacattttgttttcttctatggtttaaattctctcattaatatcacatttttaaccacttgtattaatatttttttagttgatggggtaggcttgttttgatcttgtatcatttattattattttttttctatatgtaagattaaatgtttatgcctttagtttctttatggattgctttcatgttctttcttctatcactatttcattaccctttttttcttcttgttgttgtgttgattgacagatctctttcttgattcttctgttagatagaatttaatgtttacaacgacttctcaacctttaatgtccagtagttagttcaagattttttcgcatttttttcctactatggttatatgctgattgtcacaatttaatgcttttgataaattgatcagtactgaaatgaattgctcataagtggttggtgctagttgtttccgagaattgtctcatttgccaactatctaatctgagtttgatttgattcatttatggtgaatgtaggaaattcttttgtcattttcgggtaaactacgcaa

SEQ ID NO: 107675 - DNA, 551 bp, Aquilegia coerulea
  Intron number 1 from transcript AcoGoldSmith_v1.024273m (l ocus AcoGoldSmith_v1.024273m.g) derived from phytozome v7. 0 (chr-ID scaffold_59; pos 1380344 to 1380894)
caaagatatccttcaacccttcttcaaagaagcaggtatgtagaatgaatgaattattttattagcaaaaaactatcaacaatgaatcatcaccctaagtttggtcaaagcttgctttcattttggaatgttgtagagaaagtgaccattggttgtgccttggtcggtgtacttgcttctgagggacgtgataataacacatatttgttgggtgcctaagccattatagtgacttgagtcgtcgctgccaagtttgttgttttatgctcttcacaacttctctcgttctctcaacttctccaaataaatcgaattgctttaatagctttgttttcatgaatttgtttttaattacttctccttgttttagaattcaaacttctattagaaattttatttttccgagtttcagatatttgtctaaattagaaattttcatcaatggttttgacttttgaccatgagattgagtttgacatcaaattcttctttcttttataagttttcttatttcttgctttacgtagaagtttccaacacttctattctat

SEQ ID NO: 107676 - DNA, 973 bp, Aquilegia coerulea
  Intron number 2 from transcript AcoGoldSmith_v1.006256m (l ocus AcoGoldSmith_v1.006256m.g) derived from phytozome v7. 0 (chr-ID scaffold_7; pos 4199236 to 4200208)
tttttcattcagttactcctgaaaaggtttgtattactatggatgctaattgatattagaaataattccatgaattcctatctgttattactttggctatctatcatactggggactggtggaatttgaatctccatattatatttcttgctggtggtacatcacttatgtaaatgtttatcttttaggttgaattgatatccatttcttgcatttttactgttgtttttgttttcaaaatactcttgtcatcatattgttattaatatttcatttttattcccatggttgtttgacttgttgttttctaaactcaatgctattgggcctaaatcctattgaagtgagaacatcatttggaaaaccagagtgttgaatcattgtttgtgtctgtcaaatggcattggtttaatgtgtgttttgaggtggataacctcaacctcaaggagatgattatatcaaaatgtaaagtacttttgtagtagtggaaaagtttaaagattttctgcaaaactgatgtccacaaaattttacatttgttgaaacttgcaagtagattttgtacggttagtgagtggtctaagttttgaacatgataatccccttgactttgagatgttccttcatgaaatctcgatttaaattattgttgtgtaagagacggtccacttttgtgcgtaaactgctacacgaggacaactcttttcaaaattgtaccatgtatgagtttgtgtcacataaaactaactgggttgtagtcttggtagtctttggtattcttatctgatctcggttgtgcttaaatcattctttgtgaaaatatgcttcttctttgttatgcataactatgtattaattatcttttctattcatacgatacgttttactatatgcttcttcttattcatagtgatctttgttatgaattccattttcaggtgcaagctgtgctattgcttttgggtgggcctga

SEQ ID NO: 107677 - DNA, 763 bp, Aquilegia coerulea
  Intron number 1 from transcript AcoGoldSmith_v1.007715m (l ocus AcoGoldSmith_v1.006222m.g) derived from phytozome v7. 0 (chr-ID scaffold_108; pos 187858 to 188620)
ttaaggtataaccaacttctttagtactagtgttccctttaaacaatcacaaattcacaagtcaactcaactctcttaagcatttcaacaaacacttatcaattatccattaagttaccaatcatatgtctgattcaatcttcatcattgaattgataactgaacagtataaataagtatgaaatcttagggcttatgattgagacaacaaccttaatcttccagagatatcagcatggggagccaaattatatattcttaggatattcatcaaagtattttggcacctcatgtactttcaatgattggaaatctattatctcaaccattaacttgggtacttttttccaattcaaatactgctaccaaaaggtgcgtcttcttctattgtcatctagttgacctttatattttcaaccatcttttccttataggcagcgatgtctgcagtctgcttgtactactagttaatcaatttgctacatataaaattctcatctcatcggttgtatattgttttcaatttttcttttatttcaatcaaagagacaatgggaaccatatctcagaaattgaaatcaaagtacccgtgtaaagtaaatgaaaaatcagagagatgttttgaatattgtttccacttcactaattcaggctcatttatgtactcaacaactctgaattttagtctgaatcaaattataatttttcccatccttttaccaatatacttgatgtttcttaggcacaagaaggagaggtggca

SEQ ID NO: 107678 - DNA, 842 bp, Aquilegia coerulea
  Intron number 4 from transcript AcoGoldSmith_v1.001582m (l ocus AcoGoldSmith_v1.001582m.g) derived from phytozome v7. 0 (chr-ID scaffold_7; pos 4119957 to 4120798)
gcacaatcgtaggtatgcgtatcttgtctggtttatatgctcagtctcattctaatatagtctggcacctaaaagttgataagaaaactgcctaaaacactcttgcaaaggagtgaccttcgaataaaactgaaaggatccccttaattgatcccattatacatttgttaacaacataaataagataaaggtcttgatagttcctcccaaccctaaatattccttaaatataattgactcatatcccattgtcaatctaacaccatcacttaagtcatgatatttttagaaacccctcataggctcatagcaggtaactctacaacctaatggcagactctttcccagtcatagtaatgacacaacttctaggccttacggctatctttgcataagattacatcctttacatgtaggtcatctcataaatatccattgtgaactcgaataactgaataaatcatatcgtataattttttcttggattaaagcactaggaacataattttcttttagacaatcgatgtttccttacattatgttttcagttttttgtttaacatgcttccttttgcattgtccattacatacttagtatttacaggctatgccattgagaaagaaagaaacactgtacctttcttggaactttatttctaaaggtctcctcgtcaatcgttttaggatatatttatgtgcgtaactttgaatttcggccatacaattttttttcctatgtttttgcttggaattttttttttcccctgttgagatgaagttatacataatcaagagtttctcttgcagtgttattctgtcaaatttactgaagagaaaagctg

SEQ ID NO: 107679 - DNA, 536 bp, Aquilegia coerulea
  Intron number 3 from transcript AcoGoldSmith_v1.009642m (l ocus AcoGoldSmith_v1.009642m.g) derived from phytozome v7. 0 (chr-ID scaffold_72; pos 959374 to 959909)
gctttggagatcgtcttggggctcttattgacacggtgacatagccttacaacttcttttggttctgtctttaagaagactcacgtttacctgtactattgataattgttgaccaatctttgtttttgcaacttatgcatgaaaaatgtaagcatcatatcattaatcaagtcagttttagtttctccaatgttttagttagttgtgactggtgaccattcttcgtttgttttatattacaatatattcatgtacgcactgtggtataaagtgtttgacgatttggcaaccattctgtgctatagatgcttcctagaggctcacatgtctgcaatacctgactgaaactagttgattttgaatatcagaaagtaattggtagcatgcgtgtacactgtgtttgcacattgcacattgccactggttggcttatctgtttcctcttgaccttatcttgtgttattatgtaactattggagattttgtttattgatctctgcatacatagaattttgatatggcattaaattcggcag

SEQ ID NO: 107680 - DNA, 775 bp, Aquilegia coerulea
  Intron number 1 from transcript AcoGoldSmith_v1.007943m (l ocus AcoGoldSmith_v1.007943m.g) derived from phytozome v7. 0 (chr-ID scaffold_7; pos 4981964 to 4982738)
ttcttgtcactccctccctcattctcctcttgcaggttactcttctttctcacccctccatttcttcttgtaatagaaacacaacaatgtttcatcacttctatgttttaggaatgttgggattcttttagttgatggctttagtttatcagaaaaccttaccaaacaaacaactgaacaacttctgaattcaattgggttaaggttagaggttactactattcattaaaaaagaagaatatactttgctaatggattttcttcccgtgtaattgttgcataatgatttttttttttcttcttaattttgcttttatatgtacatcaaatatccctatagcttatattttatttctagtatttatttgaacttaataatattgcagagagtgaggatgagagagtcgttattgtgagattcattactactggacgcatatgactcttatatactaactgtgagattcatcttactggaaattttataaagatacaattattttgacatacgcgttagtttgttattgtgagatatatatcttaaataaaaatattaatatgcttcctttcagattagaaaacattcttctacatcagattgtcttgaaatgtcttcagtaccaaccatatcactatatcagagagatatcatgactttagactactttatttaagatgaattctagctgtacctttgttaatccctactttaatatgtaccttattatttaatatgctgttgagccaagtgatcactttttcctgcccagcttga

SEQ ID NO: 107681 - DNA, 531 bp, Aquilegia coerulea
  Intron number 3 from transcript AcoGoldSmith_v1.010379m (l ocus AcoGoldSmith_v1.010379m.g) derived from phytozome v7. 0 (chr-ID scaffold_21; pos 4402543 to 4403073 reverse stra nd)
tgaccaattcttgagcatttttcaacaagaggtgagcaattttggggttattaactaaaacgagcacatacagggttgtttgattgatttattgaaaaaaaaaaaaaaaaacatatatgttgcacgtaagtgtattcggccaaatcttaagaccatatgaccttcaagttatacaataaaagtgaataaacctgtctttctatttccaacaaaaaaaagagcctctttctatcaatatcctaccagcgaaagcacatttaacacaattcatccccttctaataaaatggaaaaaatgcatatagttttcttcccatttgtaaactcattgtacatgtacaagtaaggaatggacctacataaaatttaaaggtattggttatatacagccattattcaatcatgcatcacctaccccctaaaataataattatacaccatcaataaattagaattttcaatttacatgtgaaaaaacattgcaatgcctttatcgtaaacaaaatattttggttttctacagggttgtcgt

SEQ ID NO: 107682 - DNA, 811 bp, Aquilegia coerulea
  Intron number 1 from transcript AcoGoldSmith_v1.026099m (l ocus AcoGoldSmith_v1.026099m.g) derived from phytozome v7. 0 (chr-ID scaffold_81; pos 506678 to 507488)
cgttgggttaataagcttaaacccgatttaaagacgtaaagttttttatcttaagtttttcagtttaccactgatcatcataattatatatcacgtatcagtgccatcagggacggatccaggaatctgagttgggggtgcagagtaacatgtaacctatatattaaaatcttgggggtgtgattctttatagttttgcaaaaaattctatatatatatagaaggatcatagtagaatttagaaaaaaattgaactttgggtggtgcggtcgcaccttgcgcacccccctggatccgtctatgagtgccattatattgctgttttgttgctgcatgtaatattatcaatatgacagtttgtgaaattccgacatgttttgtgttgaagttgaattagtgttaatgcatgcatagtagtatactagtatcaaaccaagttttatctgaagattctatggaaaaactaacttacagtcttagtgttgaattagcacagggtttaatcatatgtaggagcatgacttgaattatctctactttttgcgtttggattgcagtaatcatagtataatgcttgacacaatttcatccatgtccctcttcctggagtggaaattttataacaatggttgacaaattagcattttaaccaaaattcctgatggcttcacttaatgcatgtgttctgttctttataagaagcagttgtttagttctttctattgatgaagttgataacaaaatgatgtttggtttatgtttcttgctggaaaaagtgggtgcaaattttcagcagaagaggagagggtgg

SEQ ID NO: 107683 - DNA, 541 bp, Aquilegia coerulea
  Intron number 1 from transcript AcoGoldSmith_v1.004765m (l ocus AcoGoldSmith_v1.004765m.g) derived from phytozome v7. 0 (chr-ID scaffold_54; pos 1584123 to 1584663 reverse stra nd)
tggaggtggcaacccaaagattgcaacttacccaggtttatatcctcttcttcttcttcttcttattcaattttcctatgaaactaggcttgtagaatttttcattatatctagtttctgcaaatgatgttgagtttttaggacttattgttggatattatgaggcttttggtttgatattgtattcgatcaatctttgcgaaaaacattttgggcaattttggttttcgtatctgttagtactaggccaattttgaggttttccaatggctcagaggttttgatttttgtggactagaagctgttatatgttcatagtaatttgttgatgattgatcatgtatagagatgcgcagttttactttcgggtctttgagataattatgttggttagttgaatatgattttcaatttgaattgaacttgttttggtttgagtctgcagttgtgtctatttaagtttatttcttcaaatagttaagagtgaggctcgagctaacttggattttttttttccatctgtttttgttgtgaagatttg

SEQ ID NO: 107684 - DNA, 430 bp, Aquilegia coerulea
  Intron number 1 from transcript AcoGoldSmith_v1.001444m (l ocus AcoGoldSmith_v1.001444m.g) derived from phytozome v7. 0 (chr-ID scaffold_7; pos 7281807 to 7282236)
cttgctcttaattcatactgccttggtagatcccaactatagtccaagttcatcagttcctctaattaagcaagctcctaataagaatatctttacgttaaatcataatatctttgtgtatatttttagcaatgatcattatagatatacagtaattcataggtgtttaatatgtcaacaaaactcattagtcttatttaaatgtccgctctctctttctctgtttctttctctctctttctctctctacatatttgaatatggctccattgagttgtagaaaagttttttatctgcttttttatgtttttgtttcagaactgagattctgtttttgttctaaggtgatttgatgttaatcctttgttttccccatgtaatctatatgttgttcttctccatgtttaaggactcttgttgttgcaggttt

SEQ ID NO: 107685 - DNA, 865 bp, Aquilegia coerulea
  Intron number 1 from transcript AcoGoldSmith_v1.009230m (l ocus AcoGoldSmith_v1.009230m.g) derived from phytozome v7. 0 (chr-ID scaffold_6; pos 8507102 to 8507966)
ggaaatactcacttcaaggtactgcctttattccaaaatttttggtttatttaaatttttacaaatttggtgtactgtgaattaatgaatttgtgaatgaatcatgtgcaccattgaaatctttagagtattgtagtttccaaagggtgttcaattgttcgttctgtaaaggtcctttttggtaaaaccgtaggaaactgcaagctagctattataacttggaaaacagtatgagttcttactaccaaatttgcgatggaagattatgcaaactcaatcaaaagtttgtttccactaccaaccaattaaaatttacctcattttacttccatgccttgacttcgtagtgaggtttatgccgtgatttttattttttttttattgacaagcggggttgggacccctacccctttaaactacttctgggaacttatatcaacaatcagctgttgacgtttcgaaccgacaacctctccactttgtgagaggagagctaccattgacccacaggctcattcactttatgctatagcacaatgtggggattcttttacattctattattatttatctctcgtagggatttcttccttacgtttaacacattcaagccagcatgtggagaagtcctatgcaaacgataataataataatagaaaaaattataaactggagtgctcttaagaacaactcccctgatttacagtaaacattgtatatttatgtattatgttgggtgaggcagaacaatggtggttatagtactttttttcggtaattttttttttttattgctatggaaaagggattgtctttgtaagtgacttttatgtgttatatgtgttggtaaatcatatgaagacga

SEQ ID NO: 107686 - DNA, 764 bp, Aquilegia coerulea
  Intron number 1 from transcript AcoGoldSmith_v1.011078m (l ocus AcoGoldSmith_v1.011078m.g) derived from phytozome v7. 0 (chr-ID scaffold_10; pos 2062597 to 2063360)
atttttctcaacaactggtaacctttgatctacccatctttttaattgttcccatttttctcaaattgcaagctttgcgttgttactttgaaggaaaaagattgtaacgggggttgttatttgttaagtaattaatcatttttatactgtagtacagtatatatctgtggatttgtatgtttgaaatttgaatggggttttgagaattttattgtatgattgttcatttctagaacaaatttggaattttcatataaaaacccttttactttattttcgcaatttataccctattgaaagtgatttccatttgtttgtcaaactttatatgtagttatgtttactgaaatctattaatttgggctaatagaagccattttaaggggtaaaggaagatcataggctgaagatataattaccgaatagaagtaatcatagcaaatggcatttaggactgagcatgtttgatgttggaaagtattaatttagatagaattggcagcataacaaagcaatgaaaaccttgtgccagttgcctgattcactcaacacaaggcagtacattggtggataattggtgttttgggcatttttcttcttgtaaactctttcgataatacatataatcggtgcagtactctcttttacacaatacttgttattatctgttttatggctatctaagataattgtctcggtttgctgattgaactcaatatcttttactttgtagtgtttaccaacagattatataaacaacttca

SEQ ID NO: 107687 - DNA, 321 bp, Aquilegia coerulea
  Intron number 5 from transcript AcoGoldSmith_v1.001717m (l ocus AcoGoldSmith_v1.001173m.g) derived from phytozome v7. 0 (chr-ID scaffold_9; pos 2706920 to 2707240 reverse stran d)
tacatctttgggatacaacaggacggaatcctaaggtatggggaatcaaactataagtactgcattcgttaataattttcaatttgctaatgaattttaaaggggatcatttatgttaatgtaggggatcacttatgttaatgtaccaatttatttcttcttcattgttcattcatccattcttcttgttcttttttaagtatttgatttatctttgtggtttgttactgtgctcttaatagatccattttgtagaagatacctaactaatattttctcctcataggtttcttggtcaaaacaacactctgcgccaaccac

SEQ ID NO: 107688 - DNA, 950 bp, Aquilegia coerulea
  Intron number 1 from transcript AcoGoldSmith_v1.013745m (l ocus AcoGoldSmith_v1.013745m.g) derived from phytozome v7. 0 (chr-ID scaffold_1; pos 3710160 to 3711109 reverse stran d)
aagacagtgagtatatctagagggatcacagacaaatctgaagcaatgttattctgaagagagtgaattgttggacaccaattgtaaagtatttgatgatatgaatctcaagaaattaagaacttgtacaaggcattaaagaatataataattaatcactagccttctatgcggttcaacagaaaggcaatttgcttaggggttttgcagagactggactataattctaatgaatgctaagccttaattagttcttacagaacgcgtcattatccggctctacaaattaacaaggatatgcaggcacttggtaagtatctaaacatcaaggttcattttatgggtgaccaaagcagttggacaaatccaagtatccaactggtgaagctcatgtccttgttgggactctttaatcttgtgaattacatgttggggagaaggagaggaacttatcttacagaaaaagcattctctctcaaaaacatcaaaatggttgttatggatgagctgagccaggtcacatgtcaagggaaaagctcctttattttttgcgcaatctacttcgtttgaaaaggccaggtacaccattacagataggttttttctcagaagttttgcttagcggaattggtaataactactttgttaaggatttggtgaagaatcctgatataatgactagtactgtgtgtagggctgcaatctgagccgagcggctcgggctcggctcgctcatttatctaaacaagccgagttcgagccggtttttgagcccgagccgagcccgagctctaaatgagccgagccgagcagctcgttaactatgggcttgggcagttggacttatatctcgttaactatgggcttgggcagttgggcttatatctcttctctcttcaaaatggcatctactagattcagaggtaacaagcctcgcaccatcatcacca

SEQ ID NO: 107689 - DNA, 403 bp, Aquilegia coerulea
  Intron number 3 from transcript AcoGoldSmith_v1.013283m (l ocus AcoGoldSmith_v1.013283m.g) derived from phytozome v7. 0 (chr-ID scaffold_27; pos 3070508 to 3070910)
tcacagtgctgaaagttgcattggagtcaccggctgtatgtcatggaagtgttaatggttgattaatatataaagcaaatgctatatgtactattgtgccgctaaggatataattccaaaaaaccgatgtgataaatgtaattgctagactatgtgttgaagaaaattacttaacctagtcaacaatttgtaactcttgaaatttatttgtctgcatctggccctagggtttaggtcctgattggatttgagacacaacagtgtatctttttagtgattgctgtacacttacatactgtatatgtgttgctattgatcttattcttttgttctttcgcaatcacggaaaagcaactcaaagctttctgactttctgttagccagggatagccctactggtgat

SEQ ID NO: 107690 - DNA, 840 bp, Aquilegia coerulea
  Intron number 1 from transcript AcoGoldSmith_v1.004742m (l ocus AcoGoldSmith_v1.004742m.g) derived from phytozome v7. 0 (chr-ID scaffold_7; pos 2432219 to 2433058 reverse stran d)
aaattgctcgattaatcaatcaatcaatcaatcaggtaccttttttcgttaatcttgtattattttaatgaaattttgttgattttcatcagaatttctgttaattttaatgatcaaacttgattggtcttttaagtcaatagtgggatttgttttaaggtaaggatttaaatctgagattcagaaacagcttaattgttgttattatactgaattagaagaagggggtttgttgttttaatgaaattttcggtcaattgtcacttcaaagtcatcaattttatgataattatccgtcttggttttgaatttcgaatcttgatgtttagtcttaatgtctaagatcttggcttcatttgggtatagctttagacattatgcggctttttcttttggatttgtttaaatctgtactatttacaatttaaatttttgatttttatatttgtaagtgatatgattgtgtaaatcgcagcatagcctgttaagttttgtccaattggttaataccatggtttggtataaatttttttagtctttttgtctaattagtgctctgcatctgacgtaagcccttcaaatatagccttcttgatttatttgttaacattattataataatcaatgtgtatacgcattgtattcttaattggaccccacaaataccggtttcttaagagtggcatgcttatgtacttttttatttagaaactgaatatacggtttaagtgatatttatagattaagcgcatcgccataaagcccctccttactttacatttaattttattcttttttggcttaggaaatttgttgcagtccaaaaatcaagacagctgc

SEQ ID NO: 107691 - DNA, 800 bp, Aquilegia coerulea
  Intron number 2 from transcript AcoGoldSmith_v1.008267m (l ocus AcoGoldSmith_v1.008267m.g) derived from phytozome v7. 0 (chr-ID scaffold_12; pos 3078266 to 3079065 reverse stra nd)
ctgtatcccttatatttattcctcaaataaatcaggtaaggtgatttccgcatatctttggtctgtatgtttcgttggcatggtcttgataggtttcagattacaatgtttagagtcgttaatggcaaaactgcacgacagtattgtataagtacatgacgagtacaagacatgcactttttgaattttaaatataaaattcttctgcaagaaaagtaggcggaagcctatttaaaacaaagatgaatttgtgcaggctgggggataacagctacaggtgcttaaaaataataaagttttataggcaagaaggctgagcccgttatatgttataaattacttaaagaaatttttgccttttaccttctttagaaaacggctaaagagtataccttaaggttcaagtcttatttatccatagtggttttgtttctatgtgaattgaaacacctttttgttaagtgtcgcttttctttactgcctcccgagtcccagggcttaactagtggacaactgaacaccttgtagattgtcaagacttccacaatattacattaagaactcaaaatatttcattatgtgtcagattccaatccatctgaagttattctattgtctgtatgctacacttatagacacaagaaaagataggtgtttggaattggcctttttgcacgtattcgaagttttccctccaggaattatgaaattctgataggacagtaactccaattagaagcatattatagttcttctttaatctacttataagaatgtttgtgctcctcatgtctaggtca

SEQ ID NO: 107692 - DNA, 993 bp, Aquilegia coerulea
  Intron number 1 from transcript AcoGoldSmith_v1.024031m (l ocus AcoGoldSmith_v1.024031m.g) derived from phytozome v7. 0 (chr-ID scaffold_15; pos 3029470 to 3030462 reverse stra nd)
aatatcattttacgagagtgtactatccagctcaagtaggtgcaccttaaattacagttttcttttatttccaattttttttaagtatgctggctatgcaataatattaaagacaaggaaacataataaaaggacctaattaatgcttccacagtcttgacagtttaattaagtttctatctcttggtgctgttttaatcatatattgtgttattaagtgacatgtgtagcagaaactgctaccgtatctaagctataaactttaggggaattgcatcttagaagttgttgtagccaagatcaactctagtatctgggagaatatcatcttcacaagaaaataaagaaaaagtcaatgcttccatatacaagtacaacattatatgagccaaaaagagatcacagggtcctacttctatacatgtgcctctttgtttatccttcaatcatttcttttttctgacctaaggatgttgaattgttgatattggtaattgctgagtacgtgttatatttccagtataattattccgattgaggtaatttctaagattaaaaatcaaaattcttgcttttgcctgtaatgttattgggtgtgctgagaataaatatatatgaaaacctttagatgtgtcacgtctctcagtctttgttggttaggtatatagggtattcaccgatatccgtccttattcttactcatggaggagaagttactagaatggcttgtccttcagtgttctgtagcaaacacgtcatgtcttcaccaatttagattgactaaaattgccaccattgttgaaatgcagaggcgataagaactacagatgagtttgccaatagagtctctgattgtatttatcctagttaaatcacacaacatacctacatagttggacattgttctttccccactgataattgtcagttaagttacaggactattctatgtttctaactaccaaattcacaaatgcaggaattgactgtctc

SEQ ID NO: 107693 - DNA, 870 bp, Aquilegia coerulea
  Intron number 1 from transcript AcoGoldSmith_v1.011373m (l ocus AcoGoldSmith_v1.009956m.g) derived from phytozome v7. 0 (chr-ID scaffold_30; pos 2310019 to 2310888 reverse stra nd)
agctggcgatttcatcctagctactcagatttcaggtaatgggataaagttctattctttcatttctttttagaatatttaagcaattggttgttcattttgatcattgggtgttataaagattcgtaattttttcttgggttttcttgtttgaagttatatgagctgaatctagtgttaaatttatcaaagtaaccacatttcttatacaaattagtaatatttgagttttatttactgttttggataatgggtttgttttgttatgttcggaaatgaagcatgacagtttcctaaagatgggtttttcatgaagtttatgatgaagcattggttttaagatagctggattggatgcaattctagattggcgagaaagtgaaagtttaattaggatataattccagtatgaagcaatgttcccatccgtttattttgtgccttttgtgatcatatatttgtttgttaattgaatagattttatctgtagctagaaactcggttttttaacaggaaaccttaatcagaaataccagtcattcttacatatccaaaaattgaaagttatacgcactccattaacttctacttggattcatgtccagcttttttaatctgtaaaccagtgtctgaattagaatcatgatatgtctttcttctttccacattcgtatatctatttctttaattattccttctaggcagccgctttatattcttaaagcgttactatgtcattttaaatgctttatacagagaaagttcgaaagatgaaattatggactacttttgcttttaaggtattcagatgcccaggattgattcttgctgataaggacactttttttacatcttgtatttaggcagttg

SEQ ID NO: 107694 - DNA, 774 bp, Aquilegia coerulea
  Intron number 1 from transcript AcoGoldSmith_v1.027668m (l ocus AcoGoldSmith_v1.027668m.g) derived from phytozome v7. 0 (chr-ID scaffold_15; pos 4759839 to 4760612)
gaacccaagttctctggtatcatcagttgatcacccaaagattttaccatctaatcagctcagctgagcaagaacttaatttgtaaccacaaaacattctgaaaagcacctctccaccatacaagtaagaatcacttgtaagtctcaagaatagattacacgttacaaccacctaaacagattaacggaattgcatggttcgatcttattattatgcaggacaaagactaaagttcaaattaccatgcatgtaggaagacattttggcatcatttaaaagtagtatcatataaatgttacatttgtattcgtatttaatcaaatgcgttaaattgtcattataaatcctccaatgtattatatgcacgtcatcgtgaactcagataaatctataaaaatgaaccaacggtcaatgtcgagtattgctttgatcaataacaacaatctaaataagctcatcatcagctgagagaatataacatttcagcgagatcaattcacttttatgctattttcataaacaacaaaggaaaacaccaatttttcgtgaaattttatgccgtccctgtaaatatttaaacaatagtagaatcactgtcaccatgaggattttatttatagcaagttaacttcttagtataccatacaaaactacagatatatatgaagtcttggacccttcttctgatctcgttaatagcctccttgtcttgtgtttttgcacaaaaacatggagtaggctcaatcgtaagtccttctcttttcgaaaagcta

SEQ ID NO: 107695 - DNA, 854 bp, Aquilegia coerulea
  Intron number 1 from transcript AcoGoldSmith_v1.023522m (l ocus AcoGoldSmith_v1.023522m.g) derived from phytozome v7. 0 (chr-ID scaffold_54; pos 207339 to 208192 reverse strand )
tgacagttgaaccagcactggtttccagcattcaggtattcttctgtttcatccacttgtcgattgattcatatatgagtgcacacttgctatgggttatgattgctgtaccaactagatttttacaatgccttcttatttgtctgaaaactttggaatctttataatttcacaagtgctgcttaagagtgacatcatgccagctttatgtggcttattgtgcttaaacagtgttgtgctatcaaattaacttaaagacatggatcaatctaaaccatttgaacttgctggttcgcaagcccatgattatagatttgtgagcagtgctctgacctgcaatattgtatttgatatacaaggcgttttgactttgattaatattcttagttataaataatcaataaaagtgccatataaggcttttgagtccaccctaaatactttctatagaacccaaaattttaaaatagaccaactgtaggagttcacttatgcatcaggtggggataaaagctgtgtctgtctctcccaactgatctctccctctctccatttttctattttccttccctctgccacccctcttctttccggctttcttccccaactcctctctctctctcctgaagttggtcctcaccttgcggttctatatttttatttaatatatttatttgtttttccctgacaagtaacacaatgcatgaaaaattcaggattttgttgaagataagattataaaaaaacccaattagaagtttaattgtaccattatcttctcacctagatatagcataacacatatatgagatgacaagctggtctaccatgacataatgtgcaggcttacgttg

SEQ ID NO: 107696 - DNA, 723 bp, Aquilegia coerulea
  Intron number 2 from transcript AcoGoldSmith_v1.018245m (l ocus AcoGoldSmith_v1.018245m.g) derived from phytozome v7. 0 (chr-ID scaffold_12; pos 5366341 to 5367063 reverse stra nd)
gaacgtacgaacgtcctaactacgtacgtacgttcctgaacaaaaaagttccctccgtccaaaaaatccaacaaaaaacacaagtgtggaacaccattaatagtgcccatggttgagacatatttttcattgcacacatttaacaatgaatatcctagtgtaagaaaggataagatctcacttattaatcaagataaaaattatatatcttctgaagtcaatggagattaaataatggaaccttgcagaaaatgtgctcactaaaatatatgattcaatgcttttgaaaatcaaaagagttaggtatcaatcaagatctgagagggattgtcagggaataactccatgggaagttctacaactatcaaaaacaagaactcagttctcaccttatattgatcagtacaaagcatggagttggtttggttcttatggtcatcaagcatttgcttgctagcagttttactaatccaattcctccgcggcggaagggcaagaaactctttaggaccactgcctcctggaccgccgggatggccactagttggcaatttgttcgatctaggagaagtaccgcaccaggccctactagatttagggaaagaatatggccctgtcatgaggttaaagttcggtgcaatgaacaatgttattatacagtcaagcaaagcagctatggagatgttcaagaaccatgacttaacttttgcagacgacaaccca

SEQ ID NO: 107697 - DNA, 769 bp, Aquilegia coerulea
  Intron number 1 from transcript AcoGoldSmith_v1.009347m (l ocus AcoGoldSmith_v1.009347m.g) derived from phytozome v7. 0 (chr-ID scaffold_7; pos 1852678 to 1853446)
ctctctcatagtagttcctagcgaggttgaagaaagtaaactacaaataacatattaatcttcattttttttatagatgttgaaatttttaattttttagaattgatgtttatattataagtatatatttgtgcacttgttctactttaaattagatacccaaacttttaattgagactgtaatctagcaaggatgccttttgcaaacagaaccttacactgaaagagtgaaagggggttaaatggttaagtagggacaacaataagggtgtttttgagaattgggttttttttgttttgttttgttttggaactaaagttttgttaaattgctaatgattaatgatagttttgatgatgatgatcatgggtattatgtcaaatttatttagttcatttagtggaggtatgattgacaatggacaagttaaccaaaatcagtgtggatgatggaagagtagggggacaagactcgagagaatatgaaaatacaagattagggagaaaagaaccaattcggcaattcttagttttgtgttatcatgttagagttatttgccatgattatatatttggtttttgtataccaattcttgttttttaattgtactcttgtcagttcccttctgaatctgaaattggaaacattatgtaaaattagtctgtatgtagacagtttaatcttgtgcggaaaacttattagcatagattttattcactcttgtaaagttcttgagtcaaaatccttccaggttaagaagcagttatc

SEQ ID NO: 107698 - DNA, 673 bp, Aquilegia coerulea
  Intron number 3 from transcript AcoGoldSmith_v1.011969m (l ocus AcoGoldSmith_v1.011969m.g) derived from phytozome v7. 0 (chr-ID scaffold_27; pos 492346 to 493018)
aaaagttatcagaagcaagcaggcttggcaagattgtaagttctcagaattgttttagtaaataatagtaaagggttttcaaagaatctatcgaatactgtttttaatggggttttgtgattaaagatctcagatttctcgattagcattaagttaatgtggttctactgccaataaacaatgtggttttactgtctgaatttagttaatactacatgtgattcttgtgtagtttactgaaaagtccgaggtgaatgagtgaaattcctgtggaactataaaattacatagattcttgggttgagtttggtagatttaattttgttttgttcttttttgcacaaatggacattagggtattgtatttaaactatttatttggcgaatgtgcaagtacacctctacagattttgatgatcttacgcctttttagatgataatgaaatattatcaaagtctttgatcaaacaattttgtcactgagacggacactgagtttatcggatattatcaaaagactttgatgttctttttgttggtttgtttttctaaggctttggtgttttcatagaaatgaaatcaattagtaccgactcaagtgaagatttgaaattgcattacttaaagattttcttttgaacacttaacaggtagtagcaaacttcagtgcgac

SEQ ID NO: 107699 - DNA, 836 bp, Aquilegia coerulea
  Intron number 1 from transcript AcoGoldSmith_v1.004533m (l ocus AcoGoldSmith_v1.003556m.g) derived from phytozome v7. 0 (chr-ID scaffold_10; pos 2012412 to 2013247 reverse stra nd)
atcttcagaaagctgctgaagagatttctcgcaatgtaaactaattgaatctaatcattccttcttttgattttgtgcaatttgttagtatttattttgttcattgatttctaaattagggttaacagtacttattagagtaaattaatcaatttatttccattcctgattgtagcacaattgattttaatctttatttggtaatttaattggaacactgaattcacaattgagagatcgttttgcttacatgctgaataaaaaataaactaataataaggttcatttgtttatctctgtgtgattctcacattggtttgcgacaagttttttttcttgtataactacaattacactatggcagcatgttgttagttgttacattgcaaaatgcttcagtaggtagtgaattacaagtagctgaatactgataaaatggatactacattgtagaagaaatggaggatcacaagttataaaatctatagtagctatgaagaaaagatcattatgttaggcgttgttgttctttacttctttcattttaagagttcaaatgatttggaattattatcgtccactctatttattagttaaatggaagtgggttgagataacctacacaaaaatatgtaaaaaattgcgcaaaacaacacaactcaaagaattaacatcacaatgactattgacagtttacgattcagcaaataatattgaatttaactttgtgattaaagttgaattgattttcttttctacttaaattataaattataatctagttgagtaacacgttccctctctttcgtaagtgcaggctattgaggcagccaaga

SEQ ID NO: 107700 - DNA, 789 bp, Aquilegia coerulea
  Intron number 3 from transcript AcoGoldSmith_v1.009810m (l ocus AcoGoldSmith_v1.009810m.g) derived from phytozome v7. 0 (chr-ID scaffold_30; pos 2602203 to 2602991)
tccggagctcttcagtttctacattcacattaggggtaaggattgatttgatttgaagctcttaggtctcaagaagtctgggcctctctggaggttccatgtgttctgtctttagcctaatgtggtgcagcagataagctcatcgacaaagcgtagggttgattttaatctaggaataaacaaatgaaagtttcttattttctacctgatagactactatccttagtgtttcatctgatgtaaacttgaataatttatatttctttcctacttttccttcctttaacttcatctttagtgttgcactggtttatagtcctatagaaatcagttaaagacttcattttctatgtgttgttttaagtgttgtggccaaggtctgtcaattttttttatttatttttctcttaatgcatgttatgaacacaaaacacagcaaatactcattccagctccattaaggagtatgtttgttaaaatcctttgtttcacctcagagttgacttttatgactcctaagtttgttaatatgtggccttaaaaatttgtctctcctataaggctataactgaaatttaattgacttttcattcagaaaaaaacactatcttcaaatcatagcaactctgagtagttaaatagtgtaaacatatagatacttactcgtggtaccaattttgctgactaatgttgttctcagctgaatttaatcttgcagtaaattgtttatcattaactggtatttttctggcagatatctgttggatacttcctcacggacattgggat

SEQ ID NO: 107701 - DNA, 574 bp, Aquilegia coerulea
  Intron number 1 from transcript AcoGoldSmith_v1.014331m (l ocus AcoGoldSmith_v1.014331m.g) derived from phytozome v7. 0 (chr-ID scaffold_10; pos 320122 to 320695)
gttgatcaggtctctctctctctctctctctctctctctctctgaagacacttttgtttgaaattttgatatttttatgtaattccggatttctagggttttgattactttgatctttatgtttaagatgtttaatttcaaaattgttagttgtgcttcttatattttagctaattttgtgtaaagatgaaatccctattgctaattgaaattttgaattcagtactagttttctatgatcttacacataattagttttaattaacaagttttgatcctcaattaggtgctatttaagagagaatcacatttttttttaactctgtgtacaagtgattcatctgtttctttgtgcagattaagagagaaatatccattatgaagcttgttcggcatccatatgtagttcgtctgcatgaggcatgtttcacatagaccgagttcgagttctttctatttgttcgaaagttattgtttatgtttgtagaacaatattcttttctgttatcataatctaaagctgaataatgctctgataggttcttgcaagccgtacgaagatatatataatctt

SEQ ID NO: 107702 - DNA, 811 bp, Aquilegia coerulea
  Intron number 1 from transcript AcoGoldSmith_v1.009004m (l ocus AcoGoldSmith_v1.009026m.g) derived from phytozome v7. 0 (chr-ID scaffold_37; pos 1277690 to 1278500 reverse stra nd)
gcgttggtcttcatccattaaacttgggtaacttctctttcttcctattcttttcaaattagtcatgaaactaaagaaaatggattttttttttttttggaattttttcaaagttggaatggtgaattgaaaagtagcataatccccatttctttttataatgaattgaaaagttcaaccaccaaaaagtatcaaaattttgactatagtagtaattcatttacaagaaacccatgtttgatattcttaattttagtgaaaatttatctaaatgaggtacaatttgtacagaacttgtgaatgttgttttcttcagattccctataatttagtgacaataagtcaaataacaccaatgatgttgttaaagtttcgcctcttagcctcttaggctttatatacattgtaacacagttgccatacttggaactgctctatgagtgccctgaatttgtaggttttggtgttctaatttttgtaagaaaatttaaatctaaaaactgaagtgtgtatatagaattcttcttttcatttagttgttagttgaagtttaggaacgaagaatcaagaatgtcaaagtaaatataaaatgtgcagttgattctgccatggttttggaatcggtaagtgtaatttaagaagtcagtgatactaaaatggcttgaggtgactcttggtaataaataataataaagtagtttggaacttgatcttttacttattattaaggcattatttgctaatttggccgaatttcatgcgttgcctgtctggagtgtggaggagtttaggtcatcagaacgtgtagccc

SEQ ID NO: 107703 - DNA, 870 bp, Aquilegia coerulea; identical to SEQ ID NO: 107693
  Intron number 1 from transcript AcoGoldSmith_v1.009940m (l ocus AcoGoldSmith_v1.009956m.g) derived from phytozome v7. 0 (chr-ID scaffold_30; pos 2310019 to 2310888 reverse stra nd)

SEQ ID NO: 107704 - DNA, 528 bp, Aquilegia coerulea
  Intron number 1 from transcript AcoGoldSmith_v1.024201m (l ocus AcoGoldSmith_v1.024201m.g) derived from phytozome v7. 0 (chr-ID scaffold_54; pos 1627333 to 1627860)
gtacaagaaaagctttcaaaagataaggtaaagaagtgagagaagaagatagagttggagtagaaggaaaaattgggtatattcaatattaatttcagtagtatgacctgatgtgttgccattttcatttgtgaagtattcacaattgataccatgagggcttaagtagctaatacatttgggaagctaaatcgccaattaaagtttgagttgttagatcgaagaaagctcttcaatatccaaacaaacaaaatctactgttcttcaaaccttgaaatttttcttgacaaaaaaaaaaaaaaaacctttgaagtttttttttccaattgttttttaggggaaattagaaaattagtgatacaaattactaggtaaatatactattgagtgcggaattaaacaataacaataaataagataaacaaaaacacaatatcttatagtgaaacacaagataagcagtgaacgagaaggatgaaatagaagagctgtttaagaatattggtaacaggaagaggaagactagtg

SEQ ID NO: 107705 - DNA, 884 bp, Aquilegia coerulea
  Intron number 1 from transcript AcoGoldSmith_v1.006359m (l ocus AcoGoldSmith_v1.006359m.g) derived from phytozome v7. 0 (chr-ID scaffold_72; pos 725915 to 726798 reverse strand )
agaaacttgaggcaattgtggaacaacgttgggaggtaagttggttatgattgttactgtatagacagatattttacatcccaataagtaggtagttggcttgcaagtcccagatgttcttggaaatggaccaccgtaagctgcttcacacaaaattaggctaaaaatctcatatacgacaatgaaaactaattaaatggtgaactgttttccatttgacactttagtggtttacttctttatgatcagttgtcctcggatatagagacttgtagatatagcatatgtgataagcatagttgtgaattgatcagcatttgcatgttaaacttcagataaggaaatatgtttttttctcttgtttcttgataagttagctggttgactccaggcactcaaattattttgaattcttatgttactttgtgtattatattttgttataagtggctttgctggtttactagggatggagttttcatccaaacctgccactttagctatgtgcatctagtgcttgtcatcttggatgtattttcttcagatgtcattgcaattatgtccggatttcgtggttatgtttcttattaatattataaagtaaattgcatttagtaaatttttctttctatatgtgaaacagcaaacatttggtcttggtcacagaattggaactgagatgattcttcttcttttgcagatgcagattgagccatgccttgccattgattttaacattaaggatatcctaccatttgttaataggagtccactcttcctttggaagttaagaaacataaaatcaaaatcattcttttctgtcctcttgttcacttaatattcttacagattcctaggaaagtcaattgggaagatcgcataac

SEQ ID NO: 107706 - DNA, 867 bp, Aquilegia coerulea
  Intron number 1 from transcript AcoGoldSmith_v1.006649m (l ocus AcoGoldSmith_v1.003392m.g) derived from phytozome v7. 0 (chr-ID scaffold_1; pos 2361807 to 2362673)
tggtttgtatttttctcattttgaatcaacttgttacttcaaatcaactgatgggcattgtaataattggtcttttaatacttctcgtcttaatcttcatgttgctcaattagctggtaagttgttagtttaaagttttaatttttaatggttttagaggaaaaagatttgatttttattgatttggggagtttttttttatttttgatgggtaggacagaaaggaggttgtatgattgttgattctacaagaaaagggaaaaggtttccagatagtatgtcaaaaactatacctatatggacttgtgtgttgaatagggcaattgcgaattataaaaagaaaatgcagattgatggtgttgaaaaggagttcatggtaaattatttttgttttaaacttatttaagtatttatgcgtatgtatgcattgattagaaagggagattatatgttagtagtagtagctttaggtaaaagtttgattactgaagtgttggtttatatcaattttaattatttgtacgaaattttatgtcattttatccatctcaattctcaacgaatgatgtctaacaatcaaatgcatcgtgttctcccttgattaactgttttggcataccgatatttagaaaataagggtatggtggtcatgcgcagccaacagatttatttcttttgcatcggtaagagaaacctgccttaaggctatgtgacaagcttagaatgcagattaaactcacactttcttcgtacctacataatgtagactacattcttacatattcaaatcactatttactggattggtttctgaaatccatattttttgcaggattcagatattgtgaattgtgattctcacaattc

SEQ ID NO: 107707 - DNA, 747 bp, Aquilegia coerulea
  Intron number 1 from transcript AcoGoldSmith_v1.009052m (l ocus AcoGoldSmith_v1.006443m.g) derived from phytozome v7. 0 (chr-ID scaffold_49; pos 1073617 to 1074363)
ctttacttcttattactcctttgatcaaacccaaggtcagttcaattcaatattcctgtatattattcttttttctgtactaaaaactatattgtttctatcaatatttgaactgttttatttttatttttcaaattaattgataaagggtgttgttaattttaaataaaaattgattatttgattgttttttatggttttctataatgggttagatgtatttttttttatagattcaatattttttctttttgatatagattgtgcaagtcgtgcaagattcaaattttcaataagtttatgcaatatacttgttaatgtatatgttgatgttagtggtaaaacgatttagaaagttttcaaattaaactattgctatgatatcttgttctagttgcaagtttggtgaatgtttgttaagttttccagtttttgggagtcttgaaataatttatttatcccctttctcttcgattgtggcctttacctttcgtgactttgatcctgttggtatttgatttgttttgattaaatgtttgtgcctaaaaggtagtactgttgatgtacatttttcgggtgtttaagcgttttgattttgtgctattgttatcggcattggtgtttcactaaataggcagagtttgtttctatcttctgtaaaaatcctagattgatataactggcttcccggagctgtttttaattgatatacatttgaatcaagcaggatcaggctcaagcataacc

SEQ ID NO: 107708 - DNA, 850 bp, Aquilegia coerulea
  Intron number 1 from transcript AcoGoldSmith_v1.022579m (l ocus AcoGoldSmith_v1.022579m.g) derived from phytozome v7. 0 (chr-ID scaffold_9; pos 3690595 to 3691444)
tgaatcttgtccatgtatgtattattctttgattccatgtttagattattttgttttcaacaactgttcaatttttaaaattatcacctgaattcagagttgtcttgttccaaacttggtagatcactaagattaatttagtaaattattgcatctagctaacaacaaatgattttttttttttttacggcacacatattatgtccaagacattgtcaaagtaggttgagaaaacttgctctaaaccaatcaggcgtacatttaatagttaggtaattaaactggattcaaggatgctaattaattattaaacaaatatacgtggttggattgctttggtgcggcaaacttaattcttcttaggtactttcctttcttatgacttgtgtgttgaagttcagaacctgtaaggtcctttgttcgatctttaatgatttctgagccttaatttactattgagactgaactgtctggtaacagatatctttatcttttgttctcacgtctgagcttgctagggattgaggagttgcggtaatatttttttagctttatgttttaagttggagtccatttcatgccagacttgaggctttggtgagttgttggtgttttcatttatttttttcatgacttattcttgtatttatgttcttgtacgttaccccaacttccttatttgtctggtttaacataaaccctctatttaccattatttttcttttgtcagaactcagacgcaacatgactctaacttgttatgctattttttgaactactgatgtcatcaaagcctaatatctttgtttttgtagtgtgtgatcaaaagttcttctctgagttgataaaa

SEQ ID NO: 107709 - DNA, 408 bp, Aquilegia coerulea
  Intron number 1 from transcript AcoGoldSmith_v1.003771m (l ocus AcoGoldSmith_v1.003771m.g) derived from phytozome v7. 0 (chr-ID scaffold_6; pos 2030853 to 2031260)
gctactgctttctcatcttctttcacacttcacaagtatgtataatgctttcttcttcttcttcttagttaactttataaaggttatgaagagagagagagagaaagcattttcgttttaatttctctttaatttagggtttatatgtttcattgttagtttgatttccaaattatacaagttttattatactaataatcatttttcgatctaaaaacctaatcactttgatagatttgtttgatgatcaaacttatttaaaaaaaaaaaaacaaatctatgtagttttctaatatgattgatttttttattgaattgaattgaatcgaatgacctaaaaaatattaaagctttcttcttttttatctcccaggtttaatattctaatctcctaacttactgaatttg

SEQ ID NO: 107710 - DNA, 742 bp, Aquilegia coerulea
  Intron number 3 from transcript AcoGoldSmith_v1.003771m (l ocus AcoGoldSmith_v1.003771m.g) derived from phytozome v7. 0 (chr-ID scaffold_6; pos 2033049 to 2033790)
aggtgagtcaatattgcctttcatttttttgtttttcgtttgtagcagttgttgtttgtcgtttttatttttggtatttggttacttatcaaagcaatttcatcagtaaactattgttaattgaaatggccaatacactttctgtttcattaactttttagtaatatgctttccaacaagtagcaccttgtgaatgaaacaagcgaacatacaaaaaaattacgactagttgatcactaacttgccgactatttgacatcccataggccatcgataatttgttcttgacaaagtagattaagtgagggaaaattactcggatcaccatttctcctcttgcttgctagacaatttcaagggcacacattaccctcaatataaaatcttccaataaagtggcttgttctttaagatcactgtgttccgagcctatccatattcgccagaacactgcataggtcaactataacccattcgaacatttttaaccttctcaaagagggttgtattttaaggtattctggagcattagatcagcaatgaagttgaaaagaacttatggcaagattagaaatattgaaatccatggtgggaagatcatttccacagaaaaagcttttattcatctcataggtgacacgtgtatgaccataattatatacccgggttataatatcatattactgtttcaaagtttctgattctttttaattttttttatctatgttgcagcgtgttctat

SEQ ID NO: 107711 - DNA, 975 bp, Aquilegia coerulea
  Intron number 1 from transcript AcoGoldSmith_v1.003304m (l ocus AcoGoldSmith_v1.003304m.g) derived from phytozome v7. 0 (chr-ID scaffold_30; pos 1317597 to 1318571)
gaagaaacttcatatactggcaagtctttcattcggtaagtttgattttttttttttttttttttttttttttctatatttgcatttttgctatacaatgtgtattaaatcctgaatgcagtgatatggttcaataattaattttaatttgttcaattaaaaatattatctttttcactaattaaataaagtgagaaaacttcgagacttcttacactggcaagtctttcattaggtaagctttgctttaaaatttgatctttttaaaaattattttctgcatttttagtaagcagtgtgtattaaatcttcaatgtagtaatatggttcaataattaattctaagttgttcaaataaaaatgttatttttatcactaattaaattaattaagttgaggggtgtgagggattaaaactttcagatgagggcaatattgtataggaaaagaatttatttgagggttaataagaaaaaggagtagtggaatttagttggtttaatataggaaaagaatatgaccattaggactgtaaagtttggacaatattgtatttcatttcatattttagaaattggctggagatttcattttgacgagggatgctattatttgcttaactttcaattttgtaatactagctgttttattttgttggatgtcattgtaagtattgaacatgtaaagagcacacactagctgactagcagagcattactatccatgtacatgtcttgtgattttaagaaatcaagaatctgtttttgagttcggtcttggtatttgtaacttgacatatcatcttataattaggttacatgaagggttctctatttacttaccatagcctgtgaattttggaaattattattcaattgaaagtaacaatgtaagaagctcagatttgatctttactgataataattggggcgcatctcaggtttgaatctgtcaccttccgacgaacgaaagagt

SEQ ID NO: 107712 - DNA, 836 bp, Aquilegia coerulea
  Intron number 1 from transcript AcoGoldSmith_v1.009198m (l ocus AcoGoldSmith_v1.009198m.g) derived from phytozome v7. 0 (chr-ID scaffold_15; pos 108234 to 109069)
agtagttcaaacttcaaagttgaaagtttgttctggtaagttgtatagctttgatttactattttgtaatttgttgaacagcttttgttaatcaacttccctgaattattacttgctatatgctggtgcttctttaatttagacattgtttagtgtttgacgaactaatcaatttactttctatatattattattaggttttactttttaagttctgctgaattaatactagtgtttgattaactaatcatgatttcaataacttctacttattgggtttttaatttgatttgtgtttctcattattatttaattaacaacatctagtgcttaccttggggtttggggaaagattacacaaactataggttctgaaaatggagtttaaatgttttgaaaaaaaaaaaaaaacccactttacttatagacagttttgatttcgcatacttgctatcccttatccctttctgtagtataggttttgatactttcactgcatatttttattacatgccaatcttctgctcatagttaacccagctctgtaatgttttaattcactcggaaaatctagagaaaatcatttttgcaaggatagtggtctattaaatcacatcgataacaattttttgtgagtttgctgtgaatatgtgtactgcgaaaaatcgcccactttcccataaggtcagctcctaagtcctgtcatattagtattgccattagttttaagtgtaaggcatttgggacattgagcttttgtactgcatttgcatacattgttttccctaacaacttattggtgacacgttgtcacataaactgcattagcagaaggg

SEQ ID NO: 107713 - DNA, 962 bp, Aquilegia coerulea
  Intron number 1 from transcript AcoGoldSmith_v1.013901m (l ocus AcoGoldSmith_v1.013901m.g) derived from phytozome v7. 0 (chr-ID scaffold_27; pos 2254148 to 2255109 reverse stra nd)
gggttatcaagaggtgggttgctctttaatttattattatgctaataagcttgttatatgcttgataatcatacattttcttgttttaatggatattcaatccatcatctgtttggtgttaaatggattgtttctggggatttaatcattttcatttgtgcataatgagttgtatggtggagtttttacaatattgcagaaattttttgacaagaagttctgcaaaaaagtttattttgcatgtttactataaatgttatagaagtttaagtagagtaatttttagtggaaattcatgttaattaaagagattgttagagttaaatgtttgataactatgatatacaaatgttggggtttcttctctaaaaacaggacattatttcaatggaattttttttcagtaggatgtacagtacattggattccagttggaaatgtatattctttcttgattactaatatttttggcaaaagctttttggtcttttttctgtaatggtctgtcttcgaaaaagtggtggaaacgcgtatattttttctctaccttttctttttttggctcaagggacctcattgcttgtgtgatgcttttgaatttagatgtgtcgtagcaccaatgtcttttcatcctgtcttgcactgaagactattgtaggagtaattgacaatttgtttctgtataaattataatggagcatgaagtgaaattcttattatgcaatggacttcagtaaataatatgatatatcgacatggcgattcctccattttgcttgttagtatcttcttaattgctcatttctactcaaaatttcatcttggcaatcattaattgtgagttttttttattattgataaatgataatgacgtaaagcaataagcataccttttatcattgaattttctttcaaatatctaacaaagatgatacttttttcagattgaagagttgaaaaac

SEQ ID NO: 107714 - DNA, 466 bp, Aquilegia coerulea
  Intron number 1 from transcript AcoGoldSmith_v1.014638m (l ocus AcoGoldSmith_v1.014638m.g) derived from phytozome v7. 0 (chr-ID scaffold_30; pos 2190912 to 2191377)
ggcctggacgaagtaaaatctttattgggccggatcaaatgctaaagttaaaaaggcctttatcaacccattaccatatgtaccggtatataccggtgcgatttatcggatcggatctttagtcggctaagttcattttaatgaaaaaataagaaataataaaataaaatgctcgaaacctataaaatgctaagaaagagaaaatccaagacaacaccttcgaaattaaatcaaatcgcgccaaattcaagaacaaaaacaatactagctgttttctcaagttattagtagttcaaagatgccaaaaggtttttttctttaattctttcgattatttctgtttctcttcttcttgttaattgttattattcaattcaattagttttgttgaattgattttgattttgattttgattttgattttgattttgattttggtgttatgaagaacttcctggtttctatt

SEQ ID NO: 107715 - DNA, 751 bp, Aquilegia coerulea
  Intron number 1 from transcript AcoGoldSmith_v1.021569m (l ocus AcoGoldSmith_v1.021569m.g) derived from phytozome v7. 0 (chr-ID scaffold_6; pos 8398640 to 8399390 reverse stran d)
tttcttggaacaaaaagtattggagcagttctagggtacgattcgatctctttccttctttaacttcaattgaaacttaaaaaagactgtttaaatcatgttttcattaggttttatggatgaatgattcgtaatgaattcaatttcagattcgaattcgatgatgtgaaatcccttagggtttacttagctcaaataatttgaggttcatttggttttgtttgagttgttgtttcatttaggttatcatctcaacctaattgttgttaatttcaattgaagcagctttagggtttgatgtcattttctactaattcgtagcttcaattgaaactaaatacagtttgaatgatgttttcacgaggttgatggactccggtgttgtttgtatgataatgaatgccttgattggaacatttcaaatcccattagggttcctagcttgatttaagctttatttgttaataattcaacatcctgtttaagtcactatttagtgtactttggtatttaagctagctttagatctcagttttattgactttattgactggtttgaattatagctcaaccaaggactgattcgtttttcaattgttaaaatcgaatcagaaatgtttgggacatttttgttctcttcagttttttgttttcatgacttgtttcctgatctgaatatggatttcgacaaaaatctgatttgttgtctcttttagggtaaagatcggtatccttatccaattggttacca

SEQ ID NO: 107716 - DNA, 771 bp, Aquilegia coerulea
  Intron number 3 from transcript AcoGoldSmith_v1.016949m (l ocus AcoGoldSmith_v1.016949m.g) derived from phytozome v7. 0 (chr-ID scaffold_9; pos 6791043 to 6791813 reverse stran d)
agaagttttcaggtatgactttggttctttcacttgattaataagtaaatagctttaatgaccatttatattattgaaataagtgacgatagtttgatataaattccaaatgttgtgtgatcaacgtcaaccctgaatattaatgggtacttaattagtcgcacgaaataaatcttgctgaagaagggcaattgcaagcaaactctgtagggcattgcttgcacatactagtggcgtggaagaaggggagaataacacaatagagaaggaattgggaaaatcatttttttttccttgtatttaattgtgacgagaattagttccctataattgcctgtttaaagttcccagcttctgcttggccaaccatctgttggtgttgggtgcgagtagcaatggagtgatgaacagtgatagactgatagggtttcttctttaaagctctctgctagaggattcttgtcagtaatttttttgtctcgctatgatcttattctatattattttactcttcagtcatgtaaaaaacttgcaattttgttgaaattagttttcaactgtctttactattcatcatatgctgtgttctcaatgattaagcatatgcttttcaagtgaagtaatattagagcacctttaataaccgtcgaaaaaaaattttagcatgttctttgattctttctatgtctagagtcctttctctaaaatgaacttcataattccttttcaggagtcctttgatactgatttggtatgggaaatgcagcttct

SEQ ID NO: 107717 - DNA, 611 bp, Aquilegia coerulea
  Intron number 1 from transcript AcoGoldSmith_v1.010234m (l ocus AcoGoldSmith_v1.010234m.g) derived from phytozome v7. 0 (chr-ID scaffold_1; pos 9698629 to 9699239)
aagaaaaagctcatttgctttcctaaaacatagaagtaagtccacttcaggttagtattaaagttcaaaataaccccttttttctacttcagtcttcagttcttgattctttgccatttcttccattttgttttgtttattggattaatggtttgattaactataatacttgacataaaaaaaaaaaaaaaatcaagaaatgaaaatgggggaggggtattttattcttggggttgttgtagttgagaggttgctttactttagcacaagcatagattctctctgttaatgcaaatctaagtgaccctcttagttgccattgtgggtctcaatctcattcatgcttatatgatctatatattgtggattctctccccataaaagatttttaacttttttgtgggtgcctttcactttctggggtttctaggctgtttcaggaccagtttttagctggtgtaagcaaaggatagttgatgcagacacatggattttattccatttgcaaccctaacccacccttaagtttttgttttataaatagagattttcaatttgtttgtttcatcattgcaggtgttcatctaatatttttgcaataggagggtgtg

SEQ ID NO: 107718 - DNA, 574 bp, Aquilegia coerulea
  Intron number 4 from transcript AcoGoldSmith_v1.017571m (l ocus AcoGoldSmith_v1.017571m.g) derived from phytozome v7. 0 (chr-ID scaffold_51; pos 1096915 to 1097488 reverse stra nd)
gctaaggtatgatttactccaaattgaaattaactactagaataattaacaaatgtcgaggcattgacatagcaaatgtcgaggtgacagacatatatattcatatatttgatcaagcaacttgatcatgtgttacattcaataaactaaaatcaattgaatttgaacatttctatcaaaagcttgaggtgcaaacaaacttgtgcatggaatcttctaattccgcctgtccataacgtagacgactgtatcaacctggttatatcgttgtcatgcattgattgcacgcgggacacgtaaaaagtgcgcaataatctaaaccatacatgaccttcccaaacgtgtggatttgagattggaaatgatattcatttttcctaagtaactctactactagtcaacaacattgaaaattagagcattctgtaggtaatagagtaaaactaacaacaatatacatatgtagcagccaagtaggaaagttagtaaaaaaagtgtctattaacacataaaagtcattgttaattattcattaatgactaattgtaatttttttttcttttttctaatctag

SEQ ID NO: 107719 - DNA, 526 bp, Aquilegia coerulea
  Intron number 1 from transcript AcoGoldSmith_v1.020574m (l ocus AcoGoldSmith_v1.020574m.g) derived from phytozome v7. 0 (chr-ID scaffold_9; pos 683990 to 684515 reverse strand)
cttctggtatgttgtttaaacacttctttgcttatattttgtttaggtttcatgctcttttctctatgttctttcacttgatttcaagaactgcaatcaatttcggaatctcagagtactttgtttactctcttgtcttggattcaattgttagtaacatagtgaaaactgaaaacccttggattgatctttacaattagtcttgataatttgttattggaaaataattggatctgagcaatcgacacttggattgatctttacaattagtcttgatttaaactttgattgatcttggttacttaattaagaataactgtgatggaactgttggcagtttgaagatcagtaaaaaaacaaactaccaatttcatcttctaaacaaactaaaatggatgaatttgaattgttcttgcaattagaaatgttgtttacaattgttcaagagcaatgaatttcaaatatggatattcttcaatgtctttttgcagtgtcagctttacaggatctgtataggactctctct

SEQ ID NO: 107720 - DNA, 949 bp, Aquilegia coerulea
  Intron number 1 from transcript AcoGoldSmith_v1.023236m (l ocus AcoGoldSmith_v1.023236m.g) derived from phytozome v7. 0 (chr-ID scaffold_54; pos 1562624 to 1563572 reverse stra nd)
aaccacagttcacattaaggtgtccttattgcaaggtttgttattacttattaaacttttgattaacattaattcgatctcgttgatgttgcattttctttgttgatgatgtccatccaatactattagcacctcattttatattgtctgcgcaacttgaatatatctttgggttatggttattcatacaaagttggtatgattcactgctttacttttggtgggcacgctgatagcatttctcccttttcaagattatcgtagaaagagccatgaaaacaacattagaactcagacctggtacatgtaacacatggtttcccagatacagatagagagacaggcaaaaactgagacaagtaagaaatgctttcgggtatgaagaaaataggtcatttgtgtactagtatttacaaatatcgattctgtaatgttaagatcgagaaattctccgtagccattataatatgagttattaggctcactcttcacattctgtttagcatatatattgcccttgattagaaactacctttgactaaacttgaacttggtatgcaaatttgtattatcaaggattcttggtatgcaggataagctaaacttaagaatccctactgaaatgattatgtactcaaaatccttggtacaactgcatcctccttaacaacaggaatcattgttgtttgtcgtttgcactagctattagcatatgttgccacgactgtgctgtttatataaatttaatcattgagttactttaccaacactcctgtatgatcatttgcactagagagccaagatgtctacgctatcaaatcctttgactgttattctttaatttcttagcatgttttcccaccatctaatatcaatagcccacattttttcttgctaattgctggaaatctgcttatatgcagagtgataatatatctatagtatacga

SEQ ID NO: 107721 - DNA, 689 bp, Aquilegia coerulea
  Intron number 2 from transcript AcoGoldSmith_v1.018411m (l ocus AcoGoldSmith_v1.018411m.g) derived from phytozome v7. 0 (chr-ID scaffold_1; pos 538410 to 539098 reverse strand)
gagccgctgctcctccagcaacttcaggtatatggatgtttttttattgtttgggaaggtgaaattttagaagtaggtcatgaaataaaaaatagttggaagtattgttcaatttatttttgcattatttatatagttcatataagtggaattgcgacaaggttatttgaagttgtaaggtaaacaaactttggaaaactagtactagactactagtagatggggcattaacacacttgattcagatttaatattggaagggagaagtattaagaaattaatttttgcatacatattgttatgtagtgtcttcgcaatgttgtggctttacgcatttagccatcctagtctttgattcaaattgtttgttgtgaattatgtgagtatcgctcaggtcttgttagttatgatctcttgaggtctctttactgttcaaaacaccttcataaaaatgctttgatagaagtaatcatgggaaggtgaaatttctgtcatgaagtatgtaatcttgtttctacctttgtggtgtcctacttcatatcattaatttacttgttctgtaaatacctaaccaagtttttgacatgttttggttcatcacctatgttcttatgtataagaaacatgctaatattggcaactgtctttttgtaggtacgtcaacatctaagaaagaggaagtcaagcgt

SEQ ID NO: 107722 - DNA, 1003 bp, Aquilegia coerulea
  Intron number 1 from transcript AcoGoldSmith_v1.024588m (l ocus AcoGoldSmith_v1.024588m.g) derived from phytozome v7. 0 (chr-ID scaffold_10; pos 2259079 to 2260081 reverse stra nd)
ccaacaggacttgaatctccttgggaattctttaggtgagagaattcccttaatttgcttcataacattctttctgataattttttgtagtaagcactttgaagaatttagcaccaaaactattcattacttaactctagtgtaatatgctagactcctgtaccatgtgttgtggagatccaattggttatgttcatatgtttatttgattttttgtcacaatggattgagttcggtctgaacgtttgactcacttggcacactgagtgaccctgaatctctgatccagcatattcatgtggaacatttatggtaccatgttcacatgttcagtaaataagtacacgtgttcactcataaatactcatgagtattttcattttactaaaaataaacttatagatcttttttttttaaaaaaaagagagagaacccattttaggattatatggcccatgcaggtctcgaacctgcgaccttcgcgttattagcacgacgctctaaccaactgagctaatgggccaatttgaaatgaaagatatttccttagttcttgtactgtaaccattcatattaattggtaaaatttaatttttggggtgtattttgcgtatactctccaaattttgactacacgtctacactacaatgtatatattcatgcacaacatgcaggtctcagaccagcaacctttagccaatattaagactgaactgagttaatgagctgtttattattgaaaatgtctctacgagatatttagccatttggtttcagaatgttatagacttgatagtgatacaaattgtgaggaagaaacaaaacctattatggagaagtcagtaactcgtgctttttcatttactcgctccccttctgcgtcagtatcataccagcaatacttagagttttcccatctttttttcaggatttgtgcagttactgatgtaaatttattttgtgcattgcagtcattctgttgaaaagaccccaagaaacaga

SEQ ID NO: 107723 - DNA, 836 bp, Aquilegia coerulea
  Intron number 1 from transcript AcoGoldSmith_v1.019605m (l ocus AcoGoldSmith_v1.019605m.g) derived from phytozome v7. 0 (chr-ID scaffold_15; pos 327309 to 328144 reverse strand )
tggattaacttaatttggtggcttacaggttaatgggtttttttttttttttttttctcttgtggtaagtgtttaatgatcttcttcgtaaaaaaaaaaaaaaaaggtgtttaatgatcttgattgaaatgtaaatatccttcaatggtttctctattatgcggagacattagttacttattgatcttgattgaatatgtgatggtggtgcaactgcatagcatgtaacttgtaaaagtgaaaagccaatgtctgtctttatttatggaattatggcgcagcactgcagcagccaggggaagttcttgcaaacggcacagttcgcacaacttccacagttccaccatcaacacgtgtgccaatttagaacattactttaaaactttctaataacaaacagagcagaaacaaccttgccctgccgtaaaacatttgaatgaatgaatctccgtggtcaccaactcacgtgctttgaaattccataacagcaaactgaacgaagttcctaaatatagagaccagaggtccagagtcaaaagaggtcaaggcagttaggtgctgtttgttttttcgtctagtagcttatagcttataagctactagctactagctataagtttggggatggagcttatagtaaccgccacttttttagccaatttctactagaaaagcttataagaccataactagaagtaaaaacaaagccacatttgggttttctaatagcttataagctattagaagtagtataactgaaaaaacaaacagcaccttagtcttgctaattcattggtaaaggaagcttcagcactgtgaacttagctaccccaaga

SEQ ID NO: 107724 - DNA, 868 bp, Aquilegia coerulea
  Intron number 1 from transcript AcoGoldSmith_v1.004547m (l ocus AcoGoldSmith_v1.004547m.g) derived from phytozome v7. 0 (chr-ID scaffold_51; pos 370639 to 371506 reverse strand )
ttacaaatctagaactatcgaacaggtggatacaggtatgctttttctatttcatttgagattattgtcgcacattgttagcttattctattatatatcttatatacatagcaaattacttaattcagttcaattcataagattgacactatcacctactacttattctttgcagtagaggtgaaatgttgataaatttattttcttaagtgctcaaccatttttgctacaaacctacaactcgtagacttggtagctaatattgtctacgttctgttgttcatcgaatccaagggttagactagtgttcaaattctcggaaaattttaaataataaatccaagattcatttcagaaatcgactttaaaatcccttacacaaataccatacgctagaaccaagtcctctttgcacattctcagtttgtattataaatctgactaagtgacttactctttcctctagcctgtaattgacgaaagtacggtgacatatcacacacattctaaaatggatcattctttacatgtgccactcgaacacttgatctccattggttgagacaatattgatgatcctgtcattcttagtcactaagaaattagtctagtcgtctaattctgaactttaatcaatttaacttgccccaacagtagcgtagggaagattagatcagatgtacttactcatatacttctgcatctaaagaacataaaacaaaattttgtgatttagattgctaatcagtaccaaaacgcattatagttctgtttcctcaatgttgagtctttgcttaatactttaaggttattgccaaattgcaatttactgtctctttgtctgcagaatatacctacgtgccaacac

SEQ ID NO: 107725 - DNA, 814 bp, Aquilegia coerulea
  Intron number 1 from transcript AcoGoldSmith_v1.020524m (l ocus AcoGoldSmith_v1.020524m.g) derived from phytozome v7. 0 (chr-ID scaffold_28; pos 1782078 to 1782891 reverse stra nd)
gtgacgtaagcacttgtctgttttttgtttttattatattgctagggctgggtatacattagttggggtacttgtaattatggaggtttgggtgggtggattactacttttcagcatttttatttcaagttattttgattccagcttttaattcttgcaattctttctgttcttttgattctttgcaattccaattattttatcatccgctgcatcaatttgtttttgttcatgttaaagttatgggcttccgactaaaaacaattggttatgagtggtgttgcccatatattttatatacaaggcttgtactgttttttcatgtgagactgtatatctcaacatgtcccctcacgtgtggtgtattttgagcctagcacttggacttaatggatgacctgaagtattgggattatgcttgctaaccaactaatccatattgggcttctaatacatccaattactgtttttaatttgatcccaacatggtaaacatgactagttagaataaaagaaacatgatgacatatataggagttgggacaactacgggctactgtgaagtgtgaatacaccatgtgcttcgtcaaataaattttgaaaaattaaagtgttgcagttttttcttcatcctcttctctgctctccatcacctttttacatcttctattgtcaacacggggatgcttattgaagaacattggttgaagtgttcactgaatatgttggtgaaagtcatcttctgttgatgttcttcttttgtaatttgaatgttatcatctccttttcaaacaggttgtcaatttctgctgcc

SEQ ID NO: 107726 - DNA, 613 bp, Aquilegia coerulea
  Intron number 1 from transcript AcoGoldSmith_v1.017144m (l ocus AcoGoldSmith_v1.017144m.g) derived from phytozome v7. 0 (chr-ID scaffold_21; pos 2673161 to 2673773)
gcgacatctataactcttcctctggtaaaatccacccaactattttttttttttgttatttccatttatactcttgtttttcaatcgaatttctctgttaataccattgtttgtttgtttgtttgtttgtttgttttgtgttttttaattacaggcgaatataactccacgaagtgctgttgcacagtttaacctactaagctcatattcttcaaattcttccaaattacacaaatgccctttgaagattagcttatcttcttcttctgccttcttttccggctcgattcatcaagtagcacctttatgtcaaaggagaaatgctcttatatctgtccgagctgccgcagaggttagttgctttgcttggtttcaaatcaatgtaaactattgattttgtgctgagcattctaggtatttaggttaatgtggaatactttcattatgtttattattaattagaatggataaattgtttaattaattagtgtttgcgaaactggggagttttaagaggtttggcaggcaagaatttgaatgtacaactgttaatttaaatgttcaaattgtatttttaggaagtacaagtgcaatctaaagtcaccaacaaagt

SEQ ID NO: 107727 - DNA, 874 bp, Aquilegia coerulea
  Intron number 1 from transcript AcoGoldSmith_v1.017089m (l ocus AcoGoldSmith_v1.017089m.g) derived from phytozome v7. 0 (chr-ID scaffold_18; pos 2808850 to 2809723 reverse stra nd)
aaggtactgtgaccctacttcagtttgtgttgcatgattgtttagctattaactatggttttatggtgctaatagcctttttgaatgccccattcatgatacattttctgattgttaatttccactgattacagacttagagataaacatagcataaaatcttgtttcatgaattttcttttcttggacactttgtttcatactttcatgtatgtatcttcaaaatgattgatttcttcaacctttgttgtaagaaaactaacaaaaacaaccatgcccaatccttcaaaaacaaaagctacctaaaaaagactcaaaaacaaatcacaggagaaagagaatttcaatttaatggcattaataatgttaaagttctattagacaaaaacattttttgattggtttggattatggactaaacagtgcctacaagttaggtaccttatctttgtttgtagaaataaggtattttccttattgaagtagttttctagaacctcgaaactgtttatgtgccatagccattttcgaaagttaagtgcttcaatcctaatcttttacttttgaattttttttattatcaattagaataaccttgtaaatttaattttgaagttgtatacattgcttttaagtttaatttaatttaatgcttttacaagaatttgattcttgggaataataatctctattactatgattaaactgagaaaatctcatcctgctcaataattcataaacagaatcaatatgccactactgtcagtcccatatgcttactttgcatgaatttcatataaagagttgtgttacaatgctccaccgtggtattccgtattaatgttttattttatttttttgattttgcaggata

SEQ ID NO: 107728 - DNA, 584 bp, Aquilegia coerulea
  Intron number 1 from transcript AcoGoldSmith_v1.012008m (l ocus AcoGoldSmith_v1.012008m.g) derived from phytozome v7. 0 (chr-ID scaffold_9; pos 901977 to 902560 reverse strand)
cataaaaggttagttttacatcttctctttgttgattaatattaaaaatacaatttttagtgattgtttacttgtttattgtaaaaatctaatctttttctgttttcatagatgtattcaaactacaggtaatctttttgtagttgttttgtttattaaatatctcatattgggtttaagtaatcttctgtactgtccagaaatgaatttttgggtgaaaattgttgatttaatgaaagtagtgaagttaaagctttcatagatttgttagttattacttcaatggggtttaagactttatctggtgaccttaaaaagggcttttttgatttattatgtgttgtcttgtttaatggttgtaaattgaaattcatgttttgatgataaaattgaactttttggtagttttgtttgtatgtctgacacaaaaaacattgaataaacctgttattaatcaagttatgtttatactgagttcaatttgagatcttagggttgtattatataaaaggtcctgagatctatctttttgttttgcaggaaatcttattaactataaaatttgatttgggatttttctgatt

SEQ ID NO: 107729 - DNA, 349 bp, Aquilegia coerulea
  Intron number 1 from transcript AcoGoldSmith_v1.011061m (l ocus AcoGoldSmith_v1.011061m.g) derived from phytozome v7. 0 (chr-ID scaffold_9; pos 1700275 to 1700623)
attcgaaaccctaactcttcaataactccaatactgtaagtaatttcttcaaatttcagtttcgtttcttgttctatagattgtttagatcaatcaatccattaatcaaacctcaatttctttcttatgttaaaaattcatgaatttactttgttttagggttgttgaatgttcgtttgttacttgtagtactaattcgtccatgcagctttctttcgaatcaaacactttatattagatatatgtacttatttaagaatgtttgaatgatttttttttcttcataattgatttattttggtatatttaattagctggagaatttgaagaagaattggacttcattgat

SEQ ID NO: 107730 - DNA, 790 bp, Aquilegia coerulea
  Intron number 3 from transcript AcoGoldSmith_v1.011061m (l ocus AcoGoldSmith_v1.011061m.g) derived from phytozome v7. 0 (chr-ID scaffold_9; pos 1701048 to 1701837)
aagaagccattaaacagtgcaatattgtaagtttattgggctcattacttccatctttaatctcatagtttgtttcagatttcttgaacttgctatcatattctaatgccaacattccaataactttcttagagattctagtttcaattaaataaactcgagaaaaatctgttgattttctcaaattttcagcaggacatgcgatctttaaatgctttagtgatttttctttctttactcatctggaaaattggtgccacaatacaatgtgtgaaatcattggaatttcctaatgataacaaactgaattttcgaacattcagactcttaagttggcctaaaaacagcagatatcccgtttataccccactatttcaattctgctgtttgtcctaaacaccataaagttgtgcaaaatttactggaatatttatgttatggctggcactatacctatacatattacacgcagaaaacattaactcatttagtttgtgctatttagcttttgtacccctgttaccagaattcaaaacaacccaatctaaattagattctttagttattcaatcgctagggaaacaaaagctcgttcattctgatactcagattcttcattttcttctttgtatatttcaggaaattgaggtaggttggatatattacagtgtgtatgttggaactccaaatataacttaatctaacatgtacgctaaaaagttctaaccctaaccctaaccctaaccctaaccctaacccagttacatgataatttttcaggtcttggctc

SEQ ID NO: 107731 - DNA, 558 bp, Aquilegia coerulea
  Intron number 2 from transcript AcoGoldSmith_v1.019806m (l ocus AcoGoldSmith_v1.019806m.g) derived from phytozome v7. 0 (chr-ID scaffold_72; pos 1111285 to 1111842 reverse stra nd)
cacctcacaaaagtgatcacccttaccaagttgttagtactaatagtagtagactactgttctcgttctactttgataccttttttttttttttttaccataatgcatagatgcatatttttgtatcttacttgaccttcgaagcataatgaccatgttattaatttatgttcatgactcattataatatttcgtgcaaacttctcatctagttcatgtaaaaaaacactcagctaaatttgctcaaacaatgatcttttgatttgaatctcaaatcagagaagttgactagggatcattgttgacgccttagaaatcaagaactttattttactttcctttcttccagttttatgttatcacggtttgactcctattttttcctcttattcactttatcttttacaatgccaatcaacctatttatatccgcacccttttcactcctagttataatgactatgatgataagaaaagtctctgtgcatttttagtaaggttgaaaattttctattgttaccaggacaatttgtcatttccccttataagtccagattg

SEQ ID NO: 107732 - DNA, 499 bp, Aquilegia coerulea
  Intron number 1 from transcript AcoGoldSmith_v1.019806m (l ocus AcoGoldSmith_v1.019806m.g) derived from phytozome v7. 0 (chr-ID scaffold_72; pos 1111955 to 1112453 reverse stra nd)
aagtaaacagactgctgtaggttctgcttctgcaggtataaataatgtcatttcttgttatatatgcgtcgacttaagagcattgataaaatggcctgaatcaaaggaattttgttaaatgtctatattcaagaaaaattaacacataagaaattgtctatgtgatttttgtttcttaagtgtgtaaaatcgatttaatttgctggataacataatcataaatcatgcatatataaaagtacttttttaacaggtagggtacctttcttttctgctgaacatgtttaaccttttattatacatccatgattgtgcaccatatggaaatcggtagcagatatgaataataccttgaatggtttctcttttgtaattgtaatatcgtactgctctgtattgttcaatatttgctcactcaaaagtgcttttcaataaccactatttctctttccttgttgaaatagatagcaagaaagttgaagggaaaaaggcattatac

SEQ ID NO: 107733 - DNA, 818 bp, Aquilegia coerulea
  Intron number 3 from transcript AcoGoldSmith_v1.003199m (l ocus AcoGoldSmith_v1.003194m.g) derived from phytozome v7. 0 (chr-ID scaffold_1; pos 2268192 to 2269009)
aacagtttgatctggtaatgattctttttctcatgtttgtaaaatgatttaacgtttattgtttattgtgaaatatgtatgttcatgcagtgtgggaattagtggaggaatgacattccttcctatgtgaggttctcactggtgtaggagggaaattttaaactggttacttttgtggactgtattttctataaaagtaaaactatagtatacttggcatcaatttcatatttatcttaacacccgacaacagatgacaagtcaatcacagaaatgtaccattcgaatgaacctaaaatacatggtgcaaaaagttctagagatgcaatacacatgaagccagcgtctctataatctatatagataattacttgggaatatggtcacactaagcttgaatgtaatgtgtgactataacacatctcttagattatactactaattgtacaccgactaggataattagtcaaactaagtatctaaaggttaactatatgtggcttttgtcattacctattgtgcatgaatgatgaatgtctgaaatcaatgtaacgaaaattttggtatatcaaattcttcaactaaaatacattaactgcctgaattgctgaatggtttattgatgtgtatacagtatatccttgtagcgttcttttccaaactaagaaagttcatttctattttttacataatggggcgacaaataccatcacagtcaagaaaattatatgttcgatctgtttgttgtgaatatggtaataacaacatatctgatgtctggcacgtttgcgtttcgttgcagctcacacttcaagagt

SEQ ID NO: 107734 - DNA, 613 bp, Aquilegia coerulea
  Intron number 1 from transcript AcoGoldSmith_v1.004779m (l ocus AcoGoldSmith_v1.004779m.g) derived from phytozome v7. 0 (chr-ID scaffold_18; pos 2159218 to 2159830 reverse stra nd)
attagaacaacttaagtctaagatctctcttctaggttagttcaacaacaacttcattctttcttcaatatctattccattcacttattcaactgttttttatttgatttttcagatttctgaaattagtattataacttgtattagttgattagggtagaatcaatagaatttgtcttaattgtgaatggatttgtgattgcattgtattttgtgtgtatatgtgtgttttgagtataaaggttgacaagtagaaagcaattatgaaacctttcttttaaacctaataaagattctatatttagtgcaatttaagaggttaactttataacaagtttgtttaatcgtttgaatctagtatcttcatttctactctatttatgtagtgatttagacttgtgagttcatagttcgagacttttgagtgtcttgtggttgaattttataaccaagttttttgtggattgatattttgaaattaggacaaagctgttggatttttttattttttttatttatggacttatttggttggttggtttggttctgggtttctaacttttcaattccttttgtagaagtaagcattgaagataaagcacgagaattgaaa

SEQ ID NO: 107735 - DNA, 478 bp, Aquilegia coerulea
  Intron number 1 from transcript AcoGoldSmith_v1.003630m (l ocus AcoGoldSmith_v1.003630m.g) derived from phytozome v7. 0 (chr-ID scaffold_11; pos 5427702 to 5428179)
aacaggtacaaataacattttctaaatctcaaaattccattttacagaagaagagaaaccaacccatgttcttctttctaatctattaatcaattaatctttttttttttggtgagaatcaatcaattaatcttaaagctaataattatataccattattggccaggttttttttttttgttttgtgtaatatttctacgtcaatttatatgctttttttgacatattatatgatttgtttcttcaatgatttaattttcaataacttttttgttttattctttgtgatattttttgccaaaatattagaagggtactttttatttatttatttctaatattgggagaggagagggggggggggggggatgtaggcagtgatgttgttgttgttgttgttgttgttgttgttgttgttgttataggctttggaagtgtaacaacatatgtttctcattttgttttgtgtgttctgcag

SEQ ID NO: 107736 - DNA, 840 bp, Aquilegia coerulea
  Intron number 2 from transcript AcoGoldSmith_v1.003630m (l ocus AcoGoldSmith_v1.003630m.g) derived from phytozome v7. 0 (chr-ID scaffold_11; pos 5428442 to 5429281)
gaaggaggcaaggtcctatttcattttattgatagtatatgtgtgtcattacatttgatatattttacttctccctatatacctctttcccttcctgattgttgattcttgtttttcagtcctagaatataggtaatgtagtctattgataagcttcttgtgattggagtttactttggagaagtatttagtttatggaatgttccagttctttaagcgacatagacactttaagaggtcacatggtcctaacttacatttcatgacaatgaaagcatgtcaagtaaatctgaaaattgaatacaaatgaagcaagctaagactaaattaaattcgtcagttgacccacatctggagctttctatgccgttggttttacatggtaatatttcttggaaggatggtgtagggagtggcagttatgaagtttccgatttcctatataaatgaacaaaactaaaaattatgaatgctttaaatagaactgggacaactctttgcttgtgttaactgtcgttaatttctgtgttttaatattatttgatgttcgcttactgtcaatattcaagtaggctctttgagacagtgcatcttcgatgtgttgttcaagggtttaaatctgagaaccataactttaggccttagtttgctgtattggccagtgggtgaaaaggcaatgacttagtttagactacctactgtaagctgttcccagaattttttttttcttgaaaaaaaatccaatgttttcaactatgtgattgtagaacacaaacaaacacttttttctatttctaatacctatcttgttgcttttctttatcctcatgctttccagga

SEQ ID NO: 107737 - DNA, 227 bp, Aquilegia coerulea
  Intron number 4 from transcript AcoGoldSmith_v1.000905m (l ocus AcoGoldSmith_v1.000905m.g) derived from phytozome v7. 0 (chr-ID scaffold_7; pos 2861406 to 2861632)
agccttttaaggttaataatgcttacttaactttctatgttttttacttgttttctttctaagaaacattactaaatacacactaaacaaatttgataaaattgggaaattgaaagcaaaagaaatggtttaaccttttcctggattttgctaatataacttcaataaaattatgtgctcttcacttgttactgaatttgttttcttttactggtttggtgttgcag

SEQ ID NO: 107738 - DNA, 407 bp, Aquilegia coerulea
  Intron number 1 from transcript AcoGoldSmith_v1.024192m (l ocus AcoGoldSmith_v1.024192m.g) derived from phytozome v7. 0 (chr-ID scaffold_15; pos 3631402 to 3631808)
gggtttgctctctctctctctctctgtctgtctgttattgtttattgatgtttctctgtattttagtgctcgaaaaaccctaatcattagtgattttcttcaaaaaaattgtctccatagcatctctctgtaacgttattttacaatctattgctaaattttataaaaagaacagctttttaaggaaaatggaacaaatgcccgttaaatagtagctagcttggttgcattatggattaccttacgtttaccatggtttttagttctattttttgagttataaatatgcaagttttgagctttttggcttgttacttcgtagtggaataaaattgaatcaagataatgggaatttaagtacttgaaaaaaaaaaaaaagatttgatccacaaatgttgttttcaggt

SEQ ID NO: 107739 - DNA, 743 bp, Aquilegia coerulea
  Intron number 1 from transcript AcoGoldSmith_v1.006472m (l ocus AcoGoldSmith_v1.006472m.g) derived from phytozome v7. 0 (chr-ID scaffold_46; pos 390264 to 391006 reverse strand )
cttggatcagatccgaccaacctcatcatcatcaggtaccgtattttaatttcaaatatcaagacaaaccattttagttattatttgattcttgtttacattattgctttatagaaagtgggttttcattctgaatttttgttttggatttaataaaaacaacttcagggttgcttactagcattgatagaagaaaacccttttgtgagaaaaaaaaataaaaatccaattttgttgaatttattttgatttattggagaaggggggggggggggttttcaattgatttttttttaatggggtttgaagaatttggtagtatagtattatagacaaaggtaagactgagttaatgagggggatgagtgagtacaggtaacaggaagattgttgcaagattcttttgttcttgtatgatttgtggttttcatgattccaagtaatattatttgtttgattatgattataatgatgatgatgctggatacacttgtttgtactgtatactcacttggggttttgttttgtattacatgattgctaaaatccaaatccttggatgttggttttgtcttttatgatgtttatctgtcttttgtttttctgagctgtttatcatagcagtattctgaatttacctctgtgtttttattttcttactttcccatgttatgatctactgtttacacttttactttcatttttcagagaaattaaaagcgattcccactttacaagtcaaa

SEQ ID NO: 107740 - DNA, 804 bp, Aquilegia coerulea
  Intron number 1 from transcript AcoGoldSmith_v1.001550m (l ocus AcoGoldSmith_v1.001550m.g) derived from phytozome v7. 0 (chr-ID scaffold_7; pos 535763 to 536566)
atttgcgaagagaagatttgaaggtggttttttttttttttttattttcttccattttaatgattttttttgataaatttgtataatagaatgatttaatcaagtttttaacaatttggggttgtttgattttggttttaaaagatgggttttgttttttttaagaaatcatgaagatccatagtagaaaataacataaaacttcctctgttcttcttcttcttcttctttttgtctgtaacttttttttttggttaaaaatggagattcaaatttatagaagaaagagattttgtttataaattaatggggtttctttgtttccttttattttattgagatccagagtatattttgttttctttttctctcatcactagtgtctctcagctttcattctctccgcttttctctctctctctctctctctctctctctctctctctctctctctctctctctctctctattacttgctttagttttagttcgtgaagaagaacctgattcttctgaaactaatccgacaaacttgccttttatttttttaattttattttttctctctctttggtaactttttctattgtttccttctcttacaaaacaattcttttcagctacttttcactttaacacagaagagaagaagaagatctatatatatataagattagtagatagaatcatagaataaaacaaagccatttctttttcttttttctctgttataagaaattaatttttttccaatggttttgatgttaaggaagaaaaatcaaaagaggggtaatcatcttcatc

SEQ ID NO: 107741 - DNA, 263 bp, Aquilegia coerulea
  Intron number 2 from transcript AcoGoldSmith_v1.001550m (l ocus AcoGoldSmith_v1.001550m.g) derived from phytozome v7. 0 (chr-ID scaffold_7; pos 536628 to 536890)
aaaagacagctgaataaacaacagtcaggtaagctgttgtttcttccttattttcttatgggaagttaagtgaaagaaaacaaaaacattctttaatttgtctttttctaacaaaatgctccaatttgttatctttcccaattagattgtaatggataatggtggtggggttgaagtaatttgatgtttgaactcatttatttatttctttcattttttctttctcaggtaataataataataataaactcaattcaagttat

SEQ ID NO: 107742 - DNA, 880 bp, Aquilegia coerulea
  Intron number 4 from transcript AcoGoldSmith_v1.005994m (l ocus AcoGoldSmith_v1.005994m.g) derived from phytozome v7. 0 (chr-ID scaffold_1; pos 2275439 to 2276318)
tagtcagaaaattcacaatcagttggtatgcaaagctactttcattcctccctctatctttatttaattttttttcccttataatactggaggttttattttatgcataatgtttcatgaagttttctgctctttatgagctgtgactgtttaacaagactaaaaatagaaattctgatacaatttgtctccttttttaaccatttagatgtacaatgtaagttgaaagatatccaatattgtggtttgttaacgattctaagaatgttttttctttgctgcatggacactggtaggaggtgttggtccaagtcgggtattgcaattagatttggcatgaacccaaaagatggtattcgtttcaagtaattaagacgatatgtcataatgatatttaacatattttaataaatcaattacaagtggttgatgtatgtagtctagtggttaatttttttaattttgagttgtggggttcaaacccatgtttgagcagtttgtatatatgtatactttacggccgccctatgtgggctttgggttctttcagtctcttgggtcctttgaagaaaaaaatatacaaagaaacaatcaatcaatgtcatctttcatgataaaaattaaaattaagtacaaacaaaagtgtcacaaaaaactatgtggagtgttagagtttgaagggtgtgcaacatggacacaatttttttggaagtgtacgtagttgcccttgttgaataaattttatcagcgtgtttgcattatgttgctcttaaatattttttcgcttcatggaagtttatattaatattaatttaagagcagatagatataatgatgttttccttttgccattccttcttaataggttggtgttgataag

SEQ ID NO: 107743 - DNA, 928 bp, Aquilegia coerulea
  Intron number 1 from transcript AcoGoldSmith_v1.015027m (l ocus AcoGoldSmith_v1.015027m.g) derived from phytozome v7. 0 (chr-ID scaffold_28; pos 1305764 to 1306691 reverse stra nd)
ggtgagattatcaaggttagttgtgtaggactgtcaaatttgtttgtcggcttttaaatatatttttttgtttttgataaaagaatttttttattgataaatcgaggaatgcgcgctacaaactgtgcaagaagtcatttctgaatggcgaacctgattcttttaaatacatattcgtttgaatcaatcgtcatcacgttgctatcgattactttttatttataaaagaaaatcctatattttttgtttgataatgcttacgcttagtatatctccaacaaagacactttggtgagatggtcaaggtgagaaagttgctcatagcatgcaattgatttgtcgattttaatatatatttaatttttatttttgataaaagaatttttttttattgataaatcgaggaattaaacaaaggtagagtatatgcgcgctacaaactgtggaggaagtcctttctgattagcgaacctgattctcttaaatacataaaccaaccatcatcacgttgctatccattactttttatttatgaagaaaaaaaaccaacatttttttttataattcctataaatgcttagtatatctccaacagagacactttggtgagatgatcaaaatgagaaagttgttcaaagcatgcaattgatttgtcgatttttttttttttatatatatttgataattaaaattttattgataaactcaagaaattttttgtagaggacagcgctctacaagttctttcagaaatgtaaactcgattctcctaaatatatattcattggaaccaacagtcatcacattgataattaatataaactcaatatgtcaatatcttggtgattgtggctattcatcttttctattgactaagtaatgttttggtttaggaatcaatatcacctacaagtgagggatcagcatt

SEQ ID NO: 107744 - DNA, 656 bp, Aquilegia coerulea
  Intron number 1 from transcript AcoGoldSmith_v1.010303m (l ocus AcoGoldSmith_v1.010303m.g) derived from phytozome v7. 0 (chr-ID scaffold_11; pos 4573529 to 4574184)
ctaatactctgtaagtcttttttttttctcttagaatttgttcttcatcatctagcttgttttgttctttcatgttcaaaatacttttatgggttttttttttcaactttgtattgttctttgttttggacttttatttgatcatgtaacagtcaatgaacaggactttacatgtaattattaatggggttttgaagtttaatcttttggtagtgtttcatttttacattgggttttactctttttgcacaatttatgtactaaattttcaaaagggaaaaaaaacccattagttgttcatatgatcaaaaaaaaaaaaaaaaaaaaatcatcttttcaattgcatccatgttttaaggtcagttcttagtacccaaagaagttcaagtttaccatcattgggggattttctctctttgaaaaattccatgttttaggggtttgtattctgtttttctttatgcaatttattaatttaatagcaaagaaaaggggatattcaattggggtttttctttgtgccttgttgcttgtattggtatgttgtgttactgtggttttgtggtggggcacagcagaaatggggtgttttttttctgaagtttaatgttggattggcagggctgctgcgattccgagagcaaagggtggtgcat

SEQ ID NO: 107745 - DNA, 480 bp, Aquilegia coerulea
  Intron number 1 from transcript AcoGoldSmith_v1.000927m (l ocus AcoGoldSmith_v1.000927m.g) derived from phytozome v7. 0 (chr-ID scaffold_1; pos 5551071 to 5551550)
ctcttctttctctcagaaattttgcagatcgaaaggtacgttttcttcttaaaccctaatttgttcatatctgttaactttttttaagggttttagtttcttagatctgtgttttttcaattcgatttcaatgttttttcatgcaaattttgggattttgtttatgtaatttattgaatttttttttgtttatgttacttttgaatcgatcgatcatcattagtttatgcgttttgtctaattgtgtgaagagaaaccgagagttgagaaaataattgcgattgtttttatgtacggattcaatctgagatcgtgtttttttttattatgctttttgaataaaaaatttgatttttaattcgcttgagtctggattagaactgtttcatagctttttatttgttatttgatcgtttatgtgaaatcaaaatatagatttgttaaaattgatttttttttttgtgtttggtttaggagaag

SEQ ID NO: 107746 - DNA, 991 bp, Aquilegia coerulea
  Intron number 1 from transcript AcoGoldSmith_v1.003888m (l ocus AcoGoldSmith_v1.003870m.g) derived from phytozome v7. 0 (chr-ID scaffold_11; pos 3563257 to 3564247)
ctagtaagagtaagaggactttcttcattctcaaggtatttagtattacttattcatcatttatttgctacttaagtttgctgttgagatatgagatttttttatttatctttgtgtgttttttgaatgttgaatcacttgaatgggaaacaatttttcatagaaaactgaacaaatctgggaacagaaattatgtgactagctagtagtctaattctagacttctagtacagtaatgaaaaaccacaaatcacttttttttttttttttttattgtaaactgaaaacttttgagtcagttaagattttcttggcgatagagcaatattgtagttgcaaatttaggcctgtaatgactgatgttggttgttatagatttgtaatggtagcatgatggtatacagcggttgtggggatttggggaagcatgaagatttgatattaacagtggtggtgatgtagactctgatagtggttgcgagatcatggcactgatggtttcatgattttgatatatgattggtttcaatttaggaaatggtttggaagaaaataatagggtgaagacgatcgaaagtgattgtggtgtagcaaaattagcagctgctatgttggctttgcttccacagcgtggatagaattctctttgaatataattgggtggatttatgcatttaagaaatcaaacttttgggttacacccatggctggtggatgaaatacattttatgttaaactgaaactatttgtagacaggaacatctgaacatgtgaaactcccatgagtagttgatgattctacgtctagtcacatactcacatgtgcggctaatttgaaaaatatgcttacatacagtattaggatgaatgattttgatacttgagtacgtgacactaccataaattttataatagtaactattttcatagaaaagagaaatgatgctattctttttcctcaggactcatatatttatccctcaacaacaac

SEQ ID NO: 107747 - DNA, 1033 bp, Aquilegia coerulea
  Intron number 1 from transcript AcoGoldSmith_v1.017647m (l ocus AcoGoldSmith_v1.017647m.g) derived from phytozome v7. 0 (chr-ID scaffold_11; pos 5728883 to 5729915)
ttcggaaaattgttgatcgagaagctatcttatcggttagttgttcacattttcatactgcattttggttattgagttgattattctgctttttatgaatttgtttgtttttcttatgaacaaatgttatgttcatttgcattttgagaaagatggtttgaaactctatttttaagagattatagttgtagtaggtgggtacatttgaagttgtcagagggggaagggacgcatggagtagtgtgtttgtattcttgtgtctttcataacaaaaaatgcaaaatcttcataagtagcattgaattgggcgacatggcagaaccttgactacattgttcggaactcttgccattttcttcttcttcctcaaagaccatatgactggcgttgggtcaacagcgcaagtatctatattcagaatgtcaatagtatgtatgtttaggaacttccgcaaacaaaagcatgcaactctgtagaaatagatttgtaaagttgtaccgcatttattgcaaggaaactcttctatggtgtagtggtttttaaggaccgctgaggcataatgttttgccaacatttgtatgtaattatttcaaataaacacctttttcttcttcatttgttgtaattcaagaatattttcttagttaatcgtagagtggcgactcataatgtagggtgtcactgcatataatgctctaaaacagatcctagttcttaagttcagatttgggtctaccctatgatgcctaagactgtaaccaataggacccataattgtacatgttaaaaatcaagtttaatgaataaaccgtaactatagattattagaatctatctgtatacccattgttgaaatggaataacacttgtgaatttgactgatcttgagcggttgcagctctaacaagatgtgatcctcacgctttctgcgagtcactttagatatttgtatttactctgacgaacaattcaagtatgcatgaatttggttcattttcgcagtggcatttaacttggatgtttctacaggttt

SEQ ID NO: 107748 - DNA, 641 bp, Aquilegia coerulea
  Intron number 1 from transcript AcoGoldSmith_v1.008278m (l ocus AcoGoldSmith_v1.008278m.g) derived from phytozome v7. 0 (chr-ID scaffold_9; pos 2233419 to 2234059 reverse stran d)
agttctggttcccggctcaggtctataatcgtgaggtacttaagttctcatgcttctactccaacatcaaactgtttaattttctatatggtataccgtataccattaattatatcactaaaatgttagtataagacactttgtaatttcactaagaacaaatccatttctcaaattaagttgttaatattcaagcatattaatagtttaatacacacttgtattaaaattctgtacttatgtatgggagcatttttttcttatcagagcaatatgtttcttgtctgtgcaaaaatggagaattacttgcaaaaggagaaaagggaaaaaagttgttttagtgctgttttcaatataaaatatttagatatatgcatctgtcatttttaattggtatttagccaatatacaattggaaaaaaaaaaaaaaaaatagaaaacctaacgatgcaacaatttgttgcaggctgatcaggcattgtaactgtcttatccagatgttaatatattttaaacttcgataaaaaaaaaaaaaaaacaattggaaaaaattaagtgtagttgaaggtataaaattaatatgttatggagtttaattataatgaacattaaatctaatgaacattaaatattctttcagc

SEQ ID NO: 107749 - DNA, 592 bp, Aquilegia coerulea
  Intron number 1 from transcript AcoGoldSmith_v1.010890m (l ocus AcoGoldSmith_v1.010890m.g) derived from phytozome v7. 0 (chr-ID scaffold_30; pos 2751713 to 2752304 reverse stra nd)
acttgaggtcgaagcaatcaattgtgagtttttcttttgtttgttaataataatgaaattaatcaagttttattatctgtttagttggttaatttagttggaagaatttgatttatgtttttttggatttagttaaaatcaaactcttatgttataattcttatgttaaaatcaaattcttatttgttggagttgaattgggttttaacacttttttggagatttggggtgttcttaaattgcttttattttcgacttattgattgcggtggagttgtgagttcatttatgctgaattcagtgaattaggaacatgggagaagaggaggttggtgtttgttattgtgtgtatttgtttcggatcttgccagactgttttacttatgaatttctttgcttccccgccaatgttgtttgagagtttcaaatatgggcatataagttttttggtacatattttatcgtcatcagttctgcctgaattttaatatggtggacttattttgactatattgatttaatttaatgaattgatacgttgtaattttctttgttcatggtgaattttgctagttgctgttattaagcaaac

SEQ ID NO: 107750 - DNA, 454 bp, Aquilegia coerulea
  Intron number 1 from transcript AcoGoldSmith_v1.002171m (l ocus AcoGoldSmith_v1.002173m.g) derived from phytozome v7. 0 (chr-ID scaffold_27; pos 1208894 to 1209347)
ctttctctgtttatctgtagcaggtgagttcaaatgtcggtttctcttgttcttctaaacttgtgtaatgcaagtttcattcttctctttctttgcttttgagttcaactggttttaaaattgtttcagttcttcacattttagcactgattgagttgatttggggaaaaataaagacaatgcaggttttttatgttgtttgatgaactaaaaaagtttgctttctttttaagtttttttttgttactttttaaaagatttcttgttttacaaaagaacatgaaatgattaaagcaattttctcatgactgtaactcttttttttctttcttatttacttgttattcttactcttattagttatattatttctgatctgtttttttcaagctgagctttttgttttttactgtttacagatcggtgaagtagatctgtttctaaggatttgaag

SEQ ID NO: 107751 - DNA, 657 bp, Aquilegia coerulea
  Intron number 2 from transcript AcoGoldSmith_v1.002171m (l ocus AcoGoldSmith_v1.002173m.g) derived from phytozome v7. 0 (chr-ID scaffold_27; pos 1209322 to 1209978)
gtagatctgtttctaaggatttgaagaacttcaaggtactatagatcttcactactgttcaagttttctgtacattttgtcagtaaacaatgtggaaaattttctatttatttttagaaatctagtgtaatcagtgttaatgtcctttttcaacagagaaaaatattttcatttcgaaagtccttcaggtttatcaagtttccaatataaccttagttaaacaatcaatttgcctgatagaaaggaaatcatgttaagaaagatatatgaacttaagggtgttttgggtacataaatcataaattttcaaactctttttgacttttattttttttatagtggagagaagttggactttggagtatgaatgagtagtagaaaggtcaaaactttttttttttttttttaccaactgttttaattagattatgtttatgattttggtttctttggattcctctgaaggaaggcaggaatgcaggatatggttttctgtatatttattggttatgagcagctgcctgtctccaggcattaatttcttcatgtacaataatcagaaaacacacccaagttcttgtgcctgctttatctcaccttgtgacttctgtactttttgcaggttttgtgggtcagttagaacagggtagttggtat

SEQ ID NO: 107752 - DNA, 457 bp, Aquilegia coerulea
  Intron number 1 from transcript AcoGoldSmith_v1.000547m (l ocus AcoGoldSmith_v1.000547m.g) derived from phytozome v7. 0 (chr-ID scaffold_11; pos 4719175 to 4719631)
attgtttcactcgcagatcttaccccttaccccaggtattctctctctctctctctctctctctctctctctctctctctctctctcaacattcacacaagtttcttaaacttggagagttttctataaatggggttttctctgttggttgatttctttgtttgattttcgttttttttcttttggctatttttacttcccactaaactttgctttctcgattttgcgaaaaaaataataatttttttttttcaaagtttgagttggggtttataagcttttctgacatttggattttttcttacaatgcttggtttattttgggtggatttttgttttcaaattgtttctgactataataaatacgattttagtttacaatgtctcttctctgtcttaccattaccattaccattaccattattatgtatttgttttttcttttgtgtttgcagag

SEQ ID NO: 107753 - DNA, 587 bp, Aquilegia coerulea
  Intron number 1 from transcript AcoGoldSmith_v1.004968m (l ocus AcoGoldSmith_v1.004965m.g) derived from phytozome v7. 0 (chr-ID scaffold_1; pos 7169596 to 7170182 reverse stran d)
ctctgttgggtttaacaattatcaggtatgtttaatcttctttgtttatggtcaattttatttgattttttttttttatagatttttcaaacatatttcttacccaaaataaacagattgaagaacccctttttcatcttatcttgcttaaattattaaatcaattggtatgtttttagtgttagatcggttaatttagttctaaagacagctttttcaagatggtcaaagtgtaaaaaaggttagggttttcttttgattttgaaatttttcttcttttgggttttgaaagagctgaaattgaaatttgggtattgcttagtagctggaattaagactggttttttgtgattttggttttcttttgctgatttagttggtgggtcatgttctaatttggaaaattattcatcttttggttggatgatgttaatttagctgcaaaggagttatctttgatcagattttggcagatgcttttgaattatgactattttttattgggatttgactttttggtgtggtttaagtggtagctggagtcatttttttttttaatttgtaggtagttctggttgcagtgcttg

SEQ ID NO: 107754 - DNA, 880 bp, Aquilegia coerulea
  Intron number 1 from transcript AcoGoldSmith_v1.003570m (l ocus AcoGoldSmith_v1.003570m.g) derived from phytozome v7. 0 (chr-ID scaffold_9; pos 4548212 to 4549091)
gttggagcagttcttttcttggtattgttcaggtactagtttcttcctcttctaatgtgtgatcccaaaacagtaagtccttgtgttactttattgccacgtgttttttttataggaattaattgttcataagatcaggtgaatcagttaacttcaaaccaggtctctcttaatgcctaaaaaagattatagtcttatagggccaaatcagatctgaagaattttcaagtttcaagtttgatagaaatgaaatcacatcatgattcgtgatccacgttttaatggtggtgtgatttgggtttgttgagatttaagactagagattttctcttacgtataaaaatgattctctattaaccatcattggaaggaaatcaatcacagattcacaggaaattttttctcttcaccaaacaagaaagaaaatgtattaatatgcacctttaatgtacagtagttgtcctaatcattctttattagcagccacattttgtgttgaaaataccatgggagtgtggcagttgggcaccttattatgtgataatgaagcataatgaagcgtgggaattgggtagatggctgaatagtttaatagtttaatacataataggcttgactttatcaaattggtttcttgttgataggatttcaatatttcatgttgaaacattcaaactactgtactattgatgtagtaacccaactacacaatttgggctttaaccagcatttcattttgggcttggaatgctagaatccggccagattgctttggtctgcaaataccctttgccacctggaataatgtgtgtagaactgtagatcgtagtcatttgctaataatcttcattgtaatttcatatgtgcagtcatcatttct

SEQ ID NO: 107755 - DNA, 524 bp, Aquilegia coerulea
  Intron number 1 from transcript AcoGoldSmith_v1.008518m (l ocus AcoGoldSmith_v1.008518m.g) derived from phytozome v7. 0 (chr-ID scaffold_9; pos 1732271 to 1732794)
ttctacagagggtaagtaatatggtctctaatctctatgcttttctgttaccattttttttttttttttacattaattttatggattgtatttaattcctttctcctgttcatgttccacatctttttttcctcaaaacaatatcattttttctctaccgagggttttttttcttcaataattatgtgaaccttttactgagatgaagaagattttagattaccaactaggtcagaattatgaaaaaataaaagtgttttgttttttgctttcagattaccaactaggtcagtgcttaagtatagattattgaatatctgctcatgatggaaactgggtttgggtagtttgattattttggggaaaaagaaaagtaaaagattactagccgttttgcatcattagaaaacattattttgcttgttgggtatctatgttgggtaattttcaaatgtgttgtattgacaaggttacatatttttttttttttttgggtgtttgaaggaattatcctgacggtggtg

SEQ ID NO: 107756 - DNA, 510 bp, Aquilegia coerulea
  Intron number 1 from transcript AcoGoldSmith_v1.010780m (l ocus AcoGoldSmith_v1.010780m.g) derived from phytozome v7. 0 (chr-ID scaffold_40; pos 1611474 to 1611983)
tctccattaacttcttcttcttcttcttcttcaaggtaattaacattaacttaattacttcttctttctataacaacttcatctcatctttgtttcatttttcttcacagttatctgagttattcgaaatcgagttgttcatcaacaaacaacgattgttgttgttttagtactggaactcgaattgttgaagctgataatcggttgaaagttctcgctcttgcagctcatcatcctcaaaacaagatgaaactcaaggttataaaaaattgaattagattattagatctacttcgaattaattgttatgaaattaagatctgttgttttcaatttgaattttgacaattgaatttttctagatctggaaaattcaaattaaacttctagatcttcttctcaaatgttcttcttactaattgtttctatcattattattattatcatctatgtagagtagtactactggaaacagtgaagatttgtcaccaactgattccaagtgttctt

SEQ ID NO: 107757 - DNA, 504 bp, Aquilegia coerulea
  Intron number 1 from transcript AcoGoldSmith_v1.006091m (l ocus AcoGoldSmith_v1.006089m.g) derived from phytozome v7. 0 (chr-ID scaffold_1; pos 6135385 to 6135888)
atacttggattctgttgtttcagagacttattcatgtaatttttaatttgggtttttttctacttgcattttgggaatttcttctacttgggttctttcaatcttgactgaaaacagtgttttgtgtttggattctttgaattgagaggttttttttaatacattaatggaaagttttaatttgggtttttctaattctagtgctttcaatccctttttggatctgggtttttattaataattcatctcttgttaatgcatgtttagattaatttaaagtgttgttgttgatacatgcatgagtcttaaaaaccccaagtttcttaattgatttcagtttctgattctcttattaatctatctataattccatcaaacatttgttttatttataaatcagtagagcttattatgtatttgggcatctcaaggttctttattaattgttgtattgttgaatttattgcagaagaaattttctggtttttctaattgaagaggatt

SEQ ID NO: 107758 - DNA, 492 bp, Aquilegia coerulea
  Intron number 1 from transcript AcoGoldSmith_v1.006463m (l ocus AcoGoldSmith_v1.006463m.g) derived from phytozome v7. 0 (chr-ID scaffold_11; pos 5798459 to 5798950)
ctgtttgtagtcaggtaaattgacacttgttttgcattcatagatctgtttttatgtttggggatgttttagattggtttttgagtaatgggtagttttaattttgtctaatttgggtttggattactgaattgatgcttttgtttgataaaaatcttatctttgagattggtttaccattgactttaataagaaatgcattgaagattgattctagattttagctttgggtatttgataacaatgattttagcttatagaacttgattttggaatttgttgcaaagttcaattacataaactgattctggggatttttcttttgattggagaatcatcgagctttttatttgaaagatatgaaaatgtgtatattgcagagtagattggatgttttattttattttgttttgtttggaatctggttattcaatctgtgtctcataaatctatatgctttttaatgttcaggaaacaagagctgctttgagc

SEQ ID NO: 107759 - DNA, 563 bp, Aquilegia coerulea
  Intron number 1 from transcript AcoGoldSmith_v1.018539m (l ocus AcoGoldSmith_v1.018539m.g) derived from phytozome v7. 0 (chr-ID scaffold_15; pos 4099150 to 4099712)
tagtactgttttaaccagtggcatacacccgaaaggtgggacaccgacaaccaccaatcttcttgctccaattctatgcatttcctataccaaaaaacacaaacatgttcacaaaatgatgtataaaacgatacattgtacagtacttgtccggttgagacccaagttaggactaacaatatcttttaattgattaaacatgattataaattcaaattttacttctcttatcaaagattatttgtagttttttttattttgataaatattttttgatatattttctatgcaatcatgatggttgtcaggttgttccatcaattaagccatgaaatatgtataaaatcatggattattattattattcaccatatataaaaatacaaaatccaccaaatcaaataaaataagcaaatacttactccaaaatatgttcatttcaaatttcaaaaccttatatataaagccatgaaatatcattctcaatcaatcattctaactacaatggattactctttcacgatattctttgtcattgtgttcatatcatttctttcagtccc

SEQ ID NO: 107760 - DNA, 1000 bp, Aquilegia coerulea
  Intron number 1 from transcript AcoGoldSmith_v1.004414m (l ocus AcoGoldSmith_v1.004414m.g) derived from phytozome v7. 0 (chr-ID scaffold_9; pos 4933425 to 4934424)
attgcggctggagagctgcccttcagtgagtttgttcaaaatttcaattatactgtacattagtgtacaattggccttcaaccagatacaggattaaagtcaataccaatacatgcagctatttgctatctaataaattgattaaattctcctttgctgtgtcaaacaacaaacattttatgacaaaatacattaatggttaaatactatagttgattttttgttgggaaattctgatatactaagtcttttaagccttgaagtatgaaagaggctgtgtaaaatacgaatattgatgtctgccacctcttagaaaggacaccctagaatgaataccttaccatatgactcgcaacattcgcgcaaattaactaaactacagtatttgatcccttatcagtgtaattcctgtttagtacaatttcggatgtcttccagatgacctttctcggtcatttaacatgctcagtgatttgttacattctgttaatgttcaaccagaatgtcatgaaaggatgttttctaggcgcctggaacaggacgacaggccaccagatatatgtatagcacgtagcagatgtgctcttgacctgcaccattgatattggcctggacaagagcttggaaatccggctatatagtaatcctagacctagtgcatgtttttattggacaaataattaaattcctcgattcctaagctcattgagattggagagcttccgttcagtggaatgtacatgattagactttagatctcaggtgtctacacctaaatttcaattagatgtgggttcttagtaaattttgcaatttcattttctccataatgttaagtaatattttgatttgtacaaatcaggtgtccactgatttttctgtcactattgccattttgagtgttttggtttttctttcatatttttctgataaaatactctttagtattcaagtgccctatgcccccctatctaatgcaattattcttttgtgcattaag

SEQ ID NO: 107761 - DNA, 770 bp, Aquilegia coerulea
  Intron number 2 from transcript AcoGoldSmith_v1.002462m (l ocus AcoGoldSmith_v1.002462m.g) derived from phytozome v7. 0 (chr-ID scaffold_95; pos 311101 to 311870 reverse strand )
ggcgatttattccttcaaagtgggaaaccaaaaaggtaacttcttttttttttttttttttaagggccaacaaattaaacaacaggaagtgagctcccaaagaaatattgccttgccatgttaaagcaacattttcaaaccaaatctcaacggtatatgtaacataatactcgcaaataaatatgtgtattggtcccctggtctgatacaattatttcatggaaatatattctgagattcaaaccgctcccctttgcatattatatcatcatcttaaacctctacttcattacagttatgctgagagacctctaaatcgcagagacggttaagccacttcgtggttcacttcactatgggataaagcacaacctgttagagttacaatctggttatctaaatttatatttgaccactcggaactgtattacctcttggcgttcctcatcctggaaattgcattttttcctattctcttcatgcaaagtattgtttggttaccattccctgtctatctaaaaaggagtatgtcatgagaaatcgggttggtctgcactgaaaaaacttctataacattaaattgccagtgtcacactcactttaattcattttcctatcatatcagttgtatgtaaagttttggctgggttcacagcagactagtagtattagatggggagatgaagtacctcataattttgatttgtcattaatagtttttatctttatatacaggttgttaagttaatcagggcaattagggagggacg

SEQ ID NO: 107762 - DNA, 337 bp, Aquilegia coerulea
  Intron number 2 from transcript AcoGoldSmith_v1.006440m (l ocus AcoGoldSmith_v1.006440m.g) derived from phytozome v7. 0 (chr-ID scaffold_9; pos 3151509 to 3151845)
aagcttcaagctttcttcaagtcaattcatctcaagtaagatgtttttcttctctcaattgaaatttttcttaaaatttttaacatatagaaaaaataccaatttttcgtactagggttctcaatattcctcgccgaaacttttatgttttggtttcaataatgttaatttccctaaaaaaatcgtatttttttctttggggtgttattacttctttgaattttgtagttttcatatacaatttgtttttttttttttgtttgtttgtttgaaattgactctatttcattaatttgatatagttcttagaaataacctgcaaaagttcgggtaaagt

SEQ ID NO: 107763 - DNA, 805 bp, Aquilegia coerulea
  Intron number 1 from transcript AcoGoldSmith_v1.021138m (l ocus AcoGoldSmith_v1.021138m.g) derived from phytozome v7. 0 (chr-ID scaffold_11; pos 3334583 to 3335387)
ttctcttctccttacaggtttgtacatgttatacaactcaacatatactgcattggaaacttaaaatggatgtagtttgtattattgatcatctacttcctgttactgcgtgtttgttttcatgtgtgtgtgtttgtgttgaaagtattcatgatttttcataatctagttaggcattcctcccctttttcccctatccattatatgtctccagggcaaaaccaaaaaaatgtaaactatatcattagaaaatgacactggactctaaataggttcggttcgcattgcgaaatcaaagaaattcttaggttgcatagtagtattacatggggatatatacctagttaatcaattaattaatttgtgcagttttctctgacagtcttttgcccttaggtttcatgtggaattttttgaacattgttgatcatcaatactgtcaaatagccaatgaaatgtaaactaatttcattggctatttgttaataatcctatttatttggtctacggggtcacatcaaatgatacacacttcacccccccaaaaaaaggaaaaaaaatgatgcacactatatttcatcgttgataatccgaatgattgtcgtgaattgcttgcagctggtgccatcgaggcctcgtcctatgattattcagcaaccatcgaggcaagttttcttcaattacaatttgttcaagtgacacatgtattagaatataatctcaatcctaagtctttgtgatcgatatattttcaccttttggtctttcagtgtttggctgcacctctgcaacctcaatataaagg

SEQ ID NO: 107764 - DNA, 335 bp, Aquilegia coerulea
  Intron number 1 from transcript AcoGoldSmith_v1.005693m (l ocus AcoGoldSmith_v1.004766m.g) derived from phytozome v7. 0 (chr-ID scaffold_37; pos 2158598 to 2158932 reverse stra nd)
ggaaaaaaaaaaacacaagaaaacctgcggttgtgagtttgtcgattccccctcatactttattccatcgccaatcattttttttcattaattttcaacattttctttcctttgaagaatatttatttattatatgtttctcaaattgggtatttttcccaatctgcattttaagaaagaatagatagatatttattgttggcaattttaaaactgagggttttggattataacattaataaaagaatttttggggcgaatttgaatttgaatttgggttttccaatttttgtttttcagaagctgctgtggatttgaattttgttaattgcatt

SEQ ID NO: 107765 - DNA, 815 bp, Aquilegia coerulea
  Intron number 2 from transcript AcoGoldSmith_v1.018930m (l ocus AcoGoldSmith_v1.018930m.g) derived from phytozome v7. 0 (chr-ID scaffold_1; pos 4094242 to 4095056 reverse stran d)
cgaaggggcgtttttatttgcgtatgaaatcagtggggttgaaatgaacccaattttcttagtttgttaagagtgttacacgctagaaaaaaaaactttagttgcttgaatgttagtttggtatgtctaagattaaaatcagtgggattgatatgacatttatatgtaaacaacattgaagttagagatgaagatataaataaattctgttgttttctggctgcaattgtgcattgatatagctttgctcgcattaggtatggttcaagcatacgttgtttactgaagctttgtggctcaactcgttttttgttatcttttgaatatgataggtaaatgtgggagagtttttactgcttagaatttgttcaaattgactgatcatatggtaataatggaatgttagatatatacatgtttcagggaactagcacaaagttgagaattgattgagacctctcttatacaagcaataccaagggatgtgcacatttggaggcagaggtattaatttatttcgccgtacctattctagagagtataattgcaggagttcctcactaacgatctgttagtatgttctagtatcaataatgtctctactttctagatattatactctaccaaagcaaaagataatggactatgaactatgaaagtatgaagtacttactttttttttttccttcatcttaagtttcaaggataatgaatttggatattccagaggtttgtaaaagaaatttggatgttttggtagtgtgttgttaatcttttcagattcagtgccacgaacaatcgcaaaaactttacga

SEQ ID NO: 107766 - DNA, 792 bp, Aquilegia coerulea
  Intron number 3 from transcript AcoGoldSmith_v1.026368m (l ocus AcoGoldSmith_v1.026368m.g) derived from phytozome v7. 0 (chr-ID scaffold_1; pos 5187552 to 5188343)
ggatttgcttggatattctcaatttacctcctaaggtaatttggaacttgattacttcctcctttcatttgatttactaaagccctaatattttagttgaagactaaagctttaagtattgttgggagtctagtaaaggagtctgacagatagttaccagctgcaagtttgagtttgaagagttgattatgtgtttcacttgttttatcatctattctaatttgacctgtaacaatggcaaccagaacttatccatagaagcatcatataaacacatagtctgagttatccatagaagcatcatgctcctaccgcgtttgaaaattgcaattgaagcataatgtatgtggcatacactgataactgcaattgaacagattataaacacatattttgagttatccatagaagtatcatgctcctaccgcgttcgaaaactgccttatactgcaatgttatcatgtaatcttatcagaacattttggtaacaattcatgtcactatttaataaaaagacttctattggagctttaaagaggtgaccttttttaggttttgattattgtgctcatactttcattaataacgaatttcacatttaacaatctaatgacaagtttcaattatgtgatttcgctaccagcttctttaatttctacttggttgcattgtgaaaatgtagacaaaagaagtctgaatagttaaatatataaattgcttcaattatatatggactatggctgtttgtatatacaaaatggaatatgattaaagttcttctatccagggtgc

SEQ ID NO: 107767 - DNA, 731 bp, Aquilegia coerulea
  Intron number 1 from transcript AcoGoldSmith_v1.010925m (l ocus AcoGoldSmith_v1.010925m.g) derived from phytozome v7. 0 (chr-ID scaffold_6; pos 5114582 to 5115312)
ttgttgtttctgctgcctccggttcttctggcaaggttcgatccttcagtgttcttcaaccgattcatattcaattagattctgttaattcactcttattttcaaactaattgacaaagcgcaaatgttttgtttaaccaattaatatctgcttgtttgcttagttagttatagagatttacaactcccaagattttgaaaaaaaattataatatacaagcacaatgtttgaaattaattaactatatatgtataaagctcaacatttctcatggttatgccttatgctcttatctaatttaaccatttcctttaacaaataaaaaaagggaagctagctgatgtacctctctaagatgaacacattaaagcttggctctgtttataggagggactccaagtttccctgccttagctcattgtcaacattgttaatttgagtcaatcaataggatatgatatgtatacttttctctggatataatgcttattaagattatgtagtgatatttctactttctttaaaaggacatgcatgtttgctattttgatttagtaatcttatggtgatcaagaaattttgcttgctctctctctctctctctctctctctctgtgtttgtattttgctaactgttaaaaatttctattcttcattttcatgttattgataatttttttctttttttcttgcagttttttgttggaggtaactggaagtgtgtaagtat

SEQ ID NO: 107768 - DNA, 700 bp, Aquilegia coerulea
  Intron number 2 from transcript AcoGoldSmith_v1.004634m (l ocus AcoGoldSmith_v1.004634m.g) derived from phytozome v7. 0 (chr-ID scaffold_12; pos 5356735 to 5357434 reverse stra nd)
agtcaactgtcgtgaaagctatctcgggtgtccaggtaattagagctaagttttttctgttttaggggttttgggggaagacgatcttccattttatgagattgtacgaccctttgtgaatatgaatgaaaaaagtgttgatactgttaatactattaatatagtattactgtgatacatgaacaaaattaatgccaaattcaatatgattggatgagaggtgcattagtggcttaatcggggacaagttccttgggttgtaggtatgcattggacaattaatatgcatatgctatagttaagagttaagacttggaagatttatttgaagctcaaaatctagatactcagttttctttcgtgtgtcctgcatttatcatttgtatgatacattaaaatggacagaaaaataaataggccttgattttgtatctaataattccatttactttagctgttgttaagtctggaactttacattgcccccaatataagtgcctttctagttcatatacagttaaaagcttgctaccagttactaattacaagtcaagaagctattaacatgaccattttgtttgtttctggaacatattatgaccaacttcgctagttttttacttatttctcttgatgtttgtacaaagtttaatatttatattatctttgattgtatttacatagactgtgagattcaaga

SEQ ID NO: 107769 - DNA, 376 bp, Aquilegia coerulea
  Intron number 1 from transcript AcoGoldSmith_v1.022400m (l ocus AcoGoldSmith_v1.022400m.g) derived from phytozome v7. 0 (chr-ID scaffold_75; pos 363838 to 364213)
tggttcagagatccaaagaacaaatccaattggtaatttctcaaaattcctctataccccttcactgttaattcttctgtttattactctatatttatgaattatgacaggtgtttctgattaattacaagtgtatgtgttactctaaatttgatgattatgaagtaaactattaaattgatcaatcaattggcaaaactgtggatttttgtcaaccctaaccctagaaatgtgttcttattcacattttgtttttattagaatcattttggtttgaaatcagatctttcgcttatagaaatttatagagtaactgagtgaaaaagtcgcatttttacaattttggtttttgcataggaagagaccgtggaggaat

SEQ ID NO: 107770 - DNA, 587 bp, Aquilegia coerulea
  Intron number 2 from transcript AcoGoldSmith_v1.019797m (l ocus AcoGoldSmith_v1.019797m.g) derived from phytozome v7. 0 (chr-ID scaffold_1; pos 6654889 to 6655475)
ggtatgtatttcttcttcttgatatgtgtaatgtagcagtatatttgaatagttcaaggacattgttataaaaataaattaaaaatccattacaaattcaaagaggagggggtgggggtggggggtgatatctcaactctcaaggacattgttataatataggcacatagatcaataagattgttttctagtttgttggtctgaaaacctctagtccttgaacaaattaaaaattttgtgcacaactagactcacaagtcttttgagcacttgtgtgttatagaatacttgatcatctacttgattggtgtgctggtgtataaggaaaggggagatctaacatatcttacagttgacttctagagttcaagtataagaacatagctagatctctcaaggagtgaagcaagcctaggttaaggtcttttgcttagataatcgaaagcataactaatgtgaagattatctatatgtatagaataatgattggagctaaatgtgtaatggagttaaccctctttttctttcttttttttctaatctttttcacaggagtaacctcctttaaagtagacttggaaaacaag

SEQ ID NO: 107771 - DNA, 746 bp, Aquilegia coerulea
  Intron number 1 from transcript AcoGoldSmith_v1.013674m (l ocus AcoGoldSmith_v1.013674m.g) derived from phytozome v7. 0 (chr-ID scaffold_12; pos 5898126 to 5898871 reverse stra nd)
gccaagtcaaacaaacataaacttagtgttttgggcttagcttgtcctaggtggcacatctaattttgtgtttgcattggagatgctcttatgtaataagaagttaaaaagaatagaaaacaatagaaatatagatagagagagcaagctaagaactttggggggggggggggaagggtttaatatgcaaggtagagagattaagatctagagagagaaaatggaggtttgagagcaatcttgtaaccactattcttttgattgtaaatttttttttggagcacccgtggagtagacatagtcaaaccatgtatattttggtgttattgtgtttttttttcttctttcactattgtttattgtttgataatttttgaattcattgacaacggatctaatattacaaaaaaaatattttttacaggttgttatagacaaacgacaaagtctttatagggttaacaaatatatttatccaagtcgtacccattgcaagttgcaagcaaagtaatattttatgtgctcattaccaccaaattcttgagtgttgtgttgtgcacttttctcacaacaaagacatctgagcaacttcttaggaaaaaaatgtgttaataaattacaatgcacatcacatcaactcaagtattttctttcttcttcatttagaaaagccaatacttttagtagcaaagaaagaattgaaatggatagagagcaggaagagcttaagttgattgggttctggg

SEQ ID NO: 107772 - DNA, 946 bp, Aquilegia coerulea
  Intron number 1 from transcript AcoGoldSmith_v1.002155m (l ocus AcoGoldSmith_v1.002155m.g) derived from phytozome v7. 0 (chr-ID scaffold_9; pos 3577608 to 3578553)
aaagaagagagttctagggtttcttcgttctctctgtaagtttttctctcttttacattttcttctacatatatctctttgattcaatgtttgctttctcaagcttgtgtttgatccagcttttctctgtaatttctcttctgttaaatctctatctgcttttttttaagctaaataacttgaagtttgcattattaagcttcaaatatctgttaatcgttaagttttcatgtggttttcatcacttcaatgtgatgatgaatgtgattgtttttcgttgagcttagttcttcttcttcttcttcttttactcgttgtttttctgcttcttgtgatctaaatctgttgatgatttgttttctggttatttagattgatagatttgtttatgtatagagtttgattcttctaggtagccttttaggttcgtaaatggttttttacttcttctgatcttaatatctgcaatgtgaagttttaaaatctgtgaatccatgagttttctggtgattcagctttgacaagatgaaagttcttttttcttttgtgtgtattgtagttcttttcgtgagttttcttacgtctgccattttatgtcctgatatggaagtgtgcttctctcattaagcttttcggtcaatcaactagttttttttttttttttttgtgtgtgtggttttagatgtaattatatgtatgtgcttttgctttgtcttgagtttagttatttcaataaggtttttagaacttccagagcctgattgatgtttggttagagacaggttgatagaagacagagtgattgtttagaacttttagtacaatattatgtgatctcaaactaatcatcttcgtcattttgttttcatgtatttaagttactaagtttcatataatctctgtgatttcaggtctagtgatcttctttcaacatctgaattgggtt

SEQ ID NO: 107773 - DNA, 620 bp, Aquilegia coerulea
  Intron number 1 from transcript AcoGoldSmith_v1.018875m (l ocus AcoGoldSmith_v1.018875m.g) derived from phytozome v7. 0 (chr-ID scaffold_43; pos 205352 to 205971 reverse strand )
aaaacctactgtgcccggtccattgccgatttcgggtaagtgggtttaaagttaaaacttttttttttttttttcttacaagatagtgtatacaagtgattaaatgaaaaacaatggcttgaatcctagtattaagattttacgaaaaaatgcggacgctaggtttgataaatatatgaaatgacagttccaatggaattatatgaaatgccgcattagttttttatattgtccatttgtatatttctgtgtaaaacaatttagctgcattagtatgtatatatcaataccaggtagaacatagactatgttatatgtcaggcgattaaagtgtttgattagttagttcctcatctctgtacttgaagattagtcagttacattgtgtgcatattgttgtgtttttggaatcacttgatggcttttggtttcatgattttcttggagttgttttaccctaagaatcatatggataaggcaattataggtttatcagatgcttgcttgtttatatataactttccttgagatgcttgcttgtttatatataactttcctgaattcttgtgttccttttaaatgcagagaagctgtaccaaccaagctgtcaagggtaccca

SEQ ID NO: 107774 - DNA, 288 bp, Aquilegia coerulea
  Intron number 1 from transcript AcoGoldSmith_v1.010420m (l ocus AcoGoldSmith_v1.010420m.g) derived from phytozome v7. 0 (chr-ID scaffold_9; pos 2177259 to 2177546 reverse stran d)
atccctgccgataccagtacaaggtaattcttctcttcaaataaattaggtttattggtttccaaatatattttggtaagcgatagggttctctgattttatatcaagttgtttgatttaactcgtattcagtaagaaaaatatcattttcttctttttctggattgtaatttgattatttatgcagaataagtaagcttcaaagacaaaattttagggtgtaatcatatttttaggtatttgaggttattgatcttatgttgaatttgtaggacattgtgtgattcg

SEQ ID NO: 107775 - DNA, 604 bp, Aquilegia coerulea
  Intron number 1 from transcript AcoGoldSmith_v1.001362m (l ocus AcoGoldSmith_v1.001362m.g) derived from phytozome v7. 0 (chr-ID scaffold_59; pos 1318895 to 1319498)
ctcctttcttttgaagaagaagaagaagatttcaggtctgggtttttcttttaaaaaaaaattattctctcattatcttctttactttgaagtaattcaattatccaaaattttcatttatatgttttttttttttagatttttggaatttaaaaggtgaagagagatctcgtgttaaagcttttttaatggtgtaatgggattgtttagttcaaaattttgtttgaattattggattttttttttttttttttttttttttgaataattatgtattagttcttttttaaatatgttttgagatttagtttaattaatatatagtgtttcttatcttttgttaatttatcaaaagctagtttcaatggggttgtttaaattgatagtattgtttgaagcattggagtttaatggagcctatattctgtctttgttaaatcatttctttgtttgaaccttttcgtttctcgcagttgatttagaactggattgattttttttggtaaatttagacctgaattgttgtggggtgattgagttctctaatgggtttcttttgtttttttcagatttccgaagattctaccaattgtgttcataattc

SEQ ID NO: 107776 - DNA, 733 bp, Aquilegia coerulea
  Intron number 2 from transcript AcoGoldSmith_v1.005113m (l ocus AcoGoldSmith_v1.005113m.g) derived from phytozome v7. 0 (chr-ID scaffold_108; pos 373585 to 374317)
tcctcagcggtcttctctctgtcgacggactcaaggtatatacaaatctttttttccttttctgctgcaattccattctatttcatccataatcacgatcattaacggggctgcgcagcccgatctaatcgaagaatagaatagaatagaatagacaagtttgccttgcttgcttcttctttcttaacttaactttagggccattcattagattagattagattattgctgctgttactcgtcttttctcccaccgatccgatccgatccgatctgatcttctgataggattttaattactcctcaatcctcatactcatgtgatttgcaggtattattagctatcagttgtcatttgacctcttttttttttttttttttttatccatgtaactaaccactctagttcagtagtactaatatatatgacttttgacttttgaaaaaccagacctacctaatccatttgttttccctttagatagatagatttaatacaaacacccatcccatcccccgtcctaccatgaaaaacaacatcacctgtgactgaaactactttttgttgcaactctaattagtttttttttctttcacctccattttcatacccatcaatcaatcaatcatgtatctgcagtgtacgtcatagtaatggatataacatatggagtttactctcatcaaatctttttatccttttttatttttttctaccaatcaggttctgcac

SEQ ID NO: 107777 - DNA, 460 bp, Aquilegia coerulea
  Intron number 1 from transcript AcoGoldSmith_v1.002340m (l ocus AcoGoldSmith_v1.002340m.g) derived from phytozome v7. 0 (chr-ID scaffold_21; pos 2946558 to 2947017 reverse stra nd)
aacttgcctaaaagacctgttacggtttgttttctttctttgttttttacttaaaaatgtctatttaaaagttgagattttcttatatgttagtagagtttagattcaaaaattgaagatagattttataagcattgttttaaaatttatgttgtgatagtgtttgaacatggtttaacatttaaatgggttgtttaagtttttaaggtgtgtggcttagagagatttctctatgttaggtacctttgaaaacctttgtgaactcaatcaaatatgaaagaaagagaggatcttttattttatcatacattttacagatttaattgaaatttctaggttattccttttaatattaatctatgtttcaatattaatgtttaaatagtcatatagctgtagttttttccctttgatttcagactccatgtgggcacaatttctgtctcaaatgcttccagaa

SEQ ID NO: 107778 - DNA, 903 bp, Aquilegia coerulea
  Intron number 1 from transcript AcoGoldSmith_v1.025124m (l ocus AcoGoldSmith_v1.025124m.g) derived from phytozome v7. 0 (chr-ID scaffold_71; pos 1035401 to 1036303 reverse stra nd)
ggacgtttgcgggaatcattagttggtttggacaagtttgaagaacacagatagtgctaatctcacagtttaatattcaaacaaatcaaacgataagcagaaaataaataacacgcaggaatttttttaacgtggtaaaacccaatttgggaaacgtccacggttgccttgatgacaacaaataatccactagacgaaagagatttacaaacctatcaactacctgcaatcactgcgagctgatacttcaggttatctctaacaccttgacttcaccggagtaccttgatgtatgcacaagacactcgactctttgatgaacacacaagaagactcgaagccgaattcacaactgtatgaggaagatgggaaacaatgaattgagaagaagggaggttgagtccaatcaccaatcaaacacacaaactctcaagagcaccttacttgtgcggccaaaaaaactgactagttcattggagaagaaaaactatttatacgtagggttggaatacactgaaaatgggccggaattgctgaaatccacattggacgtacgtacgtcgaaacaacgttcgtacgtccccacacggtaaaagttcgttgcctgcttggacgtacgaacgtcgtaactgcgtacgtacgtcctgaccaaaagaagtttgctgcctcaatggacgtacgtacgtcctaactaggtacgtacgtccagtacccaaaactgactttgacaaaagacataaggacacggacacgagacgaacgtgcgtacatcttggctttcctaacaatgatttcaaggcgagataaccgagactcctcatgtcacaaaattaatgttaaataaccgagtgccagtttcaaagttaaggtcccttaatatatctcacaatatcttaagtggat

SEQ ID NO: 107779 - DNA, 743 bp, Aquilegia coerulea
  Intron number 1 from transcript AcoGoldSmith_v1.022902m (l ocus AcoGoldSmith_v1.022902m.g) derived from phytozome v7. 0 (chr-ID scaffold_72; pos 531866 to 532608 reverse strand )
atctatctggttcgagctgaaactctagcttacattttattaatttgctaagttatgattttttaacttgtgtaactatactacttagatatattttccctcttgttcttgttttcttgtattcccttgctcctttctattttctagagtgcatgacacatttactacacatttcgtgcaatagttattgtttttaggactataacttcctcttggaaaatataggacactcactagtaaataatgacatgaaaagcaaaccttctaaactttgcagctattgagttgctgcagagctttttcaatagtctccttagagacatcattacaattaagcgtgtcgcgtagttaactattttgtcagtggtgaaaataacaatctacaagataacaagaagaaatgttcttgttattctatcatggaagctaagttgtatcattttctcataataaaagtatgatccacacagaaaaattaaattgggtttttaagtatagagtaaactgtcttttatatgctgatttgcttagatttatgagaaaagctagcatcactgttctagatctatctgtttttgagcaaaaactatcatatatcttcatataataagtctggaggcatgtaaattttcattttcaagatatattttgtagaatgtacactatggaatatgccttgaataagaaaaagtagcttaaaaaacaccagatactgatttgcctcttttgtttttttcttccag

SEQ ID NO: 107780 - DNA, 553 bp, Aquilegia coerulea
  Intron number 6 from transcript AcoGoldSmith_v1.011594m (l ocus AcoGoldSmith_v1.011594m.g) derived from phytozome v7. 0 (chr-ID scaffold_27; pos 2554918 to 2555470 reverse stra nd)
cagcctggcaagcattagatttgctttttcctgtaagtgtctagttgcttaattattgtgtcagtcaaagttttagcacaagtaagaatatgagattggtttaggttttggaacaactacatattccttgattataacagatacctttacatagcatccattgaatattaacagaacctgtggacgaaataaaataaataaataaataaatagaaaaaaattaaataaacttagtggggatgtaagctgggagaaaaatgaagttcttcaaatttaataggtatagcttgctttgaacagaatcattgaaagcgatcaaatgtgaattattatattttgaaaattttgaaatgcttacatagtatagtagttaagctttttgtattgaacactagttgtgttatctgctttctttttgttaaaagaatggttacatgtcagcaaaaaaaaaaaaaatgatcacatgttactccatacagcacccttgattttgattatgatcctttctatttgtgcaggttggaagatatccacgccatctcataagtctttt

SEQ ID NO: 107781 - DNA, 713 bp, Aquilegia coerulea
  Intron number 1 from transcript AcoGoldSmith_v1.000514m (l ocus AcoGoldSmith_v1.000514m.g) derived from phytozome v7. 0 (chr-ID scaffold_1; pos 1362930 to 1363642)
cgtgctgctcttgctcttgctgttaaagttgggtatgtaattcttcttcacaactattaactcttttttattacaaataggttttgaatttggttgtttagtaaactaattaattaatgcatttttatcaatttcttgttgttgaagaagattgtaaagaaatctgaaatttatagtaagaacaagagcatttcaattttgccttttcaacccaagaaaattctgtataatggtttactttattaaggtgaagatatgacaagttcactaataaagtaaaaaaataaacaaggaaaagaagcatcttaaggcatgttgatgtaggcaaacacaaaagcttaaattgtaaagcattaaaaatataagtagttgaccccctttttgttagatactaattttgaagcacaaatcagttgattagttatctgtaaaatttgcattagagacgcaatgtcttaaaacaaaactagctgaagaacggaagtgcagtcatccttcgtatatcattttgtagtattgtacctggttttgtacattgcaaagtattttgtgttgttaaacgaatcggaattcccgagtaatgtaattgatgcaaagatgaagtatttaatctttctcatgcatatctgccttcattaagatacttttttttttatttgtctgttacttgatttattagtgaatctgttcatatggtttatgacagttcagtt

SEQ ID NO: 107782 - DNA, 709 bp, Aquilegia coerulea
  Intron number 1 from transcript AcoGoldSmith_v1.010531m (l ocus AcoGoldSmith_v1.010094m.g) derived from phytozome v7. 0 (chr-ID scaffold_9; pos 5638350 to 5639058)
aatttaacaggtttgttttctaataagttttcatgatttttatttactcatatccttagaattgatcatggggaggttagggtttggtaattagtgatctctatctttatatattttcttgatttgtaagttgtataggtttctagaagattgatgatttaatcaattgtagagctgttctgtcttaataataagatctgtaatattactaccaagtttaaatagattttacttagattgatgtaaaacccaagttgaggtttcaatttaaaaaaaagaaaccttcattttagcaatcagattgtttaatattgtgatttaaatgaagataatgttcaatgcaccaatataattataaagcaagtgtagtcttagatgaatggttgacataaatgatggtcgattgaagagtgttcaattagtcttcgacattttgcactagtgcgctactttcaaattttggaatggcagcaaaacctcaattaacatcacaccatgtctagtaaaacattttccagttttcaatgttttatgaggcaaggctattttttacatatgctcatggtgattcatggaactagggaggttgtaggcttgtagcacaggtgttcttcaaattttgacattgtgtttagatgctttcttcatctcatttataacctgtcaattgtcaacctttctttcagcttccttgtcagcaaaattcttc

SEQ ID NO: 107783 - DNA, 396 bp, Aquilegia coerulea
  Intron number 1 from transcript AcoGoldSmith_v1.026728m (l ocus AcoGoldSmith_v1.026728m.g) derived from phytozome v7. 0 (chr-ID scaffold_37; pos 2067208 to 2067603)
aaggtatgtttttttctttttttttttggcttgaaatttgcttctttgggtgtttgtggttttggattttgattttggaatttttttagattgtcaattgttgttttgaagcatatatttctaagttttgattagattctttattgcgtgcaattagtctagttgtttaaaaatgaatcagatttagttgtttcgtcgtatttaaccaatggcctaattattttcattggattttccattttttgttgcaatatgtaaatctgaaatcaaactgaggtagctaatttagacgaagagcacgtgtgattaaaactgctcgtgtcagtatgacttgttagctaatttagacttcaatctgcagcttattgagagagcacttgaagaatctggtgatct

SEQ ID NO: 107784 - DNA, 955 bp, Aquilegia coerulea
  Intron number 1 from transcript AcoGoldSmith_v1.026865m (l ocus AcoGoldSmith_v1.026865m.g) derived from phytozome v7. 0 (chr-ID scaffold_27; pos 2926621 to 2927575)
aaagacaggttcgtatatctctaaatgttcttgtttaattgaagtttttttgcttgaatttgttgttttcaagatgaaatcgataatgggtatgtgttaatttaattggatttttgtttttgggattatatatgacctaatttgtagattttggtaaaaaaaaaaacaaaaacaaatctattagattttgttatttgaatacaaagctagtgaagttctctttaagaagaagatgtttcagtcctcccctttaccaaatcaatcatagtgattgggaagggttttcacatctttgaataattcgcttaagcttaggattaatttaacctcagaattgtgggcattgcaacctactatccttatcgagcaattttcatgggttgggaagtatgttaccttgatttacagttcacaatgtatacatgagcagtgtgtaaaagaccttgaattagctggcacctgaggtttatatgcatcattcattcctacttacaagttacaaccacgttctcgctttcaagactgctaattgccattagttgtatttgtgatgcttaagttgtagattgtataagcctttacatctgcagttctttgttggcatcccttcttatgagttattttgttaaaattatgtttcctagcctttgtcactcgtaatgatgttattaaacctgagaaggaatgcaccttctgttggaatgccacactaaattttccttattgaatcttaggactgaaatgactttcatatttactaagttactgtctaccttcatgaattgtagtgatatctatgtatatgacatcgtctattgactgctgaaattctgtagttaacatggttttaaatttttggacgtactatttgttttagtcgagaccttggaaagtggtaaatattttgacttttggtatttgttctttctgctgaaaatgaaactgcagtttgcga

SEQ ID NO: 107785 - DNA, 950 bp, Aquilegia coerulea
  Intron number 2 from transcript AcoGoldSmith_v1.007034m (l ocus AcoGoldSmith_v1.007034m.g) derived from phytozome v7. 0 (chr-ID scaffold_11; pos 4204990 to 4205939)
tgcttgattctaatccaagactcacaaaggtacgcaagaatattattaaagtctgaatatatttacttatagatgcggtttaaatatatttaattatagaagtggtttgaagctccttggtttgatgtttgagtctgcagccttttctggaatttaactggctatctttataaaccttgatcttgattcctgggaacctggaaagaaaaattaacttgatattattatttagttagattattctcaataacttgtttccaaacctacacccaaacacttactacaaatgaacaacttcaacaagaacaaaatgtttaaccaattcctgaaagtgggaaaaggggttgaattagtcggaaggcatttgaatgggacaacttaaaagattagtgaacgaatgaatgattgtgatgctttttaactattttttttctgaattttggccattactttattcgctttttttcatgtttatgttgtgggagtgggagatgaagagtatatatgcctggacaatgcataatggtggggatatggtgtcaccttttaaatccagctttatgataaaagattgtgatggtagtggtattgttatttctatttatgaatattattcaggctacttagtacttggttgtacttttgaagtcttgataattgatggtagcacaaaacagatatgggtttgtttattgatgaatacctacattttaatttgatgctataatcattactgtatgagattcaagttatcaacatatttttgtctggtttctggattgagctggcaaattgcccatatgcacttttgaacctttggaaattttttgagttttaatgattgattattgtttgcttatttgtttattattgtatattaacatacatttctgtactttcaacatggtagcctaacaactatatctctctccctctctctatgcagctga

SEQ ID NO: 107786 - DNA, 308 bp, Aquilegia coerulea
  Intron number 1 from transcript AcoGoldSmith_v1.007097m (l ocus AcoGoldSmith_v1.007097m.g) derived from phytozome v7. 0 (chr-ID scaffold_9; pos 4276583 to 4276890)
tgtcgtcgtcgaaaaccaaacacagatctttccaggtaataatcttgatttcgaactttttcttacttatttcttgaattttagatttggggttttctttttccattcaattatttgcatttgaagaatcacaaatttggccgagaaacccaattgggattttttttttttttaatatatataataattattttcactaaaattgaaaattggaatttggggttttgagatttaagggtgttcattgatgtactttattaaagaagggaattttgattttccaatgctgtttgttgtgcgcagaagcg

SEQ ID NO: 107787 - DNA, 1017 bp, Aquilegia coerulea
  Intron number 2 from transcript AcoGoldSmith_v1.009545m (l ocus AcoGoldSmith_v1.008730m.g) derived from phytozome v7. 0 (chr-ID scaffold_7; pos 2185540 to 2186556)
ttacctaaggttgtgttgaaatctgctgagggaaggtaacattattaatttattatctctctctctctttctgttctgttccgtgttttttcgagtttggattacattcatatattattttcaatgtaccttactaaaagtcagcagttacgtaccattttagatgcttttcgattttcattgaatctgctacaaacaagaaattgaaaagagataatatcaattagacgttgcaaggcaaatatgccgcttaaatgtaaaaatatggcatagacaactgtagaaagaaaagtgttgcatgggatttttacctcttaaatttgaggctgcccatatgcgcagattttgatttttgcatggttgtcttggagagtgagttttgaacattaggtgggcagcaaacaattaacaatgtgactgctaaattgcattcttcaactgagaaaatctacaatgcaagtatgctcttggaattggctttcatgaccatagtctgtcttctggtatcttaaaagacaaagaaataccttccactcctatggaattatttggtggacgagcgccctgattacatataacttatatgctaggaagctactcaaaccctatatatggattacattattcactcccttaaaagagatttgcaaaggatactactatctgtagtgctagttgttttatgaacagtacccatataatagttgttattattattattgtgattatcatttttgtctgtatttctgttccatggaaatttggttacctttttaaagcctccgcttccctgatagctgttgtatggagaatatattgcaatacaatacttgttaaatatttggaaaaaatggtgaatagtgacataaacttcagactaaatctttcttccagttgattttataaaaatgggattggacccaaataaaacctattctgcaaacataaaagtaaaacgtcaatgatagaattcttccatctggatttcagtgaagtagagatctacttatttggagg

SEQ ID NO: 107788 - DNA, 770 bp, Aquilegia coerulea
  Intron number 1 from transcript AcoGoldSmith_v1.004755m (l ocus AcoGoldSmith_v1.004755m.g) derived from phytozome v7. 0 (chr-ID scaffold_6; pos 8554898 to 8555667)
aagaatcaaagagcaaggtgagttgttttgtggatttttgattttttttttgaaattttgtttggtgggttttttatgttatttttcttgtttaataatttgattaactaccatgatctttgttattaatgctaattttgtgttaaatagttactatgatttatgtgtttggtttttggttatgggtctttttttgtcttgtttagtatgttaagaagctctaagttccaagttgatttttctacaaaaggtgtttctttcaactgtttcatgtgtattcttgtttcttagtgcttttgaagcagagtactctctatgttcaaagtgtttctatgaaaataaattacttctctctctctctctcttttacatttccaagatatttgataatttttgcatgaaatctttcttttaattttcttgattattcatagatttcatcttcatagtttaatacaaatatatccatcccccctcctcccctgattcaaaatatatttcaaaatatttccatgaaatcttttttggttttgaatcaggggatggaatctttgtttgatagttttgcatgaaatctttgttgattccatagataatatctttagtgggaataatgttttctatatagcttttgatcaaagaacaaacttgttggttcatgtacactatattgtttgaagttaatttctttttcgacaagattgttttcactaatttcctcttccctcattacaggtttggaaattttttcaaatcccacttattgggat

SEQ ID NO: 107789 - DNA, 388 bp, Aquilegia coerulea
  Intron number 1 from transcript AcoGoldSmith_v1.008374m (l ocus AcoGoldSmith_v1.008374m.g) derived from phytozome v7. 0 (chr-ID scaffold_15; pos 51048 to 51435 reverse strand)
actgctttgtgagggttagtatttccttggcttctgtattacactgctgctatctatatatttgtgagggaatgaaaatttaatcttttcatattttataaactatttagctatataatttcttttatttgtttaaaagaagaaagttatatcaaaaattataattgcagcactgtcatgtagcatatagtagcatatataattatatattacttagctcgatatcattcttacagaaactaaagcatcccttgggttgaatggggttgtaatggatcatagttatttgtgtaatttgtccttcatttatgctttgtattttatcaaactataaatgtatgacattttgtaaatataacaaaatattcttgttaattttagggttgtg

SEQ ID NO: 107790 - DNA, 629 bp, Aquilegia coerulea
  Intron number 1 from transcript AcoGoldSmith_v1.002783m (l ocus AcoGoldSmith_v1.002783m.g) derived from phytozome v7. 0 (chr-ID scaffold_9; pos 2520395 to 2521023)
gccattgtcggggagatacgattttgggtctcaaggtttgaactttctctttctctttctctttcattgctgatttttattacccattgtagtcttttgatgaattaccatgcttttgatctttaatttgcaagagattggtcattcaatgtaaaaaatttgtaattttggttggatgttgttttgtttgtaaatctcaatttaggattttggccattcttcaatttaaactcaataattcccattttgactatttcaatttttgaatcttggttgctatatatgaataaaaatgacaacttttgcattcttaatggttttcgcaataatgtttacttcctctacatctacaccttgtttgtttttgacttttgagggataacttgtttaaagtgtgtaacaatttatgttaatttactagtgaattcttcattttggtataagttgggttttaatgagttttttgtctcataagatatgaagatagaattatctacaagataattttggttttgcttcaatttgtcaattgtagttgtatactgcgagtcaagattagagatacttatgttttcttaatgtactgtgttgcaggttctggaattaaccttagtcctcaccgtgttgcg

SEQ ID NO: 107791 - DNA, 549 bp, Aquilegia coerulea
  Intron number 1 from transcript AcoGoldSmith_v1.004637m (l ocus AcoGoldSmith_v1.004637m.g) derived from phytozome v7. 0 (chr-ID scaffold_10; pos 3034354 to 3034902 reverse stra nd)
tttcatcatattcaacactcttcaccacactgcaagtaagaactttgaacttctcatgctaactctcatttctctgtttcttcattcttcttctttttgttaatcttcataagctctgtttaaatctcaatctaattctaattttcaaacatcatacttcatacatattcttttcacttgaatgaagaattttgttttgtttaattcaaattgtaattcttgatttcaaattctttgataatagtaattagcactgaattcattgcatgcagcttaattgtcaggaaatttaataatatattggttcttcagtttgaaaaaacggatctattgtgtcaattctttattattttctcagtttaatttaaaattaagtgttctttcattacttaatttatcattttcagctcaaaattttctaattcaaccaataaattacataagtttgaataaaaaacagagtaatactgataaattgagtcaactgaactagttttttaactgaattttacagactcgcaatcatttattggcataaattacggccaa

SEQ ID NO: 107792 - DNA, 425 bp, Aquilegia coerulea
  Intron number 4 from transcript AcoGoldSmith_v1.005522m (l ocus AcoGoldSmith_v1.005522m.g) derived from phytozome v7. 0 (chr-ID scaffold_54; pos 369924 to 370348)
atattgggaacaccacaatcccttcgtcctacactgtaagttttatttttgtaataatagacagtcttcaatgatcccatttttttatttattttagattgatatatgccagattgatagatgatgtgcgatttatggtagaataagttctatttatactagtgcttatgataaatgtgatacatatgaaggaggtgaggaacttttctgtattctttaaattttttacagaagttatgacttgtgatgcctttcacatttttgaattctatttgtttcttcatttgccaatgtactgaacttttttttttttttttttgccaagtcctccaaagtatatgaaccatgcttattattgaatataaatggctgaagttgatgtatagtattgggttaaaactgtgcagggccctgtggtgagggat

SEQ ID NO: 107793 - DNA, 687 bp, Aquilegia coerulea
  Intron number 1 from transcript AcoGoldSmith_v1.024443m (l ocus AcoGoldSmith_v1.024443m.g) derived from phytozome v7. 0 (chr-ID scaffold_1; pos 7485286 to 7485972 reverse stran d)
caagaaggtaagaagatagacgacaaggataaactatttatttaaccattttaaagtattcgcgcgcattttattactttcgtcgtcgcagatagataccgtacaccatttgaactttgaagaatcgacaggaaaagaagaatttcgtaacacccccttcctaatgatatatttacaattttaccattacataccaagttaccaaactgaagttaacccatcagagtcggaccaaccacaaaagaactttttaagtccactactccactttgtgtggagcatattttattttattttattttttttcaggaaaagtttcaagtttcaaataatagttgttgcaatttgctactagtttttactcaaaaaattcagcttcaattccctggtggtcagatcagtagtcaagtacagagtagtagagtgtactagagtggtgtaaggaaagcagaagcaagagcagagaattgcaaaatggcttgcaagttccaacttgtttctctttcccatggaaatggaatgcaaagtttatcatccagaaatgaaaagagcaataattctctttacagttacactacaagaccacccaaatactactccattttatctactactactactaaaaacaaaccaataatatacaacaacataggagcaggaggaggaggaggaggaggaggaggagga

SEQ ID NO: 107794 - DNA, 999 bp, Aquilegia coerulea
  Intron number 1 from transcript AcoGoldSmith_v1.009275m (l ocus AcoGoldSmith_v1.009275m.g) derived from phytozome v7. 0 (chr-ID scaffold_1; pos 11859100 to 11860098 reverse str and)
ttgataaagaagaaagatatattatcaaattgaaggtaaaaaaatctaaatcatcatcatcttctctttttgtttaatttttttttgaaattgattgttttgaatcgattcaatgaaagaagaagataattgtacaattttcgatcatatccatatctattttggtgatgtttctagggttttttttttacaattcgatcatatccatatctatgttggtgatgttaggggaggttgcagctgaatataatcaccacaacaaagaaaaactaactaacttattgtgaatctcgaggaagaggaatattctgtggttggtttgtaaggaaagagtacttactccttaaattataaacacaccgactaaatggaccacacagacagtgctggcgagagaatctttgccaaaatgaccaaaaaccatgtaatccaaaatggttgactgacatatcatacacatcatagaccttgtagatagctgtaagtgtggacgtgtggtcttctttaaagcctgttgcacgtatttggcggcattttgtactttatatgtagtagaatcttcattgtggatttaagatgtaatagaaattacgatccgaatattgatgatgatgttaaatcaactcattttgtagtttacttacttccctaggtttgcaagttatatgctatagctattgaatgccacacacctattggcaaaacatatggcatacctagaagcgttgagatcttctttcatataagctaagatataaatcactattttagtttggattttgtgaatcagtcgtagaaagcaaattttgaaaccatcaaaaaaacaatttctattagtaatttataatgatggttaagtttcacttccataacaaggaaaagtaatcaatgccaaatgtagcgttctaattttctcttattgtaatctaataagaatatccaacatgtctttcttaatgagcaggacttgcaagacaggttggccaacacaaagaagcc

SEQ ID NO: 107795 - DNA, 894 bp, Aquilegia coerulea
  Intron number 1 from transcript AcoGoldSmith_v1.005226m (l ocus AcoGoldSmith_v1.005226m.g) derived from phytozome v7. 0 (chr-ID scaffold_18; pos 381034 to 381927 reverse strand )
aggtattgatgagattgcccatgttttagttttacttcaattctttctttttctctttcttcatgtatgtgatatgttgtttgattagtgatacttatcggagacattgagttcctcgctagaaagtattgtatattgctttttgtagtctgttatgcttcagttgatatttcaactcagtttaggagattgcagtgatactgttagctgattaatcagtccatttatacttaaaaaattaaaaaatttgccagtatcaatatgtataggggaagtgatggtctagattgggagtgctatatgacactagactttagtgcacattccattcaaatggaagttaagtttggcgaaacaatgccaatggttgttacgatttgtaagtttattaaaatcagaatgaattaatccattaagttgttgtaattacagatgaagctaccatgatgggctgttagttgatattaaaataataagtttacaatggcgacatttgagattttatgatagtgtgatagtaatttcaataggtagaaactaagcaaagttcattgagatgctttgtccatgtggaaagtcaactggtaactgccctgatcaaagggccaatacgtgagggtggagacaggccaaagagaatattgctccttgtgaaactagcttgatgatttatacatcaaatgagtatgaatgttccagaaattagccacttggcaaatcttatgcttgctctttgtgaaactatcttagaataaaaaatggttgttacgtgggcttcatatatgtcaatgtactttctttatgctattgaacttcagatttcgatgttcatctaataagtactaataataaacttttgctatatatggatgcagcttgattattcagaggtac

SEQ ID NO: 107796 - DNA, 788 bp, Aquilegia coerulea
  Intron number 1 from transcript AcoGoldSmith_v1.027103m (l ocus AcoGoldSmith_v1.027103m.g) derived from phytozome v7. 0 (chr-ID scaffold_133; pos 22889 to 23676)
aggtttgtgagattatgaaatactgtttatttgtatctctttgttcttataattaagactggtaatttgattttatgaattaaaaacatgctcgtttttattcttcgctatcctacattaattatacattgttctcaaaggtttttgttttatctgcttgtttattaaagaacattcttgtttaaagtcattctgtgatgttattgtttttcggatggtacaattctcatatagctaggtcccaatcaagattgttttaaagcctttgaaatgtgtatttaaggtccacgaggttataattatattttaaatggtattcaatttcgatggtagtttcaaaatatttgttctatttgattgcaaaatgtttgaagtttctttaatattgtgaatagtcagtactgtgttagtaaagacctcaaaatttaaaacagcagtatgtttgaatccaacttccaatttctggactggtcccgattttggacgacggacaacggccaacttgattttctttttaaatttcaacattatacacttggctgttttatctttttaccaatagaagactaattatattatccaaatgtcttgcttaatcatttgtttattccaataaaatacttcgatcaaatgaccggtgttgcttggtatatcaactgtgagttgcgtgcattatgatattcacggcttttaatagaagcatttttatgcctacttttactggttctgaacccttgtgtatatctcatgcaggggcgatttgagatcctgtcgctttctggttcatt

SEQ ID NO: 107797 - DNA, 980 bp, Aquilegia coerulea
  Intron number 3 from transcript AcoGoldSmith_v1.008675m (l ocus AcoGoldSmith_v1.008675m.g) derived from phytozome v7. 0 (chr-ID scaffold_7; pos 2697886 to 2698865 reverse stran d)
ggatcaactgtttcctggagtctctatttcttcttgtaagtttccttccactgaatatttttctagaaaatgtgtacaaaaatgctacaaagtgaagtaatttgatatgatttgactgtcgtttaatttattaatctgtaattcataacaagcgaaataagaaacttggtatagatagccatctagttgattgctcactttacgtatatacacaattaactttataaaattaaatctggattgtcacattgctcaatgaatttattgtcgtgatcataccatgaaatctcgggaattgatctaaatccttaaacatcagtatggtatatgcacggttcatagcatgaaatctcgccgtcccatcgttgaaatttggtcattgaaggtcccaattgcaacagcgaaataagaatccacaaattcagacctaattcgaggttttataattaggttcatattaaaaagatggggcacaattgtctgccactgcgtttgaatattgataattagtaacacattaaaacctgaccaagttatgttttcaatattggttataaaccaaaatcacactaaaatgagaattttaagcttttatttcgaaaattttaaactttgtgggtcaatagagttaaacttggtggcgttaacatgtcgaaaccaattgaagaaaagaaataatggcactaagttcaaaaaaagattaatggtatatttttgttactaaaaggtctagatattaaagatattcaagattttcgctagtaatgtttgttcttggatgtatgcacctggttttgtttgctgttttttattcttcaatctattaactatctcgtaaaagcacaatacttggaaaacttaaagagccaaccattggcacctcgaattggcttttgcatgtattcattatctaaaatagattactttttctgtgtaatatcctaggtgtgtaattttttctatttgtaccacgtttagct

SEQ ID NO: 107798 - DNA, 818 bp, Aquilegia coerulea
  Intron number 1 from transcript AcoGoldSmith_v1.023365m (l ocus AcoGoldSmith_v1.023365m.g) derived from phytozome v7. 0 (chr-ID scaffold_30; pos 2771435 to 2772252)
tcttcaccagagtgtttttgaaccagaagcaaaaggcaaagttcctctccaatactctattatcagaacacgcaattcttaattacttgtgttttttttaagttgtcagagatctttaacatcatttttttttctttttaagagagaaggtagtttgtattaatatcaaatatcccacaaatacagcctgatcagcatgctaacaagcgtcgtcaggtattaaatacaggaaacaaaacatacaaaatttcatacactatctccttctaataactgtctggcatactgtcagcacatccaccatcccctgctgctgcagaggccatcccaaagatgtttcctgacctgcagctgttctcaatcaccagttatcaaattttcccaatccatgagtatgtcaataattctgcatcccatctttgcattttacttctaaccaggccgaaatgtgaaatttaatgcacttgattaaacaggacctatcataagctttcccactgaagatgatataccattcctagctttccacacactccacaacagagctgcaggcagaattttccagactgcacacgccaggttgttgctgttcagttgtggccagcttgccagtcccttgatctctgtctgagctgcaaaaccaccagttctttgtacatgacctgtcaagatgtgttatacgtcccttactgctgggcatagcagaaaaagatgcgagatggtctcgttttcagtaccacatagaacacagttcttatccaccataatacctctggctgccaggtacacaagagtggggatacggccctgcagaacac

SEQ ID NO: 107799 - DNA, 635 bp, Aquilegia coerulea
  Intron number 3 from transcript AcoGoldSmith_v1.010172m (l ocus AcoGoldSmith_v1.010172m.g) derived from phytozome v7. 0 (chr-ID scaffold_10; pos 1295597 to 1296231)
tgaagaagcccagaaagctgtggagaggcttggtaagcttttttgtttcggaatatttgaatgttgagagcatcttcaatccttccatatatagaaaagttgccgttaattgtgcataaaaatatctcaacttcaatgctatcttaacttttccataaaaaagaaatccacgccggcgcgacattgacattatttaacccgtgtcctattgtttctgattattttaagaataaaaaatattctacttggtacatatggataaaaatctgttaggcacggatctagcaattccgcgcggcattaggagttccgtgtagagtactttctttccataggaaactccatatctttatggactctcttatagataacttacagaaagattaaatttatggatggattgaagatggattttggacatacatatttctataaatttaagaatttttcactctttatggatggattgaagatcctctagtgttgttcatgatggattccatctagaattaatttatccaatagtgtagaactatgaacaaggagctgattaggtttgtagggcataaaaaaatctttaacttatttttattgactggtggttattttgtttaattttcattctccaggaagaa

SEQ ID NO: 107800 - DNA, 663 bp, Aquilegia coerulea
  Intron number 1 from transcript AcoGoldSmith_v1.019399m (l ocus AcoGoldSmith_v1.019399m.g) derived from phytozome v7. 0 (chr-ID scaffold_30; pos 2525607 to 2526269 reverse stra nd)
aatctagtggttgtggaccccggttctttcaaaaggtatgtgttttgaactctggaggttccatttaaaattatcataatcaatttagcaaaacactgagttgtagctagtgagatggtatatacaatactgtcaacaccaacaaactttagatgggcagaacaatttgatcttaaagaattgtatcataagtttggctatatttctaaactataaaaatgggaaaattgtactttcaaatattcttctaaactctagtaaaaaacaattgtctgtcataacaacgcaaattgcctttatgtttaaatgaatctgctatcattctagtcatgtagtagtttgattctcttaaacaaaattacttgcagttatagaagtgatctcccacataattttatatatagttttagtaaacttggtttatttcttttacactttgctttgctcttcttttcttaatggaaatctggagactgttgcctctcaaacactttcaaagaaaaagttgctttccaggatgaagcaagtgtttatgtgtcgtcctcaggtaatcttcactagatcgttacattaccttctcttcttctttcaatcttataacttctgttaaacagagatttctcattcttgtagcttgttgaagatattgaggaaaccattggt

SEQ ID NO: 107801 - DNA, 769 bp, Aquilegia coerulea
  Intron number 1 from transcript AcoGoldSmith_v1.013139m (l ocus AcoGoldSmith_v1.013139m.g) derived from phytozome v7. 0 (chr-ID scaffold_109; pos 237772 to 238540)
aatttgttgtaaaatgtaatcaagatgttgtaaacaatcagtcccatgtttctccgtattaggaaaaaaaaaaaaaagtcttattcttattcataaaattggtcagtggttaaaacaccaagtattctcattactacatgtaatgagaattgtgttagaatatagaacctgttgaatcaagtccaaaacccttacatggttcatgtcatgcagagttgatatcgggaactcaaatttaaaggccgcttgggcagcctggcagcatcactcattcacaagcaaaaaaataataaaatggtcttttgatttgattatattatattatacatggtggatgagatatgacaacagaaatcttcaacttatcttcccaaaccaaagcaaaattgagaacaccagcattattgaacctgtaaagcaatatattaacaaagcaagaagccatccaagaaaatctttgtcgagcaacaaagcagggcatctttctctgtgtctttctctcttacttactgaataatatatctaattactatataatgatccatgtcctgcaactagacattatattaatgttcaacagagaccctatgttatgatgcatattaatgtgctatagtaggtagcaagccttgttataaaaattactcaaaagtctaataaattaaggtaataaaatataagcatttcttcttcaaaggtagtaccaggcgcagaaagaatgacagatggtggagaaggagagagtgtgtgacagaaggtggagggtacc

SEQ ID NO: 107802 - DNA, 619 bp, Aquilegia coerulea
  Intron number 2 from transcript AcoGoldSmith_v1.015891m (l ocus AcoGoldSmith_v1.015891m.g) derived from phytozome v7. 0 (chr-ID scaffold_123; pos 134783 to 135401 reverse stran d)
agggcatctcagagctataggtactgaagttttcttatcatgcttaccaaaaattagctaggcatacacaaatgaaaacagtgtttaatggggaacaaagcaaaggttggacatatatttagtgttatcatggtatgttgggttccatcctagagattgtcctacttggactatcatgtcacacttttccttgaggtttataatagtttctgtaatctagagcagcatggttattttagaccttttgtcttttgttcacgtacatctattctaagatttagagtcaatgccaatcaaaaaagatttagagtcaattgtcaaatatttctgtcaatatgacaggctgaaatcatgatagtaatcagaaaatatgacagatgacgactgggaaaaaccaaatgtggaacttaaaataattgtactcttgtgggaatttaaggggatggggcaacaatatcaagggaaaccagaataagttgagcgtgactactatccaattatcacactttacattttgttaaaaattgatgttgcgcttgaaatgattaatctcatttttaatctattcatccaaaaatttctagggaacttggtataaaaacgttgagctcttgtgtgg

SEQ ID NO: 107803 - DNA, 157 bp, Aquilegia coerulea
  Intron number 1 from transcript AcoGoldSmith_v1.005060m (l ocus AcoGoldSmith_v1.005060m.g) derived from phytozome v7. 0 (chr-ID scaffold_27; pos 2815267 to 2815423)
gtcgaattcaggtgggtttttttaaaagaaaattctgtgttttttcttcaatttttaatgcaatttcattcattttgattgatgggctttcttatgtttttgcttggttttattatgaacagattctttcatttattttggatcgattggttaatcc

SEQ ID NO: 107804 - DNA, 961 bp, Aquilegia coerulea
  Intron number 1 from transcript AcoGoldSmith_v1.009872m (l ocus AcoGoldSmith_v1.009872m.g) derived from phytozome v7. 0 (chr-ID scaffold_9; pos 5399271 to 5400231 reverse stran d)
cgtcgtcgttgtcttttcttgattcttgttggctggtattactacttaacttcactactgtcctcactactactagtactaatgtttctacttcaacactttcacctttttacttcagttttttttatcgatgttctcgatttcaatcgagcattgttcttcgttaatggatcttttgattatatactgtatagattcattgtacaagaagaattgtttattttctttgttgttttgattgattgtgactagtataaagtgattctgtgattctgattctgctttgaatgcgattggttctagtttcttgagtttgattggagtttcaagttttaattatagctgattttgataatgttttggataatgtgactaaattttttgattatagataagttaattggacttgatttgatatctttgatgttgatgttttgaagaaaaattcttatttgccctgatttgagttctgagtttttgttgtggtttagctttattatattgataggatgagaagatttgaagtcttttgttggtgaagtaatcatgaatttctacctacttttttactcgttgatgacgtcttcatacaagtacaatcacataattgtattgtttctaggtttttttctttttactattccaaattttatcaaattaatggcatgcggattgatcgaatctttaaccagtataaagaagcataatgattttttttttcttttttgaaaaactctgttgagacctatcctcgtcttagaggagacaaatttgttcggtcagctaaatcacattgtctatcatcctggatttgtaactgtgtgttttccttgtttttgtttcctgtttaaaaatggtaagctcaaaatcatgaactacacatcttccaagttctgactgtaaacttttcattgtttgtggtgcagtatctgatcactcatttcagtgattttcagctcgc

SEQ ID NO: 107805 - DNA, 329 bp, Aquilegia coerulea
  Intron number 1 from transcript AcoGoldSmith_v1.008476m (l ocus AcoGoldSmith_v1.008476m.g) derived from phytozome v7. 0 (chr-ID scaffold_30; pos 1536492 to 1536820)
tcttcagattttcctgaaaggtatgttcattttctttattgttttctgaagttgcttttgatgttttcatttgaatgatttagaggtttagggttttatcataattatttgaaattggagatttttgtatgttatttagggttttggtttttggaattttgttagttatgcttgttttaaagttttagggttttagaagattgaaaatcttgagagttttgatcaatttaagggttttagttagttggaatttgtgtgttgattgttcaatggtttctgatcagtatttttgggaattttcagaaagaggaaatcgcgaagtagacgca

SEQ ID NO: 107806 - DNA, 517 bp, Aquilegia coerulea
  Intron number 1 from transcript AcoGoldSmith_v1.021478m (l ocus AcoGoldSmith_v1.021478m.g) derived from phytozome v7. 0 (chr-ID scaffold_28; pos 2916647 to 2917163)
atttcatcaaaactttaaagaacgattatacggtaactttacatacaactatcctgctgttatctccatgcaaattacatgactaaaacttagtgcttactccctcgggactgagatactgagcacatcttccgattttactttgaacataagattttccatcaatcaaacacatccttgcggcacgggcactagccagctgcctaactagtggtggccagtcaaatcctttggtttctctcttgatgttatatagcaatcttcttgtgtgctaatcttgaaaacatttcatagatcaaggttttttctgctaacagataatttaaaacaatttctactttatagatctgatctgctatggcaacttctcagactgttaaaagaggtggtggtatgaaatgaatgagctaataaccaaaaagaggagatgccattttgaactattacttactttttgtgaatcagtacattaaaggaaatacaataatatttgtttgcatggcacagggagaagtat

SEQ ID NO: 107807 - DNA, 963 bp, Aquilegia coerulea
  Intron number 1 from transcript AcoGoldSmith_v1.016511m (l ocus AcoGoldSmith_v1.016511m.g) derived from phytozome v7. 0 (chr-ID scaffold_10; pos 3506486 to 3507448 reverse stra nd)
gcttggagtatactattaacaaaacggttagtaaagttttattatgttaatgtttgtgaatttgattgaagtagaattaagaatggccatttgtgttttgtgctttgatgattttgtttgatgtttgtgtataaagaatggtgcaatttgttggaccaaacctattgtggaattttattcagatgagcaagttaggatggttttgaaattagacagattttaagctataatggcatctattgaaagccttaatagtgataagtttttatcgaatgccaactgctgtgagtttctggcattttatgtactattggcttactgaatatgtgtgtgcaagcagatgtgtcaatgttgtgttattgttgtttaccgacatgtatagtttatctgtctgaagcactctctaggagtcgcacacacatgagttcaaaacctggctgcaactttactagcccagccaaaagcaaaacaaccaccaacacttgtcatatatgattatagagttttcgacatagagtctttggcagtttggcttacaacattgtgcttgtgctgccaaacttcttttcatatgcttatcatatatggtgaagaggaatgaggattccttttcttttttgctcccatataactttattttttccataaaaatgaacatgttgttttatgttcatcgaaatcatatataatatatctgtttcttatgaggtttaattgataattttctccagtgtatggcagcaaaccaggaagtcctgttatattagtaacaagcatggaagcatgcatgataacttgacaagaaatctatgataacttgatatattttttatgtcgattgctattattttgaatagcaatgcagctctttatttcaattatcttccagtaactagtatggataacaactttcttctattggttgcagagcaagtggctagtggctgcactcttcggtgccct

SEQ ID NO: 107808 - DNA, 441 bp, Aquilegia coerulea
  Intron number 1 from transcript AcoGoldSmith_v1.023405m (l ocus AcoGoldSmith_v1.023405m.g) derived from phytozome v7. 0 (chr-ID scaffold_10; pos 1417159 to 1417599)
catttggattcaaacccaccaccgacctctgtcttgtgagtattatgttactctatttgatttcttagtgtaaaaagtgttcttttatgttgatttaaataattttgttagaaaaggctataattttgtaaagaatttgatttcttttgtagatgtttttattaattgttgttgtcctaaatgtttctttgatcatcactctgtagtgttaaattaatttgatgatgttttttctgtctttaattaggaatgtgtcttagtgtaaaaagtgttcttttatgttgatttaaataattttgttagaaaaagctttaattttgaaaagaatttgagttcttttgtagatgtttttattaattgttgttgtcctaaatgtttctttgatcatcactctgtagtgttaaattaatttgatgatgttttttctgtctttaattagga

SEQ ID NO: 107809 - DNA, 645 bp, Aquilegia coerulea
  Intron number 1 from transcript AcoGoldSmith_v1.001983m (l ocus AcoGoldSmith_v1.001983m.g) derived from phytozome v7. 0 (chr-ID scaffold_27; pos 2708595 to 2709239)
aatccaatcaacactgtttttggtaagatttctcttcatttctatgtttgtttgaagattttaccctgattttagtaaatttatattttattcatgtattgtgctcttgagatttgggaaattatgtatttttttttattcaacttatagatatttagagtaataagcttaaatgatgttttgccgttggagattgtatctgctgcggctagtctgttaggtgaattgcaagtagccccttttggcttttgtatgtatgagattggattttatttagaagtaacatgttatttttgaaatttttgtatcaatttcaacatatttctgctcccattagtctgtaatgtctgggtttcgctcatattgattaactatgttatctttacaggagaattaatagttaaaccattgcaaataggtccagaattttaaacattttcaattgcaaaatcttaatgccaaaaatagaattctgacgtggttgctgatgtggtgtagccaacattcaaaatgcagttgtttttcgaaaatattgttgttgtttaaattatttttttgagtgtattagtgaatctggtagttagggatgcgcgctttggagttgagtgttaatttattcttgatttgatgttgtttttctattag

SEQ ID NO: 107810 - DNA, 384 bp, Aquilegia coerulea
  Intron number 1 from transcript AcoGoldSmith_v1.008255m (l ocus AcoGoldSmith_v1.008255m.g) derived from phytozome v7. 0 (chr-ID scaffold_27; pos 668847 to 669230)
gctgtgaaagatcggagaggagggtacaagagaaggtacttaattactaaacccttaccaactgagggcatttttctgatttatgatcaaggttactttggtccttgtggtttattaaggattaaatgtgataattttgattgatttagggacaaaatggattttcttttgctcccaaatgacatattgccctttatttacccttgttccttccattttgatattgaaaattctgatcacaatgtagtcaaaaaaattagacaatagttcttcaaattaggcaccacatcagttgtgagtgagtttgatttgcttgatttctacccatttcgatcatcattactaatatttattgaaatctttttacagaaaatccccaaatac

SEQ ID NO: 107811 - DNA, 1050 bp, Aquilegia coerulea
  Intron number 2 from transcript AcoGoldSmith_v1.019647m (l ocus AcoGoldSmith_v1.019647m.g) derived from phytozome v7. 0 (chr-ID scaffold_108; pos 232637 to 233686 reverse stran d)
tgctaatttctccattgtcactgcttcttattgcggtatttttctcccctaaatcaaattcaattaccttgccttgtttttctcttgtttatttatattgattccgattcccaatcatcacaactacccaactaggagaggataacaattatatgtttgggtattattatgatcctcttactactttccggcttacctctttagtttttaccactccacacccattgggcatcattttaaataccatctcactagtccaactccaaacaaatgatgttgtaagttttccactttgtttttattttatttatagtatgtcttcctgacctaacgctacaatagtacaatacaatgttatatcttacttagtgcctatctcttggctctttgggtggtaagtttgtttatcttatctttctatagttgtgcttcccaacaccccccccccccccaaaaaaaaaaaaaaaaaccctttgccatgagccatttggtgacaggtagagggaccaagtacaccctgaccacgacttgggattaatatatgaaccaaagtttaaaggtgtttttttgtattcctagagccatatatttaggatttcaggaaggtcttgcttagtttctccaccaaatatgatcaaaccttttgagttgcaccttaaggcagcaggcatcacggcaggaaagtaaccttaggacaaattaaaatgtgggttgcaaaggaccataagttcatgaacataactctaatgggtcatcgagtgttttcacaacttgggtgtatgcggaaaacgccaagatgcacttaactatggtcaagcttaccatggacttacacaaacacaactacacaagtaatacaaggggataaactgatcaccttgccttaatcccttttgctttaaacgaagctggtgcttttgtatttaaacttgagaagtagctcttcataagaattgtaaacaagcacatcttgtagccaatacataactagtaattaaattcctgcatgtggcaggagcacgtgaatttgtaagagcaactcgagcttca

SEQ ID NO: 107812 - DNA, 991 bp, Aquilegia coerulea
  Intron number 1 from transcript AcoGoldSmith_v1.007495m (l ocus AcoGoldSmith_v1.007495m.g) derived from phytozome v7. 0 (chr-ID scaffold_28; pos 1346297 to 1347287 reverse stra nd)
ctcatcttgaccacattgtaagatttagtgatattatttgttttatatttatttcaaagttattattgtttgaaatccgaagtaggatttgttgaaacaaaatactgtatgttacttgaaaagtggtgccagcctgagttagttattttggtgttgtcgttcttgtacttgggaatccgattctacattcttcaatgttaaatgtcatatctcatacgaaagttgaagtttgatttagtttttacggtctatgaatcttacaggtcaattcgtgattaagagttgttcaatcaaaaccatttagcttgtaaggtggtgtttgaatacttttttcccaatcatcgaaccctattttactatttcaaattcgtattaacaaaagtatgccttatgtaacataggttgagccccttttcgtgcagaatatttatattttgatgaaacaaacagtgtgtttagttaggactaaagagctcttataattctgagttatatgtgtttctgagtgaaatcatatttgatgttagtctataagttcttaatgttgtattggagaacagtatcaacctgtttatagttgttgatattttaaggaggtatcttttctctttctatcagtttctgtcaatactagtttttctctagtttaatgtgagctgaaacccataaaaggttatagcttaaaaccttgtgaatggttggaatatgtcacttcgcataatctatttggtcacacctcaggttgcatgtctttggatctgtgactgtcatttcaagaagggatgtaaagtcgtaagattataagtcacttcgcataatctatttggttacaaactattatgtctttgttttttgcaaaacgtaagagcaatatctacataatgagatattttactggaatcatcaatcttcttttgatattcaagtctgattggtttgtgctgatgttattaactttaattagttatgcttatgacagggtggtcttccg

SEQ ID NO: 107813 - DNA, 977 bp, Aquilegia coerulea
  Intron number 2 from transcript AcoGoldSmith_v1.012317m (l ocus AcoGoldSmith_v1.012317m.g) derived from phytozome v7. 0 (chr-ID scaffold_70; pos 852598 to 853574)
ctccgaaaacttgctaccacattccacgaagaaaggttagtttttactattagataactttctttttctttttcacgttttgttttatccatttgaattcctctcaaaaaacataccagcttcttctcctcccccacaacctctttctatctctttttcttagtttgcataatattgtttttgtagattttgcacatgccaggttagcatactaatatggcgtttttgtatttgttatattcgtcttcttgcctattttttatttttcccttcattattttccatttattttgtatcttgattttctgtaaatattttcgacattctataaaatcgttatgtatatttcaaactttctatttctatcaaatgttaatttttatattgtcttatacgaattgttgtgagtatttaaatctacagatgttgattcctgattgctataactcctaatctaaagtttataccccaatattcagtttttctttcgtttaccagttcgatcgtagagagatgggttaaaaagaaagaaactctgatttttgtttaaaattatctataccattatatacgggtttcgaaaaatgctttgtaagggtatacatgaatcaatgcttgatagggtctgtttggtttagagtgtgacctctaaaattcatgttccttcgacaacaacaataaattaaaaattggatgacatccatgattatgatatctaagtgaatgtattgacaatgttgcgtaaaaggctcaactgccattgttgatattattgtaacatttactataatcaaaggactgatatcacaaacactgccattgtcgatcttctgaggatgttatcttaatcttcgtattcaatgttaattgagaatttttatagattaagtgttattgattttaacatttcaatactaagagtacattggctatgtactgcagattatacttttaccattacagaatagtctactgta

SEQ ID NO: 107814 - DNA, 882 bp, Aquilegia coerulea
  Intron number 3 from transcript AcoGoldSmith_v1.012317m (l ocus AcoGoldSmith_v1.012317m.g) derived from phytozome v7. 0 (chr-ID scaffold_70; pos 853564 to 854445)
agtctactgtaaacttgtgttccctgcaaactccggtaagtctatctatccaaatgcttacaaatgttgtttcaatcatacttctaatgtatgaatctatgtttgatagagtctgtttggtttggattttttattctttctttcctctactatgtggatctctttacaacttcaagggtttgcttattgatcacatgttctacaaaaaaatataacgatttagatcacattttctgtttataaattcaatttcatgtactagagtgtgtacacctctaaaaatggatcattgttttgattggcagatcggcttctagattttgattcgccctaaacttttatagctgattattgccaggttagttctaattcttttcaatcaataaacccatctcgattgagtacatagtattgttgtctgtttttatttatattttactccgttctcagtttgaatttttgactcactagccgtgtaatagaaaacctgccaataacatcaaaactctttagaaatattgagaaattattagccaccaacaaggcgttaggagtcaatcttcatacaatagtgtgtgtactataggattgtgaagaatttaaataaagactttaaacgcgcttcccctctatgcttgattgggtcagtttcgtttgggttttttatttttttttttccctttactatatggatctttttagtgcttcggagtttttcttattgatggatcacgtgttctacaaattaaaaatataaggatttagatcacatcttgtgtttatgaattcaacttcgagtactagagtgtgtacacctccaagaaaggatcattgttttgattggcagatcggcttctagattttgattcgccctaaactttt

SEQ ID NO: 107815 - DNA, 802 bp, Aquilegia coerulea
  Intron number 6 from transcript AcoGoldSmith_v1.012317m (l ocus AcoGoldSmith_v1.012317m.g) derived from phytozome v7. 0 (chr-ID scaffold_70; pos 856128 to 856929)
aacacttctcaagcgtgatattgttttctacaaaggttagcatcttttagtctctttcggtgtagaattctcaattccacttcagtgttttttagccaatcaccaaattgactttcctcaaatccctaaaacttcaaaccaatccacacatatttgtcgccctcaatccatgcttttcttcatttcttccaaaacagctaattgaaattagatctaatgtggttcagtttgatacaaattacaacatatgaatcatgacaatctgatttactttaaaatcagattggttttttatttctccaaattgaaatgtagatgtttactaatgtgttaaaaagggaataaatttatccagagtaactaagtactcaaaataactttcattcttcccccgagtcggtagagtccttactttgatttggataggcgagagatgtaatataccagagaaaaagcctagttggctagaactagaatagtcaactacttaaagtttattttgtctagcaaccgagaatcctgaggtcagacgagggatggaaatatcgtttgcagccaaaatttagtgtcattaaatttattggtcttggatttgaaatgtaaactagccatgggaagccaattgctaaaagtttataaataggaaaaaaatacactaaaaaggagaattgctttatgcattttaaaaacgtaattcaaaaggatattttaaaactttcagaaatacatcatgttttaattttaattataattctttataattgcaggccattccatcaaattgccttcaagtaagagtttt

SEQ ID NO: 107816 - DNA, 520 bp, Aquilegia coerulea
  Intron number 7 from transcript AcoGoldSmith_v1.012317m (l ocus AcoGoldSmith_v1.012317m.g) derived from phytozome v7. 0 (chr-ID scaffold_70; pos 857049 to 857568)
aaggtgcgtttgaggatcctaattttcttaaattgattttaatttttctccatctatttcatttagtattagctatggattttaattgttgaaaaacactacttttgaaagaacaattttgtatttagtattacaatctgtattatcacttttaaaagaacaattttgtttttaatgacaagaacattgcatcctcaaatatttcgttgctaacactatgcgtcacctttctgaatacaaaaattatttctttgttaatttgttttatagtggcgttgatcaacaaattagatacaatgcaatgactgaagtttacacctctaaaaattacactgaaaaggagaatggtgttatgcatttcaaagacatagttcgaaggctgctatataactttcgaaaatacatcatgttctcctttaaattctaattctccttaattacaagccaatacatcaaattgccttcaagtaagaatttaattaggtgatttgttttgttttttcaaagggtgatccatcaa

SEQ ID NO: 107817 - DNA, 886 bp, Aquilegia coerulea
  Intron number 1 from transcript AcoGoldSmith_v1.003079m (l ocus AcoGoldSmith_v1.003074m.g) derived from phytozome v7. 0 (chr-ID scaffold_69; pos 541523 to 542408 reverse strand )
ttgaagaactgaacaaaagagactaaagggtattcttttttcttcttgtagctttttgggtatgccattcaatctttatcatttcatacatttttttttcttttttttttttttacagaaaatgtttgtgagatgaaaaaaaaaaaaacgagtggggagttcacatttggaaagaaatagttgtaccatgttattacgcttgttaatttcttggaattattgaattttctgtagatttgaagcattgtatatgagattaaccgaaaagcgattccccaaattttaatcatggttgataaattaataagtgttacagctaattcataattgactgagaattcctaagataattcagctgttccttttatatacaactagagtagctggttcatgaacttattattgttttctgatgggtgaaagagtttccgttgacgatattagagtaataacttttatcttcaatgattgattctgcaataagcattttagcatttcatcgttaaactcaaaatttaagattgaagttgaacaagcaattgcaatattgaagaacatggaaaagattattagttttatttattttgtctatctttgtagtctttatacttgactgtgaatattattttgcttcattatatatcttgatgtttctggaaccacacaaatatgagtcagttaaaagttccagagtcccattatcttggaagattgttttatatcttggagtaattgaaagccacgagttcttccattctagccttctaggttatgcttattagaagtttcatttcctctctttcaagtagaacttcagtttttattgatactgttttttattatatttgaaggattttggttgtctttctggagttctgttacatca

SEQ ID NO: 107818 - DNA, 888 bp, Aquilegia coerulea
  Intron number 1 from transcript AcoGoldSmith_v1.013128m (l ocus AcoGoldSmith_v1.013128m.g) derived from phytozome v7. 0 (chr-ID scaffold_54; pos 1462867 to 1463754)
ctcttgaggtatacccttttgtttttattggttgtgaacttgaatttatgagttgggtttgatgtttgttgtggaaatttttgatctttttgatattgggtatgttaaattgggtttttgggtatgtttttgtggaagtttgtttgtttgtagaattaattatgtgaaatggtatcgaataaacttcgataatttccatcttgaagattgggaagtaaagaataatagtgttagtccaattgaagtgcatttgaaattctaatttggggattttagtgctgttatgggtactaattacaagaaaggaagtacttaaggttcgataaaaattgaaaatttttagtctatttctatcagttgttgtatctatttgcctctgatatagtgtgctagtgtgcgatattttaatatttaagctgcgtgaacttgcttgttcatgatttcaaatagaaatttgagtttgatgcctagataagcagtaagacgtaaaaatgagtatctgtgtgatagaagtattgaacatccattaaaaacatgaggtagttaccttgaagttctaatttatacgaataacaaatttgtggagtggaagttttgttgttttagggtattgtaaatatcatgtgcattgtccatgactccatcggattgattcatttctatcattgaggaacctattaagcttttgcaagggtgaccatcttaagctatcttgacattcatccatattttgcttatatttattctcttgtgattgatattgtctacgacctggcaaagaggtggtcaaccaattgaatgatattagattccgactttttaatctgccatagactgaaaataaatattttgtaacttagacatccttccctttttttcttttcagat

SEQ ID NO: 107819 - DNA, 981 bp, Aquilegia coerulea
  Intron number 1 from transcript AcoGoldSmith_v1.019720m (l ocus AcoGoldSmith_v1.019720m.g) derived from phytozome v7. 0 (chr-ID scaffold_27; pos 2025173 to 2026153)
gccgaaggtatctattaatttgttttgaagcttgaagtgatacaatttctcacattgcttttcagtcaaacaaaaaacaaaagaggtttttttgcgctccgtgtaatgatagttgcaagttgcaactgtaccttgagtcttgttgatactctacacaaactgcaggctgaaaaaataagaattatttgtaaaaaggaattttacaatataagcagcagaaagatactataacttttggcgtgattccatgtcttcaacgcactgaactcatctgaacatcatgatctgacatactataacttttaaatcgcacacattttcaggggacttttaagttctattgccttcaggtcaggtgtcttactcttacaattacacacctttttctctcatcgccagacaatgtgttttcaggacttaaaaatattggccttttcatggtgattccaatgagtcaataacagagaaattacctataattttgcactttcagtgtatttgattcaaggtatttttgtgaagaggaattggaatgccacttttggaatgcgccaatgcgggacaccaggattgaacataatgtggtcagtagcattcaacagtctatcttaggcagttaagcttttagttttaaatgaaagtagtaagctaaagtggttaacttccaggtaggttataagataaagaatttaaatttaattatgcaaccaaccctcactctagttctatctaagtagaagcaagttaatttcgtaccaaatacacaaagaatgtacttaacaactactccatctcactaagtccattcaaataacacctccaaacctactatatatttcatcttctcattcccctttactcacaactcataccaatcatctcttcttcctacctttcgtaacctgctcaaatcttcacacaactcaaatggcaaaatatttctcagttgcctctacaacactcaaggtagcagtctacctc

SEQ ID NO: 107820 - DNA, 644 bp, Aquilegia coerulea
  Intron number 2 from transcript AcoGoldSmith_v1.008914m (l ocus AcoGoldSmith_v1.008914m.g) derived from phytozome v7. 0 (chr-ID scaffold_43; pos 347308 to 347951)
aagaagctcacaaattgccttttgttggtgataaagtaagatacaactattctacttgattgtaatcttttgtttcaagaatctgataaattctttcataataatggattataattctcatttacttgatgtacatgtcgattcgttacagttaggatttggaatatgcataattggacttgcttatttatgtctgtctttactttgggtttctatggaattgagaagtgggagtttcattgcctactcaggtaaacatgggtttcagccaagtatttgagggtcttacagtgctcaataagtctttaatatgattttttttttccacataaaacattgacattaggagaattccaatgcagacatgtattttttatttggaagtttattttgttcttggcctgctataataatatattaggcatgttcttggatatgctctatagagatgaattattttgttgcctttaccactcaagtttaaatgctcatctctaatccagtgttagtttatggagtgctccttaagtatacaacgttaatatatttcttgtgttggtatttcgtgatatgcactaggattgaagagtttatcttttgatactgcaggaacctctctctgcacttgcagcagaatatcaatc

SEQ ID NO: 107821 - DNA, 490 bp, Aquilegia coerulea
  Intron number 1 from transcript AcoGoldSmith_v1.002488m (l ocus AcoGoldSmith_v1.002488m.g) derived from phytozome v7. 0 (chr-ID scaffold_30; pos 541497 to 541986)
ttctttgttctcatcctttatccagagatattcatgtaagtagttttaatcgctttttattattatagttatttgttaatttattttagatgttttataagtaaattcatccgtttacaagtgttatgaaatctgttaatcaaagtttgtgaattttatcatcagaagaaggatttcggggtgtctctcatgattgacccgaatttacttcattaggtgagaatttattgatcggaatcgacatgttatgtactactactaatatatacctcttattaataaaatttcaactcgtattggaaagaaaagaaaaaaatagaagtaattttttttgtagtttgtgaaatattagcgagatcctcaatttgtaggttattggatgggtgatttatctcatttatttgagtttgtgtttaatttgtttctgatggtattgatgctgactggattatatggacattgcagattgagtctttatctgtaacattcc

SEQ ID NO: 107822 - DNA, 537 bp, Aquilegia coerulea
  Intron number 1 from transcript AcoGoldSmith_v1.015006m (l ocus AcoGoldSmith_v1.015006m.g) derived from phytozome v7. 0 (chr-ID scaffold_9; pos 4608490 to 4609026 reverse stran d)
aacaaggcaagttgagaagggaagtaagtagtactgtctgagttcttgttatattaactttttaatgccgtcaaacttccgtagattctgcttgtgctagtcttcttcatatgtcagtcaatgattgaaacctctggatgtaattatcttgtttgaattgttcatatccatgttattcggaatgttggatgccactacaaagctttggcaatagttttattttacgactgagccataatccctgattgagcattgtgtatcatttgacagttctatatgttatatgtctctttttcttctttacatttctcacaatgttcagaagttaattttgcttacattttcttttggtttgtgaagagtcatttttgtttatagatatttaacacaattaataaagatttgctactaggttttatttagaaaaataaatgaattcatctattgtggtaaaaaaaaaagtcatgttattacttgatagtattttatcatgttttttcagattggtttggtgattgatctaacaaacacaagtcg

SEQ ID NO: 107823 - DNA, 629 bp, Aquilegia coerulea
  Intron number 1 from transcript AcoGoldSmith_v1.008376m (l ocus AcoGoldSmith_v1.008376m.g) derived from phytozome v7. 0 (chr-ID scaffold_30; pos 1387145 to 1387773 reverse stra nd)
atcttgtttcatttgcagcttctcaagaagattctgtaagtttatttgagatttctgattgttctatttgaattagaatttaaatcttagattctttttttttctggttttatgaattgtcaattacaatgttgaatcttccaattgtagagttacaaggtttatattacaaagttttttttttattattattattattattaatttcccctgttgtatgtgaaattgtgaatgtttcttgatgtttagtagtcgtcggtcggtcagatgagacgataatgtgtagtgaattggaaatagtggttactggttagaaacaggactttcttatctataagatttgtaaaatatgtcaagaggcggatttttcttagttgaagattgacacttctgttttagctattaatttgccaaagccaaactatatgttgataacaaaacaatgtgtttaatcacatgggtatcacttttggcattttaaaattttcctctgtcagcaaattgtcctctttgattgtagtttgaggtccttagagatctttttatctgatattgtaaatattagttttcttgactctaaacttatttattcagaagcattcagagattgaagtggaaaaggagaagag

SEQ ID NO: 107824 - DNA, 949 bp, Aquilegia coerulea
  Intron number 2 from transcript AcoGoldSmith_v1.018215m (l ocus AcoGoldSmith_v1.018215m.g) derived from phytozome v7. 0 (chr-ID scaffold_72; pos 424866 to 425814 reverse strand )
caaagaaaaagaaccctcgacactggaggatcttggtgagaacttaatcaattaggggattttttttttttcttgaagttatatcaatatgtcatcaactctttcattgataatcggacatcttctctcccaaatatttatgaattaacttcttaatgacgcgctggccaccatttccgccaagattttgactttatggctgtcgtactatatcagaattgtatatttttatatatcttggtttgatttatattatgtatgaagggcctaaactaccctttctgcgatagtgatagtgcgccaacagtctcaggttcacaagttgcacactaccaacaatttaataagaactaattttgctgaaaagcttaggaatcaaggccttgttgtttcattcagcatcaggactttttctgtactgaatttttttattggacgagatcataaaatgttttgaaagcatttgtttatttatgtactttttacggtcttcgaataaaaatcatgttaaacttcagtattcacatagtgaactatgtggtcctcgacaactttgaactgtcaaactgagattcttgcttgttctttcgcatgaagaaaagtgtttatacttttcctgaaaaccaatgcacttaaccaacatattatccatagtccaatccatattacaaacctcgattttttaaaaaattttgatttctaaaaatggtaatatgtaccaatattctgacgcaataaagcacacaattcaatgcgctgaattctgaccgttgatattacaccccaattttgttttgttcttcaaaatgttgtaatgttgtatacaaggtgcatcgtgaaagaggttgatacatttcttttagttctactttatatgatttagatttcttacactgaactctttctttcatgtggtgaacgaaaaccagcggtggctgcaagaggggga

SEQ ID NO: 107825 - DNA, 480 bp, Aquilegia coerulea
  Intron number 1 from transcript AcoGoldSmith_v1.012240m (l ocus AcoGoldSmith_v1.012240m.g) derived from phytozome v7. 0 (chr-ID scaffold_21; pos 3020679 to 3021158)
tccatccaggtgagaaagcttatattctacaattaaccatcgccaagctttttttttaaaaaaaggtcaaacaatctgtttttgtaaatggatcaaaattggttgatctctgagacccaagggaattctggttccaaaaaaaaaaaaagaaaaaattcaataggttccctgttccttctacaattcatctaacagtgcagtatgaatctaatgttttctttcgaaaggagtcgacgtagtcttcttctggacactaaattttttatgtagtgtttgtatttattttttttttctgctcagcagatatgtgaattactttgcgttgataatcttgaacacaggtctgattatttcagccgcaagcatgtgtataatgttctggaaatcacgtttatttttaatcattttgttcttatattttccttcctcttctttcttatgccagaggacaaagacgcaggacgaggaactggagcttct

SEQ ID NO: 107826 - DNA, 595 bp, Aquilegia coerulea
  Intron number 2 from transcript AcoGoldSmith_v1.011797m (l ocus AcoGoldSmith_v1.011752m.g) derived from phytozome v7. 0 (chr-ID scaffold_9; pos 3950764 to 3951358 reverse stran d)
aaaaccaacaactttcagtatctctgcatctactggtaattactcacttacaatcccactttctacttgttttttcttgtcagtattcgataatctgtatcacattcttatgatcctaatctgaattgatgaatgtgtttttggtaattgttccatttcaaaattagctagcttttaatctagtatcagatgttttgagtcgtgtaatactttgatggtgactttatagaggtacagtctctaccttcctaaatggtgcagtagtttctgctatagacagaaggttactggtatttctcgagggtttgtttggatgacctcgagggataatattgaagtatttgttggtgctagaagcattgttaacacaatttttgtaaacattctttcaatataccatatatatattttgagaaaatatgcctcctctaatgtctgagattgtattgtatcactttaatttgatgtgcttctactcctacaatagtgagtgtgtgtgtgtggtatcttcaattcttcagcaactatgttttggttatataagtaatgaagtttgtttctttcataagcagataagttaatctctgaaggggct

SEQ ID NO: 107827 - DNA, 249 bp, Aquilegia coerulea
  Intron number 1 from transcript AcoGoldSmith_v1.011797m (l ocus AcoGoldSmith_v1.011752m.g) derived from phytozome v7. 0 (chr-ID scaffold_9; pos 3951426 to 3951674 reverse stran d)
tattcaagctaaaacaaccaaagtggaaccttgtggtaagtatttcccaattcgaacctaaacctagggttttcttaattgatctgattttgatgaaaactatgtggtttctttcttttcttgattataatctcaattgtgatttgaattttgtatataagtgtttgatttaaatagttgacttaagaattaatgatctgtgattaataaagtttggattttttttttttttttttttttttgttccag

SEQ ID NO: 107828 - DNA, 1021 bp, Aquilegia coerulea
  Intron number 1 from transcript AcoGoldSmith_v1.018940m (l ocus AcoGoldSmith_v1.018940m.g) derived from phytozome v7. 0 (chr-ID scaffold_72; pos 121389 to 122409)
atcaagaagctgcagttcagttgggaaaggaattggtatataagatttctttctttcttctttgtcttcttacttattcttctgtcttcttgttctttttcttcttacttcaaaaacccaataagcaattaaaaaaaaccctgttcatataatattgggattattgccaaaagaccttattgatgatgatctttgaagattttgcttcatattttattcattattctcgtataatatacaaaaagacaaaggggttttaagaagttaatccattataagttcgctccaaagttctgtttccatgttcatttttctgttaatgcattttcaacgaaaaaaaaaaaacccaaaattttcatttccatcatttcatgtcttcaagtttttacttggggactttgggtcatcttcttagattagagggtatgtaagtttggtagtatatgtgtttgaagaaaaaaaaaaccaggctttcgacgtgagatgattattgttagtagaacttaagtgttggtgagtgtaattgaaagtttaactttggcatgatgggagattgcttagctgtatctagcctgtctgttggagggagtcttcttgcatgatcttgtttttaacaaaccaaaatattatttattttttaacaaattttttttaccatcctcatatcctgcttttcccaagggagcaaacgtgctattttgatataatgatacatcactctctctaaaacatgttttttcttgagcacccccacaccttaacaccaccatcaaaacatattggtatgggtgtgttccttgtaatactacttaagtactcattactatcttgggttttgaaagtttaattttacttggttttaataattatttttagctaattatttcactctatagatactgtacttggtgataatcatggttgttggaagttgataagtatggtatgtaacaagttgacacgtgtgtttacatttggatatgtgtttatttgcaggtggagagaaagattgatctagtct

SEQ ID NO: 107829 - DNA, 560 bp, Aquilegia coerulea
  Intron number 1 from transcript AcoGoldSmith_v1.011897m (l ocus AcoGoldSmith_v1.011897m.g) derived from phytozome v7. 0 (chr-ID scaffold_37; pos 2267947 to 2268506)
tcctcctcctcctcctccttttggttttgtaagttgtaagtaacttctcttttattaatctttggtatctgtcgtccaattgctttttgttcactagtagtactactacatctatcgactatcgatgatctattagctagattcatttctttcaaattgttgctgattcatatttctgtttattttctctttcaattctctccaataatatgaatatctttcttgcaccctttcaattcaactacaactagactctagctagctagagcccttttcttatttgtttattattcatgtccaattgtccatatcaatttcttttacttgttgttgtattatacaaattaatcatgagtatcagatcagatctgggatatatattaatttcactttactatttagattatagtaccaatctttcttcaattcaaatatttgtttttttctggctggcttttgactttttttttttttttttttttttcatttccttcttctttcttgggcaatctttctatctattagaacaggcgaccaagatcttcttcttgtaccatttt

SEQ ID NO: 107830 - DNA, 790 bp, Aquilegia coerulea
  Intron number 1 from transcript AcoGoldSmith_v1.001210m (l ocus AcoGoldSmith_v1.001210m.g) derived from phytozome v7. 0 (chr-ID scaffold_72; pos 379276 to 380065)
acggtaaatcaccaagattttttgctattaaatcctttctgttgaatttataggtttattgttcaaacattagggttaattacctgtttactgaatttttgagttgaaaagtaatcaacatctttatttgggaacttcaattgctagctatcatttgagagactggttcaattgaattggtcctgctcgactttgaattgatccagttgaaagaatcaaattgtagggttttaacaagaatgtatcaaatgcatattgtagaagccccatattcacgattacttgcaaaggttgaatgtgcgagattcaaactttagggttttaagagaatgtacatatttaaaatgtcagaaagtttaaattgccagagtctctgttgattgtattaatttacaagacagaaaagtactaatattttttatttatattgatggatcttttacatttcacattgacatactttgactaaatcaaaaattaagtaattttatgccttcattgtgggaaattggttggtagaagaacttaatacacatgaaatgatgaaactgaatttggtatatgatttttttccaagtgaacgggtagtaaacttttcttgctatatctggtgctgttctgaattcagtctatgaggtgttgtttgggtttgggctagttccgtttctcaaattcaatttatgaatttgtaatttatgtttagtaattatttaagggactgttttaaaagagtattgaggtgtaattatatccctggctgagatctacgttttcatcttttatgcagctc

SEQ ID NO: 107831 - DNA, 662 bp, Aquilegia coerulea
  Intron number 1 from transcript AcoGoldSmith_v1.004768m (l ocus AcoGoldSmith_v1.004768m.g) derived from phytozome v7. 0 (chr-ID scaffold_1; pos 4125985 to 4126646)
gtgttcttaaattggctgattttggacaggtaaattgctttcgaaaaaatttcgaattaattttttttaggggttttgttcgaatgatgattgatttcactagctttttaatttctatctctgcacattttggaatcatagcatttcactacactttgagactattttatagattcttagaatctcactaacactcgcactaactaatacctaataatatgaaatgttgttctaataatcaaggcattagttaacttcaaacatcagagtttgaattgtatgttgttgaaaaagtaatgatgttgtaccagtccaccatgcttcctcttcaaattattttggttggaaagttagaaagccatagagaaaaataaaaataaatagatcttttgcttttgtttcacattttcacaactttacaatgctgtatatctaaagatgttaacatggaaaacagaagtttaaagagtggcatatatgattttcttttcttttctttgtttttagtttttatgtggtgtatggtggccggtggtgaagccttgtgtaagctctgcttgctgttttcaacgaagcagtgttacgttttctgaattttgaatttttttgagtgatttgtattggcaggcaagagtacttgcggagctcggatttgttaggga

SEQ ID NO: 107832 - DNA, 401 bp, Aquilegia coerulea
  Intron number 3 from transcript AcoGoldSmith_v1.027551m (l ocus AcoGoldSmith_v1.027551m.g) derived from phytozome v7. 0 (chr-ID scaffold_6; pos 1268048 to 1268448 reverse stran d)
aagagaagaggaagaaaggagtagtagtagctcataaagtctagcttaatgttgaacctaccataatagtttgtttgactagttttttgttgtttatcttcttgaaataatcttctccagtattagacaagaatttggtgcactagggtatttgctcatattagacaaaggctttggttacatacttataggttatgcttgtggcttttagtgttgtatgacaagattttggtgcactagggtatttgctcatattgcatggggttgttagtccaatgtgggatgcttgatcaatcttatggcatattttgagcactaatgtaaaacagtatttcacaaaaacaaattgcactgcattgtgacaagataaatacttggaaaaaccacagttcatagcttaa

SEQ ID NO: 107833 - DNA, 421 bp, Aquilegia coerulea
  Intron number 1 from transcript AcoGoldSmith_v1.006044m (l ocus AcoGoldSmith_v1.006044m.g) derived from phytozome v7. 0 (chr-ID scaffold_37; pos 1686828 to 1687248)
gaagaattccagtcgactatcttggtaaaaccctttcttttgtcttttgggacttttttttttctttttttgcaagatttcaattgaaattcacaaccccattatttgttttttgagaatagaaaaaggggttttttgtcgtttgattttcttgcatttgaaagataaaaatgggatttttttttatttttttttgcacttctggtgtgttcttggtcgtttggctaggaaaaaaagacatggggtttttgtttttcaacatatcatgtgaagaaagaaatgtattgacagcatagtttgaactagatgtttgcttcattttgttagaattttagattgaaaaaaattagaatgttgacacagttttattgattttattgaattagcattgcgtcttggattaccttttgtaccggcgttc

SEQ ID NO: 107834 - DNA, 752 bp, Aquilegia coerulea
  Intron number 2 from transcript AcoGoldSmith_v1.006044m (l ocus AcoGoldSmith_v1.006044m.g) derived from phytozome v7. 0 (chr-ID scaffold_37; pos 1687307 to 1688058)
gtgctggaatcattttctcaagtggttcagaactggtaattgaatttgctcaactatcatatttaagtacagtatagtgtgttttctggactaattagaacaattataattgatatagccttatagggaacatttcattttgtgattcggttatagtaaattagtatttgccgatcaggactgccatgatgattctctgcttgtgatcgaaggatttactaaattactacttgtatccgtgcattcaacgactgcatcattggcttgtactaggtcttaaaatttaagtgccaatttgaatagtaatgtagcttagaatagtcacacaaattgtgggttttttttttgggttagttaattcaaatgttggaaaagatgttgaaaaatttgcgatccagttgaatctgatattgagacaaactagtggaattccatcctaaattgcccaaaatactgtactccagtttttatatacagtagtgtttcttcttctgatgattttttgtttccagtcaacctgtggatgagtcatagtgtaagtaattaaagagtcagatgcttagatatcaggttgagtattctttgacaataacaataacaatgcattgtttcttatacttgagttggtaagagcattctgtctcgcgatttagttcagttctatatagcagtattattgaattaaatgatgttaatagttttgtgttcattctttagggtcaacacatctccttgacacagcagattcagca

SEQ ID NO: 107835 - DNA, 419 bp, Aquilegia coerulea
  Intron number 1 from transcript AcoGoldSmith_v1.019056m (l ocus AcoGoldSmith_v1.019056m.g) derived from phytozome v7. 0 (chr-ID scaffold_6; pos 8489326 to 8489744)
ccgatcacaatcttccatttccccaatatccacatgtacgtctctctctttctcttttgttgaacactgaagtagtttgatttaattgcttgatttatatttgttttggttcagtttttcttatacaaacttcccaaaactgcgaaaaacccgaagaattggtttgaaatgaagtaacaaaacttcaaatttatgctaaaccaactttaataaacaaagtcatctctgtagtttaaactaaagaagcaaatcagtttcaattgtcctcttgatcaatacttaacatcatatccaagattattaaagccttctaacttagtaagtagcaattgtaatgtgcttttgtaatgagcattcaatattttcattgccttcaatctgtaggtacatcatacgggtttttcgattgaagatattaa

SEQ ID NO: 107836 - DNA, 728 bp, Aquilegia coerulea
  Intron number 1 from transcript AcoGoldSmith_v1.013133m (l ocus AcoGoldSmith_v1.013133m.g) derived from phytozome v7. 0 (chr-ID scaffold_6; pos 1634955 to 1635682)
tcaccactggttcaggtactttcaccagtacttaagccagcacctagctatgccgatgtcgtagcttctgcggctacgagaaacctccggaccccagctatggaaaaggatcttttattgtccatgccctagccgttgcttccgctggatcaatgggatcccaatctcgatttcctaggtatgcttgccctgttcagaaactgaagctactttttctctttcactacaccaaaccaaacccacgaactttcacccaaacgcatacagttgattccattccacaggtaccacgggcacgctactaatgcctgttggactttgcaaaacggatttccttacccactggaggaagtaaataataacttagctgtcgacaatctccacctgagaatattcaaggacccgttaccgggcagggtaaaaccaacagcacagaggctctgcagcaacaggagccacaaagacgattgtagaaggatacctggattatactcaaacaatagcagcggtactctccgaagtaagccctgaaaagaaaggtgctacactaattgtagtaaccagaacagggcctcggccccagatgctatggaagacctttccttcctttccaagggcagctgctcgaccaagcaagacaagaaaaatgggatattaattgatgaaataacttttttgaaaacagggattctcttctctacaatgacactgtagaccaattgaaagga

SEQ ID NO: 107837 - DNA, 743 bp, Aquilegia coerulea
  Intron number 1 from transcript AcoGoldSmith_v1.007012m (l ocus AcoGoldSmith_v1.007012m.g) derived from phytozome v7. 0 (chr-ID scaffold_27; pos 612697 to 613439 reverse strand )
caagttcttgttgaaactcaggtttgatttttttttttttttttttatacacgcacgtttttccccaaataagtattagatattcgatttgattctggttgttgttagttagggttagggtctattctctttgcttcttctaaaatggaatagttgtttgaaatttgaacaattgttacagatataggttaaaatttgggtttttttattccattttttgggcgaaaaggggaaaaaataatatagaaaaaattattttttctttggcacaaatataaaggaaacatcacagtttggagttgcaggaagttggaaatgtgtttgcattattttcatagaaaagtttgtaaaatttcagatgttttacttaaaaatttgattagtctttgttgaggtttgtgaattgtagtggaaccttttgcccacacccgaataccttaaaatgttgccccagttaagaaatttttgccgaaatgttcatttgaaatagctaggttagttggtgagtcttggagagctattaccagaagcctttttttaggaatcattacaatcttgatcacatattcattggaaaaaggaatatcatgtggttacgtacagttactgttatactgaattcagttttagcatattcttctttatagtgttgtagctttttttttttttttttttttatatcttacaaagtaaacttttgggtagcaggttggaaaacgccttcgacatctcacaaaacatcc

SEQ ID NO: 107838 - DNA, 543 bp, Aquilegia coerulea
  Intron number 1 from transcript AcoGoldSmith_v1.016997m (l ocus AcoGoldSmith_v1.016997m.g) derived from phytozome v7. 0 (chr-ID scaffold_72; pos 144786 to 145328 reverse strand )
aagctgaagcagtatttgatcaagaattcgtgaatgtatgctatatcaacctttcccttagatacaaaatggacagagttctaagaagaactctatgtcaagttccactttttctcagtttttggcatcgcatccattcgatagtgaatttaatatcttttaattatataaaaagccctatcatgattatcggttatgtttgggaacatatcacctccttccagttggaaagcttgaatacctcctcagaggaaatgcacgacaaataatttcataattctgaaaatcatggacaccccctggtttcatatagtgtccatgtatctttaaccatataattaaactgaatgtataaagtgcgatatcttcatccaaagaatgcgacatctcaatttcagttttgtagcagttaaaatttgaggaaatcatatttaagtgaattttgtttcccctgtagatactgataagctacatatatattataatccctatttgatggtttgtcataacaggttaagctgtctgaatacattgggaaaaaat

SEQ ID NO: 107839 - DNA, 483 bp, Aquilegia coerulea
  Intron number 1 from transcript AcoGoldSmith_v1.002375m (l ocus AcoGoldSmith_v1.002375m.g) derived from phytozome v7. 0 (chr-ID scaffold_7; pos 5248676 to 5249158)
aagctcttgtttctgaactttctaaggtgaaaatcgatcgagaaatctttttttttttttttttttagaaattttgaaattataaagtgaaattgagcttaatttggtaaaatctatcatctctgaagataatttcatgctacattgttgatatttgaaatgaatttgactttttgagtaaaaacaacaaacgtaagcttgtagtattgatgtttacagttatttgtctttatatagagatgagattaggattttgagaaggagaattattgaatgtgattttggaaatttgttaatggaaaacgataaaacaggtctgttttagtctttcagaagaacagtgggtgaaagttttttgaattttaggttatttgaattgaattggtggttgtgatgattttgtttatgaattcaaaagtctttgatctattgttggcgctaaattatttgatttggcccagcatttggcaggatctgagcttc

SEQ ID NO: 107840 - DNA, 652 bp, Aquilegia coerulea
  Intron number 1 from transcript AcoGoldSmith_v1.015029m (l ocus AcoGoldSmith_v1.015029m.g) derived from phytozome v7. 0 (chr-ID scaffold_1; pos 3905877 to 3906528 reverse stran d)
tagaagatatcaaattgagcaacgggagatacaatgtaatgtcacattttccctttccacaccttttcttcttccattgacttctgaaccagatttttatatttcttttataatctatacacatgtgactttccacaaaataataaacagattgcctggaaactgattgaaattggtaagaaactaagaactagtctggttgctaggtagatcacataaacaattaacatgtcaaaagaggaaatgagtttaggtcaatttcgaaatttgatctgtttatttttctccactcttatgtacactttttcataattggaaagttgttttagagtgtgatttgagctgaaacatcttgtgatcacatagttttcgtttgggtcatattacatcaagacttatatctaaatgattatatttacatactttttcttttctttgaagacatataggtgtactgagtcaaacagaaaaagaaagaggactgcgatttttttcatgatgaaattgttcttgcatgttgaattaaataacttgactatttgtattgatggtaatttatgcatatatataaattgttcagaatatttttatatagattttatgttttcttctattccaattaactatagttttctgaactctggcagccaat

SEQ ID NO: 107841 - DNA, 517 bp, Aquilegia coerulea
  Intron number 3 from transcript AcoGoldSmith_v1.006534m (l ocus AcoGoldSmith_v1.006534m.g) derived from phytozome v7. 0 (chr-ID scaffold_9; pos 1093132 to 1093648)
ctttgaagccagtgcttctgactggagatttgtcggtaagtttttgctctttcctgcatgtctttgaatcatggtcacatatctgcatatctgtctgggtaatatgatctgttaattatatctaggaaagctagggaccttcacacatgtgtacttgatagttggataaaatgttttagttcttggtatgtgtacaacataatcactagttgccaccactttattgttcttggtgtggtcccatggtgtggtccaattgaacaagtgtggttattgaaattgtggttctgcatttgtgttaatttgaatggaagtggtcatacaagcaaaaaaaataaaaaatggaaggggtcttacaaatagtttcatgtgatgctgaattgccttctgtctacttttctttgcaaaatgatgttatttttcttgtttccatttcagatgttaacctgttgcctttcattctttggtttttattataacaggatagtttcttcgctagttttgccctgggttggtt

SEQ ID NO: 107842 - DNA, 821 bp, Aquilegia coerulea
  Intron number 1 from transcript AcoGoldSmith_v1.002726m (l ocus AcoGoldSmith_v1.002726m.g) derived from phytozome v7. 0 (chr-ID scaffold_28; pos 2237024 to 2237844 reverse stra nd)
tagtgaggaaaataaaaagaaaccttggaattcaggtatttccttctaaacttagctattagcctattactgtaatgaatctttatgtttcacatctatttgtttataaccatggatttgattttagcaacaactcattttctttgatttgtggaactttgattcttcatgtacttgaattaataattcttgtaaatatacaccatatgaaactgatgtctttcaaatcgctcagggtactgtttgtagaggagaaccttctccagagctggattttaacaaaacatgtcttatttttatctttaaaaaaaaatgaatacaaaaaaccttgattacaatgttattaaacaacgcaattctttgcttaattctgatacaatcaactaagattgtatgataaaaaggtttattgaggaacccgcgacctctgatttgattttattgagagaatcacctctaaatcagactagaaatcctaactttaaatattaatttcattctataataccaatgttgattacattgcatttatatagtttacataatgttaaacaaaactacccactacctacaaacaaacattagaccactttctatacccactgacccataatttagttacattatgatttatgatagatctaagtgaattgcttgaccaaggaagtgttttcaattgtgtattaaactaaagatatcgcatcgcattaaccatttatgttctttcatttgattgaagtcaaatgtgcatgctatacctcatttcactttattcatttttagcaggttgtcattatcatactgtcttccaccgtcggctt

SEQ ID NO: 107843 - DNA, 372 bp, Aquilegia coerulea
  Intron number 2 from transcript AcoGoldSmith_v1.014770m (l ocus AcoGoldSmith_v1.014770m.g) derived from phytozome v7. 0 (chr-ID scaffold_12; pos 2642679 to 2643050)
ccttggttagagataatatcaaagctgtaatcctggtgagtacctaaatcacaatgcatttttattttcaaatagatatagttcatatttttcatcattattcttcttttgtagatgttttgcttgggatggagaatgatagcacaaatcgtgtttcttttgctagagataatatcaaagctctaatcctggtaagtacctaaatcttttatcaaaacaagttgggagatgaaaattgtatttccaagagtatattcctgtaagagtttatatttaaaataacaaggagtaatagatatagaagttcatatttttcatcataattcttcttttgtaggatttgtttactgctgggactgatacatcagctgc

SEQ ID NO: 107844 - DNA, 524 bp, Aquilegia coerulea
  Intron number 1 from transcript AcoGoldSmith_v1.023839m (l ocus AcoGoldSmith_v1.023839m.g) derived from phytozome v7. 0 (chr-ID scaffold_60; pos 1102803 to 1103326 reverse stra nd)
ctgttgcaaagaagcctggtttttttacttgagttgttataataattacatgtttacaaaggtaattaagagatctaattaacaaggaaaattctctttgttaatttccttttagccttttctgctagttgtctttttgttctacttatatatttttttccccactagttatgtctttatccttttggcttgtaaatatgtttgaaatggcaatctattgaacctacaattaaactttagagcaattgttgtttggcttctgtattgggtgcctgcagaagagtagaggaccaagtctatcaccaactataatattccttcattccatttccatataaacaatagaagatgattagtttgacaacttttagagtattgcatttcaaagatcatacaaatcatccactttaatcaggtttgtttgatttgtagaaaatttatttacaaaatgtcttggataattgaaaatgctcagtttattaaccataaaaatgattggaaattcagttaattgtatattgtag

SEQ ID NO: 107845 - DNA, 1017 bp, Aquilegia coerulea
  Intron number 1 from transcript AcoGoldSmith_v1.002699m (l ocus AcoGoldSmith_v1.002699m.g) derived from phytozome v7. 0 (chr-ID scaffold_30; pos 1189033 to 1190049)
ggtgttcacaagccttactctggacaaaggaccaagtaagcttattcgtttttgtttttggtgaattcattattgtagatgcaatttgaattgaataggttaatatggaatattgtatttatctattgtttagacacttccatgttgcattcttaagtgttatttggaattttatgctgaaattagtgtcttaaggtatggataaatgtttctgggaatagaatttgtgcacaaagaaagccgtttgtagtgattttattataagtcataatgatatttatggtgtattatggtaattttgaatgtgtttaatattgagaattgttttgtatgacaagttgcttcttattacgaaaacggcttttaattacaaagaaaaatgcttattctgacaagtaaagttgtcttgttctacgcatgtttaattattttaacttcaatttttagtaaatctttcgattttattgtagaaatgagatggaagatacgtttttctaatatttgaatcccaggttccagacatatagggtgagcttactacttagtagaaattctttttggatgttttcatgttggatttaggggctcactgggttaattttattcatttctttctctaaaagcttatgtaagtgtgcctaggataaaaatttacccgaagacacccttttgcagtgatgcatcattagttaaataaggcctgcttgttgttataattaatttgaatgtgctctggaatctggattgaaaaatatagtatgaaaaatttaacttaacagtcaacattgtgaactggtggattttgtggatgtgttaaatcccgaggctgtataaaaagcatttcagattcatcaaagatctgatggtctacgaaggagaacctgagcgtatttcatagatttagcctgactcataggggccattttcttaagataaagttttcaaatattggaatgctgagttatgtgaatttgctccacagggaagctattgtaacttgggttaagaagaagactg

SEQ ID NO: 107846 - DNA, 612 bp, Aquilegia coerulea
  Intron number 2 from transcript AcoGoldSmith_v1.010319m (l ocus AcoGoldSmith_v1.010319m.g) derived from phytozome v7. 0 (chr-ID scaffold_109; pos 375060 to 375671 reverse stran d)
aggaaagctgatattgtgcagattcagtacaagaggtgagaatgataaacttcaataagaaaacgcacttctttgcacatttgatgaatgaacaaaacaaaattgtttatttagttttgaacagggtttgtcataaagttagggagcattttgtttatgccaaatgttttattattgctacaagagtgatcacttataagtattatggtttctagagcatcctgttaaggagaaatctgatgagaccctctgagccagtgattcagattgccttgcccaggctgcaatgcttgatgcccctggttcaagatgtgcaagcttgcccatgacgcaataccattatgctgcacaaactaatatattcttaacctaaatcgacaaagaatctaaagcactaattgcgcttaaaacatagactttttggaaaagatgtcactttgattaaggaatcgaccttgcatctctaggataggtttattttggtatcgatcaccaattcctagttggttaatggtattgatcaccatgtctggcaactttctactcccctttctagaaagtaatcaatttgtgtgcattttgtgtagggtgaactgcgatagaagtgggggg

SEQ ID NO: 107847 - DNA, 328 bp, Aquilegia coerulea
  Intron number 1 from transcript AcoGoldSmith_v1.005663m (l ocus AcoGoldSmith_v1.005663m.g) derived from phytozome v7. 0 (chr-ID scaffold_10; pos 6224930 to 6225257 reverse stra nd)
tattaccaaaggaggtcagtatctttctttatttcaaatgggtttttgttagttattcaaattattatcaatttatttatattgttcataaagttttgaaggaatttatttttattttagttaatttgtgtacaatgctatatcttcagtaatgatttgttggtatatagtactgtttcattcattcaaacctttcttcataaagttaaaaactttagtttaaattatatatatgttctctttacagagtccattcaatgaaagtgatttgtctatatggaatttgattcttatctcttgtttttgggtggttttcgattcaatgcag

SEQ ID NO: 107848 - DNA, 1029 bp, Aquilegia coerulea
  Intron number 3 from transcript AcoGoldSmith_v1.016239m (l ocus AcoGoldSmith_v1.016239m.g) derived from phytozome v7. 0 (chr-ID scaffold_1; pos 336756 to 337784)
aaaagttggcacaatttaagtgtatctctgaaccagtgagtactattagtattggctgccctaaaatcactttacactaaaaatacaggtattatcacaagtaaaatcatgatttcggcctcaacctgaactctgcttcagcacaaagcaacaagaagttgcttaatcctagaaaacaaagttaccaccaacaaatatgccacactgtggtagacttctatacatccttagaaacatgttctgtcatttataaagatgccaaaactcgaaatccttgtgaggagatgtcttagaaattacttgggtcgacttaataagcctagaaatctaattttgatgtggtgttcacccaaaatttggacatagttgacatagtcacatagctcacacattcaatgacttcaggaggaaccaaaaggaacagggttcattcaccggagatggagttccgaattttggggaaaaataacatattgttaattaaaatggtagaagttaagtatctcatttctcatcaggttaagagaatattggttcacaggacccaggagaaaagaatgagttattgataaagaggcaactttttgttactctgcttatctacagtgcaaaatacatgagttttcatgtgtaatgccaatcctcaagatttactgatttagatttgccattcaatgtatttatatcgtttctttggcaaaccagaaagtttaaggggtgagaagaaattactcttttttggaatgtgtgaagtccacacatgtataggaaaataagaaatgccatctacaaattattcatagtagattagtagatatgttgaggaaaaagttgcactggaagcaccagtggaccacatttgtcagtatgaacaatcatgagaattctcaacagacccatgcacatgtccgtgtatttgttacatataatacggagcgttattcttaatattagcctttttatgttcacagtcaaattaataaaaaacaagaagcttaacttttatgaacctattcttgttttttgcag

SEQ ID NO: 107849 - DNA, 307 bp, Aquilegia coerulea
  Intron number 1 from transcript AcoGoldSmith_v1.012941m (l ocus AcoGoldSmith_v1.012941m.g) derived from phytozome v7. 0 (chr-ID scaffold_40; pos 2220540 to 2220846)
gcttagcttttagtggtatgtattttcttcccctttgtaattttaattttcttttttagtaatgttttgagtgttagttttgtcaaatcatgatttgggtattggccaattagctttatttcaatctattaaatgtagtttataatgaatttatgtgtttagtttctgattttcattcttttaaaggttctaagtgttagtggattaaaatctattttcttttaagtaatgctaattcatctagattttaaatggtgggataatatgttttctatgtattcatgtgataggtggatttgggtcttat

SEQ ID NO: 107850 - DNA, 787 bp, Aquilegia coerulea
  Intron number 1 from transcript AcoGoldSmith_v1.008965m (l ocus AcoGoldSmith_v1.008965m.g) derived from phytozome v7. 0 (chr-ID scaffold_15; pos 118790 to 119576)
ccggattgctcaggtacattacatgtttaggtattttgcgtcgtgaaattttcactagtccagtgattatggcattcaaaggtgctcataacagtagaaagtcttcaaacatttgtatatgtaggttaaccaatgcattatcatttattcattttagcactcttttagtgttttcacatgattctaaacattcacaagtctataaaaaccagttccagattgaggacctattcatccgtgaaaaaaaacaaaacaaaaaaaattttgctcgtcaactttttatgattcctggaatttttatcaataaaatttgcttttgttagaaaaaaaaataaaaataaaaattgaggacctatcaacatataggcaataaaaaacatgttgcaaacttgcaatggtctttatcaaaaaaaaataaaataataataataataataaaaacttgcaatggtcaacgtaagatatcaaaaaacacaatatgcccaaacccctttccaagctactattttactttaggtgtccagtggtctactcggtgcatggcaccaaatttgagcccaaccctaagtactagcgcggaagaacaagtatgaccaactggactactcgctgttttgaaagtttttaggcaattcggtgttaaaaaacccgaataagttgtgatacatcagcatttctgcactgattttattttgcaccaacacccaaacaaaattttttagatatatgcatacccggcactctgacaaacactgatttttatattgtcaggcactccttgagccgc

SEQ ID NO: 107851 - DNA, 1012 bp, Aquilegia coerulea
  Intron number 3 from transcript AcoGoldSmith_v1.005307m (l ocus AcoGoldSmith_v1.004677m.g) derived from phytozome v7. 0 (chr-ID scaffold_1; pos 2430503 to 2431514 reverse stran d)
accttggtgctattaaaaattgggtttctcttcaggtaacaactttacttactctaccatctaccatcacattctgtcttcttttttttcattcattattctataaatcaaaattctacagttttttttttttttagattaaaacattggcaatgccacaattcaaatgtttctttcacttaagagtcggtttgattttcgtttattttctagacaatgcatttcaaaatgtcaaaactagataaattggattttccttaaaatcactagtatgctgtttcattcaccagtcaccactaatatcatttaactatgtataggttttcttcagacttcattcccgatttttccttttttaacaacgccacattcaaattgctgcaatattttgttagggcttgtttgaatttttaacaatcaggtttcggtttgttttcttcatgagcctagtctagttttcttcctcggactattgaataaaaactttgctcaaacaattgattatagggtctgtttgattcgagcggtaaatcagtttaccggtgaaaatagagggtatggatagaattaaaaaaatttagtcagaggagaagacatgaagtgagagggagtttagacagagtagtcagatctgttcttaccttactgtgcatttactaatctgcccctttaaaagatttaccgggaaagaatcccgcacgaatcaaacagaccctaaattacagctaaattggtgatattggtagctttataaaattgtatattgtatgatcaacattactcattgcatattttaatctaaaatataaactactgtattgactattgatctgtcatcaaattctgcagatcctgcatatgaatttttagtactacttaatgttctagtgacttgtgtcttgttatagtaaagcagacatatgcttcttctttctctatctgatattcgttagttaagaatttcaatttaatatgatgaagtaatttttggttttctcattgcagaatacat

SEQ ID NO: 107852 - DNA, 997 bp, Aquilegia coerulea
  Intron number 1 from transcript AcoGoldSmith_v1.020645m (l ocus AcoGoldSmith_v1.020645m.g) derived from phytozome v7. 0 (chr-ID scaffold_30; pos 1477624 to 1478620 reverse stra nd)
tgtgagatctgcggcagttcgtgtggtgagatattgattcattttttaatatagttttgtgtggaatcatattttatatttcttgtatgtatgacgaaatcacaagttccatcatattctctttgttctattttttagagctgaaccaaattctgacaaactttacatggattttaaaagagtaaagtattaaggaatttccaatagacttagatcaaaaggaatatacctttacaagctgcattctgtcagactttacagaccgcctgttatgatttttacccagaagaatctgctgacctgccacaactcaaaggttatcacatttgtttgtgatttctacattgatttaaacacgtgattcccagtaaagtattttagaatctaacgcttcgctttgtgcaatgaaagattcccaacatctaatgtgtaatttccttggtatgcttcagccgaagagtccacatattctcattctgacattgtataactatcattggtacataacagtggtcttctacatactttagtgagtttgtttcttctgcaaattttgttgagacaagtggaaacatttatgttttagccaaagagtacacatatctcattcttatattctacatctgccattgccacaaattgatggtgctttttaaacccattaaattactgaaacttttgcgattctgtttctactgcaaaattgtttagagaagtggacacactttttgctcccaaagtatacacattgtttatcaaaaagtatgcacattgattacatcaagcacctgcaaattgtcaaacattggaaagtgtttatcgcaaagttttctgtcatatcaaaatggaactttgtgtctgatcatttcgtaggattgcgttccagctgaatatatttccttagtgagctttgtttttgttccacctgacatgcatgtctgttagagttgattcctgttttgatgtatctgtttttctcttgaatccaggtcagtga

SEQ ID NO: 107853 - DNA, 917 bp, Aquilegia coerulea
  Intron number 1 from transcript AcoGoldSmith_v1.021438m (l ocus AcoGoldSmith_v1.021438m.g) derived from phytozome v7. 0 (chr-ID scaffold_1; pos 4860132 to 4861048 reverse stran d)
gacatcctcctcctaaaggtgaaatctttttactctcaatttcagttttactctaatttcttgcttgcttttggaaaatgcatcaattgtttgatttggggcaacattgagcttgaaaatttggtttaagttcaactgttgttttttcattacattgtgaatggtattagaattctatgaaaatgtttgttgtatgagtaaaaagtttgtatctttcatttgtgtgtgtttggatttgtgaagttcttggttttactaaatgttagtgtatttggttctctgaaatgaaatatggctctttagcaatttggacaaactcacaaaagtgatgctgatttagactttgaagaatttttagtaggaaaacaactcccgaaggagatgaaactttttctttctttactttactgtatagggtgattgaataacaatgcaatgtgttacaacttacaaatgctcacccaggtgcaaattaaggtttttgtttcccataggatgagattggaatctgcgtatcacttacatttgttgataaaattatgtttcatgctcaagcttaattatcttattatgttattcaatttaaatcatttactacttattggtttgtcaagaagcaaaatgtaccttcctgtagtcaattaagattttgaaacctaaatcatattacaacaactgtaaacattgtttaaaacttaaaattttcatttggatatagttgtactcaattaaaagttaagaatcatccaagccaggtcgtgggatttcaaataatggcatatttttgaaacagcaaactttctaagtcatgcgttttttttttttttccagcaaatttcaactcatcttgattaacataccagtatgccacatactaacaatgtttttccatggttgtttattgatagacggtcctt

SEQ ID NO: 107854 - DNA, 441 bp, Aquilegia coerulea
  Intron number 1 from transcript AcoGoldSmith_v1.002971m (l ocus AcoGoldSmith_v1.002901m.g) derived from phytozome v7. 0 (chr-ID scaffold_9; pos 6055059 to 6055499 reverse stran d)
tgtgaggtaatcaatttctatttctaatttggtttcttttaaaagcttttactatcttcaagtttataaatttgattgtaatcaatatatttgtgtttaattttaattctgtttaaaaaaattaacttgaaagtatgaaattcagctgttatgttggaatttatgttaagaatgagtttggttttagtttatttgatagagaatacacaaagattaataatttggatatgatataaataaattaatcaataaattacatcttcgaaattctgtcaaccgtatgttctttcgtttttccgctcttatcctgttgagttactataaactttgcgcttgtattgacgctgcaagttcttgccgttgttactagttccattttttgtctatagttgatattgtgttggaaaaattaggagactttttttttatttattgcagggg

SEQ ID NO: 107855 - DNA, 977 bp, Aquilegia coerulea
  Intron number 1 from transcript AcoGoldSmith_v1.006521m (l ocus AcoGoldSmith_v1.006521m.g) derived from phytozome v7. 0 (chr-ID scaffold_27; pos 3505571 to 3506547)
agaaaggtgtttaaagccggccattgttcttcgaagtaagaatcttgatctatttgttctgttttatgtttatatttgttttgattaattggatttattagtttttcttgcaaacaaaatgcatgatttagattttagatctaattatatgctttcaatctattgaaatattaacagaaaaggttttattatatgaatgtgaatgttgaaaataatgtagaattgaagaataaatttgctataaacgtgtcgtgatgtattcaaacataactttaatctttatatttggtgctttaaggggaatactgaaacggataaatgattctatgttgtacttaacaaaagactaaatgttgatattttccgaagtgggaatgtttgaacagaatgatagcaggaacatggaaatgtgttggatttggattaagatcatgtgagaaaagtaaacaacatattctttccaatgaaatttccgtaagaggcgctacaaatctttcattgaaccacctcaaaactcttaaatccagttaaaataattaatatttttcctacaaaaggaatttccaactttatcatgaaattcgtatgtattagatggacaaaaaaggtcagaaacgagctccttgtatttgtgccgcagttgattgttcttttatacagcttttcgagttagagtaattctatagataaatattcaatattttgcaaaccctttatatgttttttttttattccttgttcattgctggcttgccaaactgaatacaagtatatgacattagcatgctttttctgaatatgacaaaagtatgtggcacaactgtcatgctaatatattttttagtttcatatggaatttttcttgaaactagcaatttatttagtttttcctttttgcaccttgcattcaacaaagaaatgtgttgatactgagatcgctttttattgcaggttgtcaatataattatatatagata

SEQ ID NO: 107856 - DNA, 689 bp, Aquilegia coerulea
  Intron number 1 from transcript AcoGoldSmith_v1.021554m (l ocus AcoGoldSmith_v1.021554m.g) derived from phytozome v7. 0 (chr-ID scaffold_15; pos 822653 to 823341 reverse strand )
gaactattctcgcgttcttggaatcagaactccaggtacagtattcatgatattcacacacatcacacgcatgcaaacctactatatctaaaatgcagggaagaaaatgtattatgttttgccagagatattttgaggagctaaggagctatccttcaaagagaactagagaagcaccaatgtgttttcccctataaagacaagctgtttgtagatttccagacaaacaagattgtaattaagttttgccctctgggtacggcttggttacctgtaaataggagtaaagctttccttgttaagattaagcaacatattcttcttatttagttggttccaccaacaagatctctgctgtcattcaaaacttcaaagtttaaatgtatttgcagaatcgcatagtttgatatgggttttggttgtgaagccatctataccaaggcaaagaaaaagcctcgatcttgatcgatcacttttgactaccttaatttaccaagatatttaggatcatggttttgctcccattctgtgcaacactcagtttcacagatggttctctccttagatcctctactttttttttccgataaagtagatcctctatttgcatgcctaattctacacatattttaggtatcttattctgattttaaggattgtattttggtgttggggtatgtagttgttgg

SEQ ID NO: 107857 - DNA, 653 bp, Aquilegia coerulea
  Intron number 1 from transcript AcoGoldSmith_v1.012689m (l ocus AcoGoldSmith_v1.012689m.g) derived from phytozome v7. 0 (chr-ID scaffold_28; pos 2686283 to 2686935 reverse stra nd)
ctggaaccattgtgttagaagagttggaaacccaagtttaattttcccttaaaagtacaaaattgcttatgatataatatcatgttccacttagtaaaagtaaacttcttaatatgtattatttgagttctcgaaagagtcgattttataatgttcacctttaaaatacattctctataataataaataaatgattgtcgttatccttcttcattgtcaaatcaaaatgatgataatatgcagtgggtatattttggttgatcttagaggaaagctggtgactgtctccggccctggctttcatcttcccattccggagttcagcgtttctcttgttaaacccccacccaattgaaagatttcaatttttttaatataataataaaaaaaaaaaaacaagttctaaccattgtatactagcctttcttttaaaaaagacaagtgtttaatcccactttataaacaatgagaagctattttaaagatcacatgcgtagggtgcaatttgagcagaacagctcaggatctgctcgggcttggctcgtttttagcttggattgagcaagcttcttttctaaaggggtattttgtatttggtccctctagaagatgggtaattagcatttggtccaatatttatcgtttattagtaa

SEQ ID NO: 107858 - DNA, 765 bp, Aquilegia coerulea
  Intron number 1 from transcript AcoGoldSmith_v1.010335m (l ocus AcoGoldSmith_v1.010335m.g) derived from phytozome v7. 0 (chr-ID scaffold_10; pos 2762306 to 2763070 reverse stra nd)
atttaagaatcagattagtttctacttgaaatctccaacaatttggtttttcttttcatgttttgttatttttagtttgtgtggatttgtttttcagaattatttagaattgagatctgtgctttttatttaagaattgcacaaaagttttgaaggatctgtggttatgtttttttgaaattctatattgatgtgtgcttcttatgctgcctctccatagtccatacctcacctctatatatatgagtttgaaggatgcatgtctgatatgtctatgcatcttttgcttaatttgccaaactattatttataaaggggttgtaaaaacaaaatctgtaggtaattgttgaagagaaaaaagaatgatgagaactcaacagagagaaacaacgcaaaagagacgtaaaatagatcaaagcttggaacaacaacaagttcatcttctacctccacaaattatttacaacactcttgaggattccagcggagttcctcattgctttcaaggctgtttgcacgccttggtgcaaacttatatctgattctgaattcgttcatgcccatcttacttgtcatcaagggggttttgagcaaattcttgtagtcaaaataaaacatggagaatatgaagttatcaatttacaagaggttcaaggtcctactaagctcgagttgcgtcatcaccagctacagaatcttttgaaagatgaaatatgcattagttcctctcgggatggcatactcctccttcaaagaaaatataat

SEQ ID NO: 107859 - DNA, 713 bp, Aquilegia coerulea
  Intron number 3 from transcript AcoGoldSmith_v1.008657m (l ocus AcoGoldSmith_v1.008657m.g) derived from phytozome v7. 0 (chr-ID scaffold_1; pos 6908163 to 6908875 reverse stran d)
ccatcaagcaaatttgtcttcaagtatgaattctcaagcaagatcacacattattaaacacatatgtagtataacatgaaaacatttttgggcgaaagtatactaacataattgggagaagctcatccgaaactagagcctgggaaaaatagaggttaaaattgtttcgagaactttggttacacctttagctggtatcactagagagttcaatatacatcaaggtagatacaaattacaatttcaattgcaactttgcaaaattacaaaccgaattctgcatacagtcatgggggcaatgctatgcttgtagagtgataattataccaggacctcatgtccctctcaaagcctagccattatattaatcaatcatttgtttctctgcaagcttctgttttataccaagtatggcctaaagagtatataagaagagatcagagttgacagttgcttacttgctttctatctattggcttgagtgttaaaagatattctgcttcatttttgttgacaaataataccatccttttgatgatgggtattgaaggttcagttctagaaactgacaataggcttaattataatattcttatatcatttaattgtcttaaaattacaattttctgctgttgcttcattattcccagacgataaaatttgatgtctatttgctagggtggaatccagaaaaccagagcgttattcatcag

SEQ ID NO: 107860 - DNA, 793 bp, Aquilegia coerulea
  Intron number 1 from transcript AcoGoldSmith_v1.014813m (l ocus AcoGoldSmith_v1.014813m.g) derived from phytozome v7. 0 (chr-ID scaffold_10; pos 6032424 to 6033216 reverse stra nd)
aaacagatcggataaatatactaaaggtactttctttagtcaattataagcaagcaaagttgtctgctaggataaggttatttttgtgacatgctaggggatatttgttctcctagacaaaatttgccacatcgtattttaccctctgcccagctgttttaattgtaatttttcaaaatgttagacctttctaattagtgtaacgcccaaaatcatgcatatttatttgtttataaggtggtagctcctgatgcaatatatagtctctactctatgacatgacctcattgaattcagataaatatttgcagttgctcttgctcaaagttgttctttttactgatgttaggttgagcaaggaaggggaatgtgttcataactatatgatggttatatctattttgtgtgtttattattgtgttatttccttaatttgttttatgcgaaactgtatgctcctataccatttgttaatatcctcacaaggaattttatattaaatctcgattattctgttatacttttttgtcaccctggaagattcatcccttattaatgtctttatttatctagtcatggaaaaaaaaaaaaacaatggtggcacataggttggtttgtaaatttcttcaagaattggaatatcaggatcattaacattcttctgtcttccttcgcaaaaataaaaactttctgtctgacaagattctctttgagtgtcctaatcattcatgtattgctatctttctttccatttaaccctgtataactcctgacacttttgcttcttccacag

SEQ ID NO: 107861 - DNA, 637 bp, Aquilegia coerulea
  Intron number 1 from transcript AcoGoldSmith_v1.007114m (l ocus AcoGoldSmith_v1.007113m.g) derived from phytozome v7. 0 (chr-ID scaffold_15; pos 3551051 to 3551687 reverse stra nd)
tacaattgaacggattcacagcatcattcattcaggtaatgtaatgttaagctcaaaatacaataatgtatcaagatccaacataataatcataagcagaacagtgacagtagttttgtccatatggacaaaagcaaggacagacgcaggctattgcagctctggagattttcgtaatttaataatcgctactactttgcctgttttaccctccagacaagtttagtgataattttatgacttataagttatatcaaaccattttgttatttctctgtaagaattattgctgttatcatatgtttgttttgacctttgatcaatcctgtttctttagaattaccttttagcagtataagttccatggtttttataatcatttggtttgttttctaaatataaacgacacagtaatcatcactctacctttttttctttgtcttttatatgttttattatattttatttgcatatggtagttacatagattttattcattgttctttgcattgagcaaacttatttttctttcttctagagcttgttgcagtttaggcttacccatatttttttttctaactttcatttttgatatgtttcaggttagggggtctattccattcttgtgggagcaaat

SEQ ID NO: 107862 - DNA, 511 bp, Aquilegia coerulea
  Intron number 1 from transcript AcoGoldSmith_v1.004959m (l ocus AcoGoldSmith_v1.004958m.g) derived from phytozome v7. 0 (chr-ID scaffold_10; pos 346752 to 347262)
acactctcaatcaatatcttctcttgtgctagcaggtaagaagatgattgaaactattcaactgattgaattacttagtttaatttttatttttttatcattttctcatgtttttaaactgagcaaagataaaaatttgacatttttcatgatttctatatctaatagtgctgtataatttcgaattatagaatgaaatatctctacttttggtagttttgatttgtggggtttgataattttttgtttatacatacatattgtttgattaattgcctcaaagatattaaaaaaaataaaaataaaaataaattgttttgtgtacatttgtgaatttatatggttatgagatatcgttgcaatgtgggttaagctcaatacagtgttaaaatagtcgctttatcgttaccaatcaagaatgcgtacattttattagtgcatatgcttaaattcaagtagtaattctgcttattttttcatttgtttaggaaaggattgttattgcatagaa

SEQ ID NO: 107863 - DNA, 153 bp, Aquilegia coerulea
  Intron number 1 from transcript AcoGoldSmith_v1.005301m (l ocus AcoGoldSmith_v1.005301m.g) derived from phytozome v7. 0 (chr-ID scaffold_9; pos 5117474 to 5117626 reverse stran d)
gcaaggttcttcttcttagatatttggatttgcaggtaaaatattgacccatgaattattttggccactcgtgtctatgttttcttgtcaattttgcttttacttatctgaaattatttgtttctcatgttactctttattttagggatcggt

SEQ ID NO: 107864 - DNA, 1057 bp, Aquilegia coerulea
  Intron number 3 from transcript AcoGoldSmith_v1.013273m (l ocus AcoGoldSmith_v1.013273m.g) derived from phytozome v7. 0 (chr-ID scaffold_11; pos 4639378 to 4640434 reverse stra nd)
gattgggtcctagtagatagtgcaaagggtggaaggtatgtaatactcttctctagtgttgtatttatcaagattcttttgagatctgtatttctttgtgcatagtcattagaccacattcctgcattgaccctttgtttctcagtcttcccttgatcaggggcattttcttttttactagagattttcaattgttacttcgaatatttgcacatgcctgcatagtaaatttctcgactttatatagtaaaccctgcgtcttttcttatattgcagaaagagattaattcttagcaatgtggttacctaaatttaatgctctactaatacgttttctcctgttctgttgccattcacccatctgtatataatcaattttctgtgtcctgctcatatttcaatctcctattttggattttcttcatcttctattggagcaatcttgtaatctgtatatatatatatatatatggaaaagtcgtgttttatcctctggctgtttagtcagtggcttcgtaagtttgagttggcatctatgttccagaccatgttccatggtatatgatgctgtttgtatatttttcatgagttcgactactggtatgatattctattatatgtatttagctactaatctatatgagaagtatactacactttcatttacatgtagacctgcttggatgtgccaatttttgcaactatgatataagattattagttgaatcagttgatgacttgatgctgatcgtccaagctgtcaactttgcgttctgctagcataaaaggatgcagttatcatcaaattggatgatgtcttgtgcagcaaatgtatgctagctatacatattagtggctctttacctccttcgggtgccatatttctttcttcccttctatctttgctaaatccttccatcggaaattggatgatggtcattgcgactgttttgttaaattttgcaaggaagttggggctttgtctagtaagattttcgaaatgttgatttatatgtttgcagtggtaaaggttttaactggacaaagttcaagctac

SEQ ID NO: 107865 - DNA, 735 bp, Aquilegia coerulea
  Intron number 1 from transcript AcoGoldSmith_v1.006815m (l ocus AcoGoldSmith_v1.006815m.g) derived from phytozome v7. 0 (chr-ID scaffold_12; pos 3898052 to 3898786)
aaagaatcaaaggtggaatctttcttcaaatttatgtaagttttcgacaaattttccttgtttcttttcgattttatctactactaatacccatttgaatcaaaataatgatggaaaatacaaatttgaagctaaaacaaaaaccccacttgcgaaagagatatttagaatgggttcatataagcaaggtgattcaacattttataatcacattgagaattttgcgaatttgggtgattttatgtcgttggaaagtgttttagatcaaatgaaacgagaacaaagagtgttaactgagaagatatttatagttatatttaaagcttatggtaaagcacatttacctgataaagctttggatttgtttaatagaatgtttgaggagtttcattgtagacaaagtattcgatcatttaattcggttcttaatgttctaattcaagaacattgttttgatcgagctttgttattttattcaaatggtattgaaaagggtattttttcgccgaattttcttacctttaatttgattattaaagctatgtgtaaaatgggattggttgataaagctatttcaacatttcgagagatgtcttataaggattgcactcctgatgtttttacttatagtactttaatggatgggttgtgtaaggaaggtagaattgacgaggctatttccttgttggatgagatgcagattgagggttgcttcccaaaccctgtgacatttaa

SEQ ID NO: 107866 - DNA, 567 bp, Aquilegia coerulea
  Intron number 1 from transcript AcoGoldSmith_v1.001649m (l ocus AcoGoldSmith_v1.001649m.g) derived from phytozome v7. 0 (chr-ID scaffold_30; pos 319170 to 319736 reverse strand )
cgatatcgaaggtaatataattgagatttaatgattggattttgattagaagatatttagaaagataaaagataaaaatttgtttttataagaagctgattgttctattgaagtattgaagtgttatttccattttgggttgaaagtatcaaagtaaggattttatattgtttggaggtgaagaactgtacaaagatagagacacaattaacttttcagtacaagtttacgcaattttattttcaagaacatccagattgaggtttagatatatgcctttttttgatggagtagatgattattttatccatgacaaggcactttatattatttaactgcaggcttttgatcaaaagcttacataaattattcagaaactttcaagttgaagttcagatatagggtcattgtcatgggagagataattattttataaatgggaactgaaaaagtgaaaagatgatttagatttggtgggattggtatagttgttaattgaaagagactcaatggttttaaagttttaatatgaacctgtatatggtctacaggtcggtgagttctctg

SEQ ID NO: 107867 - DNA, 524 bp, Aquilegia coerulea
  Intron number 1 from transcript AcoGoldSmith_v1.006388m (l ocus AcoGoldSmith_v1.006388m.g) derived from phytozome v7. 0 (chr-ID scaffold_10; pos 1436690 to 1437213 reverse stra nd)
ttcttggctggtatgtttttttttttttttccaagaaaatcccatgtttaaaaatggttaattacttaatttttgttagtataaattaaagtagtgaattttctagttgaattgaatgaatgagatccttgatcaataggtttataggtgttttcttgtaagtttatcatgaaatgaaatcccatctttatattttgcttagttgatatgaaataggcctaattagtaattattaatatcatgcatggttggaatttggaaagaatgttaaactgtacatgatggagtagttattttaagtttttaacccaattataattgaagaaaagttgagtttcaagtactgaagaacaatggtgtcaatgtgtcatgggttactttgattttgatccagtccgagaagctgtgattttttatatttttatatcaaaatttgacgctgtcatacttgcacattattaatgttggtttggtttctttgatttacaggccagtgatcactattgtttatcctttgtaagtgg

SEQ ID NO: 107868 - DNA, 950 bp, Aquilegia coerulea
  Intron number 1 from transcript AcoGoldSmith_v1.000430m (l ocus AcoGoldSmith_v1.000430m.g) derived from phytozome v7. 0 (chr-ID scaffold_30; pos 1451439 to 1452388)
gtgggtatcaattgccaaagtggccattctatgtaaacatcacaatgaatgtacacccttccaaaaataataaaaaaaccaagtgaagtcccacagtctgtcttgtagattgtcaattatgttcaccccacatccattgtccatttgagccgtgaatactagggaaccattcaattccattatttcaggttaattgctgctgctgattctgtagtataggtaaaaatctccaattttcacacaattaagaaaatttcgatcattggaaatattgaactagtgaaaattaacatgtgataccccaaaatgccaaaacaacaacaaaattttgacctattcgtgcaaagtggacccataccctaaaagcttgactcatttttgaataaactgaaattgataaagcctttgacgtcctcaaggtcaaggaatctttttctctttttggcgggtaaagctttgttttatttactgataaaaccccactaaaacccaattttcccgctctcccatgctactttattttgtgttctgccacaaaattaaaaattaacaaaaattaatttcctttacagttaatggtagtagtagtagtagtgacaattttttttttttttttttaattagggttttagctgtttgattgatgagagaagaaacaagtgagttagagtttccacttcacttccagtgtaccaagtaccaactacttttacatttattaattacattaaatgccatggaactgagcacttgatcttcttcttcttcttgatcttcttcttctactactaccacctgtacttttttttttttattctcaataattaactatgaagaagaaagaaatttggtgggttttagttgtaatgttactctatttactagatttatgcaaaccccttcatccatcacaagacattttagcattacttgagtttaaaaagggtatt

SEQ ID NO: 107869 - DNA, 700 bp, Aquilegia coerulea
  Intron number 1 from transcript AcoGoldSmith_v1.008263m (l ocus AcoGoldSmith_v1.008263m.g) derived from phytozome v7. 0 (chr-ID scaffold_9; pos 5124150 to 5124849)
gcactggtaaggttttgtaatacttatctcatgttttggtcaaattatagttagtaattagtatgttaatgaaaaacactcccctttgaagcaatttggagtattgaattggcttttcttgcatttcttggattactcaccatttattcacttaatattagcacaatgtgatcatggtagggaaaaagctgaaatatatgttgggtattgagtatttgttgatttattgtaaaggactagactcgatttaattgttcccttgtatttgtaacaatttttagggtggaaaaccaaaatatttaggtgaacaaggaaggtagttatactagtttgcgtgattagaatatgatggttaatataataatctggaagtgaaacaaagattgttcggctgatcccttatttgttcgataggtctttggcagtgtttaagtaaaacaattgagagatttctgtattggcttaagtaccctaagaacgtgatttttttcgtatgccttattgtgaggattggtttatgaaaatggataaaatataaattttatacactcaccattctttgtaactggtatcatgttcttctcttcatatatacatagactacctcaataatgataaactgcatctatctgtaataaaatgtttgccgtctgagttttgtgtagttgacgtgatacaaattgaatcctgttctgaaatc

SEQ ID NO: 107870 - DNA, 777 bp, Aquilegia coerulea
  Intron number 2 from transcript AcoGoldSmith_v1.015429m (l ocus AcoGoldSmith_v1.015429m.g) derived from phytozome v7. 0 (chr-ID scaffold_37; pos 1279884 to 1280660 reverse stra nd)
ctttgatctacctcgacgtggtaatttcttttctttaaaatctcaaataatttcacaacatatataattatcaaacttgcactaattatattgcttccctaccatgagttcaacaattaactactattcagacaactttgataaaattaaaatttgtttactaatggtagaagaacaccactaaaaaattctgattatcaaaaaaaaaaaaaaaatgttcttaggtaagggtatgcatttttttcttcaccaactttttaatccaacatcaccatgtagctcaccagtttcaccaactatatcccattattgatgcagcagcctctgttgtatgtttaccagtaattgcaattatcttatacttgatgagaattagtaagcaagtttgtacattttttcttataacatagcataccattatactagtactaaactactaatatatgtgggagaatgtcattatattgaatgattagaaaaacacaacagccatgaatatgactattccaccaagaattgaccaaggaagatcaccaataatacaccagtcaatggtcctgtaaacatcttatatgctagaaaatggccatgtacatacattttttttccagtacatacatgctgtggagaaagacgtgacagtttacaatgtatgatattgttcttcaaattattttattggcaacctttacatattttgattctaataaaactgtaatttatttattttttatcattaaatttgtttttcttagtagtctccaaaggcagtgaagt

SEQ ID NO: 107871 - DNA, 577 bp, Aquilegia coerulea
  Intron number 1 from transcript AcoGoldSmith_v1.000949m (l ocus AcoGoldSmith_v1.000949m.g) derived from phytozome v7. 0 (chr-ID scaffold_9; pos 5981062 to 5981638)
ggagctcgtaagtgttgcttattttaatgttatgtaacttgtttctatcttcattttccggttcatacttgtagtgttattgaagtcgacttttagttttatcatatatttgactattgttcatgaattgagttgggctttagaaaatttcagcaaaaattatatgagtaggttttccatgattattagctacattgtctttaataatggagctttaagtgttatcttaaatattgatctacaacaatcagggagtaagtagtggaagagctctaatgatcagggaattcgataatatacctttgagtcttggtgtcatggtttttaatattttttactaaaagtgtgtttgttcccccattgtcgttacaccactgtgcaatcccaagtttgatttttcattccgcgacaatattacagtttaatgcacttttatgtgtctagcaatctagccactaagaacaatgccaagattttcttgtgttaggtatcttatcatatgaaacacttcttaatttttgctattaacaagaagagcttctagcgataacttttcttgctgcaatctgctgaaggt

SEQ ID NO: 107872 - DNA, 403 bp, Aquilegia coerulea
  Intron number 1 from transcript AcoGoldSmith_v1.022865m (l ocus AcoGoldSmith_v1.022865m.g) derived from phytozome v7. 0 (chr-ID scaffold_9; pos 1787074 to 1787476 reverse stran d)
gaatattgtcactattgcagtcagtaagtttttggcaggcatattacgacttttgaacctattgcaataactcttgttttggtttttttttttttttttatttattttgttacatactagtttccactgttcgtttaaatttttttatttcttctagcttgcaagtgttattcccggacatatataaattgcagacatatacacaatataattcaatccatagttccatggttaatgtgttaataagagtaatgatcggaaaaagaaaaaggaaactgcaagctattaaaaactcatattttcacaaaatgtctaccttaacttctatatctttaattttctcccactggatatttggatgctaaaccccatgctatattttcaaacacagggaaaaagagta

SEQ ID NO: 107873 - DNA, 918 bp, Aquilegia coerulea
  Intron number 1 from transcript AcoGoldSmith_v1.024085m (l ocus AcoGoldSmith_v1.024085m.g) derived from phytozome v7. 0 (chr-ID scaffold_11; pos 2788324 to 2789241 reverse stra nd)
gtggcagttgtttgggtaataccaccaatcctctttcacaatttgtagtcaatttaggaagcagaaaactaatgagcacctatacatagtagttgtttccccggggtttttgagtatttttcacattctgagcacctaaccgccatgcacaatagtatacacaatagtttacgcgaacggcggttaagtgcttagaagagcgcctgaatactttaaaagatgttagctcaattgtgttgcttcatgtctgatgtctctttccacctctgtatggtaccccatgaccatgatatatagctggcaggattatattacttaattgtctatggatactggatagtattagtatctctagtatgatagtaagtggtaaaataaaaaacagaaaatgaccaagatattttttatccattttgatattgctaagcaatatccgaataagtactattagactaggtttactgttttatattagacttattcaggtttgttccagggactaagttataccaagcaagatccaagtgagtctatacagtattgtacttagttctataaaaatgcacaaatttgacttggtttacactctataaacaaaaacagtatatgttaaagaaatatattacagtatgcaatctataaacaaaagaattgataaaattatgttgatgtaactgttgatcttaatattattgtatgaatgcttattcagctatattctcttgccagaaactacctttattttcttgatataatctggacattttctctactagattcatgtatgactaggtttacgacaagagtagcttgtataaatgattcaggatgtggtcctttatactataataaatggggaccatgattatgggagttgtttaaacatggattaaattctttgtacttgggctgcaggag

SEQ ID NO: 107874 - DNA, 882 bp, Aquilegia coerulea
  Intron number 1 from transcript AcoGoldSmith_v1.012794m (l ocus AcoGoldSmith_v1.012794m.g) derived from phytozome v7. 0 (chr-ID scaffold_37; pos 1611763 to 1612644 reverse stra nd)
cggtataatctaccttaaacaatttttgtttggttttattcttagaaaaaaattgtttaatgcatttgctcctttatggagaggataaaaggaaaacaagataaaaggaatttgtatcatagccctcaacagcgtgttttgcgtaactaatacatttcttgttgatgatgagttcttgtttgtatacgagttcccacgaggtttgacaatatgcacttgtcactgacccttgtatcttcagaaggacccagaaatgtgtccatatataactgttgaaaatgttaagtattggcttttaatttttggtttagcctagttacagttattttaagcccttcagaacagaaaagacaaaatcatgtaaatgttatgttgtactgttctaatattggtcatttaaacatgtactttccctccaaatggtgatacctcctcagtatattagcagtttttttgaggccttgagggaacttgtccactgtgattattgccattatggacactttgatttctagttcatcctacaagctacagcgcataattatttacttgtgaagggcatttactgcttctcccatatgtcttcctacttgttttttcaatttttggaacctttcagagaagtcaaactaccaccttcatttactctcaagacctcctttagtattctaagatgagatgcagagatggtacatccatttgatgcatcaatatgctagttgctgtggagtgtggaccttgtgtgaacaagttttatctttacccgttataattttcaaacggcacttattaaggaaaggtcatatcttagttggtgtgacaaatatgcttttttcaaatctattttatctatcatctttatatatttaggtaaacgtactg

SEQ ID NO: 107875 - DNA, 202 bp, Aquilegia coerulea
  Intron number 1 from transcript AcoGoldSmith_v1.004332m (l ocus AcoGoldSmith_v1.003615m.g) derived from phytozome v7. 0 (chr-ID scaffold_9; pos 1954136 to 1954337 reverse stran d)
ttgccgcttcatcgttcctcattgttctgtttaacgtaagtactttcttcccttcttctgaatctttgtttttctcaatgtttttgtttataaattattggaatttttattcttaaaccctaggggttttagttttatcaaaacatctaacttgtctacataattaggtagtcgaattgctgtagtagcattagcaccaagg

SEQ ID NO: 107876 - DNA, 888 bp, Aquilegia coerulea
  Intron number 2 from transcript AcoGoldSmith_v1.015250m (l ocus AcoGoldSmith_v1.015250m.g) derived from phytozome v7. 0 (chr-ID scaffold_54; pos 1394735 to 1395622 reverse stra nd)
aggtaagcttgattgatttgatctttctgtgttcattttaacttaagtttccatttttcttgttaaataagtttaatttgtgaagatttaacgataattagtttaaatagtttatgacttatatatgatttctatggcttcatttttattaagttctggatcagttgatttgacagaaaaaaaaaatctaaacttttagataatttgttgtggagcttctataatgggctaatggctgatgggataacttttagaaaagtttttaaaagactaccccttccaaaaggcatgctttttaatactggaactgtaataagtatatctggatcaggataaaatgccaagactggtgattatgttgtagtggtttattttcttaacaactcttgttgctcttaagtttaagtaatcacaacaagctgttcacattatggtaggggtagtagtatttaaaaagcgcttattgagaacgttcatacattggaattcgtggaattgcaagctgaagaagaaaatacaaaagaccctttcctataccctgactctttaactacatttcttaaaacacagacaagattctaaaataagtaataaacatagaattacaaactaatagacaaactggatctatttggtttcgtattaggctcatgagaggcatgttttgatgaaaactgactcaacctgtgcttgactgagttgacctggtcctggacggtgaaattgatcgagtcttggatagacgagtcaactagaaagcaaatatttctacatagttgtacaaactacaagttgactgtagtatatgtgtgtgtgtgtatttttgtgattgaatagtatatcagtatgtttttaagaattttttttttgtataacagattgtagtgt

SEQ ID NO: 107877 - DNA, 1017 bp, Aquilegia coerulea
  Intron number 1 from transcript AcoGoldSmith_v1.011535m (l ocus AcoGoldSmith_v1.010839m.g) derived from phytozome v7. 0 (chr-ID scaffold_27; pos 3015901 to 3016917 reverse stra nd)
ctctttgctatcttgcttgcttccctccttgatctgtaagtctaatggtttctgtttctcatttacatatgttacgctttattatgtacttgatttgatgagattttgttggtaggctttagatttggtgttattgatatgtttctgtgttgtgttggttgatctactgagatttggggtaattttcttagttatattgggatatgtttttttatttttcagatcgaattaagattgcaattgttttgaattatttttaatgagatcagcttgtaaatctgtaaaatttgtgcttatgatgttttgcatcataattgtttgatgcaatgggtctgtgagttaagttaattattttacacatgagcaatgtagtgaagtaccgaagttgggtgatggttagatttgagaaatatgtaaagcattgtaatgttgtttgttgagtgtattttactaaaatgattgttttgaaagaatctttagaaactttgtcctagactaatgttttatttgtagaattacattcatttttgagtttacttgattagggaagaaaaccccattagtggaatagtggttcgttggtttgccatagcagatgaatgcaggatttttttttttttagaaattttgaagttcttaatgtgtagtgtctattgtgggtttcacttagattagtagaatgcactttttccgtgttgatgaggatagtagtcttcttatttttggatctcagtttctttttaaatgacgcgacgatgatttattattttttttttttgaggggtcagtggttgccaaacaaataaatatatgttggacttacttttgtgtagaatatgggttcctgtcaggttggatatgcttctgttttgtttcgttgatcaccatgattctttaaatttttgcatgccacccatgtactacttgtgtccttcattttgttgatggttctttatatgtgctggccgaattttatttgcagattcctacttgaggttgatctcattactctcctga

SEQ ID NO: 107878 - DNA, 721 bp, Aquilegia coerulea
  Intron number 1 from transcript AcoGoldSmith_v1.000790m (l ocus AcoGoldSmith_v1.000790m.g) derived from phytozome v7. 0 (chr-ID scaffold_30; pos 2618310 to 2619030)
ggaagacagtctcagttaatcaattccaggtatacttttttatatcttgatttatagttttttgtctgtgttatgtttaatgcatgaatgtttagcagctttctcttgaaagaccagattctatagacatttttatcaaatgcccttcgtaggtgacttgtggtgcatgaattgcttaatccatctttcattgattttgcgatttttctgtttatacttttgacattttctcagtactgctctctaaaaaataacctatgataagttcttttggaattgcttgaccaagatcttcccaaattgaacttgataacgttgagttgcagtgttgcacacctgtagtaccaaactgaattttgaatctatatcctttatacactttctgcttcttgtgtttaagcgtattcgaatgttgatggatgatagaaatcacttttcttcttataatggccagtgccaacatcgtaacatgttgcacaatatatccaagatattggcatcaattctatatacaatgctgcattatgctttattaattattatcctctcattaggagaatgaacatttaattgttgtgaatgtatcatgttgtatgacttgggtaccaaaatttggctcaccaaatatacaatcttatctaatgcatttggtcggtttacatgaaacatgcttcccagttttttacatataacttatgcttgaatcttctgcaggtcaagg

SEQ ID NO: 107879 - DNA, 552 bp, Aquilegia coerulea
  Intron number 1 from transcript AcoGoldSmith_v1.000950m (l ocus AcoGoldSmith_v1.000950m.g) derived from phytozome v7. 0 (chr-ID scaffold_10; pos 2538070 to 2538621 reverse stra nd)
aactgaagataccacttgtttttgttgtatttaaggtactttttatcatttctatgttaattttttagtttctattgaagtaattttagtcttagaaatggagatttggggtgttttgggtgtgaagaattggtcaaaatggataatttctacagttttttggctttgggagttttgggattttgtagttagtgaagaaggtttaaggatttattggaaatgtagtggattttgtgtattagttgacattaaggtcaccaattatggtagtgaattgcttgaattagttatttttcgcaattttctgctgtttatgttcaattctgggggtattaggtggtgattttggtttaatcttctgtttttgggatttataaagtgacatttgaagaagaagattctaattttggagtatttttttgctttttttagcggtataattgttctacttatattggatatttgattgagatctaagtactgtggttggtttttggtatttcaatgtttctgatttctctttttgttgtgttagattgtactagtacttgt

SEQ ID NO: 107880 - DNA, 877 bp, Aquilegia coerulea
  Intron number 1 from transcript AcoGoldSmith_v1.005334m (l ocus AcoGoldSmith_v1.005334m.g) derived from phytozome v7. 0 (chr-ID scaffold_15; pos 4408389 to 4409265)
ttcttacttctgctaactcacctaacggaattcaggttcgttctctaactttacatcttcttcttcttgtaactgtaacgacgcgatatttgtttagtttcatgatatttcgcgagaatttcagttacacgagattttcgttacataagcttccacgacaaaactgttatcgtgtacgtttcgattgagaatacacaactgtaatcttggccttatataacgccacgtggcgtgattttccaagtaattacactttgtttttttattgggaaggttagcttaaaactcacttttgttttattaatatggacattatgtgtgtcgttagtgggtttgaaatggttggaggaaaagcaagttgagtggttagctggtgacttagtggttacatctaattaaaccaatcttaactactctattaagcattctttgtaatattatgatgaataaatcaagtcttggatccctgtgttctgtcatctgtgctttcgtatgatgattgttatggagaactttaagatggggttgcatttaagtatatggtatagtaatggtgcatatatacaaaatggtttccttcatcaaaataaaaatgtacaaaatggttttcgaacctttgtgcaaaaaatttcatacatgtgcatcaaatgcttggaagtaggtgaatgctacctttgtgtgtgtatatatgttgcaaaatgtgtcctaggggaatatttgacagaatttagctgcattgtctcttagcattcatattgttgaaagagacttctaaatgcacattttgttgttcacttttgatcgagactgtactggatttcttctaatcctagtttgttttgcagggtttgctgcagtactttaacctggtggaggg

SEQ ID NO: 107881 - DNA, 578 bp, Aquilegia coerulea
  Intron number 2 from transcript AcoGoldSmith_v1.001586m (l ocus AcoGoldSmith_v1.001586m.g) derived from phytozome v7. 0 (chr-ID scaffold_7; pos 653552 to 654129)
gataaggtttgcctctaatttctctttggtgcttcagaaattattgccaaggaaaccattttgtttcatacaatatgttttggaaaccggctttattaattgcaaattagcatgtgttaatatatgactattagatcagtttcacctgaaccagaaactgaactcacaaaaaggatgaaggaatccccaagaagtggaaattaatagaaatatatacttatagaaatgaagcagtagaccaaagacagaatttacccatacgattgtgctgacggttgattggcccttagagaaaattttcccttggctttaaggctcaagccaggagaggcacatgtgtgcatgagatgaaccaatttatagtattgattcatctgcagaacaatgaaaatgtgaagaaaaaacaaagattttgttatgcattctctgttttcaatcttttcatcaaagcagcattgataaaaaccagaatttggcaatcaatcttggtaatcttcgttatatttactcaaaaagtgatttaattgtttgactactgtgggtttttgttttttttttccggtggtttcagatttacc

SEQ ID NO: 107882 - DNA, 783 bp, Aquilegia coerulea
  Intron number 1 from transcript AcoGoldSmith_v1.000510m (l ocus AcoGoldSmith_v1.000510m.g) derived from phytozome v7. 0 (chr-ID scaffold_30; pos 2504328 to 2505110)
gaaggtattattgtttttttttaactttaatgtaaacaagtttgtttcttgcgcaatccattgatatgattgaatggtatgcttttgttgttgactgatttgagaccaactttggaaattattatcaatagaaatgtcaccacaattattgtgttaggacctccctcaccaaatacgctctaatggtttgtcagaccgtgttttacatccaatgcttaagctcatgaattcaggatattatatcgaaaagagataaatcaaaatttaaactgaaatggaatgattaatcaaaaaccaaaggaacatgaacttctacaaaaagcacatgataaacaatcaagttggcaatgaattgatagacatgtgtcagtctgctaagtaagtttatcaagacaatgtttgaacagagaaactccgaatctaatttgtaattcttaatcttatcagcgagcgagtggtaactgaatctaatttgtacatgaactgtggaaccatactagaatgaagactccagaaactagataaatgtgaatccttgatttgacagttcatgagtctatcatagttcagttgttggttgtatcccgcctatgctattttgattgtacacgctgtgtttaatattacttaatctattctaaaactaatagttggttagttctaatgagctattcatgttactacattcctttgtttggtaagttgctaaatctatacgaaacgatattcttgttgttcattctctcaggacctcaaaagctggaaaccgaaacgaatagctgt

SEQ ID NO: 107883 - DNA, 655 bp, Aquilegia coerulea
  Intron number 1 from transcript AcoGoldSmith_v1.003026m (l ocus AcoGoldSmith_v1.003021m.g) derived from phytozome v7. 0 (chr-ID scaffold_15; pos 712337 to 712991)
atcacattactcaacaccagactactactgataaggtttgatcttttttcacttcaagttttgtttttttatttaattaacttactctaattatcaatttctcttgcaattcaatgtaatttgaattgaaagtatgattattgcattcaattttctatgattatatgttatgatttaacttgcaagaggttattactagtgtggtcgatttttgttgtgttatacttcatgggtttaatgtgaattgagaaacagaattgttattcttgctttgttctgctgccatgtacattattaatatagtttgacctaaaaaggttttcatcttatctttgttaatttgagggattttcaatccatggagacagaagacaactcttgagtccacaaagcaagtaaaagggtagcaagtgatgtataagaaaagttattaatattgaagtttttaactattacaagttaagatcactcccgtttaataatttcgttatgctctgatgagcagaacacattgtaaaatttatactgtatctatattaaaagtcagattgatttatccttgccttcatcatacgtgatatgcttaaattaggatccgctaaaatgtaattggcttgatttatgcagtttctactgtttgggtcgttcactgaag

SEQ ID NO: 107884 - DNA, 779 bp, Aquilegia coerulea
  Intron number 1 from transcript AcoGoldSmith_v1.025583m (l ocus AcoGoldSmith_v1.025583m.g) derived from phytozome v7. 0 (chr-ID scaffold_9; pos 6223666 to 6224444 reverse stran d)
gaaagaactcatcttctggttcaaaccccaaagtttgtagtgctgcaaggtttcacactattgcatttgcagtaaaaatcttaaatttttttttatcttttgtctcaatttgtacaaatatatgattgggtatcaatatattattggtgattttgttttgatcttttttttttctctagtttgcaatgtattttggaaaatgccgcagcttggatggaaactaaatcaaaagaagggtaaggctcaataatgatttttgtggaattcttatttttcaattgttaagtgttttgctaaataatcaatttcaatatcttctctacaagattctgagagttgttccatgattttaaccaaagttgtaaaagttaaaaagttgcactcaatgtgtttgatatttgtactaaaagaaaattgtatacaggaaattcattcttctacatgatattatgtttccaactgaccaacttggattttacttcaaaaatatctgcttgatttaaaccaaagcttaatgaggacatctaacataaaacagttggttttgtttttcacagtgacatgattaaaggaatgcagataagcaatgaagtgcatcgaagcaagcaccaagaccacgagcagtcagccgatatatccacatcccaaatagtgcctcttttgagatacttactcgtgacccaatcagcccacagggagtttttgttgttcacgaatcgccagaacagcttcagttgcccaactttgttccaatctagcttccacacacctaacgaagg

SEQ ID NO: 107885 - DNA, 834 bp, Aquilegia coerulea
  Intron number 1 from transcript AcoGoldSmith_v1.001937m (l ocus AcoGoldSmith_v1.001937m.g) derived from phytozome v7. 0 (chr-ID scaffold_10; pos 2977297 to 2978130)
gagaccctcgcaaaggtactctatatgaatttttttatccttgtgcgtgcaaaacatgcttaacatttgaggttttgaactaatttatattcaaaggtccaaatcctctctccatcaaattctaggcatgatactcaggactggcgtaaatgcttaattagccaaacattttagagtctttagataatattttgacagaaatgtgatgaattgcaaggcacagtaaagcacaattaatgcaacacatcataaccatcttagtttaagtatttcagttcttcaacaaacaggtaacacaatctcccatcaactaagggctgaataacatattcatggataagtaataagcagtagatcctacatcaagagtgacctagttataatatgctaaaggtgtacagagttcaaatacacaacgtatatgttcaagcaaattaggtgtaataaaggcaatatattcagcattatagagtacatttaatgaaatgaggtaattcttttcccttctacagtcttaataagattgcaacttatccaggaaaaaaagagtacatttaatgataaatgaaaaccttcattgcattgttatgtctgtgttaattcgaggttaaaagaattatgcaacaagaagaaccccttaggaatctcatgtctttagtgccattgtaaacatacacacatatgcaccaataccacagaactagtacctacatactatttattctatcttgtaactgtgtttctacgctcataacatggtaaacctatatactcttggaaaatatgtactgacgatatgcaacttccaatgtttctatgaaggtaataactact

SEQ ID NO: 107886 - DNA, 897 bp, Aquilegia coerulea
  Intron number 1 from transcript AcoGoldSmith_v1.026067m (l ocus AcoGoldSmith_v1.026067m.g) derived from phytozome v7. 0 (chr-ID scaffold_54; pos 1357272 to 1358168)
gagttgtcaacttgctgtttctcataaaaagcaaggtgatatccaagtaccattttctaccttatttcattaatttttattattcaactcaattacatgctacctgataatatgatgtttattgctttctttgatgttatcacacatacttgtcactaataatactgttctgattgatcgattgatatattgttcaaagaagatgcatgaattaatggttcatgatgaatgtatagtatgattcataatcattttaattgctagttcattgacaatggtttcatatgtgtaaagttttgtcatcttaattaattttctttcattagtgatcagatttagtaaattgatctaagtgtatcgagacacttaagataatactccgtaaataattaaacacctacaaatccaaaatcaaactaattcaaatgctttggttattggtaaaactttgttacattgtggtttatgattaggattccttaattaggtggcccatacgttgcatccacatccaagtatatcttaagctggtttaaacttttttgttgttggttaaagttggtttgcactttgaactttggaatctcttgatgaattacttttgcagaacttttactactccatgagtaagcataaatgttgtatacttgtatgtgcatgcaggccatacagttcatgtgatgattctgagtttctgattttgaagcataagtaattttgtcctttagattgaagtcattgaacaattctatcctttttgcctttacttattgttgaagattgatcatcaaaaagtcatgaattctaaataattttgaaatcacatatttcaatggataagatttgaatcaagtttcaatatttcttcttgaattgcaggtgaaggaaaagttacat

SEQ ID NO: 107887 - DNA, 809 bp, Aquilegia coerulea
  Intron number 2 from transcript AcoGoldSmith_v1.008356m (l ocus AcoGoldSmith_v1.008356m.g) derived from phytozome v7. 0 (chr-ID scaffold_18; pos 614924 to 615732)
ttgctgaaaggtatgtcattttcaaaccatttttaagcattctcgactatttaaatgcaagtcattgcatctgatgcttggtgcacctagggtttcaacatttagataatgctttgtgttatgggggaagacagactacaaagaacaagtgtgggatagatacacatataactgaaataatagagaggccagagttattctgaaactggctaaaaagcacggagctattttcttggattccacattttctgtcatagacatataatctattataaatgtgaaaccctcgtaaacatagacaatagttttcttccatttggctgcctgaatgtttttaccctctgaaccaagtggaggactaacctacttttggtttgagatgggtggtgggaaacagaaacatgttgcttccacttatagttccaacggatcccttttttttttattgtttttgtctgtataagtatattaattcttttcattaaatccaaataagtaaaaaagtttccttctagtaaaatcttgccaaataaacacaccctaatgtttagaagaggacaaatcgataaccaaaggtatggaaaaaaatggccatcttggactgttgggacatctttttccgtccaattatgtaatcatgctaagttatctatatagaacgtgttaaaacatctttttttgaaagcctagcttctgtcctatttattcagtgtgcatgttttatggatttgtctgtagcaacagttgaattttactaggtttgaatctgatgggagttcatctgcttttaacagaacacccaacctcca

SEQ ID NO: 107888 - DNA, 758 bp, Aquilegia coerulea
  Intron number 1 from transcript AcoGoldSmith_v1.010639m (l ocus AcoGoldSmith_v1.010639m.g) derived from phytozome v7. 0 (chr-ID scaffold_6; pos 3101848 to 3102605 reverse stran d)
gaagaaaaaggtgcatccccctttcatatttcaagctctgctatttttttagcggtgttactagaatgatatggatcatcactgactcattgatatggatcatcactgactcattttaaatgatttggattattgccttttttggtgtatgtacttttgaataatttcaatgcctcattatttcttatgaatgttccaactgacatgaatattccaacttatatgttacatacttgcatggcaatttttttttttgttttcatttgtatctgggaagaaacctggttgccttcttattaaaagatagcccaggttgtctttttcttaaacggatttctctttatcacagaaaatccagactcacataatatttcatgctcccttcagctaccatgtgctcttcaacaattcctccctttagtagcaagtctgaacgagattccacccaactaattgtcattataattcttggttttgcgtccttcaaagaaataagataagttgctaggatgcctttccattgtctacgaccaaaagtttaagtagctttcgccagccttccttagttatactaaaactttgtttaggaatatatttgctcatttacctctctctcgaatagggataaaaaagagagtatgcaacagtgcaaattacttcattgagcattcttcgtatgagcatgtcatctgacatgtatatgtcatatacatttgatgcttgcagtgagacgagaaattaaaatattgagactgttc

SEQ ID NO: 107889 - DNA, 915 bp, Aquilegia coerulea
  Intron number 1 from transcript AcoGoldSmith_v1.004508m (l ocus AcoGoldSmith_v1.004508m.g) derived from phytozome v7. 0 (chr-ID scaffold_30; pos 1336398 to 1337312)
catttgcttcacagtacaagaaatacagtaaggtggtaaaatggctatcagtctatggatatggtttttgttgataggtggtctacatcgacaacttctgtcatcctaactgcgaaaacctctgtaacatctaggaatgattatagaattttagtgttaatctttggttcctttcaatgggcaaaatcaaaacggagctatcttcaatcctgccaaataaaagatttgaagtgctaacacagtccacacagaataaagactcatatatctcagtattccatcaaatggagttaagatatcatgaatttcagaggagattcttaggtaacaaaagcatatgccattgccacttcctttttctttttctttttctttttcggcaacagctcaattgggcttttgtcggacgtgtagctcagacagggagtacaactaaccgtcttttggaagtttacgtgacacaacacattgcaaaagaagcgccaacgtattttgatccaattcttattctctcgtcaatcgtcatattactcatatctacaatctacattgggaggtcaaaactatacttcgattcctctctttctctctctcttacacgcacaaacgaaaagagtgagtgttcttcaacttctctctcgctttttcttttcttccctaatcgattgaaccctaaccctaattaaattgcaagtgatttagggtaaaaatcagctgtaatcaatctgaaaatctcgtaattactttcatctattactgattttctctttgtcaaattgaattagcttgtagtaccttttatttcctctgaattagctcgtaatattgttttactatttcactgtacctttttgtagattttgattgtataaacaatcttgccagtttcaggtttattgtgtttggaattttctc

SEQ ID NO: 107890 - DNA, 908 bp, Aquilegia coerulea
  Intron number 3 from transcript AcoGoldSmith_v1.024224m (l ocus AcoGoldSmith_v1.024224m.g) derived from phytozome v7. 0 (chr-ID scaffold_6; pos 3178010 to 3178917 reverse stran d)
gagctattgttttcaagcagatactaattcaaaaggtactgctatactttctttccttgagttagatttattctttcttgggtatgtaatattgtaatgaaagttgatgtgatccccaaatataaatcttccattattttttattgatttcaaactgcctctgacaagttccatgttgtcatactagattttttttttagcccgtcactcataattttcagttttcacatttgatgaaatttcaaaaccaatcctacaattttctcactggggctagaattaaagcttctgcatagcaaagactccgaagtcagcaattattgtaaagaaaaatctgtatacagtacttagaatttgtgaactttaatgttacttgatgaataatgacagaatctggatatagatttccacaatcaacctgatatagctttgctgattaatgtttttgtattagtatggatgaactatactcatgttgtcatcatttctattagattttattatattgttcactacttatcataatcctcaaaatgcaaattttgaagaatggagagaccgtttaccttggtcaagtcactcaagggaaaggcccaaggaagaactgagactaccatttgttgaaattgaaagcttatgcataacttccttaagttagtaaaaaaatgacatctcatgctttattgataaacaattcactgagtataagaccataaactatcctttcatcttataactttctatattttgtttatatattaatatatcaacattacccggcatttcagtagtgacttatcagaatgcttttcagtagtgtcatattgatcttaatttggtggagtgtaaccctttgttttgtatcctacctaggttgaattttttgaccggtacaaggtgcgaacata

SEQ ID NO: 107891 - DNA, 950 bp, Aquilegia coerulea
  Intron number 2 from transcript AcoGoldSmith_v1.013867m (l ocus AcoGoldSmith_v1.013867m.g) derived from phytozome v7. 0 (chr-ID scaffold_30; pos 2458969 to 2459918)
cccggtttggtaagtggttttccgcagcttctgtcatcagcttgtcatgatcaccatgcaatttttaaagttataaaatggttttaatttttaagactatggagtccttgtttttctatactttcttaatttttgaatcaaaaaacatattgggagcatttggtcttgcttttcacaaggggagaaaaaaaaaactgtacaagagagtctcatcataagacccaagtttgtgtcgccatgtcgaccctatacagagattttgacaggaaaaataaaaaaaagagatttgtggacagtctgctaactggcccaatcgacatttttttttttttttttttgttaggaagtttcaactttattcaaaacaagtcaagattacagtcctgatcagcataccaaccggtatcgtcaggtttggaaagatcagcaacaaaaacaagacacaacagaaactaactcccctatcaacctatgccttgcacaagggagtcccagttcaagagcagctctgtaaatctgtggttgcttctgcttttcatctgtggacagccaattaaagtggttacagagattagaaccgttagcagtaaagaatgaaacaaatttaaactgaatgaaagcttcgaaccgttagcagtaaggaggaagtacatgtttaaatctctgtaacaatcaacattgtaaggaggaagtacatgttagcagtaaagaaatattaaaaccgaagctttcattcagtttatgtaggtgtaaaattaaaacagatacagggttaaaaattcaattaaagaagtgcgtattattttttccagatcataatagaaaaactgaaactgaactagtcctatatattggatttgatagggaaataataaactgtgttaaagtgaagaaaaatatatactgaatgttgcttgtgatatatatttcttttaatgtaacaggtcatc

SEQ ID NO: 107892 - DNA, 806 bp, Aquilegia coerulea
  Intron number 3 from transcript AcoGoldSmith_v1.005872m (l ocus AcoGoldSmith_v1.002258m.g) derived from phytozome v7. 0 (chr-ID scaffold_1; pos 4105711 to 4106516 reverse stran d)
attcggtttgtccttcgtcatacctgttacttctcaacatgccaacttacatcatgcataagggaaaatgagctgaattggaatttatttcatttgtctgacttgccgatatgttttgcctctctaatatttgcttgctttggcagtgttgccgtctatctttattttccccacaaaacacctcatcaagtcattcccaaactctaattattctagttgcctgtatttcaaatttaattttatttggatttcaactttacactgggttgaagtcaaaatttctaaattttttgttcctaactaaaaagttatatgagacgatggaaaaaccctgtttacattttaacaagttttggctgttcttacccttttatgtcttatataccaatttctgcataagtaaatgccttaacggtatagaggctggagaaaaaaccctttttacaagttaactagtgaacttagactgcaaagtagcttgcacatataaagactgaagtaatattgatgtatggaaatgtggaacattcttgtggatgaagcctattttacttctcgacagaatttctttcaaattccataaaatttcatgtaccgatgaactgctttggtaggatgtatatgatattttccatgctttaattcagtgttgtacaatgtttataagccatttggtttgtaggatgtttttatgcttttgagcactgaagatcatcaagagcttatgaagaatgttgctgctaaaagttctgctcagttttctcttattccctccatatccagcgttccattacagacaagtacac

SEQ ID NO: 107893 - DNA, 967 bp, Aquilegia coerulea
  Intron number 2 from transcript AcoGoldSmith_v1.004335m (l ocus AcoGoldSmith_v1.004327m.g) derived from phytozome v7. 0 (chr-ID scaffold_10; pos 2453967 to 2454933)
aaccttcatctcagcagattctcaacttgttacaggtgagttacagagtatgttttgcttttactgattagtttataggttttgcgaaatttaattcacttgttgagctggaagaatctccttttctagatgattttattatacccagatacggattttatgttcttcacatgaaatttgtgtggctttgatcaatctttgaaattctctatgtttggtgggttctttttttccaatctattctatctctttgttgattttatttcaaaagtgcaacttcttaagattgagtttgcaatcccttttgccggatatggagatatgcatgtaggacctctagctttgacatattcaattgctacctgtaatatggatattagaacactgcgcttcaaatttgttttgtaatgctcctttcatgaattggattgggtgaatttgaattgatagtcttaggtatatgatgctatatgtaattgagctgcagatttttttccagtttttctctatctaatatcctagctaagtatttcattatcagcatttactgttacatagccttttcttgctgttcaaaatatgaagatggatactgttattgtctcgtcatttctataggccacattcatcttcgaatgattctttttttgtaaattatggtgaggaaattatttcatcgtatggaaatcacctcccccttaagggtatggagactactctgctgctatattatgaatagagttgagatgtttttttttttagccaataatcccaggatggttaagataagttcaacaatattcatcatgaagtgttgaactcctgatgttagcatttatgtttgaggaaaggatttttattcaatattcacagatatgtctacttttccaagtagactttgcttctctacccaatgattttaatgataaagtggacaattcttgttcaggtaaagttgtaacagatc

SEQ ID NO: 107894 - DNA, 822 bp, Aquilegia coerulea
  Intron number 4 from transcript AcoGoldSmith_v1.004335m (l ocus AcoGoldSmith_v1.004327m.g) derived from phytozome v7. 0 (chr-ID scaffold_10; pos 2455330 to 2456151)
tgataggtgagctagtttatcaggattgcatgtggttgtgcaggatcatggtgtctctatttttgtaagattcacatacttaattataatccgctgtcaaagaaatgccatacttgtcaatgcagttcttttcagtgcttgtagcttattattctaagttactcattattctgagaattttattacaggatttagtcttggcagaaaatttgtcatttgaaaatgttagtaaaggaagaggatgatctttctggtattggaaacttaagaagtcattaaacatatgtattggctacataatttcactgtgaatacttgttgttttacttcaaaattcaatggtaactgcaatacgcaaaataaaagttcttagtagctgtgtctcaaacaaacacccaagtattatatataaccgttaaaactaagcatccttaaatgtttaagactactttgcatgaaatttcattctccaatgtaatttcagaactttttgtatgtttgggagtgcttgatttactgataagatttacagaatctggtttgcatattctgccaagtggccttttatttgtaatagagattactctatgcaattaaaagtacaagctgcagtcagtgagcccagatgcgcttttgactgcaaagatattactcgtaaggatatagtggtgatcaagcctttcaacattttctctaatagtagtgttctgtttgaactattatgatgattacgcatctaataagttagcagattttgaattggctagttaagtacctatgtttctctgtgtgcttcataagaccttttcttttccttagaaa

SEQ ID NO: 107895 - DNA, 357 bp, Aquilegia coerulea
  Intron number 2 from transcript AcoGoldSmith_v1.002922m (l ocus AcoGoldSmith_v1.002922m.g) derived from phytozome v7. 0 (chr-ID scaffold_6; pos 1772186 to 1772542 reverse stran d)
ctcggcgttttctggatcattcagacccaatacatgtaagtttgattttgttctttgtactaaaacatgtaaagaatgtagttcaatcacaaacaaaaatatttttactttggcttttagttcatttggtaacattaacacagttgtagaatagttgacatgaatgaacgattaacatgttaacattcttagtttaactgtgttaatcttcgtcatttatgtcaaaaagtacaacaatgataagggatgttcacatgtaaatcgtttataatgtcaattttatgtaggatagcattcatacacattgtcttttgtttgttattgagtttgtatattttttctataatttttagtggg

SEQ ID NO: 107896 - DNA, 510 bp, Aquilegia coerulea
  Intron number 1 from transcript AcoGoldSmith_v1.002922m (l ocus AcoGoldSmith_v1.002922m.g) derived from phytozome v7. 0 (chr-ID scaffold_6; pos 1772701 to 1773210 reverse stran d)
ctagaaatacaggtatgtcaagtttttgatagatttttgaagttgggtatttgggttttggatagatttgtgatttttgagatggggtatttgagtaatgtcattttctatggagtttttgatagattagattgttaaaccccaaactaagtaggtaaaggggtcttttcattggacttgagttagtggaaaatcttgggggggttttatttatttattaagtcttatcaacaaaaggttaataggaaagtttgttttgattgttttttttttttctgtttgtgtgatggtgttgttgcaatttcactactgtagatggaataaactttgaaagggaattttattaacatatgcccttttctttttcttcaaattaaattactactttttgtattcttaagtgtgttaaaaatcattttcatgaacattagcttctttcagttctaacagttaattgcctttttctgatattgtattctaggttggggttgtggaagtttgaatacaaat

SEQ ID NO: 107897 - DNA, 808 bp, Aquilegia coerulea
  Intron number 1 from transcript AcoGoldSmith_v1.020203m (l ocus AcoGoldSmith_v1.020203m.g) derived from phytozome v7. 0 (chr-ID scaffold_43; pos 1847769 to 1848576 reverse stra nd)
aaagagtttgggtctgggtctcttctgattgatttccagctgtgcgagctaaggaagcaactgcctgaagccagatatagccccatcaccctgcttctttaaagctaaccttctagatttctctaaagccttgttaaaatcatcatcctcatctccgaaaacagtttcgccttcttccacttgagtggttgacggtaattcttgtctaagtgttttagatgcttctttagctttagcataagctgattgatatgcatcacttctcatttgagcttcggatctctgttgttcttccttagcgatttgccttttgccatctttcctggaaccaagatcactaacacccaatccagcagaaatcgcttctgcttcaaggccatctaagtctagtttgtccttcttccttagtgatttttttctttttaggctttttactgcatcttgcaatttattgttcgtgtggtttgtaaaggtagagattttctgagatttcttagatttagctttcaatatgtgttccaatttgttgtagaaataagtttgatcgatttcatcaaatggggttgaaaaaaattgttattttcatagtttcttggaatattaattctatgtttatattactattggttttaatgttatgattctgtgagatagtaatgtttgtgtgcattccaaagtttataggtttgagaaagtatgaaatttgatatttattatatttattattttttgtatatttatatatagtattggagaatgtcgttagcacctaaaaaagactggatgcatgaaacaaatagattgagtg

SEQ ID NO: 107898 - DNA, 339 bp, Aquilegia coerulea
  Intron number 1 from transcript AcoGoldSmith_v1.008937m (l ocus AcoGoldSmith_v1.008937m.g) derived from phytozome v7. 0 (chr-ID scaffold_9; pos 4265703 to 4266041)
aaaaacacggtatctttctttcaaagtttaaactcgtacaattacaagttgtatttgattgattgattgattgattgttccaagtcgataattcgaattacatacaactacaagtgttcaatttggtttggttatgataatttgtgttcttgattgtaattatagtcattatataatataaatgatttatttattgtttactactactaattagacaaagcttgtagttaaatttgggcgcattttgtttttgtgtgcacttgttgtttgtttttgccctttttttatgtttttttccctgaagatgaagatgtcctcttcaaattatgtaacaggttt

SEQ ID NO: 107899 - DNA, 722 bp, Aquilegia coerulea
  Intron number 3 from transcript AcoGoldSmith_v1.005217m (l ocus AcoGoldSmith_v1.005217m.g) derived from phytozome v7. 0 (chr-ID scaffold_49; pos 37283 to 38004)
accagttcaggtctactttttaattttgttttctgcgtgtttgtcagactgaatttttgcattgctatttagaagagtattgattccacttatttggagatttgcacttacaattcataagataatgtattttgggggttcgttagagctaccttaatatctcatcttctgtcagtcaactgatcccttacttttgttgactgtgctggttgttggtcttagtatttacatgacaacactgcttattaccaattgcaacttcaaacttccattacccttatatagtacgagggacttaatcttggagagggtaatctacatttctacatgcagagagtgtgatcatgtcaccccataactttctcttaaacttcattattttgtattagagttattgaatgttcctgtttaatgttttatccaaattaataacagcagatgtgtacaatagttcatctaatgtagtaacaaggtttatgtcatgtttaggactgtgtttctgtattgtaaaaattgtaactagagctctctgcctcctaagaattgtaattagagctccccacatggaagctttgaacctgatcttaataggcaatattatcaataaaaagatatcttagcaaccatcaaacttacaatgattgatatctacgaataattttgcaactaaaagcttcctggttgcagagaacttgctaaagccggaaaagacattgaaggtg

SEQ ID NO: 107900 - DNA, 981 bp, Aquilegia coerulea
  Intron number 1 from transcript AcoGoldSmith_v1.011407m (l ocus AcoGoldSmith_v1.010659m.g) derived from phytozome v7. 0 (chr-ID scaffold_54; pos 1612419 to 1613399 reverse stra nd)
tatactcaccataaccagtccatcttcctcccaaggtaacggcctttcattcttgccgttatctgtctatatatatatatatgtgtgttagaattttcatttcaagtttaattcaacaagaaaaatgctttttaacgaatgatttcaagctgttagatattctcgagatacgtgatagaatccagattgtaaattcatcatattagatgaggttcttcatactaaattcatatattgaaaatcaaatcttatatttagaaataaatttagagatgaaatcagaaatcttcatattaaattcataatcttgattatttttgtaaaaattaatgtaattgaacggctaagatcatctaattagaaactaatctttgagaaagatctataaaggtggtattagtgtatttttctcataaatttcaataatatcagaaaattattagaacatcgagatctggtaagctgatttgatctaatggttgataaggattattggatctgaatggtgatggccacgtgtgagttttttatagtgataagtttcagagccgttcactagtccggcaatttttgagccatacacgtgtcattaggattcttttggattagaccagttgaatgttctagtcagtagtcaactctacccaaaacttcaccaactcaaatcaacggctcataatcataatcaagctgtaagattctaatcgtatggtggagaacagaagttatggagtttgttgagctaaaataatgtttctgtacacctgtttgcttttgcagagagtatctgcaagatgctaattcttatgaactaattttgtcttgttcgattaatacataaaggatagtacacatctcaaggcagattttgtttttattatttttgtatttttcaatattgaaaatcataattcatacatagaatttgtgtattaatgatgtaatattaattttatgaatacaggtcatttgctgtgaagg

SEQ ID NO: 107901 - DNA, 677 bp, Aquilegia coerulea
  Intron number 1 from transcript AcoGoldSmith_v1.000567m (l ocus AcoGoldSmith_v1.000567m.g) derived from phytozome v7. 0 (chr-ID scaffold_9; pos 2024177 to 2024853 reverse stran d)
gtaccaaaagtccaaactaccaaccaaccaacacctttcattcaatacttcaatcatagtgatgatgatttcgacttgtaacaaagtaccaacctttcatgtcccaatcatgctaattcccaaatagggatattaaacgaactgggctttgtatgttcaagttcggttcatttataaatgagtcgaactcgagtcgagcttaaattttatatgagttttattttatattcaagttcaactcgtttagctatacgaacgagcttgagcagttgagccaagtttgagccgttccgttcgtttaacagccctatttccaagtcgtaaacatatctctttaccgacataaacaaactacatgtcacagctcatctttgatcaattggaatttgacacgtggatcacgtgggctttcgtatgggcaaggccattgagaccatgaatggcccataccccaacgcaccttctctcttgtgggttttgtttccaatagtccgatccataaaaagcccatggtagaagaatagccacgccaattggctctcatgtgggctttagtatggtccatgacccaacgcgccttctctctctttctctccgaaaaacaaaaccctggttctctctctctcttctccttctctgaaaaatgtctttgaagcttcttcaaagtaatactcacg

SEQ ID NO: 107902 - DNA, 981 bp, Aquilegia coerulea
  Intron number 1 from transcript AcoGoldSmith_v1.021280m (l ocus AcoGoldSmith_v1.021280m.g) derived from phytozome v7. 0 (chr-ID scaffold_9; pos 2187600 to 2188580 reverse stran d)
ttttaagagtggcccacttttcatatcatcaagaggtcagtgatttgatctttgttttttctgctttgtcaacttggggatgaaaggggacttcaacttttgttatgctagaaatttttattatacaatctaaaaccttggattttaccgtgatacttgttgtgcactccaactatagggctacttcactatttatacgcacaagcattcagtttgagacataataaaataatttatacgtttgacacagacatgtaaataataattataattcgtgtgactaatatacatgaagtggtagggatatatgtagtttcgccgtgattcaaagattaatcatttgatccttttggctttttgtttatgttttcccttctcaatttgggttgtcctttgtacctatgagtccgtaacaaatctcatttgtttgcgagcattcatataactataattagttttcaccaaaagactcttcggtagagttgtcccgctgtgaaagatctgattttgttccgacaaaggattctgttgcaacttgtaagagcgaataactgaataagacggcaaaaatcccagtacagtagtttcttttaccgacgagtttcttgaaaagtttacttttaaccttcattttcattccattattttccctggagacttatagcaagataaccatactcaatttaatagttaattaagtcattaagatttgatccactgtatcttgtattaatccaagagaggcttatatatttctaatcaggcattcttgtttctaactttatgcaacattacaaatgaaatgttcgaatctattatataacgttatatatacgttactaattatcagtctttgttaaatgctactctggtgaccatttcattagcttcctcctgcagtttatgtattttgcatgtgtactaaaagaatatatattaattgcagtacttgacaatttttatagggataggttggaaatc

SEQ ID NO: 107903 - DNA, 801 bp, Aquilegia coerulea
  Intron number 2 from transcript AcoGoldSmith_v1.002424m (l ocus AcoGoldSmith_v1.002426m.g) derived from phytozome v7. 0 (chr-ID scaffold_1; pos 880974 to 881774)
ctggattagaggtttaattttctttaacatacttgatctttctgttttgcgtatatctcttgaacagcacttaattttctatccaatttcatgtcagtatgaactagttttagtgatcagttgatcacccatacatacagtttccacctgttttaacaaattcttcctagagatacaatattccatgcatcattagttttagacttttagttgttttgcgtataatttattgatatattctaagatcagcctcatttatcagtaattcgcatgtttttgcttccattttgcattcagttagagtatcatttatggtctatcatgaccttagtccttgtgtagtatataaatgacaatgtaaatgaattgttttagtcaaacatcaccacagagttaaatccttgtatggcaatggttccatcattgttatgtcttaagctgcaaataatatattttcttcaagaaaatagctttttttttttttttgataaacttcaagaaaatagctggtatcgaaaagaagcactgaatacttgtttggcatatttagattatccctttagaaactacaggactgaggttctcgaccagatgaaaataaccttttgtcttaaaactgatggtgaaccatgtcttaaagttcgaattagatcaacaacttaagaacctttcctgattcataacattcttgttttaagtgtttgaagtttttctcatgaagaaataatagtaatctttgttgattaattatgatgttttcttaactcttcaccaaatcttttcaggaaactttaccatagt

SEQ ID NO: 107904 - DNA, 529 bp, Aquilegia coerulea
  Intron number 2 from transcript AcoGoldSmith_v1.009820m (l ocus AcoGoldSmith_v1.009820m.g) derived from phytozome v7. 0 (chr-ID scaffold_37; pos 1981441 to 1981969 reverse stra nd)
taaaagaacgggaaattgaagatctattcttcaaggtatgaaccaattcttttctatcatatttttgacacttgtattgtatgtaatgtttaacttggatttttcctatttaatgcatacataagtgatggctgctattaggcaattagtatcctgataaatttagcaaatttttgcttgtagaattaaaactaggtgattcaagggcttcagttgtcttgctaggtagtcccatctctaaaacctcttttgaaaaaactgtgaacaaacgcctgtatttccgtcccacagaaaagtgaattttagttgcgtgttctttacggggtcttgatagcggtattgttgtggcatcactagagaccatcacccttaaagtttggtgttagctctgctttagccaacagattttattttgaattttcaatttacaaagcaccccacttgtttcttgatgagctctccattttttaataattttcaaaattgccacaaatagctttctttaatttctacttcctttttctgcagt

SEQ ID NO: 107905 - DNA, 1009 bp, Aquilegia coerulea
  Intron number 1 from transcript AcoGoldSmith_v1.009820m (l ocus AcoGoldSmith_v1.009820m.g) derived from phytozome v7. 0 (chr-ID scaffold_37; pos 1982022 to 1983030 reverse stra nd)
gcttttggagtaaatcgaagttactttgtcgcgaagtaggtttctttggctcgctttctctctctttcctccttcaacgatttctacaatttctctgtttatttagttgaattgtgtttaattccatatttttttctcgattacacttagaaatcgttagatcttgtatgtagaccgtcagatctttgtcaaaaattagaatttttttttatattgatgttgttttgtggtagttaagtaagtgtatggtggttcaacaacaaattcgaattaaagaaacgattttgatacaaggaattacagttttaattgttaggagctcatatgtatgatttataggtttgtttttaattaattttgtaacaattatgtgtgtacaccatgggggtttgggagatgaggcaactgtacattgtattatttcctttcaacaatttgattatcttgttatgcgctgcatagttatcaaatctgtaacccacaatgaagttataaagcaagctgaatgcaggtaagttcttataattttttggcaccattataatgtctcgtaacaaagacacttgctttatgatagatgaaaggagctcggaacaataggagctttggaatcatacataggagtatagaaagggagtgggataaatgtgggtgcacattttgtttgaataaatggagtttcttgcaagctcagcacctctgccaaaatcaagtagaggatgggaaaatcaataatcagagggaggatgaggatttattttatatttcaaattatttatagctgtggagcttaatggagcatatgagcttggagcttgtggagaacaaccacttcgaggattgctctattggtttgcttcatagttttgggctttttcttcttaattgtatactgtctaacataatacatcacactaagaaatagaaaatgcttctggaatgtttttttttgaataggaggttgatcattctattcttcatgcaggaacaaccgattattcttttaagg

SEQ ID NO: 107906 - DNA, 603 bp, Aquilegia coerulea
  Intron number 4 from transcript AcoGoldSmith_v1.007407m (l ocus AcoGoldSmith_v1.004039m.g) derived from phytozome v7. 0 (chr-ID scaffold_9; pos 4902867 to 4903469 reverse stran d)
aggacaggtaattacttctcaacaaaaaaacaatagtgttatctttatctgcacgtccaatttaaacaattatggatatctgatatgatggatggttgtcttgttggatatatatgaataaatattttgaattatgcttttatgatatatcctacacttatcgttcacaataatgcaaagactctgtaggtattgccacctttaatcatcatcaaaacactttatcccgaatactgatagattgagaatttatacaatcatagtcaagctctttgttcatttgaccaagtggtaactccgaagtgtgttatggtgtagagtgtagaccactacattaaatcacttttgctatctattagcttctttgcataaatttattctttttgcaatcaatgggccaatattttttatgaacttttttccctgcttatgtagagtagaccatcttatcctctttggttggtttatcgtaatttggtaaaaaaatacgttagaactgtcctgcaagcatctatgcgcatcatgttatgcccatctgaaagatagatttgatgttttgttttgacaggaagagtaacaccagaaagtgtagtatatagcttc

SEQ ID NO: 107907 - DNA, 768 bp, Aquilegia coerulea
  Intron number 2 from transcript AcoGoldSmith_v1.002940m (l ocus AcoGoldSmith_v1.002940m.g) derived from phytozome v7. 0 (chr-ID scaffold_15; pos 1577644 to 1578411 reverse stra nd)
tagctggtttgagtgttgcaacatcaattgctgaggtatttcaacttcgccttttggcaattagtatatttttacgacaagggtcgcaaaaagttttgaatttgaattagacatgttaggtgctatttcaaatttgataaaatagtttatcatttcaatgacaaaatttagataagacacgagaggaaagactacatttgtgtaatttagtgatatggtattctgttgtattgtaatggttcaacttacatattatacatgctcaaaaaagagatttatttgttggatattagttctttaatgcaaaatgtctaaattagtctgagttagtcattgatcgttaatccgactgcaatataacattgtgtgtttgggataaataattgtaacattgagggtacactaatttatataagtaatctgagaggacagtaaggaatggccatcaaatgtgacttctccaaccttatgtagtgttttggactttgtgaagaacacactatgtatcatattcatgaaagaggaggcatcaattgagaaactcccgctcgaatatctatgcatatgtgtgatactattttatattgaatatttaccaattaatgtgatctttagtacatgatatataaaaagaaacttcaactatttatttgcagcaaaagatgatgattataattctcttttctcttttctctcgagaagataactaactgtgaatatatgaaattaacaggtttataaacccagtgaatacagccgtattcttgt

SEQ ID NO: 107908 - DNA, 1008 bp, Aquilegia coerulea
  Intron number 2 from transcript AcoGoldSmith_v1.006357m (l ocus AcoGoldSmith_v1.006357m.g) derived from phytozome v7. 0 (chr-ID scaffold_1; pos 7460846 to 7461853)
ttggaggcattaaaggtgctgtatcacttggtcaggtctgtttgcttttttgtccactcttctgtttatttaaagggggaattcagaattggatgcttttgctgttgatgttttgtagccaagattggtgatgcactgatggttacttatagaaaacttgccattgggtatttgggtatagtacactttggcgtctgagtttatgttgaatctcctttttcccactctctaaaatcaatgtccctgttgaaaatgccacatataaatacactgcagaggaatataaatagtagtatatttttgaataggggtggaggagtgattgctgtaaatgatttcttacaatgaccatgcatcctctgataattcagcttttgcttttcttatagtttgtgtcatacaagacaagggtaccagtttgattaaaattgtctctttgattaggaccatgtcctgtagttttgttgttttgtgattttttctattaatgtaactgctgctatatccgtgtccttcatgttagtttgatgatcttcttaagccacactgcatctctatcctgtacattaattattgtctgtttttttttcccaacaagtaatagggttaggcagacccccacctgtattaatatctcaaaaatatagttcccttcttatcatcatttacaaatccttcaggaaaaatattgttgcggcagactctcttcaagcaattcaaatccttcaggaaaaattgaagccaccttggtattgccagaatattgtgtgtgaaattaaacaccaccagaatactcttgatagagtagtatataaacatgtctatagggagtctaaaagagtagctgactacttagcaagtcttgaaaatgtaataggagaatcttattttgtagctcctatgagtaggcaaatggacttgcttgtaattaattattgtctttaatccactttttggttttgttttggtgtagggggtagttcattggcaaccgcccgaacaggctct

SEQ ID NO: 107909 - DNA, 641 bp, Aquilegia coerulea
  Intron number 2 from transcript AcoGoldSmith_v1.001152m (l ocus AcoGoldSmith_v1.001152m.g) derived from phytozome v7. 0 (chr-ID scaffold_1; pos 3318402 to 3319042)
aatttgatccttacttcaattacagagttactcaggttcgttccttctttctcaacatttagatcatctgtttttggttatctgaatgaattgtatttgaaaattgaaataggagtcactgacattatataaggtcatagaactaagatcattgaaagttgattgatacttgcattgggaaatgaaacaaggttatgatagttgatgattgatggaatgtcttaggaagttaagcctaatttgtgccagaaacgggatcacaacattctctgacaacacagtcagtgatcaagctactaaggcttttaaagtacatgattttttatgattagttttttgtttgcttagattaacaatgagatatctcaataatatgaaatttctaaaagaagaattatgttatcttgctctacaaagagaagtgtgaatttagattagttacctctttcacacttgtgtttttgtgctttttaggtgttcaattatagttttctctgtgaataggtgctgtttgttcttgtaataagatggcaattttttttatttcttctgcttacatgttttgttttccccataattcaaatcttattttttttctggtcacttactgtcgtacttcttatgtcagttccttacaaaga

SEQ ID NO: 107910 - DNA, 743 bp, Aquilegia coerulea
  Intron number 2 from transcript AcoGoldSmith_v1.001987m (l ocus AcoGoldSmith_v1.001987m.g) derived from phytozome v7. 0 (chr-ID scaffold_37; pos 22589 to 23331)
ttggggttaataaaaactctttaggtaattcgtcgacaactcagcttctgctgcttacaatcaaattctttaggttttcctatttcttctatcactcatcacttaaatctatctatattggtaagtatgttaacaattactgctttacctaatttgggtgctgtttattttgatttccctttgtattatactaccaattatagaaaacaaaaatggattgagtagacgtcttgaacttcaatgtcgtgttttatacttctttaattacttgtgattatgattgtaggaagactgatatattaacaagaggttctgaactcttgtcctcacagtatgtcaacttggttagaatattcgtttgggattaattgatatatatatatatatatataaaacaattgaataagttggatcaagatttgggagttgctgcaaagtgcaaacacttgaaattggaaaaacaaaattatgtgctagttatgatccacctgagtaattgaatctcaaaagcctattttgtgatgaggaattcatgtgtcttcaaaaaagtcaatagttctgacatttatatactccactaaaatgcatgtttagttaagaatttttttccctttggagacgagattagcatgttggaccaactaattgcttgggtagttttttccatgtgtgatatattctatattccttcttgaagggaatttccatttattactattgttcatttgtggacttcaggagca

SEQ ID NO: 107911 - DNA, 762 bp, Aquilegia coerulea
  Intron number 2 from transcript AcoGoldSmith_v1.021526m (l ocus AcoGoldSmith_v1.021526m.g) derived from phytozome v7. 0 (chr-ID scaffold_6; pos 8714158 to 8714919 reverse stran d)
gtacagtggccagtatcaggtatgtgaatatttgacttggctttatttatcctttaatctgccttacgtctttgttgttaagtactagtgggatttgatctagttcaagctgtgaatagccatattaataaccggcaatagccaatgacaaaatttcaataaaaatgacgagattttagagacatgaacgttggcagtgttcctatatcctgctaataggtggctaggcctgcgctagttctagcacaattaactgtgtattgggaaaattggtattgtattaaagttatgtttcaccaattcaccctgcttataggtggctaagcctgcactagttctagaacaattaactgtgttcactatggacaagaattcatagcttccctccatctggcaagaacacatctacctaatacctatgcactactgggatgcggcgggcctgtttgttgtccgagttcaagtcttcatatttctaagtctatctcattctgttcttcactatttcaattcatagtttcagaacaatgacataaccaaagtgcactgcagtctgcaatgcacattgtctaaactagttttgtggacgaatgcaaaatgtattgtagattcgtgcaaaccacaagtcactgcaaaacacaagtcgtcataacagttcggagctcaattcactaggaaagcagttccatcacttactggcatgcatgttatttcgtgttgtatgtagggtgaagtgttgagaactcgtagaaccaacgtggg

SEQ ID NO: 107912 - DNA, 994 bp, Aquilegia coerulea
  Intron number 1 from transcript AcoGoldSmith_v1.011975m (l ocus AcoGoldSmith_v1.011975m.g) derived from phytozome v7. 0 (chr-ID scaffold_30; pos 1842775 to 1843768)
tatttactgcaacgacagcaattgttgttttgacggtaggtggtcttatatgtcatattaattgtttcttcttataccaataaggatagagatggtgaaatcaagtatatatgatatatacttagtttgttctcatttaacaatatgaaaaaagattatatgatatattttaatcatgtattgtcttaaaaggatgtatttcaaatattaaattactcaactaatataagatctagagtaggtcatttcaaatgccccataaaatgtgacacctctcctgatttcaacttatcaaagatttcaacttatcaaaatgtaagtttctgagttatgttctaactaatttttgactggtattctttgttctgtttgattgccgttcatgccgattctgtgttcatgatttttcatcttatctagggatttaagttttctcccctggcttcttctatttggtgatgtattgtacagaaagcaccttgctgaaatgataccctcttcattgtccttttaggattagctccttgcttgtttataatgaaatttttgttcaatatttcaaaacgccaaaaaatggaaagatgataagcatgaaatttagagcagataaaaattatttaaattgacatcactgaagagaactcaaaaagatctttgaagaatcaagcacataatttgtagtctgcaaattcttatgctggcaatctattcagattgcctgtacaaaagaacaaaatatattgttcttgttggttttgttttaggcagaccttgtggtttataagtatgagacttattagatatgtaattgcatattcacttcccttgtactctctgataacttttcttcatatgttagtactgtaatgacatgtaagtacactgcatacttttagtcagatggtacattctatatatcaccgattcacttaatttgtcgttgatcttatatggaatgatgcaggtcttattgattggaggatcgactggtact

SEQ ID NO: 107913 - DNA, 840 bp, Aquilegia coerulea
  Intron number 1 from transcript AcoGoldSmith_v1.005185m (l ocus AcoGoldSmith_v1.005185m.g) derived from phytozome v7. 0 (chr-ID scaffold_77; pos 161813 to 162652)
gcctgtttctgacagagattacagttattttagaggtaaaagcatgtcttttgtgtgtataatttgaatttttttacattcgatagtggttaaataaatgaaagaatctataacagtgacatccttaggaacaacaggagctattacacatctgaatatacccccatcctttcatccgattgatacataaatccctggaatattttttattagtaaaacataaacattattttttaaagcgatatccacttccacattcagaaaattctgacactaagaagtagcacctttatacggcaactatgtcactcattgtaaaacatgagtagaggaagaggtaaatcacataagctcttatatcaggataatgggatgtgggttcaagtttatcggtcaataatgaattattctatcttacgatgatacgatcaatatggctcgatgtttctaaacccatattactccctctgtcccaaaatacatgtcactttccatatttgaacatatattaattaagttaatttgctcttttgcctatattacccttgctttggaattagagtaattattttaataaaaaatagttagagtaattaattctaatgaaatagggcaaatttggaaatataattagtagacaaaccaataaatgatgctctcttaataagttggattttctataatgtacttataatttgggacggagggagtattttttttttttttttgccaagtacctttatttcaattgaatttattttcctttgcagaagattcctagttgatgcagtttcctctttcaaactctgaattttgttatttcttctacgtaggtagtca

SEQ ID NO: 107914 - DNA, 578 bp, Aquilegia coerulea
  Intron number 1 from transcript AcoGoldSmith_v1.021776m (l ocus AcoGoldSmith_v1.021776m.g) derived from phytozome v7. 0 (chr-ID scaffold_6; pos 4507809 to 4508386)
caaaagttgctgaagaagctgtctcaggtatattctttgcgcgctgcctaaacattacaatcttatcttcctagtacatatctacatttattgctatccttgtatccctccatttttcagcatctccacttatttcaacggttggttgcttgttcttccccaaatttcttgagcttttgtgaataagatctaaaatgtggtgcctatagtggcccctgcttatgttcgctcttttgttgtgtacaggatttttgtatttccttggattgtagtcgattatgaatttattatattctccacctgccactcttctccaatacgctcatttgttatacggatactcatttgattgacatactgttttttgataatcaattttgacttgatgaacataaccgatcttgtttcttgtataataatgtttttatgtggttttaagcgggcatacattggtaacttttttactttcagtgtatcctatatacatttctgtttgatgggaatgatattagttcttgtcctgagtccatctccttaccgcaggttgggagaaggctgaggcagaagctttggcattg

SEQ ID NO: 107915 - DNA, 462 bp, Aquilegia coerulea
  Intron number 1 from transcript AcoGoldSmith_v1.000522m (l ocus AcoGoldSmith_v1.000522m.g) derived from phytozome v7. 0 (chr-ID scaffold_10; pos 5556205 to 5556666)
tggtgcattcagtaagttggatacttggataggacttgagcacaatctatctagataaatgcaagttatcattttcaaatccattggcttctcagcttgatgaagtgtttgaagctaacgtccttcttattttcttgctgtttcacgcttttttgtttttcttttgctagctggtaggttttgtaatcaaatttgtggtaacatactttgccaactatgctagtggaagttgatatttcacatgattattcaatatgctatgtcatttggaataattagtttctacgtagaagagttaactacatgagcttaataggaaagagttcaaattcaatgcaaacatgtaaaaatagacttaaagatatgtaatgtagccaccaatattcgcttgggttttgtttggaagatagattaaatttttagtgcaactgctgcaggcaatctcttacatcaggaccttgt

SEQ ID NO: 107916 - DNA, 555 bp, Aquilegia coerulea
  Intron number 1 from transcript AcoGoldSmith_v1.002915m (l ocus AcoGoldSmith_v1.002915m.g) derived from phytozome v7. 0 (chr-ID scaffold_21; pos 3343504 to 3344058)
aatttaatcatcctttggactctaaggtttctcttctttcctttaatcaacaatttactcagaattcttcttctcaatcgttttttttttactttttcttcttcttatttggtgcaattttgattgggtttgggggtagtttgggtgattttttttttctgataaaatgctcaaattgatgaaggttgtgttgtgttttagttgttgttgttgttgttgttgttgaggtttaatatatattgggttgaaacttttctagtgtttttagttttggggagaaacaaattgtgagtttagttgatgaacttgattggaatcctattcaattcgcttttagtgttagcttttattgatgaattcagctttggtgcttttgctgggttaaatcctaaccttgttgtttgtagttgtgtttaattattttagtgaaaaaaccaagtttaaactgatttgtttgatttttaactgcattattgattttttttttttttttgggataatctgggtgtttgtttatcaggattcatttgggagtctaagcaaggatagtgttcc

SEQ ID NO: 107917 - DNA, 819 bp, Aquilegia coerulea
  Intron number 1 from transcript AcoGoldSmith_v1.009600m (l ocus AcoGoldSmith_v1.009600m.g) derived from phytozome v7. 0 (chr-ID scaffold_9; pos 355769 to 356587 reverse strand)
aggaagaagctcgatactcgtttccccgccgtaagttcgttctttttttctctctctatctttatgtttgtttcgtttgattctattgtcaaggttgtttctttttcttctatgttgattcaattttgtttctattgattcttattagggtttattggtattgagtggttttatgggtttgtttcaatttaggttttagatttgttttggaagttgtgatttcttaattaggtttacagttatcatctctttggtcaaaacaagggttttgaatcaaatttgggaatttttattgttgtgtttgaagtttacacattctcagttctagtgtagaaatctttagtttgtagtgaaattttttatataaaagcttgaattgaataaccttgggaatactttgttatattgcctgtatttaattgagtctactacttcaaatgtgtgcacttggggggtcaaaattgattcttttaagttgttttaaatacaaattgaatgttctaacatacacaccccttcttgatttgtgagaactaactaacaagaatgtcaatgatggtgtgtcatacaataagagtgctcctcatatctctcaatgcatttgctaatatcaaggagtttaaattgctaaaaataatcttctgtgaaatacaaatagtttcttttttaagtgttagaaactgacagtcttctggttttaacagtctctttcattcaattcctactactatcaagagatatatagatggtagacttacagccgtaatatatcatgtttaatgtttttttccccttctgcagtctcggattaaaaagata

SEQ ID NO: 107918 - DNA, 526 bp, Aquilegia coerulea; identical to SEQ ID NO: 107719
  Intron number 1 from transcript AcoGoldSmith_v1.001435m (l ocus AcoGoldSmith_v1.001435m.g) derived from phytozome v7. 0 (chr-ID scaffold_9; pos 886095 to 886620)

SEQ ID NO: 107919 - DNA, 301 bp, Aquilegia coerulea
  Intron number 2 from transcript AcoGoldSmith_v1.020288m (l ocus AcoGoldSmith_v1.020288m.g) derived from phytozome v7. 0 (chr-ID scaffold_9; pos 1946270 to 1946570 reverse stran d)
attacaaacaggtatttttattcctaccccttttcaatttccctttgtctttccatgttttaattttatatctgcacattagttctttttgtttttattttcaagtcatccaagtttttctttcaagtaatagattgggtgcttttggttcaaaatgtcatagactaatagtactgtgaagtagcttatgttgaattatagaaatgattaatttcagtctcacaagaatcttgagtgtttgacaccttggaagacaaattttaggtcccgctgtggcaccaaaaggctagtaaacgagctg

SEQ ID NO: 107920 - DNA, 589 bp, Aquilegia coerulea
  Intron number 1 from transcript AcoGoldSmith_v1.010107m (l ocus AcoGoldSmith_v1.010107m.g) derived from phytozome v7. 0 (chr-ID scaffold_75; pos 700481 to 701069)
gtttggtttccttcacaatttcaaatcttagtaaagtaagtttcttttaccaattttagtattatttggaattatctttctgtttgtttctaggttacttgaaatcgatcgtaagtttacatgtaattgtaactgtttgattgtgttttcttttcttagggtttatatactttccgttccaattatagtttatttgtttgctttgattaagatcaattatcatggaaattgaaatgttatcatctttaaattcaaattacttaactatattcactcaatttagttgatttgtttagaatttggtaagaacacaatcacttaaatctgaatttttcattaacttctttaattgttacgagtagttgaaatgcgacaatgtatttttgaagactcttaattctgtcgtttaattactagtctagtcttaagttgtgcttaaaattttcaattttgaggaatttgcaaaaaattaggtttttgatgacagtattagtcttaaagttgggcttaccatttttaatattgagtaatttgtgaagaatttgtatgtgttgcagattccgtaagttggtttgttaagaatttagtc

SEQ ID NO: 107921 - DNA, 685 bp, Aquilegia coerulea
  Intron number 1 from transcript AcoGoldSmith_v1.019480m (l ocus AcoGoldSmith_v1.019480m.g) derived from phytozome v7. 0 (chr-ID scaffold_15; pos 331052 to 331736)
tacttgattactgtgcgagatctccagatcctttggtatgaatacaatttttttggctgtgtatagaatgttgaacgttattttttcctcccttgtctatgatgcatgaatgcttccaaagaatagcttaatagactcagacaaggggaagactcagaaaatacatggactcatgtgtgaaatttatatccatccctttgtttgtttttattgttagttgttgatttaaatttgttgtaataatcatccgactccatcaaatttttctttgttgagtgtcttccaataaaggaggcggcttaagaaaatcttacctactactgataaaaaaaaataaacatattagctacccatccttagaagaatatattctggatataggtttcctctgaagctgtgacacataattccatcataaagtccatgtcttaataaaagaagttactcgtatttcaatgtatgtgaaccaaattttgatgccatgaattagagttggtatctggaagaggaatttgaaaatggatcccaaaaattaatcttgtttccctctcttccatcaaaatatgctctccataggcattagaaaatgccccttttaccttttatattatgttttgatctttagtgtagattgtagaagtagcctgctgttatagaagtgtttttctattatgttcagtttgtt

SEQ ID NO: 107922 - DNA, 870 bp, Aquilegia coerulea
  Intron number 1 from transcript AcoGoldSmith_v1.022024m (l ocus AcoGoldSmith_v1.022024m.g) derived from phytozome v7. 0 (chr-ID scaffold_67; pos 43031 to 43900 reverse strand)
atgtgaggctgtccacatccttacttatagtgcaattttttttttttgatgttaatacttaatacgtttccaacttctattgtgatgggtattcattctcttcagcatattgttttccagatgatcgattgctatcataatcactttgctgaattgacatcccctaagcacactttgtggattcatttagtagtaaaatacattatttggaaaaacgataggatacaaagacagggaaatagagtcaagccaaaaaaatgctagttaaaaaagaactgcaacaaccgttatacatctcctttgtttttcttgtgattgctaaattggtaaactttatttcccttcgtctaacacgaaatactgaatattaaccttccaaaattaagtatgttagaggctaagtgaagaagtacttatatatccataagcctacaactgacttctcaaactagagtgaaacaaaccttaggttgaaggtctccactaacgcataaggtggcagattccactagcctatattaaatattcgatgtcttctaaatttgatgtgtagttaacattttttcaccgaaaaaaagaaagaagacttctctagctggacacagtgcattgtggcagtttcattaatggcaagtagttgtcatatcacagactagttatgcttaatccctcaaataacaaagtaaagtacaaagtacaaactactataatcctgtattaaatcgaggtctgtttcttgggaagtctgtgctttcaatcttgttttgtggtactttgtgctttgacattaaccactgattttagcttacattgttgtttagttcaacttttggacttctaatggtccgttgttaattttggcagactggg

SEQ ID NO: 107923 - DNA, 620 bp, Aquilegia coerulea
  Intron number 2 from transcript AcoGoldSmith_v1.014587m (l ocus AcoGoldSmith_v1.014587m.g) derived from phytozome v7. 0 (chr-ID scaffold_46; pos 914084 to 914703 reverse strand )
caaaagttaattcagctttaggatccaactctaaggttagtttcttgaatttctttgccatactttatcccttctgaaagtagactttttcatcgtttatgttaagactaatcaactaatcatttgacttcatccacatgtatgcctcaaagacccctcgaaagctggagttggtaaaaggagttaataaaaccccgtttaaagccggaggatgtccaagaccgccgggtgcagcttcatatccttctcttttaattattaattctagattggtgttttgttgattgtcggctgctccactaggatggatttactttgttcaattgggttttaaaaagaattggcatttttcttaactcctctccactcagaagaggcttccaagcatgaacatacgagatgtgccgaaaaaagacatgaaaatccccaaactttcagtttcaaggccagaacaatcttcagtttcggcgatgccaaagatttctgctcgcgctgaaaaaaatacaaataataatcgcaaccgaccagtaggaccagcaggtaatcctctctgaagtttctcaaaattagtgatgtgctgtctgttcattgatttaaagcagaaaatatcgtcagtctga

SEQ ID NO: 107924 - DNA, 667 bp, Aquilegia coerulea
  Intron number 1 from transcript AcoGoldSmith_v1.022618m (l ocus AcoGoldSmith_v1.022618m.g) derived from phytozome v7. 0 (chr-ID scaffold_37; pos 1292171 to 1292837 reverse stra nd)
gcaggtgaaatcaaaccagtggacacaaacaaagcaagcagtaaactgagagtgactttttaaaatatgagcattcaagtggtgatcaggaataatggttatgaaaataaataggtgtgaaagggaacaaacctcgatatgtaaaacattaataggaggcaaagttatcagtatcagcagtagcgtcaaaatgagaattttgatctgttacctccccaaccgaagtgggggcatagcaatggttaatttgattcatcaaaacagtgtttggtgaattgggggaaatccttgggagtttaatttgttcgagatcattatggggtataaaatgcaagatatcagggcttaacattcctccttggataaggtgatttgcaatagaagggcgagtgagaggttgtagcactaattcttgggtttgggggggtcaggttgattagttattggaactgaaatttgtggtgaaggatggtggttcttgagatagaggcaacatcgatatatccattgacataatttccattatctttcttttcttttgctctctctttctctcctctgacatcaaattcatcacttctttccctttaccaacagaacctaggcttggaattttatttttgccccaacaggtcgtcttcctcttcgtcgtctttggtaaatcgcc

SEQ ID NO: 107925 - DNA, 721 bp, Aquilegia coerulea
  Intron number 2 from transcript AcoGoldSmith_v1.008915m (l ocus AcoGoldSmith_v1.008915m.g) derived from phytozome v7. 0 (chr-ID scaffold_102; pos 58212 to 58932)
gtttttcaaacccaaaggtgctttcttggttactcactactttgatttacaatttctttttgttattccaaggacctgcttggtttcattttcctgaattgtgttaatttgattaaaataattcattatcatgtgttgattttatttcatttgggtttttggaaaaagcttaaatatcactatatcagagtttaccaattctaatgtaattgtgtttggttggttggttggtgaaaatgagattggataggcttcagtttattcaatgaatcaccataccacatgcccactttgtgctttactggaattacaagtacacaaagaacaaaaatttctataaagtttagaaggcaatcaagttttttgttgttagagttgtagatgagtattatttgcagataagaatggatcccattttgagattctgagaggggatgctttgtttttcattgcaatcttcatttttgttatggtaagggtgcaggatattcggaagtaatacctttttaatttgtacactatgttgagactcgagatggagtccatccttttagttttgaaggcgttcttatactacaattcgtgtatgtgcttgcatgctccttacttgcaagttctgtaaattattcattttgagttaatcatttattttgatcctgtgtctaatcgtcttaatcctattacaggttttaggttacttggataacagacgtaagattca

SEQ ID NO: 107926 - DNA, 705 bp, Aquilegia coerulea
  Intron number 2 from transcript AcoGoldSmith_v1.023028m (l ocus AcoGoldSmith_v1.023028m.g) derived from phytozome v7. 0 (chr-ID scaffold_6; pos 8563530 to 8564234 reverse stran d)
gtccaatcttacccccaactaagactccaccaaaggtatcatatcatattgtcatcacttctacatagctctttaattttaatcgctttttgtttgtgttttggcttttggttttattgtaaatcctcgctgctggaatcgataattcagtacaaatagggtactctattatatccaaaattatttgttttggaaatttacagtattcaccaacctttgaatgaacaatggcttctgttggacaaataacaaatttataaaaagattctaaataaagattttgtataatctgaaagactatttttctgtaacaaaggtgtgttgcgtctactgggatggcacgaaactgagatcaacttctgtagttatgttaaaatccaaacttgagttgattccgtcttgtccaacataagccaccgttttgtgtcaaactgtgttgggcactgctaataatggctttgacccctgtagagaaaagggaagagacacacatgcccttcctttggaagccttaggtgccccttcgacatcatgctcgatagtctcaattctcatttacaatagcggtctcagtcactctttatgttctcaacctaccctatgtgaaccctctatagctctactacatcattcctatcttatctgtctatattgtgttatgctcttgcagatcccagaccagtgctcccaaggtgtaggactttt

SEQ ID NO: 107927 - DNA, 917 bp, Aquilegia coerulea
  Intron number 1 from transcript AcoGoldSmith_v1.006866m (l ocus AcoGoldSmith_v1.006866m.g) derived from phytozome v7. 0 (chr-ID scaffold_15; pos 3956299 to 3957215)
aagttgttcctggtgttgtcgagtctcttaaggtatgtttttgcaattttgatctaatttttattataaaattttgataatatatggttattggggattatgatttgagattagtagtgtaatgtggacacttaaggatagaaacctggaaattattatttgtgcatgtgatttaaattgattcttatatgttgacacattattaatgtgtgtgtggattattttttcatcatataccaatgttcacttatgttgaaagttattgtatttgttgatgctacctgatgtaatggtgcttacccatgaaagcccgtgaaaatttgtcttgttgagggctaatctaaattatggtcttattgatgaattgtattaacaacaattgtaagagtttcatgagtgaaatgcctgtttgaaaattgaattgaatcccttggtacacagaacaaacctattcttattgtatgtgattctgcgctttatcagtgaggttggagcttctgctgaatccttgttttttgcatatttgcaaattcaatagtcatttgggcacaccggaagtgtaatttatgtaattttcaatttaattaaattagcaatgccaacaaagtgtttctctgaattcttctgactattggaattgtgctgatcttgcttaacaccaatgggtctgtccatggaaaattaacatgttaaactgatacttatcccagcaaacctctccatttccacatcttattagaataaatttatcattctttacatctcaggttttcgtcagttagtattagcatgggtttgacatcgaattctctaaagagttttgtaattttgatatttctttttacacataattctctgtttctgatcaagagcatgtgctaggtgataacaaagttttgttcagaacgcattgcaaa

SEQ ID NO: 107928 - DNA, 624 bp, Aquilegia coerulea
  Intron number 1 from transcript AcoGoldSmith_v1.026179m (l ocus AcoGoldSmith_v1.026179m.g) derived from phytozome v7. 0 (chr-ID scaffold_18; pos 2683362 to 2683985)
aacatctcgtaagtttctctctctctctctctctctctctctctctctctctctctctctctctctctctctcttttattgtgattttgttagaatctaaattaatatttacacacacaacgaaaatgtttgtcagtttttcaatcgaataaattcataattaaacacttttttaggatttggggaaaaaaataaattcatataccttttgttattattttattttttttaatttgtaatcaaacattgttgacttattcaaaataattattcagtaatttttgtgtaactatcatggtttgtttaaggttttgagcatgattctctgctaatttggggagaatattagccgcacacaaggccaaaggatgatataaagatgaaattcaaatccaaactacaaaatgatgaactagagcataactacatcatgaggttaacttgtatgtgttttgaataaaattttgaaaaagtctgttgttgtttttggaacattgggggtaaataacttgtatgtgttttgaagaaagcgtattcgaaagtctgttttttagtttgaatatttcagttgacttttatgtggtggaatatattgtattgtagtgtgccagtagatcctctaga

SEQ ID NO: 107929 - DNA, 397 bp, Aquilegia coerulea
  Intron number 3 from transcript AcoGoldSmith_v1.004212m (l ocus AcoGoldSmith_v1.004061m.g) derived from phytozome v7. 0 (chr-ID scaffold_21; pos 3564172 to 3564568 reverse stra nd)
taatatcgttcgaataactccacctttgtcccaatgtatggctgctacttcctatgttacttatttttattattttgtatgattagacatcttctattattggtaatggagtgtttcaacatgggaaatctatggcctgataggaggatttgtatgaggaaggttgctctttagataggggttgagggtagttgtggtcaattgtcaaaatggtgttggttttagggggtttgggtgtattggggctggggtcttcttcttgattttgacatggtttgattattaataaaacaggaaaatgaaaaacataggaacatgatattgatgtggatatgtttcaactctgtgagtttattttgcagatagcagagctagattggttgctggttcatttcag

SEQ ID NO: 107930 - DNA, 465 bp, Aquilegia coerulea
  Intron number 1 from transcript AcoGoldSmith_v1.021481m (l ocus AcoGoldSmith_v1.021481m.g) derived from phytozome v7. 0 (chr-ID scaffold_30; pos 1134105 to 1134569 reverse stra nd)
aaggtaagtcggttatttatcaaactgaaatctgtgatgttaggatggtcttcgtattactagaaacaattattagaaatgattatctctaaatgattatcacctgtttttagggtgcattattcgttattaaataaagttacattatataacaattaaatgatataaaaaatcggacttttgaaaaaaatagaagattttatcttttactgtataaggtattgcgatagatgtatgtgatgaaaaagttaattcaaatctcactcaaacgctgttccattcggtgctaaatcatgatgcgattacaaatcagatcttgtgggatcaggacttggtaacatctgtcttttttagttgataaagaaatatcaattgattaaatattgacgtatgtttttctcctgacatgcaataatcgttccatgggaagatagcggacatcctaaaagatcgcttatcttggtt

SEQ ID NO: 107931 - DNA, 644 bp, Aquilegia coerulea
  Intron number 2 from transcript AcoGoldSmith_v1.023875m (l ocus AcoGoldSmith_v1.023875m.g) derived from phytozome v7. 0 (chr-ID scaffold_40; pos 506096 to 506739 reverse strand )
gattatactttcagtcaaaaggtagcttctctaagaagtattcttagccagtggcggatccaggatttcaaaataaggtgggcttggatgaactaagaaaaaaaaaaaaaaaaaaaaacaataccacaaactgaaagaaatgaaaatttagattaaaatcgacaaaataaataaggttctcattattcaataaagacaagaaaaacctataatttgagacactagtgaataagtaaacaactaataaaacaacaaaaacctaaacaaatcttaatttataaattataaaaacaattaaaaaatacaataaaaaaaaattgtataaaataaaattaccttcgaaaatagatgggaggaatcaaaaagtggcaggttagcaatccaaagtccaaacgaccagcaggcacatagtattaagaaatttgttgtatttttatttttttttgaagaataaagtagaataaattagagaaagagagagcagagaatcccgttgtttttttttttttttttctatgtctatcttaatattttcctaatatcaaggaaaggaatcagggattgtgggagtttgtattgacttttgtgataattagttattgggattaggaaagaatatatatattaataataagctatattat

SEQ ID NO: 107932 - DNA, 406 bp, Aquilegia coerulea
  Intron number 1 from transcript AcoGoldSmith_v1.003146m (l ocus AcoGoldSmith_v1.003146m.g) derived from phytozome v7. 0 (chr-ID scaffold_11; pos 4491936 to 4492341)
aaccccaagaggttagtttaacaaattacttactacccttgttttctttttcagtttttgttaatgggtatctcttgttttagtgtaatttgaattgggtttctcagatttttgctctttgtaatgctgttcatgcccttttttcttcaattctctttgatggattttttggtttttgtttttctctttgtataattcgcctcatttcttgatttagttttgtatgtagggttttcagttacttttgtttgtgttttctttttaaattgttcattattaatgatattttcatgtgatttgatgcaattctgcttaagtggggattgatttgaaaatcttactagggttttggggttgaaggatttcttctcaacttgaaataatgtattgcaggggaacccacttc

SEQ ID NO: 107933 - DNA, 560 bp, Aquilegia coerulea
  Intron number 3 from transcript AcoGoldSmith_v1.023352m (l ocus AcoGoldSmith_v1.023352m.g) derived from phytozome v7. 0 (chr-ID scaffold_11; pos 3567450 to 3568009)
aaaggagcctaaatacgtacgtttctttcgttgttttcttgatttgatatgtatattgtgtatcttaggtgcacatgtagtttgtattgcttctttcagtttatcttcattacatttaaaagtttaaatgacttctagctcttatgttcataagaatgaacaatttaaatcacattatccattgtctaaaaaactctgggatgttttaggatgtaactgattaagtgttcttgaagcaagcatgggattgattttagatatctactttattttctttaaaccttcatcttttgaatttgaaaataatcaatgtagatggggatttcatcactgtatgttactcattattgaagtaatcgatttcttgtagcattattggcagtgagacagtgatttattgttaggattgacttaagcatactgtatatcctcaaaaccttttttatttttgcaaatgattaatcggccacggttttactttcatcattgtatattactctttctatagggtataattaatttcttgaagcatcattggcagtgacatattgttgggcttg

SEQ ID NO: 107934 - DNA, 860 bp, Aquilegia coerulea
  Intron number 1 from transcript AcoGoldSmith_v1.023283m (l ocus AcoGoldSmith_v1.023283m.g) derived from phytozome v7. 0 (chr-ID scaffold_110; pos 151014 to 151873 reverse stran d)
ttgttgtcaagcttggtgatcaggtaaaggttaatctgtgtgcattatgtattgtttagattaagcaatgatccccaagaaaatttacattaaagctgttgattagaatatttaggatgaagcctaaatgtaaacttatctgtgtgtgagttcattaattattactgtctttctcgggttcttcaatgcaaacttacaagtgtgtccccaatgaaagaaatatatttcttatatatgtgcaatgcatatagtatatgtccgataaactcaagatctagtaacatgcatcaacattatgtgtcgaaatgtgataagatcctggagtccgactgtggtggtcttgttctagtttctcaagttatctcttgacatcttctctgtagtgatacttagggctaagtgatgtgtactgaactgctttgtctgttcttttttatgataatgaaaaatcataaaatgtgatatttcattttttgttgttgttgttgttgtaacatctgccatgatcttatttttctggtgaaatgagtaagaccattgcaaacctttgccatatttcacactttatgttgactaggtcgcagtaaacataatggttgtatcgtttgaattcaatgctattcaggctcattgttgactacagaaaagtcttattccaactcttctctgttccacactcccaaaagtttatccaatttcagtatttttttttaggaaaagatatgggtacataatggatcggagttttttggcaatttgtctttcagctttatcagttgctattgaaaattgaattggtctcacagtatctgttttctgcaccagactgcaaagacgaaggttattaatagctgtcttaa

SEQ ID NO: 107935 - DNA, 829 bp, Aquilegia coerulea
  Intron number 2 from transcript AcoGoldSmith_v1.005345m (l ocus AcoGoldSmith_v1.005345m.g) derived from phytozome v7. 0 (chr-ID scaffold_60; pos 459788 to 460616 reverse strand )
tcacgttctaattgacaagctgttgaccgagagaggtgaagaaacttgttgttttttgctttcagtttctccttgtagcctctttacttataccttcatgtacattgtctctcaaattatttgtctatgaaatttggtatactatctccatttttaatatactccacaaatattactcactttaaaatttgcttattcaataggacagagacagaacataaaagggactgttgtgtttgattattcttgaagaagatgtgctgagtcagtactaaatttagaatgttacagaagcactaaactttacttaacctttcacacttgaatggggcattcacttatcagacattgtcccgtaagtagggcccattcccgatgttcataccgtagatcttgttgtcaatgaatagacaaatcttacaagttctttagcattagcaatcctgaaaaggtgtttagttggaacaatgtaattaactaaatgggattaaacatgtagttgcttaactttatctaataaaaagtaagctttgagcttttttagacacattgatctgtttattttcttataaagttataaaaaaaaaaacagatgaaggtttatgtaaaagaaataaggaaaagaaaaacttactgaatgaaggtataagtgaattcgaagcaaaggtataatatatactagtcattgaacattatcagtgtaagaaatgcataaatttatgtttaccttggtctcatggtgctttatcttcccctgggcatgctattatcttttctcagtcccatggtgttcatatgtgtttttacttgcaaatgaatttctcgcagg

SEQ ID NO: 107936 - DNA, 763 bp, Aquilegia coerulea
  Intron number 1 from transcript AcoGoldSmith_v1.001732m (l ocus AcoGoldSmith_v1.001695m.g) derived from phytozome v7. 0 (chr-ID scaffold_10; pos 1164678 to 1165440 reverse stra nd)
tggtgctactcacctcttcttcaaccatctttgttagtctttctattaaaatttaagtatatatctttttctttcctgaatttttttttcataattcttgtcaataccctcttgattggattttggtagatctaactacttttacttataatttttaatttgatgttatcatttttattttttgtatatgatcatcatcactgtcatcattgatgaatttattttgctactttctaccatcatctatcattaagcttcagtgtttgatcataactatgctattgagtattttcttaagtgtggatctattggtttattgcctttcaaatgtcagattaatttactaaggaacataactgacagataataacattcaagaatgatagaatagtgctgagtggctaataacatcaaagctatgaagatcttattgcttcaaattaaatagagtgttcttttaatcttattgatccacttattcttctgtcaaatatgtcaaatttcccccatttggactacgctataatgttaaaatggatgtgcatttctcttttttctttcttgtggttcactctcactgatgtttaagacactctgtggccaaataggctctggcgggtttcatgatcattaatgtttatttctccaatatctttgaacagagaaaatttctttggttgtttccataggacaggtttctaaataggccgctgaatttatttttgtagatcctctgtctcttgtaagagaccgaagagcaaaa

SEQ ID NO: 107937 - DNA, 334 bp, Aquilegia coerulea
  Intron number 1 from transcript AcoGoldSmith_v1.000757m (l ocus AcoGoldSmith_v1.000750m.g) derived from phytozome v7. 0 (chr-ID scaffold_1; pos 6455467 to 6455800)
cttcattcatttagctcgtttcaactacaacagtatggttctttcaattctctataattcgaatcttccaacacttacttcaattagatctcatgaaaattttgttcgaatttgatgttagaagcttaagagagctctattcaattgttttcgtaactttatgtattgaaaatgaagtgaattgtaaagttaaattgagttttatgtttgaattgatttgtgagatctgaaatttttaatgagaagtttgattgatattgatttgtgtttttgtttgtgttgtaatggcatttttgcagcctctcagacttgaaatcaaggtattgttttactt

SEQ ID NO: 107938 - DNA, 692 bp, Aquilegia coerulea
  Intron number 1 from transcript AcoGoldSmith_v1.027154m (l ocus AcoGoldSmith_v1.027154m.g) derived from phytozome v7. 0 (chr-ID scaffold_21; pos 2566722 to 2567413)
aaattgttatgctaatttaatttgctaaaggatgacctcaaattatcagtgaccaaaccatcaaaaaggaaagaacatttttgtttgtggatcttatgaaaacaacgagggaaggaaaaaccgagaagacggggaagttcaagatatcgattgtttgtttcagaattaatgttaaaaagaattatctaaacattattctttttttctatggaaatttttaataacaagttgaaaccctcaaactggtttgaatctgtgtgtaaaacttaggatacaatactcgcaatttcaatcattcttgttatacatacccacattattgttccatttatgggtttgaatatggatacttattacagtttgattgacaagtactgaatgtcctttttggtcttttggttaactacaatcatatgattatgtccatgtcttggttaaagattctctaagtagaacaaattgtttttgttatagcttgttttatccttcttattttctgtttgatccagtgaaatgttaaaacttatcaagtgacaactggataaagtgtgcacaattttcttgactcatttgtccaataaagtgtttgcaaccttgcgctatggaattttatgtgcctggctatccttatagtttataaaaatctttgtaatttattaatttgtatgtactttgtgcatatatcagggctc

SEQ ID NO: 107939 - DNA, 465 bp, Aquilegia coerulea
  Intron number 3 from transcript AcoGoldSmith_v1.001909m (l ocus AcoGoldSmith_v1.001909m.g) derived from phytozome v7. 0 (chr-ID scaffold_9; pos 2278159 to 2278623 reverse stran d)
ttatattctacggcgattatcaggtgagttttcttcttatcaaggcatttatgttttaagattagcaaaatggttatcatagtttactcttatgctcctattgtgtaatcaccgcaaaatggttatctcgtcattttgattaaataaaatcgtgtttaatgaggactaggatggcttccagtttcgtgttcaatctgacatatgttgtgaggaacgactgtcccacgcatctaaccagctcgcgtggttcacccttttttggcggaattcttttttgttcagctagagaaagaggatgatttcgttttccttatctcctttgtttctttcacttatattgatcaccctttgccttgaaatgcgaaggacgtatctattaaattctgtgagtttggtgctgtaccatgttatgcctcatagagagagaacctcacaaaaccttgtttatttatggaaggcttgtaa

SEQ ID NO: 107940 - DNA, 721 bp, Aquilegia coerulea
  Intron number 3 from transcript AcoGoldSmith_v1.001451m (l ocus AcoGoldSmith_v1.001451m.g) derived from phytozome v7. 0 (chr-ID scaffold_49; pos 474227 to 474947 reverse strand )
atccactagaggaacctcaagttgaagaggtaattcatttacttttgtgatgattttatgagagctatatgatacttgaacgagttttcatctaccctaagtttgtttagttttgtgtttgattttaattttttatttaccagatttcctcaatatattcaagttcatcgctgactacttctttgatatctactcttaataactaacaaccttccgttaatctttcttttttctgcccgattcatcgatctactgatttttcttctaactaaatggttgacctcgttttaatcacttttctattcctttccgtatctgtggtagactctgtggattgtatacataagagatatttaattgtacagaacaaaagagtcattgtgtttcttggttggtttggacatgctattgggagaggtgcagggctttaatactgggaatggatgcagctcatataggtaattggctgtcaaatgtttgagagatgagtagctcgcttcttagatcatgttggaagtaggaactcaagagcaatacttgtaaactccttcatgaataatcgacgtgtattcttctgcatttacatttgtatagtaaatgtattagatatgtatatctgtacatatgcatgcttatactgcatctgtgtgcacgtattttcatcgatatttaattgatatcttttctgcatgaacaggtgaaaaaacctaatcctagagaa

SEQ ID NO: 107941 - DNA, 912 bp, Aquilegia coerulea
  Intron number 1 from transcript AcoGoldSmith_v1.001451m (l ocus AcoGoldSmith_v1.001451m.g) derived from phytozome v7. 0 (chr-ID scaffold_49; pos 475508 to 476419 reverse strand )
atcagttacgtaactctcccgatttcaactaacaggtatttctatctctctcacatcgcttgtgtaaatagatagtttaattcgtgatattctttttgctccaaatttgtggttttatggttttaattgtaattgatgattgttggggaatgaaattaaattgcaacatcaaccaacagtctcttttacgttatccacgactctagaatatatataagtgggtttagttttatgagatgtaattcgttgtttgtgataaaaagagataaaataaaattgagaaagagagcggcatcgatcagatgttttggatatataatttttttgtttatggactcgttgcagaggtacttagaagaaattgcagagctaattgaaagaagaagaagaagaaactagtaacatcagtaacctgtgagtggacatagttttaatactatattaataaattggtttagttctcgatactttgattgatatgagaaaagtaattttgatgagtctgcttatgctaacatgatagaggaagtagaacttttatttgttttcttttataataatatgtcttacaagaaagtttaatgatagtgcgtgcacaagtgtatatacgtgtttattatctgagtgtttacgattccgcataatatactgactctaatacacgtgttggttaaaaaaataatcacaaaattttcttaataacacaaacaaactaaatgttggtccccaccgtgtcacggttgtatatttaaaattgggggaactgtttctgaatttgttggtcacatttggtgttaatctagatattactagtataaatgcaaggtttgatttgatgtggagacattatgtagtgttgattgttgcatttgttttaatacagataaaaatttcgaggtaattaaagaggca

SEQ ID NO: 107942 - DNA, 952 bp, Aquilegia coerulea
  Intron number 1 from transcript AcoGoldSmith_v1.013451m (l ocus AcoGoldSmith_v1.013451m.g) derived from phytozome v7. 0 (chr-ID scaffold_54; pos 1376144 to 1377095 reverse stra nd)
agtgcagcaatcgagggtttcaagaggaagattcggtatgtgttttcgatttggattttgtgaatttatgttttgatggagtttgaattgaattcttggttaattttttgattttttgtttatctttttgctggaatttgtgattgttttggtacatagataatgtttttgtggattaaagaattgattcaattttgtggattttggtgtgatgtgtatatcaaattggtgattttgttcaattctttggtaaaaagctcttttattctttatatttatcgttatccatgaattgaggaatgaatttacagggttaattgtttgcattatttatttaattgtgttttagctctttaatttgagggatgtgtacttatgtagtagttgaggtactaagagtttcaaaaattttgttaggaagtgattctgtaagttctgtgtgtctaggtgtttcttcttcgtccttgactgagtttctagtgtgacagtgagtttggaattcatcttaaaaggatagatacgaagtaattggaatctgtcctttagtttctctatggttcagtttcattagtacctagatgatgtaatcaggatttctggagtacatattttaaggtttcatacaatgacataaacagcattcttaaatctgctcaaacatatatgcatatggtgaggcagttggatatcacaatgttgttttgacacatgcttagttttggacccttcagtggttcatatcatttaaagttgaaactctggtcttggtattaaaactttgagattcccatccatatcgtatcacacataaaattgtgttattatacggagaagaactgagaaggcctgtgttctttgtgtacatccacaacaattctctttggctgatttatctatcatgcgttcttttacatagccacatgtttttcattagagttgttgctgcagggtc

SEQ ID NO: 107943 - DNA, 891 bp, Aquilegia coerulea
  Intron number 1 from transcript AcoGoldSmith_v1.005155m (l ocus AcoGoldSmith_v1.005155m.g) derived from phytozome v7. 0 (chr-ID scaffold_9; pos 3970978 to 3971868)
ttttcttcaggtgagttattagggtttctgagctgatttttcttgcttttgtttttatctttagtagttttctatgaattatgatctacagatctattgtttgatgagattctgatgtaaaaattccacctttttcagttgttatgtcactgtaattgtttgatgaggttcaaattgtgaacaatttggtattgaattatgattttggtactagcttatagttcaatttgaacttggtctttgattttctgtggaaattgactatagatccttgcaatgtgttagtttaatgctgcaattcaaatttaccaaatttgtcacttgtttaagaaattaggattttggtgtttctggtttttagttttgtggtatctttgttggattttggatggaagatcagtaggaattgaaaatcggaatgttatttgtcagaacggcgagctagttaaaagacaagtggacagaaataaatcgaatttcaataatttcatacacgtattactggattgattatagtggcacaatgccgatatcaagtagttgacattgctccatagagtttcaaaaacagaaaaaaaaaaaaaaaagcaccatttaaatttttataaagaaaggaaggtgatatgaagaaggtggacaagcggctccccgtattaatggttgtattattgattataagtatatacgttctttgccatttgtgtaaatattatgtgtaggttgatggcttcattttttgcttcttcagcacacccgctcacacacaaagacacagtaacgcaaactgaaaacacaataacattttttcctcctctctgtactattcaacttcttataagagttgtttctgtgacaggatttagtttactatagcaaaagctagtgcataat

SEQ ID NO: 107944 - DNA, 753 bp, Aquilegia coerulea
  Intron number 1 from transcript AcoGoldSmith_v1.007734m (l ocus AcoGoldSmith_v1.007734m.g) derived from phytozome v7. 0 (chr-ID scaffold_30; pos 2595075 to 2595827)
cccatctctggaacaagaagatttgctctttcaaggtattctatattttgtatatctcttcaatccccaaaatacttattagtaattagatgttaaaatagttgaattttctttttttttttatccatggcttgtttgttttatttatataagaaatgatggaattagttaagaaaattggtatctggatttcttccttaatattgggaaaaacaagcaaaatatatagttatgaaagattgaaagctgacttcacaattttttcatctggggttgggattagtagtagaaaacccaaatttgaatctttaatgcttcttaacatgcttatgttattgggagttttgaagagcttctttatttataaactcatctgtataagttttggatgatagatgattagaactagagttaaattcccgtattccaaatttggaactggattagatcaagtttcactggtaatgggattagccagtaagatgcaactttgtaaatgcacgaggaaaaagtctgcatcgctgtagtattgattaatatgtgatctattattcaattggaatgatttgattgacgaaaatgacttgttaagtcatttgcttccaatctattggattggtaaagggacaaggatatgttgatcttgcgacacatttaacaacaatattagtatgttttttgagtaatcatttattatttcatatttattttccctttttgaccttcgtgcaatttcttcagaacacctttcga

SEQ ID NO: 107945 - DNA, 708 bp, Aquilegia coerulea
  Intron number 1 from transcript AcoGoldSmith_v1.010971m (l ocus AcoGoldSmith_v1.010971m.g) derived from phytozome v7. 0 (chr-ID scaffold_18; pos 3453597 to 3454304 reverse stra nd)
tattatcagcttatcaattcgtctaatctccttgggtaaaaattcaatttatttattttttttatttgatttgttccctttttgtgctacattgcctttgttttgttttagtaatttggattattatgaatttttttttttttttttttttttccattttcatagagtcaaacaaggttcttacttccttaatcaggtcaaaagattagatagaatagctgattgtgttcatggtgttgagatttgggtaaatttggggataccccattgaataatttgagagttgagatttaggtttaaatcgagattacttttcttagttccatagtacaataattcagacttctgtttcacaatgtagactaatgtagctcactgaatttcttgacaactggaacatctctattgtaaaaataaagaaaaaacggatcctggattttcaatttccacataaatcctattgttgttggtttttattttacccaaattcaaatttctataaaaccctataggaagaaagatgagaatagaactgtttaagcctttattttgactttggttcatatgaatattttcaattccatgtggaacacttgccgattttaactcggatatttgtcttattgaagtttgcattgctgagaaagagttattgtatatgaaatctgttcagaagctttacatctttttgacaggtatattataatc

SEQ ID NO: 107946 - DNA, 720 bp, Aquilegia coerulea
  Intron number 2 from transcript AcoGoldSmith_v1.000608m (l ocus AcoGoldSmith_v1.000608m.g) derived from phytozome v7. 0 (chr-ID scaffold_1; pos 3763263 to 3763982 reverse stran d)
cattgcttctcttgatcttcgaagaggagagatatgtaagctgttacttatttaatttattattgttttgttgaaactctggttttgtgattgttgtagaagattttactcatgttttttttttttttttttttggtcttttttgaatgcagtttggagacatgttcttggaagcaatgatgttattgatgcaattgatatcacactcggcaaatgtaatttttctttgtcttgatattgatgttaatttgtttgttatggagatttatgtttagagctatgtctgccgttgtcttcctttgtttgtgttttatgaacaccttaaggatatactgtagtgggattgttccattgtggtttaactgtgtctttttcagaagatcatctgattgaataattaagagattaggagcaaaaaacaaaacacacacacactagtaaatatttttacatacaaattaataattgattggaacatgatatataatttgagagtatgttcaacttgaatagcaatatcatagtcaaccagttgtccatgctatgttttgtaaaagtgttatgcttagaggtccagactttgtaatattactgtttttccttttggttgctctccctgatgccttaacactacttccttattcaatgttatcctgtattaaaacttagctttccttgagtagctgctaattgtctaagtggtgcatattatgtttgcag

SEQ ID NO: 107947 - DNA, 415 bp, Aquilegia coerulea
  Intron number 1 from transcript AcoGoldSmith_v1.018342m (l ocus AcoGoldSmith_v1.018342m.g) derived from phytozome v7. 0 (chr-ID scaffold_37; pos 836220 to 836634 reverse strand )
ataaggtcactatcttgttctatctttgattgaattattagcttaaagatttgatttttttatttttttttaccccaaatccttattttgaagtttttgtctgggtttaatttcatttgtattcaatcctgctaaattgaataaattacaatagttagtctttgtttttggcactggtacttgaatttagaaaccctaactcggtatattgttgatatatttaaaagaaaagaatacttagttgaatacttatacgcttaatgataaaatttgaaccaactctgatttagtcaaaagtgttccagagttttgaatgaaacaaatatctttgtttactgttgtcgatgttgaaaacatctcttacaaatgatggtaattttgctcttagactaagatagggatttttctttttcag

SEQ ID NO: 107948 - DNA, 670 bp, Aquilegia coerulea
  Intron number 5 from transcript AcoGoldSmith_v1.007876m (l ocus AcoGoldSmith_v1.007876m.g) derived from phytozome v7. 0 (chr-ID scaffold_27; pos 2587556 to 2588225 reverse stra nd)
ctgtaaaggtgcatacgtctatacctatttgcctctacacttaatagtagttttatgttttgtgaaaacttttggggacagttcctgtggtgaacatattagattagtgttatcattgccatacactacctctagtagcgacatttgcaatgtcattatcaatatatattggtgtgcataccaaaatggagacaccttagtaagtttaatttcagaatccatcaccaccaaactggtagcaaattgcattgtcttacagattttatgactaaacctaacattattcataaagtcaagcttgctccttataaaagcgtattcaagcattgcatccatgaaacttaatgacaagttggtgctgaatggatactgttattcttagcttagctaccaacatgtccattttactgttggttggtctgctccgaagttgctctttttcagaaatcactcatgaacctgcctccttcctacttcacttcttgttgcattgtttgctaaatgctaagttgctaacttaaattgcttgatcctatcctccctgttttttgcaccggcatgtctcaaaccttctaaacttttgcatttgctaaaaagttcttagaaatacaatttttctagatggtcttatgttcattggtatttgatgtctaacagacaataaagacaa

SEQ ID NO: 107949 - DNA, 415 bp, Aquilegia coerulea
  Intron number 4 from transcript AcoGoldSmith_v1.007876m (l ocus AcoGoldSmith_v1.007876m.g) derived from phytozome v7. 0 (chr-ID scaffold_27; pos 2588310 to 2588724 reverse stra nd)
gattgggcaccccagattcgagcttattcgacgtattctttattggctctctgttaacaaatgcaagttttgtgtataatagtggtagtcaatatttatgtttgtccttaataccccatatgcaaatttcatgttgttgaatagactgttagattcaaaaggtttaccttgtgtcctgtcttatcgaatggctgattcattgttctcttctttttagtttagagttgtttgcccttttgctttctggcattttgatgaaatccttcagatcaataaacagtgtctgaaaacaattacaaaaacataattataactagcatctctggtattgttcttaatagttaatattgatattgatcttgcatagtccccaaccactgattcagatcatttaaatattttttgtgtcttgcag

SEQ ID NO: 107950 - DNA, 785 bp, Aquilegia coerulea
  Intron number 3 from transcript AcoGoldSmith_v1.003260m (l ocus AcoGoldSmith_v1.003260m.g) derived from phytozome v7. 0 (chr-ID scaffold_9; pos 6042210 to 6042994 reverse stran d)
cgaaattggtcttgttcaagctcgttggaaatttggtaattattagcaaacatttgcagaaatatttactactgtttgagtgtagaaactagagtgtcggtggtcggttatgtaaaagtcgtcttctttgagttctttctagtttctactcagtttccgtcacttcttttgtcgtaatgttgcgtgatttgttgcgtatctcgagaaaagagattaggtgggccaataccgcttaccaccgtagattaccagatactctggcacaaacgatcctcaccgtacatatcgatatcgaaggggtccctttgtactttaaccaccaatttcagctactccacgtgttcactcttttcaaagtaggtaaaagtagtttattttattgattgacataaatacccccaaaactcttactagaaagtcaaactgtttctgtcggttactctttttacataagttgacgaaaatacccaaactgctttactgaaagtcagagattgctagattctcgccatgaaaatagccgaagtaaacagagggttgtgtttggactaatttggatagttgaagggtattaatgtcaagtaaaaatattttctgaacaaaccatgtgcattagtacagcaacttaactaccgggtgtattaggaccatatttcaaccaccgacacttaaatgtctttgtcccacccatgtgtttttcttttttttcttttttttacttcaattagttaatatttgctgacgtgtcaagttgtttttctggttggattttgcagtgaattcag

SEQ ID NO: 107951 - DNA, 486 bp, Aquilegia coerulea
  Intron number 3 from transcript AcoGoldSmith_v1.003786m (l ocus AcoGoldSmith_v1.003786m.g) derived from phytozome v7. 0 (chr-ID scaffold_10; pos 1773936 to 1774421)
agaaccaggctctactggtaactccgtcttctttttcctcgcctttttttatgtagtctggtgacctatttccaccccttattctttttttttttttttttccattttcatcgaggacttttgaggcttctatttttaagatatcttttttgttataatggttgtattcataaagacgagagccgtcctatgcttttgggtataagttggatttgatgcttgactttcttataattacggtacaacctttgattttcacacaatccagtatactgcctttgtttcatctttcgcgttttactttgaaaagggaactatgcagaccagctcattatttagtgctttttgattttatctgtgatatagagacaacaaatgtttttggcatgttacctcttaaatattatatgctagaattaactcttgattggtttttcccattattatacagatattggtatcttgctttgtgaagacttcacattt

SEQ ID NO: 107952 - DNA, 790 bp, Aquilegia coerulea
  Intron number 2 from transcript AcoGoldSmith_v1.014434m (l ocus AcoGoldSmith_v1.014434m.g) derived from phytozome v7. 0 (chr-ID scaffold_30; pos 708777 to 709566 reverse strand )
ggctgaagttgtagggacgagttgcttggttttgcagtcacaccttcattcagggtatagaagttgaaaaaggatgacctgtgccaatttccgtttggtggtgcatgtggctaaacattatcaggggtggggtatgaaccttcaggatttacttcaggtgagctgtgaaattgttgttgcaaatatcaaagcaaaggtttctgcagctatgataattgtaaaatacagactatgatctagtttgattgaattgaaacatatatacggctttaaacaaaaacccttcaaaattatgctagagcccagagctctgtaattttcttaggtctatgtagaatatctgttgaaaggtctaaaaaatcttttcatcagtcattggtctggttaggcaaccataatgcgtagatcataccaatgtcttcacattcttaacattttccaaaggtggaatagattggtggatttaggatcgtaaatgagtaacattcaattttaatttttgaaatctctaaaaggcctgtccgaggagcctaacctggacgtcatcatgttttgggccatttacagttctacacatcgataggtacctgtacaacacatatttgggcagtaaactttagtttttacccttttcaattcatgccatttgttaatattgcacactaatgcttatatacatcacctggttgtgtgcgataaagatggagtgaggaaagcaaggcactagtttcttttacttggggttagtttctaatattacttttaaatctaggaggaaagcaagggactt

SEQ ID NO: 107953 - DNA, 486 bp, Aquilegia coerulea
  Intron number 1 from transcript AcoGoldSmith_v1.014434m (l ocus AcoGoldSmith_v1.014434m.g) derived from phytozome v7. 0 (chr-ID scaffold_30; pos 709606 to 710091 reverse strand )
ccggtaactgaaattataaagatgagattacagatgttgaacctggtgatacactttcccttgctaagaaagcagtgatagcttcaaaagaagcagcctctttatttgaagagtcaaatttacttggagatgatttcagactgggtgaaccttttcttgggtcagtttcatgatacacaccttctttgctggtttgatcctgttgtgccagtctccacgaacttgtgtaattcttagcagcttggagtccacaagtatcaaccactgatactccaaatgatcccctacgagtgttcttgcgggttatgcgacaaggcaacttttgaccgcataagaagaacgagagttgtttgttcaaattcaggcatgtttctaaatacttaggctgagtgagttattgttaggttctaactggtgtttttattgattgctatattttctaatgtgacaggagttggccagattagaggaagtgaagaagaggct

SEQ ID NO: 107954 - DNA, 1058 bp, Aquilegia coerulea
  Intron number 3 from transcript AcoGoldSmith_v1.008681m (l ocus AcoGoldSmith_v1.008681m.g) derived from phytozome v7. 0 (chr-ID scaffold_9; pos 2117993 to 2119050)
tcaagcgaaaatagaacctggctttactgaactgggtatgatttttttattgttcactattgaagaagaggctacatgtttgagttattctgtagttaacgtcttcgttcagtaaacatacttttattggtaaagtaaaaggagaataataataaaagtgtattaaagtcaggtaaagggattttagtttggtatatgaagtgcattgacaggccaaacatgtacgcaaaagaagttccacaaagaaataggtgattttggtatttcacaaattatctcatcttcatgaagccattccagcttgtataatttgtgtttggcttaaaactagcttttgtgtttgtttgtgctttaatgagtcatgaatatgagctgttgctcatctttttaagggataaaatagaataaattttagtactaaaaaaaaggttgacacgaagataatggagggttccagttgtttacatggaagtgagacatccaaataggttggcaccactccttaccacactttttcttttcccattcaacctgacaaagaaaatagtcaaatactgaaagccattctctggtatatgagctagccacaaggccccgaaaacctaatcttgtacaagatgccctgtgggcagctaatacaatctcgttaatgttgaagataagactatcatggtcatgtcccaaggagttgaagatcctacttttttttatatatattcagttattcttattgaattcacttcttttacttggtaacagtacagttgttgtttactaatttgaaggggcatgtttcttggaatgagtgatggcaaatgaatgtatgtttcagtttgtcagtatttctggacttaactagattggaatagttggacttaattagattagaatagttgcttagagttgaagaaagtaagctacgacctttgatccttttgtttgtactgtatcatttttttgtgcatcttatattggaaatatatagagtttcttattattctgtgttctgtccttgtttttcagtttggcaaaagcttgaagatcagaatcgagaattt

SEQ ID NO: 107955 - DNA, 228 bp, Aquilegia coerulea
  Intron number 1 from transcript AcoGoldSmith_v1.000083m (l ocus AcoGoldSmith_v1.000083m.g) derived from phytozome v7. 0 (chr-ID scaffold_15; pos 1094540 to 1094767 reverse stra nd)
tctcattgctgttgcaattggaaacttcataatcggtatgttttccttcttcttcttcttctgttttctctattcgttagaaactctaggttttttagcttgaatttgatcttgtttgctttctataactgtgataattaaacaatttagttgaactatagtgtgtgtgtgtgtatttgtgcaatgctttgttttgatcctgtttattgttttgttttacagaatttg

SEQ ID NO: 107956 - DNA, 924 bp, Aquilegia coerulea
  Intron number 1 from transcript AcoGoldSmith_v1.001330m (l ocus AcoGoldSmith_v1.001330m.g) derived from phytozome v7. 0 (chr-ID scaffold_18; pos 4390751 to 4391674 reverse stra nd)
gctactgttggagatttcttcgttcttccaatttcatatcctttttacttttcaattcatcgattcattatgtatgtatgtatgtttgtgatccaattgcatgcaattgatgcttaattcttgaattgatagaacaactttctctacttctttttagtaattaaaactattggagtactagtgaatctttttgcttgttattgtatctaggtattttatgaataaataaattgaggcacattttaacaatatatttacttttttgaaacaactaagttgggacttgggtatttcttctcctgagctacataattgtgtaggattggtttaaatttcagaatcatggatatgaaacttattgtataagtaatttttatcattttgaatacagaacatcaaaagtcttaacatgggaatgcatttccatctatatcaaggatgataagatcaactaaatatatactgactgcatacgttaaaatagaggagatgtagtgggtcttagtgatacacaatatgcatgtggtgtatatggagttaagggcaccagggagaggttgttcttcactagagacaacctccccactttcgagaggaagttgatctttcacttcctatggccttaagtgtatttggattggtagcatgaaggccaatgtatgtgaaaaaaatcaattcatatgtttctgttgaaaaatctatggcattcttggatatgttaatgaaattagctgataatcaaaggagataggcatggtttctgcttttgttcttcaatttttacgttagtcatacttcgccgtatgtatgtttttttctttctttctctctgcgagttgagagttcgaggaaattgttgcaagccatgaaaatggtttcatttagaagtctttttaaatgtgccttaaccaaaacatactggtc

SEQ ID NO: 107957 - DNA, 841 bp, Aquilegia coerulea
  Intron number 1 from transcript AcoGoldSmith_v1.003242m (l ocus AcoGoldSmith_v1.003242m.g) derived from phytozome v7. 0 (chr-ID scaffold_10; pos 3856737 to 3857577)
atagtttctacttcagatacccatcagcaatcagagtaagtttctcattttgtttttcttagatacattaaagctctcatttttagtgaagaaattgaaaatcaaatattgtttattttaatcttatgtagaaattattgattttaacgaaatgggtatgtttgcatttctaattccacacgacaaattaatgtttacttactctgcggcactaaatgtttgttaataggattgagctgaagtaaaccttgttgcatttggttaaacaattatagtcaattgttattgattttttcatatttcatagcatttcgaatagtttccttgggttatgtatattagtagacttttgttccaaatggtcatagagatccttaggatggttctatttgcgatattaagtttgttacttatatgtgttattgattctagttgggtagtacttaatttaacaattgagtttgatttgaaccccacatgttctgtggcattacaagcttaatgcgctccttgtatgttcagtggcattatgttttcgataatagtgttggtttttatttttagaaatttgatttaagttattaggactgatataacctaattcatctgagctacgattgtaagtcttactttcttaatgtgaactgttaccattttctcttgtcaatcttacttgcctacagatccttgaaagattttttgattgccaattatttccacgtactagcatagtagcacgattgctcctaagtttttctgggtaataaaatccttgctgatttgctgtttcttttttatggctgtagttcgatatcagcttcagaggttctttcgaagggtc

SEQ ID NO: 107958 - DNA, 563 bp, Aquilegia coerulea
  Intron number 1 from transcript AcoGoldSmith_v1.006247m (l ocus AcoGoldSmith_v1.005959m.g) derived from phytozome v7. 0 (chr-ID scaffold_11; pos 5738855 to 5739417)
tgggtttctctcttctacatccgtttttgttcttggtacgtttttttttctcctcttctcatggttctgttatgtgattagaatttttttttatgatttaatctcttttcattatatttgataagaattacaaaagaagtaaagttgtttggtttaattgttttaatgggatttgggttttgtaaattttaagaattgtatgtaaagtgttttggtttatacaagtttgaaaaaaataaaacatgggtagattcttatagagtttatgaggggttaaagcacatggtgaggttgaatgttaagttaagttgaaatgttgagcagagatcaaaggaaattttctctgttgtcttaggttagcagaaatgaaacttaatttatttggtatttagtgtgtttcaggattgtgacagatcatgataccaaacatcttttttatttatagctaatgtgatatgtttttctatagcttttgatatgttgatctttagagtgaaagtttatgaatacttctttatgttgctacaggtcctttccttttttattccttttcagtattaagg

SEQ ID NO: 107959 - DNA, 854 bp, Aquilegia coerulea
  Intron number 4 from transcript AcoGoldSmith_v1.006247m (l ocus AcoGoldSmith_v1.005959m.g) derived from phytozome v7. 0 (chr-ID scaffold_11; pos 5739991 to 5740844)
cagcagaatctagaaatttgactgatacaacaaaggtatcaatcaccaatactcacaagtactaccgttacctgatgcagcactgccagtattagaaagtttgagtaccatttgtttttttataaatctgtgcttattttacgtttaaaacttatatcttttaccagaagaagaaacagtaaaaaactgacagaattagatttaaggtcaagccttagagaaaggattgatttcttggactaagtaaatatgtttgaaaagtgtaacttgtggttcttatggaaaatgacctgaagctatagaaatttcaatttagaattagaaatgggaaaaaggaaaaaaaatgatttggtcattaatagtagccttacttgatatccatatacaagtgcgtagggaagataatctgaattgtagcacatcccgtaggaaatgttcatcttggctgttattctgcactcagcaaacttacgctgacagagtgcaacaacctaggtctgtcacagttatcagcttatgtctgttgttcttaaacagtggtcaattctgatttgtttaaactacctaagtatctaaataatccgcctcttccaactaatctcatatctaggctttaaacttgcatgaagacatccaagattaccacaagagacctcctcttacattatatttttctaaccttgcaaaagcaagccaaagttttgaccatccaaattagtcttcaatatataatgctagaagaaaacggtttataatatcatttttttttcaaccactgcattgttcagaattagaaataggaatttgttttgctctgtaacacggactgcttcttttgtgatactgatgcagat

SEQ ID NO: 107960 - DNA, 943 bp, Aquilegia coerulea
  Intron number 2 from transcript AcoGoldSmith_v1.025083m (l ocus AcoGoldSmith_v1.025083m.g) derived from phytozome v7. 0 (chr-ID scaffold_10; pos 2361616 to 2362558)
gaatttgctcctaaaattcagcaagtaattgactggtaatttttaaacaaaccccttattataattctctgtgtttattgcgaaatgaaaagattgcatttgaagtagttgatgaaatgcctatatgctaagacaagcagctcttttttagttttgaatacaacagttgacagaccactgaggctcatgtgtacattgaagttttgcttgagattaataaaagaattttgaaattctaaactagtctggcacaaaggtctgtaatgagctaccatcttacctgtgtttggttacgaaagttgacaggcgactgagactcctaatgttcttatgttcagtcaattttatcgagaacaaatgtttggtgacccttagttttggcaaatttgtttgagttaactggtcatcattaacggtcatattgagtcaccaatgacctatccaaatgtttattaggcatgttttaaacttgtagtcctctattcagatctggccactgccagaaaaaataagagttgtaatactacagatttgtatgactattttaatcttgcatttgttctcacttctcactttgatatccacccagacgcatgaaataacctacagttcctgcacatcaaattgtattggcaatagtcttgcacttgccaaacttatctccacagagatatttttcactgttcataagtcatcacatactttctcagtgaagaatgtatgttcaagttttaaccatattgaagtcctgaaaatagtgtagatgtgttcgaacaatcacagttgtttttataatatgtttcgtcctgtacaccactgtatttttctttcttaggattccttccattactattgttgatattgtttctgttctaatagcttgaattgggttacacctctcatggtaggtttggacaactgcaggcagttgatctagaaagta

SEQ ID NO: 107961 - DNA, 751 bp, Aquilegia coerulea
  Intron number 2 from transcript AcoGoldSmith_v1.008276m (l ocus AcoGoldSmith_v1.008276m.g) derived from phytozome v7. 0 (chr-ID scaffold_1; pos 3269894 to 3270644)
ggtatgttacatccattacttttacattccatggatattattgatatgcattagtgataattgtcacagtatatgcttttaagtccatcagaaattttgaaaatatcattgtgtgggccatcaatctctgtttaaccttacatgaagttgaaagtttgtggattctcttcctttgggattgaaatgcatgtttgagtgttctgttctgtcataaactatataaattttttttatcgaggacaaaaagactatcacactaaattttgtgtacagatttctatgtgtggtaagttgtagtgctattctccttttgtttatattcatccatctccaatgttttgagtgcaaatttctatgtgtggtgaattgtagtgctattctccttttgtttatattcagccatctctaatgttttgagtgagcaagtttgttcttgaaatcttcctacctgtattatttcacctgttttatttggtgattacaacaaaaatccttatctgcattaaccaatgagatgacagtacatgtagttgcatctgagatgtgagatattaactgttaaggtaacgatcatttgtgtcatattgttcgcttaattcatgccaggcgatggtatattttatgcagtacttgtgctcatggaatgtcatgtttaaattttgtcactttgatttttatttacataatcatgctttagtcaaaacttgattttttttttcttccttatttaggttttctcctggggacacaa

SEQ ID NO: 107962 - DNA, 778 bp, Aquilegia coerulea
  Intron number 1 from transcript AcoGoldSmith_v1.022580m (l ocus AcoGoldSmith_v1.022580m.g) derived from phytozome v7. 0 (chr-ID scaffold_6; pos 843062 to 843839)
tcttattttcttctttgtcttgcattctcctagtacatttcacaatacccatctcttgtttttctttcacatttgttatagttctttcatttcatttcatcttgtttgattatttaaagtgtgggtatgttctattttcttccattaatggaatcttgagttcaacccataaaattatgctatttggggatcaaatgttgagtctggttcaagtattaaagttgtcactcaaatgtttgataattgtccttaattagattttttttttttttcccaataaataaattttattgataaaaatttgaagaattacacaaaagtagaggacataattttgattgcattttgatcatgtgggtatgtttgttttagaacatacttcaatgcaatatgttatatgctctatagaaaatatatctctagtctccaaaaagaactgagtaaacacaatttacatacgtggctgaactttgaataagggtgtcgtggaagatgattattgcattatacatgtactgtgtctaaaatatctgtcagtttaagaactttatatattcttcacgctaaagtggaaaaattgtacaatgaatgcaaactatgtattactctttatataacaaaaattatatattgtgtgagtgtttaatatttaatattccttgttcaaatattactttttctgcttttttttttgtgattctatatttggactctgcttttcaatgccagatttgttaacatatttctgttctggcagttcaagcattcactggaactt

SEQ ID NO: 107963 - DNA, 750 bp, Aquilegia coerulea
  Intron number 1 from transcript AcoGoldSmith_v1.007652m (l ocus AcoGoldSmith_v1.007652m.g) derived from phytozome v7. 0 (chr-ID scaffold_1; pos 1909570 to 1910319 reverse stran d)
cacgaggaaacttaatttcagtgagttgaacaggggtaagttggttgttattgttgttagtaagtggttactcttatactactctctttattgagttattcattttgatgagccaataagttcataaataggatgcaatatatggattttgtagagcagtttaattataaaacagaaaactgactacatttttaatgagaacacacactagcaaacaagtcctctgagaacattagcttgctgatcaaaggcatctttggattaacagttctgttatttctttttgactgagtttgagttacattctgtactccttgttaagcacaacaaaatttcacgccaatggagcagtttccttttccgcgattatctgataattaaattgatcttcatagtcattgtaaaatactaaccatcttgaaagctatacgcctatagttgtccctaatctactactaacattaatatagactgttttaccaaaaaaaaaaacatgaatatagactgagcttgaatgagctaaaatacggttgttcatcaaaattttaagtctatggccgatcaatgttttcaacttagcaactagcctactatcagtttaatgaaccagttcaaaggttgattttagactggagcaattgctatgttaaacagtctatgaattgtgttagttttctacttttgccgcaacacaaaaatacgctcacactgtaacacacattttttgacctttttgttttcaggtatatc

SEQ ID NO: 107964 - DNA, 1038 bp, Aquilegia coerulea
  Intron number 1 from transcript AcoGoldSmith_v1.011079m (l ocus AcoGoldSmith_v1.009791m.g) derived from phytozome v7. 0 (chr-ID scaffold_40; pos 1243917 to 1244954 reverse stra nd)
cccacaccaatcttcatcttcaggtactcatttattctctttgaaacattctcaaataaatcattcttttataagttatggttttgaatgatctctctgttctttgctctgtttttttggttgaatttcattatcctaaacagattaaattgttaaataattaagtacttatgaattgattaattaaaaaaaaaaaccataaattgtgaattcaaacagataattacagtaaagcacaagaaaacaaaaacaatacacgtaagtagtctactctagtagtaagataactcttggcaggaggagtaggtacaccgtacaccacaccaaaacaacatttgttttattttattgtatgatgagagaaaagagaatctaatgttgtttctttcgtatgtaaggagatagatttctagtcaatcaatgactttacaccacgcatgatgcatgtccaaacaaaaaaaaaaaaaatacttctttgatacttcttccctcggtaattaagggcaccgtaattaccatggctgaatatgctctgcctcctctagtcctccctttgtggtaacaaaaatactcaaaaatgcgcttagatgaaaaaaaaatatatcatcaaatgctatgtacagtatctcatcggttgttatagttttatttattctgagcatcgttacatgcccagccgaatgaaatggttatccatgaatattgtgaattttcttttatcttttgttctatttactacattttaatactaatagatatcaactttgctttgttttgaagttgtagtcatgaaatgctttaaagtagttcttaagcgaggttatatgaaaattttgatacattattatatacagtattaacgtacaataaatatcaaacgtttgtttgtttgaatcacaacaatcaacacaaatagttgaattgatgtagactttctggtcattagtttcttgcttcaccaatgtggagcatacttttgaagcctgaattttgttcttctttgtctgcagaagaagctgcaacctgtggtactccaac

SEQ ID NO: 107965 - DNA, 1004 bp, Aquilegia coerulea
  Intron number 3 from transcript AcoGoldSmith_v1.018262m (l ocus AcoGoldSmith_v1.018262m.g) derived from phytozome v7. 0 (chr-ID scaffold_59; pos 1345765 to 1346768)
attggatctgctggaccagaggtaaaagaattttttatggtagtttttttgtataattaatatgataatatcaacgatcatgttgggtataccatctaaaattgtagggagaaatttgtatagagaagaacagagccaaaaaacaatgagttttgtcacatcaatgtgaactgaacaactgcataaatttctctctgtatcacagggcaacttgacgcaaacttcaaaatccgaaagacacgagtggcatagacttaggagttaggacatgattcttacaaaggttaagcttttaggtatcacagctgtttagtcctagatggtcacattcgcaagtcttctcagcagtatttagaaaaaatatattgattagtattgatgagggagatttttgtgtgttatctctaattgggacgtgggcttcgtttggtgtgcacctgccgtttttgtgaaggaccctagatttgactatctcattattaattgttgtagaattatgggattataaatcggaatccactgtttatctgttgcttttgctttgttagttgtggatgcgtgaggttcattttatgacaagtgctccaggccatgtaaaacttaccgtataaatatacattttttagttagacatgtaaataagatatttttagagcaactgagcaagtggtcatcagttgtcttcattgagggtctcttgaccttaaatggtacagtgagggcctaaacatttcattccagaatctggataaagtgtcttgttaggaaagtgagatcactgcattgcaaaaatgaggatccacactgacaaaaaaggactgaaagaacgggtgggtgggttggaaatgggagaaccacgctgccattttcatcttttggcagattgcttcatgtatatctgttgtttgagtgttggttgaaatgttttgatacgattccatcagtatttcatcccattgtaatagaatgaattgttttctttccaggctactggggtacactct

SEQ ID NO: 107966 - DNA, 996 bp, Aquilegia coerulea
  Intron number 3 from transcript AcoGoldSmith_v1.003417m (l ocus AcoGoldSmith_v1.003417m.g) derived from phytozome v7. 0 (chr-ID scaffold_21; pos 3847272 to 3848267 reverse stra nd)
attcatctatcactcaaattcaagatccacatttggttagtttgtcttcttttcctttctgtagctattttttgttattattagtacacttgtctttatatatactgaatttctactcgccactacgagtccaaaatccaaatggcatcagcatttggacaggttttgtcttttagaatactcgtaatgtacagtaaactcgtgcactccttgctgttctattttggttttcttagctctccacattacagtatcatataaaagcaaggagaaagactgaaaaaaaattaaatcctgagttcccaaagtttaaatttggtctgtccgttgataatgtcactcatttaggaaaaggttccaatgctcagagttttaaacacggcgacttgaccacttaatggctttccaaagggttctgtgtttaaggtttcttttaaaactgatagctagacaccgaaggacctcgacacatatcaaagactgatataatcttaaatatctatggtcttcagtcttcactcgttaatggacaagaaacaatggtgttcttcccatctttttttttttgttgatatgaaggataattttcagtctgctatcttagatagcctgtgtttgactcgagtatatgttgtaaattcatgtaggatttcgaacgaattctttggatatactttttggcaagttaggcctttgtcaaagaaattttagagtaaattaataagcttgttaacttgtgtgttagaaccttagaagttactttgggcacaaggacaaggggttaggaagcaactaaatttgtctgtgaaggcctccttgtgtttgccaagccaaaattctaccgtctacgccctatcctgtgttttggctgcaaaactgtagttacttagcataatgttgttacctactgaaccagtatctctaaagctaatgtattgacaaatgtggactgtttttacagagatttcttcaaacaataagagcaatacaaggtgc

SEQ ID NO: 107967 - DNA, 301 bp, Aquilegia coerulea
  Intron number 2 from transcript AcoGoldSmith_v1.003417m (l ocus AcoGoldSmith_v1.003417m.g) derived from phytozome v7. 0 (chr-ID scaffold_21; pos 3848375 to 3848675 reverse stra nd)
ccaccattatagttggctctatacagggaccagatgtgagtagaaaataaaattattgttctctctttcctttcttcatgtaattagtatgtaattgaagaactttaacacagaaaaaaaaaacaggagaaacagagtaaaatgacaaaacatattgctattttgtttttatggaaaaatttaattcaatggggttgtttgtttttgaatgtggatttgttgaatgatttgttcttattcaatattggcttgatcttgcttgacagagtgataaggtgagacttatccagactcttctctt

SEQ ID NO: 107968 - DNA, 220 bp, Aquilegia coerulea
  Intron number 1 from transcript AcoGoldSmith_v1.019668m (l ocus AcoGoldSmith_v1.019668m.g) derived from phytozome v7. 0 (chr-ID scaffold_6; pos 8513041 to 8513260)
ggcaaatataaacctctaattgaacctgccaagtagatatgtttcatttttctgtttttcttgcaaaatttggtaaaaattagatttttattcataaaaatttgaaattcaaagtacccatggttgctttgaattgggtgtttaaagggtttcttttcttagctaattttaaggaattattgcagtcagaagtgtaccaagagggcagttcgacaagcgt

SEQ ID NO: 107969 - DNA, 776 bp, Aquilegia coerulea
  Intron number 1 from transcript AcoGoldSmith_v1.003873m (l ocus AcoGoldSmith_v1.003873m.g) derived from phytozome v7. 0 (chr-ID scaffold_15; pos 3123216 to 3123991)
gaagtacatcatttgttaaacaaatattcttctttattctttttcctttgtcgttttttatgtatattttgtaccggaaaagtttacagaagaataagaaggaaaaagcagtgtggtgcacattaattttcaacaatagcactgtgtctgtgtgattgtaattatggaagcacattatgacactggcagttgatgtagaatcctcgatatatagctataatagcagtgctcatgtttgtttttgactaagctgtaatcgcaactctttttttgttcgtaaataaattatgttattaatgcaatctcaaattctcaatcatagttcaaaatatcggggatatctgtggatggatatttttatagtgtcgaaacctcaataaaatccgtttttccaagattcaaaattttgctcgaaattggcaatttgatgatttgaacatgcatgaaccgcgttcgtctgaaacttttctcagttggctcttttgaaactactactgaatctgcctttgagttgaaaaacaaaatatccttcgacctttttagtaggactgtaggaggttcagacttcagacttcagaggctgattggcagagacaagaagcagagctcattatgggccaaaaatatttgtatctctggcccaataaaagtccatttcttttcttctttaaatactgaagaaagaatcatatttccttcatctctctctctctcttgctctcttgctctctctgtgttcagtgttcttgaaaagaagaaagcaattactctgtttc

SEQ ID NO: 107970 - DNA, 402 bp, Aquilegia coerulea
  Intron number 2 from transcript AcoGoldSmith_v1.003873m (l ocus AcoGoldSmith_v1.003873m.g) derived from phytozome v7. 0 (chr-ID scaffold_15; pos 3124015 to 3124416)
tcatcgatcagatccacataagaatttaataagttgtaagttggattctctttctctcttcttcatcatcatcttcttcttgtataattttcctggtgcaaattatattaatgaatttgtaggaaacttgatgaaaagattataacaatgcacactatctctttgatgaaatgtttgttcataagcatatatagatgaatctcaatctttactttcgttcttcttcttctttaactgaatttgagtaaccagagtcttaatttgtttttattttcttcttctagctatatatttctttgttaatcatcttgtttacttttgttattctattctcattttcttggtattttattcattgtttttacaggttcattgctcatcatcaccatcatcatcatcatc

SEQ ID NO: 107971 - DNA, 480 bp, Aquilegia coerulea
  Intron number 1 from transcript AcoGoldSmith_v1.022141m (l ocus AcoGoldSmith_v1.022141m.g) derived from phytozome v7. 0 (chr-ID scaffold_27; pos 532971 to 533450 reverse strand )
ttgatctcttgtcagtcctccctgaaaacgaaaaggtaattctctctctttcttaatttattttttttgtttttagtctcttcacttacacttggcaacttatgtcggaaaattatgatcagaatgaagatttaatgcttgacttcttgtatatgattcgcaaagatcagtatatataaagccgatcttccattcaattggtttcgttattgactaagctacttgcaaattgttactgtcctaagtcctaacatagcacttaaaaagaagataaacccgaactttattgctgaggttctggcctacactgtgattatatgcaaaaatatatacagtatttcccttttccttgttaatctcagtttcaaatttaattttagagtgggtacctaatcattgtggtgcatctacatcaatggaatttaactttaattgatttttgcaggtgattttagtgggtcacagcgctgggggactgag

SEQ ID NO: 107972 - DNA, 555 bp, Aquilegia coerulea
  Intron number 3 from transcript AcoGoldSmith_v1.019977m (l ocus AcoGoldSmith_v1.019977m.g) derived from phytozome v7. 0 (chr-ID scaffold_43; pos 1984299 to 1984853 reverse stra nd)
gtgtggctcgacgtacgaacgtcaattcgacgtacgtacgtccttctttgttttttgtgaatatgggcctgtttaagcccatttcgtgtttgattgtaaggctaagttataaagccaatgagaaggttgggaaaacctaatcttcatgtgagagagattgtgagaagccattggcaagtttgagagaacttttgtgaggaagaacactttggtttcttcgtgagggcttgtataatcgtctctataaggaagattgttggtttgttcgtggacgtatgcaatattagccgaaccacgtaaatcttgtgttttgtgtgagtttggtttgttttgttttgttttgctcaattcatacactatttcaatcttaggtattggtgcataagtttccgctgcacacaacaatattgttgtacaaagaataacacttacactttatttctaagagttttagctatgtgatttacaacgactaacttgactttaccaactatggaatttgaataaccaatagaaatttaagaacaccaacacatcatataattattatcagta

SEQ ID NO: 107973 - DNA, 944 bp, Aquilegia coerulea
  Intron number 1 from transcript AcoGoldSmith_v1.019124m (l ocus AcoGoldSmith_v1.019124m.g) derived from phytozome v7. 0 (chr-ID scaffold_11; pos 1273321 to 1274264 reverse stra nd)
taccaaaagctctttcaagttggaacatccattgggtttgtaccatttttctctaatttttcttataaaaattcaatcttttttagtgggtatgtgttagaattgattttttagatcaattatcatattgggtatttgagatttaagggttttttggattaaatcttctaaagattgtatctttatgaagtgggtatatactaaatttgttgtttatggtttgatttcacctgataaagtttgtacagaaagaatgtttatattgctgtatcggtaattggaggttagattgtgttgagagttagccactaggacaagacttgtacaagaagtttaataatatgggatcttcatgggatgttccgtgtttctgtagtttttaatcattggttgatttgtttgaaatatgcttagtcaaaatcttctttttgttgtggtgatttactttaaattatagtctacaaaccaatcttactgactccagcttcttaaatattagtatgctgtcggactttactctccaaatctaaaataaaaccctgaatgagttgaaaatcccttagttttgaaggtaaaaaacaatctttctactatatgttttatagttactggggtatataatttgtcgtgtttatgtaatgcaggctaagtagtattatgactacatcactacatctcatgtatgtttctgaagttcttcaggatcaaacttatcttaattcttcttctatatgcgtaatggattgtgtcaaatctttgtacataacactttaactgatgtctgagttacttctcggctgtgctccaaaatttgtattagttaatgcttaactgatgtaattgttttgcacttagtttggatttctgcttacatattagttctaagctatatcatcttatacttttcagagaggagacaggctgaagctgcacgtatcagggag

SEQ ID NO: 107974 - DNA, 438 bp, Aquilegia coerulea
  Intron number 3 from transcript AcoGoldSmith_v1.006667m (l ocus AcoGoldSmith_v1.006667m.g) derived from phytozome v7. 0 (chr-ID scaffold_1; pos 494066 to 494503)
tcagaaagcgtgtcgaggttctaagagagattcaggtttgttgcagtaactttattttaagttttatacttcattattgttctgttattgtatctagagtgtatcgttgtaaagtttttgtatatgtttagttgtaatgaatggttgccagactgtagttgttaactgttttgatactttatgagatgcttgtgtttgtgtggtggttgagtactggttgtgtggtcttcttaatcagttgtcgtactgcttaactatgaaatctgtttgcaaaactaatccgcttagaggagattaatctgataatcgcaaatttatagatactgcaatttttctttgtgtttatatccttaattttgaatatttttctctcttaaacactacatcaatctgaggttttctctaatattactattctgttactctagaggaaacacg

SEQ ID NO: 107975 - DNA, 407 bp, Aquilegia coerulea
  Intron number 1 from transcript AcoGoldSmith_v1.010398m (l ocus AcoGoldSmith_v1.010385m.g) derived from phytozome v7. 0 (chr-ID scaffold_37; pos 1927489 to 1927895 reverse stra nd)
aacaaacaccgaactccgaagagcactggtaactggtaagtagaactcttcttaatttcttcaacacgaaaccattcaatctgaaaaaaaaaaagtgatatgttcgatcttcagtttatacttcaattagttttctagggttgtataattttcaattctagggtttaataacttaattaggtttttcaattttataaaatctttgttttcttgaacaaatttttgcttaaaaaaaatctcacattgaaaataagaagtcaaacatttgatccttgagaactagaagtaactttatttccttgtatcttattttgaattgcaagagacacaaatgaacagctaatctttacattcacttgtaaaaactgtaataatgcttatacctgctaatttcatttatacagcga

SEQ ID NO: 107976 - DNA, 995 bp, Aquilegia coerulea
  Intron number 1 from transcript AcoGoldSmith_v1.002734m (l ocus AcoGoldSmith_v1.002734m.g) derived from phytozome v7. 0 (chr-ID scaffold_30; pos 784487 to 785481)
cttatcgagatctgaatcactttacgaacaacaaggtaaacatttctcgatttcttcttcaacattcttccaatacttcgatctttgtttcttcgagttcaaatctctgtttttttttttttatttctcatgtttctaagtagattgaatcgtttcagttgtactagattgagctcatttcgtttgttttacttttaaatcgtgtttgtttgtctaatgttcttccgatctttgatcatttcggtaaaatctatgttatttttaagtttaatgacttaagatcagttttagagcattaagtatagtgaaatttgtctattttagtgaagctttagtctttttctagggttttatatctgtaactttttctatatttggtgaaaaatgatatttttagtgattaagatgtttgcatagctgaggaggtcttatagtcctaatgaagattgcatttgctataaattgtatttttactgaacttcaatcctgtttttgtgtataaagttattctatcatcgagtgagcaaattagctttttgactatgaattgaccattcacccttgcataggacttgtggaagtatatgagtgaccaagtttgaacaatgcctaatttgcaagataaatggtgaagaacataaactttaaatagaatcgggagcttattcaaggtgtttgatacatcaactctctaagaaacttgttattaaacccatgaccttgtttgtgatttgatggaacctctttaattagttgttgttgggccaatagcaaagctaggagagtttttatttatttatttatttaagcaagttgctctcaatcactagtgatacatgcatcggatgttgttggtgataattgcaagtaactctttagatattttttgagaactcttccagtggtgtatttattatgttatagagtgtgatgtttcttttttgcatgttctatatgcatatgatgtggctttttgcacagtggaaaaaacataa

SEQ ID NO: 107977 - DNA, 952 bp, Aquilegia coerulea
  Intron number 2 from transcript AcoGoldSmith_v1.002734m (l ocus AcoGoldSmith_v1.002734m.g) derived from phytozome v7. 0 (chr-ID scaffold_30; pos 785555 to 786506)
agccggcaaacagattgacttataagtttgttcaggtatgtgagaatttttttaaaacttctgtttttctttctaatgcctttgatatagttcgtgattctggaaactaagtttattgatacatcacgtctttactgatctcattagttctctcactttacatgcacacatgcatccatatatcataaaaacaatttttttatttgtgctgtcttggtgtaattcatgatatagtaagctagtaaattttacaatatgaaacatctgttattaagtgcacaaacatggtcaatcattctcttttttcttcaatatagatgaaattctgcagttatgtaccacaaacaagctccttagttatagtggcatgcttgcgagatgaaacttagaaccacaaaataaaatttaaaatgtggaagcatgttatctagactctacaggcaagcaaatttgaagagtgggtaaaatatttgccagaaatgcagcttttattttgggtacataattatttgtcatatgttttcaaaagtttggatagtctgtacctttgaggctgttgaggattggttgtgacttcatggacagccacttcaccctcaatcacgtatattatatatacttctctatcaaaaatcattaagaaagttgtatttgtgttgaaattagattttcgttggttcttaagggtatatcctgtgaaggtccagataagttcaataacttaaatcaatttgtaccattcattgccttttttgtatatcctcattgcagttttatgttcaaatttcaactgaatttcggtaattgatcaattatctaattgaagataccccaatatcttataaagataattgatcaaagggactgtcctaatagttatttcgctattaaaaagaagtttaagaattttttttaatttcttctatgttttatttggtttaggttgaaagag

SEQ ID NO: 107978 - DNA, 806 bp, Aquilegia coerulea
  Intron number 1 from transcript AcoGoldSmith_v1.001611m (l ocus AcoGoldSmith_v1.001616m.g) derived from phytozome v7. 0 (chr-ID scaffold_9; pos 3019031 to 3019836)
gctaccgttgctccatcttcggatcgtatccttaaatttcaatcttttttcttcaattgggtatgtttttgtttttaatttttcatgagatttgatttcttctgtttttattaattttgggatttgggttttgtttctcgtgtatattttgattgtgggtatgcttcaatttattaattttcgatctctaatccattttttttttgttgatttagatctataatactgtataattgtcgtctctgagatttgggtttacgtagttaagtttagatcttgggttattttatgttgatttgagtgttaagggttttagtttgttagggtttatgggaatttaatgggttcaattgttgtaattttgtgatgttttctttggtatttgtcatgcttctgttgatgattaaatttaccttctatttggcaaattattccattttcaagttgagatttttgtgttatactgatttatgtggtgcattgattggttagtttgaagggtttaatttctatctcaataaatcaactgatctggatctgcttatgttacataattgaaaaagctttatgtttcctatcatagctttggaagatatatagaaatccataactataattgatggggatttttatttagtgttaaatgcgatagaatttttttgttgagaattagtgatgctgtggagtgtggagtttgctttattgtatttatctagttttagagctatgattttctttcgacatagagttggtttccttcactctaaacagcagctgcagatttactacagaaattatccctagaa

SEQ ID NO: 107979 - DNA, 522 bp, Aquilegia coerulea
  Intron number 3 from transcript AcoGoldSmith_v1.005175m (l ocus AcoGoldSmith_v1.005175m.g) derived from phytozome v7. 0 (chr-ID scaffold_10; pos 3486193 to 3486714)
cccatcagatctgtctggaagtaccatacaggttgaaaacctctctcttctcttttctttttcttgctgtaagcctgtaatgttaatgaaaattttcatgtcaagcttggttggacttgaaagatttcaaactccctgaattgttcaagggtatacttccattcaaagaaacaaattctagccaattgtaaacaaaagcatcttatcaccaaccaagggtttgtcatgaagtggttcacatgagcatagttcaactaactcaaaactgattacaagtttaaaacaactgattagaagtttggttgtatgagacaaggctacatacaatgtacattgattatcttgcatcagtgacgattataacgtataagaatcaatattctgcgtgaatgcacataggatgtatgctattgaattagtgtacatttcagtcttctacgacacattttccctttgaatgtttgtttctagactacttagtttcctttgttgttatttgatacacaggcttggatttcagag

SEQ ID NO: 107980 - DNA, 503 bp, Aquilegia coerulea
  Intron number 2 from transcript AcoGoldSmith_v1.014627m (l ocus AcoGoldSmith_v1.014627m.g) derived from phytozome v7. 0 (chr-ID scaffold_9; pos 4840377 to 4840879)
tgttgacctctactttaatttggctgcaggagaaggtaatttttattttatttttcgttcttaatgatattttttgctaaagcaatctgcagtttcttaatcactattagattttgaggtagattcattaattatataagtgccaaatgaaattacaatctcactctcaacaccacaaaattctctcaaatatgttttccctagaggcctagagctttgaagtatgaaaaaacctcatgcatctaattggcaccttagccttgaattcttcattcaaatttttttgttcaagaccttaagcccaaatgcccaattgtttggttttacgtggactttgccagtttgcattacatatttcgcgctcctaaataataaatatagtccatagatacttgttatgattcattgcttctattccaatctatccatatatattccctttcaaattataatttttaatcaaattttcttattatgaatgcaggtgtatttttgcctgattt

SEQ ID NO: 107981 - DNA, 1009 bp, Aquilegia coerulea
  Intron number 1 from transcript AcoGoldSmith_v1.002682m (l ocus AcoGoldSmith_v1.002682m.g) derived from phytozome v7. 0 (chr-ID scaffold_109; pos 339540 to 340548)
tcagataggaaaggaaaacaagtgcaacatatcaggtcagagtatgttccttttgtcactgtgcatgtgaattggcactgagcagaagaaaaagaaaaaaagaaagagaaggaaaaagaaaaagaaaaggaagatgcatattttgatctattcttttcctcttcttgttgtatgtgtgtgtgtgtgtgtgtgtgtgcacacgtgttagtaattatattggagggttgaatctggtacaattttcttccgttggttagtaaagagtgaaatctagtctgcgaactttaatatcattgagctgatctcaataaatagggatcaacagtaaaaaccttgcagtaattttcaccttgaaacaatttttttacctttccgcaagaaaagaaactataaacaacagatagtcagatagtaaaacaaactccaaaagttttgggttactgtcaaatagagggaaatgtgtcatgtctcatgcatcaactatgatcgaggaatctgaatgtcaattttgttgaattctgctacccatctgcatagtttaggagtaattatcctatttaaatggattttctgagaaatttatgaaggccaagtgcccattcggttgaaccacaagttgtctttggaaatgtcactctaaagcacatgtcctgtacatgacatgatggaaacttgagaaaggtgattagagagtattttctaattagagaggaactaattatatttaacatgtttcatgcatcatttggtttatggaatgtatgtgtttaaataataatcgacttaaaaagatgagatagagaatggttttgaggagatgggttttgtagtcattaagtaggtattacaaaaattgtccgtgatgttttcttattggtttaatagtaaaatcagaacttaacctgcgtgcttgacattagctgaagtaaagctcgaacttaggagtcaaacctcatttgttaatatacaattccgtttgacatgcaattctgtggtttcccacatgcag

SEQ ID NO: 107982 - DNA, 821 bp, Aquilegia coerulea
  Intron number 3 from transcript AcoGoldSmith_v1.002682m (l ocus AcoGoldSmith_v1.002682m.g) derived from phytozome v7. 0 (chr-ID scaffold_109; pos 341208 to 342028)
cagaccatattggacgttttggcattggtttcaaggtaatcttatgtttgtttcaaattccatattttaatcaacggtttagaactacttgtagatttgattttcagctgaccagatgttactcttactgtatagattttgtttgttaataatatcttacaatacttttcttgttatgatatttaataataggttttttcctcttcagctgatgcagatgtgaattggtgtcatttagtacgagcttaaaatttttatgtggttataataatttccttttttatactaagccagtgcaagtatataaagtatcaactattatataaccatccctaacaagccggaaaacagtgcagcttgtctaacaatctgtgcaactttgatgattttggtatttggtttacaaagaaaagggtccaatttcgctcaacacacaaccttgattatcaagcctcaagggcctctgttcaaaacaccagctgaatgcaacatgagaagcagagctgttcagttgatttccatgcatgaaaacctatgttatcaataatctgattgagttctgtctcatccagacgtctgttgtggatgtgatatgtcaagtttcttcccccttcttagttattaacgagtgtattaattctgagtaagttacagaatctttgaggtgttgatatgatatttttcttttagcgcggtgatggatcttatctttcctcgtcctcttactttgttgaattgtagtatgggtgtttggttttatattttatgatctaatgcctctgatatgtcaatttcgaatattttgaattcagacgggttcc

SEQ ID NO: 107983 - DNA, 888 bp, Aquilegia coerulea
  Intron number 1 from transcript AcoGoldSmith_v1.001367m (l ocus AcoGoldSmith_v1.001367m.g) derived from phytozome v7. 0 (chr-ID scaffold_9; pos 3968147 to 3969034 reverse stran d)
tccttgccttttggcgccaggtaagcagaagatgacttttggtgaccacattttagttttgatttccatagatcagtatatcagattttggatttagtttcaaaagttagtttaaggacactgataaccattattttggatagtggaaaatattgattaccataagaaagattttaaaagcacatttttgttcattttgagaagcaaataatcatcagtgatgtatgggcccctttgcgttaattgacataagaagtagataaaaaattctacaataatagccttatttacttatattcaactggagttcaagcaaatgcccaggatcaatacaaattttgcatgtttgtgatataaactgggttatccactcctcgatatttcgcttttcgctgctagagcaaaacgaatcagcattgaattaagctatttgcttgatcccgatatttttggcgatattcgtccgaaatgtactcttcgttctagcgattttccttgaaaagtttggctggttataattagaagagaatcaccatagcccaatccaaagatctcaagcccgttaaaaggaaagtgaaacatgagaaacacccttatacaatagtatatctgtacatcatctttaagacttagtgggtgtgtacggacttgcatttaaacatttgttaagctttgaaagtgtttattaggtattgtttcagctgtacgtgctgatctcttgctgtaaattgttacattaatgctctgaaaaacgttggcctcaatgatctattttttcttaccactatctacgtttaaacccattgttatttgtttttttgcaacgagcatgtagctgatcttctgttattgctgtttgtccttcagcactttgttctcaaggagaac

SEQ ID NO: 107984 - DNA, 532 bp, Aquilegia coerulea
  Intron number 2 from transcript AcoGoldSmith_v1.007259m (l ocus AcoGoldSmith_v1.007259m.g) derived from phytozome v7. 0 (chr-ID scaffold_1; pos 8827629 to 8828160 reverse stran d)
cattgtcccagccgccttcacaatctggtataactttttagtttattgtatattcattatattttgaatttgaaggaagtttgtagaataaaagtagttgataatatatcgttagtttagtacatttacttgattcaaaaggagaccagggaaagaaagagctacacctttttcaacaagtaggagaatagagaaaaaacgtgtgtttaattatatcttaaattgaattacagttaacttagctgcaaatgtttaataactactgttgaaatgtgtctttcttgcactgcttgagtattggtcttttacagtcaacgaagttagtttcttggctgattaaccgtataattttcaaataattgcaatgataagctgtttatctgtggaaataccgtgatcgtgctagaaattgaaaaaaactttcagttttagttagaagaggtttcagtgacaagttcaattgacttatatttgttcatttttttcgtgacttccagagcggtttgtagttctatcatacaacattctcgct

SEQ ID NO: 107985 - DNA, 706 bp, Aquilegia coerulea
  Intron number 1 from transcript AcoGoldSmith_v1.003666m (l ocus AcoGoldSmith_v1.003666m.g) derived from phytozome v7. 0 (chr-ID scaffold_123; pos 231140 to 231845 reverse stran d)
ttcttcactactcattcgatttcaaatcgaaataggtttgtttgattcgatttcaattttcatgttctttcaatttaaactaattttattatagttaagctaattgatgaaattgattccgaagttcttgtgatcaatttctttagtaatgtttcaattgaagtagttttgtttgaattcacgaagatcgattagttaggtagttcatgaatcttgattttgattctatgatcaacttcaattcagcttgatcttcaatttcaacttgaattgaagatcaagttgtgctgattgtttgcttgatagttgaattcaatcatttttgctattgatatggaatgtgaattttttactatcttcaccactagttgaccttcatctccaattcactttttcattttgaatattttctgttttaacatgatcattttgaacattttgtgaattttttatcaagtatgtgaaaccaacagatccatatcttttgaatttctcggatatatgtttatctgctcattgtctcatacctatacttaattcagtttatgattaattttgttcagaaactgaaattgtggttaagtttgacttttgtttttaacaaatagttagttttgaggttgaaagttgaaacactgctaacttctttcagtttatggttttgtatgtaggtttcaaggagtattgttgcctatactagtagagt

SEQ ID NO: 107986 - DNA, 760 bp, Aquilegia coerulea
  Intron number 1 from transcript AcoGoldSmith_v1.001465m (l ocus AcoGoldSmith_v1.001465m.g) derived from phytozome v7. 0 (chr-ID scaffold_11; pos 5610829 to 5611588)
ctgaagctcaggtctgtcttctttgtttcaataatttaacatgtcttgcttcatttaatgtttgaaattattgtaaataactgctatgtagtatagaactaagttttatcagagagggagctcgtcgggtatataaataaaatggacccacaaaagagaaagttgcaagcttgtctattgtttaggatgctgtgtattagttaggttatatttctgtcaaatgcaaaggatttcttgatctgcgatttggaatcttgagggttaaatatttcaacttgttagtgcacccaattttacaataatagtttgtatgtaattacccatgtagaatatgtccacataccaattgccatgaccgactctgtcataaatcatactggccaaggatttatatagaaacatttccttttcagttaatccatggaatacaaagtatatatgttggacacaacactcaaatacgttaaagcagcacccatagtttttcaaatccaacaagttgttctatcttgaatgccaaccttttcaactgccagcaagggtctggtcttgcactggatgtcacattgttttagtatgaatgtctataagttgaatgagtacaaaatgaataattgcgagaagctagtaatgtaattgtccacttcgccaggctttttcttttttcattactgtacttatttactgtcatggacggccttgcaatatcaggtttctaaattccattatagtgaactgcaggccaagtttttgttccctg

SEQ ID NO: 107987 - DNA, 669 bp, Aquilegia coerulea
  Intron number 1 from transcript AcoGoldSmith_v1.007804m (l ocus AcoGoldSmith_v1.007804m.g) derived from phytozome v7. 0 (chr-ID scaffold_1; pos 3748810 to 3749478 reverse stran d)
atcaatctccccctgcaaagtaagttttattctcttggagtcttggttaaatttgtaagatttccatttttgtcggaatatttggaacaaaagattgtttttagggttcttgttcatttgtttttgtgagtttctagtatacttatttttctaaacattaattttcccatatttttgcttctcattttttatgtagtatgattagtggttttggggggtttaacataaaattaaatttgtatatgtgtgtgtgttttgtgattttgggggggttaaggatattgtttcatggttgtgatttttttttattctgcctgtatactactagaggtttatatgagaaaattatattttcaatgtaatttcaaaattcctagaagttaaaagcattggggctttgatgttctggtgttaaagagatttgggttttaatgttctggtatttacacccctcttctactttggtcatttcagtctaaagctcgttcttaatgttatcaaattgttgttctaatatatgtatggatttaatttggtagaactatttgtaggcaatattattggtttatgtaagtttaacaaaatctaagaaattaagctcaatgtctgtataagggttttatttaattatcttttgttatttttttcttacagggcacaggttgtagg

SEQ ID NO: 107988 - DNA, 640 bp, Aquilegia coerulea
  Intron number 1 from transcript AcoGoldSmith_v1.021779m (l ocus AcoGoldSmith_v1.021779m.g) derived from phytozome v7. 0 (chr-ID scaffold_10; pos 4035515 to 4036154)
ccacggcccctttctgttgtgggtgttagcgttctgtaagcacctcctttgtccttccatttccaatactttcttccatcgtcatatatgtttcatggttgcagttggctctttcgccactagaatacatccctccttcgatttacgtgaatcataatttatattataatgtctatcaattacttagttacacgataattttacttagataaactaaacacatttgtatccacaatggttttggcgtgactcgagaaatttaacagccatgataactgcaaaagtgaagtagattgtacaggttattctaaaatagaaaatttatactctctgcaacttcaaataacccagtagttgggtctctttctctgttaaaaatggaagttaaaagaatattgtgaaagcactgtcagtaccttggttatttacgtaataaaatataaaaattcctgtatgaaattaacaatgtggttcaggcagtttcttccttcacatacactatgataagtgattgtggtggtgcgtatgattattgcaatcatttgattttgcttgccaattttttgtacttgtacatacacgccagtgccttttgctaagcgatatttaacaccattttgcaggaaaggaatcaatattg

SEQ ID NO: 107989 - DNA, 1006 bp, Aquilegia coerulea
  Intron number 1 from transcript AcoGoldSmith_v1.014137m (l ocus AcoGoldSmith_v1.014137m.g) derived from phytozome v7. 0 (chr-ID scaffold_27; pos 2601289 to 2602294 reverse stra nd)
agaagattagcagttggtggttcaacatcaaaagagtaacttttttactttatttatctagaaaatggttttaatttgattcgatttgtatttagaattgtaaagttacttgctactagtgttaatgttgtttttggagttgttatgagtgacaattgtatcaagcagacagactctagggtttttcattttgttttcaatctcgtgtttgagtgacaaattttttttaagtactatactgcaatatgatgtgggtgtgtgttggggtgagtatggattatggaagtatggaaggaagataggtgcatggtgaaaaaaaaagagagggattaagataggaactttgataagatgataaacattttattcaagacaaagtatgttatcaccatctgacccaaatttgagaaggagaaaaagagcccaagagaggggagatagagagagagattggggaaacggtggcaagacaaggtgataagatatgctatttgacactccctcaattcactagtctgataatttgttactgtgtctgtaaggatttctattgtttttatgttggtgccatggactgtttttctgtctttggttggtttgtcagtaggcatgaataccatgtagaacatgggaatgagaggaaaggatgaacatttacctcattatattccccttttgtttaaatgaatatcatgtaaaaagaaaaaaagaaacccctgcacacacccaaatttatcgatcatgtgttttttgacatcagttgttctctaagcaaaccagtagttgtccattacttgcaatgttcaaaaccatgcatagcacatatagtgagtagaaagagtaataagcttctgccgtagtctctatattatcttttgcgagtctgcttcgattttggcctcaagcaatttttttgcagttctgtaattctgccatatggataatcaataactgtgactaattttctccaggaatcgggcaactcgaatcttttcctctgcaccaa

SEQ ID NO: 107990 - DNA, 655 bp, Aquilegia coerulea
  Intron number 1 from transcript AcoGoldSmith_v1.004874m (l ocus AcoGoldSmith_v1.004874m.g) derived from phytozome v7. 0 (chr-ID scaffold_108; pos 80097 to 80751)
ctgtttggattctagggtttctcgcgaatcttcaggtgtttgttttcttctctttctatcctctctcttcttaatttttatttcattattatgtaagattccaccttttgattatttcaacaacactataattaggtttttaaaattcttcccatcccataagtttcttggaaaagatctttctggaaaattgaatttattctgcagtctgcagaaaacctaaactcggtttctttccttggagattataatttttcctattcaaagtgggggttttcaatttatagaagaaacatgttgttaatcactagcgaaagggttttttgataatttgtggaacaaatgcctaatcaatagccatagaggaaattgagatggcacatttgatattaatcattctcaacttccttaaacactcattatactaattttggtttccataaattttgttgaactagtgttttagagatgttggataggatattgatgttaaacttactatttttcttgccacctgtttaacgtcttttcgcgtttttttttggatggcaacaaagggaaaataaattgtgagaacagactaactttcttttttaattgctcatattttccttttgtagagacaagtaaagcaaaaagagtaaggtttgaggac

SEQ ID NO: 107991 - DNA, 895 bp, Aquilegia coerulea
  Intron number 1 from transcript AcoGoldSmith_v1.014251m (l ocus AcoGoldSmith_v1.014251m.g) derived from phytozome v7. 0 (chr-ID scaffold_40; pos 1837916 to 1838810 reverse stra nd)
tctcgatactacgaaaaccataaagctagagtgatgtgaaacttgaataccatgtgaacattatcaaatatactagcatggattttcgaaaagaaaaaaaaaatgaaaatataaacaaaacaaaccaccaccaaaattaaaaattaaaaagataaacaaatttattgaagaattataagaaattacatgtgaagtacaccaaaagtcgattcagcagaaattataccaaaagtcgattcaaccgaatttgcaagttgaagatgataaggtttcaacaaagaagatgattgcgatctcaaattgagactttgcaatttctcaaaatcaacagagaagatgatagggttctcaatttcagaaattgagactctgaatgataggcttcttcgatttctgaacgatttctgaagaaaggtggcaatttctcaaaatcaacagagaagatgatagggttcttcgattcctgattttgatttctcaaaaggaagaaagcttttcgttttttctctctctcttttttttttttttttcttttcgttatttgtttaaccaaattgtattgactgtagataaatctcgagataagaaacaagaatcatacggtccatactcacttcgttcccatggttcataactgtaggaaattttcccaacaatcttaaatatttgatcaagattttgccacggctttataacatttgccacggaaatcaaccgtggctaattttgctatagacccggaccgcggctaaggcagtcgtaggtccgtcccaataaactgattttcttgtagtgaatgattaacactctttctaatcgtaatgcagtgaaatggcacaagatttgactagcagttctatgcaaggttcatcatgtagtgattccagttccagtg

SEQ ID NO: 107992 - DNA, 730 bp, Aquilegia coerulea
  Intron number 2 from transcript AcoGoldSmith_v1.002045m (l ocus AcoGoldSmith_v1.002045m.g) derived from phytozome v7. 0 (chr-ID scaffold_15; pos 2128181 to 2128910 reverse stra nd)
cacttcaagaagtaggagaaactgagtttgaggtaagtgccgcgaataaatgaatgtttatttcagttgaatgagttgaaaattttgaatgaagtttagttgtagcaaatggatgctaatgaaaataaagttcaatagaggcattggttcattggttggtttgtgctattttctgtagagttatatctgcctgccttatgtattggatagatacatttttagttaaaactttgctattattcgaatttgcttcataatgttgtcacataagtatgatcttttctcttggtataaagcaatgattaaaggtaatcagtgattgcattttattagaacaatattttaagaggtcacttccttgtagtaatctcgcaccagagtcatgccatagaggccaaagccaattaaagtttaagtttcgattgaatactactgtactcttttttaatctaaatttggcagggggaccttgtggacaccaatggcctcataccaaattacttcagttttgatcttttacttttgcttagagaataacctttagctaaatgctaagttccctataataccaagatggccattatgtttggatttatttactatttttgtactaatatctgtgaatgaatgaatcttctcaagatttattatttctaagacctaatattttttttgaaactttgggtggtatgtagagttccactcaccattatagcgacttggtcgcagt

SEQ ID NO: 107993 - DNA, 449 bp, Aquilegia coerulea
  Intron number 2 from transcript AcoGoldSmith_v1.011456m (l ocus AcoGoldSmith_v1.011456m.g) derived from phytozome v7. 0 (chr-ID scaffold_1; pos 5689145 to 5689593)
atcctgaaactttcaggtttgtgttctttctactggtttgacttccttaatatgggttcctgatttgattgcttgagacataggttcattctttggaaggttctgctactgcttttaattcattaatgtacttcaatgtcagtgccttacttagagccttctacacaaactattaacctctcgggtggcacaactttcactcaactgtcatagtaccttgtgaaatttttaatgaaaacataaaaaggctgaatcacttgaacaaaaaaaaaaaaattaaaatttataaagtctgtttaaaagatgataaattgataacccttgaagttttgttgatagatcattttcattctaatagaggtgcagtttgttcttcatagtacccgttatcatgttctttcaactgttttgcaggagaaggtgtgaaattgcagaaacacttgctgaga

SEQ ID NO: 107994 - DNA, 1028 bp, Aquilegia coerulea
  Intron number 1 from transcript AcoGoldSmith_v1.013362m (l ocus AcoGoldSmith_v1.013362m.g) derived from phytozome v7. 0 (chr-ID scaffold_30; pos 344298 to 345325)
ctattcggaggactcgtaaagaagaattgataagagttgactcattttttcaatctttaaatactactattcatccacagataaaagaattgcctggacaacacgtgagtgcatttgattcttcaacacgtggtacaagagaaaatcaaggtaccatgtaagagttcgtggtatcgaaaaactctaccagaagcttttgacatggttgatatagaccataattgagtagttatttgtttattctttaattcaattctggtctatatatttttggtaaagttcaacatatgataacacgaactcttacatggtactcttgtaccatatatttactttctatctctcagggatctcttatttatttttcatcataataaaatattgtgtgcatttgttttgaattttgttgtcatgaacacgtgcctttgttttggaatttgttaaactttgcacactaacaaaaatgcttaaatgaactaaaaataataaaatgatataatttttttgaattactagtaaatacacatgaaatatatatttgattttttatttattattagcgagcgctctgggcaacaagaataacaaaacaaaaatatcttggagttgaagcatacatcaacatccacagtccaagaacaaggtctttccaatatagtagtgctcaaatgtggatagaagaaggcacgtcattcgatctcaatgctatacaaactggatgggcggtaatccaatttctacacatatttttttattaaattatagtacttaaaccttacttagctgaatatttgaagtatacggtatatataatgttctaatgtggagcatcttggattgtcttaataggtttttccaatgatatttcaagattcccatcctcggttgtttgtatattggcaagtaagttaataatcataataagtgttatttttttatttttaatgtgattcatacattaattaattaattaattaattaattaattaacaggaggcaggaggtaaaaaaccttgttttaacaacct

SEQ ID NO: 107995 - DNA, 582 bp, Aquilegia coerulea
  Intron number 3 from transcript AcoGoldSmith_v1.020687m (l ocus AcoGoldSmith_v1.020687m.g) derived from phytozome v7. 0 (chr-ID scaffold_6; pos 7702266 to 7702847)
ggaagaagaccatatcaacttcggtatgtatatcatatttccttgtcttcaatcaattttgagttattgtcttcagtgcgcaaagaacttttatttgaatgcatgaatagctgttcttaaggcatccacttcatcataagtgtagctcaaaaacagtcaaaacaccaataccaaacaaaccctagaaaatactaatattaaggaaattctgaagctctaagcttaaatgagttgagaaacaatgcaatagagttaattaattaaaggttatagtagcactaagcacacaattttcgtagtttttataaataactggtgaaatacattcttgttatttccttaacttgtcagatgcacccttcaaccatttaaagtggaaacactatgcggcaacatgatgatgtgaaaatcctccttaatgaaaatacaaaattatgatgtgttggaatgtttttcctccgtctcgctatgtttataattggttctctgaataaaaggttgtattacccccttttgctcatgtcattttttcatcttggaattttaggtatcagcaaaggaccaccaacggtttcaagcttc

SEQ ID NO: 107996 - DNA, 854 bp, Aquilegia coerulea
  Intron number 1 from transcript AcoGoldSmith_v1.010893m (l ocus AcoGoldSmith_v1.010893m.g) derived from phytozome v7. 0 (chr-ID scaffold_6; pos 5846583 to 5847436 reverse stran d)
ttattgtttttctcgccatttccacttctcgcaaggtacacctttttcttttaaactttgatttcttttataataatggaaactgaaaattaagaaaaatgccaattcaattggaatctgagaatacttcttattagttgatctgtaattctaaattttgtgattttcttttcggattaacatgaatgtcatatcacaataaagacaaccgcatatacagtagattgtttgtgacattgttcttccccttttccactagtttttgttttgttttgttttgtttttgtccatacctgccaagttagtctcaatctaagtgccttgatgaacatacagtaaatacttaggacctagactcccgcattgcctttggctgtcctgggactcacccacactttgtcctagtctactcctgcttccataactgtatactccaatgatgtcatttacattacaaaatcccacttacagtcagcatgtcgtattgtaacactgcacgcaaaaatatcgtttcagtacttcttatatgggtaacaagtgtaaagttctttgttttttaaaacagaaatgagttatcaattagcaatttaggcatttatgttttcaagtgtcacctttttccatcgataaggtcattgctggtggttgattttttttctaggataatgtacttaaagtaacaacttaggaattaagtatcatttaaggtttcaattgtcttttcaaatttgttattatcatgaacatcctcactcatccctataagtgctgtgcattatatccaaacaattaacatttcggtctcaaacgtatgtttaggaggaagacaaggtggagattgttgcagaaattac

SEQ ID NO: 107997 - DNA, 290 bp, Aquilegia coerulea
  Intron number 1 from transcript AcoGoldSmith_v1.005965m (l ocus AcoGoldSmith_v1.005974m.g) derived from phytozome v7. 0 (chr-ID scaffold_21; pos 3810104 to 3810393 reverse stra nd)
aaacattgccatcattcatcctgaccttggaataggttctattctattctcatctcaatctttattttgaagataatttattttgctgattcaaagaaaaagagttttaatcacaattggataatgatgtgtgatcatttatcttgctacacttgaacaggttactgttgtattatgttttattgagatatttttattctttgtgttacttatgaaagtttgtgtttctttttgttaaatcttaaaacctttgattgtgtatgtaggtggagctgagaggttaattgttg

SEQ ID NO: 107998 - DNA, 723 bp, Aquilegia coerulea
  Intron number 2 from transcript AcoGoldSmith_v1.007424m (l ocus AcoGoldSmith_v1.007424m.g) derived from phytozome v7. 0 (chr-ID scaffold_6; pos 7715806 to 7716528)
ttttttgtttctctctgttcaaaatcgtttaattggtaagttttcttttaattctgcgtgaatttattggcaatttgttgaaattaattgtttttttttttttcttatgtagctaaaattcatattctctaggtatgatcatgtgtaatatggattttcaaatttgattttattgattagttggagttgtgaattgtttatgcaaatcataagaaatatcatttagggattgtgctgttttaatttgctttgtattgtttttggaggagtatgtacttttctttcaatttattatatgattgtattgttttaggtggattgaatgccatttattgaaagatggtatatgtgctggattttgagaaataaatattctgatgatttgatatgaaaaaatagatttttatgatgaaagttgtgtattagggattggcttttgtgaaaacttttaaggggttctatttacataggctattttgatgtgcattctttttaatatatgttgatgcaaatattccaagtatcttattccaagtatctttggatcgtactaaataatttattttttttctttcggggttgatattagattagataaccgtgaaattgtttattctgtattctgtgttctttatcaaaatatatatatatatatatatattttatagattatattttttgcatccattctgatttcttatctcatttgtctggatagattga

SEQ ID NO: 107999 - DNA, 549 bp, Aquilegia coerulea
  Intron number 2 from transcript AcoGoldSmith_v1.020109m (l ocus AcoGoldSmith_v1.020109m.g) derived from phytozome v7. 0 (chr-ID scaffold_63; pos 805642 to 806190)
cccggtttggtaagtggttctgcagcttctgtaaacctcaatttttcgagaaatgaatattcacttaataaatatcaggttgtgcttgatattcttgttacatattgtgcctaatactcttgcttttctatagtttcttgattttttattttattttatcgaaaaacatgtttgagagcattggccattaggccttacttttcacctttaagaaaaacaagtgtagaagagtcccaagtttgtgtcgccatgacgaccctatacacagagtttggctcaaaaaggtgaggtttgtgtcctaatccacatcgtaagcaggatgtacaggctagtatagtgaagaaacagatgcaggggtgggggttaaaaattcaattaaaacagacagtatttattccagactgcaggatgatagaaaaaccaaacgagtcccattggatttgatagagaaataagctgtgttaaatcgaagaaaactatatttatatgtatatattttatactgatcgaatgttgcatgtgatatttcttttaatgtaacaggtcatc

SEQ ID NO: 108000 - DNA, 1016 bp, Aquilegia coerulea
  Intron number 1 from transcript AcoGoldSmith_v1.016909m (l ocus AcoGoldSmith_v1.016909m.g) derived from phytozome v7. 0 (chr-ID scaffold_59; pos 79702 to 80717)
gaacaaccaatatactcaaggttattgtcctacccaaaactatacagtctccaaattaatttgatagaacaaccatatacttttcagaataagcaacgaatctatttttgaaaatctacaaagaaaaaaaaaaaaaaaaaaaaaaaaaaactcattatatagacttgaaggaagcgtgatatataattgaatctaacactataaacttgaaagaaaattgataagaagtagaactttaatactagttgaataaataatttgaatacaaatttcgtttttagagctcattatatagataacttttaataactaatgtagaaattgactaaagctcctaatacatgtccaaatattcttaaacatagtagaactcaaagactcttctagactactataaagacaaataaatagcaaaaaccgaacttagaaaagttcatcttagacaaggaattctaaaccaatactaactcaaagtatgaaatatgaaactatcattcaaattgacttagtcaagatgttttgcatcaacttctgcatgaaatatgaaattgcaaagtgttgtggattagttaaattaaactggtcgggttcgtattctaacattcattagttaacttaaacttatattttgtgtatttgcagggatggcagaaattattggtgtagttggtactctcctgagttgtttttttcaacaaaattgtgtaagtacccccatttttgtacgatgcaagcacatggtaaatgtaaaaaaagaaattaagaagctgatgaagataaataaagagttgaattctttgaaagatgatgtaaatgacaagttacacacggcaaagatcgaccgaggagaagttcctaaacatgttgtggacaattggctacaaaatgtccaacatgttttggatgacacaaatcgcattgaagaagaggttaaaattgcaacaagctgcttaaagggactgttacctaaatgttgttcaaattttagtttaggacaacgtatctcagagttgatc

SEQ ID NO: 108001 - DNA, 423 bp, Aquilegia coerulea
  Intron number 1 from transcript AcoGoldSmith_v1.019776m (l ocus AcoGoldSmith_v1.019776m.g) derived from phytozome v7. 0 (chr-ID scaffold_7; pos 1354894 to 1355316 reverse stran d)
ttatcaaaggctctgtcttccttcgtcctgaacaggtaattaattgatttaaatctaatgaaaaagatctcaattcatttatttttgtttaccatttcttttctttccatttttgcctgaaatgaaattattttataaagattaaaatgccctttagaactcagctcagaaaccatttgatcttctttgaaagtatcaaaaaagaatctctctatagcgagagattctatcatttagataacttttgtttcacaatggagcaggataacttttgttgtcatttgtcagacataaacagaggaatcaacacaacacacaatcaatagtttccttcaaaaacattgtaatccctttgttaatagcattttgcccttgtttatgattacagatagcaaaagcaattgaaggagttattccattacc

SEQ ID NO: 108002 - DNA, 781 bp, Aquilegia coerulea
  Intron number 1 from transcript AcoGoldSmith_v1.004381m (l ocus AcoGoldSmith_v1.004381m.g) derived from phytozome v7. 0 (chr-ID scaffold_27; pos 849645 to 850425 reverse strand )
tcaagttcttcttcaaccattaatttctgcccaaggtaaaaaaaatcccatctttgtttattgtattgatccccaaatcaaataatttgatttagctggctttagtttgtcgggtagtttatatcttgattgctcttttgaaaagtttctttcttgatgaattttaattaagtatactattgtgggtatctaaggagtaattttttaggtttttgttgtagttactgaatctttcatattgatatatttggatattgcattattgcaatttttaatcacattgtattcacattgagtgatttgcagaaaaaaacaattttcttagtatatttttttgtttaaaaagtaggaaatatgctaaattctaacaatgttaaattgcactctaacaatcatagttctatatacatcatagaataccttatctaaattattgcatatcgtgtagcttatgttagttagactcacacatataggaggtgtcaatggtcacacattaccagaagaattctgttaccggaagcgataaataaaaactgaacagtagatgatattactggttagtacccggaatttcgggagtgtataaattgtaaaaataggctgtctttgttcagatgaaggagtccatgttctgtttacatcctttctagtgtttaaccatcctttttacgagttgggtttacagtttcatacatgatgttaactgttgttgagttgggtctatggataatttattcattatttgggcatgatctgagatccttatgttggaatgcag

SEQ ID NO: 108003 - DNA, 987 bp, Aquilegia coerulea
  Intron number 2 from transcript AcoGoldSmith_v1.005540m (l ocus AcoGoldSmith_v1.005539m.g) derived from phytozome v7. 0 (chr-ID scaffold_9; pos 23879 to 24865 reverse strand)
acttggatagttgggtacaaatatgttcctttacctactgctttccacttttattttttctcctttctttcgtccatacattacataatgtatactctacttttattttaccaagacaaaaactaaatatccttgtgctgattatggaagtatctcattttaccagatggattttttttcaaatgatgctctatttaacaagaggcaatactgttcatatatgagaataaattctaatcttaaactaccattattacaacttagaagatacttcaccatgcttccaagtctttccgtttggattaagctgtctacttcatccccgcactcccttgttaccctgttcatcttgcatttcttttacttgcatacttgctagaattttaataaagtgagattttatattaatatttagaattttagtttatttcaattttgttaaaatgttaacttgaactgagatacaatagcctggtacatgtaacctcgtgacatcagtttgtttgaatataacaccaatgtttacttatccaagccttccatattaatttaataaatacagaatcacagtcttacaatgttttacttaccatttagtataatctcacttttaagtacatttacacatttgaccaaatcaaacataattattatcttagtcataccctttatcgttcgagcctttggataggtgtaataccacaactggctttaatataaaattttaaggcacattgccatgtaataacagaaccctttttttcctatattttcactacatgacaaagatatacatatctccttagtaaaatcgtgcaagtcatgtttcaaagtatgcatttacttcattttttgttataatgcatcttaaccctttgctctttatgtgatcacagtatcattagaaagttaatggttctgtgctgaaattatcgagtttatgttgactaattccgttgcagggatcttttcaacctttttggctgt

SEQ ID NO: 108004 - DNA, 778 bp, Aquilegia coerulea
  Intron number 1 from transcript AcoGoldSmith_v1.005540m (l ocus AcoGoldSmith_v1.005539m.g) derived from phytozome v7. 0 (chr-ID scaffold_9; pos 25097 to 25874 reverse strand)
aagagagaaaaagaaaaaataaagtcggtcgaaaggtattattattcttattattactattattatctgatctgatctgatctgctctactctgcatttttttcgtctctcaagaaactacccatatctttgataataccttaaaaaattatttcttattttctttacaaataaatatttctcttcttcttcttcttttacatcacatcacaatatgattatatttttgcagagataaaataaaacctaactgcaacccggaaaggcatgcatggaacaacaacaaaccgtcaccattacccaatcaccattgcttgcatgttgtgttttcatctcattttgattgattttagggtttatttattgctagtcattcacaatttcttcaaccccaccactctctctctctcacacacacacattacacactcttggaatcttggattgctttcaaattctttctgtaccaaccagagtttaattaagtagcacatttcctcccattctttaatttattgagcacagtagtaataatttattcatcaatggactctcgatctcatcccttcctcctaacaataacatactgtacatattatgcggccgcctcttgcaacccggcaaccaccaaacccttgatccacaaacttgtattttttattttttggccgatcacccattcatccctgcctgctaattatcatacagtatattttattaactgtaaaccttttttatttcttgttaattcatctttctcatattcccttcccaggtt

SEQ ID NO: 108005 - DNA, 793 bp, Aquilegia coerulea
  Intron number 1 from transcript AcoGoldSmith_v1.025236m (l ocus AcoGoldSmith_v1.025236m.g) derived from phytozome v7. 0 (chr-ID scaffold_18; pos 3783 to 4575)
tccattggatcacttgaagaatctttaccaataaagtgagttattagtttattttaagaaacaccctcattgttttagtttattagtatattctccttgaattcatcatgttgatgataagtgtcttggtggtgtccaagaactatttttagataaagatgagtagatgactgaagttgatctagaagaactatttttagataaatggatactcaagtttagaagaaatgttgtttaacaactcactagctatagtatgaactatatcaacttatcatcttgatccataagataaaaatgcgcaataatagtatgatcttgtgaatctttagtaagaacttacattttgctgtgtgtctaggtttttgaaggtacaaaattatagatgtttgatctggctaaaactattttatgcagccgtaaactctcgcattttgcaagtcggcattgcttgttggtattccggataatctattttggattattaaagaaacaaaaaatattggatgtttgtccataaattatgatctacacacttgtagtcttgtagagtgtgtagaattaggtgccattgtaaccgttttgccttggtttttgtttttcgagggcaactcttttgaatgagttgtttatgtgcattcattaattatacaatttctttacagaatttttacaagatcgactaattatcatttatattttatacgtattgtagtgatggtctttttcttttatttcttggtcatttgtttttgcagaagagggttatcaagtttttactcaggaaaatcga

SEQ ID NO: 108006 - DNA, 918 bp, Aquilegia coerulea
  Intron number 1 from transcript AcoGoldSmith_v1.026413m (l ocus AcoGoldSmith_v1.026413m.g) derived from phytozome v7. 0 (chr-ID scaffold_6; pos 2301457 to 2302374)
gaaaatttggaaggagtattgaaatttcagacaaggtaagcgattttgacctccattgattgatatactgcatttttgttataaacaaccatatacgtgttactatattacatgaaaacacaaagatgcaatgtttagtacgggataatctatttgagactccaatggaatgagattcaatatggtccaaatttaaataactgctttcgtgttaaattgctaacgtttgagaaacacaataaaatagatctgcaactttgactcagattgttaaaatttaagaatacactaatagagctagtttaaaatttaggttgtgcttggcaaggagaaaaaggttgcatgtcaaagtctaggttggacccgtgtctacatgtgttttggttgtttccagggttgaagtttcattaaaactttgtcgtcattacttagcttcaaagtgttgataatattttactacgaacccaccacgaggatgggatgttgtaggctgtaggcagtgggatcacactacgatataaacaagtgccccatttaacactagaatattttaatgaagttattatcactttattaattctcttaacttctgaaaagtgctatatataatggtggtcaagtggtaatgctcaactaattttaaaaagtataaacacatcgaacataagtttgtagcccaattattagtgaatccatgtgtcctaaactcctaataggaacaggattgtgtcttctcaacattgttgatgaatttctcgatatgatgaaccactgttgaaaatagtggtggttcaaatttcaaaatgtcgataagcatgccagtcaagcatttgatactccatactgtgttctatatcctaaatggagatgaatattcaatcaggtataaattccaaaggtgttggcaatctcactttg

SEQ ID NO: 108007 - DNA, 996 bp, Aquilegia coerulea
  Intron number 1 from transcript AcoGoldSmith_v1.002068m (l ocus AcoGoldSmith_v1.001805m.g) derived from phytozome v7. 0 (chr-ID scaffold_6; pos 3329134 to 3330129)
gcaaggacaattcgagcactcttgcagccacagtggtataatgagaaacctctgtgattattgttgctgctagcataatttagcacaaaatcaaaacaaaaagatgatgttgaatttgtttttctatacagaattttgttgatctggcagggagtgagcgtgcatctcaggcattatcagcaggaacaagattgaaagagggttgtcatataaatcgcagtttgctcacccttgggactgtaatacgcaaactaaggtcttcttcgttaactttcttgtttccattttaagtaatttcttttaggggttggcttgcattggtttaattgaaagaatcagctgtttttctttagaatttgttacttacacattatgttcatccttttggaaactcaaaaatatgtaaaaaagtgttaaaattaagaagaaagttttaaatactctatgtcttcttgaaaccctgagttcgctgttagagactgtgggatacacattctaagggaagagctgcttatcatttctgcaatcccaaattcagccttagtctggcttctatttttacttacttctaacctctgttattttttggtggcttggtgcacaatattatatcctctaaaggttctttcacttgcataagagtacgttgcttatcttgaaaactgaatccgaaagggcttcacttcaaaccaaatataaacggcaggagaaaaataaaatgtacagtatctagacttcaggcctaaatttatgcccgtcgccacaacaatccaaaagaaaagcatttgagtttgtataatattcatgtatttaatgaatgattaaccagctacatcgtgttcaatgtttttggaagattttatgacaaagaaatgccactctcttcagattttttgtaaatgtttatttttgtcatatctctagttatatgtcaataataatagtcatatcatgttattatatcttattatgttaccggctgcagcaagggacgaa

SEQ ID NO: 108008 - DNA, 632 bp, Aquilegia coerulea
  Intron number 1 from transcript AcoGoldSmith_v1.008409m (l ocus AcoGoldSmith_v1.008376m.g) derived from phytozome v7. 0 (chr-ID scaffold_30; pos 1387142 to 1387773 reverse stra nd)
atcttgtttcatttgcagcttctcaagaagattctgtaagtttatttgagatttctgattgttctatttgaattagaatttaaatcttagattctttttttttctggttttatgaattgtcaattacaatgttgaatcttccaattgtagagttacaaggtttatattacaaagttttttttttattattattattattattaatttcccctgttgtatgtgaaattgtgaatgtttcttgatgtttagtagtcgtcggtcggtcagatgagacgataatgtgtagtgaattggaaatagtggttactggttagaaacaggactttcttatctataagatttgtaaaatatgtcaagaggcggatttttcttagttgaagattgacacttctgttttagctattaatttgccaaagccaaactatatgttgataacaaaacaatgtgtttaatcacatgggtatcacttttggcattttaaaattttcctctgtcagcaaattgtcctctttgattgtagtttgaggtccttagagatctttttatctgatattgtaaatattagttttcttgactctaaacttatttattcagaagcattcagagattgaagtggaaaaggagaagagtga

SEQ ID NO: 108009 - DNA, 727 bp, Aquilegia coerulea
  Intron number 1 from transcript AcoGoldSmith_v1.009346m (l ocus AcoGoldSmith_v1.009346m.g) derived from phytozome v7. 0 (chr-ID scaffold_27; pos 1445362 to 1446088 reverse stra nd)
aagaactttcttcttctggtcctctttctcaacaggtttgtttttatatttttcttcttctttacttccttgatgttgattgattcgagttttataaactcagaaatttaatatagttttgagatctgaatcatagatttaatttaaatactattgttatagactcgaagttgtgaacaatcagaaatgaattgaattagggtgatttaaattgaaattttgagcaaatgagctatttataatttaggtatcttgatcttgttgtgctttgttaatcttattttaatgcgaaaaaaataaatccatttgagatgttgagttattaaatgtgatgaatctagaaggattttttgtttttgacgcactccttccactaaatcgtgacaaactctctagtcaattgttaagatatataacagtttgtaagtgactcttcatatgaatatgtgatttgattcttgatctatggagtcaattgttgtttgtgggaatccactgcaggtatcatgtagaaacttgttacatgggctgatagtaagcccatgtaagaaaatgtgttcagatgctgctgttttgaacttttgattatagtacttttgacacaagtagactactagagtactagactgtattactgatttactgtctcttttgtcctctctatttcatcactttttcttattcctttgcagctcaaagagatcgtaaaccaaggaaagttggtttc

SEQ ID NO: 108010 - DNA, 780 bp, Aquilegia coerulea
  Intron number 1 from transcript AcoGoldSmith_v1.009264m (l ocus AcoGoldSmith_v1.009264m.g) derived from phytozome v7. 0 (chr-ID scaffold_10; pos 1155741 to 1156520)
gtgctgcttattctcttgtttctttcgttgctttggtaaatttcattccttttttttttttatttttattttttattgttgcactattgatttgatgttttacttgatttgggtttttagggcaaggtgtatttttaggtcaatttcatattatagagtggatttttttaaatgggtaggtctttttgtgagtaattatgaattaaaaatttaatttttatttgtagaaatgtttagattatctaaaccctaatcacattgtgtgattgtaatcaaacttgttattagtattggagtgagttctatactattagttggtagttggtaggtagtgtagttaatgtgtactcaatatctcggacattcgcaatgctgtaaattgccagtttgatagcatcactttagaaaatggcgttacaaaggcttttattgcagaagggttggttgagtagggaagatgaggtctagatttgggtaattgtttaccttttaaatttattgttaaaaggagatcggcaatgagaatatccatagtttctagaattatgtgcaacatttaacttcatgtaaatagaaagaggaccattttgacgtcctttctctgtagctgggactgtccggctgatttcttaggttgtacaggctactttcactttctcttctctcccgtacgtcaccctatacatatatataaatgtatggaaacatagatttacacgtgcacatttatattttactgatgtaagtttctatatctaggtacaacttttccgcattcaa

SEQ ID NO: 108011 - DNA, 1014 bp, Aquilegia coerulea
  Intron number 1 from transcript AcoGoldSmith_v1.011174m (l ocus AcoGoldSmith_v1.011174m.g) derived from phytozome v7. 0 (chr-ID scaffold_72; pos 761728 to 762741 reverse strand )
gtcaacagtaagtttttcttttctgatcgtagtattgtagtaattgtgattaaaatcaatgaagaatgaatttgtttttatatgaaagaattgatcttggtgttagattattcaaatgcatgttaaagttatgattttggattgaattcagttgagaaaagttttgttttttaagtatttaaacactagattgactttattcttttgatttatgtgtctgtgtgtttacatatactggaaatttcacttatttttttgattttagtatttaattatgtttgtcagagattatacttgcgaactaatgaaagtattgctatggaaaagttgtcattgttgtggaagagtgagggaagagatgacttctaagttttaatcactaataagcatgatataagcattaggaaaacatgtttctgctatgatgtgattggtacccagaaaattattggaaagagcgatactgaaaatcgaaactacataccttttacctcataagtattatggctttttcaacatgtttttctgttcactagataactacaagtaaagaaaagtgaagaattcatgctccgtttcactctataagtaaaagctgccaaggccatttcttatcacttgagggttgccgggttggggtttgggggtaatataattgtatgtagttaccttaatttagataaaacagaggatcctagatataaaggatttctaatatttttctgattatcagtttcgttgtatggatcacaaaatgtaaaagaaaaactccttgtatgggttgatactttaatttgtgagtgtgccaagtagcacagaaaaataattacaggtagttgtgcatttcctctgttgaaacttggaaccaagtgcagcatggactactatttcatgcttaattatatttcttctggcatacctacatgtaatgtcaataccttagtgggatcgtaacccgacaagaactgtttgcttatttcagcccattgtttgtcacttggaagaaagtgacaa

SEQ ID NO: 108012 - DNA, 482 bp, Aquilegia coerulea
  Intron number 1 from transcript AcoGoldSmith_v1.010647m (l ocus AcoGoldSmith_v1.010647m.g) derived from phytozome v7. 0 (chr-ID scaffold_27; pos 2059879 to 2060360 reverse stra nd)
ccatctttacaggtaagtaacatacatttttcccctgctatctttcaatttagtaacattttaattgaaattgaatggcatattggtatttgaaaacctcaacgtcttcttaacactagtaggcttgaatcttgattagctagcttggtggatttgtttttttagttttgcatgcaaataacatctttgagtacatattcccttgaaaaacagctcaatagattggggcatcaggatcagcaacatgaacaatgggaccaaccaaatactctctttataatgctctcgctaatgaacaattgttgttctttataatttttaaagtatctaaaatgaattttaaaaagattttttttggcaatttttactcagagaacattatttttttagtgtaaggcaatttgttgtttgttgccttaaattgtgtttttgactagctataatctggatttaattgactgcagtggaggattttctgctta

SEQ ID NO: 108013 - DNA, 247 bp, Aquilegia coerulea
  Intron number 4 from transcript AcoGoldSmith_v1.020166m (l ocus AcoGoldSmith_v1.020166m.g) derived from phytozome v7. 0 (chr-ID scaffold_1; pos 151466 to 151712)
aggaaaggtgcaattcttctctcacactttcattattttcgcaatagatgaaatgtagatttccaaaatccggagacattttattttatctgttactgagattaacatctgcacacacatctttcttttggcaagtacataaagcacatattactatattagttagttttaattcaaacgaaaaccaaaataacatttgtttatatgaccagtactacaaagagagacttgtctccgaagaacaaaa

SEQ ID NO: 108014 - DNA, 805 bp, Aquilegia coerulea
  Intron number 1 from transcript AcoGoldSmith_v1.008391m (l ocus AcoGoldSmith_v1.008391m.g) derived from phytozome v7. 0 (chr-ID scaffold_10; pos 981755 to 982559 reverse strand )
aatctcagaaccaagagaaaaattctcccttttgggtaagtggtcatttcaaatcactttattctaaaatttcttctttgggttttggaaattttcaatttttattatcttgtaacttgtttttaagcaagatttgatggtaaagtttgattctttacgttattagaacaatgggtatttgcttttttctcgatctgttgtcaatttaatgagaattgattgcttcgcaggtttttttcttctctctgcatttatattctctttgatttttttctggtattgtgtttaatggtttatttgactagtttcccatctctgtacaatttgattcatacaagtgagtcgatttaattgctttgctttcttgtaatcctgggtttctgatttctgtgctttgttttctagtcccaatgggtgtcttttttatttttcaacctacttttctttctttctctctcatctcaattctttgtttataattgaaaaaagtttcaattttttttggtacaagatcatcaattgtgaagtgggtaggtttacattacattacctcttttttcttgtttctttcttcgttccaattcactgtttttttttccatcttagatagctatagagttttgaaattttcaactaacttgttcctttggtaataaagattcttcttttcttgttctttcatttatagaatgtgtttgtttgagataaaaatggtgaaatctactaccttgatttctaaagatttgaacaaaacaagtcatgttttgcttgcttcttgtttcagggaataattgaagaagattag

SEQ ID NO: 108015 - DNA, 507 bp, Aquilegia coerulea
  Intron number 1 from transcript AcoGoldSmith_v1.016347m (l ocus AcoGoldSmith_v1.016347m.g) derived from phytozome v7. 0 (chr-ID scaffold_9; pos 489974 to 490480)
ctgtgcttggaattggattaaaaagtggactggaggtacctctataattttctctttcaaaattattttatgattgaaaatagataattcagtagaggtacaacatcagagtggaggaacatactacttgaaatctgggaaaattaaaatccgtcacatttcatgaaagctgcttattgggctttgattggctatggcttccgcctgagcgaactgaagtctgatgcatgccaaactatagtagaccaaacatcagctgaggcatgattgagctcttcgaaattactgttgtgtgttttcatatccacagcttaagggcttgttacgttaatgttctttaatctaagatcacggtctttaattttttttccatcaatcttggatcacaaactcatgatgtatcatctataaatttgcatattacacatttcagtggtgattcgaatgtctattaagactgatcttgatctatgcagtttgttggagttgatcctttgcaagcgggta

SEQ ID NO: 108016 - DNA, 865 bp, Aquilegia coerulea
  Intron number 1 from transcript AcoGoldSmith_v1.001067m (l ocus AcoGoldSmith_v1.001067m.g) derived from phytozome v7. 0 (chr-ID scaffold_18; pos 4588165 to 4589029)
actgattctggagtttctttactcactcataacaagtaagttatttgctttatctttctactagaaagaaatgtttcttgattcgtttgtagtttctctcagtgtttttatctaaaattttagcaacagaaatgtatatatgaatcaatgtcacatattgtttatttatgtattcttagagaagcacaagtttcaaaggggaaggatctttaacaagaggggagggattattgaccgctaccctagtattagtgcctgcaacgttataacactccaaggcctagatgtaaaacatgtgcataatttggattgtaattatgatgttttaaatgcccaaggcctagatgtaaaaacatgtgcaaactttgtgttataactatactgttaagtgctttgtcaacacaatccattgaatattgttcaagagttttcatatattggggctatgtgtatacattctatttgtactcttctcataggcttttcttcatgttattgatgaggtctattttacaatatcccccagtgcacaaaaagttgaatttgtatgttggcaattagcaaaatgaacttgatttgctagaagtgtaggaagacctgcgtaatgtattttatttcgtctcctgaaattttctgttggttttgttcctcatcacggttaattatttttccttcctctcgttgtgttttgagtatgtggtgctgctttttattcttcttgtgttgttatgttttagcctagctgattcttatgtcatatcatttaggtgctattctattttttgttaatattcatagtttgtctctaattactcaagttgcttgttcagagtttcagacacccaaacccatcaaattgctgcta

SEQ ID NO: 108017 - DNA, 466 bp, Aquilegia coerulea
  Intron number 1 from transcript AcoGoldSmith_v1.002178m (l ocus AcoGoldSmith_v1.002173m.g) derived from phytozome v7. 0 (chr-ID scaffold_27; pos 1208882 to 1209347)
ttctctatataactttctctgtttatctgtagcaggtgagttcaaatgtcggtttctcttgttcttctaaacttgtgtaatgcaagtttcattcttctctttctttgcttttgagttcaactggttttaaaattgtttcagttcttcacattttagcactgattgagttgatttggggaaaaataaagacaatgcaggttttttatgttgtttgatgaactaaaaaagtttgctttctttttaagtttttttttgttactttttaaaagatttcttgttttacaaaagaacatgaaatgattaaagcaattttctcatgactgtaactcttttttttctttcttatttacttgttattcttactcttattagttatattatttctgatctgtttttttcaagctgagctttttgttttttactgtttacagatcggtgaagtagatctgtttctaaggatttgaag

SEQ ID NO: 108018 - DNA, 441 bp, Aquilegia coerulea
  Intron number 1 from transcript AcoGoldSmith_v1.020686m (l ocus AcoGoldSmith_v1.020686m.g) derived from phytozome v7. 0 (chr-ID scaffold_11; pos 3366141 to 3366581 reverse stra nd)
aagctgctgggagttcacctcctcaaagtgaagaggtatgatactttgtaatattcttttgcttgttttctcattcccaaaggaagtttctgttctatatattttgcaatattattccagtacaagtttatagagcatttttctgtcatttatgcacatgtttcttgatactttttattgaagaaggaaatgtgaggtataggagagtctaatgtaccagaaattacactcatagatagagttcacaactcaataaatctctacatgaataaacttaatgcatcactatcagatcaggggcgtttatttggagggatataggcacaatttgcaaaacaaaatctttaacaaaaagcctttgattttgaccagaattttttcttttccaactttatccaggccaacgcttcctcttgaccataagtttcattcaattgcaga

SEQ ID NO: 108019 - DNA, 718 bp, Aquilegia coerulea
  Intron number 2 from transcript AcoGoldSmith_v1.006957m (l ocus AcoGoldSmith_v1.006957m.g) derived from phytozome v7. 0 (chr-ID scaffold_67; pos 153166 to 153883 reverse strand )
tgttaaacagcttcctcatcaacttattgttcactgtaagctatcaaccaagtacatcttcattttcaaattgatatgaattgccctatagtttgatttgatcttctttttatggcatttttcttttagtaaagatagatatacagtatcacttaatgttaaagatcattcttgtatgatcaaatgaatgaaggtatttattttgagaaaagcttatttacacacaagaaggagaagtagtcactcagtagctgtaggatagcaaaaatgtttttattttctactttcctatatgaataccattattctgagtttctgactgctaactgtatcatcatttgatgaacttgatgacaaaaatatatttgattgtattttaatcaagtgcttattttagtttacaaatacatcttgattggtgttaatggttaagttttcttccaattttttatgtctttctgtggaaaattacctcgattccatcattaccaatttgtacaagtcatttcctattttttccccctcaagtaaaccggatacttgaaaagaggcttttaaaaacaatttcgtgggtccattctataatccaggcgttctgtgagcaaatgtagcatagttatttatatttcgatgataatcatttcagaaactgtgtctaggaccaaatttttatcttcattttacttgaattggatatcctgtgcaggtagtgaacgca

SEQ ID NO: 108020 - DNA, 583 bp, Aquilegia coerulea
  Intron number 2 from transcript AcoGoldSmith_v1.027453m (l ocus AcoGoldSmith_v1.027453m.g) derived from phytozome v7. 0 (chr-ID scaffold_15; pos 2504622 to 2505204 reverse stra nd)
ggacaatccagaaatcttagaggtatatatatattcaaacttccagtttatttatatctatatgttggtatttgatttcgactaatatatagtactcctaatatccatggcaattatttcacatatgacatatgcattagaattgaattgaccaaaataagtcactactgatttctacatatatctaaaacagcagatatactttgcttaacatctgtatagaaatgtgctcaagggtgcatgttatatttagtcttcctacaatatgaaattaatcataccctgttgcattatgtataattgctagttagctttgggctaattgatcaattggccttttaaactctcgttgtcttcaattatagcttcatatatgatgaagagttcatgtgttgtattttaagatggtctataggttaggtgttaaaatccctcctggagttattttagttcgttctatattctgtttttccatataagttttggctatgtcttttaaatcagttcattattatctcaattcactaatcttcgttaattttaaaccattacagaacgcacatattcagaaccgagaaagtgg

SEQ ID NO: 108021 - DNA, 1017 bp, Aquilegia coerulea
  Intron number 4 from transcript AcoGoldSmith_v1.005701m (l ocus AcoGoldSmith_v1.005694m.g) derived from phytozome v7. 0 (chr-ID scaffold_11; pos 6290899 to 6291915)
taaagggtacgttttatgatctttacctttgcttagtttctagccatttgcccaaaagcataccaaaaagttaaactttgacatagagtagtaaacgaccctttttgtagtatgtcttagagtcttgaattttatggattaaaattgtgtgctccaagggatcctgtcagagatgagaacttgtcggtaacttgattagtaaacgacccttgtttatcatgatgtaatcaatggctagatatcattcaacatcaatccaatggtttgtaagagatgagaaaatgttttagttattttctcacttaagcctcttttcccaccttttgaattactcggggggagctaagaaaatcttttctcactgtatagtgaaaaattgatatgcgatgggaaaataccattttcttttccacctacttaaattggcaatcaaacacgtgaacagtgtttatcttccactggtctagtgagaaaatgcttaagttttctcactacagtgggaaaacttaagcaatcaaacacatcctatgggtctttctgattcgactcccggaaatagatttcgcgggaaaacttaatttcccatgtgtgaatacatggaaaattatcggtaaatttttaacattgaaatgtaagtcaaaatgctaggacatattggagctcaatgttgattaactctacatatttacacgattttccaatgattttcataatcaaattagcactagtcattttacgaaaattttatttcccaaatatttgcatatgggtaaatctacttcttggtaaattgtttttccacccgatcaaatagaccctaattgttaaggctacttttctgcttggtggttgtgtagatcaaattatataagtatcctctatccagttctcatattagttgtatacatctaaactattgaattatattctgactgatgtctactaatatccgcatactgaacttctagattgtattttgtttttcagtaaagggtcaaagagtggggcttctggtag

SEQ ID NO: 108022 - DNA, 713 bp, Aquilegia coerulea
  Intron number 1 from transcript AcoGoldSmith_v1.014895m (l ocus AcoGoldSmith_v1.014895m.g) derived from phytozome v7. 0 (chr-ID scaffold_1; pos 3672562 to 3673274)
atacaattctgtatgtccctgccttcttactcattattttggcataacattattcgtagtttttgacgatcatgcaaatatgtcatgatgtttatctctcattgtaatttggtatcttgataaataatacgacagaccaattaatttattagacatttcgacgttatgttctttattttgtcttttccatgtttttgtaacctataaaacatgcactttaagtggccaacacaggtactagaagtgttcaacactggccttataaaccacatcctctagaactagaagtattcctgcattcaaatgtgttttgaatttgggctgccttgtggtttctgaaaagccaaaattcctagcaaaatatagtgaaatatagtgttcttgttgcattggatataactagaagatcatgcagacttccatgatataaaaaatctgccttttgtgcgctattggcatggattgagagattttgaagttttatgatttatgttctggtgctattgtgcttattgtttcttttgaattgtatagcacttgcttgatctatttatgtgggcaccgtacccttgatttcacaattcacatatattttcttaccatattggcatattcatgtgcatcagactatcagtatcacttgagtgggcttttatgaatttggcttgtgcattgcagtttgagcgtgacaaagtggatccatttgaactggg

SEQ ID NO: 108023 - DNA, 518 bp, Aquilegia coerulea
  Intron number 2 from transcript AcoGoldSmith_v1.012170m (l ocus AcoGoldSmith_v1.012170m.g) derived from phytozome v7. 0 (chr-ID scaffold_9; pos 2541474 to 2541991 reverse stran d)
ggggtcccgtttcaaactgcggttttatagctgctgtaagttataattctttctattgattatcagtttctgcttctctttcactatgatttgagtttgtaaatctattggtccgttcagttcttatgtgtgagtatctgtcaacctacgaaatcttaggatgactaccaggagttcaggataaatcaatcgagtttttaagattatttgcctgtcagtgggcttgactgtgaactttgtgtctatttatgttgcattcagttttcacacttggtactcggactcttcttgttgtgtttgttattaacactactgtattatgcttgttgctaacaagcatattttgagtttgtataacaagcataatttgttattagcataagatttttcttactgtaagatgatttcttggaggcttaatattattctttaccattttgtgttgactcaatcataattctgtttgattggtggctttaacagggattagccgacacgcagaaacccccagaactcat

SEQ ID NO: 108024 - DNA, 788 bp, Aquilegia coerulea
  Intron number 1 from transcript AcoGoldSmith_v1.012170m (l ocus AcoGoldSmith_v1.012170m.g) derived from phytozome v7. 0 (chr-ID scaffold_9; pos 2542056 to 2542843 reverse stran d)
agagagatagctcgaacgatcattctcgtttctctgtaagttcatctgatcgagctcctttatcggaagaatcttgcgtttttaattttgtaatttgagaatgaaaaaaaaaatctgatttatgaatctagggtttctctctctatattaaaatcatacagttttatattgaattgattgaagagctgatttaagcaggttttgagatcaaatcctaatacatgtagtctaaaactctaaattgatcacacatgttagtaaagtcggaaggatgtttgacaaatagctggtgaaatgattgttttctttcacttcaattatattgcttggtatacttttcgtcgaatttgctgggaaaatatatgaacattacatcaaaagaatttagctattctcggcaatggtagtagtggatagtggcttctcaaagtctccgagtggatttctttggtaattagaaactgtgtctactgtggagtgatttaaagactggaagtagtgtaaaatatgttaggtttgaattatagacacgggaccaaattccaccaacgtgacagtaaattgacatcatttaccttcttaacagtgctcaaacaaaactaagagtaggaatgctgtaaattaagttcttacttaacgtgcttgttggaaatggagaatgatattgtgttctcctattattgtggaatttatcatagcttattgatttgttatacttatctgatattatgggttttcaatcttaaatgataggagattgtttatcttacagctcaaaccataatcag

SEQ ID NO: 108025 - DNA, 988 bp, Aquilegia coerulea
  Intron number 1 from transcript AcoGoldSmith_v1.001017m (l ocus AcoGoldSmith_v1.001017m.g) derived from phytozome v7. 0 (chr-ID scaffold_72; pos 49161 to 50148 reverse strand)
ataagcgctctggtggcttttggaactctgccttggtaaggtcttatttccatattgtatgacatagttagaacttagaaggcatcatgagttacatgtttggtaattttccttcaggttatttatttgagtgatgctatgattaatctcatttgtagatttttagctttatcatcatgtatgcttactgttaagtcgaattaccctgatacttatattaactgaaattaacagaaatttggatcttgtcagtacaaaagatgcgttcgaaagaagtagtattcttgtcaagactttctgacctgacactttcagttgtagtatatttctacctaggctcattcaattaaacaaaagttgcattttatgcaaacaatctgaccagtgatcactacttaatgaccaccttatgaaatgtaacatgtcaaaaggtgccccttagctaagatggtagggggtttgaattcaggtccataccatcgtcaacaatgatgactaatcaacaattcaccattttggttaaagataatcttcatagatgtgaatgaaaaaaattttataatctacattgggaaaccttttgaaaaccttaatgctggtagcctatgttgcaagatagtcccaagaaggcctattgggtctggttcttgataattagtttacatcgggcaaattgatgacaactgtttcttttttaatttcttggcttccaatatggtttttatcctttttgcataaaaagactcgttatacagtagaaaacatagtataccgcatggagttggaaattattggtatttcaatcctttccatactcaaaatcgattgtcccttatgactgtgaaaatctctctgtcgcctttctttttgttctaccaatcacaaaaatggaatacatatttttaccacaaaaaatgggatggatgaagttttactgtgtgcttccctttcagattgcaattttttactgtgctgtacttgctgggct

SEQ ID NO: 108026 - DNA, 676 bp, Aquilegia coerulea
  Intron number 1 from transcript AcoGoldSmith_v1.021673m (l ocus AcoGoldSmith_v1.021673m.g) derived from phytozome v7. 0 (chr-ID scaffold_69; pos 775933 to 776608)
accaccccaaccaacactgcagactacccacgttagttcgtgcctatgctaaatctgttgtgcaagcagtagtagtcacgccgtacccaggataaaacaacccaaatttttcgaattccttatgcacaaggaagaaattcgatctcactttcaacactctttttataatacaaaaaaaaactgttaatggtggaggaaatctctccccaaatcaagccataacagtaaaaaacggctagggttgaaataaacacgttttagtcaatttaaatgctagggcacaaattcgaaatttgaaaaaaaaaaaaaaaaagtaaaaagtttttttttttttcaagagcacaaaggccctaaggcccagcccgatcatagataaatcaaaagaatatatattatctatgtattgtggggaatccaagctcactaccattgaatctcactccaaaccatgtcaatattcaagaatttttagatataaccttaaaaaaccaacatgatatgacctcgagggattcattgatgggaccaatgtatgtcctccttgtttcacctactaatcagccaaattcggcatatcgcgtctggcaaaaacaagatcaagttttgcttggctaattgctttcttcactctctgagataagtcttgcattggctgttggtcttgaagtcatctcgc

SEQ ID NO: 108027 - DNA, 765 bp, Aquilegia coerulea
  Intron number 2 from transcript AcoGoldSmith_v1.014232m (l ocus AcoGoldSmith_v1.014232m.g) derived from phytozome v7. 0 (chr-ID scaffold_10; pos 1835179 to 1835943 reverse stra nd)
aagcaactggagcaggtttttttttttccttaatctctttcacttatttattccttgacatcttttatgtatgcatgaatacccttataaaaaagaaagaaacaacaactgctaagctcttttgcattttaattatgcgaaataatcatgcatttacctcatctttgatctgagaaatggttggaatttcaggttattttgtgtcctaccttagtaaaacaaacaatttgccttttaagttttacatccttgaactccatctatactctacaacttacgattaccagttacactttcaatattatagtatatgtgttacaaaatcaaataactcgttgccagtttcattgatatatgaagaatgaaaataatgacagttgaaattttgccaaatatttgcgtgtaccaaaagattgatattttaggagaaaagttctatagatcctgttattttgcttcttgttatattcgatttttgatcataattaagatcaaagcaatgatacatccaattttctcctctttccatagttcctactgcggagaggtagtagaaaatcgggaattcaggatgtattgggtttctgggcatttgatgtttatgtctatattgatacttgatctcgctgtaggacttaactatatggagtgtaccttgaatatataggatatatgccttgttcaactcttgtaagttaagaacaaccgtttaatactttctttgtgacaggaaatcaaagttctgagccaattaaagcatccaaa

SEQ ID NO: 108028 - DNA, 951 bp, Aquilegia coerulea
  Intron number 1 from transcript AcoGoldSmith_v1.027233m (l ocus AcoGoldSmith_v1.027233m.g) derived from phytozome v7. 0 (chr-ID scaffold_15; pos 5018764 to 5019714)
ggcaggtaaaatatcatgacttgatttaattaaaggctaaatagattatattatacattgaaatagaacacctactaaagttgcattacatcgtgagaattatctgttttcaataagaacttctttccaaattgattttggtccatacatgttttcaattgttagtctaaggtggttgaaaactataaggattttttattaaaaaaaaaactataaagatttgacttacaattactatttttttttatgaatgatttactattttagttagttggaattttcatcaatatgtaaaatcatgtaagtgattggtttattaagtgaaattagaattcaaatattattagatacctggttgtagattctagatgtgcaacacctgatttcattaacaatacaacatgggtctggtaaaccatgatatgaataaacattattcagtgaagtccaacgtactaccatctttaccaatggcctgagcattaacatccacaataggggtgccaagtttaaaatgtaatcagaggagctaaccaagctagctaattagtaacatatatttgttcaggcaaattctcttccctagaaacgtttttgtcctttcaaataggatatgatacatgtacttacagacaatatgttaacgttgatgttgagaggtagatgttacataccatcactgtattattattattattattattattattttcatgtattaatttctgttaatatagatgttgacaggctcttaattatctgtgcaagtgtgggtgttatatttttagattcttgacatcttcgactaatattatctattggttatttgattttgcatattcagccatttacacgatagagttccagaaaagaggcttaccgcatgcacatatactgatctttctggatggagcagacaagccagatacttcagtgaaggtaaacaagatt

SEQ ID NO: 108029 - DNA, 537 bp, Aquilegia coerulea
  Intron number 1 from transcript AcoGoldSmith_v1.005772m (l ocus AcoGoldSmith_v1.005305m.g) derived from phytozome v7. 0 (chr-ID scaffold_30; pos 1814065 to 1814601)
cttctctcaggcaaaacgattgaagttcaagaaaggtactgatagctttaagtttaatttaaattctcaagcagtaaggcatgtttactgaagaattgaaactgggtgttttaattgataaataaatatgttgtaatttacttatgcaaactgtttaatcaacttattcattcttttaatacagaaatatgcaaatctatatctctcgctctctctatagctggaaatgagatttgaattcgatttcatatgtgtgttattctaattagttggacttatatgatcaagcataccaaagttaattaggataactgcaacaaagtttttcttgtgttttcttctctccattacaacatgacatgactcatgagtagatcatactcaaaacaatgttgtaacactttgaaattgattattattgtgataatgcgagatgggcatcttaacattttcatttgataattctaaatacttcctatcttctctgtttgttccttgacagttttgcagctcacgatctggagtgacacactgctt

SEQ ID NO: 108030 - DNA, 162 bp, Aquilegia coerulea
  Intron number 2 from transcript AcoGoldSmith_v1.008444m (l ocus AcoGoldSmith_v1.008444m.g) derived from phytozome v7. 0 (chr-ID scaffold_49; pos 1587957 to 1588118 reverse stra nd)
ttactgaagtaagtaatcatcatttttcatcaattaagtttattattatttgattggatagagttttgattgaattgtttctttatattgataactcaattcttctttgtttcttttgtttgatcagttgattggtaatacacctttggtttatctaaacaa

SEQ ID NO: 108031 - DNA, 471 bp, Aquilegia coerulea
  Intron number 2 from transcript AcoGoldSmith_v1.001911m (l ocus AcoGoldSmith_v1.001911m.g) derived from phytozome v7. 0 (chr-ID scaffold_9; pos 6489050 to 6489520 reverse stran d)
agaagtgagtacacaaccctagaaattttttgttaatatatattagcattgtttcttatttgcttcttccgcattggtttgggatgggacatgtctgtaatttggagtttagatgaattgaaaattaagtcagcaagttgaattgaactgaagtggtttattttccagttaaaattatttggaaacaaaggcgcacataacatttgacagtcatgtaggcctatattatgtatacggaaaacattgcatcatttgttaatgacacaaagtccttgtaagtgtgcctttcttctaagtaactttttatcattgaaaaaggtacatttacatctcttttgttcatgagttttgattggaaattatgttctcttaattccagcaaaattattaaaacgcatggtcatcaatactttgatcctaattaattcacattgggtggcaggtttgtttggaggaagaaaatagagcgtg

SEQ ID NO: 108032 - DNA, 555 bp, Aquilegia coerulea
  Intron number 1 from transcript AcoGoldSmith_v1.003175m (l ocus AcoGoldSmith_v1.003175m.g) derived from phytozome v7. 0 (chr-ID scaffold_9; pos 6453928 to 6454482 reverse stran d)
catcatcgtattacccttctgctccttcttctgaggtaacatggagtagtaattatattatcaataaaccctaaaccctaattcaatcaaccctaaaccaccacggcaccaacactttctactatttctgtcaattccattcaatataaacaatgtaaaattttgaaaatagaatcgttgttacacttctgatgttttcattataatctgcccaattcatttctaaatttgatattaattctttagttgtttgcgagtttgtaaggttttaactgaattttttatttgattatccgtagagtggaaaaacatcaaaacactggaaatttataggtttatattagccgtagagtggatgttcacaagaagaagtaatgcacactctcagactaggtttgaggactgaagtaatgcacttaagtactgctttatgtcttaggtttgaggattagttactgtcatagcttttatcgggttgattgagttttatgttttaatgttgttagtttttgttgtgcagatatttgacacacggactacagtagatcctagcta

SEQ ID NO: 108033 - DNA, 802 bp, Aquilegia coerulea
  Intron number 1 from transcript AcoGoldSmith_v1.027684m (l ocus AcoGoldSmith_v1.027684m.g) derived from phytozome v7. 0 (chr-ID scaffold_102; pos 337601 to 338402)
ggcaggactcgtcgtaaaaaaacatagtaaatctccatgggttttgctttgctgacaacatgaaaacatttgtctatgaatatatgaagaatgggtctttggacaaaatattgtataaaaaccttttcggaatagattggaagaagttcacgtcgaggctagtaatgtgctacttcataaaaatctttctcccaagttcaaaaaatcttggattggctagatatacatcacatagttatactgtttacatgatgcagcggaagctaaaataaacttaatctaagaattaagattgcaaggaattgaaataacggaaaggaattacaataagtaaaagctgaaatttaaataacttgaaagtaaattgcagaaattaaagaacttgaagtaaaaactaaattgaaagacaataaactaaataataaactcttcaatcatcaatcttttctaagaaattcgtttttggagctctttatatagataactcccttgacacaattagaaaacctactagaacttgaattacttgttccctaaggtatgtattaccttttggcaacttcctaaacctattaggacttaaaataagacttctagacacttctaaagacattctaattaataaaaacgaaaataacaatttataaatactatttaggcttctaaataaatcataaacccaaataggaaaccaattggtaagtgtgttctgtcctacatcattacaacttcggcattatgttgtttgaacttctgggaatgagaagaaaccacattggctcagtccttttttcatagacat

SEQ ID NO: 108034 - DNA, 516 bp, Aquilegia coerulea
  Intron number 3 from transcript AcoGoldSmith_v1.026066m (l ocus AcoGoldSmith_v1.026066m.g) derived from phytozome v7. 0 (chr-ID scaffold_6; pos 8312855 to 8313370 reverse stran d)
ttgacagtgctctgaggcaaataagatcaagaaaggtactactattcttacttgattagttttagttttcacagtatagataattttgagattgtgacgcatttcaggttttttaataagctcaagttggcaggaagacctgtctgcttttcacttgcttaccagttaccaccccactacccccacatcagttttctgtcctatttttaatctgattcctgattatgtcaccttgacccatcatgcatatgcaagcatggatgaggtcactgaatgaggtttatatgttttatccaataacaagtccaaaataatgtgtaatgcactaatgcttatgtgagtgggataatggatttgattgaaaaacctattaatattaagtaatgaaactacataaactaatgggatttcgttaagctagccccattaatggcttaatgcccatgattacatttctttactctgaatgattgcttatttgtatttgtttttctgctgtacagaaccaactcatat

SEQ ID NO: 108035 - DNA, 263 bp, Aquilegia coerulea
  Intron number 1 from transcript AcoGoldSmith_v1.007116m (l ocus AcoGoldSmith_v1.007116m.g) derived from phytozome v7. 0 (chr-ID scaffold_10; pos 5001227 to 5001489 reverse stra nd)
gcctcaagagtacaacaaattctggtaagtaatcatgcacactcatgaagtgcatgtctccatgcacaactctaatagcaaatgaactgatcttataaccaggaaaacaaataaaatcaagaagaagaagtaactggcttctttatgatgttgagtaggagacaaagaagtctagatttagttctttctgccttttatagatattatgtttatttgagtttttcacagcaataataaacagaatttcaatttctcatgcagtg

SEQ ID NO: 108036 - DNA, 606 bp, Aquilegia coerulea
  Intron number 1 from transcript AcoGoldSmith_v1.004602m (l ocus AcoGoldSmith_v1.004602m.g) derived from phytozome v7. 0 (chr-ID scaffold_11; pos 1563853 to 1564458 reverse stra nd)
aattttgaatacaaatatttctagattgtcttcaggtatgtttgatctgagttttcaattatttttgtatttttaagctttgggtatctttttaatttagtaaaatttgattgattgaatcattttttattagaagatttgttttcattttgattagaattcagtttcaacttattggttagtctcatcaagcttgttgctttaatcgtttgatgtgatttgaactggtctgttagtttctagttgataggtacttgacccaaaagtaaataaattactgtgagaattatgtagaattccatgaattagtttatgccagtgatatattgcatctgtaacatgatattcatttgtatgtgaatttgttgtttttttttttttttaatcttattgtggattcgatttatatcttcttttgttgatctacatgacgaaattcaagatcttttgttttggtatagaatcaatagattcaattgtttaccatcttgctttgtggatttggtgcaatattatttagttctatgttacttatagatctggtatcttgcttgttcattggagtttgcaggagccgaccgtttgaaaacaagaagcgctttaggg

SEQ ID NO: 108037 - DNA, 545 bp, Aquilegia coerulea
  Intron number 1 from transcript AcoGoldSmith_v1.006103m (l ocus AcoGoldSmith_v1.006103m.g) derived from phytozome v7. 0 (chr-ID scaffold_37; pos 700033 to 700577)
gtcgtggtcgtggttgattcaattccaattccaatgtatgttttgttttctttctctaattctgttttctcaaattgttattcggataatttcactacattttataatttcatattagtttagatttcagaatcgagatctgttcttacattttgtaagttgattttgatttcgtttcgagatctgtttttacattttgtaagttgattttgatttcgtttattttatttttgttccgattgttacgtttatcttcttattttattttaacaaatttgttaaaaattcagaaaaatgagactgtctcttaatcttagatcgtatcaatttttgagaaaagatatgaaaaattcaaggctgaactgttattttcaaatttcatctattttttttttctgcgaaaaaagaagtttattccaaagattatttccaaatatttaggaaaacagattggcatctttacagttgtgagtgattgtgttttgttttttcatggtgtagatttttatagcatatttgggttcaattgtttttcagaaatcgga

SEQ ID NO: 108038 - DNA, 490 bp, Aquilegia coerulea
  Intron number 1 from transcript AcoGoldSmith_v1.005412m (l ocus AcoGoldSmith_v1.005412m.g) derived from phytozome v7. 0 (chr-ID scaffold_27; pos 3411113 to 3411602)
gcgctcaaaggacaagatttcctacttctacgacggtactttctttgtttctttctctctctctctctctctctttcttcaaactttctactatagaagtagtttatagaaaaaaaacctagggtttatttgaatctaagattcaaaataattcattttgcatatagatgaaaattcactgtataaatatcacatgtataattctaataacaactgctttctttgattgatttattgatggaaaattatgttttcgaaaataataaattgaatttccagaactttccatgggaatttttgatagaaaccctttgttttgaaacgttagggctgtgtttggggttatggaaaagttgcaaattactctccaaaagtagatacagtacagtattcaagcaaacactgtatattgtttgccagatatagcgttattgccttaaaaacaaagtttatgaagaaatttaactactgaggtattatattgcaggag

SEQ ID NO: 108039 - DNA, 255 bp, Aquilegia coerulea
  Intron number 1 from transcript AcoGoldSmith_v1.009794m (l ocus AcoGoldSmith_v1.009794m.g) derived from phytozome v7. 0 (chr-ID scaffold_11; pos 1999712 to 1999966 reverse stra nd)
tcctgataactggagcttcttcgggcattggagaggttgttgatcaaccaattactttaacctgtattcatttcaatctcaaaattttcaacgttgcatttggaattactatttaactaatctcttttttttcttcttcttatatatatatggtattttgaagaagtttttgtttccaaccctagtctaaatttttgtttatgttcagcatattaaaattttgtctgatctcatgtattctgtatctgacagcaa

SEQ ID NO: 108040 - DNA, 972 bp, Aquilegia coerulea
  Intron number 2 from transcript AcoGoldSmith_v1.006931m (l ocus AcoGoldSmith_v1.006931m.g) derived from phytozome v7. 0 (chr-ID scaffold_27; pos 528294 to 529265)
gaacggttttttcttgaagatatttgtcaggtgtgtaattatctctatattgtggtcttgtttgcattcctgggctcatgcttcattagaatgaaatttatttatggattacttttagaaactgtatgagctaaaccgttgtattagtataatgttagggaaaataacaccatgtttgagaaaacaattctgtgtatggagattaaaagatttgctaaatatgtatgaaatgcttacatgaaaggatatgtatggactccagtgagtagaccgacactaaaggtgttagagttcctttgtgtttatgttagaggcaatccaggtggtgctcgctcgctcctgttgtcattcttctgcgatgagaagcgcagcagacagaggtcatttggatgccattgacaagccaaaggctcgcaacacttctgacccaaattttctagaattaaataaacattgttgtataaaaagaagaaaagagtcagagattccacaaaattcatttaggttggtttctctctcacacataatatcttcatcttttgctttcctttctttcttcttctttttcttctcaaataccaatgtatacaattaagctatagcatatcacagataataagggacataacaattcacataatttctattcaaatgacagccaaatttgcttgcttttgggttagagattactctaagatttgcttaggtttagtagctgcatgtgctctacttgtgtgatttcgttcataaacagtgaacacaatattatacgctagactggttagttttaccatcaagcaagttttaaatttagttctgttcctagatggtatagatcaaaacacaatagttttcatgctatcggtatttcctcaagcatacccgagtagtatttgttaatatccagtctattttttgtgttgcatttatcaactgacatgaaatcaaacttctgttcacaacaggtcgggg

SEQ ID NO: 108041 - DNA, 694 bp, Aquilegia coerulea
  Intron number 1 from transcript AcoGoldSmith_v1.001378m (l ocus AcoGoldSmith_v1.001378m.g) derived from phytozome v7. 0 (chr-ID scaffold_30; pos 1209663 to 1210356 reverse stra nd)
tacttctttctcttagctgaatttcttcatctaaggtaccacttacctctctcaattctttcttaatggttaattaattgcagtttcttgcttcttcttcttcttctgtagaaagcttttgatttgagattattttctatacagttacttatcgttgacttaatttcttctgaaggtttgatcatgtttttgatgatttttaagattattttttttttaattgaagcaaatacatacttgaaagttagaattgtggtttggggttgagaggaaattgtttataatttgattttgattcatttctttagcaaaaagaaagctagaatcaaaatttctttgaattataagtaaaacaataaaagaatttgcgttttttcattaatgagtaagtttagtttgattcgaaaagttttctctgatttactaatcgttgacttaaattaagataattgagtttttgaccattgactttacaactgttgaaagtggaaacttttctaaaggcatttaactaattattagttgcctttattgaattttggcaaaatattatttactgaaacttgtttgaatatagattttttttcttttgtttttataatttgttgtgtttagagatttgggattggcataacttatcttagattttgtgtttgtatgaaattgtgaaggttttaggaggaagtttcacgaa

SEQ ID NO: 108042 - DNA, 1043 bp, Aquilegia coerulea
  Intron number 1 from transcript AcoGoldSmith_v1.015718m (l ocus AcoGoldSmith_v1.015718m.g) derived from phytozome v7. 0 (chr-ID scaffold_95; pos 144339 to 145381 reverse strand )
gcatcgagatccgtaactttcttggagagaagaaggtaacccctttttctcagtttttttttttaattttcatatggttatctattttgtgaaattgaaaacccctatggtagaaattgttgttatgcgaacttaattataattaattttacttgttagttattaaaaatgagatttttatgtggttagtctcaatgtttttatagttcaattgattgcaatcatttgtttcaaattgaaattttagggtttatgatgatcttcctttggctcttcaaatttatacatgatttaaagaccatgacaagtcaaaccatattgttattcaaatatagctcataatagttgttaaaccagaatcacaaaaatgtaggatattggtatgactttttattaaaattatttggattttttacatatttccaccatgtaaaatcattatgaaataagtttgggtagatatgggtactcatacaagcagggattttgttagtgaaatgatttgcttaccataagttatgactcaactttgataatctaatcactgtactaaacatatttacgtagtatattttacaaagatatttgcttgttagtgtatatttttatttccaatagtagattcttctgttctaacatcgcaagtaatgtctcattggttcaagaaatatgcttatatcattttattgctatgcaagtcaaagtagcttctattttaccatgaactttgcttgggtagttgggtatgactggttagtttcttatacttttgaatatttttactgtattttaaagcaatatatttactggatcagaaagctaataatggtggggatgcactttgattcatgttccaaaattttgcatgcttaaggatatcattgtgtactgaatgaagtcatggacactgtcatgtagatattaattgctattggattcatgtactgtaacagaaaatgatatgtgattgatttatctattgtattgaataaaaagcaactaattagagtcatgtattgctgcatcaggttcgaaaagtaggt

SEQ ID NO: 108043 - DNA, 853 bp, Aquilegia coerulea
  Intron number 1 from transcript AcoGoldSmith_v1.026129m (l ocus AcoGoldSmith_v1.026129m.g) derived from phytozome v7. 0 (chr-ID scaffold_7; pos 3900531 to 3901383)
gactgaagcctttaaagaagccatttggttacgaggtatgttgaaaaacttgggtattgtgcaagagcagcttatggttcattgtgacaatcaaagtaccataaatctggcaaattaagaactcagtttatcatgctcgtacaaagcacattgatgtgcgacatcattttgtcagagacattattgaagagggtgagattttattgaagaagattcatactagcaataatccggctgacatgttgactaaagtggtttcagggactaagttctatcattgcttagatttggtccatgttcttcctttgagtggatagtatattttggagtgaactacgatggcttgatcccttagaagaagggtacgtaggcaaccatgaagtggtgcagccgaggtggtctttcgggacatgtgtgggagtttgtgacttgtgtttgtcggcttagatttattgaatcttcgccgaggtggagaattgttgggttttatgtgcaatatgggcctgtttgggcccaaattcgtggtctattgtaaggctatactataaagccaaatagaagtgatacaaaaccttaacttttctaagagagagattgtgagaagccattagagagtttgagagaactttgtgaggaagaagacatcggtttcttcgtgagggcttgtacaattgtctagataagaaaagcatcatcctttctccccgtggacgtaggcatattaccgaaccacgtatatcttgtgtcgtgtgtgtggttgcttgtttattttgtctttttcgttttactttcatacattagttcaatcatcatatttgtgcattagtttccgctgcgcacaacagtcactggc

SEQ ID NO: 108044 - DNA, 858 bp, Aquilegia coerulea
  Intron number 2 from transcript AcoGoldSmith_v1.010343m (l ocus AcoGoldSmith_v1.010343m.g) derived from phytozome v7. 0 (chr-ID scaffold_95; pos 179784 to 180641 reverse strand )
aagaaccaagcaggagtctgccgtactctttttgggtatgaatcctggaattttgtattgtcattgtttcattattatttttagacttcagtttagattttcaccatctgttatgcttttgctatgaaatttggtagttatacttggttatcaacatcagaaagatgcacccctgcataacacaacacttgtgacttgcaaaagatcttcaaagcaacccactttaagaattcttttgacctagccatatggccagctagatgtcacagataccttttaccctatggggctttatgtttcattgtgagaagtacttgtatataagctaagttctagttttgttggctgtgttaaagctatccttcattctggccctttctcttcgttctccccataagtaataaattttttattatcttagtaaatcttttatggtgtatctacacttcttaagaagggggtgttttgccgtttgtgtgcctaaagtttgatatagatgccatattaatactttaattttgaacataaattgacatatttatgttgtgctgccccggatcacctctcttttgcaaagtagagcacgaaacttactggtagtgcttgttagttacctgcttttacatttttggtgaattttttcatgggaggaaaatattactgttggcagtgtgatcattgaattttgtttcctctgaagacatttaagtaaacagatgatcaggatttcttacttatggtacatgttatgtccatgaatacaaaagatacatgcataatatggtaatatttttctattggggtagtatcttattattttgtttattatacagaatccctgctgttgggttccctgct

SEQ ID NO: 108045 - DNA, 393 bp, Aquilegia coerulea
  Intron number 1 from transcript AcoGoldSmith_v1.010343m (l ocus AcoGoldSmith_v1.010343m.g) derived from phytozome v7. 0 (chr-ID scaffold_95; pos 180824 to 181216 reverse strand )
atcccaataccaagaagcgcaagaggtattattcattgttatgctaattttccctactttcttttcaattgtctataattcttggctataagctggcttctgtctgtaaaaaaatataatttatttatttcaacaacagataggtttgtttaagtttgatatattattctttgaagaatgttggacatgtttcctttagttctatctatttcaagttgattgaagaattcagtgctctctgactttgatgaaaaataagtctaatgttatatttagctagatttgttataatttctttgtcgaattgatagttttccattcacaaacaatggtgtcctttcaattttggtggagtgtttgatatgtccaccaattttatgaatgctcaggcaa

SEQ ID NO: 108046 - DNA, 490 bp, Aquilegia coerulea
  Intron number 1 from transcript AcoGoldSmith_v1.009756m (l ocus AcoGoldSmith_v1.008185m.g) derived from phytozome v7. 0 (chr-ID scaffold_9; pos 5050093 to 5050582)
ctggaattggttttaatctatctttgttaagcttggtaagagatctgagcttatgtttaagatctaatatgattaaactgacttcttagtgcaattcttagttatgttgattttgaaattcgaaagtggggttttgatttttattttgaaattccactaattttgattttgaaattcgaaattgggggttttaaaaccctagttttgattttgattttgaaattgggggtttttaaaccctaatttttcaaagagttaatcacagtttacagtttttttttttttatcacagtttacagtttgcaatttgagattaattcttatgcatagttaatcacagtttacagttaattcttatccatagtctatcatgaattgaatggtctaaagttgaagcatggttctgcattgttgtgtacagtggcctatcatatggtgatgagattgatttttttcttcatttcactttcatgtcttgttggagtgattc

SEQ ID NO: 108047 - DNA, 723 bp, Aquilegia coerulea
  Intron number 1 from transcript AcoGoldSmith_v1.004127m (l ocus AcoGoldSmith_v1.004127m.g) derived from phytozome v7. 0 (chr-ID scaffold_21; pos 1345463 to 1346185)
taatcctccaagcagtgagtccagtcaggtattgtttcaaaacaatttctgactaatgattgagattacgctttatgtttagttttcacattattattattattagtttgataattgatgttagaccgtgggaatagaatgctatgtacaattatgtctattaaaactggtataggcatctatatagatattggcttgtttacttcggtttgggaggccaaaagcagtgagtccagtcaggtattgcctcagtatgtctgattcctgatcaggcaggccaaaagcagtgagtccagtcaggtattgcctcagtatgtctgattcgtgatcaggctttgagagggagtctgggcatgatgtagttcgatggagttgatacatcagtagtactttgcaatgtttcttgttaagatatctacttactttccttctcattttggtcaaatatgtatcttgcttctggattttttttatttttatttttttgatttgcataacctatatctctttcttatatatgctagtttggcacaaacaatattcttattacttgattgtttccttgtcaatgaagaaaataaggcatttccctttgattcgtgctattgttgtctgtgcattgtcttatatttgtttggccccacctttctctttaaaagctaatttagtatataagtgcatgtttgtttctctctattcataataatgtctctccatacagat

SEQ ID NO: 108048 - DNA, 827 bp, Aquilegia coerulea
  Intron number 2 from transcript AcoGoldSmith_v1.007806m (l ocus AcoGoldSmith_v1.007806m.g) derived from phytozome v7. 0 (chr-ID scaffold_37; pos 1161774 to 1162600)
gaggattgaagaggtattcacattactcaattcttgaatttgtttgaagttattttattcttatctgtttaaatttgcatgtttgcagttgcttgctctcactagtttgatgaagttgtttacgccactatggaattatgtttagtgtgtttggatttattgtattgatgttaaggtgaatctgttgaggtttcaagtaattagaagtagaaactttgattgtgatatcatcattagaaaaaattgcctattatgactttcaagattagatgtaatacattgccaaagatttgaggatgagataaaaaaaaacaaaaaaacctgtttatataactcaatgtaaaatggttgtaggctatatagtgtaaaacatgcattagagcttgttagttttacgtgaaggctcataaaaggcgatctgtccataataggatgtacacaaccaaggtagatccagattccattgcagtttatgaataatgatgtcaatagtttaaaccaaagtgtatcaagtggatgtgtaggtggcgttacgagttcttgaattttgcccaattcattttcttgccctatttatagaaaagtattgaggaatacttcaatgtatatattgtatctaaatgattggccgttgataagcattcaggactcagaagggacacttgattgtatttaaggaacatatactgattgtctcgacatttagaaaattaaatgagttttgtttcgtcttattttttctttttgataggatgaatctgcactattcttgcactatacttctagtaataaatttgcttgcatccttcaattgatttacagtgaag

SEQ ID NO: 108049 - DNA, 439 bp, Aquilegia coerulea
  Intron number 4 from transcript AcoGoldSmith_v1.003044m (l ocus AcoGoldSmith_v1.003044m.g) derived from phytozome v7. 0 (chr-ID scaffold_7; pos 6509462 to 6509900 reverse stran d)
gtccaactttcagggtggagcaaggtacttctctatctatctattcacattaggttcatattgattgaacaaattgctcaaaaaaataagcatcttatgttacctcagttctatacgaaccaggtcctcttgtatccagattcacagtactccctgaccagtgacggtggaatttttaaccttaggacatggactgcaaagtacaaatagactcgcaaaaacatattgttctgtcttgttgtatttcattggagagaaaaaaaagggagaaacaaacagagtttacgccatataagggatcatatcatgctgattatggaagagaattcctgagcacattagcttctagaagtttgaattatagaatatagagtgaagataattatcacactaaaatgtgcttgtggtacagggaaaacatataggttcaggatatcga

SEQ ID NO: 108050 - DNA, 801 bp, Aquilegia coerulea
  Intron number 3 from transcript AcoGoldSmith_v1.020202m (l ocus AcoGoldSmith_v1.020202m.g) derived from phytozome v7. 0 (chr-ID scaffold_120; pos 267658 to 268458)
gatcccaaggggtaagtctttctgcctctctgttgtttctttcttttcttatattggattgattgaatcaagttgttagaataagtttgaattctgtattatctatactaatacaatatattgatgacttagtagctaaataacaagttattttccttccattgattgagaatggtttataaaagagattagccgattgttagccatgccatatacagtagttttatccccagttggtttataatgtatattgaaccatatacagtagttttacggttcaaaattatcctgttttatgtatagaccaagtttaccctgtgttttttttgatagatgattggagaattggcttttgactgcagaagcttctctccttgttacccctccagctaatctttcacaaatccgcctccaaatgccattacattatcatcaagtctgaaaatcgggaactggaaaatccttagttttgtataggcaaactatctaaattctaactgcttttagactttaagtgtgtttacaagtgagactgttttaagttcggtaatgaccaacttgtagatcgctcgagatagaattgttataaatcatgtactgcaaattccttggtatcccagcaccatagtttggccagcagcctacctttacattgaatcaattattaaggtcgtctaagtctatcttattagcttgcattagttagaaatatccttctgtattcagtctaatggtaggttgtttattttgctacattttgtaacagtggaaggagaatcacttcaattggtcgccgtgatc

SEQ ID NO: 108051 - DNA, 944 bp, Aquilegia coerulea
  Intron number 1 from transcript AcoGoldSmith_v1.009199m (l ocus AcoGoldSmith_v1.009199m.g) derived from phytozome v7. 0 (chr-ID scaffold_15; pos 855939 to 856882 reverse strand )
aagcttcagtaattcccattgttgattcacaaaaggtacacttctttctctctcttcatttgttgtttgaactaagatttttttttttcgccatttttttcgatttttataagaaaccagacatagtccaggtatctattgtagacttgtctacaaaataataggaacctttacatgtctggaatagaaatgattttcattcctatgttggatttctttttgatggtttccaacgttgcgcttgattatctacatcttgtagttgtatcccttttgatgaatgaaatttgcctttgcgcgacatttgttttatacaattgaagaatagttttaatacattttgatctgaattgcttgcagtaattgtagtgtccatgtgcaatatcccaatttattagtacgcatagattagaattagaaacaaccaattttttattgagaaaccagacatagtccaggtctctgttgtagattttgtctgccaaataatggggacctttacatgtctgggaaagtaagaaaagggaaagaaaattgatggatgagttttcattcaaatgttggatgtctctttttggtttccagtattacatgatgatctttttactttgtgatcattcaagctatagctggatattatatctttacatttttgtcattgatggaaaacatgagggatgccaaactacctttcacgattgaattttatctttttcttaattaattttcttaaagagttatatacgtaaattctggtaatgtagacacttagcatgtgtaactgcattaaactttggcatgtttagaccatttataagattaggtactactataacggttagtccttatttcattggcattttcttttcagtttgttatatgaggtggtctatttctcttgtggggctataattctaggtggaaacattgttgaatagcgtcaa

SEQ ID NO: 108052 - DNA, 763 bp, Aquilegia coerulea
  Intron number 1 from transcript AcoGoldSmith_v1.025596m (l ocus AcoGoldSmith_v1.025596m.g) derived from phytozome v7. 0 (chr-ID scaffold_6; pos 6669381 to 6670143 reverse stran d)
gttttgaggagaggtatgtactaaatctacactctatttctttcttgtcccaatcatcatctaaccatttgatatggatctctctcaaatgttatcaataacatagtaaacctaacaattgcatgatatagtagaattctagaaatttttgaggaatcgtaacatgttctgcatctttccatgatataagttaataaacctctcttactagattttcaatcaattaaacctaacaattgcagctcgaaattaaagagtcataacttaaataaaaaaaaaagggtcagaagtaaaacccttttgattataggaactactacttcaaaattgttgctcggaaagatcccaaacaatcataaagtacgttgactgagtggtttatagtagaggttctttactcaacagttatcatgaaattttatcagtgccatgggtataatcagcatctttccgagtcgcaacgattaaattgtctgtagctgcgaggagaaccccaggataaacaggttttagactaacagtctgcagtattagaaattactgcaatgcctattgactatgaatgtggtttactgaacctccctgaatttgaaatgtgaagttcatgattcttacctactgttcttgctctttttaatcaaataagagttaaaactatagagtttagctacccaataatattatcggttcttagtactgaccaggtcagccatatgcaattaatctctgtttatcaatccaacccttttgattgagatagtct

SEQ ID NO: 108053 - DNA, 879 bp, Aquilegia coerulea
  Intron number 1 from transcript AcoGoldSmith_v1.011639m (l ocus AcoGoldSmith_v1.011639m.g) derived from phytozome v7. 0 (chr-ID scaffold_60; pos 141999 to 142877 reverse strand )
tcgttgaattaagagagagaattctcaattctgaggtaatctaagctctttttttattaaaattttcaattttttcttatttgaattgagtttctgtgcttaaatcaattgattttattgagaaatgattcattttgaattaaaaactttgaaacttttgttatcaatttgattcaaatgattagttttgaataatttgaagtttttttttttgtgtttatgttattgttgatgtatttggcacgcattgtgcttcatttctggttgagatttgaacttgtatgattaggtgataagtgtcttttagtgaagggttgtaaaaaagattcttctttctttttgtgtgaatggatgtggtttaatggtactaaatcaatacaggaagaaagatgaatgctttttcagatgtgggattcttctgttcctaagatattttcaactgtctcactattgccttctcataaattctgaactttgatatctatttatattggtttcgatcagttcatggtaatactatgttagagttttaaggttgtttttttttttttttttatcagaatttagtttcaaatttcaaatttagagacatctagagttctgaaccttagttatgaaattgttgttcctttttcttgtaatcattacagattttctgtgcttcatgttaaaattatatttgtttcctgttttcgattttgcctagttatgaatctggactattttggtgatgatgcttctaattagatctgactgcactttgtcaagatcagttttgattagtaattaaagaagaaaagagtttgttattgttctgattagttatttctatttctgtaaccaggttctgcatatagtgatcaaaggtatccaatttcc

SEQ ID NO: 108054 - DNA, 564 bp, Aquilegia coerulea
  Intron number 3 from transcript AcoGoldSmith_v1.008114m (l ocus AcoGoldSmith_v1.008114m.g) derived from phytozome v7. 0 (chr-ID scaffold_9; pos 748850 to 749413 reverse strand)
atacacttgttacaatcaatcatcgaaaagtaagtatgatgttatctttcttttctttttttttcccatcaaagtttagtcattgagaatgtgatattaattgcttaaaacctttagttcgtgttaatgtgttattatgactagattgactctagagaattgggatatagataatgttatgatcgataatcaagatttgctcgttcctcatgacagagatatggtataggtatgttctgatggtggttggactagttataactataaccatcttttcttcgtcgtggcccttcttatttaacttgtttctttctgcatgaaaactcaaatatgtttttgtttgacatagtgttgatttatatttattctattcttcctagtacataaagaagttagtctggtgtcttattgcattgtttactctcttttttttctccaagaaaccatttaaattgttacaataaatatttcataaatacatgtttacaaccttctcacgaagagattatctttattttcatatatataggtcaggttgacggaagacacgtctctttattctct

SEQ ID NO: 108055 - DNA, 940 bp, Aquilegia coerulea
  Intron number 1 from transcript AcoGoldSmith_v1.008110m (l ocus AcoGoldSmith_v1.008110m.g) derived from phytozome v7. 0 (chr-ID scaffold_1; pos 1093745 to 1094684)
gaatcggacctgagatcgctgaatctgttaagaaggtttctattttatcacatcatcttctctttatctgtactgatgatctgattaaatccttttttttctattttttattattgattgattgattgattgtagggttagtagattttttttttctttctctctctgttctttctgtgtgtttttatttatttatgtctgttaatttttatatgagggatttataaagaagttggaatcatgttcattgggtgcaattcatttatttgataaaattgttcaaacaacacataggccatcatatcatatcatgtggactatattttgaattcttaataaagctttttacttgggatatctattctagtttttagagtctaggaatacattagtggatgtatcttttgatgaaaattaaacttgttgtcataattcatcgtgaatgtctttggtggtgggtgtgggtttcaaaagtaggtaacgtactatagctacttgttatattcatacccattacaaaactactactactacttcccattaattacaccttcagttcggttcttaaatagaataatttaactacctttctgctttattggtttagtgtgttgtaatatcgtctttgttccaaactctaattgatggatcacttaatttggttgttgtggtaaatttgacccttttgaggatttatttaaatcaccttaaatcttctagcctgcttttcatctctttacaacattggtttgtgtatgtactatgtattcaaggaaacttgctatcagtctataaatacaagccacacatcttagaggataaaattgttctcttttatggttgagttctacttttcaaattatacgaatatctggctatccttaatattgtctatatgatgttgtttttaggtactggccacggctgaagtgcccataga

SEQ ID NO: 108056 - DNA, 783 bp, Aquilegia coerulea
  Intron number 1 from transcript AcoGoldSmith_v1.003000m (l ocus AcoGoldSmith_v1.003005m.g) derived from phytozome v7. 0 (chr-ID scaffold_37; pos 1502484 to 1503266 reverse stra nd)
ggtaatcttttaattcataattcattaactcaattgtattaaaaatgatttttttaatgtttttaagggttaattttgaattaattgttattaattagtttatcttacattaaaaatgtaatctttatagatttttgaggttttctgcatttgggattgtgtttaagttgcttatgaactgaaaaaatgaaaaaaacactaattttttttttcaaaatctcacaatgtggttttatcagtatgttaaagcttcacaatcttgtttagatagcttctttttaagacagccgaggccgcaaaaaatttgtaatgggactagattctctagaatctggtgtttaatgtatacatttttggaatgtcaaaagtttgaagttactgtaccataatgagtaagcgagttatattgtgctgcacgacatgtcacaatgattatagtatgctatactgcatgtaaaaacttaattacacatggacttctacaaacgtatttacgtaacttgataaatgatattaacagtttaacactatgacctacaaatatgcgatatagtacacctgaattctcacttgcaggttcttgtactaaacgatccattccattacacaaaatatcgaggcagtagataaccaacttttaggaaggaccccatttcttatcaaacagtttactacattattgtcttttaaagtttattcaaaattattttcttttgtgttttgtttccctcattatcttcagtgatattttactaaattcttcactatttggtaaactgtcag

SEQ ID NO: 108057 - DNA, 794 bp, Aquilegia coerulea
  Intron number 2 from transcript AcoGoldSmith_v1.001650m (l ocus AcoGoldSmith_v1.001650m.g) derived from phytozome v7. 0 (chr-ID scaffold_1; pos 232624 to 233417)
tctcagctgaagacatatcctatctgaagcaacaggtcattactattatctaatattactgctgttattattattgttgtgatgtcttatgtcaacaataattctttcgttaattttttttttattgaggataaaaagttcttttattttcctgttacaaattatcatgtaggaagggatgcagttatctgaatttttaaatatatcaagtttgatgtcctaactatgttcaagacggggtagattaaaagagatatatatctttcagctgtcacaatattataggtataggattgaggatcatctgtgtatcttctttcaggtgcttgctaatgaattacaatccctttttactgtctaataagctgtttttactcatcaaagaaggtagtatacactatctatacttgaaggcacgtgtagatgttctaccatatttagtgcctgtaatgttttacatgaatgaaatttccctatcatgtttcttatcaaagtaataaacaggaatagccagtgatgttgatgatttcagaaatattattttttgttgttgaatgcaataacaagcaatgttgatgtgttcagttagaataaaaggcactgttgtttattctaataattggtttcttttcttgcatggataatagagttcttataatttgaataatataatctgtatatggtaagtgatgtcattgaactcattacattttgtttgatatggctatattttctttttctttctacttctcttctcaggttgatagtgttttgaccccaacatatagtgctcc

SEQ ID NO: 108058 - DNA, 952 bp, Aquilegia coerulea
  Intron number 1 from transcript AcoGoldSmith_v1.018743m (l ocus AcoGoldSmith_v1.018743m.g) derived from phytozome v7. 0 (chr-ID scaffold_9; pos 2480631 to 2481582)
cagaccacttgcaactactcctgacaatcttttttgttaaagcatggatgtagcttgtctggacttattctcttgttttagctacagtgatctcagaaaatcagtgtgggtatgatattgaagtgcagaacatgaagatgagatctcaagaagttgattctgatggtattttatgtcaaaagaaatttaatgatgctttcaccaagaatttgatatcaaagaacacagcgtcagaatcacttgatggtacaagacaagagaagctttcttgtgatccacatttaactatggatacttctagtgcagaaaagcttttagaacccttcttaattcagtctctcgaggaaaatgtaggagtaacaagaaaccaggtaaggaatatggaaaatcaatacttcatgttttcatttcttttaggataattgaagcattttttcccttggtatattggtgtctgtgtgtttgcccattgccgcagtggtctatatatgcattgttgttcatctgtctgtaagcttggcttttggagttagttgttttccaacgatgtaattgtatcattcgctgttaaaattccatctgcagcaggtttgaggaatataattacttttggctaatcaagcaaaacacaaaaaggggaatacactataaatgttaaaattgaggagtgcgggactctttttaatccattagacacataagtgcacacaatcataacacacacatctcatttagaagtcgttgtggattacgctatgcgagaactccgctgtctagttctaagaatggagtttctgctcttccataatttggtatatgagatatcacgatgttgtttatcaatacatatttatgcatatgaattctaactttaactttcttcgtttctaaaaggatgtcaatgtttctgaacaaaggaccgtgttgctgataaaacaataaacaaagctgt

SEQ ID NO: 108059 - DNA, 594 bp, Aquilegia coerulea
  Intron number 1 from transcript AcoGoldSmith_v1.020280m (l ocus AcoGoldSmith_v1.020280m.g) derived from phytozome v7. 0 (chr-ID scaffold_10; pos 6808669 to 6809262 reverse stra nd)
catcatcatcaccaccaccatcaccagaagaaagagtaaaagaagaagaagaagaatggttatggccttctgtcgaggatatggatgcattacttaataattttgattattgtgaacaagctgctacagtatccaaggaagaaaaccaacaagatgaagaattgttttttgatattaatcaatactttaattattcttaataatgtaatatatatatctttatttctgcatatatacattatgctctgtaatttttattaattaatacaaaatataaattaagcatttgtttacgttgggttattctcttcttaagttgtacttcaatttagtacttcacaatgcaacaccacaagataagttcctgatcagctgatgttttaaagagtaaaaacctatcttccatcgtacacgatcaacctaattaagactaggatactttatcaatgatttaatcgtttatccttatcaatgatttggtctagtctgcgatgaatctaatgtgcgttatcatttgattaaggtgttcaacttaaaagatatcgatctagtgtcaacttcattgtccagataattttcttccttagtcagaaa

SEQ ID NO: 108060 - DNA, 425 bp, Aquilegia coerulea
  Intron number 1 from transcript AcoGoldSmith_v1.012651m (l ocus AcoGoldSmith_v1.012651m.g) derived from phytozome v7. 0 (chr-ID scaffold_10; pos 2893939 to 2894363)
acttattaaggtttctttagtttgctttaaattaagtaatcaggagttatacatgaggcaaaatgcaacatttttagtggtaattgtagttttaaaagctaaattcagctgttttcatcacatttaattcctttgggagagttgcttagaaatcaagaaaaaaaaaagggttttgactttggaatccagttatattttcgcccgaaaaagaaatttacgtgtttttttttttcttaattagattaaacctagtgttgagtgactttttttttttggcaaatgcagacactggtgttatgagtggagctacaatttttataagagaagatctcaaaataagtgatcgtcaggttgaaattctcacagggatcttaagtttgtgtgctttagtctgttctcttactgctggtgttggtgtgggctac

SEQ ID NO: 108061 - DNA, 647 bp, Aquilegia coerulea
  Intron number 1 from transcript AcoGoldSmith_v1.018609m (l ocus AcoGoldSmith_v1.018609m.g) derived from phytozome v7. 0 (chr-ID scaffold_11; pos 5325815 to 5326461 reverse stra nd)
atttccttagtctcaccttgatccaagcatatcaggtaaatccctttttttcttttcaatatatatttaaaccctgccgcgaaaactcacaaggcacttttggctggttgggcaccttgaatttacataatgtttcagggcacggtaagattgtacccacaatccaattgtacgtatgcccagttccactccttagtatcatgtgagtgatcggcttatcgcggcagaaatcatctatatttcacttccatgttaagcacatttgaatcattgttagatgatcacacatcaaatccgtccagtagactgttttgaaccagggttgatacaaggaagacaaaatctgagtcagagtcagtcaagtgctagatatgactgtggatttcaaactgccaattgggtttgctttagtctgaccaaacattgggtcacactgaacccagcccaaacacatttccactactagtactcattcaacatttttttttttttttttttagatgaaactcatttaactttcactgtcaatcaatctcacaaatctagaaatctcttttccctgcatatatgatacagtattcattccgagatgatcgagattttattaatgattgaataggctgtggtttcaaatcttggcgataaca

SEQ ID NO: 108062 - DNA, 251 bp, Aquilegia coerulea
  Intron number 1 from transcript AcoGoldSmith_v1.003993m (l ocus AcoGoldSmith_v1.003214m.g) derived from phytozome v7. 0 (chr-ID scaffold_1; pos 1905966 to 1906216 reverse stran d)
ctctcactttctcatttcgtcatcataattatcaggtgatctttcaaccaccttctttgattaataaatatacataatgacttcttcttctgcaattagcaagtttctttcttcttgttctaatggattattcttcaaagtttcgttgttttgatccttcaaatactaataatacaatttcaacttcaaaaactcacttttcttcttattcaacaaattcaattgttagatctccaagagcttcttcatca

SEQ ID NO: 108063 - DNA, 605 bp, Aquilegia coerulea
  Intron number 1 from transcript AcoGoldSmith_v1.011012m (l ocus AcoGoldSmith_v1.011012m.g) derived from phytozome v7. 0 (chr-ID scaffold_1; pos 1771455 to 1772059)
aggtatcttatcttttagatctcgctctatgttactgttttgattgtttttcatgttttgtgtattgtcgcttaaattgatttttatttctgtatttaggtttctgtagttgattttgttttaattataatcatcaattggattgggaaattatttaaaatttaaaaggtgtagctttataaattggtctaagagtttattattgtataatggcagttcagttgatgaaaagggcaaatgttatgtatacttgttttgtatgaaataggtggaaaatagagaatttttcagtgtacgtatatgtaaccgaaattgagaggctcagcagttgtataatagtcggcaaaacaatttcaaataacccttaggtgtgcctaaataagcatttacttttcagtgaagatatttgctctttatttttaattctttgttataacttgttttgccactacctcaactcatattcttggacatgtatgacctgataattggtgtatatatctgtttatatggattatatagttataattcttttgttatgctgcaaaatcatttttgtttttttgaattaactttgattctaaattggttgccagacacttgaa

SEQ ID NO: 108064 - DNA, 729 bp, Aquilegia coerulea
  Intron number 2 from transcript AcoGoldSmith_v1.011012m (l ocus AcoGoldSmith_v1.011012m.g) derived from phytozome v7. 0 (chr-ID scaffold_1; pos 1772116 to 1772844)
ggccaaggagtttactagagcaaagaacaaaagaggtataatttgagactaccttcttgcctgtgatcctttgctttttattgttcttttcacagtcgtgggacatgaaatctctgtttttatttcttaaatattcatatgttcaggggtgtcatcaagtattccaagtttatagatgccttcatattaccattagaacatgtttgttaaaaatttattgttttagccactaattaagttttggagttaaacctgattttcaaatgttcatgttttatttgctgtaacatttggaaatatcctcatcatatgttattgtaatgtacccactaaagcaatccaattcattccaaataattttttgcttgtaaagcttttgtgcttgacccgccactctgagttagcagcaaaacggcaaaactagcttgaaccaagctgttctaacctagttatcttatcacaacatttaatgacattttagtctttagaattttcctgcttttaaaaagaccacagtgccatagtttgaacgtctgaaccatgttgattgaaactatatagatctaaacaaattatgtagtatctagtgaaagcaaggattgactaggtttgtggtctactgttatatttgtcaaatatggggtcttcaatgtgtttatagtaattcctttatgatgttggaaatactctctaaatgtttgtttgttgctattacacagctgccataca

SEQ ID NO: 108065 - DNA, 609 bp, Aquilegia coerulea
  Intron number 1 from transcript AcoGoldSmith_v1.005359m (l ocus AcoGoldSmith_v1.005359m.g) derived from phytozome v7. 0 (chr-ID scaffold_27; pos 2137042 to 2137650 reverse stra nd)
ccaccccctgttcctcctccaaaggtattatcatcttcatctcttgttcaattcataacaattatagttcatatttttgtgaattttatgtattttgttatgatttcaatttgattaaattttccaaaaaattaacaattggcaatcttaaaaattgcaaggagttgatatttttgaattattattatgaattcccatttcataaaatttcaaaatgattttttttagaattttacatttctacttgtcattttagttttcctttgtttttgcaatttaggatcagagatttttttttttttggggggattgtcttgttctgttgtttgcattaaatattaatgcaatatgttaatgttaaattggatattagttcatgagttccataattgattaaatttgacttttgagaaatgtccacgaattttttcagattacaagtaagttctactaattcttgtaatgaaattaaatttcagaatatttgctttgattttattttaaaaattgatgtttttttttgtttttagtaggattaatgtttgagcttgtatcaatggctgtatgtatgcaggttattccaacaatatacggtgggcaagaatttac

SEQ ID NO: 108066 - DNA, 1063 bp, Aquilegia coerulea
  Intron number 1 from transcript AcoGoldSmith_v1.005832m (l ocus AcoGoldSmith_v1.004336m.g) derived from phytozome v7. 0 (chr-ID scaffold_6; pos 2214503 to 2215565 reverse stran d)
tttggttggaagaaggtctatagctgaagggtaaggtaagttattattatgttttaagcttaaagtttcaatcttttgggggttttgttttttaattgaaaatcaatttgttgttattttcttgattatacataagctatatatactatggaaaaaaaaaaaaaatgctacactacattgtttactatgatgtttgcaagtctcaatatgggttttggttatttgttttgaaacacagatattactgcaaagaatggagattttattggcccaactgactaacgtgaaatccacataccttattggaataacacattataatttcagtgtgcactggtcagtggtcaaggataaatctctttgtgataataagagggaaacggtgaactacccagtatagacattggctccatctattgatatagtggatcatcgggttttttttttaaaaggaaaaggtttatatgatttaattatagcaatttataaacagtttaagctatactttaacactggacttcttatgtaaagttctttgttggaaaaaaatttgttattttgtttttgacaaccatttaacttttgtcctgtgttcatacaaaataagcaccttattctcacattttgaacacattgttattttgttaagtttaatgttagatgaggagctttcgacttcattttttgagaaaatttctttgggaagtaaagtaaaatataaaaaatagaaagaacaaatacttaataacacaattctaacagtaatacatctacaaacttataatatatttttgtatagaataattcttataatatagatgtctcatgtgattacttattttcagtcctcccctcttcttttaacaggtttaagatattatgggcttgacaaactcatatagtcaaatatagatagatattcttgaaatatatttggcaaaattatattagattggatcccactcccatttgcaatttgaattggtgaacacgtcattgatctgcagtaactttaatatctggtgcagggtaccaaagtcggatttggatatatttggatata

SEQ ID NO: 108067 - DNA, 267 bp, Aquilegia coerulea
  Intron number 1 from transcript AcoGoldSmith_v1.003210m (l ocus AcoGoldSmith_v1.003155m.g) derived from phytozome v7. 0 (chr-ID scaffold_6; pos 7828697 to 7828963)
tcatcactaccattccattggagacaacactaaaggttacttcttcttcttctttctttttctctggtataaaataatacccaaacctaaccctaatttgataattttctcttgctttatctatcttctatttcaactttactctttgttttacattttgatgtgatgattctaattttgttagggtttatttatgtacatttcaaatactactcctttcatttcattataatgatgttttgtttcttgattttgtaggtaataagc

SEQ ID NO: 108068 - DNA, 845 bp, Aquilegia coerulea
  Intron number 2 from transcript AcoGoldSmith_v1.003210m (l ocus AcoGoldSmith_v1.003155m.g) derived from phytozome v7. 0 (chr-ID scaffold_6; pos 7829058 to 7829902)
cttcttctgagttgaaaggttaggttacaggtttagtatatatctattattatgcaataaacataattttcagtctcagtacaaacaatctagtacgtagttagtttgacctctggctataacagcaggatgagctactctgctccatcaatacactcttttgactcaactgtatactttattttattttgtaatgattactcttagtaccacaaggaaattggaatcataattttgtcgcgcggattagaaaaatataaataagcaactttaaagccttacttagctcatgaaaaaacaaagacgtaaaatatactatcaaaacttgtaagcatcatgaaagatgagtgttttgttgaaaaatcagtttagcatcatttgtgtgttttctctgagacaattccatgttttttttatactctatatttacaacactgaaataagatctttatctttttattcatttgaaattggttgcggttttcaaatttacaattgttttttttttggggggggtgggggggggagttgttatttccagtagtcattgttgctaatggcagtagatcagtgtttgagtttgctgacaaagttacatacatgccctaacatgtgtttctctatatttgtcaaatgatatatttacataacgtctactggattagcaaaaaaagctactgggagtaacaagtcccctcttttttgtttttcatttcagttcttccaatagccaatagcaaggtttcagggaaattgttacgtctgtttcatgttcaattggtctaatgagatattgaaccatctactgagctgtatttgcttcacctgggcagtgcatttccaga

SEQ ID NO: 108069 - DNA, 864 bp, Aquilegia coerulea
  Intron number 1 from transcript AcoGoldSmith_v1.005566m (l ocus AcoGoldSmith_v1.005566m.g) derived from phytozome v7. 0 (chr-ID scaffold_10; pos 1234153 to 1235016 reverse stra nd)
atttctaggttcgttttcttcatttatcgtttaagtgattgtgcttgaattccctcgatgagtcattttgttttatttttatcaaaaataaataaattaattaattaattaaaggtttgttaattatagactagtgtgttcctaaagaatgtccatgaatgcttatattatgtaaaatgtggtaagctagggaagaaagtttgagacaagtgcaacacaggtaaagaagtatttgacgaatttgctgcataatcccattattgcttgtaaggttgtaacttatgctttatccaattataaccagtgtgcttagtctaacatacgcctgacacaacaaacaatgtaaataaagtcgaagggatgacataaggtcccattatataggtgggagtcataccccagaagtttgcactgaaattttaatgcttgaatggaagtgtcacagacaaagatggtccttaaagtgctttactatcaagatttcttcttcttagtctaaggaaccactaaagtaggtcaatttaacaccaaatttgatcttcctaacactaggcttagcgagaaaccaagagcatatcccaactgagaaataagtgaaaatttaccaaaaaaaatcttaatgtagtaagactagagcggacataatttggattgattcatttggtatagtggtagcgttgttataggtttgataaaaaaagtaagaaaacaagcttatttttgtgaggtatgcttgatttatgaagcgtgtagaatactttcggtttgatacatttacttctgcaattttgtgtctaatgttaacatcattttctccaaattttatcagaacttgtgttgctccacttgagagactgaagcttg

SEQ ID NO: 108070 - DNA, 571 bp, Aquilegia coerulea
  Intron number 1 from transcript AcoGoldSmith_v1.000126m (l ocus AcoGoldSmith_v1.000126m.g) derived from phytozome v7. 0 (chr-ID scaffold_11; pos 4084860 to 4085430)
cagcacttcacatactagtatcagaaaagaacaaggtttaatgtatattacactgttgagattctagtgctatgttgtcttatttactagataccaaatagagatagatgcaaagagtgacagagaaaggactagtttacatgttttaaatacccttttttaatagaagaacacagagaagatatactatatctaaacttcaaaacatcttgcttttggaattctgcttttccttatctctgtactggaattttgaataccactttgtttgaggtatatttttttcattttagatctcaagtaatatagattattctgtacttcttaccattcttgttcttgggtgtttgagtgtattctcttagttgagttttgttttttgaatttcttgccttatgttgatggagatttctttgaggtttcttaacgtaggatgttctttgttgtttttaatatggttattggttgaagttgtaagggagaggagatatgttgaggatgaggagttgaagcaaactaacagcaataacaaacagagaaaaaccagagtatttatcaagattactctact

SEQ ID NO: 108071 - DNA, 316 bp, Aquilegia coerulea
  Intron number 4 from transcript AcoGoldSmith_v1.011626m (l ocus AcoGoldSmith_v1.011335m.g) derived from phytozome v7. 0 (chr-ID scaffold_37; pos 2133243 to 2133558 reverse stra nd)
agagtgaacaacaatcaaagctggcagctaggaaggtgggatagctgttttaactgttttcttgtcctagagctttgatgttacattcattttgttgaactgatgaaaattatggtcaaacagtcgtcctcaatttaaacttttttctttttctaataaaaaaaaaaaaaaaaatccaaccaaagaaagtgaatggataaggatatttcacatatttttaccatcacaggtcgattttggttggtagttattaattttgatttttgatgtttaccaaaccgtttctcaacctggcatcatattgttattttccagt

SEQ ID NO: 108072 - DNA, 534 bp, Aquilegia coerulea
  Intron number 4 from transcript AcoGoldSmith_v1.010353m (l ocus AcoGoldSmith_v1.010353m.g) derived from phytozome v7. 0 (chr-ID scaffold_95; pos 130017 to 130550)
cttctctctctttggcggtatgattttttatttacaatattttttatgggtgaagtacaagatggattctgaattttacaaagtctaaagtgattgagtgatagtgattagggtaggtatagtgtaatcaaattaaagcgtagaaaaaacaatcttatattactctttgcttttaagtattttatttttcctagttcgactttacaacattcaattttccactcaagaaattgaacaaattacatattgttgagaccaagttggtatctatcatgcaacagagcaaaatcatttataattattctctacttctctctcttcacagtgtaatgcaacttctaagattatacatgtctctatcttgaaagagcaattaaataatggaaatgtaatcttggtttatcaattagctaaaatgttttttcttcaatgcttgcttacccttaattcatgtgtcagaactatgcttaatagtaacttgatctaatcgatatatttttcttattcagcttggagccatttatctgtggtctt

SEQ ID NO: 108073 - DNA, 425 bp, Aquilegia coerulea
  Intron number 1 from transcript AcoGoldSmith_v1.003954m (l ocus AcoGoldSmith_v1.003194m.g) derived from phytozome v7. 0 (chr-ID scaffold_1; pos 2266768 to 2267192)
tcgtagtagttcgtagacttttacttgtatctcaggtttgtttctgactattttttctttacttattattattagctgagtttaattgaaataaatagagtgtttggttatcttcggggaattatagcttttataatgatgggtttttgtttaatttggaaaactgattgaaattttaattatctatggctttttgttttgcattgttattgataaaatccgttggttttctaatattagttttaaaattttaggccaaaagggtggataattgataacattagaatttgttgtttaaaatgctgtaattttttattcagatttttattaattggtatgtttgtacaggtctgaaaatttgattgctttcatctttttggggaaaactagtaactcttttggagtataagcatatagcaactagc

SEQ ID NO: 108074 - DNA, 955 bp, Aquilegia coerulea
  Intron number 2 from transcript AcoGoldSmith_v1.008104m (l ocus AcoGoldSmith_v1.006419m.g) derived from phytozome v7. 0 (chr-ID scaffold_6; pos 7679271 to 7680225 reverse stran d)
ccgtaagtattttctttaagtagtgctaacctgtgtttttttttattttcgatgtaatcaaacttaaatgaaatccatatcaaacatcggtgtctgaaatgtgttcgataactttaactttcattgaacttgcttacttgtattattgcattgaaatttattaggtgttaatatgactgttagtggaagtttagtttggataccatttgtgaacagaaaggccattattggctttgttttttggttagttaatgcaagtttttgtagaataagatgagggggtttttcttatagaggccttggcctggtatgattatgaaggcgtgtttggtgtgtaattttcaatgacatccagttgttttttagtttggtgcaggctgtagggatgatagtaactgtcaatagtacagtatagtgaaccaaataattcgccattactataaaagatctaatgaagggtatatagttgaaagaaacaggccagagtagttccctattcattcgatcactccttataaaacaaataggaaaaataggtttggaaagatgtcctgtcctgtcgaaaattaataaattataggattacaatattagggaaaataatagatatatgtattagtatgcttttttctgagaagtttcgcagttatacttataccaaatgttagaacaactttttatgaatattgtattgcacagtgttttgttgatgagataactgaattcttggttcaagtctagttctctagtatgctttattaaaagatgctaaatacatttgtttgtcttcttgtttgcatgatggatgcgtcttcacccagaccaaacatggtaatgtgcacttctacaatcttcttgtatagggaattaactctaaattgttacaacactttcaggatttcttgttttctgatgtagtggtcaattgtgtttgcagataacattaaccggtttc

SEQ ID NO: 108075 - DNA, 346 bp, Aquilegia coerulea
  Intron number 4 from transcript AcoGoldSmith_v1.005882m (l ocus AcoGoldSmith_v1.005882m.g) derived from phytozome v7. 0 (chr-ID scaffold_43; pos 1133502 to 1133847)
gaaaggaaatccttttacaggtaaaatttacaaagatctgttcttaaatgtttcatttgcaagtgctatccaaatatttccatattgcgttcctctataattctttgtagcagttttgtgcttcaaatttagaagttatcttctactcttattagaaaaacaaaagacttctaaaatgacaactaatatatattggaaggagtaagaatcaaaaggaaaaattcaaattattatgcgctttagtatatatcaagtttatcgactaacttctgtatagctcaatttgatacctgtgaccctcactgaaatgctgacaaacaggctttcaattgggaatctcataaac

SEQ ID NO: 108076 - DNA, 506 bp, Aquilegia coerulea
  Intron number 1 from transcript AcoGoldSmith_v1.008252m (l ocus AcoGoldSmith_v1.008252m.g) derived from phytozome v7. 0 (chr-ID scaffold_10; pos 1867609 to 1868114 reverse stra nd)
gaaagggtaaaaagaaacgagggtaagttttcttttctgtaaattctttcaatttggtaaaaaatttcatattatttgagaaactgtgattgtttttttcttatatattagtaataatttagatttttgtgttacgtgcatgattatatgtgggtttaaattggggaaattattgacattataaggaatttgggtttgtagagaataattatcagattatgcatgaattggaaaatgttcggcaaatttgactttatgaagtttaaattgagtctgttggaaatagtttgtgttaaaagattttattcatttctgtaatgtggaatgtattagataatgtaacaagcgtggaaacgttgattatattttatgtattgacttaatctatgtataagcacgtatgatcatttttggataatcgtgtctagtgtgattctcttttatctatggtttgaataatttaggttcgatttatttaatatgtaggtcaagcagtaagaacaaag

SEQ ID NO: 108077 - DNA, 822 bp, Aquilegia coerulea
  Intron number 1 from transcript AcoGoldSmith_v1.001045m (l ocus AcoGoldSmith_v1.001045m.g) derived from phytozome v7. 0 (chr-ID scaffold_18; pos 1819610 to 1820431)
ctgcgtgtcatctaagttgtaatcagtaagtaaaaagctttagtgattgttgagttttaacaacttatttaatcgattgaaatcatgtttcttacttatatatatattctatctgctttaatgataggtatatttgattgtaattaagctcactttactctcaagataaaagttattacttgttttgtgtcttttaatttgagcttcttcatcaatggaagtagttcaataggcacacatcacacttcagtttggctattcctgctttacttagttaagaatttgagttcttgtttgtttgtttgttaaatgaattcaattatttatgttgtttgatttgcattcatatgcagtgaagttctatggtattacttcagagtgaattttgtgtttgaagtgattttgctggtaataagaggctaagttgaggttgatctagactatacttttgcaattcatcttccctcatatttgatttggcatgttggttgggcaagttcctttatatatttttcagccagttatatataaaataaaatacactttaattgtctatgttgtgttttctactcatgcatcttggattgcagttttttttttcatgatttttttattcaattgttttattattttatttaacaatagagcttctttcggttttccttttctcacaatattctgtagcatgctttatgctctctctctctctctctctctctctctctctctctctctctctctctgtataaatattttcttactcttcctactttgatgtggacagcagccaaggactttgaagaaacagattgtgtagctcac

SEQ ID NO: 108078 - DNA, 986 bp, Aquilegia coerulea
  Intron number 1 from transcript AcoGoldSmith_v1.007609m (l ocus AcoGoldSmith_v1.007609m.g) derived from phytozome v7. 0 (chr-ID scaffold_6; pos 8383881 to 8384866 reverse stran d)
acgattgctttgtaagttgtttttttctttcttatgcttgtttttttagtttatttaatttgggtttttgattttatgtttaaatcatatgaaaaaattggtttttttttttttttatgggttttgtagaatttggggtttagttttattgtttatgtgtgatggggatttcaatttatagttaaattttttattttgataagaattgttttgtaaaattgtcggttttatgctattttccagcttgataaagagtggaattgagtagagttttgtacaaagtgaattgatctgcattacagtatgttgtttttgttaatgttgtttaagcaacttatctggtgcaatgagtatgtttgcttgaaacaattttcttaagtaatctgaatcagaactgttggaaaattatgaggtgtgcaaaattaattcacatgtgtggggttaaagtggtttaagtcaacattgtttatataagattcgtagtccaatatggatttagatctaaagatataatttaaatcagctcttgctttattgtcaataattgtatgggttttttaaatgtccgttgatgttatgtatgtcgaccaatatgtaaggatttttttcccacttgttaagatgccatattctttgaatatgtgctttatatttcctttcttttgtttctttaatatttaactaattgagcaagaggcttgactttcagcgttgagatatcaaaattatgcgatcttgcctgctccttcattataaactgaaaataatttgccagtttgatatagtctatgggagtcacaggttctaagcgcgcacggtgcagtgaattctcagttgatttaatcactccatttaatgattgaataattaaactttgctctttcttcataatctagaaaactaatctagaaatcaagttttctagcatttaagttatatatatattgataaacaggttgctaaggatccttctggcaaagatatca

SEQ ID NO: 108079 - DNA, 647 bp, Aquilegia coerulea
  Intron number 4 from transcript AcoGoldSmith_v1.013914m (l ocus AcoGoldSmith_v1.013914m.g) derived from phytozome v7. 0 (chr-ID scaffold_40; pos 2277371 to 2278017)
tagaagagggggtaagcatttacaattatgtcttactgtgattaatatgtccattttcttttgtataataaatttatactagatttatattggtaatattatagcaacagataaaccaaagtacctttcttttttttgcaaagttaaactaaaggatctattacgcatttatgttcatcatctgatgtaaatgttcatcattggatggtttccaacatccttaaactgcatctattgaattaccattcttatatctggcatttctgcccatctaccatattaaacaggaccaccccctcccaggtactcaccaaaacaacgtacgagatagcaaaaggtttttataacatgggtctttggatatgatgtagcacatctgaacgattaacacgtttagagatctatgaattggatgattgagagacagtcaaatacttctacagatataatgtatgaatgctttgtttttaggacgaagatgtcagatagtgagatatgttttgcacttactgtctgtaattttagttagtaaatattggcgaattcttagctccaagtttcattaatagattaaactgttattttgatttaacttatgtgctatatttgcaggctgttcttagtaatattttgaaagggaaactcgc

SEQ ID NO: 108080 - DNA, 923 bp, Aquilegia coerulea
  Intron number 1 from transcript AcoGoldSmith_v1.006831m (l ocus AcoGoldSmith_v1.006831m.g) derived from phytozome v7. 0 (chr-ID scaffold_6; pos 8772815 to 8773737 reverse stran d)
cagaactgttgttggtgttctcgaggtataactcactgtttcatcacttcttcatttctctttcacttggcggattttcaatttgtttagtaaaaagagagaatgttttagaacttgttttttttaatatgaattggtatgagactgcagtttaaatagaaagagtgtaaatgtagttaagtttaggtgcattagtcattacacatttacacgttaatgtgactgagttaggtcggtcgactgtaattcatgcttaccaatcacgaatcaaatctaaatcagcttagttttgtatgatgaataatgtgcctgcaacatcacattgaactggagtgattatttattttgcattttaataatcaaattagtagggttatgtaattggtctgggcacttttaccagagagttttcatgttttaggcaataaccttaggagataggaatcgtatgggaaaaactggaaaaggagagaagaattttaccaccttcgtgaacatgtttagtggggaagtttacgtggggagttggttatatgagaaataccctcccaaattttcatgaaggtgaacaaaaactttccttccctctacgtacgcatggtaggaaatttgaggctgaaacataaacacccccttattatttctgcattgagaaaaagaatgtgccacataggtaaaacttgccccgccaaatagcattgctagtttatcaatttaaagaaaccggaaacttgcccccaagcctagagatgcctcctagcggtatcaagtcctcaactctaaagtgttgctgctgaaaactgtacttttgatttctatcacttctttttgttccatgtaattttattcttatataatattcgttcttatatggtttacaacacataggaggcttttcacaaatttattggtcaacctgtttc

SEQ ID NO: 108081 - DNA, 220 bp, Aquilegia coerulea
  Intron number 3 from transcript AcoGoldSmith_v1.002141m (l ocus AcoGoldSmith_v1.002006m.g) derived from phytozome v7. 0 (chr-ID scaffold_10; pos 2310569 to 2310788 reverse stra nd)
attcgggtggtgaaacctctaatcggttcaagcttgtaagatacaacaattttccttaaaccaatttcattcattacatgagatcaaaattttaatttattttttatgttttcttcaagatctggattctggatgtgttgctctgacatcatatcactttgtttattacttatatctttgtttatttcttacaaggatacaagacaagctaagggtcata

SEQ ID NO: 108082 - DNA, 521 bp, Aquilegia coerulea
  Intron number 2 from transcript AcoGoldSmith_v1.002141m (l ocus AcoGoldSmith_v1.002006m.g) derived from phytozome v7. 0 (chr-ID scaffold_10; pos 2310792 to 2311312 reverse stra nd)
attgcagaaactccaactcataagcgttctaaaaggtgaacattcacaatttcacatatctcttaaatctttgttaaacttctatacatagaagtacttacttgcagattccctctgttccattttgttttccatctttgctagttttttctagaaaagggttttcccaaaatgagaattgatgtttaatagttaaagttgcactggttttccctatttagtactaatgatttaatgatttgcatacactttttgtttactcttgatttctggtaaaaataaaatttcccagtggtttaatttaatcgcaagaagaagaaaaatcccaatatgaggttttgggaaagtgaagaatccagagttttgttatgaaatatgtatgtgctacatacatctaggctgcatttttcatattctttgattctagtctgtgcaagagtaaacatttttcccaacaacattatggggctgatgtttgttcgtcgtctttaacagtgatacttgccagaaagtcgaggaag

SEQ ID NO: 108083 - DNA, 878 bp, Aquilegia coerulea
  Intron number 1 from transcript AcoGoldSmith_v1.025971m (l ocus AcoGoldSmith_v1.025971m.g) derived from phytozome v7. 0 (chr-ID scaffold_1; pos 7023747 to 7024624 reverse stran d)
agcaaggcgacactcaatctcttcttcaagctttggtaactcaatcttttcaattcaactcaatttctgtttaattttaactattcaaataaacataagctttaggtatgagttacaatcttttatttcaatttcgttcttcaatttccccaaattgttacactagaaattaacttagggttcaacattattaaataatattaaatggattaggtactagtttatgtgcgatacacagtgtagatgaagttttaattgtatgatagtcaatacattgttgtagatagttaattttgaaaacaaggtttcttacaatgtgaaaatggaatcattttattttttacatttttgtcctttccgcaaaatcaaacaacatatcctgttcactaactgtatatactgtatataacaagttcacacttgtacttagtcttttgtttaaccatttttgagagtcatgaagtccttaatttttaactactttgataaaaattcaactgtatacaacattgcaacttagtgccactctttcaagtatgatgtgtgtttctatttatgggttggatgtatcgtttaaatgctaagctttttacattataatattcattgaaaataaaatgctatttgacgatttttatacctggagatggtatatatgtatttttattggtgctttcatagttgggaacacagaaactcgtatggtatcatttctagtaatagtttcatgattgcaatagaggcttagcatcatgttcttggtgtgattttgtttttctgggttgatttgcattgtgtgagtagatactgatgtggcatatcgcatactgtttgtccttgcaggcagcaaaaacttcaaataatcgactagaccaggc

SEQ ID NO: 108084 - DNA, 836 bp, Aquilegia coerulea
  Intron number 1 from transcript AcoGoldSmith_v1.007290m (l ocus AcoGoldSmith_v1.007290m.g) derived from phytozome v7. 0 (chr-ID scaffold_15; pos 2229413 to 2230248)
gagtatagaaaacttaaagacgaggtaatcgatctctttctctctctttctttgttgatttcgatttctatttcaaatcgattcggcattttagcttttcagcttgatttaggtttagaaagcttagttactattattctcgagatttatgttgacaagagtactaattaaacactttattgcattgttgaagaacgaacatttgttatttgagatctcaaagctaaaaaatcatgtgaatttgaattttcttatgttatatattgtttttgtcataatagtaaagcataatgtagattgagttgtagaactttgatagttaaactagctgcactagtaattatatcatcttcattttagtatttcacctgaatataagtgatatgtcttttgtcctgaaattttatcgatatacttctgtaaacacttttttcatgggccttgtctatgacaacgaaaactattggaggttctcagtatttcatgataatcttattcatctagcagtcatagtaataaggtcgttagtttaaacatcgagagattagttaacagaacttgttggtcagtgatcatatacagtagtatgtttttgggagtcatggcattatgtttttgttgagaccaatactgtctctattaaatttgaatcccatacatgcgcatattctttgggatccaatccactttgttatcagttattgtctagtcatttttatatattcttcaattaatatttcttagcatacatttaaattattggtttgaagtttctatcttctatggatgcttcacacagaattaatcgtcaatgactttcctattgtaggacaaag

SEQ ID NO: 108085 - DNA, 865 bp, Aquilegia coerulea
  Intron number 1 from transcript AcoGoldSmith_v1.024627m (l ocus AcoGoldSmith_v1.024627m.g) derived from phytozome v7. 0 (chr-ID scaffold_60; pos 1240425 to 1241289)
ctaacttcgattcagtctttcacgagctttgtcaggtaatacaaaacacttttttcttcttcgtcgttatcttgattctctttaaatgttagattatgttgtagtttgcaaatctgtttaaactagggttcttaatgttaagattaatgcattattgttaaattgatgttattctgctagtttagttttactgttatagtaacagtttagagattgaataactcaattcatgcataatgaactcgattacttatatgttagatgagaaggaatttgtcttcatttggtgtatacagtatacggtttccttacatagtgaaatttgtctcatttgatgttgttctgctagttaagttaaagtaacacttgagattgaataactaaaatcacaactaaaatcacgcttatgtttatgttttaaagagtattcaattttcgctctttatgtgtatctgtaaaagggtgggggatgtcaggtgagtgagacaacataatgaacttgataacttaaattttacaagacctttatctttgttgcgtgtcattcatatgtttagatagatggattttgtcttcatttggtgtatactgtttccttacctactgaaaaaagttttaagccatttatgtatcagaaaagcatgatggagttgtttgatttacttgctcatgtttgccaaagcttcgtcaagcaatgttttaatagttaattgactcccgtttgaaaccctttaggaattggttacttttttgacattttatataagattttagatatgtaaacttttttggactaattatcttctgaaatagtttacacgttatttgttctcatgtatcacttgctcatgccagtttgccgatt

SEQ ID NO: 108086 - DNA, 669 bp, Aquilegia coerulea
  Intron number 1 from transcript AcoGoldSmith_v1.000722m (l ocus AcoGoldSmith_v1.000376m.g) derived from phytozome v7. 0 (chr-ID scaffold_15; pos 1627294 to 1627962 reverse stra nd)
agttacttctggttttacacacaaggattgctcaggttagttgtagtaattttgttaattttaaattagggttctttacatcttggatttcttgtgttagggtttttaaatgttcaatttttcttcttgatgagtcaaattttgattaattgaagactattgaatcaattagggctcttttaatctatagctacattgaggattcatgtatttgagctagaatttgaagaaatgttgaatttgtttttattgattcatgtcaagtttaggggtttttgcaattcctctactttaaattctatttaattaaaagcttgtgttttttttttttttttttttacataatcttttgatctgagctcagtattacagtcttaaattgtaatattagtcttaaattgttcgaatcctccttgcatttgatttgcatgtgatttggaaatagctgcataggttcgaacatcaaacctccacgttaaaaaggcaaaatacacacacccatttgattgtatgaggcgtttgaaaacataacttttacagccatttgatcgtatgatattgtgatattttttgggttggacgtaagaacatgcagtggcatttttggtagattgcatagtatattgagggtgttatcttagtatttctgcatttttgcttttattccag

SEQ ID NO: 108087 - DNA, 1027 bp, Aquilegia coerulea
  Intron number 1 from transcript AcoGoldSmith_v1.010372m (l ocus AcoGoldSmith_v1.010372m.g) derived from phytozome v7. 0 (chr-ID scaffold_27; pos 1025496 to 1026522 reverse stra nd)
acttttgcagtagcgatcttgaagtttgtgagttccatcgcaaccttttttttttttttacttttattaattattagatcagataattcttattgttttatttaattgatcttttatttgatgattttgaatgattttattaggttttagataaatttggaattgaattgaaacttatatcttatagtttattacaagatttattttaattaatatttggaaatatgtatgttgaattgtcttaatttcaatcattaaaaatcttagaacaaaacctgattagattatgatggtgtgtgtggtagtgtggtcattttgatatataactcattcttaattcaatcaaatttctgtaattatggaggggatttttttattttaggacaccttaaggggtagaaattggattgaggcatatgttctctaagaagtcatatcaccgataaatgtataggcaatatacaggcaatatacgtaaaaatatttggtaaataattccttttgaccagcgatctcgtgcaaagtttaatcctatgccaagaagcatttaaattatcgaaagagtatgttggacctatgctgagctattgtggttttgggaatcagagtcggtaaaacttccatctgtcagaagtttgaaactgtcaatagaaaatttattaacttgctggtatatgaaggtgggtttcgaaaatttgtataaccaatatggcaacatgcattgttgtttttatgtatgaacatgaacatactgagtaaccacatatttacacaatgtacttacatgctttattctttgcttgtatgatcccattcgaaccgcacaatttgggatcatgttactgttgagtttaggagaactttgtttgagaagctattgcacttactacttgcatactggttcagctttccgagttaatatgtttttgatattataattcgcttgaagattgtgttgttttcctttatactaactacatattatctggaaggtctcctgggaagcttggccccttgtgtgctatat

SEQ ID NO: 108088 - DNA, 907 bp, Aquilegia coerulea
  Intron number 2 from transcript AcoGoldSmith_v1.007429m (l ocus AcoGoldSmith_v1.007429m.g) derived from phytozome v7. 0 (chr-ID scaffold_63; pos 352635 to 353541 reverse strand )
aaaaacttcatcaaacaaacattcaaggtatgttataatatataacaattccccaaatcccatttcttaattttctgttctaagtttcacaattttttattcaaatatcatgtttaatcacttttttttttttttttagtgaattgatgggttatgaatgatagtttagattattttcaagttttgcggctttgtcgttttgattttgattttatagaaattaatgaatgaatattttccgagtagcacgaaaatttgggaatggggatttattcgttgagtgaaaagcataggtatagattaagcaaagggtatgaccttttgagttcattgttgaataatttcaatgaactgcaatgcgatcagtggggcagattagaggagaggaagggaggtcaattattgttgacctgactcaactattgctgtgttaaggacattacctggagcactgcattttggcatgaactccccctgcggctttgccagcagtatatggtggtttttattcaactcacatagatattttggagaacaacttattagcattttcaccattttcatgacaaataatggttgaatattatttattttctcagccctagcaatttgaataagctgcagtcgttgatcatctcagtgagttatacatcatagtaaagtggtacatttactcatttagtggtagggttactttctgtttgatggaagacattatatagtgaacattcaaaattacccttatgaactattcaattctttctgatatgtgtatatgtttgtgttattaatatcttcatatctgtttaattgttaatatgttaaagtccatttttcgttttaatatttagatgctaacacaatgaagattcttttgcttctattgaaatggtaaaataaagtacac

SEQ ID NO: 108089 - DNA, 611 bp, Aquilegia coerulea
  Intron number 1 from transcript AcoGoldSmith_v1.007045m (l ocus AcoGoldSmith_v1.007045m.g) derived from phytozome v7. 0 (chr-ID scaffold_30; pos 1804425 to 1805035)
agcttgttaaagatctattgttcattactctaaaggtactactacgttactgcttctcttctttcgttgttaaatttcctttattccactacttcaattaatcaattagtgtgttttcaagaatctagatgtttttgaggtttagaggttttgccttactagtgttttcaagagcagaacaaggttattaagtagcaaagattgttgtcatcgattaaactttttcgatttttattttaatttttcttagttaaacctgtttgatgaaatgcctcaaagagaacataaatttcttttcgtggattatgattttaattttttgatttaaacctgtttgatgaaatgccaaagagaacataaattgctttccttttaaattatttttatgctcttgggtgtgtttcttgtgtgaagaccactgtttttttgcttttgttttttccacaaataattgatttaagtccactgcccttttttttccagtttccacactcttaacataatattactgtatgcataatagcatacccagtaccattacttctcaatctaataaaattatgcggcattgtgtaggttcccaccacatatacagtaggatcaagctgtgg

SEQ ID NO: 108090 - DNA, 433 bp, Aquilegia coerulea
  Intron number 2 from transcript AcoGoldSmith_v1.020736m (l ocus AcoGoldSmith_v1.020736m.g) derived from phytozome v7. 0 (chr-ID scaffold_12; pos 837182 to 837614 reverse strand )
tttcatttcttggaatttgtgtcttagattatgttacttgcatgtggaatgcccttcacttttgtttttctaagttttatggtgtttctaattcttcttggtgttacattgtgggtaatgagtatgtgtaatgtttgttctgcgagatttctttaagcgttttccattttctggccaatatctaaatggtttttttgaacttgtgttatgcttactgagatattagtcatcttttgatgttgagtggcttacctgtataaagtgatatccaaattaatttgactgtgtttacatatgttttcttaagaagtcctgaaagttatgtgaagtcctgaaagttatgcatcgtttaaaaattgtaaaccctgcttcaatgttttgtaagtattagtcatttgtgaagcatatgagagagagtgactgtcatgcagag

SEQ ID NO: 108091 - DNA, 845 bp, Aquilegia coerulea
  Intron number 1 from transcript AcoGoldSmith_v1.017327m (l ocus AcoGoldSmith_v1.017327m.g) derived from phytozome v7. 0 (chr-ID scaffold_108; pos 177474 to 178318 reverse stran d)
gatcggttagttataattattagcctatttaattttcattttcatttttcgccctaatttcattattcgtcggttgtgaaattgttgatccaaaacttgtaggaaaatacacaccgatatattactgttctaaaataaataaaagggaatagatgatgcaaaccagaataaatggatgaaggacaagatttagatcgagtcgagataaaaatctctctccttaagacattattcgccccgtacatgtgtcgaaccgtttatcaatggcggactgtctcccaggatacaacgatctatccttcttagcgtagcagcacttcaaacgcatagaagacggcgaaccaattctttgttatactctctcatggcaagacacaaacactaaaagaaggaaaatcaatttgattttttaaaagtgatttgaagacaaacacaagatacacttatatagtaggaagacacctttttgaaaaggcacatatctattcaatgtatatttgaatagacacctgacccaatacaatgtacatatctgttgggacagacacacccattgggaatgagtgtctacaaagtatgtgtctattgggaaagacacacccattgggatgggttgggccaaatacaatgtatgtgaatacatacccattcatctactataacacaagttagccatggccagtggttaacttaggacttaaatttctcattcatatacaaatgttttgaccacttgaaaacatttccaacaaaactaagtgtcaagtgtctcatctgtttgataattaaaatgaaatatatatatatatatatatatttataatgcaggtaccgtccccgctaca

SEQ ID NO: 108092 - DNA, 458 bp, Aquilegia coerulea
  Intron number 1 from transcript AcoGoldSmith_v1.020363m (l ocus AcoGoldSmith_v1.020363m.g) derived from phytozome v7. 0 (chr-ID scaffold_7; pos 2668724 to 2669181 reverse stran d)
tggttgaaagtggaactactgggttcttggggcaggtgatattgtgtttcatattgtattttctgcactaggatcacacccttacgccagatcattatcatgtgaccttcaaaggttgaatgaggaacttaccaaagaaaagccttcaaagtattttcacaacctcaatcaaagtactgtctcttcctatacatagtgatatcaagtaataagattccttccagtgcccagtgctggtgtataagataccttccagtgctagtttattctggatatgatctgtgtcaagggatgtccggatagacaattttaaggctttttaaactttgcaaattttaaattctatctcagcgatttctgatgatgtattacttgaacaaatgttacgttgatatgtttgattggtcctgacaatgctattaattgttttgctacatatgttgagcaggtcactgtac

SEQ ID NO: 108093 - DNA, 623 bp, Aquilegia coerulea
  Intron number 1 from transcript AcoGoldSmith_v1.006596m (l ocus AcoGoldSmith_v1.006596m.g) derived from phytozome v7. 0 (chr-ID scaffold_30; pos 1030404 to 1031026)
ttctctctctctgatcggcaaaacttcactaacaagtaagttctttgaaaccctagattcatcaatcttcattattatttatttttctataattttactttgatttcagtatatcttttgagtgttgaattcgttcaaatgattcaaatctattgattctattatcgtcttttgaacttctagggttagtttgttattcatttattgaaatttcttatttgatctctttatcactagtgaaggtagttagttctattgtaaggtgtggagaactggagaagagtgtttatatagagattagaagtaatgatgtattgtttaattgcaatttggatattgaaacaaaaaagtttatctagacgaacacttacgctcttttgttgtgtatctttcattcacttttggctccaggattcttgattgaagcatcatattgcatttagttcgttattagtgtttctgttgaacttaagacacttttttatacttcaaagttcaaagtacatagtaagaaagtttgttgtcatgtaaggttcatgttttggcactgtcagtattgattgtttttcattctaatgtttgatgcagattgaatcttacttcatcatttcattgttcgttgt

SEQ ID NO: 108094 - DNA, 565 bp, Aquilegia coerulea
  Intron number 1 from transcript AcoGoldSmith_v1.001893m (l ocus AcoGoldSmith_v1.001893m.g) derived from phytozome v7. 0 (chr-ID scaffold_10; pos 2433082 to 2433646 reverse stra nd)
aggcatgtattctttctctctaaaacccattaattttttctaaattcactggaagaaatcacaattccaggaaaattttgattgtttttttttttttttaattaataactttaaaagattaataaaagccggcaattataatacatatatgattgagaaaatcgcctatagttttataaaataatacataatatagtataagtttgcttgctaatccattagattcgattatagacactattgagcaataagttattgattcttctctaagttgacttagagatagtttgtctcttcttcttaattaatttttttttttaattattaacacaaatctatgggcaaagatgatagatgtttgggatatttttctttcttcaatcataacaatcattctctcactgtttttagctttgtttgacactttctttttacaaagcaaaactgttcataggttaataattttttaaataatcattattttaagttaagcaagattaactgagggtttattatattattgtgtataggtggatagaagatataaccattattgtgagcaaat

SEQ ID NO: 108095 - DNA, 668 bp, Aquilegia coerulea
  Intron number 1 from transcript AcoGoldSmith_v1.003221m (l ocus AcoGoldSmith_v1.003221m.g) derived from phytozome v7. 0 (chr-ID scaffold_9; pos 4540727 to 4541394)
gagtaggtctttttctggtattgttcaggtattattattattgctatatattttaacctctttatttaaatttgaaaattttggataaggatttatcgtcttggtgttttaattaaatgagttgataatcaagttaaagaatcctcataagtcataataatcttacaatttttcgacttaagctgtgtttttggtctgattttgattacatatttggactttcacatggtgtgaattttagttatttcggacaaaataccttcaccgactatcataagggttttatataaatcaaagttgttttttgaatttctaaaggaataagttcttaatggaatacaatgatcaattgaaggcggacacgggacactcttcttgggagtgaacatgttgaggatgagagtaatagaaattctgaaacaaatttgaagatgaaaatgattaattgaaatgtcaaagttgatttcacaatgttgtaaactttgactttcagggagctatgtattttgctgcattaaacagaaatttttgaaaatatgtctgtctgttcctaagatccttcttttcatatagatgtaaaccagtgaaattctgcttggatagtaatcttaattaccagttttcgtagcctgattatatggcaattgcaaatcccagtcatctttcct

SEQ ID NO: 108096 - DNA, 817 bp, Aquilegia coerulea
  Intron number 1 from transcript AcoGoldSmith_v1.018485m (l ocus AcoGoldSmith_v1.018485m.g) derived from phytozome v7. 0 (chr-ID scaffold_30; pos 909822 to 910638)
tattatctgcaaacttggtggagagcttttgtatgtgacccttctttagttattttgttttgtctgatattcatcgccctgaaatctaacctggatgttggaagtgtttaaaaaatttcctcttgatcagaaaggcaaaaagtttgatgggcagattgcatgagatgccatttgtgatttacataactgttttatcattaataagaaccagaggtatggttagttcagtcatcctttcagctcaggaccccttccatgactctaattgttgcgagagagtaaagatgttcgtaaacaccacaaatcccttgatatgagaagaaaatagaaagttagaagaggtgggggggcctgggatttgtactatcttatctgtttgttaacaacaagagggaatgcttccatatgcaaacagcaaacctgtcccatacccgattttgggattgaagtgcatttctacctcattagcatttgaagtttttaacccaatagatgcaatgagctgttggatttatcttttgcgtttcagactctagtatggcagtaggctttgttctgaatgccaatttgcctgaaaagatgatagtcatatcttcaataatttattgtttgtttggtggaagttaatcatctttgataaaaaaaaatacccataacagtaagattgtaaggtatctgtttttccttgggtttgtgctgaatatttatactgcgtttgtttccagtatccagattttgatggtgttcagattctctgatgtttcttacctatataatgttaggtgctgcgagggaaaagggtgcaataagaattacc

SEQ ID NO: 108097 - DNA, 991 bp, Aquilegia coerulea
  Intron number 4 from transcript AcoGoldSmith_v1.014959m (l ocus AcoGoldSmith_v1.014959m.g) derived from phytozome v7. 0 (chr-ID scaffold_6; pos 8638257 to 8639247)
ctagagagattgccaaagatatagcacgtcgtaaggtaattcccttgtcagtctcttattgggtttgtggttaagaattttgtttgtaccatgaaatttggtcctagattagtggtatttattatccatgttataaccctgtttttaaggttaagggagtttaatgtcatggttctactttgtgtgacatattttccagttgtatgtccaaggaatttgacttaccaacttactaggccttataattgtgacttggatgctcggttgtcgattgttatgaatatgagcctacacagaattataatttataagaatacttcatcacacatcagcattgctccacataaactttatagtttacattaccaatacataaacccaaacacccctcttctgttgagtgtggttacttcatagcaagttatacgacggtgtatctagcttaaatctatatgttaattgtgatacatgaaccttgtcattttatcatcccattactttggggtatctggtgggagtgtaactgtaggcattttgattaggaggcaactgaccttttacagatgatttttgatatcaaatgattatttttcctatgtgacgttgttagggacttggagagtattttcattggcttttgtgatatttgctcattcgtgggagtctgggactcattgttacataagctgtcagaattatcttgaaatgatagtaacgttctatttatgttttgacttgttataggtcatttactcgcatcgcttcacctcctggagagcttatgatgttttctagaagtctgattctcacataggatagtaatttcttagctgtatatagatacactatattaaagtagacatatatgattgtgaacgtcaataatatcttttttgactttcatcatttacatttactaaagttgcttttagctgaagttttagattcctggctttgtttacatgtatgatgggatatgcaggtggagaag

SEQ ID NO: 108098 - DNA, 715 bp, Aquilegia coerulea
  Intron number 1 from transcript AcoGoldSmith_v1.001092m (l ocus AcoGoldSmith_v1.001092m.g) derived from phytozome v7. 0 (chr-ID scaffold_9; pos 4218863 to 4219577 reverse stran d)
acagcgagttcattgagaaagtaaaatcaagcctggtatgtttcttttagaatttatttgtttcagttatagacttagccacttaggggttttattcctgaactctttgatgaacatactggctttgttctgctcaattttatcatgatcatatgtttattttagctgttagattgcaaatacttctaaatttattgaaaatcgagcactgaatgagtttttatccattaaaaagactgctaaatgtaccagctaagcatacatgactttatgtgatcaacttaaaaggggatacaacttgggtggatcccgcaaatatgaagtttgtaacatttgaaaacacacctaactaccttccatatttactaatttacatagtgattgtaatgagaactctcctttgcaaattatattttttctttatagaacttttaagaagctttatttacttaaattatgctttcttaagaagaaagaagtactcctttgagtacctaaggggttttagagtttcattttcatagagtccactggggtggaaacttttagtttctagaggagaaaacatctgtccttgttttgatttcttttgtttgaaagtggtgttcacgtttttagtatatatcatgaactaaatacactcaacttttttttccttgatgatagaagaaaataaagctaaaatgtttactgttttttctttctgcagaagtcg

SEQ ID NO: 108099 - DNA, 748 bp, Aquilegia coerulea
  Intron number 1 from transcript AcoGoldSmith_v1.006571m (l ocus AcoGoldSmith_v1.006571m.g) derived from phytozome v7. 0 (chr-ID scaffold_11; pos 3151945 to 3152692 reverse stra nd)
tctcttgcttcccatcttcttttcttcttcttgaggtaatcttttcaatctcatttcaaatcttaagattaaatttccaatcttttatatctctgtaacacttgttttggataattttgtatgattctttgtgttttatgtagaagttttgattgtagaatttcatttcttgggaatatataagattgaattagatccaattatggtattagatttattgaatttgtagttttgtttttcatggcaattctgtgttttcttgatttttttttttttttacacaaattgctataacaataccttaagttattagctaactagtgcatttaagatctctagctaatgtttaatttgcgtccaaacacacgccgcaaaagctttgaattgagttttcgctctcatttaggatcttacttaaacattaaggagaacagtgattgcagtccaagctctttcgatgccaccccttaatgtgcgtgtttgtgtttttttggattgttttcatatatttgtgggaattatttgattggtaatttgaccattgcatatttgcacgaggttgatgatatatttgggaagtgatgcatcctttactctggcatgaataagtgaattgtaaccaaaagcatatcttgaagatacgatctagcataagtgcataacctttggtgttgtcacttgtcgttatggttcattaaaatttgcttatgttttcatctggttgcaggtgaatatctaatttaataca

SEQ ID NO: 108100 - DNA, 725 bp, Aquilegia coerulea
  Intron number 3 from transcript AcoGoldSmith_v1.018885m (l ocus AcoGoldSmith_v1.018885m.g) derived from phytozome v7. 0 (chr-ID scaffold_6; pos 3337611 to 3338335)
gacaggttgtaaacttagagttcttgatgttcccaagggaagaacctatgaagcacggacacggataccggacaccgacacaacacgatacggacacgccaacacgtaatttttaaaaaatgtaggacaccgacacgttataatatacatattatttttatttttttctagcatacaatatttttcatatagaagataacaatatagtgtacaaataacaatgtggcattgtcatttgtcaaagttaatttgacaaaagaagcaacaaagtattgagaaaaatgaagaatacaagagaagcaaacttagagagagaataacaattgatattgaaggaagatgaagagaaagtaggtgagacttgagagagaagtttctggagaagtagagatcttttagtttgtttattctattcctgatccaattctattttgattagtttatgcctctcgcaatcttaagtaatatcttcttgcccattgtaaaaagctaaaattacaaaagctaaaattacaaagtaatccttaagccaaggtgtctagatgcagtgtccggcagtgtccgaaagtgtccgaatttgaaaatttggttttttgaagtaagacacttgatttgaagtgtcggacacgtgtcctaaggtgtccggagagtgtcggtgtcggacacgtgtccgacaccggtgtgtgagattaagaggggtgtccgtgcttcatagggaagaacaa

SEQ ID NO: 108101 - DNA, 915 bp, Aquilegia coerulea
  Intron number 2 from transcript AcoGoldSmith_v1.009406m (l ocus AcoGoldSmith_v1.009406m.g) derived from phytozome v7. 0 (chr-ID scaffold_15; pos 582898 to 583812 reverse strand )
gaggagctaaagtcgttcctataacacttgatcaagtaagtttatggttgtaacatatataaccaaaggcttcgagtcaaataagctagatttttttttagaccaactacaatgtatagtcatttaaacaaattgtgttctttatacgatgaatgatatggagtagagttaattgagtactgtatgttgaaatgtttatgtacttgaatcaataaaagaaaggaactcgtagatttttaataaatgaagttgtgtaatgtgttaatcgttatacaactataatcaatcacacattcctctgcatttaaagggatttagtttctttagaattcattataaggggatttgttttcatgaactctattttgattggcaatctatgaagttatatacttagatcttctgagggccttgccaaggatctttaaccatgttcagttgcggccagcaagctcttgtcctgtaaggattctgagtggacctacaaggctgagtactgatatagtaactgcgtcaaaatgctggtttcttgtcttggctaaagacaaagtactgcaatggggtggaatggaaactgataactggactattgggtgccaacctagttgagatgtgttatatatcatataaattcctggagaccccttcttgatatatgtttgcattatgacaattagcatgaatatagttttactcataggaaatgatgattaaattagatggcatcagtaagaccatatatattctgggaaataaactgttgagtgtgaaagaacataagaccgattcctctgttgcgataaattctttgaattcttatctatacaatataagtttgtttcctgtatttttgtcagctttccttatattaatcttgttatttctttctttgttgatccatatatataggtttac

SEQ ID NO: 108102 - DNA, 1009 bp, Aquilegia coerulea
  Intron number 2 from transcript AcoGoldSmith_v1.007090m (l ocus AcoGoldSmith_v1.007058m.g) derived from phytozome v7. 0 (chr-ID scaffold_15; pos 3819938 to 3820946)
gtgttattgatacaagctccgagaaaatacacaaggtatttttatttttatgaagagaaataatagtgcattatgtttattttttcagtttttatatctccctttcattttagaatgtttatatagcaattttacgtctataaaagtttattcatttgaatctttttgttataagataacatataggataaaaaccatgtcacaaatccgcaatagaaaacatcagccttcagtatacccccctctatttcctaaaaactatattaagccatcatcatgatttcatggccaccacaaaattatatatagataagcgaagagaaaacaaaaaatcagtcaagctgttgtcgttgatgttaccatgccagggttgaatttttccggtgagtatcaaacaaacagaagtgtggatataggaatgtgtctgtcgatgaagttggacagtgtacaggcacttcttctggcaggttgcatttcgggtagactagattggagataccggcaaggttttggtagggtgtcattgaaaccaacataatgttaaatttacatatgattgattatgggggattttccatgaaaccttgccttggtttcgttggcactctaccgaagttgtatatgtagatgaagaaaagatgaggaggtagaaaggaatagataagaggaggatagaatggatagcggttaggtggtgacacagtggggaggctggaataggagacatggtggtggtgactggtggtcacagtcgacactgcataaaattaaacgggttaaaagattttactatatatgtgtgattgcaatagtaatttacaaatctggaacatgacactcctatctaatatttttaaatattgtcttatactcagttagtcagttatcttaagctggccgtcatggataaaaaatccttccagtacgcttttatacattctgtaggtttcactgtttcagacatggaagcaataatggttacttttatggatgcagagttttgttgggc

SEQ ID NO: 108103 - DNA, 488 bp, Aquilegia coerulea
  Intron number 1 from transcript AcoGoldSmith_v1.027642m (l ocus AcoGoldSmith_v1.027642m.g) derived from phytozome v7. 0 (chr-ID scaffold_7; pos 5948407 to 5948894 reverse stran d)
ttagcttggatatcgtggacttggcatcccaggaggtagtgacatgggagtgtttgatttggaagataagagtattcaaccacattacaaaggtgaatctacttgttattactcaccacccctttggctgattccaactccgcaagaacagtgaattcgtagagcacatcaaattgcctaagcctagaagagttacattctaactttcatagcaagacttgtgtatattcagtgctcagaatccatctcaaggcaactcttgattcaagtggaaacaaactttgaaagtacgactcctgggagaagacaagaggtgcaactcaataacctaggtacatggtgtctagcctctaggaagaatcgtttcgtttttttgtccgtcagaattgtattctgttaacttggatacccttagttaagtatggatagaattttgatgaataatccatttactttttttcgattaatttgtttaacagtttgttttg

SEQ ID NO: 108104 - DNA, 545 bp, Aquilegia coerulea
  Intron number 1 from transcript AcoGoldSmith_v1.005779m (l ocus AcoGoldSmith_v1.005779m.g) derived from phytozome v7. 0 (chr-ID scaffold_37; pos 2205045 to 2205589 reverse stra nd)
agttctggtttcaacaaacttctcttaagctcaaggtaatcattcccaactatattcgactacttactttcaagtttcaacacacacattatatacaactgcttagtttcatctctacttcagttggtgctctttcaaaatgccatttttttttatattggttagacctcactaagacgtcacctcacctcaaatgttgctaggatttttcaaaaacctatacagtattgctaataatttgaagatttatttattaatacttcaagctgctagtctatatttcacaatgttccgagtagttcaagaatccatcctccctctagttcattgtgaaatagaaactatattgttaactttctgtacgagaaattttgatactgtgaaacacatgcagacaaaatttgacacaattttaagtttgaattgtgtgttcaggttgttgtgtttgatgagaccccttgaaatattcttgaaataatacatattttctcggtgaagccaggttttaaatttttcattgccttattgctatttatttctgcaga

SEQ ID NO: 108105 - DNA, 379 bp, Aquilegia coerulea
  Intron number 4 from transcript AcoGoldSmith_v1.026178m (l ocus AcoGoldSmith_v1.026178m.g) derived from phytozome v7. 0 (chr-ID scaffold_1; pos 3697830 to 3698208 reverse stran d)
ttggcggatcaggtaaacagttttttcatatcgtaatttgttttttggcaaaaataaatatctttgatgatatatgcaccacaggatagagcttactaaaccatgccttaaagtgaagacaacaaaattgaacccagatagctaaatgctgcaaaaggcagaacaatattattcagtattcacagtagattatcttttactaatttcatagttcaattactgtaaaaaattgagactggaattctgatgtcctgtggacatagaaatatgatttttgcagtgattggatgtcatgttgttctttgaagtattgctatctgaataataactatattattactgcttaccccctctctctttcagattacaagaatagagt

SEQ ID NO: 108106 - DNA, 542 bp, Aquilegia coerulea
  Intron number 1 from transcript AcoGoldSmith_v1.016842m (l ocus AcoGoldSmith_v1.016842m.g) derived from phytozome v7. 0 (chr-ID scaffold_28; pos 1005335 to 1005876)
aaattatcacgaacagcaacagagttctcttcttcgtgagttcgtggtagtttcaattagaaatttcaacctctctcttactctctacactataaatcctcgatcattcttctctctgttaattaattaattgcaatttctatttctaagtaagttctctcacatttttattaaatctaataatttcattaaatctagtatagaatttggtttttcttttaataaaccctgactttattagtagttaatttattgatttatttattaaatgattaatcttgtcttattagatattgatttcgtcgtgttgcgaattaaatagtgtgtgtttgtttattcttttgtttacagagatgaaaaaaccgagactcgataaaaattgtcgaaggattgatactttattcacaaagaaaactcacgaaggtgcttccggttcaacggttcatactcaaaatgttcaaaacaatgatgaaatggaggtagagcctacaccaaaaaaggtcaaattaaatcgtatagaaatttcaacctctctcttacta

SEQ ID NO: 108107 - DNA, 531 bp, Aquilegia coerulea
  Intron number 1 from transcript AcoGoldSmith_v1.023684m (l ocus AcoGoldSmith_v1.023684m.g) derived from phytozome v7. 0 (chr-ID scaffold_51; pos 600216 to 600746)
caagttaaaggcgtgcaggtgatcctcttgtttgcacttttctttcataatagtatctttgatcttttacagtctcaaaaagacaatagaaatagacggggtattgatgtatgtgctttcttaaatgtaagttagtgattttgttatatctacagtctattctcaattaaaatgaatgatgtttattctctctttttgtgtgcttcttctctttgcttagaaatctctttctcagagctctataaacgttttagttgcattatacaaagaggccctaaggtatctactgaacatgaaataagagaagttgtggtcatacagccatacccctcgatgcaaaaggaagactagcagttgcatagtgggaactgggatgggtatatttgaaaataattcgacattgtaaatcattatcaacataccaactaaaaagcaataaatgagtacatttttgtgcttccaaaattactgttcatttttttgcaacttaaatttttattcatgttcaggtggaggaattgtattctttgg

SEQ ID NO: 108108 - DNA, 512 bp, Aquilegia coerulea
  Intron number 1 from transcript AcoGoldSmith_v1.006805m (l ocus AcoGoldSmith_v1.006805m.g) derived from phytozome v7. 0 (chr-ID scaffold_30; pos 1049341 to 1049852)
aacacaagaacaccaaattcgagacaggtagggggcaaaaccccatcttcaattgtttgttttaatgtttctttgtttctttgtttccttctcttatgttttcttcatgttactattttgaattgttgttgcttttgctttcgtcgtcccctttgttttgatttgggattatttgtagctattcatctctctctctctctctctctctctctctctctctctctctctctctctctctctctctctctctctctctctctctctcaatttgcaatttggtaagcttttgttgttaagatcaatcatcaatcttagctttttttttcctgggctttttgtttttcattaagtagattgtttttattgaatctgtttagtttaccttcatttattctgatatgggaatcaatgtgtatgctcttgttcttgtcactttatattcctttatgattatttattaacaaatatttgtacttgtttgtatttactatttagtaggaagaagataaagg

SEQ ID NO: 108109 - DNA, 953 bp, Aquilegia coerulea
  Intron number 4 from transcript AcoGoldSmith_v1.006805m (l ocus AcoGoldSmith_v1.006805m.g) derived from phytozome v7. 0 (chr-ID scaffold_30; pos 1050702 to 1051654)
acaagttacactttgacccaaggtagaaactctccctattttttcgatgtgattctcttattcatactattctttgtaagattgacttgtacgttgggctcacactcagatgaattttgtttgtttaggtgaggatgattttgtcattatatagagttatagaccccctcacgaattagtcagtgtctatggaaatctaatcctattagacgggtgtgacatcatacttaaagagttaaggactcgaggtgcattggcatatagttctttaataattagtctgattactaaagatacacaaagaaaatagaattacttagtatgtgtgtggaattgatctcgattatgaggtgaattgtgttcattacttttttcccatgtgtaataaccgtctattataggctttcatatttcttagttaaaggctattataaaagatttatggactgtgtatgtcaaaagatatcaatactgtcagatttacaggtttagtagaccttgatgtttgttaaatatcgggaaatgaggaaatttttggaaaatctttgaaggttcaagaaatgaatatcttccagaccagaccatacaaatatacaatagtcattgctacagtcccagaacatcttcatgctaagaaaagttattgctacgatcccagaacaactttatgataataaaagtcgttatataatatcagccaagtagcttggtattctgattcatgtgtaacctgtgctgctatttgatgaaatttatgcaacttatatcagatggtagaatcaaattagactgagcccagatgttgcgctatcctctgtgtaactaaattataggaataaatagttgattgccagatagttatcaagtataaatgattgggtattgtgaagaactcttaattggtttatttgattttgtatgcagcaagtcagattgccgattattggctactc

SEQ ID NO: 108110 - DNA, 694 bp, Aquilegia coerulea
  Intron number 1 from transcript AcoGoldSmith_v1.007944m (l ocus AcoGoldSmith_v1.007944m.g) derived from phytozome v7. 0 (chr-ID scaffold_9; pos 5383984 to 5384677 reverse stran d)
tcccacattgtcttgatttcaagttgcattattgtgtaggtaggtttgatttgttgtgtttttttgaaataataagatgaaatcaaagtcttgatttgatttaaacatcttgaagagtattttgagattatcagagtatctttactagagtactacatcaaattgcattatttaggcaatgtattgatcaaggtgtgatgtttctgtgtaactagtaatctgcacattgtttcccttaggtttcattttcatcaactatttgtatgagtttcatagattgtgagtgatcgtggtgattgagacgtgcagtcggggttttcttttgttattttgtaatttaagtactatccgagtgctaagggatcaggggttatccttgggattaactgcattatagtataccatatctgtcaaacaagttcaattgttccacattattgtgaagtacagaacaaacaagattgtgtaaaaaatatctctttcagtctttcatcaatgtataattatttgattattgccatacatgatactttatgctctattagtagctttaacttattaaccttataagtttcccttgcttaattatggatattgtaaatgttattgcaattcttgggttaatgatttttaggcttcttatatattcactggtttttcatatatattattcagcccaacattcaaagttgag

SEQ ID NO: 108111 - DNA, 201 bp, Aquilegia coerulea
  Intron number 2 from transcript AcoGoldSmith_v1.004519m (l ocus AcoGoldSmith_v1.004519m.g) derived from phytozome v7. 0 (chr-ID scaffold_7; pos 5259896 to 5260096 reverse stran d)
gaaggtaatggatttctacatttagggttggggaaactgtatggaaattttgattttcaatatttgacacacacaacaatctcatcgaaaagaaaattaatttgattaccattaactttttataattgaacttacttcaaatgtattgactattgggcaaagtatgtaatgcattattgtttgtttgttaattttgtgcag

SEQ ID NO: 108112 - DNA, 656 bp, Aquilegia coerulea
  Intron number 1 from transcript AcoGoldSmith_v1.016400m (l ocus AcoGoldSmith_v1.016400m.g) derived from phytozome v7. 0 (chr-ID scaffold_28; pos 637824 to 638479)
cggagcctacaactgacagatttgtggttgttgtaaacacttccatttcttctcacagatgcatacataaatccctctttaatcttcatgaaaaagtaagattcacaaaggtttatactcaaggagaagctctcacgaaatactgagtacatgcttgacaatatttgctttcctgttgagataatgattagatgttctgaaaaccaacattaatttaagatcaaacatatgcaactatgcaagggttttcgaaaaaggactttgtgtatcttagaaaattgcagaatatataaacatttttctatgatctcttttgaccagaagatagtatttcagtgagtttgcttcagaatgctctatctgacctagctaccaaagctaatatgtgtttattgtcttcatatgaacagctgcattactatagcttttgacacagtaatgtcaggttaaataaattttgtagtgtcagattgttctttgccatttagattgttctttgccatttagattttgtagtgcataaggattttagaagttaaataaataacttttcagcttaatttggtttgcatctattgcgttttttccatcttttctttatccatttcaccaaatttgtctcttggccatgacattttcacctcagtcaggaccag

SEQ ID NO: 108113 - DNA, 486 bp, Aquilegia coerulea
  Intron number 2 from transcript AcoGoldSmith_v1.022770m (l ocus AcoGoldSmith_v1.022770m.g) derived from phytozome v7. 0 (chr-ID scaffold_96; pos 509667 to 510152 reverse strand )
aaaccgaagaaaacttcttgaataaaggcatccatgtaacttattattattattgtgttttgttttataattgttgatgatatttggatgaatcgaatgatttgttattgaattgaatgattgatatattgatgttcaggtcactggtttataggttttttaatggatgaatatattgcagatttttcatattgtgataaacattgtagttggattttgattctacttagttctaattcttcttctgttgtatctgaatgtggaatttcattctttaaatgacgacactattagacaggaatgtgatatctcgctgtgtaatatgtttaatatgttactaaagttgtggatgcttgggtttgaattaaattccttgttaaatactagcccctctatgagtcatttctagttttggaggttggactttttattacatttgctaaataattacaatgccctcttggtatgtttcaggttgctaagtag

SEQ ID NO: 108114 - DNA, 506 bp, Aquilegia coerulea
  Intron number 1 from transcript AcoGoldSmith_v1.026086m (l ocus AcoGoldSmith_v1.026086m.g) derived from phytozome v7. 0 (chr-ID scaffold_69; pos 72172 to 72677)
gccaagcctataggacctgtatcagatttgaccctttctgccaacccaaataggattggttgatgatcacatgcccccgatacatatgactaccaaagacacctggtagtatttttaacttagggtacgcatagataggtactttgatattaatatatggtagatatcatttggttgtggtaaccacatttttgaagtacacatctcgttgtaaaagaagaattaaaacatatgaatacatttattatcgaacacttacagaagatcccaaaatctgcattttctatttcttaagttttttgcaatatcataggttttatcagataaacacgaatctatccaaattaattattacgtaaattgggttctattagataaacacgaatcttacaacttaatagccaaaacatttgtagacccacacattacaatatatatgtatggcatctcacctcttcctttttgttaatgattcagagaaaaaggaaggcgtggaaaggtggtgt

SEQ ID NO: 108115 - DNA, 614 bp, Aquilegia coerulea
  Intron number 1 from transcript AcoGoldSmith_v1.009057m (l ocus AcoGoldSmith_v1.009057m.g) derived from phytozome v7. 0 (chr-ID scaffold_9; pos 3604246 to 3604859)
aacgatcttcttacggtaagtattttgtagaattttttttttttaggtttttttttgcaattttttttatgatctataactgtttacgtgtttggtgagattgttataattcgaatgcaatatttgagttaattgactattagagttagattaataaggctatagtgtgattaattagaattgtagaaagttatagagttggaagattgattgaatctgtaaaggatgaaaacagtttgaaactttagtatgaaagaaagagtttattgtgacttaaccttacagcattgaggctagagaataaagttcagaactattattatctgtatccaatcatatgagcagttatgatgatgagtagtgaagaacgacatattattcttttcaacttcttcaatggatgatgagtagtgaagatggtgtatatatttaatatagtggaaaccatcttgactataaatctctctcctatgaactttcaagtgtcacttttggggtcattgtatctaatccgtggacagacctcttgtgtgtgtctagttggaaattgttatttgatgctttggctgtgttttccaggattcttttgagatccctcgaggtcaagcttcaag

SEQ ID NO: 108116 - DNA, 740 bp, Aquilegia coerulea
  Intron number 1 from transcript AcoGoldSmith_v1.024509m (l ocus AcoGoldSmith_v1.024509m.g) derived from phytozome v7. 0 (chr-ID scaffold_54; pos 257520 to 258259)
aacttggtcgaggaggttttgggactgtttacaaggtatgtgaaggtttttgcgaatattattttctcaatagtcagaaaacatgagttttagtttacttggagaattgtactcagtagaagattgaaccatcattaacaatagttttttttatcagatagattgttcttatattccatatttggtccatcttttcttctgaaatgtgagactttgaattagacctttaaaagatccaaggaacttcacattgcctctttttagactcccagaaatttgaggaagcagagtaggcagctaacttcaaatttctagtgaaggattattatccctttatatcaatactaacagttcttcatgtgatttacagtattctgtaataaaattctctgaaaatatggatcgtgtttaagctctctaagagtgctggtctgaacctatacacttgatcatctcattggtatccctgtataatattttcttgttagcgtatttgcttcttatgaatcctactgttgaatccattacttttctgtgatagaaatccaaacatgaatctagaagttaatccaaatatgtttcatggaatgactgaacattcttccaataattttgcatttcagcattagtattggggttaagacaattcactatgtaacgaatttcattttctttagttattttttggggtgtagttttacattgcctcgtttccttttttttccagggaatcttaaaaa

SEQ ID NO: 108117 - DNA, 468 bp, Aquilegia coerulea
  Intron number 2 from transcript AcoGoldSmith_v1.005221m (l ocus AcoGoldSmith_v1.005221m.g) derived from phytozome v7. 0 (chr-ID scaffold_54; pos 1559519 to 1559986 reverse stra nd)
gcttacaggttgggattataaatattaaacattgtgttcagttcatattcttcaactaacttagacttggtaacgttaaattttgttcaaggtttagggtttaaagcatatgtgttatccatgcccatgttcttgtattgttaccttttagattgacgagctcttgcaaacaggttgttatgtggttataatagcatcacaatgatgggttgtcgagaacttgtatcatcccaatgatgaggttcataatggctgtattatagttacagtctatatattgatggcatgtctagtattaatgcaccagtcacccagcctggtggtaaaagcatgtttgactactagaattgatgggaccactagctatcgaaccaaagattagttaattttttttgtttttcgcatttgacatacatatttgcatacatattcaactcaaccaaccttaaaactgttgtgacagtataa

SEQ ID NO: 108118 - DNA, 808 bp, Aquilegia coerulea
  Intron number 2 from transcript AcoGoldSmith_v1.019600m (l ocus AcoGoldSmith_v1.019600m.g) derived from phytozome v7. 0 (chr-ID scaffold_9; pos 6308062 to 6308869)
atcgattgaaagaggtgatttgtttgctaatttctattttctattgtagtcactagttatgatttggtttcagcgatatttagcagtgtttacagaagatatctatactaaaaacaaagacacagatatattgtatgttacttgcatttagtttttatcaaaagaacttaaatgaaggaatactcataaataaataaaaaaaaaagaataactaaacttgagttaacttggtaaagaagaatccagagagtgcattcaccttcactaagtatatcatgatggtgatgtctcctttcttggtatttatactatgtggttggcagaaaattttcacaattaaagttcaatgggaacacaaagagtgtttcagtgatttttgtttatgatcgcgagtttatgattgctaattaattttaatactactatctaagtaaatttaaaacttatgttacttgcttttatgcgtcaaacttaaaagccttatatttaaaacttatgttacttgatatggagtttggattgttatttgaagtcgtgtgagaggaatgatgtaactgttagttgcatatctactaacctaaacaatggtatacatcatgtaatataataatgcgatcatgcattattacatttctggttatcctgtgggagtcactgtgtcacacgagcactcatttctttcttttgcttttctaatacaatttcttcccttaaaaccagggtattagtttgtgttgttttattcatctttattcctaactcatgcattatctattgcagattcgtgaatatcatagacgacatccaa

SEQ ID NO: 108119 - DNA, 771 bp, Aquilegia coerulea
  Intron number 3 from transcript AcoGoldSmith_v1.007146m (l ocus AcoGoldSmith_v1.007146m.g) derived from phytozome v7. 0 (chr-ID scaffold_27; pos 1499006 to 1499776 reverse stra nd)
atcattgtcaggtaactttgctttgcgctatgaaaagaatgatttacagtagagtaattcaaaaaattttagagttgcatattgaacagttccaagtaaaaagatcctattgtaatttgagtatttgacaatttacacatagttagacgatgaaagtgccacaaaggctagaaaaacagttcttaatataccttgacacaaatgatgaatcagatagtttgcataacaggatgtaaatattaataagggatctgggaatctggcaggggtctgccttaggaaaaatctatggagcgaaagttggtaaaaatcaagacgtcacagtactcatgatacttctgtatagattaaggccacttacaattggtgtcctgaatcgttttttatatcttatattttcaagttagttgacattgcaagcaatgtcatgtatacaaatgttgctcacctcagtttttttgcaatttctataaaaaatttcctttgtattgtttgaaaagcctgagacgagtagtgttcagtgctctagtacacttgatttttaagcaagttagaagtgtaatcatcgtgaactacttgtggcaagcaacaaaaacatgcataatttacatatgagcaagagattatgtttcagttcattataatgtgttatttcttcttaaacagttttaattatgtaatttacaatatatatcatggattaaaatatacatttcctttcttcctctattggcagtattttctatatcaattactgcgaggactgaaata

SEQ ID NO: 108120 - DNA, 942 bp, Aquilegia coerulea
  Intron number 1 from transcript AcoGoldSmith_v1.006719m (l ocus AcoGoldSmith_v1.006719m.g) derived from phytozome v7. 0 (chr-ID scaffold_21; pos 3818567 to 3819508 reverse stra nd)
ggtgacgcgaaggtaattattagtagttttccgatcgaacttgatgttttccggctagatttatagctcttcttgttctttagttttgaattcatttgagcagatttcttcgagattgagctggttttcttagttctgagttgattttttctgtaatttgttttctattttgtgtgatttcttttaaatctggagtttcttgaggtttctttgtttcaaattaatttgcgaatagtaatagttttgtgaaaagtttgtaatatctggctttaaagtgagcttcagtttgcttgttttagggtttttaaggttcgagatctcttaaatgttagctaaatgtattctatttgtagttttaagtgattctaggcataatcagattctatgcttttttgctttattatactatagttctatttcttgtttagaggaattgatttgatttgatttgatttgaattctactttactttattagatcttcaagctttttcacctttttgttaatttttgaaatttaattataatttcaagtatgagctcaagtttctgtttcttggccttctacgttgcttggttgcttggttatgacggttatgattttagcacttttgcaagcttttgtgtgacttgttctttagtcttgtcttggtggttaatgtttgattctttcttcatttctggggcagggatgtttgtgtcatgtttctttaaaactatacttaaaaaggactttgttttaggattatgtattgtgatttcttctttccgttatttttgttctcctgtaattatgtttgagctcttaaagtactaactactatggttagttgtcctcttttgctgtgtaacttagttcattttaaccataataatttggcatgtaacattatctcaatccgttcaattatgtaagtgcaggaattgaattcagcttttgtcg

SEQ ID NO: 108121 - DNA, 663 bp, Aquilegia coerulea
  Intron number 1 from transcript AcoGoldSmith_v1.019367m (l ocus AcoGoldSmith_v1.019367m.g) derived from phytozome v7. 0 (chr-ID scaffold_11; pos 3343944 to 3344606)
acctcagagctaaagtatgtatcaaacttcttcctttttttagtacatgattatcttctagtgtcgacatttatctatggctctctttatctgtttagtttatctcgtgtttattacagattttggaaatttagtgaatttttttttataaatcaagtttcaaaacttagtaatactacttgatgctttttaaggttgtgtttggcattgcttcagtttaagtacttaaaaagtcaacataagcatcccaaaccagcttctgtagttctgataataacttactaaagaattgagagaagttccaaaatgtgtacattgtggcgtattctattaactcataagaaatagaagctcgaatgtcgagcaatttctgttaggctagtcagacgttacaagctttcatctttaaattatttcattggatcattgtctgttatcaaatttcaaataatattggttgaacaagacttggtgaactactgagctgagcctgcgatttgattattggttgagtctgtgaactcgtaattttttcattacgaataactacatcttccttatatttttgttcttggttattaattttgaattcttttacttattttattatcattttataaatattaggaagttgaaagtgtgcatggtttcaacaggtcgtag

SEQ ID NO: 108122 - DNA, 521 bp, Aquilegia coerulea
  Intron number 2 from transcript AcoGoldSmith_v1.015929m (l ocus AcoGoldSmith_v1.015929m.g) derived from phytozome v7. 0 (chr-ID scaffold_6; pos 3470887 to 3471407)
tgatatatattatctttgctcccttccagttcaaggtttgagttcatagcatgtaaattgtaagaataatgcgtactgatatcaaaccaattttatgacatagttcacaacatgagataatatcatcactgcgctgatttatttgaaactattatcaagtccagaaatcttatttgtggattttactgaatctctgtgccactgttgtaatctgacacttatatcagcgtcgtgcaatacagttgtttcaatataaggattaagtttgtagaaagtgaatactacatcaatttatttgtttagtaggaaaggaactgataaaataatcaagcatcatgagtttctggcttgccaatattattattattttttcttattctcttctctgtttgtgttgatgtggcttcttagatgataaatgtgtagtttcattgtttatcaacaccttttccagcaagaacatttttttggcaggttgtctaccactgactcagcatatgtctattgttcaggtgttataa

SEQ ID NO: 108123 - DNA, 859 bp, Aquilegia coerulea
  Intron number 1 from transcript AcoGoldSmith_v1.003396m (l ocus AcoGoldSmith_v1.003396m.g) derived from phytozome v7. 0 (chr-ID scaffold_54; pos 1195533 to 1196391)
ttggtgtttctggtgagtagaagaagtttagatctttgtgtttttaggttttttgttgttgtttaaaatgattgaaaagttgaaacgttttcaaatgaacatgcttttgatttggtttaaaatgactcgatttaggtcatttaacactgtttatcaagtttttcttagatctgattagatctaaagagaaaggaagagtgtttgatttggtttctgacttagatcttgttgttgttgtttggcgggaaaaatcaaatgagacagttttgtaaatcagaatgaaatttgtttttttttttaaattggaaagaaagttttcttgtttttttcttccaaaagacataaaataagaaaagaactccaccggtctgaaatcccagaacataggaaagtatgtcctaatgacgaaaatgcccttgtcttgttcatttatattacagcaaaacgagaaaagcaagtaacctttcaatattatattctcaactaacatcatgatttgcacagttaattcaaactttgttctatttggatatctcaacaagtctatttttttagttatcagagaatcttctctctttatgtagtttaatggtgttacacgacttacttaatatagtcctcttcacatgaaacgtcacatttttgtgaaattactcttttacccttactagagcagatgcagtgtgaaattttttaatttctgatctgaagagataaatttgaaattcatgttttgattgaagctatggcttgttaaattaatatacttgttaatataaatttttaatcatgttttggttgatattactgcttaattgatcaatgtattggttaatctgttgaagggggtgtgacatcc

SEQ ID NO: 108124 - DNA, 631 bp, Aquilegia coerulea
  Intron number 2 from transcript AcoGoldSmith_v1.010316m (l ocus AcoGoldSmith_v1.010316m.g) derived from phytozome v7. 0 (chr-ID scaffold_133; pos 29669 to 30299 reverse strand)
aggaaagctgatattgtgcagattcagtacaagaggtgagaatgataaactccaataagaaaacgcacttctttgcacatttgatgaatgaacaaaacaaaaacaaaacaaaattgtttatttagttttgaacagggtttgtcataaagttagggagcattttgtttatgccaaatgttttattattgctacaacagtgatcacttataagtattatggtttctagagcatcctgttaaggagaaatctgatgaggtcctctgagctagtgattcagattgccttgcccaggctgcaatgcttgatgcccctggttcaagatgtgcaagcttgcccatgccgcaataccattatgctgcacaaactaatatattcttaacctaaatcgacgaaggatctaaagcactaattacgcttaaaacatagactttttggaaaagatgtcactttgattaaggaatcaaccttgcatctctaggataggcttattttggtatccatcaccaattcctagttggttaatggtattgatcaccatgtctggcaactttctactcccctagtcccctttctagaaagtaatcaatttgtgtgcattttgtgtagggtgaactgcgatagaagtgggggg

SEQ ID NO: 108125 - DNA, 668 bp, Aquilegia coerulea
  Intron number 3 from transcript AcoGoldSmith_v1.004764m (l ocus AcoGoldSmith_v1.004764m.g) derived from phytozome v7. 0 (chr-ID scaffold_49; pos 667638 to 668305)
aaagtattgtttttattgttgcaaattatacatagtttatgaaatacaacttgttttaacttttaacatgtgcttgcctgtaagagaaagatgaacgtctacttgttgaaggtttctttgaggagctaaaattagggcctactttggctccagtttcatgattgagtatataaaactatatagttgtagtgaaattttcccatagcgtctccatatcttcattcctccatgcacacaccactcaggtcactctgagttggttattcatatgtatctcaacattgcatatgcataaagttgttgtcacatgatggcctcactaccatattttcactcagctccccattcacatgatgtccaatcttatgaattttcactcagctcaccattcaaatgtttatgtattaagcatcagaagaggatataactaacatgaaagcaacaaaaacatctaatggtaaaattgaagtcttgatcctcttagtagccttatttgtttgagctgattagttgtagactttatcactcaatttatcaggattatgtgtatttttgttaacggtgggtctaacctagccaaatcagtcttttgcactgacttacctgaccgccgaaaactgcaatatgaataatttgttttggtgttacaggtgagactcctcttcttc

SEQ ID NO: 108126 - DNA, 402 bp, Aquilegia coerulea
  Intron number 1 from transcript AcoGoldSmith_v1.008340m (l ocus AcoGoldSmith_v1.008340m.g) derived from phytozome v7. 0 (chr-ID scaffold_10; pos 1801800 to 1802201 reverse stra nd)
tcatccggttgcactttcacgactgtatcgtgaatgtaattttcttcatcattaccctttatatttttattattgagtaattgcaaaacatgagcctacatttaaaacagtcagtaatatatgcattatggataccttcataaactcatatatattaatattcaaatcaatatgataattactttcggataagaaaacaaaatttcatttggtgaaagatttagtaacaataacaccaagtcaccaacacacttcctaagcatctgtaaatctatttgaaagaactgtattcctagctttagcagctgaaaatctgaaataaaaccctagtatttgaatgtaagcgcttgttctttaaaaatatactgctgttatattggtttttgtttcctttgagtaggg

SEQ ID NO: 108127 - DNA, 864 bp, Aquilegia coerulea
  Intron number 1 from transcript AcoGoldSmith_v1.009671m (l ocus AcoGoldSmith_v1.009671m.g) derived from phytozome v7. 0 (chr-ID scaffold_11; pos 2136752 to 2137615)
cacatttcaaggtaatgcatctgtcaaccatatagtatttagattcacatttccatgttgatgtggttgctccaaatgttttcttttataatacagtagttggattgaatctgaacaagaattagtccatttcgttttcgatattatatagttaattagctcatttcaatgtagaattgttccttaaaattaaagatgttggagattgaggttcagaaaaactaaataagtgtctttatttgatcaattatattattgcaatgtttaatagtttgaagttgattgctgcaaaaataactctacaagaagcaaattaaaaatggtagagagtaacttaaattaatatggttcacacgggttttcaccttgttgggggtgtgattcttccaaaaccacatacggagctcaaattcaagtaagtactttggtagtggcagcaatgatttatcaaggacaatcacctacctagacagagctgaaggagaggtaatggatgaatctcaattgaaagcacattggatgggaatggatccccataggatcgggtgattgttgtctgtgtgacagtgatctgtggtctgctaattagcttatgaactaccactttattcattaattcttttcttttgcaatgatctggtgctcattgggtgaccatcatgacgaaggggattatcgtggtcaaaattcagcagctaattctgtgccttatttctttggctgaacttctgatgttgtttctttaatttactaactgaaacttttgatttgaaattacttattagagtagtagtggggtttatatagtgatattgaccaagttatcaatgatttagtttcttgttgatgtttttatcctgtagg

SEQ ID NO: 108128 - DNA, 528 bp, Aquilegia coerulea
  Intron number 2 from transcript AcoGoldSmith_v1.015790m (l ocus AcoGoldSmith_v1.015790m.g) derived from phytozome v7. 0 (chr-ID scaffold_1; pos 5080346 to 5080873 reverse stran d)
accaccaaatacagacaaagaagctgtaactactggtaaaatccatgtgattgtttgtactcctgtggtgtaaacaaagcacgtactaaggcctcattattactggcaagaaattaatgaaaaaaataaaattatacttaaatgaaagaactaaatagacttacataaatcaaatatgtctagggtattggttacaaaataaaacaaataaaataagagttattttgtatttggtccctctagaagacggataattagcatgtggtatagagtttttagtttattagtgtttagtcctatttctgtcagttgactgttagtcaatcagtttgactgaggtcaaaccatccattttttttaaatacctataataccatttgatatgaatttttataaaacaaccactagatatatcatcatctatgcttgatccaatgatccaatggttgcggtgtctccgtcgccgcaaccaccaccgacaccaacaacacagaaatccgtggtcttgttgcttgtggaactggtgtt

SEQ ID NO: 108129 - DNA, 722 bp, Aquilegia coerulea
  Intron number 1 from transcript AcoGoldSmith_v1.010274m (l ocus AcoGoldSmith_v1.010274m.g) derived from phytozome v7. 0 (chr-ID scaffold_30; pos 2382657 to 2383378)
gtcttccttctcattgttctcactctctacttcaggtaatttaattaattataattttctccaaaaacaatatctcttgggttttcttaatcttttcatcttcttcaatgggtatttcatatttttgctttttctacaacttttcaatgggtttttcaaattattgcattttatttcattacttttctatcaactcttcaatgggtagttgagaattctcttattcaatcatttaaatagcttttaaaattattatttaaataaaagttttatctaattatggttttgtttttcattgtttcttcgtctgatatagattttgtttctttccacttttagtaaaatttcttttgcatagttttttctgctctgtttctctcacctgtagctttcatggatagtgaaagtttgacccaatttcctaattattattaacaaaaaaatatttaattaccaaatctatatatgtttcttgagatcaattaaagtttagtcagctaacattatcttttttggtaatttgataatttacaatgttacccctcccaagtatcaaaaaattttgattgcttgcattaaaatgtgcatagcttgataaaaatgtgtttatactgttactaattgtgtatgtgaaaataattatcgaaatgtttgcgttatgcgcaattgcgaaggatggcagcaatgtaatgttttgttctttgtttgataggtgagacgat

SEQ ID NO: 108130 - DNA, 569 bp, Aquilegia coerulea
  Intron number 3 from transcript AcoGoldSmith_v1.002384m (l ocus AcoGoldSmith_v1.002384m.g) derived from phytozome v7. 0 (chr-ID scaffold_10; pos 1122462 to 1123030)
cctaaaattggagttctgaaaactctcagcacactgtacgtaataatctaacttccaagtctctcttttttctcttttgcctttttcctggtgaaagtagcatatatttatttctgtgccaaaacaaaactgaagagatacgatggtatattgttaaatagagtatccctgcacgcaattctgtggatcgactggagtgaaggaagagctaatcatttacgagcttagaaattaaagatgacaggggaatacatctttttgctgctagccacaaaacgtgcagccaaccaaacaagagaatcatataatcattaaagaacccctagcgacacatgctattataaagaaattataatataaaactttctaagtaggtgttttttctgtactctacaaattttgattgtagcatgtaattccctttaactatcagcgggtgtattagctcaaataccttctatatttccttgtattgggtccagttatttttttgctttctatgcatgatacttatcagttgcttaactcatgcagtacattgcaaggtaacggcataactggtgagatac

SEQ ID NO: 108131 - DNA, 656 bp, Aquilegia coerulea
  Intron number 1 from transcript AcoGoldSmith_v1.026253m (l ocus AcoGoldSmith_v1.026253m.g) derived from phytozome v7. 0 (chr-ID scaffold_18; pos 1245907 to 1246562)
aacacccaggtaatctagatgttaatacttaatacctatactctaaagtctatggttgatggacctgatgatcactatttgttatactgttaatggaatactaatttggcatcatgcattattattattattcccaaatgagtaattaagacaatcttctccatgacaatattgttcccaagtgaggtctagtcaatgttggacaccatgatcttgataagacattgagaattatatgataatgtcaagtggagacagttttcctacactatattctaaattattatgaatataaggaatattttttttttttttttttgatagaaatataattttcaacaggtcccaatcccaccacttaaaaaaacactttgaataaagcttcaataatcatatatttcagaacttttcatattgcctatttaagaaagtaatcatgttgtcttcatgcttaatcttacctctaaggccttttttcttcaaaagatgctgattactttcgctaattcatgtcccaatcaatgagatttgggtcctggaaaaaaaaaaaataaataagaaaataaataaagcaaacaaaacttactgttctgtcatttctgaggaaaatgcatggttgcgaacaacagaacgaataagaaagggtggtaacgggg

SEQ ID NO: 108132 - DNA, 692 bp, Aquilegia coerulea
  Intron number 1 from transcript AcoGoldSmith_v1.006089m (l ocus AcoGoldSmith_v1.006089m.g) derived from phytozome v7. 0 (chr-ID scaffold_1; pos 6135197 to 6135888)
tctctgtcaagttttcagagaaagaaagaaaccaggtgggtgggttttacagtttgaacttaccattttcttcatcattctctgtttctaattccacttgattttgacccatttctttgcattttttggataaaaacttgcctacatttgccttcaaagtctatgtttcagccttttcgatcatacccatacttggattctgttgtttcagagacttattcatgtaatttttaatttgggtttttttctacttgcattttgggaatttcttctacttgggttctttcaatcttgactgaaaacagtgttttgtgtttggattctttgaattgagaggttttttttaatacattaatggaaagttttaatttgggtttttctaattctagtgctttcaatccctttttggatctgggtttttattaataattcatctcttgttaatgcatgtttagattaatttaaagtgttgttgttgatacatgcatgagtcttaaaaaccccaagtttcttaattgatttcagtttctgattctcttattaatctatctataattccatcaaacatttgttttatttataaatcagtagagcttattatgtatttgggcatctcaaggttctttattaattgttgtattgttgaatttattgcagaagaaattttctggtttttctaattgaagaggatt

SEQ ID NO: 108133 - DNA, 749 bp, Aquilegia coerulea
  Intron number 1 from transcript AcoGoldSmith_v1.005028m (l ocus AcoGoldSmith_v1.005028m.g) derived from phytozome v7. 0 (chr-ID scaffold_37; pos 524592 to 525340 reverse strand )
gatctttgaagtttcagatcagagtgctcagaaaggtatgtagtttagtttgttgcttagatttgagtttgggttttgtgggttgttgtaagaagattaatggaattaaagtatagtagttcaaatgggaattttgagaaacactctttttttaatgatttgtttattgcaaatttgcaataaggttggtcatgattgaatattatttttattatttacttgagggtattgctttatcatgagtaaatgattgatgaactttactaaaatactcaaaattgggttttagaaaagaaatcattttgcactcagtcactcaaatgtgttccgtatgaaaattaaaaactgctttttatatgttcagcttagtttttggttcatgattgatggctatggagcgaaattaaaagatgattgtaggaatgtagcaaagaagtagatatttcacagaaaattgggctttttgcgaagaagatattgctctatctgtttcaccaatttcaacttcctttcagagaaaatgtgggtttttattgagtgtttttggtctttattgggtgttagtattactagttgaactacgttgggtcaatgatggatggttcttgagaggaatttgcactcaggtttttcatttcttattagaaatggatttgtgagaatgaattcaagatctgtgtattccttattgcacctcctttcccttcttatgtgaaggcttatatgcttaattatgctaatgcagaaaa

SEQ ID NO: 108134 - DNA, 743 bp, Aquilegia coerulea
  Intron number 1 from transcript AcoGoldSmith_v1.000486m (l ocus AcoGoldSmith_v1.000486m.g) derived from phytozome v7. 0 (chr-ID scaffold_72; pos 1187668 to 1188410 reverse stra nd)
gtcttaggtttgcaactggtggaggagatcacaaggtaagatttttaattattttttttattcatctgggtgtatttaattttactttaattaacttgggttcttcttaatttgtatgtttagttgctataatttaaaatttctctacaccagattttgatgcttaaacacttctggttttctgaatttgcaaattttacttgtcgtcggtgcttgtggaagctttataaatctcacattgttgtacttgttttttaattttgcattagtatgatgcatttaattaattgcttagaatttactagtctgacatctgaatcatgctcgacaaacatttacttgtgtaagcattgggattgtacttttttgtgtctggttatctgtttgggaattataattacagtatatgaaacttcataaaggactaaataaagtgtaaagaaagaccccaatataactgtgtatcataatctataattccgggtagtaagtaatcaagttgtagtgatgtatttcaatatttctgcttcatgctgttatttggaagacaatgaaggaagttaaatttgggtatcttggactacaaatttaggtctttgttcacatcaacattgcaccaaattggagcaacctgtgtagctacatgttataatgaaagtttttctctgcatgacacccgctgtatgagagaatcgtacttgttatgtgcttaattaatattatgcgtctgtgtaggtgcggat

SEQ ID NO: 108135 - DNA, 417 bp, Aquilegia coerulea
  Intron number 2 from transcript AcoGoldSmith_v1.015013m (l ocus AcoGoldSmith_v1.015013m.g) derived from phytozome v7. 0 (chr-ID scaffold_7; pos 5263985 to 5264401 reverse stran d)
catatctgaggtattacttttactcttttagtttccagtatttttataatagttcaaggtgtgtttactctcatgcatgcatgtcacagtttgttaaattttatatcacacaaatcacaggtcacaggtccacatcttcttttgaactttgttatgggctacataccacatagacttgttcaatggttccatccattaagcttcttggaattgttcatatttagcacataaaatgcagaaaaagtgacaatcaatttactgtattctgcaattttttgacgtttctatgcttcttgaattttaatttaattgtttttcgttattaattatttactattttaattgtttagattctctctcacaaggtactactatttatgtttatggttttgtaggcacagttcaaaaccataagaa

SEQ ID NO: 108136 - DNA, 551 bp, Aquilegia coerulea
  Intron number 1 from transcript AcoGoldSmith_v1.003152m (l ocus AcoGoldSmith_v1.003152m.g) derived from phytozome v7. 0 (chr-ID scaffold_1; pos 448908 to 449458)
caagttttgtaatagaaggtaacaagcctttactttaaagtttatactattcctttagtcagaaaaatccatggttgttctgttatattgctttcttcttgattactatgaatggagttttggtatcattttgattttggccttttaggggaaagttatgtggttatgagtattttctagcttatcatctaaatccagattgtagattttaaaaaggtaactatgatgatgaaaaaggcgaaaaagcgctttctaacaatgaaaatggactagaagtaatcacaagtgatttaatacaacaatacccaattgggcaattggggttttaattgaaaaataagtatattgtgaatttttcagtctgaagttatgtatttctatattttttcagaaaaatctgaaccacctcatcccctttaatataatctgtttaacttgatttttgtgtttctgatgttcaatgttctattagcttttgaaaattatcaattaatttgttttaatcttattgagcagattgactataatcacaaaagagagttgttgctgtt

SEQ ID NO: 108137 - DNA, 610 bp, Aquilegia coerulea
  Intron number 1 from transcript AcoGoldSmith_v1.002895m (l ocus AcoGoldSmith_v1.002895m.g) derived from phytozome v7. 0 (chr-ID scaffold_49; pos 168995 to 169604)
ggacaatagctattttcacaacaatctatcttgcggtaagatttgtaatcagaacattaatacaaatatattttagtatccatttcatagttcaggatactatctcgtatcaaattccaatataatgcatattttgtattgtttaattagtccattttccatttttcatacttaacatgatcgccacttgacaattatgaaaacgtacacttcttgtctattctagtaaatgtcctctccaatggagccttcaatggtgttcctccaaacccctcaggccataaaggaaaacgtatacagctttggacttcatttttgtaatctgtttttagtattttaagataggccaaccttttgtaaacaatcaaaactaacaagccatgaccttcaccttcttctacaagcattaaaaaaaactattactgtatgtacaatataaaacagactatacagcgtagaacatattcctaaaaatactcagttacctgaatatgggttttatacaagtgtcatcattcattttttgtttttaaccatgtagattgttctcagacataattgctgacttttggttctgcagggtctgacaggaataacgttgtgtgcctca

SEQ ID NO: 108138 - DNA, 654 bp, Aquilegia coerulea
  Intron number 2 from transcript AcoGoldSmith_v1.022678m (l ocus AcoGoldSmith_v1.022678m.g) derived from phytozome v7. 0 (chr-ID scaffold_9; pos 6064901 to 6065554)
gctcacgacatcttaggtaaatacattattcattttcttggtgtttactctcattaattagctatatatgtgatcccaagtgggcggtcattttaagtgtaaacaaaaaaagtgacaaaatgtttagtcactttctgtttaagtgaggttttttgaattgaattcttttggggataaagaagacgccaggtttgaatgtgcactacaaagtttgaatgatgtagctaggttagagtgttttataatttaaatgtaacaaaatcttatggatctatataaaaaagatcaggcacatgtggaccagctatattagatatacatacatattgacatattgtacatgtagctctcagcctggcaattttaggatctttgaaatttttatttgaatagtcatcttgcttggtgccaatgtaccatcagaaaggatatgttctgattgtttgaagattgaacataatgttatgtagtctcaggacaaacttgtaagcttgtgtgttatgatatgaaatgaaacagccagtacacaactttgcaacagtgtcaaccacagaaatttgatgaaacttgctcacattaatcatagtcatcattgttatagaaacaaacaaaaaaaacatagtgatgttggttgaattaattttcaggacctag

SEQ ID NO: 108139 - DNA, 625 bp, Aquilegia coerulea
  Intron number 1 from transcript AcoGoldSmith_v1.004991m (l ocus AcoGoldSmith_v1.004991m.g) derived from phytozome v7. 0 (chr-ID scaffold_9; pos 2324598 to 2325222 reverse stran d)
tgcctctttctcatacactgtaagtttgagtgttgagagttctctttcatttcatttcttttgggtttttttttttttcctgaattattatatttttgttttagaaaataggcttaagttactgtcatactggttttattagaacttaggatcacatttgatacaaatgcaatacttagaaaattttcttgtgtgacaaactctgaagtttaggtattacttgaagattgattgttttgtttgtgcgctattagtataagattgatctgctatttttatccaatatgaaaacagttatgttttagaatcactcactctaattagtttatgtttgtgcaactctgaatttaaatagttcctttctggttacacttttcctttgatatgttgtcactattgttggagacttggagttggtagcatgattcatatgtacagtatctattttttttttttttttccgtgagattgattgttcgagtcttgctgcactttgtcaatatttttttaataattagcaagtcaataaatttaatcagaaaagctagaatttgtttgcgctaatagttcttgttaatttatgctttcagtggcacagacagaacaaacattgataatcgagcct

SEQ ID NO: 108140 - DNA, 1017 bp, Aquilegia coerulea
  Intron number 2 from transcript AcoGoldSmith_v1.025229m (l ocus AcoGoldSmith_v1.025229m.g) derived from phytozome v7. 0 (chr-ID scaffold_27; pos 1134889 to 1135905)
accagaagggaagctgctcttgttcttggtttaaggtaagccacagattatcaaatggatataaattacttcctgtggtattttatagcacaatggatgcaatgtagttctgattgctaaagacagacactaagtgcgtaatattattttaggtaggtctttaactttgtgtaactatgaaataaagaacttttcatagagccaaatgaaagtgaaaccagatttgatgagaatagatgataaaattacgacaacaaaattgttgtattccacaagtctggatgcttgtactttgtatgaatacaccattcagttctactttgtttcctgaccacagacatcttgtctattggcttgtttgtattgaactttgattataaactcatttaccaatctcgaacagaaaaaaccaagaaaaaattatatctgtttatgtcgcattcttctttgcagcctctacacacaaaagtaaattattaatttccttcttattgttcagcaattctgacagatcagttgcgcatacatttttagtgtccatgctgttctactgctctaaaacatatgttgtcgcaatcacatttgatgaagtggattaatgtctgtgtttgatataccactgtacatatagtgtcatttctcatcttcatcaactaactaccatccatcatatgccgcatccctagcgtatccagcatgctttctcttcatggagaacacaagccacaagtcgtcttgatttgggatgatactttaactgttataacttggcttatatatattcaagtagtccagttatagattgggttataagaattgtaatttataagcatctcaaaatattattgtttcagtatgttttactttttaaatgtggatactattacttttcttttaaaccaagtcagtaatatctttcatagcaccccaaatctcattttatttacacaatctttcgccaatgatttgtttgtctgttcagagaaagtgcaaccccagacaaggtcaaggaggccc

SEQ ID NO: 108141 - DNA, 533 bp, Aquilegia coerulea
  Intron number 1 from transcript AcoGoldSmith_v1.007779m (l ocus AcoGoldSmith_v1.007759m.g) derived from phytozome v7. 0 (chr-ID scaffold_9; pos 2138029 to 2138561)
tcaactctctctcatcagtcatcagacataagtaggtaggtaagttgttctttcttctgacctttttgaaacaattactttaatcattttattctaaaaatgaaattgggattttgaaattcgtgtattgaatatgcaaaaattgatacttattttgactttaaattgttaacgaatgttcatgttttttttttttttttttttcattttataatttataatgcatagtggtagactggtaagttatagcttttagtttgttatttgttattccattaatgaaagtgagaagagaattctatatctatggaggtttttattttatcaaagtatggattttgtttaatttttggatagaaagctaaaaaaataataaaaatttgtggtcacttttgtgttaatcatgatatgctttaatttttctgaaaattttcgattttgggcttatcaattgttgctgtttagttttgttgtacattaatttggatttgtgtgcaggttttaactactgtcttgcggtatttggaaccttg

SEQ ID NO: 108142 - DNA, 616 bp, Aquilegia coerulea
  Intron number 2 from transcript AcoGoldSmith_v1.000497m (l ocus AcoGoldSmith_v1.000497m.g) derived from phytozome v7. 0 (chr-ID scaffold_30; pos 1765840 to 1766455)
cagggacttggtgctgaaattggtgtgtaacctgtcaactctagtagctgtagactgtagatttttatttatttttattttgatatatcagtttagttaagaagatttatttgttgtatttgtatcattttatccgccttatcaaatgcatttgatcgttatttagttgattttttgtgtgtttttataaatggatggtcacctgtgcttgccattatcatagctagattgatttcttttgtgcttgtactttcattcccctaattggtgcatcaataatgttcaattcttatattatgagacacttaatctggaaaggatggaaattatctactgtcagagtttccaaataaccagaatttaaaagaggaaaatttacaaacggatgtattatcatgggttcatggggtggtctaggatgtatattagatgtttttatgtacttatgattaatgtccatctcaatctagaggtagccttgtgtgaaatacctgtttcagtcacctacattctgtgtcattgttagtgagattcttttaagcatctgctaatgatcttactacgggtgcttacttttgcagcaaagaaccttattcttgctggtgtcaaatctgtg

SEQ ID NO: 108143 - DNA, 956 bp, Aquilegia coerulea
  Intron number 3 from transcript AcoGoldSmith_v1.005511m (l ocus AcoGoldSmith_v1.005511m.g) derived from phytozome v7. 0 (chr-ID scaffold_21; pos 3791184 to 3792139 reverse stra nd)
gcagcttccacggaaactaaatcaggagcaggagggtaaggctctttcaattctttatttcaattgctaacgttagctactgatatacattacatttatttttaagttcggtagtactagtgcttcttattcaaatagattgtgtaaccgaatgtggggatttcctcttttgcttaaacgtttttgagtttacacatctcgatacacattacgtcaaacaacttttctagggtcaaaatgtggaaatgtacgctacaagttagttttacacattgcattaaaagtgcactatctgtaaatttctgtatgtaaactaaattgtttgctcgttaagcggcaaccttttaaagtcagtcattggtatgattattcattttccttttgccaaatatttgtgaactctgcttgattttacatagataattagatattactgtttcttattgacctgagtgcctagctaggtgagtgtcctctaattggggtatgtgataagaagggaagctttcttcattagaaggaagacaattattgtataaataagaaactgattatgtttgagacaccaaaaagaaaccttatataggggtagccgggtagcatatggtttcaacccatgctggtggatgatttctaccttaaatttttgtgatccttgttgaaaatcatggtctcatagtttataaatgcaagctattacaacaaagtctcaaccaagaaatgaagaagcaattcaaaacatatggcttcgagactatatctaactatttgtttacgtaataatatataaaaattaaaaagttgtgagactttaaggattcatggttttatttctatgttcttgtagattagggattagcatattcttaacagagagcattaagtatgtttgaaagtgaattttacattttattagtgtgtttgacaagtatttttgacagacgtctaagtcaagg

SEQ ID NO: 108144 - DNA, 338 bp, Aquilegia coerulea
  Intron number 1 from transcript AcoGoldSmith_v1.001709m (l ocus AcoGoldSmith_v1.001709m.g) derived from phytozome v7. 0 (chr-ID scaffold_54; pos 1166950 to 1167287)
cccatcaggtttaatttccaaaaactttctcatttcttatttttatattgatttcatgggtatgtttgagttcatttaggtgtaatttcttttgggttattctcatttttcaaaataaactttggattttaagtctgcttatatgattatatactgtatatcatttcttctttttaagattgttttgaaatatttgtttatattgattttgtatgaaatgttgacttatggaattaaaggtgtatgtttccgcatgttagaagagaacccctagattgttttttttttttttttttttgtatttgatgttgatacttgcagagtgagtttattgctga

SEQ ID NO: 108145 - DNA, 913 bp, Aquilegia coerulea
  Intron number 2 from transcript AcoGoldSmith_v1.018469m (l ocus AcoGoldSmith_v1.018469m.g) derived from phytozome v7. 0 (chr-ID scaffold_11; pos 1412702 to 1413614)
agacaacaaggttacattggagagaaaggtaaaaagtcaccattatattttttattttcaaacaagttattatgttttttagtatattaacgagaattgaaatttagtatactaaattgaacatatttgagatacctaatcaacctatgacagtatatgtatgtatgtttatgagttgtgaattttgatctaagggggaaggttagtggagtccgttgagaacagtgttttcttagtgttaagccatgattattgcgaaactaccccgttaaatatccaattgtagtttcatacctgcatatactctctctcccctcccacgaaaacacacgcacaaaaacattcagatccctgcctcgatcatgaattcccccaacaaaactttattgtgcttgtagaggtcctttgaatttttttgttttttttccgacaacaactatatgtgtatgctatcctggcctccacaagctaaactctttataagtatttaataagatgtcatcataggaaaataaattgtaggaaataaggttctcgctcttttgaaagtgaatctacaactacttatgtttgactcatgttatacgattcttctcatcttatatgcggctagcatattctaattagctttttcatgtttaaatgtgattgtacaactacttaatctcctctcgttgaacacgatcttctcttcttctatctggctaacagattctaatgcttaaatgtgattgccaactacttaagctccgctcattgaatacgaatcttctcttcttaaacctgtctagcagattttaatgaatttttcatgcttaagtgtgatttcacaactacttatgttccactcgtttcacaggaattggattcaagagtgtgtttctcattacgtctcagccatacatatttagta

SEQ ID NO: 108146 - DNA, 532 bp, Aquilegia coerulea
  Intron number 6 from transcript AcoGoldSmith_v1.004740m (l ocus AcoGoldSmith_v1.004740m.g) derived from phytozome v7. 0 (chr-ID scaffold_43; pos 143203 to 143734 reverse strand )
gatatctcaggtgctcttttttacctatatgacattgggttttttttttttttttttttattatgtttttgccagcctcttcctctttgttagcgcatacagtatcaaattagttgagatagtgggtttaggagttgaaataaaggggtttcactttagggtgtagaattatgtttcacatacacttcaatattcgtttatattctattttgagcagtggccttttaaccaacatacattattgtgcaccaatagaaaatatgattctgaacaagtattgcataagcacgcttgaaagtggcctcgaacactggtccatatatgccgttctcaattagagggatatgtgaatgaattcctatatacctagtggatgaatgcaaaacaaaatattgcagtaaatatctgcaatatgtggttcattgtaaaagttaatttctaagtgtcgtatctgaatttaatttttttgatattgataattttgagatggtctaaaatgtgtagatcaccagaatttacaagggaaaagaac

SEQ ID NO: 108147 - DNA, 740 bp, Aquilegia coerulea
  Intron number 1 from transcript AcoGoldSmith_v1.008949m (l ocus AcoGoldSmith_v1.008949m.g) derived from phytozome v7. 0 (chr-ID scaffold_27; pos 1153089 to 1153828)
cgagttgtttggagtattatttggtaataatcttctcattttctcacttttcgtacatgttgaatcagggtttttcttgtgagaattaacattcttcgttcaaattcacagtatgttgattcacctttagaaactaatgatttgcctttagataattgcaatctgttgatgtttttattcaaattttgagttcaaaatgcagtttaattgtatcaatatgttgaaactaagttgttttctttattttttttgttttgggtgtttttttttatttatgtttttatctatatttgcatcaaaagctaataaagttgtggatttgatattgtcatgcacaatatttggattaaactagaggctgcagagagaatttccaagaaattcaatgaagtagttgatcttttagttatttgtatccccactgaagagttttttattgtcttcttatgttcaagtttatttgtattgggtttttaactttttatccataaataagtttggtggttgctattttgcggttagtaggacgtgcgggattattagctcattattattgctgtactgtgttgtgaatacccaacttatcatcaaaaactacttaccgtcacttgtcttggacagttacactgccaaatcaaacacaaaatatagagaagatataagttctttttattattcctttgtacgtggcgattaactaggacttcttgtgttcagagttgtgagggaaactgttggtc

SEQ ID NO: 108148 - DNA, 776 bp, Aquilegia coerulea
  Intron number 2 from transcript AcoGoldSmith_v1.008949m (l ocus AcoGoldSmith_v1.008949m.g) derived from phytozome v7. 0 (chr-ID scaffold_27; pos 1153988 to 1154763)
caagcaaccccagtctccaaaaaaggttttgtttaaccttttgttcaacatccgggttttttttttattttcatttataactcactttgataagtgcaattgggtgcagatatcatgtgtattgtattggattgactgtcaaagaaatgcatagtgattgccgtacatattagtcttgggattactggattagggtttggtattgtcctcctataaatgtcattcaaataaatgggatagaagatatgtttcatcaagtttttcttgcagttggttgggaacatatcaatgttaattgttaacgaaggactgccttagtaagacgcaaggaaacccttcaaaacacttttgtaacatgtatttactttttaccaattttggccttttaacatgaagccaaattgctgtatacagcaaattcaccacagttacaaacgagtattctaacttctaaagcatgatggtgtttggtatatgcctttgtttattagggagtgcactttcggacatttgagttggaaaaaaacacacaagctatgttcagactcaaacttttacaattagttatacagaagagatgagagaaataaatttcaaaagttaaaataaaagaaagaaaaggaggagaggaaataaaggaaaagatagctcaaaaagaaactatatccgagttcaccactttttgaaaagttttcagaatgggggttttctttttctcatctgtcctaatcactttttcttttttgctgaattgcagtgcgtgcattttttgtcgg

SEQ ID NO: 108149 - DNA, 1005 bp, Aquilegia coerulea
  Intron number 1 from transcript AcoGoldSmith_v1.013875m (l ocus AcoGoldSmith_v1.013875m.g) derived from phytozome v7. 0 (chr-ID scaffold_11; pos 2256746 to 2257750)
gtgaaagtattcttcaaattcttgctgatgtatgttgttgttatcttcgtattattatgtattctcttatgcttctcactttctccttagctaattttttgtcagttccttaatcaaactagtttttagggtgtggtttactcattcccattattaatgtgaggtgaaaattagccacttttgccaaaatttaacaaaataacttaaaaaggagaaaaataacaggtaatttacgaaacagagacataacctattcgtttcaccgtaatattagacaaagaatcctgtggaacttatatttccaaaatgtagtttttctgaatacatataagaattaaacacggaaatcatcatagtattatgtgtggatacccttccctgatccttgactaactccattgttctcgttgctttatctcttagcgagaaagaaagtttgatgtaaagcccagttacctcaaaagcaacgtgattcacgtcttctgacgggataaaagcatagcaactctagagacatatgcaacacacatggagcttcttcttgatgggataaaagcatagcaatatgcaacacacatgcagtcccactaggaccctattataacacaacttaaagaacttttttgatgtcattaataagaccctaataatatataacaccaattaataaatattatagtactatcctcgagagtcgtatacttgatttcctgcatcaccactcgttaaattacaaaagtagtattctcaggaaactcaagtttgtactcgtattatttgatatacttgattgacggaatcttttaatcaggatttgttgctcaatgttatttacccatgaactttggagaccatttaatttttgtggatataatctcatagtggaatttgaaactaagaaattaagggctaatataatcctgtatatattactggatgatataggcaaaatacaaatataccttttcttttttttttaattatatatacaggttcattataccg

SEQ ID NO: 108150 - DNA, 779 bp, Aquilegia coerulea
  Intron number 1 from transcript AcoGoldSmith_v1.016337m (l ocus AcoGoldSmith_v1.016337m.g) derived from phytozome v7. 0 (chr-ID scaffold_28; pos 539563 to 540341)
gctgtaagttttcctttgatggatatttcttctttcttgttgattagattttgtttcttggtgtttgttttgattcgggttttcattcatgagtgtttgtgtgtgttgtgtattaagttattggatgatttagctattttgggattttggaggacattttatagattagattacgtcgattagtctggtttttattgatgtctggttgaatcaatcattaggaaataggcttaagatgaggattacaattagtgaattagatggccttgcatgcaatgatggatctaggagggtcagggttgcaccacaaagtgacggtcgcacccccaaagttcgaaaatataggcatgtgcaccccgaaaaaattcgcctatacgttacatatacatatactcttgcaccccccatactcgaattcctaaaatccatccatccttgctgcgagcctgtgatgtgcattggttcgaagattgggcactgtcactagtgctcgatatttaatagtttttggttatttgtatgaaggtatatgaagaaagtactgactgatatttgtttggtgtttatttaatcaaaatttgtgatttatttttttaatctgttggcgcataacattcaagtcctacattattctttggtctatcttttcaataagaatttttgcgttaagtcctcagataaattcaccagcttcatcgaagtaatagttcactgataacagttataaggcctgagagtacttaactttgttttattttggatttatcagcaacgttccc

SEQ ID NO: 108151 - DNA, 621 bp, Aquilegia coerulea
  Intron number 3 from transcript AcoGoldSmith_v1.027225m (l ocus AcoGoldSmith_v1.027225m.g) derived from phytozome v7. 0 (chr-ID scaffold_144; pos 77956 to 78576 reverse strand)
gagccataggtataattgtttttgtttgtgtttttttcttttaggtataaaatatttatataatatataccgaagattgaatctgcatggagccataggtataattgtttttgtttgtgtttttttcttttaggtataaaatatttatataatatatacagtattaaataacacgcagaatatctctagttacaaaaccatagttattccacatggacatataaaaggagattaaggttttaaaatggatttgtcccctaatatgaaaatttcgttactattatcatctttttatggtacttgaatacttcaaaattggttctgtatgatgtttagggtctttatttttagaggtttgttgaaattgtaacttgacataccttgtaacattgcttttgtggtcctctaaaatatcccttccctttttgattggagacagactcttctattaatggtattaaacagacaacaccttgaaattttcattctttttctattaaagtgaagggaatttttttttaatttgatggttcaaattacttttacataagggcagcaattttttgtgttaaagtatttaagttctgtttgatggtaggcgttgggtgatcaaggcaattg

SEQ ID NO: 108152 - DNA, 699 bp, Aquilegia coerulea
  Intron number 1 from transcript AcoGoldSmith_v1.009351m (l ocus AcoGoldSmith_v1.009351m.g) derived from phytozome v7. 0 (chr-ID scaffold_10; pos 5526868 to 5527566)
tgggaagggacatcattgtccttctactccgcgtagctaagtggctcatcacatttcaagaccagttgtgttgacattgtggatggatagaaatataagggtattcgatcaaaaggagaggaactgtcattaattaattcttgatgtaagagaagttatgtatttggctgggacaagtctatcttttagacgaataagattccatgtataaatttgtcattggaaggggagtatacccttacttcatcaatatatgccgattgtttttgtgtgggaccaatgtattgctcggtgtattgctaatgaagtgagaaagggcagatgccagctgaactcagtttgtaatacctctgggcgatgatactagaggtctggggctcgatcccaggcagtgcatctttgagttactgatctcattaaaacaggcttgctaataaaaaataaaaaagtgagggaagggtattttactctttgtttataagcttccatatgatttagcaactgtttctgtcctgcagactctttcacccttctcttcaagtaactattctgatcaccattccatcttctgctattcatttattcttataaatggtccatgagttcatctgattctgattattttattatttcaatcatctgatctgttttttcttccttccaggggcactggatatcctgatctttggccttcgcata

SEQ ID NO: 108153 - DNA, 827 bp, Aquilegia coerulea
  Intron number 1 from transcript AcoGoldSmith_v1.020426m (l ocus AcoGoldSmith_v1.020426m.g) derived from phytozome v7. 0 (chr-ID scaffold_123; pos 196437 to 197263)
tctgttgattttctcatcgacaaggtatgctctttactcaataatcaaattgattggttatgatttcaagtttttttgagttgatttttgtttggtagagaaatttctagtgagttttgaatctaaaaactctaggttaatagttttagatctacaaacatttatttgaatagattttgattgattaactgttgtcaatattctattaatcgttttttatttgtttaactgctataatattcttcattttatcaatttttttagttttaaataaacccaatttgttaaatcacatgattaggttgatttggatttagtgatttgaaataggtagttgtgataaaggggttttagttgttttgtgagttataagatgttagcaagttgacgccaaattttcgagttttttatagaaggattcgagttgtcgtattaactaagatgacttacattagactttttttcttttttaatgagtatttatgttagagcttaataaaggggttttgattgtaaagatagagagacgaacttgcgtagttttcttaagttttttttttttcgaaatgagtgttcactctcgtctaccttgccttgccgtaatactgtactgtttaccctcgtcagaattgttatgattttataatagttatgttggtatactaatgttccacattacattataaacctaatagataagccatagggataatagaacacataatatctctacaatattaataatttatcattctcatcattctgaatcttatatatatgagagtttagttatacattttttttcctttcatttacttttcttatag

SEQ ID NO: 108154 - DNA, 967 bp, Aquilegia coerulea
  Intron number 1 from transcript AcoGoldSmith_v1.006741m (l ocus AcoGoldSmith_v1.006741m.g) derived from phytozome v7. 0 (chr-ID scaffold_11; pos 4175273 to 4176239 reverse stra nd)
ttcaattctcagacagaggtatcatttctttttgttcccattttggttttaaaaattatgtaaaactgaagctcatacgaaatactctatgtttagtgtatctatgtatatagtcacataatcaatggtagtaattatcaacttgtacagctctgaccctatacaaaacacatgtcaaaaaaaatattcaaaaccgaccttgagccagccattgccaacctaggatcttaaaacttgacttcacgtcttcactggtcctcgaattcaaaattccagtttcccaaaagtaacaaatttattgcatgaatgaaaaccttgagatgcttcaacaaatttattgcatgaatggggatatctggcatgaatgaagttaccaggatagtgacagtatcaaagttttacactgtatgatttcggatgcaccaccatcttcattttttaaacaaactctcatacagattggaactttacaaggccttgaacttccattattaggttccttgattaggagtatgatctactcaaggtttccatcatcttggaaagcaatgtacaccatttatttcgtaactgagtttataattttcttttttgttatcggcaaaatcatttttaaggaccaaaacctctagtttgaacactgtaccactgagcctaactcacgttataggtcattttctgttgtgtttgctaaagaaatataatgtgacatggagttgcttctcttaattttagctttgaatacctagattcttatacgcatcttgtaaagtaggggatagaccttgtctccgtattctactaatatctataaactgcataactcttttaggtaaatgttttatttctgagctcatttttcactcactaaggagaagtagcataatgactaaacctgttagctgtattttgaaaacacagtaatacagtatctaatagcatctgcactctttttgcttaggtcctg

SEQ ID NO: 108155 - DNA, 494 bp, Aquilegia coerulea
  Intron number 2 from transcript AcoGoldSmith_v1.007673m (l ocus AcoGoldSmith_v1.007673m.g) derived from phytozome v7. 0 (chr-ID scaffold_37; pos 1412357 to 1412850)
tggaacaaagcttgatattatcagataatctcaaggtacaaccccccttttctcttcttcacatgttttagatttttagtttcatcaatgagagctaagggaaaatgaatgttactagaatatggttagtaattgacggcaaaggcgacattttgagggcattacaagtcacattaacaatagaacgccaatcttcattcctacattggggcaatggagtgatactaaaacaatcttgtgggcttaatatattgatgggaaatttgttttaaaaattttgatggttctattggatttcgatgatttgtttcaaatttgtttcgatctttttcataagccgttagcaaacatagttttcagcttcaatgtcttttcttcaattaaatacaaagcaagtctttgcttttcattaaatgttttttaaagtatgaaatttgccatcttgcttttgtttttcaggatttaaagaatctgagatcacagctgtattctgc

SEQ ID NO: 108156 - DNA, 896 bp, Aquilegia coerulea
  Intron number 4 from transcript AcoGoldSmith_v1.007673m (l ocus AcoGoldSmith_v1.007673m.g) derived from phytozome v7. 0 (chr-ID scaffold_37; pos 1413104 to 1413999)
ctggaacagagcttcgggtcgcttgcattgaacaggtactctcatttcttttttagtagtataatatactgtatagcattattgcacttgccacttgcctttgagaagaaaaaaattctttgcagatttattaaaccagataaaactcaaaataactgtaggtattaactattcaataaaagcctcaactatcaataaggagttgatttttgataatgtcatgttagaaaatagataccattataaactggataatagaagacaaaagttttatactagagaaactgcaatgatctaacggtctaagggataatgtggaaaaattgaagtatgtagcaaatttatatcaattttagctcaacaaatcaggtacatatctatctttcgattttactaagtacgaaaaatctgaagaccaaagttatccatagcatgtcaaatatagtgcactgatgggagtcaggaatcattggatgcatgaactattcagcactaaatatctaaaacactagagttgttgttattgccaagtatgggaaacacattgtttttgttgccaagtatgggaaacacaaaagtctatatttttatatcaactaggggtacactatattgttttgctgtagtgatataacttgctcttactgatgaccagaaactagatttagtgataagactatgcacacagattctgcatgtgtggattcatatccaattgattagtgaaacgttcccgtgacttttgcagcctgcatgtttgccaagttgtagcactctacaatcactctttcttgaacatatataattgtcattaccatactaatttgttctctctcttttatcattgatggagtattttagagattaaggacctgtcaagagtgcattgatcgtgg

SEQ ID NO: 108157 - DNA, 1039 bp, Aquilegia coerulea
  Intron number 1 from transcript AcoGoldSmith_v1.005990m (l ocus AcoGoldSmith_v1.005990m.g) derived from phytozome v7. 0 (chr-ID scaffold_9; pos 4836902 to 4837940 reverse stran d)
tcatctctaacgaggtatgatcgtcatcacgtatttaagtccaaacagaagtgtatgtttcaagttctaattctaaaactatatgtaaaagtagacattatcttttctgctaagtaaattgcaattaaaatcaaaaagtaagactggtagcattagtcatcagaaaaagagtagaaccaacacatcacctaaatagaagagctactaaaacttggagcacatgaagggtgccgtgagagtgggagcagaaccattactgcaatttgattcctacgattatattcacaaaaaataataaacaggataatcatgataaactatagtttctaataacatggtttgacagcaaaatgtgcttgtttggaaaaatgacattgattttaagttgtggtttttctaaggaaaatgacctagaaactatggaatttcctgacaaaaaatactcctatatttctgaaaatgccaagcaaaaggataaagattttatacaaaatggatcgctaacactcccaagttcatgaaagattgcaggtagatttcaacagcacagtagattttttcctgacgtgacacatcacgacgagaaaaacttcatgacttatgtcagaccatatctaacaactgcaaatcagagttatgtatatttcaacattcaagctcagaaatgcaaaaggttgtcttctaaaatttaaacctctttgacatattccacactaccaaatatctttaaaagctgaagcacgcagaggcacaactgttaaccatatctcatagggaatcacttggaaactactacgtagcgacataattctctaaggtggacattttaggatgaaattcaccaagcaccctttggacggctaccgccttgctaaaaaaaaattaggcaaactgccttcgatcactaacgtatcatttaacgtctgtcagttttatgtaccattgttcatccaatgaacaattacagagacttctgtatcattaacgtctgattttaaatccaggtgttctctaattgccttagatcaagtggaagaac

SEQ ID NO: 108158 - DNA, 997 bp, Aquilegia coerulea
  Intron number 1 from transcript AcoGoldSmith_v1.007011m (l ocus AcoGoldSmith_v1.007011m.g) derived from phytozome v7. 0 (chr-ID scaffold_7; pos 3086275 to 3087271 reverse stran d)
ccaagataagagaacaagtcgccaagcaacaacaggtgcttttctctttcttttgatttcatttttatttgattttatctttaatcggatctataataatcattctcttaagtctgattaaatttcaactatatataacatatgttttatgattaatagtgtttgggttgatctaaagttttgttttttttctccctttttcgttgtcattgccaatggtttatggagtattcgatgttaattaattggttttttcctccccaatggttgaaatcactaaatgggagctctttgatgacgatgacaatctatagttcatgcttgtgccagatgaatgttatcggtaaagatggtatttgacttacattgttgcgcagcagctggagcttttaaatagtagctaaaattaatttttgccaataattttaatggtttgattaagggttgagaaaatcatgggaagatctcttggaatgacaacctggttttatttttcacatcaaaatgccattgagatccttgaaataatagtgatggggagcggtggtggaactgaaaactctggggttctgagatgctagggcgtgtccagattaggaatggattcaaaaatgaaaaagaattatgtgtatattaattcaggttgttctgcagaatgtattaagacataaaggtcaatgtgaaattcttattagttaaaacaacttaggcagggttttaggtggttatcttctcggatatctttatattagtcttctttaaatttgaggtagattgtagtatcacaaccatgagggaccagctgagctcctggaaaacgtcttctctaacttggaattcattttatttctttcttgccgatttctattacttccactggtttaagtgcacaaaaaaaatttcagataaatgatttctttcaaatgtgagtgtgagatccaaagtttcacttgttggttcaaaaacttgcttcttattcttagttttacttcaggca

SEQ ID NO: 108159 - DNA, 380 bp, Aquilegia coerulea
  Intron number 2 from transcript AcoGoldSmith_v1.007122m (l ocus AcoGoldSmith_v1.007021m.g) derived from phytozome v7. 0 (chr-ID scaffold_54; pos 1402352 to 1402731 reverse stra nd)
aagtaagtttgattcatttggtgattttcttctttattaacttgaatttaaactaaagtttcaatctttttgttaataagttctaaattgtttattggttttccttgtgaaggaaaagattcattagaaaatacgtatttcgattagtttatgagttttcattacaaatgttatttcgaacttttcttaataggataaatatacaatactatgtttaaagaaatttgcgcgtttttcacctggggtcaacttttgttgtacaagctgattcttttttatgtatgtacttgtgtgtgcacaatatgttatggttagtaaagtgtttttggtttgttatgcaaacagattgtagtatttgacaataagagttcgaacacgga

SEQ ID NO: 108160 - DNA, 916 bp, Aquilegia coerulea
  Intron number 1 from transcript AcoGoldSmith_v1.001708m (l ocus AcoGoldSmith_v1.001708m.g) derived from phytozome v7. 0 (chr-ID scaffold_9; pos 3504431 to 3505346)
atctgaaatcacggtatcggttgtcaaaccaactggtaacatattcaattcgatttctctcttcttcttttttttttttctcaaacacataattcttgcttgatttcgcgtttgagtttatgcaattagattttttttgttgtgtgatttgaattgtttgtttgatgaaattgcaattgaatttaacttgattcactcggctaattgcactacaacacataagattagcagagtatagtaatacatcaatttgagaaattagatcatgtcaattattcagtttaattgttgttatgaacttaattaatgaataattgaatgtttagataccactgatatcatgaaactgaatcctcaatttcaaatttcgaatttgggatgttcaatgtttagatggttaattttgatatctgaatttgggaattttgtgaagtctagggtgtgttatgtgctgctactttttttttcttgaatttcttcgtggtgctccttttgtttgttgtttgatttgtttattgagttgagtcccatttcgaggcgatatacagtactcaagactcactgttgggttcagagcttgactgagtccgagtattttttttttctttttttgcacgagaggtagtcaagaacagagtcagtagatatttttgtctctccactacaatgagattcgtctcgtatctcatatctccttgattgtactatatctccatgaattcgtttgtttcatttgattcaatagatgaggtagtaaaacttcatcggtgaattgtttactgttcccattaatcatgtgtgtgcatcttcatttctgtatgtcactgattgcctgaaatcatgatttttcattttatggtcttccactataacctgtgcaggtattacctaatttcttacaaattcgcatagaaaa

SEQ ID NO: 108161 - DNA, 746 bp, Aquilegia coerulea
  Intron number 3 from transcript AcoGoldSmith_v1.003080m (l ocus AcoGoldSmith_v1.003080m.g) derived from phytozome v7. 0 (chr-ID scaffold_18; pos 3954663 to 3955408 reverse stra nd)
ttggagtttgatttctatctatctacaccttctatgatatatatgtttgtcttgatcctgggacggtacactcccttgttaagtcgctaaacaccactcatctgtatgcattgaactctactgctgagtgaaatgtaggtcatgtttctaaaagatatataacttcttttgttgagtaaaacaactactttttatttggatttcagaattttggtagtgcctaattatttgacagactggcaaaatatattgagccaagtacataggtttttctaaaggcgtctttattgctgactctcctttattcatcaaaaaaggaaacaaaaagtaaaataatatctttgtcattaaaggttgtcgtatacaatttatattaacaaaaaacatgcttataattgttatgccaataatgatagcagttcaggatttcctagctgaaattttgggccttattgtggccttgtgggtcttattcagcacataccgttactatgattgatcacccatttatcatgatacttcacataacactgatgttctggccatctttgatgtcgtttatctttgttaatgacatcaccagttgcttggatttgactggaagacactcttgttgcttattttccataataattaatcttatcacttatcagcactctactatttagcgtagtcttagtttttacgaaaactgattaatattcttttgattacattgcaggcttctcaacagcaaagaccattat

SEQ ID NO: 108162 - DNA, 215 bp, Aquilegia coerulea
  Intron number 1 from transcript AcoGoldSmith_v1.010119m (l ocus AcoGoldSmith_v1.010117m.g) derived from phytozome v7. 0 (chr-ID scaffold_120; pos 225510 to 225724 reverse stran d)
catttttcataataccctttttttctcaggtaatcatttgctctatatttcatttaatttgtagttttttgatctttaaagttttgaattcattttctatgtgcctatgtagatataattagaaatgggttttcttatcatgtttgtaaatctgatttattcttattgttatgatgataggatttttttttatatatatatttagagggatatat

SEQ ID NO: 108163 - DNA, 1024 bp, Aquilegia coerulea
  Intron number 2 from transcript AcoGoldSmith_v1.012855m (l ocus AcoGoldSmith_v1.012855m.g) derived from phytozome v7. 0 (chr-ID scaffold_67; pos 518025 to 519048)
catctagagcctccacatctagtattcctgataaggtagaagaccaatttgaaattaaaggattaaagaatctaataatgcaattcctcacggtctctatacaagacaacctatacctcttcctaatcctaccccttcggaaatggatttttctattaacactttagaaattattaacaaattgaaaattgatagagttgctattaataatgaatttaatagccctaaatatgttgtttttaaaaaatggtatattaggcattataataacgggcaccataatattctaaaagaaaaatattattcacatttaaaaaaaaataaagacaaatgttccgtttgctcattatgtgcttacttatgataaaaccttagaatcatgtgttataaaagatttctataaaagttggactactaatgatagacggtgtattaaatctatccaccctcctcctcagtctctcaaacttatagatgggtcatataatttggaaacagttgcttatgttcaaccttcctccgaagaaactgatataaataaggtttttaaacaatctaagtatactaatttatgtttacaaacaataggaaaacaattaatccgcattgaaaatttatttaataaaccagaatcaagtgaagaaatcttccctgttaatattaagcctcctcctgaaatgaagttcaatttgggaaaaaataaattaagtcaaaatgaatttattgaagaacttactaagaaattaaaaggaataaaactatctgataataatattgttgttttatcacaggataataatttatccgatgaaagtgaaaatattgaagaatatgcgacaagaagtcaatgaaatagactttagctcgaataataaagctaaaatgccccctgcacgaacctattaccctagacttactcctatggatgtcttaaatgaagaagactatatttctatacaaacttcttatagtgctaaaactatctatgaatgaaatattgatagtttaactgaatatttaatct

SEQ ID NO: 108164 - DNA, 1000 bp, Aquilegia coerulea
  Intron number 1 from transcript AcoGoldSmith_v1.000864m (l ocus AcoGoldSmith_v1.000864m.g) derived from phytozome v7. 0 (chr-ID scaffold_15; pos 3349237 to 3350236 reverse stra nd)
cgaccgttgattcgagttcattcattcatcaacatgtaagtaatcttcttcttcttgtcgttcaattcgatgttttttgtttaatttaagtataaagttttattggatctagttcggttactgatccgttaatttttttttttttttaaatcttaattactaataattttgattattgaattttttgattttaataataataataataataaatcaacaatgagcgagttattattattattattcaatatgaaaaattggattttgtatgtttagaattggtaatttttatggttattgaatagttttgtttgaggtatattgattgatgatctgaacaatttaggttgaaataattgaaaatttaggttatttttgtaaattatgtagtggaaaaatattactaatttgattgatttggcatcagtatatttggaaaggtttttataattatttgacaattttaattaaatatagaaccacacaacacacggcgagttattgattttaggagagaaagagaagatttggggaggaaatggtgtggggaaagagaaactagatgaatgagaaattgagagagacagagatatgggtttagagtttagagactaaaaactcatagtggaggatttgtttcccacatgaagtctggttgaacaaaaagcaatctttgtctgaataatagtaacatctgtttgctccaagatgaactattgttttaagtagatagatagttattcagttgtttgtatgcgaatgtttttattgtgcacagagatttcttcatgcgattgattttgagcatttgtctctcggatattggctctaggttgtcttggatacataactgttgattgtaaaaattattaatggatttttgattgattaagtttttatgtattaatctatatattttcagtcagagttttgtattaagataacatttattatgtctcactgattaataaatttgtcgtctttcagtgtcaactttgaa

SEQ ID NO: 108165 - DNA, 856 bp, Aquilegia coerulea
  Intron number 2 from transcript AcoGoldSmith_v1.014930m (l ocus AcoGoldSmith_v1.014930m.g) derived from phytozome v7. 0 (chr-ID scaffold_11; pos 2807187 to 2808042)
gattggattggagtattttcccctgcaaatttcaagtaattataccctcgtcgtcaatccttatttaagattttatttctcgctagtcaatttattctgacaacatgtatgagtatgatcatgtgttatgttgataagattttttaaatctggatgatcagtgaaccacacaagcaactaatgataattaatataatttgtaaagagtgaggaatcttgttgaccggaaggaaaccacacttaccagaataatattattgtgtgacaaaagacaagatcaattaatacctactagctatgatagtatgtctgctctgcacattgatgagccatggattgtttcactgaactagaaattgatacattaagcatgcaaattcatctttcgttcttgttagtgtgatagtggaaaacagtgtttaatttttgtctaactgagagttgaacaaaatttccagtttactttcaaatatcaacttgttggcatataggtgttattcaaagtagaagtgtttagactttagacagaacacacaaacaattgtagctgtattggaactgctacagatttgcagcttaagaatgacaaacaaacatatacacattttctcggactgagtggggaaacgataaataacattacatgtttgtcttacaaataagtgatgctacaagcaaacaattgaagctgtagtactgttttattatatatatatccctactacattagttttcaaaacaattttcgtcctgaaaattgcttatgcactttcttttctagtattcttttgatggtaacatgaataaatttgatgtggcagttcgtcaaactgttcgccagaagctggcaatccga

SEQ ID NO: 108166 - DNA, 520 bp, Aquilegia coerulea
  Intron number 1 from transcript AcoGoldSmith_v1.002574m (l ocus AcoGoldSmith_v1.002574m.g) derived from phytozome v7. 0 (chr-ID scaffold_30; pos 744876 to 745395 reverse strand )
tttcaattgcatctattcttcgaactcctatacaggtattcgattgacttcacttcgcgatttcattactcaaatcatttcattttatataaattataatgagcaatttcttctttaaaagtatgtcattttggtatatatttcttttatctttttataccgttttgacatttggattattgtagttgtagttctaaaaagcaaatacagtaacattttgttggagaaataaaaattaatccgtttcgatatttaattaaatcttataggttacaatgaagattgaatttgtggaatttcgacaaaatttatttattgcttattcaaatttgagggtttgccagtctccaagactaataatttgactgtttcataatgtataattgctttaggagctcatggagtcatggttttttttgtttgtgtgcatttgggttacgaaaaattgagttgactgttacacttttgtctacattattatacaggtgcaagggagttttagcggaagagtacagcaggg

SEQ ID NO: 108167 - DNA, 990 bp, Aquilegia coerulea
  Intron number 1 from transcript AcoGoldSmith_v1.005961m (l ocus AcoGoldSmith_v1.005961m.g) derived from phytozome v7. 0 (chr-ID scaffold_96; pos 428513 to 429502)
gcatcgttataatctcaaacgaaaggtttgtttatctttttttttttttcattatttccattcaattaaactcaatttaacaagctaaatttgattaaagtattattaatttcttaatttgagcaaaaattgctgaaaatatatctctaattgcaatgattggatgaaaaatatgtagttttaattattgatttgattagctcacatgtattgttttgatcaattaaatgaataataattggttttattattattattattattgcgatttatgcgaatgattgtatcttgtattgtttgatagctttgcattacaacttgtaactttagttgaagggtttattatagataaggtcaggtgtaggcaaatgattgaggtgctaatgattctctagctctgtaggtttagaatgcaagtgggtttataagaacgaattgaatatgtagcatttaaatataaggttaccagtaagaaagttggttttgtacttttgtagcaaattgtttacgggtggctttattaatctggccctttcatctgcaaaaaccgttatgatactaatggaaccagaccctatggtgaagggtcaaatgaacctaaccctagggaaggctcttacagctgataacttgaaaagaaaagaaagcagctggtcagtatgtgggggtgtgtttccagtgaagagagcattcaacacctaatttaactttgtacaaagaacatgacaatactttcttgattcagccccactttaagtattctgattcggggaagtgttaaggagatactacataggaacacttgttattattataattgtgtatatagttgttttctgtaaacccgacttagatgtatattctataaaatctatatgttcattttcactgttagatattacacatatgttcttgtttctcaaatttcttatatgcatctgtattctgtttacaggttgcaggggttccaggagtgactgaagctttgtt

SEQ ID NO: 108168 - DNA, 561 bp, Aquilegia coerulea
  Intron number 1 from transcript AcoGoldSmith_v1.003736m (l ocus AcoGoldSmith_v1.003736m.g) derived from phytozome v7. 0 (chr-ID scaffold_15; pos 1750551 to 1751111)
ggaaaaagtaaaataattaaacctaatttatagagaagttttcttcatttttaaggaattatattgtttggaattttccattattagtatagagtattagagtatatagaagtttggccttattgatggaaggaaatcaaggaataagatttccttttatgaaaaatggaaaccatattgttcagactatgggccgctgggttgggctgagtatgggccattttagggctttttatcgattagtttcttaatttgttgtcacattgaaacattgagaccaattgcacgatcttcaactgattttcacaagaatgatctgctctttgattccccacgagaacatgtaatcatttttactaaaaattgctagttaggttggccaatcatcatcagtctatcacatatctttgctagcactcaaccttaacccgggtttaaacttaaccatagttaaattaaaataaaaaaccatctctttctctctcttctttcattccctatataaacacaaacaaatcccccaaaggcttttcatcagatctgaaatcgaaaggcgtctta

SEQ ID NO: 108169 - DNA, 701 bp, Aquilegia coerulea
  Intron number 2 from transcript AcoGoldSmith_v1.003736m (l ocus AcoGoldSmith_v1.003736m.g) derived from phytozome v7. 0 (chr-ID scaffold_15; pos 1751323 to 1752023)
gcattcaggtatatattcattttcattagatctagggttctttcatcttgattcttgtagatctaattgaaataacaattgaatcataaacttatatatgtgattgattcgttttgattaggttatgtattgaaatctgttagttttgattagatcggtgatcatttttgtgttgttttattaaatttattcatatatatgttagatttgaggtattgagatgcttattgattatcgtatatattgaaacataaacatgttagattagtttagaaattttgtattgtttgattggaaatagtttatttcaatgatatctcacattttaagttatatagatgggagtatcaagtatgcattgtttcatttcatttgcagaatttttgttttggttttagaattttgattttgcaattaaacttttttgaattgttgatattcttttttgtttaacattgaagattgtgaattctacattacagtttttcgtatgcgctatgttactttagtttaatttgctgctcttgagaattaggtgagatatatgctggtaatttggtgattagattttgcttaagattggtcatcatatcctagagcttgttttgatgtcttgtgtttattgtttgtcagttactttagtttttggctacttgtacttcttggatttttcttagttttgtgtattgtttggcagcctg

SEQ ID NO: 108170 - DNA, 965 bp, Aquilegia coerulea
  Intron number 1 from transcript AcoGoldSmith_v1.007682m (l ocus AcoGoldSmith_v1.005158m.g) derived from phytozome v7. 0 (chr-ID scaffold_15; pos 2972758 to 2973722)
atacacgttgctctgtatgttctttctcttggatgtttttttttttccttttttgcaccacttttttgattagtttttgatctaattcgatttgggtatttttaaattttgattttttatgtatttaaatcaatgggtattctttgttttgtattttagataacatggtttactgtattgatctgatttgtgtgattataattggtattcatcgattattcgcggcgatcagaaataatctgtctggattttgtaatttatcattaattttgttgtgcatctgatcgtatgataagctgcacagattcttcaaaatgggtgtcttgtgatgttggatacttaatttttaagtttagaaatggtgcattttgcgatcaggattcttggatgtgacacaatgggcccatttccaagcaaagttcattcatttattgcaccttttctatctctggagaagagatgctatagaaacttcaaacctttagtcttaaggggtacatttgtgtcgtgcttagcttgtttggatgcgacacaacaatcaacttcaacttcaaccagagttcattcatttattgcaccctttttttctctttaaaaaggtaaagcctggcgtcctgttcttttgaaggatctaagtcttcctcgatttatcttacctaggaccactattgctgctaagacattttagatttcacatcaaccttatcttcactgggaaaactttattttgtacatgtttcaattatttacaccatttgtattcttgattgagaccttatatcaatagcactaaattataagtgaattataatgagagattcctcatttagatgtggttgatatgtaaatgtttgtttttctttgaaaggaaatgtaaatgtttgctgatttttttgaaactttttagcgtgtttaatttcttgaatcttctgtaaggtctcatgcttcatttcttatgcagagat

SEQ ID NO: 108171 - DNA, 840 bp, Aquilegia coerulea
  Intron number 1 from transcript AcoGoldSmith_v1.016331m (l ocus AcoGoldSmith_v1.016331m.g) derived from phytozome v7. 0 (chr-ID scaffold_27; pos 536944 to 537783)
gcttgcagaaaatcttgaaggttagacacgaaatcacaagtctgcttgatgtcttactcaatttcctttttagtctatattgaaccttcagagaagattaaaacttaatgtcacaaaaagaagaaaagcatttaattgttcaattgtagtactgtactcatataggtctttcttgttgagcatattgaaaatttgagatctttgggctaacttttatgtttgattatgcatttctagccagatgttagttagcaacaactttagatgcatcttaacacagaaagtactgttacctttctattaccacagtagcaaccaatctttcaatcccttatacaaaatgatgattttgaagttatttaccattaataaaatagaacgcggagttgtactgatcttactcttttattcatggctcatatcagacagtttatgcaagtctttgatctaactatctcttgagtggtttatgcatcttggcctgtttccctttttttatcacatcggtacatcgtcaatggctcactgggggcaggcccaatgtatagtactttattccaacaatttggtatagtgacagaaatatctatttgacaattctcaatgagtacattgatgatcttaaagtttggtcagcttgaaaggttttgaaaatttaaaaccaattttttgcccttttcctgtatgggactgcagatcgcaaattacagctgttaaggaagattacaaatatttgatgcttctcttaaaaacagacctttgtaaaacaatattaaattcacaccaattgccattttgcactagaatttgatagggaaaactatcttgcttgtcacagag

SEQ ID NO: 108172 - DNA, 429 bp, Aquilegia coerulea
  Intron number 1 from transcript AcoGoldSmith_v1.010550m (l ocus AcoGoldSmith_v1.010550m.g) derived from phytozome v7. 0 (chr-ID scaffold_27; pos 1168652 to 1169080 reverse stra nd)
gaaatgtgagtgttctctttctcattatttatttactgaagcattgtgtagaagggaaaattttgcctaaaaaactgcacatggtaagagcctgagacattgcagactacagtgttgattcctgagtaacatattagtaagcacagggagtagaaaattaaggcaaacttcaatcttcctgtgtttgtttaactgtagattatgggggtatatccgtatatggactgatttggtggacattgtcataattaaaatctggtattgtcatattttgagttccgtgccttcaagtgcactcgtttagatcgaataccacatctttgaactgactactgtgacaacattgagtctaaatgaacatgtaaatagatagtttccagccatgttttaccaggtcctcattgactataaacatttcttgttttccag

SEQ ID NO: 108173 - DNA, 701 bp, Aquilegia coerulea
  Intron number 3 from transcript AcoGoldSmith_v1.003018m (l ocus AcoGoldSmith_v1.003018m.g) derived from phytozome v7. 0 (chr-ID scaffold_28; pos 226443 to 227143 reverse strand )
ttactccggaatttatttatccttacagaaatcaggtgaaaatttgaagaactttactaaaacaaatgaatgaagtatggtttttataatggatcacattgttaagatatttgtaaatggtaacttctataatcaagtcaaagtttttttttttttttttttttttttttttaatttaatttacatttaattgatttattgatttattttgtataaaatgatggatctcgtggttccccagtagagttttgcacatctaaaaattcatatgcattcgtctgcatgatgttgatttaggttgcatgtgatttgtggaatattgattggtgcttctaaaattattgggatacatgttttccataaccaccaaaaagctattttaaaaaatatattcccctgttggctggaagacatgtatgtcatatctcttgtccttgattgaaatagaagagagatactttggtatctgtggatggtggaaatgcagtgtagccgagatgatggaaatctgttgatgcatgtgcattatgttacaattattgattcttcactgtgtttatgtgtctgccattgttattaataatgtctactttttgttgtagagtcagtgaattagtatttacctatttaactgtgaatactgaattttatgggcctctatctaatcttaatttgaatatcacaaacagggtggatttgat

SEQ ID NO: 108174 - DNA, 362 bp, Aquilegia coerulea
  Intron number 2 from transcript AcoGoldSmith_v1.019820m (l ocus AcoGoldSmith_v1.019820m.g) derived from phytozome v7. 0 (chr-ID scaffold_10; pos 919756 to 920117)
acggtcgcaaacaaacgctaacgtttgggacttcagtaagaatactattttttcttttctttttctgctccttggctttcacagttagcctggttattatcacctacaaagagtatcagaccttggacgaagaataaagaaactaaagagaaagcaagcaataatccaaccaaacagaacgacagcagtaaattaatatcaaacgttttatcttttcttttaataatcttatgatcaagttaatagaaacaaaaaagagagcttattgctaaactcgacttttacgtgactcaatagattgatctataattgtcataggcgatccacaattaatttttatcctttttattgagttcaggctt

SEQ ID NO: 108175 - DNA, 1059 bp, Aquilegia coerulea
  Intron number 1 from transcript AcoGoldSmith_v1.009623m (l ocus AcoGoldSmith_v1.009623m.g) derived from phytozome v7. 0 (chr-ID scaffold_15; pos 2579864 to 2580922)
cggaagagaggatcaagtggaagattgaaaaggtgagtgccataaactatactactatagaaggtttagagttcagataattcagtctaagctggtttttgcaatatgatacaaactgttgattgatcaggcatttcccattcctggatttgtaacaatctaaaatcaaaagaataaaaaatagaaattcaacacactaagctcctcatagtgtgatgtacatcgtcggtaggttcgaaaatcggtcaactagtccttaaaacagcgtaaaagaccggtgtctgtggctatagtcatagaaactgttcacatggtgaggagcggatttaggttggaaagaacgtccatgctaaatcataccacttgtcccagaaaatatattataaccatctcatagaagcaatgttgattgtatcaatcaatttcatggctgcatttttggcacttgtacaaaagaaacttctcaggatgtaaatgtcccagagattgcaataaagatgagttgtcattgagagattactttcaggtttagaaatattagctttatggaccaaaattatcttctgtattatgttacacgatccttgttattggtactaaccatggtgttataaatctctgaagatacattaaacaagaaatccctgtcccctaactaatctttatttcaaaagctcttcctggattcttgattaatggtgaggattataattctacgaaggccccgggcctctattgtaacctacctcctctatgcttttgtgacgataaagagctgctataaatctcctgtagacaaaccatcatgctatataaatttcgataatagtttcgaacaacatcagattaacagaatcactcttcatgacttgccttctatatccttttacttaaatcgtcacctttttggagtgataaccgaggttttctgttagtaagaaatcattatttgccgttgtaggtttgttagtaaaagtgcatgaaaattggaagtatttgaatattgactaattcctcattccaggccaaaatcaaagaagacctactgattgaaagact

SEQ ID NO: 108176 - DNA, 941 bp, Aquilegia coerulea
  Intron number 1 from transcript AcoGoldSmith_v1.015179m (l ocus AcoGoldSmith_v1.015179m.g) derived from phytozome v7. 0 (chr-ID scaffold_6; pos 7092091 to 7093031)
gcggcggcaagaggttgaagacggtggttgctgtttgctgtttggtgtttgttaaaaaaaacaattcattaacgttccacgctggttcaaccagcgtggaacatataacagatcctgttcaccaagcccagcctgcccaagcccagctcaatcccagcccatcctgcccatcctgccccaagcccagccaacacgcgaagcccaagtcttccacgctggtctgacctgcgtggaacagaaaaacatttccacgctggttataccagcgtggaagatagaaatttgaaaaaaaaaataggaaacgcgttagggatacccctgatataggtatggaagacctgctaaaaaaaccgatagaaaaggaggtggcaccgacgtggaggctaaatcgtcccatgtgtaggctaaatatagcagacccattagagatgctctaaacaggcagtaagacacacactcccatttttattttcgattaaggtttcgaaaaaaaatcataccatttaatttcattttagtgttcttaaaaacagaagtatttgtttccaaccaaaaatcaaattttttaatatatgtagccaatgggaactctgtttagtgaaacaaagatacaagtaaaatgctagacttcactcacctgacctactctgtactggtctatggtcacgttatttttctagagtaagacaatactgtattcagtttctcttaaatttttatattaaatatataatcaaatggattctgtctttacatacaaaaacaaatattattattatatctaagttttcattatatatctttcttcatcaaacactcttcctccttcaaactcccccactcttctcactactagctttcaaaacacataatcatgaaactccaactcttctacattattctacttcttttcttaatctctatttcttcttctcaaacag

SEQ ID NO: 108177 - DNA, 788 bp, Aquilegia coerulea
  Intron number 1 from transcript AcoGoldSmith_v1.009043m (l ocus AcoGoldSmith_v1.009043m.g) derived from phytozome v7. 0 (chr-ID scaffold_108; pos 319918 to 320705 reverse stran d)
gattacagtaataacaacaacaacaacaagtgagtttcaatttcttgttttgatttcatttataataactatatacatattacttgtccttctgattaatccacttattttagggctttatttgtttcattcatatggtggtgaaggtgtgtgggtgggtggttgggtgtttgcctttacactttacaatttcttttgctctcttgctcttacaaattacttaccattcaccattgcttatgtatttaatctaatctaatatagtggaaatgccattgccctttttttcaactctcactttgatttatttattttttctcattttcacatcaaaaaattactagtattttgagatttacaaaacccaccaccctgtttcattccaaatttctacatacattacatttgcaaccaattgaattatcttatgtattatgccctaccttcctagttcctactcatttttattacacaattaaacccagttatatgcaactcaatgtattgtacactagttagttagtttgtttgtttctttgtgttcatactataaattcgtcttcagtttctcttcttctggaattaccatctccatatgtattctagttttttaagttgtctgtcccttttaactctttattcagatcattaaactaggatcttttattaaactccttacttgtacaaacttacaatcccatatctaatcttaatctgctttacacttttatttgtttcttgccccactcttacgctttgatctgcatgtctttcagtgagctgtggga

SEQ ID NO: 108178 - DNA, 348 bp, Aquilegia coerulea
  Intron number 1 from transcript AcoGoldSmith_v1.006165m (l ocus AcoGoldSmith_v1.006165m.g) derived from phytozome v7. 0 (chr-ID scaffold_40; pos 1292035 to 1292382)
tgaagcttgtcgtgacgcctttcgacatttatttggtttgtaatcttcttcttctttctttttcttcttccctcagaagtcataagcaccacctttgtttgtagttttaaaatgttgataagttgtgtaatttagatggaatttgagctatagagaaattaattttttttattgaaaattacttgaatttgatttacagttgcaatgctaggaatagagattgagctggaatttgtgctctattgcaattttttttttattattaaaataagttggaaaattgagttctaaatgaaatttgctttgttttcaggtacaagagttgctgttgctcaccagagtgaggtt

SEQ ID NO: 108179 - DNA, 346 bp, Aquilegia coerulea
  Intron number 3 from transcript AcoGoldSmith_v1.006165m (l ocus AcoGoldSmith_v1.006165m.g) derived from phytozome v7. 0 (chr-ID scaffold_40; pos 1292812 to 1293157)
aaacactcggagaagaatattgtgatattactcaggtccacaatctttacttttatgccatgcatgtcttatttcagtaatcatgaataccactatagcagaaatgtttcgcagtaggtcattaccataattttccttattttccaatcttctatattgtataccaaacttctgcttctgttagcttttcaacacctatgcatttttctatttcatctacactgttaatattcattttgattgaacgaatgaaagcataattgaagattttctgtatggaatggatcattccagcacttcaactttgagtgacgtttggatttgtttttgtaggttgccggtacat

SEQ ID NO: 108180 - DNA, 445 bp, Aquilegia coerulea
  Intron number 1 from transcript AcoGoldSmith_v1.005402m (l ocus AcoGoldSmith_v1.005399m.g) derived from phytozome v7. 0 (chr-ID scaffold_18; pos 3225753 to 3226197)
tttttaactttgcatctctcaagcttgcggtagatgtaggtagcttatttttacacaaattttacattttttttttccaaatttagtttgcttgatttgaattttaaatcccatcttttattttgctcaaattcattcgttaattatgtatgaaaactcccttaccctttttcatggaaaacacaacttgtttgaatttttattttgagattcattttgaatcgcattttttttagcatgactgaaatttctgagcttttttcttcctgaagaaactagtttttttttttttttttttttttggaatttcattttatgttataatgattattagttgaaattggagatgtttattgaattgaaaaaattgctttgtaaatttattgaattttttttcttcttatttttagcggcgtgggcataagaggaacgtaaacgaaacttg

SEQ ID NO: 108181 - DNA, 908 bp, Aquilegia coerulea
  Intron number 1 from transcript AcoGoldSmith_v1.001278m (l ocus AcoGoldSmith_v1.001278m.g) derived from phytozome v7. 0 (chr-ID scaffold_1; pos 2323929 to 2324836)
ttctttctggttgattggcattaacaacaataaaggtaaggtaaggtaaggtaaggtaatgtaattgttttgtttcatcttcttctgttcattgtgattcttagtttctccgtttcaagccaaaattgatttacttagggttttttgaattttgaatttctgtaaaactgtcaattgttagctttacttgtcttgcaattcttgttagttttacttctctttcaatttgttattaatttgcaagtatttttcaccttttcttgaaatttttagttctacactacataagtcaggtagtagtagagtgattggaaaatcgagtttgtaataatgcttgtaaagcagaaagagttaggtagcaaataaggtataacttaggcagtttgggatttcggaaatttgcactattgctatctattgctaggatatgcgttttaagtttcacgattgtttggaatacctacttggatcaagttattagaaatatgtgtggttcaagaatttgttttgtatatgacatattcatttgattttaattgaaaccgagaagaattgatataaggagccttttttttttcttatgtacttgtctctcactttgaaaactattgttgcattttagtgaccccgttctattgacagaaagaatttatatattatagatgattcttggatgttagtatggtgggtttttgtctgttgcaataatgaatatctgcttcaagtattagaaacaaatagtacaatcagaatattatcttaaaactagcatggggttctaaatgctttggcaccagtttttgatagacataacattttcatggtatagcattctcagtttctgtagctgaaataactagattttattttcttcttgcagtagcggtctttcaacataaattttggac

SEQ ID NO: 108182 - DNA, 770 bp, Aquilegia coerulea
  Intron number 2 from transcript AcoGoldSmith_v1.022831m (l ocus AcoGoldSmith_v1.022831m.g) derived from phytozome v7. 0 (chr-ID scaffold_21; pos 1258236 to 1259005 reverse stra nd)
gttggagagtgcactacttccaatttcactgggtatatttccattttttttatctaacttgtgttttaatttcaagaatattttagattaatttcatcttaaataaaaacactatagtgttggagtttctgaggcttagggtatgtttgagatggataaatactttttttttttttgggtactatgcaatgcaagatatcacagggcattgcgtgacaatattgtttcctctcccttgttaatctcactctcaagtcattatatgtgtgcatcaattaataaaaaaataattctagttttggaatggcaaaagattcctgttattgtacaccaaaaaagtattttttattttttcagtagcgcagtgaaaagcagagttttgattgaggtctttcgcatcatatttgattgtgattgtggtagtggtcatagttcaaaacgcctatttcgagcgaaattttgaaatctgggaaaatggattttgctgagatttcgacactagaaaccaatacgaatatttgaatattcgtggatatttgtgtatccaattcttcaaaattcgacataattcgtgggatatccgaggatatccccgatattttgaagtatggtagtggtaacacctaccaggagtccaggacataacaagtatgaattgttctatgcaacttattacggccttagtattttgatagttctaatgctggaaggggatatttctctgactacatattttctctttgtgtttctgtttcagggtcatttcggtc

SEQ ID NO: 108183 - DNA, 677 bp, Aquilegia coerulea
  Intron number 2 from transcript AcoGoldSmith_v1.001779m (l ocus AcoGoldSmith_v1.001779m.g) derived from phytozome v7. 0 (chr-ID scaffold_9; pos 6480758 to 6481434 reverse stran d)
agaagtgagtcttctactacatccaattgaaattatagaaacaatgcactttgatattaatgcatttccgtatcttttacgttctcgcaatgctgcatacctctatataaattactagctgtttaaacttagtcaataacgataacaaatttttattaccatgttattgctgtgctggtttgaattacattttaattattagctggtttctgtatgtgtctctccaaacacttgagtaaaatttgtcacttaactgggaattttttgttttgtgaaggtcaaagaaagtgagtgttaatcatgtttcaaaatattagaaaaagaaatgttcatgatattacaacttaaaaaatcgttattcattttatcatgaggattttcttttttcacattgttattgagatttaataagaggaataaattttccattttagtttcttcactagtttttatactttctaatataataacatgtatgatttttattgttgttgttgtttatttttgtaagacagtgtatgtttgaacgaggaacacacattttctattttctttagtttgtctttcttgaatggaaattatgttcacattctggcagaactctactaaaacgatggtctgaagatgtttacgttgatccatgttttattcaccacgctatcgggtggcaggtttgt

SEQ ID NO: 108184 - DNA, 1009 bp, Aquilegia coerulea
  Intron number 2 from transcript AcoGoldSmith_v1.006589m (l ocus AcoGoldSmith_v1.006589m.g) derived from phytozome v7. 0 (chr-ID scaffold_6; pos 2067465 to 2068473)
aggtttgttgatttttatttatgccttttttggggtaaaatatgatgttttgttgtttacaatttaatactttggtgcaacttttactttctgttaattgaattgatgtgctaattaaactggatttctgacaaatgaatgaatcctcgagtcaaattttattatttactattgatttttggatgttaaattttaatgaaaatgatgaactttctatctgccgtgtcttaaaaagacaactgtagaaaatttcacttaccaggatgttgttggaaggaactgatggctttcttttaacctttttgatataaaaagcgtaggtaaaagttatggttattacttattattgttcattatctgagtagattttccacgtgagattctgaatttaggactaatgtattacttcaaaaattttaatcattgatctgaaacttttgtgttggacaatttttagtgttcctaaagttcacgagggtgccgttaactagctgattgtggctgcgttaacgacatctggtgtgtgcagagaacatgaccaactttatggagttaagagtgagactagtaaaattaaattttgatttgttagaagtttttgggcatcaagggtgttagtcaatatgaattagctacgggtttactcatgacacattgataacttagaaaatatcttagtttaatagttgattactattcaatcaatagagaaaaaaaaggacaaatttttttagacatatatagaattggctagacccatcaagaagcaagcaatggataaaccaaatgtttttgaagctttcttttctttcatatctgcaagttactggtttgtttcaatatcaaatgtgttattttacaatgtcagaaatgcaactcctgtacatgtcaatttcagggattccgataaagatctgctgcaggttaagttcaataattcaaattttgtacttaatggattcaaacttgcaatttatcatttgcagtgtgaccctgaggaagccagtga

SEQ ID NO: 108185 - DNA, 657 bp, Aquilegia coerulea
  Intron number 2 from transcript AcoGoldSmith_v1.018416m (l ocus AcoGoldSmith_v1.018416m.g) derived from phytozome v7. 0 (chr-ID scaffold_9; pos 847743 to 848399)
tcgtggtaagcactaagctgcatctacctctttccctttgttttatttacttcccagatataagggtcggatggccgtgctggtgtttcaaatgcactgcaccaaatgcatttgtcgaacctcgaaaaggggttttgtttaactttctattggccatggctcctttgggagctaataatttctataggattggaatgaaacctgacataattcatatgaattatgtttttatctgcaacaagaaatatcaagcacggatggtacatagtatgaactatgaaactaagaacaccacaaggaagaaaggaaggaaaagtaagacttatttgtattttgaattttgaaaggtagaataaaatgactttgatcaatgcttttcaacaactctgaaatctggtttgtgattttcaaaccaacgtgaaaacttgaatcgtcattgtttggtacaaagagattttcatgtcctttttttctaccactttgaaggttgaacctttctatcttggtcatgattaggtatactgaccctgtcaacatttttgttagtaacaattacagtaattgtagattttcaggatttctagccttgtcaattaattagataccctttgatgctaatcagattacaagtggaagtatacgagcatcatcgatatt

SEQ ID NO: 108186 - DNA, 671 bp, Aquilegia coerulea
  Intron number 1 from transcript AcoGoldSmith_v1.003015m (l ocus AcoGoldSmith_v1.003015m.g) derived from phytozome v7. 0 (chr-ID scaffold_7; pos 6696391 to 6697061 reverse stran d)
ggttgcagcactctcttcttgaaaaagaacaggtacttacattttgtatataattttttgattgataaaggttatattgatgacaaaagcctaacgacacttacataaacccatatttagatagctaatcaataatcaactactttcaaaccacttttcgaaaataatttgaaacccagcttttaatacaaacaaacccttctaatattacatatttcctctattgtgcctataccctcttcatcggaatattcatttgactgcctcatcctcattttggtcttcctcgaaatccttaaatgcaagtttgtacattcaatgaatgagaataaattgaaagaagatgaaaatattcgtcttcaagctgtctctcacagtcatgtgtcattggtgttttctttctgtgtatattcagtattaatgtccaatctcgagtagagtcttagattaacagctacccttatgagagagtatttcttgatctcttcctgttattcttcaggattagtttctttccttgcattgcccccccttaaatgttttaacctttacatctttgtccaaaaaaaaaaaaaaaacaaaaaaagaagaaaaaaaaaaaaaaagaatttgactattacagattgttgttgcaatttgtaagttaaactagcaaattactttccacacag

SEQ ID NO: 108187 - DNA, 1049 bp, Aquilegia coerulea
  Intron number 1 from transcript AcoGoldSmith_v1.007835m (l ocus AcoGoldSmith_v1.006122m.g) derived from phytozome v7. 0 (chr-ID scaffold_30; pos 2201117 to 2202165)
ctcttatacctgatcattacaaaactcttgaccaggttaattctctcatcatctcttccttgctatgtcttctagtgtctttgtacaaccattaattttcttatccactattatatagtatgtccaactgtacaatatagcactgcagccactgctgcactgccataccagatactttaaacttatgttattactccctgattagtcaatagtcatcaaaggctgatagccactgcatcctaacacatgaacccaaaacactgcgagtgagtccttggattggatgcaaatatgcaatggcaatttagtttctcccctctccccctccctcttcgaggacagtgaggaaaatccatgtttatggtggtagttgtcgcagacaacttatccctcaattttgtggacaccataatttggggtgtatggtgccctcaactgttcgacgtatgcagccaacccacagcctccatctatagcctcagcatatgttgggggcctcattgtgcccgccgaatcttataggtccaagcccgaccatattttacaatactacctttctcattcaaatacatactctggccatgctatatcccttcttttttttttaagctaacaacaactacttcactgtcatttatgataatatctatgtctacaaaggctggtggtagaggatcagtagttccacagtggtttactagtctagcttgttagatcatgagcaagctctttatcaaaaaaaaaaaaagatcatgagcaagctgattaccaaccctaaatacatatacattagatgaatataatgtttattccaagtgctatatgacaaacgaaaggcttccatgccaagatttaaatctgactctagtcaagacgaatataatgtttattccaagtgctaaatggcaaaatattgtcgaatgccactggtactgtacattacatatctttaatgattttagaaagaaatgcataaatttagtgaagtcacaaccagcattttgaatgttacaggtcacacttgccttgaaagaatcaggtcttgaatc

SEQ ID NO: 108188 - DNA, 835 bp, Aquilegia coerulea
  Intron number 1 from transcript AcoGoldSmith_v1.019839m (l ocus AcoGoldSmith_v1.019839m.g) derived from phytozome v7. 0 (chr-ID scaffold_71; pos 1005166 to 1006000)
ggtgttagaaaaagcgaacgagcttcgaggcacaggtgcagccataacacttgctccaaatgcatagctagctcttgatgtacttggtgttttacaaaagctcaagctcatctatacccctttccaaaagtaagtcaaaacaaaattttccatatatatgtatttttgtaatcgaattaaagaaaatatattaaactcaagtgatacttgattttattttataacattttatattttcaatcttatatatatatgtatatatgtttatttatcaggggaaagtttaccaatcttgcgaatggatctgtggaagaggtttcatatgttgaaaatgataggtaaatctaaatatataatcacgatttttgatatttctgcttttaatttacttggctaattggcatttgtaacaagtagcatcaattagcaatcaagatacaacaaatcttgttgctgccttgtttcagcttgcgttagaacatttctttattcttttccaaatgaatggcgtttaattttacattagccaacccaaacatgaaacatatacaataattaattagtttactccatccaatacatttgcgagttgtttattcaaattgtatgaactgaagttgtagtttacacttataaatttcaagtgaatgtcaaatgttgtgattctagcctgaatgcaggaacataagtggtcctatgacggtacataggagtgtcttagtagagaatctagcccaagaacttcctgtggatgcaatccgtttctcttcgaagttgagttcgattgaaactctcaaacacaatggttcatcatcagttgtccttaccttggacg

SEQ ID NO: 108189 - DNA, 831 bp, Aquilegia coerulea
  Intron number 1 from transcript AcoGoldSmith_v1.005235m (l ocus AcoGoldSmith_v1.005235m.g) derived from phytozome v7. 0 (chr-ID scaffold_49; pos 953747 to 954577 reverse strand )
ctaattctttctacttcaacaatagctttcaaaaggttagttacatttctacttcattttcttctatttagtttataatttcttttatagtctcttgggttttatgtttctgttataaattttctagctttatgtctgtttgatgtttaaactaaaatagctgagttcccaaatggtaatatattgagttgaaacatcgggaatttagtgtgaagtcttcaaagggtatttgaattatgatttaaaggttgaaagttgagaatatttgatcggttaatttcaattagataagtagacaagaggaagatgagctcgcaattttgagtgcattttagttgaagaaaaacacatacatataggagggggcgaacaaggaaatccgctgcaattctgcaaagactttggccatttatacaccatgtcaggaatttcactgttgggaatcattttgcctcattgcagttaggcagttagctatcaagtagtgccttattgtcgaggagattttggatatcgggtggagagatttgaatgtattctccactcagttaggaggcggatgtaaagtagggtcttatgttcctaagaaatttgttgcggtgaaatcatggtttacttgttttatatttgatctgaagtttgaagcatattatatttcataaaatctggtagttaattagttacagcgaattcttattttctttatgatgtgttgttttgtgttctagctcttcaatattgtagttttcattttcacaacaagtttgtgttttaacataaaatttggcaccaacagattcactctgatagacccacatcatcaggagcttt

SEQ ID NO: 108190 - DNA, 958 bp, Aquilegia coerulea
  Intron number 1 from transcript AcoGoldSmith_v1.008080m (l ocus AcoGoldSmith_v1.008080m.g) derived from phytozome v7. 0 (chr-ID scaffold_11; pos 6363175 to 6364132 reverse stra nd)
ctgtttcttctcttcagcagtaagtttgttttattattttataatctatccatttcttttttgtttaaaatataatttgattttgtgggtgttgttttatatattgtttaagggtttaaggaattaaattaagtagggtttatggtaagtaataagtggttaaaagagtaacaaattagggttttgtttgatattaggtgatttgtttagaaatagctaggttgttttctgttggggacccagaattttattcaatttgttaattttttggtactgtactactgctaccatggcggaatttatataactcctgtttcattgttttgtgttaggtctttgtagtaataatttaggcatttagcacacactactcttactctatagttaacgatgctatatcgaggtttgaactaatcaattcacctatcaaatgacaaatttttcgctcaaatgaatattttgaagttgacaaggtattagtcaaatgaagggtgaatcagttcactttgtattaataattatttggcgaacttggactatcactaataaaaaatggaccatattggtcttcttatagacttaaatggctaccacatctgcactaactccagcttcataaaactactgttaaaaatcatattaatcagatgtagattgacttctatacaaattgagctggtgaatattgttcttcttcatcacacgtcatttgatctaaagtttgtactttggattcaagcttatatgtggcacacaattgcaaaagattgtgctaacatcagagctacactttgaaaaaactgcagaatgtttacactgcagattatctagaatatcttacgttttaaatgacatccgtgctgcttgttttatcactgttttaggatgaaaatatggtgattagtaacgatctgtttttgtagtttccttggcgcaccctcatactcacagcttacgg

SEQ ID NO: 108191 - DNA, 733 bp, Aquilegia coerulea
  Intron number 3 from transcript AcoGoldSmith_v1.010879m (l ocus AcoGoldSmith_v1.010879m.g) derived from phytozome v7. 0 (chr-ID scaffold_30; pos 2005965 to 2006697 reverse stra nd)
ctttggacgaggtacctatgtgtattaatctgtttatgtttctataatgttgaattccctttggcacatattagcttctttttttcctctttggaagaacgagaaattaagagaataaaatttttaagctgttttgaaatttgtgtgccgttattgttggtatgacttgcataattttgtagcaacaaaatagagagaaaaacattccttttctatggcaggtagtgatccaatggagcttggattttaaggatacatattactccaatttaggcaatgtaggcaactttagatagatggatgtaagacagacacctctttgtgcggattggagcatggcatgagtttaaatctcctcaattccaaatgttagcatgttaaataagtgacatatgtgctgaccaagagtttgaatagtggaacatagaagaaggggttgtggtgcagttggtttgcaactcacattcttgcctgcaatgtggtcacaaagaaaatatgattgatatgtgctggaacatttgttggcagtttgattctttgccatatcgacatcctcttctcccactcaacttccatgactagaaacaacatacagtaatatcaatgagagcatgtgtctattgacaatagatagagctttcctcaacgttcaatttattaatatggtttacttttgacttttctgctcacttttgcaggtaaaagaaggaaggattcctgaaaaccgatttgc

SEQ ID NO: 108192 - DNA, 1038 bp, Aquilegia coerulea
  Intron number 2 from transcript AcoGoldSmith_v1.001955m (l ocus AcoGoldSmith_v1.001955m.g) derived from phytozome v7. 0 (chr-ID scaffold_9; pos 346010 to 347047)
tattgcccaagctgtatccatcatttttgacctaggtgattttctatccagtttgagattttacacgttttttttatattgaatttagaggatttgcaattgtgtaaagtcattaactggatattttgatgtttaaatttgttcatagtaatgtattgtctacagttaataatcaagtgaacttcatatagtactaaatactaatggagatattcgataatcgtaatgcagtaggataagattgtacatggtcaagttattgcacccaatgttaagcagggtactaatgtcacagaaaccaacattctttttaatttataccatgtcattggtaatgagcagacacgaagaaaacgtaaatttagttgacttgttgatcctgacatcccaaaaaacatcatattgtcttaagtctagcttttcaatttccaatcaccaccttagactgtcgatttactatgtcattgcccgacctagagtagctgttgaagtcacacttcgaattatataacattttttctttattcaactctttcaaaaacgaaccgtgagatgttttctttttttatgaaatagaaatttataaaaggaggccaaacaaaagtgacaagacaggaataaactggcttttgaaacaacaacagtctcaattggtgggtaatgcatgacgaactttttcgacgaaaattgtcctcatttatggaattgtattcagaacattgtttttatattatgatgccatggcggaaaagtactgactgaatttatggtactataaagttatattttcgcttgcttttttttcataaaaaattttcatttctttatacgaaccaagtgatctcaaactcttttctacgaattatatttatttattattgtttctcttctttctccgcctcccctcccctacccctccctctcctttttcttgttcttaaattatttctaaaactttatcatttgctctcatcttcttgtgtttgcttttctttcattccagctaaagctctacaatatctacattaccttggcatt

SEQ ID NO: 108193 - DNA, 900 bp, Aquilegia coerulea
  Intron number 1 from transcript AcoGoldSmith_v1.006093m (l ocus AcoGoldSmith_v1.006093m.g) derived from phytozome v7. 0 (chr-ID scaffold_43; pos 15123 to 16022 reverse strand)
agctacactgctcctgagtgtttccagaactgcaggtatttttctctttctgtgttgtaggattatcgatttataatggtcacagataacttcaaattttgattacaacttagttagctcatggttctttatgagttagttgacacggtaaagcctggaatcatagtagtttctgagtatagtgttggaaattatcataaatttgtaaatataagttagcctcgctgttatttatgtatttgttttaggtagtagagggaatggtaagtagtatatgactttgtgcagttcctcgaatcctagttcaaaatttggtgacatgtatcgtgctttattgacaatttagctactaagagtgtacaccatagtaaaaattctatttagttcatcaagaattcttgatccagtttgcattaattgtggaaacttgagcctatgggattgtttttgtgatagggatatggtctgctttatgttgaattcacacttccatatttgagttcttggagtacaaactgcaaaaatagaagtccaccagttcatcaaacttttggtacaataacatatgtttcgaaatgaaaagaaagagcacagtgtatggttatttgacagtagctgtggcgaacattcagaagtcagaaccaatcttcttgttttgtgttattgtcaatatttgcataagctgccaccaaaattcatgttatgtggtatttcttgcaagtgtccttattatgtaatttcactctacatttagtaaattatggtttgtattcgcattaggttacctagaatttagaaagtcctacaatgttgaattaagcatctgttatgatcagaatttcttatattggctatattcctccataatcagatacacggagaagagtgatatcttcagtt

SEQ ID NO: 108194 - DNA, 793 bp, Aquilegia coerulea
  Intron number 3 from transcript AcoGoldSmith_v1.000863m (l ocus AcoGoldSmith_v1.000829m.g) derived from phytozome v7. 0 (chr-ID scaffold_1; pos 7857658 to 7858450 reverse stran d)
agaagcattctgaagttgctgcaacttacattgaggtagaattctggactatctgaagtgttcacttttttagattcaacacttttttaatatctcatgtgctgtgtgattctgttctatgctgtaataaccatgatggaaagcttacactttggactgctacagtttgggtgttattcctattttttttttcctatgcatatttcatttaatttatttgattgtagctgttagatttttgtgttcttaatactgttggtaattctacgggcttaactaactaatttacctttcttggaactaagaataagttatcttcgaatttacctctcttggaactaagaataagttatcttctttccgcaaggaaggtctttctttttgattctgtgaaaaacataatattttatttagaagtgtgtagtggtcacacaaatgattgaagtcatcttattgttggttcaactcatagagcctgtagtcctatagatagccctccctcccttccttccccctttgttataatttgcaatttcacctgcttacactgtgatgtctggcgtctgcagatgattacactgactcactgaatctgtattgtactatgttgtgtactgtattcgtccaccagtgcttgtgaagcagttttcacttttcacaccctgggatgtactttataacactgataaatatagtgctatttaactaaaataaaaataaaaatatgagcttactgaatatgaaccttgaatgagcagactcaacaaataaaggcacgggaacagcagcagca

SEQ ID NO: 108195 - DNA, 413 bp, Aquilegia coerulea
  Intron number 1 from transcript AcoGoldSmith_v1.000863m (l ocus AcoGoldSmith_v1.000829m.g) derived from phytozome v7. 0 (chr-ID scaffold_1; pos 7858719 to 7859131 reverse stran d)
tctcagaccaactgggaagctgataaaatgtgagttcatcattatcatttattttagtactcttttctggtttttttttttttttttggataaaaattggggtttgaagggagtacacttcaatttatctttttttttgttgaatttctaagctagggatatgatttggggttttctcttcaatggtaatttttgatttttgtgtttctaatatgaatataaatttagggtttaggttttctttgctgtttcagtaatgggtgttttttaaaatgtatttctctttgatttcagttgtgctttacttgaaaaagctatgcttcagtttatttgataaatacttgtctctttttttttttttttttttggaagttttggtttttatacctgaggtttgttgtgaaacaggttgg

SEQ ID NO: 108196 - DNA, 639 bp, Aquilegia coerulea
  Intron number 2 from transcript AcoGoldSmith_v1.026766m (l ocus AcoGoldSmith_v1.026766m.g) derived from phytozome v7. 0 (chr-ID scaffold_40; pos 1930613 to 1931251 reverse stra nd)
acgtaaacttttctcttcacgaaaaaaggtaaacctgagaattgccttagcttggattcctcaagtaaataatctgcatatattgcattcacgatgctagcttttagatgggaaagttattatggggtggcgcttcaagaataaaagtctattttcacctcctattggagtactagcatgtaaccacaaaccaagatataaattagattataatagctggttattcacatggcaaaggtttgtgcacatttcacaactattaatcgggtccatgtagtttattcgtaaatcaaaatttatttatgatccccacttttaaaattactatatcttttttaccttttagtttctaccgcaaattttaaagaaatgtgagaaaatgatctcagttaaccaactaagtggaataatagtttgtttatatggattcctggatggtgcaccctctcttcttcacaaatatactgctcctgtacttttctgaatccattgtgctttacatcggctaaatagatggctttatgtatgcatactatggtgctagcaatctcattgcaaatgatcatcctttcatgagtaacgttgttttggtcgacctatgcagcttgggtttgatctttggtcggagtggaagtggga

SEQ ID NO: 108197 - DNA, 718 bp, Aquilegia coerulea
  Intron number 2 from transcript AcoGoldSmith_v1.027633m (l ocus AcoGoldSmith_v1.027633m.g) derived from phytozome v7. 0 (chr-ID scaffold_1; pos 6411855 to 6412572)
gtcagcaggtttttatttgttttatttttaatctatatatggattccaattttcacttttctaagcaatttaaattcatttaattcttattgttgatatggcatcatcgtacaaattttctgctagatagttattaggcctggaaagcctatactgtatatgaaaaccttaacgctatttttgtaacagcaatatttccctgtgaatctcaactttttattaaaaaaatttcttgtttatcttactccaagatctccctacagtccaatctgattaaactattgctgcttggatgaagcagtaagttttgaatattatttaacatccctaatagatattatgtcggggatcataggcttaggcaacaaagtgttcacaaaacctgcattttactttgcttttagcatgaacttgtgtttgttttatggattaccatgtacacatatatattccatcatttgctaaggggttgccttcctcatagaatattagtttttctgttttcttggtgaagaaaaaaaatagtagatgtgtctgaatcacggcttctggatagtcttttgcaaaactgacatttccacgctagaatcctgagttgtttaaaagccaaagagaagtgaagtcatagctcatctatttcaaagcttctccaacattaatacagcctgctgaactaagttacttcaatggcaggtgacctttcactatattggctaca

SEQ ID NO: 108198 - DNA, 1029 bp, Aquilegia coerulea
  Intron number 2 from transcript AcoGoldSmith_v1.017978m (l ocus AcoGoldSmith_v1.017978m.g) derived from phytozome v7. 0 (chr-ID scaffold_21; pos 845867 to 846895 reverse strand )
tggtatgtcttaccggtttttatttatttattaattggtttgtggcttttcaatgatactgtgttttgtgttaggtgttacataacaaaatgtaaaatcaatattttcttggtagatttctactcatagatgtagtcttttgtcaaattagaaattttcattgaaaatgacagaaaccaatgttaccaatttttgttttgcttattttagttacgtttagagctaacaaatgtttgtataacaaccatttcttttggagttgacaagtttctttattgaaaatgatactgtgacacattgcacacattactagtttccttgaggaacaatttcaaggtctatttataagactttagaaatatggatgataaattgaaaactgatagtgtgacgaaccaatcaaaaggagaaagattttgaataaagcaaaacctttaggagcaaactcaaactttttctctatagtatattacacataatataaagattctgactgctagttctgtttcactggcaaaattatacttgtgtttaaacaaatattagtttaaagtacaacaacttatgtatttagatgtgcagatgtgtaaacaaatatcaatagaagtacaaagatttaagtatttagatttgcatgtttgtctcgtctgtgtgacactattgtgattggagtggatgcttagctttagttttcatgtaactgtatactgccattatgagagattatctatcacttctaattttaactgccctattagtgtctggtatagttctttccattggttatatatgtattcatttcattttaacaaatgagatcacaatgtagagcagtattaccattcgactattatgatacaattgcaaataaagtccttaaatttagatctttaaaacccattcctccctgaacaaatcatacaatttaccctatttgaatttgatatataaattgaacaacattttcctcataaatatcagaaaatttgctttcttcacaggggttataagcgattcttcaaacgaaca

SEQ ID NO: 108199 - DNA, 830 bp, Aquilegia coerulea
  Intron number 2 from transcript AcoGoldSmith_v1.013570m (l ocus AcoGoldSmith_v1.013570m.g) derived from phytozome v7. 0 (chr-ID scaffold_77; pos 3834 to 4663)
ctcatagcagtgccgtacctgagattttgggggccctagtttttttttttaaagtcaagatacctaaggccgttaaatttatttaaaaaaaaaaaaaaattaaataataatatacacatatagatgaatttgaaaaatatatttgaagttatattagattgagatttttgtttgattaattgagagaaggggaaacaaagaaagtgaatttaggtttttgttctaggagagatagagccatggaagtgagaaagaaagctattacaatatgtcaagaagtctaatgaattgaactgggcttcaattgagagagagagtctcctcccatattgccaccccggcagtttacaaagagctatcccacttacgacaaaaacccttaaaaaatttatgtacaccctatactaagagccacccgcctacattaaccattcaattccttcatcttcccgatctagatttcaaaaacaaagaaacacatagcatatatcaaaatcaaatagaaagaagaagaaataatttggcaagaaagacatgttccaatgtgatgggtggaaacaaaataactgatggctagggtgcagtgggattcaaataaagttgaacttgcattagtccccccccccccccccccgattaacttgtattgctttaaaaaaaaaaaatgtacccaaaaattcaatacattaaatctatcactaacactgtctttgactaaaaactgtagttcaaaattgaaaaagaatttaaacagaagatattggggaaacatatttatgataaattcaaaaatagaaaagaatttaatcaaaaaatacggattacaaata

SEQ ID NO: 108200 - DNA, 617 bp, Aquilegia coerulea
  Intron number 1 from transcript AcoGoldSmith_v1.006449m (l ocus AcoGoldSmith_v1.006449m.g) derived from phytozome v7. 0 (chr-ID scaffold_1; pos 2349605 to 2350221 reverse stran d)
tgtgctttccggcttttcgttctgctttgtatactgtatgttctgttcttcttattcattcattttatgtagctttgttggtgaagtttatagtcatgatctgtgtatccaagaacttgtaaattataatgaaatttgatgtaagatgtcacttatgacaaaacaaaaaataataattatatatatgatatttatctgtattaaacagaggtaagacactaattaccttatagaaatccatttttgaatgaaaccagaagatttcattttcgcgtgaaaaggaaagagttagaaaacttgttgtatttttatgttgtagaaatataattgttggtcatgatgatgggtttgatcttagatcatccataaaacagaggaaacagagatacaaggatttgcaatgggaatattcggttcatttactaactttcttcttataattatgatctaattgattgagtataaaatgagacttggaagaaaaaacgggttttgggcaagatcatatcaaactgtatctatttccagttttcagatttctttcattgcctttggaataagcctacgccttattctgatgaagtaagatattgatcacttttgcgcgtcttttgcag

SEQ ID NO: 108201 - DNA, 812 bp, Aquilegia coerulea
  Intron number 4 from transcript AcoGoldSmith_v1.005211m (l ocus AcoGoldSmith_v1.005211m.g) derived from phytozome v7. 0 (chr-ID scaffold_11; pos 5379279 to 5380090 reverse stra nd)
ctttggatttggaggtatgttcttatcagtgtatttcggccaacatgttttgagcatatcttctagataatctgtactactttataaaggcgcctcattttcgaggtacttgcgaagccttagctgtcacatatttagatttccacgtattcaggttttttaacttaaacttaaatataaattgggccttaaaacaaagcccaacactgtttaagctcaacaaccaaacagacttgattttttttccaatccttctagatttccatttctttttcaagagtcttcttcatcttcctaccaatctgttcgtctgagatcatttttgattcacttttcttcagttttaattgctgattaatttcacaaattttgattccttgctgctactctgttcttcggtttcacttttacttcaatttcaattgctaatcaatttttcgaattgtgattcattctcccctctctggtttgggtaatctcttaatttttgttttctttttgaattatattatggtaatttgatttttttagtgggtaaatgtttctgatttgaaagagagcgtaggctgatcaagcaatgtatatgttttttttttttggtagataaaattactacactttatcaaataaacaactatcagaattcaccgtttattatgcactatatatagtttgtattcaattatgtgttgtgcatgtgtgctaaaatatgatcaggttcttttttataccattactgaatctttcgcgtgcacattcacataatgttgattaaaatcttatggttgtacacattatgacagcctcaacgc

SEQ ID NO: 108202 - DNA, 693 bp, Aquilegia coerulea
  Intron number 1 from transcript AcoGoldSmith_v1.005211m (l ocus AcoGoldSmith_v1.005211m.g) derived from phytozome v7. 0 (chr-ID scaffold_11; pos 5381085 to 5381777 reverse stra nd)
gaattcaaggaaacaaattaagctctcagattcaggtagacttcttaacacttcgatctacacaaaatgtaactcaatttgtttcaattcttctggcattaatgagaaatgcagctttaattaatttccttgatgtcttgttgcacttagttgtttttcttagctgaatttgagtaaattctgcgaattatgtaggtttgaatgttctacttagggtttgaagttgaagtagtttaaaaaggttaaattaatgaataaaattgatttaggggttaggcaaagacaagagagttgatagaaggtagatagaagaagaccttattgagtttcttgcttgcttgcagggtaatttctttttatttttttatttgaaagtgttatttatatattaagtcttctctttcatattagtctatattaatgtttggaagaaaaacatttttgtgttttcctcgaactttcgcgctttggtcaaatggtatactaatttgagtaatttctcagtttaaatgggtgtacaatgttctttagtttcttacaacaaagacattacagtgagttttaattctgattagtttgagtttatgctttctgtgatatctgaatccattaaccatttctcttcttcttattatgtttgatttgctatgctatgcaggtggtttttgtgaagtagagaagttgactttgtta

SEQ ID NO: 108203 - DNA, 293 bp, Aquilegia coerulea
  Intron number 3 from transcript AcoGoldSmith_v1.020707m (l ocus AcoGoldSmith_v1.020707m.g) derived from phytozome v7. 0 (chr-ID scaffold_15; pos 1896277 to 1896569)
agttgatcgaatctcgaaaggagttgattagtgtaagtatcatgtttgaattgggaaaaactattttcgacattgattgaattatttatgaagagcaattgtgtttatgattcttttcattcttaaaaagttaaaatggcaaaacatgaaaagtgaactccattcatccaattgtgtatgtcaacttttgaacaatcttgtacttttgattctattcatcttctctattgatacaaaattcatcctttcatacatctctttgcagggttggaaaggtttttcggataatttgt

SEQ ID NO: 108204 - DNA, 498 bp, Aquilegia coerulea
  Intron number 2 from transcript AcoGoldSmith_v1.001127m (l ocus AcoGoldSmith_v1.001127m.g) derived from phytozome v7. 0 (chr-ID scaffold_30; pos 2491300 to 2491797 reverse stra nd)
gtcaaggtaagtctctatatatgactataatttcacttttgatcattcttttctactattgtctatgaaaattaaagcaggtgcttggctctgttgtgccgacagccaacatacttgtatatatttgaaactgggtcaatatgtatctccatccaatagattcttgtttgttgggaaaaacattcgttcatgaaaaaaaatatacctaagctttactgtaaaagcttctagtctttattattataaaaattggaccagaaaattacatcagaagcttgacacacacatttaacatatctctagataaagaaagttttgagctgctttcagccaccctaaggaaattaagaatgaattgttagatacgtacttacgtagattttaacaagaatatgtatgaccctattcgttttccttaaataatgaccaggtggttacagtgtatactttctttcttcaacaggtggaacatttgcgctatattcattactttgtcga

SEQ ID NO: 108205 - DNA, 459 bp, Aquilegia coerulea
  Intron number 1 from transcript AcoGoldSmith_v1.002117m (l ocus AcoGoldSmith_v1.002117m.g) derived from phytozome v7. 0 (chr-ID scaffold_9; pos 2528454 to 2528912 reverse stran d)
tttgtcttcttcttcttcaacatctttatcataaggtaatctctttcttcctttcgatctctattttttgtttttatttagtgaaatcggatttagtcgattgagctttggatttcattttctatgttgtttggttaatgatgaatataggtatcttcgtatctgctttcgcgatgttgttaggtcgagtttgtaattttgtttgattgtgtttttgtacatgtgtttgtttttattgtttctgaaatcgattgttctgatctgttttagggtttacatttgaggatttttgcgaaaaagggaaaggttttgattgctttaagacaaagaaatttttgttatttatttgggtttggtggtggagagaatttggggtttttttttcgtatttgaagctttttataagaaccattgttgaacgcagaacacagctctctggtatttaggtgtgatatcgag

SEQ ID NO: 108206 - DNA, 488 bp, Aquilegia coerulea
  Intron number 1 from transcript AcoGoldSmith_v1.019902m (l ocus AcoGoldSmith_v1.019902m.g) derived from phytozome v7. 0 (chr-ID scaffold_18; pos 2228081 to 2228568)
gtaagagacctataagtttataacacaaccctactctcaattgctgtaccaatcccatgattaaaaggtttattataaactgaatttgattcctcttactcacaattgtgagttgccagtgtcaatatatttattattaacaatggtctcgctttcgcttagtatcttaatttcttcttttgaaaaggctgctaataaactgattttgaatttttgatggtttgtagaagttagataatattgatcacattacagttttaacatgattgagtgattttgaaactgttcacaagtacgaataagaatatggacaattcattctcttcttcaattatttcacctacatacctactcactcaagctgcattctaaaagagttgtctttgttcctttctttatttttgtttgtctatattgattagagttaaacattttgagactattctgtaagcatatcaacttctccatttccttttgcagcctgtttc

SEQ ID NO: 108207 - DNA, 775 bp, Aquilegia coerulea
  Intron number 1 from transcript AcoGoldSmith_v1.004413m (l ocus AcoGoldSmith_v1.004413m.g) derived from phytozome v7. 0 (chr-ID scaffold_37; pos 1400463 to 1401237)
ttctcttgcacttgcaggtatacttaatcttcacttctctcttcttctttttcttctacaaagtttcgagctttgtaattattcagttgttcaagttcactatcagtaatttctatagctatatttattggaaaaatttctctgttttgctcgaattattcctttgaaagtttgatttaaggtttggggtggttttttcagtttctggggttagctttaattcatgttaattttgtttttatagtggataattggatctgggtattgattataattgccaattgtggtgaattcactgaattctgatctaagttttattattttttcttctttcaagctttgcaagagtgttgcaaatacttttttcatagatcaaaactttgcgatttcaagctttaatacttttttcatagatcaaaactttgcgatttcaaattttcacttgcttgcttaattcagttacaggtgtgtctcttatcatttgtagaagatatagttttgacatgagttactccaaggtcgggtaatggagttgatggtttgggtgtttatagtgattaattgagactgggtgtcgggtatttttgctaatcattctaaattgctgtgtatagtctgatctgggtgtcgggtgattcaaacatatctcattttaaacttttgtaccaaatctatttagtaattagtaatggtagggggaggcaaatttttgtgtatttatccctctgagcagtttgttgttctttttttacttcatagtgaaacatattggaga

SEQ ID NO: 108208 - DNA, 805 bp, Aquilegia coerulea
  Intron number 2 from transcript AcoGoldSmith_v1.004413m (l ocus AcoGoldSmith_v1.004413m.g) derived from phytozome v7. 0 (chr-ID scaffold_37; pos 1402177 to 1402981)
gttttggcaaatcattcaggtatttttttggattttcatcttccatttgactgccagtctgccagttttgaagtatactgaattattgatctagtctatttatttaactaggctgtgcacagtatttcacaatatgacgaagatgatcggattgtttttcattatttctgtgagttagccagttaggcattgctctttgaaagaagatgccttttaatatagtattacccatcaactgatggaagattcatatacactattaatgtgttctagagaagaacatattagttggagcaatctatttgtttttgtttgttcagctcttaatcactgatgtgccttcaacattcctagtagtgatgcatcgaatagaaagaaaactggctggtagtcttcatttacggtaacctatcgagaaatggggatgtcctttacaactgtatgttttatttgtttgggaatgaaatagtgtcatttgacatgaatgggttggaataagaattcgataaaaggatgtgagctccaaataaatttaccgcgttggggtagtctggtgaactgcacgccgttttatccttgatcaaagtcaaactagagtcccttatttgagttatttccagattaggaaatagtatggaagtacttcatatggtataaacaatgttgatattatcaaaatatttggcatctgttgatattattggttactgtgtagaattttattgataaccatatttatgttatattaacctttaaacatgatccagcagcaccaacagtcacaacacagacggcaaggatccaa

SEQ ID NO: 108209 - DNA, 1008 bp, Aquilegia coerulea
  Intron number 3 from transcript AcoGoldSmith_v1.005452m (l ocus AcoGoldSmith_v1.005452m.g) derived from phytozome v7. 0 (chr-ID scaffold_27; pos 2576962 to 2577969 reverse stra nd)
gacttgttctttatcactgataacatgtgagtgtgtttgttctataatttgcttcttaacattttagttggagaaatatattatcttgtttttgcattatggtaatgcagtagtgactagtgagttgcgactctttcaacttaagtcacttcacttgatcatttgtattcaaaaacaatacctgtttgggtccattgttactaactttctacatgtaatgtaatttattttttgatggattggaaatttgatattgtaaaccaagtcctcaaaaaggcacattcaagacccagttttaaaatataagaacattattgaggaaagaaggaaattattgttgttagtggctgatgtgtctattatatctgatgtaaggattggcttcattgaatctagtccaagtgtatcaccagttgcatattattgttgttattatatggaagctgtgggctctgttttgttacgctgagataaggtcaatggtataggcggaataatggtctaagcggatgtgcctcaattgggtgacatgggtgccttaaaatttctgttaaagttaaagtagatttatctctgccacttagacacactcttatcttagtcaaatattttgtgtaatacataacctcatacactgctttattaattattgtattttgtcaatatctttctgaatttctgatactggtatgtccaaagatctgaagagagatcaatgtaaatattttgtcagagaatggtgagaaactaaaatagagtcccctttgaatccttagttcagttagttgtgactgtaatggaacataagttataatttaatcatttagctgttactcttggaaaaccctttgcatttattggaaactattcttcctaccaaaagtaggtaaatgatgcaatgttttggattttgttgtaatttcaggtttcaattagtaagtggtaactaatatagtatccttatcgtctttaattttagggaccttttacacacaagaagaagacagg

SEQ ID NO: 108210 - DNA, 853 bp, Aquilegia coerulea
  Intron number 1 from transcript AcoGoldSmith_v1.018999m (l ocus AcoGoldSmith_v1.018999m.g) derived from phytozome v7. 0 (chr-ID scaffold_6; pos 8812535 to 8813387)
gtaaatgaaaataaggcgaggtgggggaaggatatcggcatttgctgtagtaattgtttgattcaactggagaggttcttgtaatattcaatggaccacaaggaatagttaaaagaatcaaacaaagtttgagcagggaagatttcccatattcacatcgagaaaagggaatgatgctttactttacccacattgtgtaaagttccaaacaaggctttgcatgcaaagcatatgtaactttgcttgccaccctctccccatttcaccactagctagcagactggcaccaatacaatttccacaaagcttgcttccatgtcttccttccttcactttctcttccttcccttcgtataaaacaaccttggtggtcctattcctctgatattccgataaacatattggcttattagtaacacaggtctcacaaaatggaaagtttggctaagcagatgaggtaagtgcgcgttcattaatttatatcgcctccctataactaaattagtttcatattaatgatcaatgcatgtttacgattttcacgcacatttgaggattataaactggttgctgaagcgaaagttttaagaaaattttcatgcatatacttttccatggcctattcataactcagaccatttctgtaatctgatatccagaatatcaaactaatacgtactcttataactgagcagtatttgctaactttctttgttttcctgatgttgtgtaagctcgatttgttcttcctttagtcttagttcatattgaaataactgaaaacctttgttagggtgagattttctggtttaggacaggataaccaagaagggccaaatagcgtaaaagaaag

SEQ ID NO: 108211 - DNA, 964 bp, Aquilegia coerulea
  Intron number 1 from transcript AcoGoldSmith_v1.007434m (l ocus AcoGoldSmith_v1.007434m.g) derived from phytozome v7. 0 (chr-ID scaffold_27; pos 3143970 to 3144933)
tcttgctacaagggaaaatatcgtaaaccttctaacttattttaattgttttgaattaatgtttcattttgagattgatcttatatgtgttagttgttttcaatgtttgattatttgctgaaagatttttttttagatttctgttagagtttataaaatcttaactagttttggtcttgtttgagatttgaaggtggtacatgattggaaatactatgattttctatagatcttatggaaagatattatttttgatgtgggggtttttgttttgtgtcattatcaagggtttataatgatttgcagaaatatgtattttgcataatcacttagtagattgattaaaattttgactaggaatacggaacaaatagtatgcaagatcaaccattcttaccatagtctaattcatttttgtgttttatgttgaattttacatccataatgctcgaaattatgtaggttttacagaatttgttaagtttgtttaaatgcctgttattctagtgctttgttagtcctatttcgcgtgaaatccgtgaagtagttttaaatgtccaggaaacttaatcacaggggatgataacaatgagtttgagatttgtatgataatattgtttctttgttcatacccttgtccatgtgtgtcttctcgtggtgactagttagtgaatttttctgtcttttgggggtacatgagctattacataagtgtagtataatgttatttaggattcattcatacaatgatagcacgatgttcagataaaatgttaatggatattgggtagtacaataaaataaacattgttgtttttcctttaatcttaccagataagatgtgatcgtttttttgttagcttattgcattttcgtatctgaatatttataaatgtcaaattacttactctgtaattctgtatatatgtttggtaattaactttgttcatattcttttgtctag

SEQ ID NO: 108212 - DNA, 475 bp, Aquilegia coerulea
  Intron number 2 from transcript AcoGoldSmith_v1.004297m (l ocus AcoGoldSmith_v1.004297m.g) derived from phytozome v7. 0 (chr-ID scaffold_27; pos 521809 to 522283 reverse strand )
acccttttatcgtgcagcttaaatactcattccaggtaatgctctatcttttttgtatctgtgttagttttctttaaagatatttaaattgctgtatatatatgtttgttttcaggtttaatattttgggcttttgatatttaccaattaatggacaaattgtttagttgctgtatattttcttataattccgtttcacaaacacgttcttttagagaacttgtatattttcttatactaggtctttgtagtttgtttttatcaaaaacccccatgaagaaatctgcatatgttatttagaaatgggttgtctaactgttgtcaatcccattgaattcaaaatgctatttattagttttgttaacaatgtataaatgtttgttcattcctagtttcagcgcaatatattaagactaagctcaattatttatgtcttgcagaccaagtacagactgtaccttgtgctggattttgt

SEQ ID NO: 108213 - DNA, 971 bp, Aquilegia coerulea
  Intron number 1 from transcript AcoGoldSmith_v1.004297m (l ocus AcoGoldSmith_v1.004297m.g) derived from phytozome v7. 0 (chr-ID scaffold_27; pos 523174 to 524144 reverse strand )
tctcttcgttccttgtctctgctcacaaccttcaggtaacacgtttcttcagatctcttttattattttttttcttttttttttttttttaattttgttcagttttgatttatacattgttagggtttcgttaacttacagctttggttttaatcttatttttattataattattagtttgatctgagttgtcgtttgagatctgtttgaattccattctcattatctataattcttctcagtatataggttcttttaattggtcatagttgcaaagtagttctcttgatctgaatttcggtatgtttggttgacaaattttgctgtttatatgacaattctatgcaatttttccacaataattattttgttcatgtatttattgtgattagaaaaggtaggagttttgtcaagctaggagtttatatatgaaatcttttcttatcaggttattaggagtttagccctggaagggtaacacttgtttggaaagattttgagtttagatgtttttcatggtctcgtttgcaaattttaaagatattaaaacacccacttcaaacatattaccatcgattcaacttttgatttagttacttttgtgggtcaaatgtgggtgacagctaatggcagcttaatgtaattatcatgcttctctttatatgatagacttcaatggcttgtaatcccccattttggtttaactattcttaaattttactaataaagtttctttcttgatatttttgtcgcaacaatattgtgtaatttatagctatgacaattcaatttctttcgaaaagaaacatggtgttctatgttgcacttgttattatgactatctttaatacattcgcaccctccagatatgttatctcatactcttgctaaatatcttacgacttagattcagttcactatgactaacttttttatattcacatttttctcagattgagaacttgatcttc

SEQ ID NO: 108214 - DNA, 555 bp, Aquilegia coerulea
  Intron number 1 from transcript AcoGoldSmith_v1.006560m (l ocus AcoGoldSmith_v1.006560m.g) derived from phytozome v7. 0 (chr-ID scaffold_18; pos 3003690 to 3004244 reverse stra nd)
gttatccaagtgtatacatttggattctaacaaccgtacgatctcttcgatttaatcaccattatcaactttcaaaccttaataagatctttttgatttttttttttttttctcgccgttactgttttgtttgtttgattcttctttagctcttcatcgagatctttttggtaattttttttctgtttttaaattcgttagaaatgatgttttttttttttttctcgattttcaataattttttgttgatttttatttatttaggtttttgaagaaatctgtggtttttgtaagatttgtgaattttttttttccatttttttctttgattttgaattgtaaaaactattgtagaagattttgattcttttagtttctgatttttcgaaaagttgtgtttgatcacatgttttcacttgcaaacacatttttgtaggtttttattttgttttttaattatagatctgaaataaatttatctgactttgatcttggtgttgattgtaaatttcttgtcattttgcagtatttaacttggagaaaagtggtattgga

SEQ ID NO: 108215 - DNA, 797 bp, Aquilegia coerulea
  Intron number 2 from transcript AcoGoldSmith_v1.009396m (l ocus AcoGoldSmith_v1.009396m.g) derived from phytozome v7. 0 (chr-ID scaffold_27; pos 2407091 to 2407887)
catacgaaaagtgtgaacacccagcacctctttctgtaagttatcttttccatcttcggtatttttttatgtgggtggttgtgtgtatcagtttggggctttgttaacttcattgctagtaagctagctgggggatttacaatgctagttaattggttagttgcattttgcattttagtatattagcaaggttttagattaaaatggtgaagtaatgtcaacaaattttttttgagcttatcaagtattatatgatttctggacctgtttggggtttatctctgtggaaaagcagacaccactgcttcttgagattccttgagttggttttcttgaatcttgccctgttccatatcccgataagttttatcattctgtatatgagtgttgccttattcatgtagtttgcttattttttttcttgtgtatgcgtgtaaacactatttcaatatttaacaagtgtgttacctccttccgctccactccccctccgcacctgcatccccacccaaaacaaaaatatataaaaatgaaaaggtacaatcagtgctttgaagctttaaaggaggtaaaggtcaagacagagtaacagttttagaatatgattcatgaccactgccatggtatctgaaaaagtcctattcataaaaacatcatggtgtctgtacaagttttctatggtgtaacctctttcgtgtgttttttggtggccattgtagacagttgaatagtttttacttattttggcatgttgtcttgcagactcccaagaagcttgtatctgctttaaaaggtag

SEQ ID NO: 108216 - DNA, 938 bp, Aquilegia coerulea
  Intron number 1 from transcript AcoGoldSmith_v1.022246m (l ocus AcoGoldSmith_v1.022246m.g) derived from phytozome v7. 0 (chr-ID scaffold_12; pos 2509773 to 2510710)
cacaggtatgtccctttaagatataatcactatgatttgcaaagttctaaattatatcctttgtttgttgaaagaaaatactgaaaaggataattcaaccaattcttttcttagttgggaacttatcagcttttttccttgtaagacaaagaaagtcttacaagctaggaaaggaaaaccttaaaactaaaagttttccttaaggaataaaaatatagagagagagaaacatgtagtgtgtagtgttacttgtttcaagataaacaagctagtgtgtagcttgtttgatttcatattttggcatagaccaaaacatagagaaacaacttacaacttatttagttgtttagataaaccactaaggtttagtgtgtttagaaatagtaagacaattaggttttggtttgtctagagagtattacgaggaagagattcttgtaatcttcataatattcaataaagaatatttacttctattgtttaatttgggatcttgtgttttacttcaagatcttgtgtttttgttcatctttatttactgttattgtttaattccgcactcaatagtgttttttttttttttttggttggcaagcgaggttgaggggacccctaccccttttaaattacgtgtagaaacttatatcaacaatccgctgttgacgtgtttcgaacccacgaccactccactttgtgagaggggtgctaccactgagccacaggctcattcgccactcaatagttatttttacctagcaatttatatcatctcatgtgtcaactgtacatttcttaatggtatcttttaaagtccagctaattgtatatgcaactatcttttaaaacagtattatacactaattatgtttgtttatattgttggatgatggcgttgatcttgccactagacattgacgagtgcttgccagaatacaaaa

SEQ ID NO: 108217 - DNA, 948 bp, Aquilegia coerulea
  Intron number 2 from transcript AcoGoldSmith_v1.005451m (l ocus AcoGoldSmith_v1.005463m.g) derived from phytozome v7. 0 (chr-ID scaffold_49; pos 687024 to 687971 reverse strand )
tcttcatacatgtaagcctcttctctttcttggtttttttttctctaaatttactgactttcttctacttattttgtgtttttatcacttgggttgtttaggatttgttgttatgatgtgggaatgttatatttcgcgtttttatgatttgggtcgtttgaatttaacgattttaccatctgggttgtttggattttgcgatttcatgaattgggtgtcaatgttttcgttgatttgccgcttagtttttgttttgatcgtttttttagattgaagcttcatagtaaggtacaattactatgactcaacatacaaatacaagaagaaagattgtatctttagttaaggggcagtaaagcttgttgcctacattcgtgttctgttgatttgttttttactgaatattgtgtctttatcttggacgatttgttatgtggtgataacgtaattatattgttggtagatatttgaagaaattgatttcttcattttgatgatgaactttcggatattaaaagagttgtaatactgatagtcgacaaaattatggataattatgctgtcctgatgaggaaagctctgacttaatgcctccaatcacctttctactttattattctcgacaatctttcatgaccactaatgtagttcttaaaagaaacaagcttgaattggtagttagaactgatcagattttatccttaacaattgcaacgtggcgataaatgttcttcctaatcattgtaacgtggctatttgcagtttactctgtccctttatgcttagttacttatttcatggaagtgcagacatttaatgcataatttctctttttattttccgtgtacacatccaatttccatcacttttgaagaaacatttttaatagtgttaaccagaattttcaattcagtttgcaggaagtgcatatacaagaagctcacacat

SEQ ID NO: 108218 - DNA, 607 bp, Aquilegia coerulea
  Intron number 1 from transcript AcoGoldSmith_v1.009376m (l ocus AcoGoldSmith_v1.009376m.g) derived from phytozome v7. 0 (chr-ID scaffold_7; pos 739765 to 740371)
atcaatcaagaaaagctacagtttgaatctaaaaggtaagaaaaaataaattaatttgtttccttttgttatatatatgagaaaatctcattcaaatcgttaaaagatttttcattatctttaatcggatctataaagatcttaaatctatcttttctttccattttaaaaaaaaaaaaaacttcttcaagtttgaatctctctctctctctctctctctctctctttctctttctttctagttcaagaagaagaagatgaagaagaagaacggttttagagagagagagaaggttatcttgaaccgtaagtgaaggatagatgtagttttgcagttaagaagtcatatcatttcatatcatcacttggtagttattattattagatctttcaagtctagcaacctttttctttgataccttttcgtctacttttttttaataaatacagtaggattgttttagattctagggttaacaagattcttggtagaaatctttaattatggatttcaagtatctttaatttgattagaaaaccctaattctgattcttatgttttaattgttttgatttataggtactactactactactactactaaaa

SEQ ID NO: 108219 - DNA, 891 bp, Aquilegia coerulea
  Intron number 1 from transcript AcoGoldSmith_v1.022423m (l ocus AcoGoldSmith_v1.022423m.g) derived from phytozome v7. 0 (chr-ID scaffold_30; pos 2539775 to 2540665)
gaacaacttacaaaaaggtgagattatcacttatcagatccttaattctaactttttcctcttttcagattcaaatataatggtattaatatttaacactgttcatgtcatatacaattatacatacatgaaacatcaactgtaaccatctacataatatatatcatagagtcagtacttacggtttgtttgattgcacaggaagcactaaataaatcatccttcaaataaatacagtaataatatgtagatatctcaccaaaatctccatcacagtcagtacacaaattgatatatgactagattttgtcgattccatatacatttataagattgataaattaataaaggtaaacaagcacttaaaaagaaaagagagagaacagtacagaatgttgttcattaattgtattgcggtaaaaaattttgcacaggtttagtttaattgagtttgatatacagtgatgccataaggctatatcaaggtaagacgcgtgtatgtattgtaatcgtttcgatcatatttacacctaacaattagcagtgctccagcgttttggagggtactttcgaaccacggcctaacgacgttgatgtgaaaaatttagtcccaccacttaatactattactagatcattacattctacacttgaatcttcaggttgttaataataagcctcaactcgatttcgtctttcaagtagaaaaatatacatatattggggcatagaacataaacacttttaaactctatataagaaagattggaaattattgatagttaattaacataaattagtataacgagtgaaggatttaaatgatctgttgctaacacgatactaatggatacaggtctcttggcggaggtaaggaagagacaaaagacg

SEQ ID NO: 108220 - DNA, 374 bp, Aquilegia coerulea
  Intron number 1 from transcript AcoGoldSmith_v1.005252m (l ocus AcoGoldSmith_v1.005252m.g) derived from phytozome v7. 0 (chr-ID scaffold_18; pos 2418798 to 2419171 reverse stra nd)
tctttcacatcaaagtgcttcttttcttcttcttggtaatgattaaaagttctagtaaagttatttcaattccttagcttctactgtatttaatttaatcatatacaatatgttgttttatgttttttcttgctttgaatttgactgttattgtgaatttgtgtttgatttgtggtcttcattcaaagtttctagaatgaaatctttaactaactattatatattgatttgtttatttgaaactattttgtggttaaaacttaacttaaaagtaatacttgcatgatgacaattcatttctcagtaaactttgttatatataaacatatatggtttatgcttttcagatttaaggctttcagtattatttactt

SEQ ID NO: 108221 - DNA, 758 bp, Aquilegia coerulea
  Intron number 4 from transcript AcoGoldSmith_v1.006159m (l ocus AcoGoldSmith_v1.006159m.g) derived from phytozome v7. 0 (chr-ID scaffold_110; pos 101322 to 102079 reverse stran d)
cacccaaatatctaacagagtcaaggttagcagtttttctgtctcgatagtgatttgtactcttgttacgtttacacaattggttttcatgtttataaattatgagagtgatccaaacaatcacgaagatatatttaccaacatgcatatgatgagttttaagaggaaaaaaaatgtcgctcaaccttttttttcttattcatgtaaatggaacagaatctaaagttagaggggatttttttctttgcccctttttggggttacaattcaaaacagtggaagtcggctaatccttgtgtgtgtaacagtgacgaagtgcagagtggcaaacaaaatatgccaacaatagatgctcttaaatcaaagagtgattagtggtttaaatgtaatagggttttattgaaaatcctacaattgagaagatgactgatatgaagaattcatatctagtatgacagcaggacctaaaggtgtccagtggcccattggtcaagccttgggatgttgcacctcatggtttcgagattgaaatctgacagtccctgcaagggtatttttggagtattagctccttcaaaaattgtcaaattgatatgcataactagttgagatacaacgtggatggttactgttgtcctgttaccttgtcttctatatatattccatttaattgtgatatttagatataaagtttatgtacaagaaaccagtgtgacttgcaatctgttatgattgcaggaagggatctcgactaggac

SEQ ID NO: 108222 - DNA, 682 bp, Aquilegia coerulea
  Intron number 1 from transcript AcoGoldSmith_v1.014110m (l ocus AcoGoldSmith_v1.014110m.g) derived from phytozome v7. 0 (chr-ID scaffold_9; pos 5594608 to 5595289)
aaccaactgccttgaaattcctatctatctgcaaggtaacgacatttatttaaaatacctcattttttttttcacaaattcgataaattgtatgtaccaggtcaaatgtggtcaaagtctaacatagcaacaataatcgttcgtacagaggaattttcttcactctgtaatacgagcaggaaaattctccattacaggctcaaatgttaacatatattgaggcgtctagtcccaccatcattgcaaaaaatcaatcctgtctaatctcaagggtcaccttcgaacatgttgcattggagatagtctgatatccgacattaacttggtttagtaagttgatatgatgttgcagtaaagccaatataaaggagggtgttaaaggtggatgggtacctgtaaatggtgcttctccacaacaagtaatttatgggaactgggagtgagatcaaacaacatcactaataacttatttcatagaaatgttttaagtgtatacccaaaaataaatttcatttaatttgtattaccgcgaaataggttgaactttaatgtggggctttgggctccaatgactactcccctaaatgctctgtttatggctagcttaaggtaggtcagaccaaattgtaacttaaattgttgccttaattgcaggaacaatactactcaccattcctcacaa

SEQ ID NO: 108223 - DNA, 553 bp, Aquilegia coerulea
  Intron number 2 from transcript AcoGoldSmith_v1.008457m (l ocus AcoGoldSmith_v1.008457m.g) derived from phytozome v7. 0 (chr-ID scaffold_11; pos 2845959 to 2846511 reverse stra nd)
gcttctgcatcaggttttcatcccaacctttgtatttgagttgagttaaatttcaaaatgttatcatctatacgtatacatatcaatcacaaaagagtaaacagtacacacaatcatagttaaaaatgccggtttatagagaatcggcattttaaaatccgggaataatcgagaatattcctaatatattcagatgacttttttgtttcgagtgtcggaatgttggaatatgccgtttttttgaaattcgaatttcgcccggattcgaaattttgaaccatgcacacaatatttagacaaagccatattcaggttcatcttggatacagatgttgttctgtttcttcaaaacctaaaaccaaattgaatgtttgccacttatatcttggaaaaaaaaaaggaatatagcagatttctaagcacttatctcttggtgatcaagtgactaaataacctggatagatattcactgggtaggtttatttcttctgcctagattctgaaggctgagttttatatctattttttgcagtccgaaattgctgctctacgc

SEQ ID NO: 108224 - DNA, 615 bp, Aquilegia coerulea
  Intron number 1 from transcript AcoGoldSmith_v1.008457m (l ocus AcoGoldSmith_v1.008457m.g) derived from phytozome v7. 0 (chr-ID scaffold_11; pos 2846635 to 2847249 reverse stra nd)
caacttccctacttctacttctccttcttctcaaggtttcattatcttgattcatttcctactgttaaaaaaacttgatttcatttcttctgtttattatttatcaaaatcttttagataccaacactagtcaaacttttaatttaacttaagtcaaacctcgaggggtggatgggtagtggcaaaatttcacaacttgaaactgtgatttctcacacacttgggttttatttttatataatgatgagtttgcgcaactgtaagagagagaaaaaaaatggagtatattgatctaataagaccatttgggtcttcaagaagattcttatttttttttagttagtacagtatatttcattgcatctgatacaaatttatacaagtaattaatctttagggtttaataggcatttgagtatgatgtctgactgtctgtgttgttagttgcttttcaaatgtttttcactcatacttgtcactgttttgatttttttgatttacacaattacacctgtttatgttttgtaaattcgggattagttattatttttaattcaactttattatttgtgttcagtagttgagataaactcgaattccagtctggcagaggct

SEQ ID NO: 108225 - DNA, 897 bp, Aquilegia coerulea
  Intron number 2 from transcript AcoGoldSmith_v1.015949m (l ocus AcoGoldSmith_v1.015949m.g) derived from phytozome v7. 0 (chr-ID scaffold_7; pos 2450887 to 2451783)
catcatccggatttggttcttcttcagacatattggtaaccattcagtcatacttaaaaaagttttaggctatatatattttattgctttcgtgacttactgacttgtgaacagattgatactataatatcttcatattatttttttgcatttccttgtattccctgttaagcataatacacgttctaattcagtgttcgctcaaattcgttgtcttatattcatctccgcaattgtttaagagatgaacattgttcaatttatgaaattggattttctacaaagtaattgtacttttttattgaacacaaaattcgttgggaaatcacttgactgtatgttgattgggacttcgttagggctgagctcctgtaaaattttcaccttttcacatcgtacttttctgaaatttgggttttcccaaaaattggacgttttgacttggaaattagtagctttgttgaaaatcaggttcttcttagacccagtcataaataatcaaacggacccttacataagttacaattaagttattgagttgatgcattgtggatcccaggtcaattttttcgcaacttggcgttgctaaaatatgtagttttcaggttaaagcataaagtatggtgttgtggaggtattattccaattataacatattttaaggaaatatctcagaacttttaaaggtttgtatttgaaccacttcctgaactgcactacatactaacttactgttatggcacacagggccaactgtataatgcaatccattaaacacatactgtactgctcagcttcagtttgttactctttatcttttttaacctttgacgttatgattaattttcgtaatgtatttcaggatcctgagggtctcttcccgtgtattcttggtca

SEQ ID NO: 108226 - DNA, 979 bp, Aquilegia coerulea
  Intron number 1 from transcript AcoGoldSmith_v1.002577m (l ocus AcoGoldSmith_v1.002577m.g) derived from phytozome v7. 0 (chr-ID scaffold_28; pos 1725192 to 1726170)
cagagtttccaagggaagcttaggtaaaatattcttaccttgctattttttttgttaaatacattttctttttttgtatgttgaagaaaatacatttttgaaattagatgatgaaacccaaatgaaatttttattgaaattgaagataataaatacttttgaattgataactaaatcaaatttctcattcaatctaaagatatattgacttgaatcggtaacgggttcatgtcaaaaccctaaaagtgataataaaaatgtccaaactccaaagcctaattacactatataaatagtgtataaaacgtaaacagccccatcatgtgcctactccagtgggcttaacatataaatattttcacacaaatattggtaaaattttccacacacacatgtagtatgtgtagactccacttttgaatttttatcgcaaaatgcaggtcatcacattgtacattactagaactatgaatattgtattgacatcagcgcaccgagaagaaatgctccgatatatttacaatcatcaggtatgacgtagtatgtagatcactagattgttatatctcatgaacatggatcaatgtaaaggattctttttcctggaggttgtctgatactctgatgtttaattgctagaacaataacagcatatgaccaatgtaaacatatgaccagcaacagcctaaacaagacattaccttacagatatagactctaagtaaactgttgtgctgtaccactttgtacatggatttcaaaccgtgaagaattctttctacgaccacttttaacaccacctatccatgcccttttcaagagagatattagccaaaaggttcctttatatagacattgaatttgaaaagtcccatttcattttaaaatactcacatatatacgttaatgtggtgagtctctattacctagtagtatagttttttttactaatttaatgtacttttgtcacagaaccaag

SEQ ID NO: 108227 - DNA, 499 bp, Aquilegia coerulea
  Intron number 2 from transcript AcoGoldSmith_v1.010111m (l ocus AcoGoldSmith_v1.010111m.g) derived from phytozome v7. 0 (chr-ID scaffold_9; pos 5828032 to 5828530)
tatcgtgccggaattgttccagttgcctttcggaggtaaaacaaaagatttcttctcaatgataactcttgtttgtcagatttctctgttttttttctttccaaacaagttaagttttggtcagtttccggccgtttctcgtccgtacattcacctataatacccctactttattaccataattaatagaattcaaaggtagtttggtcattttatttaatggtcctttcggaaaatactggtctcgggaccagaagatgtacgactattatgtcgcgtgtgtgaaaacaaagaagcataaatcctggggtccaaagttgttctgtaaatgtaataaaggtgtttgatgaaactccacgcgttttcggttaaagttgcacacaactctatgcactgctacaaagtaaccgaaatttcgtcctattattttaactttttttttattattattaagacaaaactacccttctaacattttgttttgtgaactcaggatccc

SEQ ID NO: 108228 - DNA, 816 bp, Aquilegia coerulea
  Intron number 1 from transcript AcoGoldSmith_v1.008471m (l ocus AcoGoldSmith_v1.008475m.g) derived from phytozome v7. 0 (chr-ID scaffold_1; pos 2478691 to 2479506)
tgattgttaaagaagcggtaagcgggtaagatttctgacttcactcttttgatttcgataagtaatggggttttcatatttttttgatttagttatgaaaattaggttatatgttcattattcgacttattcatatttgggatttttttgaattaaatgatgcagtcaaggtgtttgataatatgtctatgagaagtgtttttgaagtttttgttgaatatctatttttctcaactaataactattattttgctataaaatttgatttctcacgaaaccatttgtctgcacaatcaaccacaagttaatatgagagtataatggcagtaaagttgtatcaaacttatcaagtcatttgattagatgcgaatttttttgttgggagttcataaatgttgaggtaggcggagctttgtttcaagataaaactaaactctccttctgtggtcttttgcattggaccaagcaggggtctgtaagctgttgttgttgttatactttttaaataaaatgttgtgttagttgaaaaggatttaagtatactctatatactgtaccaggtacattaactatattcaaatgccagaaccatatttcccttgaaacaatattacaggaagttctacccatcactaatgtctttcctagatggttctccaaagttcttgttttctgagtaaaatagaaatgacaatgttccttggtccatattggcttcggattttggttcatgtttatgtatttgactttgttgtttttcatggaagataattgttttttttttttttttgtgtgagatcacattcaaggagaaac

SEQ ID NO: 108229 - DNA, 711 bp, Aquilegia coerulea
  Intron number 1 from transcript AcoGoldSmith_v1.010215m (l ocus AcoGoldSmith_v1.010215m.g) derived from phytozome v7. 0 (chr-ID scaffold_1; pos 4766861 to 4767571)
aaggactcaggtatctcttcccccttttgtttctttcagtaaattatgttctaattgaaaaagtttttgtttttggataaaaaaaaagttcaatttttagcaaagttttagttgcactttttaggagaaatataaatttgtaatctctgtatgcttgatgtttaatgggtattttccaatttattgaaatttccctaagtaatggtggacgcaactaagcaatctattaaaacagtaattgtgttaacaatgttgtttgccgcgtaattccaagcaaattgtcaattaaccatactttgtcttcgagcaatgcaaatgagaatcattgggtttcatgaatattattatcgtttcgtatcataagttcatgagacaacataatttaagtggttattgatgattagatgctttattttcggcgtgtctatggagtttgtctttgaaatttggttgccattgtgccggttgcgactctatgattgggtttattatcttcacagtttaaattgaaaagaacaaacgtgagttaaaataatggatacatagagctcatggtgaatataactaaattatctagttctagagtgaaagattaatctaaaatagacttgtgaacttttgaatctgttataactttatatgtgtttgtagaatttgaaaatgactgacatgcttatacgccggattcttataatcattgttttactagac

SEQ ID NO: 108230 - DNA, 749 bp, Aquilegia coerulea
  Intron number 2 from transcript AcoGoldSmith_v1.025655m (l ocus AcoGoldSmith_v1.025655m.g) derived from phytozome v7. 0 (chr-ID scaffold_30; pos 434192 to 434940 reverse strand )
atttcgataacgacggtatgttaatgttcttctttcttgatattatcaatcaaatattgcctttatttagagagataattatttgaactactacaattcttactatgttcctttgccaaaataatgaaatagttgttttatcaatccttcaggaagaaaaaaaaaatgaaaattttattattatgaatttatgataggtaatggtgactaaaaaaggtggcttcatcacatgctctgcattttattattattttatttcatcactggcaatgtttgacaaatgtggaagcatggttatctaatttgtgaagatacttgttttttttagaacttttctgtagagcaaaattgtcattaaactctgcatcacacttattgtaagtctatcagcaagagcattttgttaattaatgggactcaagatgaacttccataatagaaatcgtatacaatgacggtcttgggggtgttaaggcaattgtgtcgaccaatttcactttttatgtcaaaatgatttttttttcttactttcaatttaacattattcttgtagaattgacgaactgcactaaaattttatacttatctgttctttcagtaatgcactcgtcactcatcgtgttatactgtataccattttattagcaacgtgcagtgagaatatcttattatgaggaattcttcactcaataatactaatattcttgacaacagaacctgcgagagtacgagtttctgttagggttcgg

SEQ ID NO: 108231 - DNA, 635 bp, Aquilegia coerulea
  Intron number 2 from transcript AcoGoldSmith_v1.008781m (l ocus AcoGoldSmith_v1.008781m.g) derived from phytozome v7. 0 (chr-ID scaffold_1; pos 1050615 to 1051249)
aggttagtaacatattgctacagctattttatttgttagtgggatcatggacgtgggtgggttctatttggctataaattggggtgcgagtgtgttctctaaaaacaaaatttacattcatgactcactaaatttatcaacaagggtgtcaagcttctgaagtgaacaaaaagaatattatccctctatggtttatactgctgaaaatgcagtttctttctatctcttaaagctacagagccaacattttctttctatctctcaaagctacagagccaacattttttaatcgcgaatgggcttgtggctcgatggtagcacccctctcacaaagtggagaggttgtgggttcgaaacacgtcaacagctgattgttgatataagtttccacacgtaatttaaaaggggtaagggtcccctcaaccctgcttgccaatcaaaaaaaaaaaaaaaaaaaacattttttaatcagatttattgtacaaagaaaagaaaaaaaagtacgtcacaactataattcctatatagtgatctgagacatattttttatctttcacaacacactttcctatatgactgaggtattgtttgtcttttcagtccaaattagcagctatattggcttccttcatcat

SEQ ID NO: 108232 - DNA, 530 bp, Aquilegia coerulea
  Intron number 2 from transcript AcoGoldSmith_v1.010674m (l ocus AcoGoldSmith_v1.010674m.g) derived from phytozome v7. 0 (chr-ID scaffold_6; pos 3626221 to 3626750 reverse stran d)
tggaactgaagactcctggatctactgcagagcaggtgggttgtactaattctatgaggttatagctttacacctaagatcatgtttttttgctgtaatgtttttcgttctttttgtaactcaaacgtgcatattgatctgtaaaagtggttagaagaagcatttaatatcatgcttttatttataattctttgactgcactctacattgcttattgaatgcataggtttaactaagtttagcctgtgggaaaatgctttgaaatttaagcagttccaaatggacctaacgtctgggagactttgtaggaaagaattgaaagaaatctagaagaggccttattggtgctcatctttttgtcctggtaagggaccaaaggctaattgtattagttggcaaaataatagaaggcacaaagaattacaatgaaactgtaggctttatttgtacacacatgcatagtacctaaatcgcatagtttttttttatttgtaggaattatcatcagaagagaggaaagaaaaacagtc

SEQ ID NO: 108233 - DNA, 730 bp, Aquilegia coerulea
  Intron number 1 from transcript AcoGoldSmith_v1.020921m (l ocus AcoGoldSmith_v1.020921m.g) derived from phytozome v7. 0 (chr-ID scaffold_6; pos 3466418 to 3467147 reverse stran d)
tctcgcccaaaagaattcccatcgataggcttgatgttacagaagctgctggtcgtcttattcatcatatggttactcataacgacaacccaaagaagacagataatgttaagatgaattgttcagatatcaacactgggatggattcatttgaatctcgagggatgttgtaaaggtcgtttgctctgtagaacatcttcgtcatttactctttctggggtttccaatattgattgtgttggtagtcctctatttttcctggttattgtaccattgttagtggtaattagttgcttggctaagtaagaagaaaaaattgtggccccttcccgttctaaggctgagtacttatggccttggcacatacctgctgcagagatgttatgtgagttcagtttctactttctgagatgagggttgaaggtatttcttctgagcagatgcaatgcaataccaaagttgaagtcttgattgcaagtagttggtgctatgagctcttcaaccacatctagtttgatttagttcatgatttgagcatggctaaatggattgtcactccttatatgaattctgtagatcagttggagatcctcaaaacatcgctagattttgaatattttattctcagtaattcacagtagcattgatttgtatgctccagcttgagaggagggctgaagagttaattatgtgtttcttttggtctctgtatttgggaagctgttgcagt

SEQ ID NO: 108234 - DNA, 603 bp, Aquilegia coerulea
  Intron number 2 from transcript AcoGoldSmith_v1.010729m (l ocus AcoGoldSmith_v1.010729m.g) derived from phytozome v7. 0 (chr-ID scaffold_6; pos 8303201 to 8303803 reverse stran d)
tgtcatacaaaacaacctgaggtaagtaagtacatttgatgcaagattatgccgattaatttcttcaattagcgtcaggcctagtgctacaggctctagtattaaggagacactactttcaacctaacttatgacaagagtgcatagcattataatcgtgcttattcgcaattatatcgttaattagatacaagttcaactttgaagataatggtttttaaataagttgatcatgtcacagtaaagaccataatttttgtctatattgttgcagcaaagttgtattagaaactgttttgttctctgtttcggtttgcttttgcattctgtcctaatcatgtgttttgtaacatgttgcccctctgtcaccccatgctattagataaaatatgtgaactctgatagtattttttcttcttcttttcgatgctcaccgcctcactgagactgagtcaccggtctttgtgcaatcacaagtagtaatcacttgactgcaccataatatcttagtttagagcattattataacagctagatggaggctaatgacaatgatttttgatgccaggtcaaaattgagtttgcattggtggaaggaaaaga

SEQ ID NO: 108235 - DNA, 654 bp, Aquilegia coerulea
  Intron number 1 from transcript AcoGoldSmith_v1.016998m (l ocus AcoGoldSmith_v1.016998m.g) derived from phytozome v7. 0 (chr-ID scaffold_7; pos 1228503 to 1229156)
tccgctattttcaccttgttgggggttggtttgtgcggctttcaggcgtgcattttcttcctgcaaaagagtgatttgagcatgcagattgatagttaactctggggtagtcatttgaatagatgactttgagaagggtgggagggtttgggtttttcgattatatcgaattccttgcagtcggcgccaaatgtattaacctatttctagattaatgcactactaggtcaggtcgctgggagacttgaccaaagggggagattttaggtcggggtggctgcacctcgttgagatcgagattgcctacgtactcttagctcgaggggattgaacttagagatcaagccattgtagttctgttcttatagaaggtagaaaggcgtggatcttgcagattctccgtcatcataatgaggattaattgtgtaacgcgcgtggatcatccctgtgaattaattatgtaactgacgagaatattctgtgcattgaatgaaagcgcgtgtgtgtaagcaggccgctgctcgttatgaggtcgagctgttgtggacgagctactagcaggtagagagcgtggcgacctggtggatgagtgactgtgccacgtggctgcttttgattggttggagtatgtagtacccctacagctgacgacac

SEQ ID NO: 108236 - DNA, 1034 bp, Aquilegia coerulea
  Intron number 1 from transcript AcoGoldSmith_v1.008999m (l ocus AcoGoldSmith_v1.008999m.g) derived from phytozome v7. 0 (chr-ID scaffold_10; pos 3411492 to 3412525)
ttatcaaagctattaagcaatctggttgcatcaaggtatccccacttcatctttataaaccctaattttagtacaaatattttcaatctctcatgtgatagaattatggtgtggaataagtacatcttactcactttagtcttatgaaccttgtttatattatcaaaaaagttttattcaataatgattgaaaaaaattacaatacaggaggggtaacctagcaaagacattaagaaacacgcattacaacagtaacccatttaaactatatagctgtaaactatttctgtaagtgtttagttaattctcatttggggcaaatatacctcttcgggacttcgccaaatgtgggacttgttcctcatccctttcatcaaaatcctagttttttcttatctctttattaaagtccatttcttcatataaaatcatttgcgattcaaactttgtgcctttgagtatagttactggccctatgatattgacagggtttttgtggtgtcgaactcagcttagtatgaaatatgttatttacaacacctttctactgaaaatgatttgctggaatctactttttcatgtatcaaccaagcactttcaagttgctgggaataatttacattgcaagagatctgcagggtaccaactaggccttatacttttccttgcttactaagaccaaaaattgaaagtataaacattatctatttttaaatagaaatgatattgtgaagtaagacttgtaggaaaaacaattgtaggaagataaatgtaaacacaaacagtagagataactataagtctacaacgttaagagtttagttgatttctggagttgagataactataacattacaaatttagtcgatttctggagttttgttattatgacattttgtttcaactccactctaatgtcaatgctcaattttcctacggagatacaatgaagaaaaagtaaaatgttatattaattcctttaatttgaattgttgcagagattcattccatcagagttcggactagatcctga

SEQ ID NO: 108237 - DNA, 871 bp, Aquilegia coerulea
  Intron number 1 from transcript AcoGoldSmith_v1.006557m (l ocus AcoGoldSmith_v1.006557m.g) derived from phytozome v7. 0 (chr-ID scaffold_10; pos 1887803 to 1888673 reverse stra nd)
aagcttcttcaaagcaagttgatttccaaactaaggtttgttttctctctctctctctctctctctgtactttttcttgcttaatttgattctttttcaattaggtttgtgtagttaaaattaaacatggtagagaaattgtgcaaaacaagtcaaatagaacaaaaatgcagaaggtagtgtgcagaagtatatgaattaatatttcgatatttaggagtcccgaaaaaaagggattttgacacttttaagtgatctcattcgacgaattcttgatattgtcccccaaatttttcattggttgtaatgagttttgcgaataggttataattgtgcatgcgccatcggggcggacatatactaatacaggaagattgatgtggtaatatgtattgcgtcaatcacatggtcttatacccttattgtcttcatgggaggaagaattggcaaatacttaagaatggaataaaattgctacaagaccattgttaacataaagaatgtgtatttgatttggccttagttttcaaaagagtaaacttggagaatttagttattggttgcagcaaacatatagaaaattaattttatcagagctttgtgtttcttttgtatgcttctcaaactctgcccttggacagatgtggcaatacttgaatgcgtaagtcccaaacagtagttttctgtctgaaatatctacctttgaaggtttaacatttcatctatttgtgaagtcctgaatgtgcattacttttttattagtgtcagttcaagttcagcaatcttttgttctggaatgtgatgaacttgttattgcttgttttttgtttttcaaggctgttgaagtgaccggtgaggtcaactcctgggc

SEQ ID NO: 108238 - DNA, 1053 bp, Aquilegia coerulea
  Intron number 2 from transcript AcoGoldSmith_v1.002757m (l ocus AcoGoldSmith_v1.002757m.g) derived from phytozome v7. 0 (chr-ID scaffold_108; pos 148933 to 149985 reverse stran d)
ccgtggtactccattcaaattcaagcttggacaaggtacattttcttagtatttttaatcacctttttatgtcaatttatttggattggattggattggatgggaaaataatgtattgtttcgaatattatgatgaatgggattttgttaccaggatctgaagaattagtcactaatttttcagatctttagtcaaatagctttaacataacgttaacacagcttctgaaggtttattagtagtacaatcttaatgcaaacatacatagaaagagaagtctgctgatgatggactatgatagcattaattttgtggcttctttaattacatatatatatttagtgattgaactatataaagtctgctgatcatcgagaatacgtatattacaagattatttactatataaatctgtcatcccatacgataaaggtttggctccttggtgtgagcgctcatctgtcccagtgatcatgtgtgatttagtgcagttacatggtcaaacactcaaactcgactgttcctttctcaagtaagccttttaaaggctgtgatattttaattttctttggatgttgtgtttgtatcaatcagacgttaatttatgccttaaaattttacataaaagaattgtagtatgcagtctgttggttatttctgttgcatttgtgcctctaagaacatagacaattgtctgctgcatacatctgaattctgaacacttcaatggcatctatctcttagtggatttcaatgatgaatatgaatgtgtaacatttaaattattgagtagtaaatcacaaaagtagttacctatgaatgaataggctgtaaaattacttgcttgtctttttgtgtatcctcttgtttgttgaggagctgtatgatcctcactgggcaatcgttatattgatcataattgcagttttgagtgaattcactctctgaatagcccaccttcagttttttttttcccaaattgtcattatgattcttcatcctattattctgtgacagggcaagtgatcaaagggtgggatcagggtatcaag

SEQ ID NO: 108239 - DNA, 993 bp, Aquilegia coerulea
  Intron number 2 from transcript AcoGoldSmith_v1.011837m (l ocus AcoGoldSmith_v1.011837m.g) derived from phytozome v7. 0 (chr-ID scaffold_9; pos 2156560 to 2157552 reverse stran d)
gagtggtaaggatcccaacttttgaaatttatgttaacagctttttatatgtaatataaatacaagaactatacaagtggtgtttcatatctttatgtatagactgtgtaagatcagccttgaaccttgcagtccctggttgtgtgctccaagtgtttgctaacatagaaaagacttgaaatttgttattgaaatgatcttaaacgacctctccgaactcactatgagattattctaacatatataattttgaaagttgaaatatatattttgggttgtgaaaatcagtattgaatttttgtgtatgctcgtcgaaaccacaataagatccaaccgtccaaacgaaagcatgcaactaaatccctccagctgaaattaaatttggaaattgtaataccatattgtttgccttgttttgccagcaccatattcactgattaaacaacaacaaaattcatgtcatgatcaaatgttttatttaatactcagaaattataatgcagattgtgttggatattcctggaaccatttcccctgttgtcaaattatttccttccaaaaaacccccccctaaatgtgggttgacagactcatgtcacatcttggtgatatgcctggctgtttcagtgagacagtgactgtgttgtacataacccattttatagtggttgtctttatatgctatttctgcatcttgaagaatatatgtctgcttgtttcactgaagctgtaagtgaattcgactttaatattatcctgctggaaatcactgaagaaaaatagtgtcatctccaatttggattccctttctattttttcatgataaagctccttattgtagaaatacgtattagcgatgttaacacctctgtgaaattgaaaggtcttggctagttgtctgcagaatccctgtttaggatgatttgtaatgatttggtatgcataagtatgtgatactgtagttaacctgtgagcaggacctgaacgcttata

SEQ ID NO: 108240 - DNA, 317 bp, Aquilegia coerulea
  Intron number 1 from transcript AcoGoldSmith_v1.026577m (l ocus AcoGoldSmith_v1.026577m.g) derived from phytozome v7. 0 (chr-ID scaffold_1; pos 3359079 to 3359395 reverse stran d)
gctggtataattttgagtcttttttgcttttacggatgtttatttaatcagattaagttggccctcgtgtgacaatgtcatattgcacttacgaaaatgatcaataagatataacaaaagaaaaaacaaaagattttgtcgcaaaattttgcattctgttttttcttttcaactttagtgtttgtatgtaaatccaactagtggcgatgttttagattaggatcatcgttagtgtaaaaattgattgtcatgactcaagaattaacgtcttcatgacactatttctgcggacatgcagaaaggaacgtacataagaa

SEQ ID NO: 108241 - DNA, 623 bp, Aquilegia coerulea
  Intron number 2 from transcript AcoGoldSmith_v1.006207m (l ocus AcoGoldSmith_v1.006207m.g) derived from phytozome v7. 0 (chr-ID scaffold_10; pos 1851143 to 1851765 reverse stra nd)
aatcgtgcctattgggctaccctccttgagtacaagtaagttttcacattttccagggtgtgtatatactaaatttgaatattcgaattcttttgctgcaagaattgcccattttcctcattatgtattgagaaccttgtgttgagtgcagtttaaattttgaagcttatgatctcgacaggcaaataattgttacataccatcagtattttgggcactgggtctatatatagtgaaatttggtcaatttgacacacggaataccaaaagctaaacttctttgcatggaacctgttccaagaattgggttgaacctgttctttggtaattggtagtctggatttatataacaagaattagaatagaaaaatagaaagaaaaaaagtaaacatggaatggatctttgaaatcctcaactttgttgatacttgtgttctctggaaggaattgcctgtttgagaatttgttggctaccatatatgttactattatacaatgcaaaaaacagtttcttatatcattcactattatactcctttcctttaactattttactttatctgactgattttttttgccattgttaaggtaaggtatcttcttttctttgcatcaaagacgca

SEQ ID NO: 108242 - DNA, 1023 bp, Aquilegia coerulea
  Intron number 1 from transcript AcoGoldSmith_v1.009790m (l ocus AcoGoldSmith_v1.009790m.g) derived from phytozome v7. 0 (chr-ID scaffold_9; pos 984735 to 985757)
gttccagaggggtctcacagaagtaaaatattgaggtatatattgttttcttgttctaatgatggaaatagaatttgattccaataagttttttttttcattcaatcttagtgttttctgaattttttttataagaaagtagtacttttttgcatttttttcttaagttgtgaactctgggacttgaattaagggttggagagttcatgtagtagtctttcatgtccttgtttattggtatttttccaagaaagccaaatcagatctattgtctttgtcttgaatcatgtccaaacttcaatttgtactttgtcttttgttttcttgtttttgttacaaacagtatgccttgactagagtactagacctggttaatgaaaaactgtacattatatattactccttctaaggtatagtggtcttttggtagaaaaactgttactggaaaatttttataggatatggaaacttgtgagcaaataaacaaaaacaaatctgggtatttgtctatcattgaggttttgcatggtaaatccctagatcaataaagggaacttgtgaaaatagagggttgtttattttataattttatttatttatttattttgtaaaaagttgatttatttgagaatattttgatttatttgagaatatgttgactcatgttttttttttttttttgaaatatgttgactcatgttactgtctgtagttttaaatttttgatctaataccatatctagtgtgctgattgatcaggtattgtaattctctttcattttatttcattaataaatttgtacttatataaaaaaaaaaaaacttttcccatgaaactgtgatgttttcgaagttctagaagatagcgaaagcgagagcagggagatccaatggaaaataaaaagtgaaaaataaaaataaaaatagtcaaaatcagtatattgactaatatttgaccagaattttgttgatttattttttatttcagctttcaaggtggattagattgatagtagaatatag

SEQ ID NO: 108243 - DNA, 715 bp, Aquilegia coerulea
  Intron number 1 from transcript AcoGoldSmith_v1.010702m (l ocus AcoGoldSmith_v1.010702m.g) derived from phytozome v7. 0 (chr-ID scaffold_15; pos 4330712 to 4331426 reverse stra nd)
ttctccatttaaagttctctaccaagatctttaaggttggtattcgatcaatctttttgttttgtgttgttgttgttgttgttgttgttgttgttagggttaagaatctgatataatcaattcttctatttatccatcgatatgatcaattcatctctatttatcgcttttagtttggtagattcgaagtatttccaaaaaatatttagggtattcttgttttgttgtaattctatcggtgatagatcaattgtttatgttacttattttaagttttgtttgttgctcaaggttttaaccatttaataaaaaaaattgaagaaattgttgttgttttgattcaattacttagttttcttcattacggttactgctcagttggtggatctgatgctaatgcttacaaatatgatgtcaagattgacaaatgaagctaaaactattcacttcaaaagtgtaacttgaatttagtttacattgatgagttcagtaggattgggaattaattgtttatctgatcctttgttatgaaaacgtttcccaaaacaaacattttctagggaattatgttttacattgatgaacaattttttttgtttttgaattattattttgctgattgtttgtactttatattatttgtttatttgaattattattatattattaatctcgtttcttatattctgttgttcacagagcgaataatctacat

SEQ ID NO: 108244 - DNA, 788 bp, Aquilegia coerulea
  Intron number 1 from transcript AcoGoldSmith_v1.023380m (l ocus AcoGoldSmith_v1.023380m.g) derived from phytozome v7. 0 (chr-ID scaffold_51; pos 1403256 to 1404043 reverse stra nd)
cacctaggaaggatcacaggttcagtgagcttcgacagggctgggaccaccttttcagtttaaccaacaatgaagggatacagaactgcagcaggtttttgattcagaaacagttcgtcaaagggatagttaatttgtaaactgagcatggtgctgtattatgttttcatcataatacaatgattctttctgtatactgtaaagtttcatcagaattgaaaccaataaacattttcttatatagcaaatagtacattttcttataaagcaaaaaatgtcgcaacatttttacaaggattgtagttgcgacattggtaaaagatctctggtggtgtctttccttgctgctgctgcaactatccaaaccataaagcaaaagttctgctcaagaatgtcattgtgggttgtgtgcttggagccttggatccatcatagtctagcccatcaacagcaatttcttggaaactgtaaaacaaaacaaacttgtgtcacgagacaagtttaatctagaaatacaaatccttaccactcctagttcatgtttgcttcagattaaaatctaaaagcggttgttaatctataaatattcattcaacctcaagttctcaatcacaaaaagttctaagactcaagcaacgaacctgcagtcggttatcaacaattttgtattgcttcttcaatttattatggcgtcaaggtattgttcatcatcttctcttttatgctttattattctactttcaagtttttcagttctacttcatcctactcttggagaaacatctgtt

SEQ ID NO: 108245 - DNA, 128 bp, Aquilegia coerulea
  Intron number 3 from transcript AcoGoldSmith_v1.008089m (l ocus AcoGoldSmith_v1.008089m.g) derived from phytozome v7. 0 (chr-ID scaffold_108; pos 167163 to 167290)
tgtgcctgcgtggtagctctgatttcaaggtagtccagtatgaaaatgatttctctttgaattttgtaactgaatgtcataatttacttcttctgcctttttatatttgtttatttgctctgaccagg

SEQ ID NO: 108246 - DNA, 712 bp, Aquilegia coerulea
  Intron number 1 from transcript AcoGoldSmith_v1.015671m (l ocus AcoGoldSmith_v1.015671m.g) derived from phytozome v7. 0 (chr-ID scaffold_15; pos 691365 to 692076)
atcagctttcatcactggtggaggatcaggaatcggtaaactctatacactatttcttcttcttattattattataaatgatttgatttttcctggtgttttagagaatttaataaatctctatatatatatatatgtgtgtaatctcaaactcaattgaacttggaagaatctcaatcaatcttttgatatattatacgttattattaattgtaatttgattataattgcaattaaagagattcattcattcaaaacttattgttaattgaagtttcaattttatatgtattagatagtttgttaactgatacttttaaattgcactaataaacaaagttaccttgtcagagttgacatatcataaaccttagttgatctaataggactggttttgctgaatgaatcctttgattggtaggtcgatcacttacactactatttgatttttattctaaatgatatgcatcacttttagaatacgaattcattttgatggttctttcatattgtaattaagaaacattcatttcttcaggtaatggactgatttctcataatcgttttgagcattttttttgtattcctgattttcactttcttttgtctatctgttttgttacgggaccaaatttcaatgcatattttctacaatgtgaatgatatttgttattcagggaaagctattgccttggctcttgcaaagaaagga

SEQ ID NO: 108247 - DNA, 383 bp, Aquilegia coerulea
  Intron number 2 from transcript AcoGoldSmith_v1.006199m (l ocus AcoGoldSmith_v1.006199m.g) derived from phytozome v7. 0 (chr-ID scaffold_95; pos 118370 to 118752)
gaagaaaccatctcaataaggtaatagctagctagatcgatcatattcttcttcttcttcttgtttttgttgtatatataaatagtaaaaaacactattactttttttttttggtgattgatataattaacttcatggccaatcatgcatgcgattaatatattttaagtatagttgtgaaaaatgattaatttgttgtaatctaatacttatttatttgattaaacaatgttctggttctttgagtcgtttttgaaaactctccaataggtttaaccatcgatgtcattgagtaattaagctttgttgcagtgtacttgagttggatttccatgcattttttttttttttgacttgtacgtattgcaatcaggttgcgttct

SEQ ID NO: 108248 - DNA, 679 bp, Aquilegia coerulea
  Intron number 1 from transcript AcoGoldSmith_v1.024279m (l ocus AcoGoldSmith_v1.024279m.g) derived from phytozome v7. 0 (chr-ID scaffold_10; pos 2561227 to 2561905 reverse stra nd)
aaattgtaagtacatttctcttttttttgtttctcatttttttgcttcttaacctttatgtgtggggggtttcttctgctcagctattagtacttcatctacataatggatacctatggtaatttaaatgtcgccaacctaactcccttttttcttcttaaattatctgatgtgattagtatttgctagtcctccgcagtaaaatacatcaaagctatcacttacgcggtcttagtctattatttttataattccttgtgtttccagaatttttgtttcaatgatcttcattatctatcaaaaagtataatttgaatgtttttgttgggtgattgtgtccatagtagcagtaatttcagatctttgtttcccctctctgtaaaggttacggccattgatttttgtgttagatttgacgtatttctgttttacttcaattttcattagaagaaacaatgaatttttatggcttaagtaatgcttgcatgtgagtagatatagatgacatatgtttaactttttagtcatattactattgatgtctgtttattgaaggaaactctttattagcttgaagccgtgtcattattgtcccattattggttcttgttatctactgtgtaatcttgacttataaggggttccattactccttgcagtgtacagcatctattagtgg

SEQ ID NO: 108249 - DNA, 1041 bp, Aquilegia coerulea
  Intron number 1 from transcript AcoGoldSmith_v1.001713m (l ocus AcoGoldSmith_v1.001713m.g) derived from phytozome v7. 0 (chr-ID scaffold_9; pos 3377113 to 3378153)
tgtttcaacacccttgtcatcttcttcttcaacaagtaagaatgaaagaatctatcattacttcacttaaaagcttgttttttttttttcgtttcttttgtgaaatctattgatagcttaggtttgaagagaggtttatctgttgaaaatttttgctacagattgtaaaaatatctaattttaggagtggattaaccttttatgtggaaatttgtcttatagatttgaatttctttgaatttttgaaaaatcggaacttggcgggaatgtttggaatatgttgaataaactggtttgatgaaatgctagatcttttgcattatgtttttacttgttgaaatttgtgaattggaaccttgggttacgaaaacaagccaagatttaaatcatttaatgcatcgcggactgctgatcataattagacttattcatttaagtaatggatatgtttaattgacatggtttagatgattttattgatatgagttcaaaatttgctaccattaaaagcttgtacgagaggggaaaaaaaagtacattcgaatttagtgatttatcaacaatatgcaactcttaattgcacgaaaatagttatgcgggttaccactttagttcaattgattatgaattatttctttatgaagctcgcctactagtttcctttcgatataagctaagaaatattgtaagctgtgatcaaggaacagtgtggatttctctttgtggataagtcgtaagtgaaattagaaccatctactatgttgctgacgtatgcagaatttaaacatgctttaagaaaaatttcatataaaactatctcgttattaggtcagacattttgtttaacctttaattaagacgtcatggttccgctaccatatattgattctggttcaccttacattctagacgatccttaattagagctaactcaaaagatatcaaaccatgctcgtatgaactttaggtgcatatgcttctcaaatgctttatttctcacaaattcataaatatactcaatgcttttctcaggtttctcaa

SEQ ID NO: 108250 - DNA, 861 bp, Aquilegia coerulea
  Intron number 1 from transcript AcoGoldSmith_v1.009278m (l ocus AcoGoldSmith_v1.009278m.g) derived from phytozome v7. 0 (chr-ID scaffold_95; pos 88497 to 89357 reverse strand)
gtgttcgttcaatccctaaaggagttgcggaggtaactttagcccttctgttctaatttataatatcatctttttttttttctacttgttatatcactttgttctagtaaactaatctcatttttgaaaaagtgttggagacttcttaatcttgtcatctcatgaaaaagtgtctttcacctttcaaagtttttgtatctaataagggaaacttacacacttacaccatcaataatttgggcatttaggaattgtcatcacatcttttcgtctaaacagatatgcttaatcataattatgttttacttttgtgcacaactccactccaacaaagtttttctggttgctatctgtgcaagagtaattataacaatcaactaattaggggaacttctccaaatagatttgtttgtttatctgtgttcagattactagttgatttcatgacgtgagaagaagggatattgaactatcagtaggatataaagatggaagtttgtaaactttcggagtcgattcttcttattgccgtcataaatttttctaatcgttgtcacaaattcttcaagtttttaatcaacattgtagcaagttaatatgttatcaacttaataatatgtagcagttataaggttgtagtttctttgaagttaataaccatcaaggagtgattgtgtgagcgttacaagctctggtttcgttatactgtatatgataacatttaagatttactatactggtaatcttaatcacacatgtcagtttgaatttctctacgtgaacagtagctgctgattatcctgatcttcttttgtgaatcatgcagaacatctgaaatacgaaaagagcttaaaagattat

SEQ ID NO: 108251 - DNA, 810 bp, Aquilegia coerulea
  Intron number 1 from transcript AcoGoldSmith_v1.009780m (l ocus AcoGoldSmith_v1.009746m.g) derived from phytozome v7. 0 (chr-ID scaffold_27; pos 2627423 to 2628232 reverse stra nd)
gatcgtgaggtacggttgtttgttgcttcttcaaaattgagtaatttttatttggaatttagaattgttaatttattgtaatttcaatggaatttgatgatttagttagaatatggttgataattgcatagatttcaagaaatttctgaagttgagatttgaaaattgtgttttttgtttgcatcatttggtatgtacaagcaaattttggaaagtttcctggtaaaatttgaagtaaaatgaaaggtttgttatagggatttgattgttttgaaagtggtggttcactcacaaccaagatctttcttaagatgaggcaaatggtattaagactttgctgccatttaggaattatgactatttgatttgcattcttggcttgagtttggagtgaggcttttgtaatgaccacatgctatacacaaaaatgaaagttaatgattttttctgcaaaattttgatttatgtaatatttatgcacactagtcttcccatgtggtttagagatatagtcttggtgattgatatatacctcctcattattgatatattatcatctccactatttgtaaaagatcggtaatcagtggttgcatctgtatctgaatattttaatttattagcagttattgattgttgtcacttctagtttttgaatttaatcacaaaatattggtggttatcatgtcttaattatacatatgtgtttgattacatatggtttctttaacgcaacactgcaagtttctaattgttcgttgttttaaaattgtagttggtggaatccgttcttaaaacacacaatcataa

SEQ ID NO: 108252 - DNA, 953 bp, Aquilegia coerulea
  Intron number 1 from transcript AcoGoldSmith_v1.012413m (l ocus AcoGoldSmith_v1.012413m.g) derived from phytozome v7. 0 (chr-ID scaffold_12; pos 3355983 to 3356935 reverse stra nd)
tggtgataaactagtaatacccatcaccccatcaggtatgaatttctttctttctttccttacagtttgatttaacaattttttgattttgtttttgttgcaaaaaaaaaatataaattcaagaaaatggtgtatgtttgatattggaatttacaattatatgatataggaataggagtttatacatattaatattaacaacatcagggattaaagatttatacctggcattctagggggttgggcagttgcttgattgaatttgccaactctggttaatgcaatttatttctatgaccttattgtttaagatttctgaatctgtgataaattgtttttctttactgccttaaaagtggttatgagtgtaggggaccctgaaaaacatttttgttatatgtttacgactaatggactgccagaccctcttcaatgataaaggtatggtcatgttgatttggccaattttgttttaagtccgttgatgcccctgacaacaaaaccacattatcagacaaccattttctgtatttgtttttcagcaggcgagaacaatattttgagtgtaggcacaaatcgttctctgtacaagtagaatataagtatgaatataagttttctaatctccagatgcgacccttcataatctattggccttttgaagagttatctccaacaaaatacatactataaagtgggatttatgctgtaataagatgctgaactgaaaacttttgttgttgttttcatactttcccctcccccattttaggtctgtattaacttaataccgcgattggatcgctcacaacaaccctctatttttttttttgttaccttgatatgctaagataacataccactgagttatttgtgtatttagtttttcaatttttattaatacttaatacttatacaatatcgtcacaatgcaggttttggtgtctaccgca

SEQ ID NO: 108253 - DNA, 551 bp, Aquilegia coerulea
  Intron number 1 from transcript AcoGoldSmith_v1.003347m (l ocus AcoGoldSmith_v1.003347m.g) derived from phytozome v7. 0 (chr-ID scaffold_12; pos 5545346 to 5545896 reverse stra nd)
gaaaggtctgattttacatttgtttttctgtagcacactcattgtacattagtctctgcccctcaatcaaattttttttattgactaatgtacttgttttttcgaattcgatttagtattacttagttatgttagtcgtagtctcgtagcagatacaacttcacgtgccacaaatgttcttcctgatttaggacatgctgtatctatcttgctttgtacttgatttataatatgaagtgaagtttaatgagcttctcctgcatggaagatgtcaaacatcaaaagttcccgtgtgaattattatttttttttattttttacccaaggtaaaaatatttcattcaaagaagctcgagatgagcggagaacatacacagttaattacagagtccctagagggggttatctcatctcctcccacatagagaacacgcagacacaactacagttcgtgtgaattatcatgtcctagaatttttttgagatattattgctaaatatatattgcagatgggcttactgactatctatgttattgcagagatttggta

SEQ ID NO: 108254 - DNA, 438 bp, Aquilegia coerulea
  Intron number 1 from transcript AcoGoldSmith_v1.012032m (l ocus AcoGoldSmith_v1.012032m.g) derived from phytozome v7. 0 (chr-ID scaffold_18; pos 1746377 to 1746814)
ttctttcgttttctgaaagaacagattaagaattggtatgaactgtaatcatgttaattgctttataaaaaatttgaaatgtgaagatttcgtttgatttttttataaatgaacatgttaacatttactttaatcataatcaatttggttagttttatgtttaatcatgatcagtttggtttttatgttaacaattagtttaatcagtttttgataaattatgaaacagaattgcttttgtatgtattgtgatatatttaatatctttgaagatttataagaagaatagagtttgcatgtagcttcttttctatttgtatagctttgagaattcttagtttagattggttgagaatcacagtagttcaatttttttaataagaaagttatttctgtgttgcagagaattgcgttttcatctattaaatttctttgaga

SEQ ID NO: 108255 - DNA, 131 bp, Aquilegia coerulea
  Intron number 2 from transcript AcoGoldSmith_v1.012032m (l ocus AcoGoldSmith_v1.012032m.g) derived from phytozome v7. 0 (chr-ID scaffold_18; pos 1746836 to 1746966)
gaggcgattgaaggttttacactatatcttatttagtttttctggaatttgtctgtggaggtttcttcttccacttttaatgattttttgacatttctcttttgtttgaatcaatttcagtgagttcatta

SEQ ID NO: 108256 - DNA, 820 bp, Aquilegia coerulea
  Intron number 1 from transcript AcoGoldSmith_v1.013173m (l ocus AcoGoldSmith_v1.013173m.g) derived from phytozome v7. 0 (chr-ID scaffold_21; pos 598494 to 599313)
ttccaaatcaagcaaatgttccacagcagtagagcaatcgggatgaagatagtgtacgacgtcaaagacattacccatctcagaacaatcgagatgaagatgatgaagtcaaacaagaactaaattatatatacgcaaatatttgtcggatcaatggaggttgtgctccacaaactgaacctttacacaataagtacttgttccctaagattgggcagatatatttgtgtcgggatgattttatgagagacatgaaatcttatgcaattgaggaggagtttgacctgaataattataaaactgagatgaaaagggtgtattggaaatgtaaagttccaacttgcccatggtatgttcgtgctacaccaaatttaaatggtacttggaaaataagatgcattactgagcgtcacacatgtgggaaattcagacttggatcaaaaaatcgtcaagctgatagtgattgggttgcatctaaaattgcgagaaaattacgggataatgaagatcttacatccaaacaactgaaaaaccaaattgaggtggaatatcttacccagatttcatacaaagttgcttggagagctaaagaaaaggcattggccaagtattgttctgtttaacattgcaccttcctatcttatcctctagttcattcacatatgtcggttaatatcttgtgttatttcctctaaaacgtagtatgtgcatatagtgcattaatgttatcctctaaatattcaatttataatggctaattagtcatgtttatccactatttgtagttaaggggaagcttcagtgagtcatatcaacaact

SEQ ID NO: 108257 - DNA, 995 bp, Aquilegia coerulea
  Intron number 1 from transcript AcoGoldSmith_v1.013364m (l ocus AcoGoldSmith_v1.013364m.g) derived from phytozome v7. 0 (chr-ID scaffold_108; pos 306685 to 307679 reverse stran d)
aggttttgaagaaagcacaggttcggtttcactacttttgactatattcacatttctatacattgagtagcacagatcattatgtttacttttatacgtataaaactacttgaagactttagttcattacttttggcggctttagcttagttgatgaacaacacacaaacttaagcataagtattttctattatagaattctcaaagttttgaaaatgtggatctttggtggttgaatagtcatccttgttgtgaagaaataattgatcttactgattttctgaataaagtaaaagaagatatattgcgagatcctccaagatttcgaactatgtgtctgacataattttattttgttgatcagttcaaagtgcacgtttgagacgtatttctttttgtttcgtcgttataattttaggactacttattggagagaatatatccatatcacatacatttcgaaaaataacaaggttataaacatattacaagagcaaaaatagtgagagatttatatcccacaatagtgctgtagtggttcaaagttataagttataactacaacttaattgctgtgaggatagttattttcctttctacgtcaacgcagttagggtgctcccaggaaaagagagcggacttggaatgaatgtcagtgctcttatggtaagaatctgcaaatgtgtaagctttagtagacatgttcttgacctaggagcttattgcaataaaatatcagtaaaatcccactttaagggcatggtcatccagtcaaaccaaaaggtctacaatatctgtccacttgaaagttagagaaataaagaaaagaggatacagagagacatgaactaaactaagcctctaaagtttgaatcagtaatttataaaaatagaaaaagctattacgtactaggttagacatatatcatatgcttattattatgtcatttgattttgtaggaagataaaaagaagattcgggaactatcagccga

SEQ ID NO: 108258 - DNA, 736 bp, Aquilegia coerulea
  Intron number 3 from transcript AcoGoldSmith_v1.024595m (l ocus AcoGoldSmith_v1.024595m.g) derived from phytozome v7. 0 (chr-ID scaffold_1; pos 18723 to 19458)
tgcagattttggaatcagcgagactcttctcgacagtaaagttgaagctgtaatttttttcaccctttgatttttttttttttttttgtttgggattggtaagcggggttgaggggacccctaccccttttaaattacgtgtggaaacttatatcaacaatcagctgttgacgtgtttcgaacccacaacctctccactttgtgagaggggtgctaccattgagccgcaggcccattcacaaaattgtgtggtaagcctgtttttaatgagatcagtaactcgataatgctggcgggatttgaacccccagacctctggtatcatcacccaaaggttttaccaattgagcccaactggcacccaaagatttttctattctttgttttactttttggttgttacttcagtccattattgagttttcatttgttaggcacttaggctggttaatgagttctatttaactgtttgtgttatatattgattttgacagattgtaaacgagtacaatgaccttctcagatcgcaacttgaaagtcaaaaaattgtaagtatttccaaattatcagaaggcaacaccttttccatcttatgttttggaatacactaaattcatctaaggccaaaactcaattaatccatgcgacaagaatgattctttttttgtttcaattgtagtatttcgagtctttacttctagaagccagggaggaaactgaaaaagaaatttctgaa

SEQ ID NO: 108259 - DNA, 192 bp, Aquilegia coerulea
  Intron number 1 from transcript AcoGoldSmith_v1.011585m (l ocus AcoGoldSmith_v1.011585m.g) derived from phytozome v7. 0 (chr-ID scaffold_11; pos 2870497 to 2870688)
gagtagctgtagtagaagaagaagatttcaccgtaactttgattatctcttcattcacattatttcttcttcatcatcatcttattctttgtagtaatctcgttagttcataatcttaatctaattttgtttttctcaatgttgtgttgttttacaggtgaagtattcaaaggaacctgataatccgactaa

SEQ ID NO: 108260 - DNA, 363 bp, Aquilegia coerulea
  Intron number 2 from transcript AcoGoldSmith_v1.019829m (l ocus AcoGoldSmith_v1.019829m.g) derived from phytozome v7. 0 (chr-ID scaffold_21; pos 1015126 to 1015488)
gaattttgaaaattccatcaactgcttttgtgaaggtgaaaggatttctgtctttggtcctcttggtttagttcactatatagtcatatcaaatgtaattctaatattacaaaaatgtaaaaagagaaaaggcaatgcaactatcattaggttgcaaatggtgcatacatatgttcttgttttttccacctctcttctttgttgttcacttggttaattggtttatagttagatttcatagattttctggataatgttgaacttctttgcgagattaatttaccaagtagtttcacaaattaagttaacttggtgccttgtttgccatgaacttacatttttgtgtaatctgcaagcaagtgc

SEQ ID NO: 108261 - DNA, 799 bp, Aquilegia coerulea
  Intron number 3 from transcript AcoGoldSmith_v1.019829m (l ocus AcoGoldSmith_v1.019829m.g) derived from phytozome v7. 0 (chr-ID scaffold_21; pos 1015566 to 1016364)
gaggtgagtgactgaaagtctgaaatcaatttatatcatttaagaacccaaatataggatggaaaagtggaggacctcctgggaagtccttgtgttgcaccctcttttgaagtatcagttaaaaaaaaagaacccatacatagtattattcatcagttcagtgaatgatcattttaactgatatatttcttaatgcttgttgagaaccagttgctcaataagctcaaactcttagataggtgcccagacaatgtatatatcaaagggatcataggtcacacacgtggcacaccccaggcacatatttaatcacctgatggaggcacacactaatgcagaaactttgctttcaggcttttgacttttgtcattcttctcctataatgttgtaaacttatgcaaatttaatcattatcttgggtattatgtaactttgattgttgtttaagcaggaattattattttaatcacttaatttaacactttaagttttaattatgagtttaaatatgaaatggctcgtagaaaattattgggtttatatttaatggtattaaccctatgtaagggtgttttccattttttgccaaaaaatccaaaagctcaattctcagcgagtatgatctatccctgaatttagctcgggtttctaacagaagaatagtttgatacgatgatttattgccagtatgtggcttagcctgcatatttggttgtgtataaatgttgtcttttgttgttgttgttgttgttgttgttgttgttatttattgttttattgtaattgtagttgcactgc

SEQ ID NO: 108262 - DNA, 726 bp, Aquilegia coerulea
  Intron number 2 from transcript AcoGoldSmith_v1.005071m (l ocus AcoGoldSmith_v1.005071m.g) derived from phytozome v7. 0 (chr-ID scaffold_37; pos 837456 to 838181)
ctcctaaagcagtattcccttcagtatgtctatactctattactttattactgttcttcttgttattacaatgtgtggtttagggtttttgaagttgatataatgtggtaataattagttgtagaagagcaaaaagatagaaagatttcaaaagacttaaaagagtggaggaatatggagatattctttgaacagataatgtggatggattcgcatattagtaattatagttataattcttcctaatcgaaaattttgaacaaatactgaaccaactcaactctcgtccctaaatttaactttttctagcaatacagaattttttttttatcataacaagtaaaaaggaaagaacagcgctgtggccaatttagttcatggttgacttcatgtattagtaacaggcatttgattgcttttgctataatggtacagtatatgttggtataatggtacagtccagttgggaagtgcttttgctataatggtacagtccagtagtatatgttggtatactactgcttcaacaagatccttgcagccatagaataaaacactatcactatcatagttttttagttggcgttcgagtttttttttttgtgtgtgtgtttgtgtgtgcgttatatcagtctttagaaatgttttttttcctactatggcactcctaacgcatgaatacattttgaaggttgttggctcgattgagcagttggaaattggtga

SEQ ID NO: 108263 - DNA, 1001 bp, Aquilegia coerulea
  Intron number 1 from transcript AcoGoldSmith_v1.002182m (l ocus AcoGoldSmith_v1.002182m.g) derived from phytozome v7. 0 (chr-ID scaffold_37; pos 1174437 to 1175437)
ttttttttcgacaaattgccaaacaggtaaggctttaataagtgcaacttttaacctaatcgtatacttattgcttttttgtttgaaatgttgtttgtaatcttgaatcaattgagctaattttaatgttgtaaacatcatttccatagttttcacttgaagaagattgtttctattgttgtattgatatagaaaagcttcatttctttgtgattttgatttggtttcaatgaattattctcaataattgatgctgagtaatgtttaattcctaataatttttgttatttattgagtaatttgagttcttgaggtattgtgtccaactccggaatcggtaaaattttaaattggaagtgatttgtgttgggccgctaagattcatatggatatgtactcattgtgcaaaacaaacaaagatatgtatgaattaattatatgagattttctaattattatttccaaaaaaaaaatttgagaatttaagcacttttgcttcatactgataaatttcatgccaacttatttttttaatctgatattgtaacaaatataactcgtcttaccgtgcttgtaatatatggtaaaaatatatcattacaagtcagctaagatattataagatcaacagatttcccctgctttaagcctctaccattgctatatgttaagaagtatcctgttatgagttttccagtgcacatgacttgtcattgcaagcagatagttagaaaaacagacatgcctctcaaatggtgagtgtttgtgtatgtaagaattcaggggtcgtctcaaatatctactcattcagcttttccaagcactcctattcttgatcatcatcactagattactatatatactatatgtcctcacctgtcaaaaactgttcaatcataagctaagaaagctcaacacaaaatctgttatctagttttctggatttcttatattctgtttcatttattctttgaaatgtgtcatttttttaggtttgctaa

SEQ ID NO: 108264 - DNA, 429 bp, Aquilegia coerulea
  Intron number 1 from transcript AcoGoldSmith_v1.005377m (l ocus AcoGoldSmith_v1.005377m.g) derived from phytozome v7. 0 (chr-ID scaffold_9; pos 3991945 to 3992373 reverse stran d)
aaatcttcttcaatctctgtctctcaaccataactgtaagtttattttcttcttgtttgttcttttcacattgaattgtttttcataatttttgtttaattttagtctaaatttaccattactttatatatccataaaagtttgatgttatttatttgattaacattgcaatactactgtataaggatactttcaattcaattattgtcattttttttttcaataaaaaaaatcttgtggaattagtatcaaaaaatggaatattttgttgaagagaatgaatatatatatatatatatatatatatttaatgcactttttgtagagagaatcaatattggattctttgcgactttttgataccttggtctgttatatattttgttgtttgtttctcaaatagattggagtttgttttgagacgaggag

SEQ ID NO: 108265 - DNA, 676 bp, Aquilegia coerulea
  Intron number 1 from transcript AcoGoldSmith_v1.004882m (l ocus AcoGoldSmith_v1.004882m.g) derived from phytozome v7. 0 (chr-ID scaffold_6; pos 8054848 to 8055523)
ttgcttatttgtgatttgtgaatacttcaaacaaggtagaattctctttcttcttctctcttttttttttttttttttgtttttttttttagtttagaattactacttgttaagctttcaagttttaatctttagttgaagaaatgagttcataattaaattttttgtttttcttataaataacaatttcgaaagatttctgttttgagcaatttgttcatttctccaatactttggggggttttatgaagttatggaaaaaaaacaatttcatttttttcctgaacgttggggaaatttgctgtttttttgtgttaattttgtctagaatgtaaagtcccaagactcgaaattgattctagaaggtaagtttgagcttcaaattgaaagttgaagttgggtttaccggtttaagctgaatcagcaaagtttttatatgaattcactatcccatgtttcaattaaatttgaactttttgaattagttttgaggatttttgtttggtttaatggtgattctatcaaaataatagaatcccaattcaagtttgttatttcagagcttaaagactatttttttagaattttatcgattttttctgtaactttagtaacagttctatattgtttataattgtcagattctcaattattggagctgaattcaagctttgga

SEQ ID NO: 108266 - DNA, 784 bp, Aquilegia coerulea
  Intron number 2 from transcript AcoGoldSmith_v1.004882m (l ocus AcoGoldSmith_v1.004882m.g) derived from phytozome v7. 0 (chr-ID scaffold_6; pos 8055990 to 8056773)
attattcttggtaaggtttatatcttaaatttttagttactttatccaatttagtttatcaaagttgttgtcagtttgttgtgtttgctagcttcaaccatgtcccatttgatatttttaggttggaaatgctttacccaaagtttatgacttctacattaaccgagggtaacatcatttggttttacttttattacaaccatgatcagatcgcaatgctattgaaagctaaccgagggtaccatcatttggttttacttttattacaaccatgatcagatcgcaatgctattgaaagctttgtttagttttggatcgacaaaatgctacagcaggtttgtttgtttgcatagagttgtaattggaaaaaatcaactagaaacaagcacacagtgttctttgtgggatgttgagtgaacaatgagataagtattgtcatgttgtccacttaccctgacgcagtattcaactatgaactctcgtactcttcggtattgtctcttgtttagaagatagtgaagggaaatgtcattctaaaatttgagagatatgaaacctgtacgttataagctcaattccctcaaaatgatttgttccatctcaaaccatagtcccaacaaatgaaaaggcagcttttaagccagaagcagctcctctttgtctagaatcccaatgtagctaaatgagatctattgctcttatcatttcttatatcagtcaaccttatattcttctattgttttgagaataagtctaacttattgatctctatggtgataaggtg

SEQ ID NO: 108267 - DNA, 409 bp, Aquilegia coerulea
  Intron number 1 from transcript AcoGoldSmith_v1.014940m (l ocus AcoGoldSmith_v1.014940m.g) derived from phytozome v7. 0 (chr-ID scaffold_9; pos 316631 to 317039)
ggttaatggtcaggttttgggttcgccaacattaataaccaaaaaccaccaaccgatcaaacgatggctcatatggtctcactgatgactgaaccgagtacataaccgactcaacacaaaatgcaccgactgattgacgctacgtaaaaatttccgcaaatagaagttttacgcaatccaaacagaccctaaggcttggtgattataaaacgatcgattccttccctctcctcttcagtgacaccatttctttcttttgctatctctcgctatctttttgtctttcgtttcctctcattgattagattcgcgagtttacactcttttttctttctgcattagggtttctatctattcttctaattcgattctcttcaagcgatgggtttaggaagaacggttgtttctg

SEQ ID NO: 108268 - DNA, 539 bp, Aquilegia coerulea
  Intron number 4 from transcript AcoGoldSmith_v1.017522m (l ocus AcoGoldSmith_v1.017522m.g) derived from phytozome v7. 0 (chr-ID scaffold_11; pos 6111235 to 6111773)
tagaacgtgcagctgctccttattttgggataaaggtttgtttgtctacaacttaacaataatgtatcttctcataattgaaataaacgttgtatcttgcaaaactaaatgcccttggaacaaaatagtcaaagttatgtcttcttttctaggtgatttcatatatttcaaaatatgcgcaatttgaatcttggagggagtttattagttggtaacctgtagattaagtcaatttttctcaggggcatcaacaaactctaaaactgtgtgaggtgatcctactggtctcaacatgctaattaatctatcaagaagatatgttgattacagttaagatcagatatcagacatatagtcacctgacaatctattttgagtcaatgaggttccacaacaatttagtttctacataggttgtctgtgaatgtctgcatatttcttatttatattatctggacatgagtattttggcatgctctcttcatgccgatcacatttaacttattttctttctcctttttttccctgcaaataggctt

SEQ ID NO: 108269 - DNA, 1002 bp, Aquilegia coerulea
  Intron number 1 from transcript AcoGoldSmith_v1.001231m (l ocus AcoGoldSmith_v1.001231m.g) derived from phytozome v7. 0 (chr-ID scaffold_1; pos 8721340 to 8722341 reverse stran d)
ctgcacctggtgtgagtaattgccttatttgcattttatcattttcctcatcagatagtaatgagagtagaaagtagcaagttttgaacatcttccttcttgcttggattaaaacactgctctcagcctgctacatacggaatctgagtgtggataactcatttccaggtttaggacctgatgcttcttccagttgtcattcttctccctactgtatttttttttttttttttgtcaatggttaatttgcatatctgttagttagaccaggcatctagattcagatcgaagccaaacatcaagctgtgatggatatgaagcaagatgacgaaatccaaatccaaccaatgggatttaatgccaaaagaaatgaaaataattaaaaaaaaaagcaaatcaaacaactatttagtaaaaaaactgaatacgggttttttgaacatcatgagttgcaaagtttatgagaggtcgcttgaacgatggaaaatgcttttacactatcttaaactattggtcatgtaacaatttagcactaccttgaataaccagtttcatggtttggttccttttatttattttatttttttgtgttttgattgggtggcattcacttggctttcatcctcgttctatttaaacaaaaaaaaaacttaattatctaactcactggactattgttgttatgcagatataccatttatatattgtgaaattttataatatctctcgttggtcatattgggtctttttagcacaatgcacgaataaatctgccttgttaatagggctaattcatttatactaaattgtaacactgcctgttccgttccttggtctttaatgtagattgtggagttcaacaaagatgttgtaaacttgtagttgcagacactgtgtgaaagcatgattaccttgtatagtcgtatcttggaagctatgattttttttttctctatttgcttctcaggatatcagacgtggattgagttctattcgaaggct

SEQ ID NO: 108270 - DNA, 604 bp, Aquilegia coerulea
  Intron number 2 from transcript AcoGoldSmith_v1.018109m (l ocus AcoGoldSmith_v1.018109m.g) derived from phytozome v7. 0 (chr-ID scaffold_28; pos 2052071 to 2052674 reverse stra nd)
aaaaagtaagattcacaaaggtttatactcaaggagaagctctcacgaaatactgagtacatgcttgacaatatttgctttcctgttgagagaatgattagatgttctgaaaaccaacattaatttaagatcaaacatatgcaactatgcaagggttttcgaaaaaggactttgtttatcttagaaaattgcagaatatataaacatttttctatgatctcttttgaccagaagatagtatttcagtgagtttgcttcagaatgctctatctgaatgctaattaataattggtgggtcagacctagctaccaaagctaatatgtgtttgttgtcttcatatgaacagctgcattacttgatcacacgattgttctttgccatttagattttgtagtgcataaggattttagaagttaaatatataacttttaagcttaatttggtttgtaagttttaaatcattttactaatttttcctctgaagcaaaaaaacccattctaaagctagtgtgcatctattgcgttttttccatcttttctttatccattccaccaaatttgtctcttggccatgacattttcacctcaatcagtcaggaccag

SEQ ID NO: 108271 - DNA, 764 bp, Aquilegia coerulea
  Intron number 1 from transcript AcoGoldSmith_v1.016061m (l ocus AcoGoldSmith_v1.016061m.g) derived from phytozome v7. 0 (chr-ID scaffold_7; pos 6924429 to 6925192 reverse stran d)
tctggttaagggtcctgatattaacatcctgagtaaccattggctgtgtgagttggagggttctttgagcttggtgcaaacatatgagaagaaagtgatcttgtgggttttgaaggactatgaagaacaagaatggatgaagaaaagtgtccttcgacttccattttatccgagctggccagaaggttttatgacaattcgaaacaataaaattttgttcgaatcaaataaagatgaatgtgactacgtttgtcactatgatgaccagggtcggctgttcaaggcaatcaaagttacagggctaccttcatccttcaaaaactacattgataaccatgtcgagagcctggtcagttttaaatatacctgaaactgaaagctccataattaaaaatctaagcttgttggttgttacttttgttttgtttttttttccttttgcacttttgtaaacttcttagactttccttgtaaatgtggaacatttcatagcgacttcttcatacatgcttcttattttgggaaaacagggcaaccttcttgtgtgttaaagacttattagagcaaattgaagtaagttatgaatttctagggtgagattctgcaacaaacatctggtgttgctttgctgtcaattaagaatttcaaggatagataagaacgaatgtgaactgaatattcatacctcaataaagccataccaaagtccaaagagatagtcgatctgtgaaaactatgcagccttgtaaaattcttagttgcag

SEQ ID NO: 108272 - DNA, 955 bp, Aquilegia coerulea
  Intron number 3 from transcript AcoGoldSmith_v1.015386m (l ocus AcoGoldSmith_v1.015386m.g) derived from phytozome v7. 0 (chr-ID scaffold_49; pos 845456 to 846410)
ctcggatgtcctttattatcatatctaattgaaaacacaaaagagcagaggaataaaaacaggcaagctattgttatttggactggacagtcctgccagataatcagcaaccctatatacttctctaaacacatggattacattcacactacacatcaatcttacagttcctttaattggcgctattaagtttgcgcagtacaatgggaattctcattttctcttgataatagtgattgcccttagggtccgtggccactacaacattttgcaaattagttctctggcattcctgtagaccacttcaactgcctttaactcttgtacaaaagcactgatctcactatacttcctagtatagtcagatactaggcagctaactttattttgagtcttctgggaagttccattgtgcttacgccaatgttagtaaattgttagtaacccaacgttcatgccagagcaaagtcctttctccattagcaatgctacaagttatgaactttcatcctagtctacgagctctaattatagaccttcatgtccacgagcagtctaccggaattcccatagaccagaaactacaaatgcaatataataattttgaaacttcaaaataaaaaattaggatataaaaggaactgattatagaagcagagtgttggtagtctttgtacttggtttgtttttcattgttgttcatctagctaatgttgagtactgatgattacctctattactaattactagctcacaagtgttctgtaactttgatgtatatgtcactttgttaatgacatgccaattactaataatgtgtatctaagttcagaatggatatacatctgtcttatatggccagttcatcatcatatctaaacattgaaattagatgatatactgcatgcagttaacacttgtgttttggtctgtatatgcagtcaggaggacctaa

SEQ ID NO: 108273 - DNA, 619 bp, Aquilegia coerulea
  Intron number 2 from transcript AcoGoldSmith_v1.010818m (l ocus AcoGoldSmith_v1.010818m.g) derived from phytozome v7. 0 (chr-ID scaffold_54; pos 1443270 to 1443888 reverse stra nd)
ctaaagctttccataagaaagaggatattataaaggtaaactcacacaagcaaaaaaaagatgttaagtattttctgttaatttgattcatctttattacttgcacaaagattaatttttaagatgtttgataattaaaatcctagtaattataggaaacaaatgccaatttgggttttgaagtctctaaagtattggcgatgacaacccaatgtctattgctattgtttaagaatattgttgattcccgagaactgtgatgttgttgtggagaaaggataaataggtgcgttgcaagagaaaataagattggtaagaaaattaggtaactcccaaactgcttagataatggtaggaaatttcaacacttaggcatttctttttgagataaacctcaaatttaagtagaagagagatggaaaggcacaaatttttttttgccacactaagagttgaattttggtgtgtaggatataaatcatataatatgctaacaaattcatcacgaggtatgcatatgcattatccagcaacttgttatcatctgatcttctattgaactattctgttggtttgttctgcagaaactcaaggagaaagcttcattcagaaatccaga

SEQ ID NO: 108274 - DNA, 523 bp, Aquilegia coerulea
  Intron number 1 from transcript AcoGoldSmith_v1.001458m (l ocus AcoGoldSmith_v1.001458m.g) derived from phytozome v7. 0 (chr-ID scaffold_9; pos 4175533 to 4176055 reverse stran d)
tttaatgtaagaaggtttgattgatgtatctatttgtctatctctctttgtgtagcttagctataactgttatttcttctttagttcttgcctctgcaagatctttcatgtgttttgtgtcactgtaagtaaacaaaaaagaaaagaattcttttgcagatgatgagaacacgtgcactaagatttcaagctcaccacttacaattaactataatatattataaatatatatctcaaatctcctttcttctgtctctctctctctctctctctctctatatatatatatatataaacaatatgattggtgatttcacacactacaattttcaatctatgttttttaagattgggtttttaagttgatcataaaatgggtttttaatgagaagtatggttatatagataaatggtattgtatggaatacttatatagggaactttcagggtcttccatggattcattattggttcatttcttatctcaggagcttctgaaggactagaagatcacaattggtgt

SEQ ID NO: 108275 - DNA, 300 bp, Aquilegia coerulea
  Intron number 3 from transcript AcoGoldSmith_v1.004098m (l ocus AcoGoldSmith_v1.004098m.g) derived from phytozome v7. 0 (chr-ID scaffold_10; pos 3289841 to 3290140 reverse stra nd)
gtggacaaattgcagagtacattggaagaaaaggggtaattattattaactcactatttttttttcttctcatttgggctgtgcttggtatatagattaaagagcaaaaatgcgagctagtatagactatagatcttacttgaaactcgtgtaatggatgccaagtttgatcaatttttgtttgagtttgctattataccaagcacagttctgcttgccatttttttccgtttttgttacttataggaattttactgatttagtttgattggattggattggatcgaattgtagtcattg

SEQ ID NO: 108276 - DNA, 469 bp, Aquilegia coerulea
  Intron number 1 from transcript AcoGoldSmith_v1.014398m (l ocus AcoGoldSmith_v1.014398m.g) derived from phytozome v7. 0 (chr-ID scaffold_75; pos 450686 to 451154 reverse strand )
aattgtatggacaataaaaaatatttgagctatatcttacattaattaaatgggtatcattttttgagaaagtgacatagtgtttgtatttaggtttgtgtgtttcatgttctgcctttcatgttaaagtatagcataaattatctagtatatataaaaaaacctttcatgttctgcctttttcatctagtgtttaaatttggcttgtgtgttttatgttctctctcatttatgaaatactactgtatgtatataagccacactaagcatagtttggattattatgtgggatctgtggtcctttgttttatattccctttctactaatatatgttagttgaaattttgaatttttatttttcctaccaagataaagattataagaagaaaaatatggcgtgcaaaatgtcgaaaccagttcaaaaaaactggatgaatgtagctgatagaacattgccggtgtatagaa

SEQ ID NO: 108277 - DNA, 877 bp, Aquilegia coerulea
  Intron number 1 from transcript AcoGoldSmith_v1.001579m (l ocus AcoGoldSmith_v1.001579m.g) derived from phytozome v7. 0 (chr-ID scaffold_9; pos 6638368 to 6639244)
ctggatttgccattgctgaaggtcaactttggactgtaagaaattttaattatgaaaactattttgctaagtttaatcgattttattttgaatttttgcaatttgttttgagtaagttttaaagtatgagaaaacatgttgttcagatggtgatttatttgagttttgtccaattgtccacttaacatctagtgcgttttcgtgagtttaatatcgattattttgtattttatgttgtgaataatataggagggtggggagtcttattgtgtagaatggaatatggtaataatgcaatgctcaaatgaatttagtctaaagcagtctagttgcaatgtgtaacatataacgtcgacattatgttaattactccctagtttagaggagtatagattttgattgctataaaatcatggtttctggaaaagaagtgtttgttattttctgttccgaaagtaatggatggcattgtatagacttaaaggatggtagaattggctctgctggccctaaatgttttaagtaaccagatcaatgttcacgcttttgttcaatgtcatttactctgctatcctccatttccaatattcaatagttgtcatttcaagttcattccgagttatatatccattaaattgaggtcatgattccaaactagaggacatacctagtaatcaccacttacctctacatgatctgattaaatttgattgagttcacttttctgaatcactaaaagaaattcttcttggattttgtaattcccaattttcttgattttcaatatcttaagccgcaaatccatgtaatccattatttaacctaatatcttattttaataggtaaggcgcagggctgtggttccttctcttcacaa

SEQ ID NO: 108278 - DNA, 940 bp, Aquilegia coerulea
  Intron number 2 from transcript AcoGoldSmith_v1.011151m (l ocus AcoGoldSmith_v1.009394m.g) derived from phytozome v7. 0 (chr-ID scaffold_9; pos 1583561 to 1584500 reverse stran d)
acaggtaatctttttacaattaattaatcataataatcattaccaacaaattacagtaatatgatgtagtagactgtagacgttatcaatttcacacatcaagagtaatgcattttaatatttttaagaaaaattatatactttgaagtaatgcatttgtaacttatacacaattaaagaatttgaagaggcgtgagctaacttgatggtatatcatggtttttgtgcaattgtttgaagttattgtgaaatgcacttcttgttgaatgtatactatatatgataacaaaagtaactatgcagtttgaaactttgcaaccgatacacaaacaactcaacacgttgttttgttcatctgaagaattttgtatgtttgagttagtagataaagtgcagagaatatttgtaataataataataataaaaaaaaaaagatgcttttatactttacaaaaagatttagacatgcatatttcaatgtagttgtctattatgtattcattctaataagaagtgctacaccggtaacattgcattcatgagcgacagtcttgtccagaagcctttattcagcatctggttagtccatccctcttgaaattctttgtatgtttatgtgttacaaagacatctacgcatgagatggcttctcaacaaattcattcttgatgtgtcaaattgaaagacaaattttctgccacattgtaccttttcgatagttgtcaacattactgactcttgatctgtggttacaattggtcgtgtctacaaatcatttcaccttgactccctatgccagtttccataatttaattggtcatgtgccgttttaccaggatcaagcgacagatcttttaaaatgattcctatacactattagctcttgacctactcttttttatggtttctttgtaatttcatgcaagggtagagctcttta

SEQ ID NO: 108279 - DNA, 521 bp, Aquilegia coerulea
  Intron number 1 from transcript AcoGoldSmith_v1.012327m (l ocus AcoGoldSmith_v1.012327m.g) derived from phytozome v7. 0 (chr-ID scaffold_10; pos 1022612 to 1023132)
gtggtggaggatagcatcatcggactacaggtaaatcatgcgctttgcataattgcctcaggccatttcaattcttaaaagttaatagtccaaaacatatttacaagtgagatataggctctatttggtacaccttaatactaagtgtagagcatattctgccttttccccttaagttaatattgtgaggggcatagctgtctgttgatgtaaggctgcagctacaaattcttggaagatcgaaggcagaacatggacacgttgtaccaacttcggagttttgatgaattcctgcctccttcatattctagtttcttagtgggccttttagagcaacataatacaaaattaagcttctttcagactcacaatattttcttttggccttagtgaggcaaagatagcttaattgaacaaaaacgagaagtcattccagttttgaattctttgcattgaaccacgttcatagatcctactgatactacacaaaacttatccaacaggctgcaacaagtgcagga

SEQ ID NO: 108280 - DNA, 639 bp, Aquilegia coerulea
  Intron number 1 from transcript AcoGoldSmith_v1.012113m (l ocus AcoGoldSmith_v1.012113m.g) derived from phytozome v7. 0 (chr-ID scaffold_71; pos 892798 to 893436 reverse strand )
atcaattgcctttccttgcaaaggtaactccattattttacgaggatggccattaatcaatttgttgttcttcatatctttgaataatctgtttattctgcccatctgttgttgaccatggtttgaataatctgtttattcaagcaattttaactttccttatgagttagcatatcttaaaatgtatatggggttttctgttgaaatctattttaaattatatgatgattaattgtacatcacaatgatttatgaggtttcttttttattttattgataagctcaaaaattacacaaagacaaacgtgctacaaactgtgttgcaggtctttttgaatagcgaacccaattctctatacatattctttcgaaccgcagtcatcacgttgctaaccattattttattttttttaaagcaacctggggttctgtcatttaggcagagtcctaccgaattttattaaactcttatgttgcttattgcattcaagaatgaataatttctaattatgtaccggatgaatggaggaaaatatcattatttacacatctttgtatttgcatgtataatctgatcatattttgttgggttgtgttggtccagatcctaggatctctcagactggcaactctaattga

SEQ ID NO: 108281 - DNA, 538 bp, Aquilegia coerulea
  Intron number 1 from transcript AcoGoldSmith_v1.024532m (l ocus AcoGoldSmith_v1.024532m.g) derived from phytozome v7. 0 (chr-ID scaffold_27; pos 1754598 to 1755135)
aagctttgtggaatcgtttcgcgccaaaaaggtcttcatgaacgtttcttcccgccatttaaatgcttcattctatctaaaaagtcgttatttaaaagaaattttcaaacttttggtaatttaaaaggagaaacgacgagtgctattgtaagtttgattgaaaagggcaatattattcctacatttcatacttattctaaacttttagcagaatgcagttcgagaaaatctctcaaacaaggcaagcaaattcatgctcatgttgtcagatttggattcttggacgacaccactctctgcaaccatttgatcaatttttatacaaaatgtcaagtttttcgatatgcccagaatttgtttgatcaaattactgaaccagattctgtttcttggtcttctattatatctgggtatgtgcaaaatgggtttggtgagaaagcgatatttgcgtttggtgagatgcataaagggggtgttgagtctaattcattcacattctctagtgttttgaaagcgtgctcgattataaaggatttga

SEQ ID NO: 108282 - DNA, 568 bp, Aquilegia coerulea
  Intron number 1 from transcript AcoGoldSmith_v1.007503m (l ocus AcoGoldSmith_v1.007469m.g) derived from phytozome v7. 0 (chr-ID scaffold_10; pos 273316 to 273883)
atcactaccactatcttctcgttcttctctttcaggtaaattatatatatataaataatctctcccctcctataacaaccctacctagtacctacctcttttgtttctctagatctaaatgttaattacatttcgtctgatttcaacttaattgctaatttcccgataattatttttctgaaaaatcattggaatttcttccatatatttctttctttcagattgtggatgagttttactgtgtatcgttaaggttgaattcttctacttcttatgaattttttaatattgttttcattccacattggtgtcagaatttcttggaaaatatgttatagcgtagccgccgtagcttcattttctatttcttatacgaagatatatctttatagaaaagcaaaatgaagtcagtagttggccatagcttcagcctttagcttgtggttgttgtctatgcaaaatatataattttgatgtaaatcctaatatttgggacaatttgtcttgtgattttagtgtcattaaaaagtagttaaaatgcaattttcattttgttttctcagcagaa

SEQ ID NO: 108283 - DNA, 614 bp, Aquilegia coerulea
  Intron number 3 from transcript AcoGoldSmith_v1.002014m (l ocus AcoGoldSmith_v1.002014m.g) derived from phytozome v7. 0 (chr-ID scaffold_9; pos 4315318 to 4315931)
gaagaagaatttaggcagcttctaacatcctacaggtatgtttatgtacatatcttgctcgttaagcccattcgtataaatgttactgaggagaggatcacatcattctgcacttactcatgattgcatagctacggcatattatgaaatcgtaatgcatataagaagtcctgatacatcagtagtccatgtcccaagttgaggatgtatcttcttttgctccctaaataaagtgtcattttaatgttttgacaataaggtgttggtattccagatccattatttgatttccacggttccaccttgagctctttatgctttctcggcaagttaatacttattgactaaaaatttaactagtacctatttatagaatagctcttttagtaatctgtcatgtactcatgtcgcaaggttaattcatttactgtctatcttatattcatatagaatagaatgataagcaactgaatcgctcaaggtatttagtccgccaagtgtttgacatagggaagattccatgtgctgatctatttctttatttttcgtaatgaattctattttctctttggatttcagcaaacctgtggaacctgatcgtctttttgattgcc

SEQ ID NO: 108284 - DNA, 629 bp, Aquilegia coerulea
  Intron number 1 from transcript AcoGoldSmith_v1.000680m (l ocus AcoGoldSmith_v1.000680m.g) derived from phytozome v7. 0 (chr-ID scaffold_9; pos 6566178 to 6566806 reverse stran d)
gaaccgttcacatccttgatttacttggaaatcaggtttttatttctctattttttattcaattcaattgtttcgttgacttcattaagctcttttgatatttttttttaggttagttttagttgaattacaaaggaaataatgctttcttttgaatttcatagcttgtttgctatatgaacacattgatactaattagcagttctctcagatgtcaatacacatgatcagaaactgaattagaatcaaaacaggcttcgttggatcgattatatagaaaactgccagttaatttgaaataagtcgagatttggcgtgttgccgtgttatgtttgttgaattagtggacaacctagaaaatctcaaagcttaattatcaaatttcaatatactaaaggaggtaatggtaataaagttaccttctactcgagtaaatcattgttctatcaggaaattgttgtgtgctatatcagtagggagagcatataattttagttgattctaacattacttgatcaccttatccctcaaacattatgaatttttattcttcaactatattgttgagtgtttggtggttatgcttatgtataggttaaggaatttgctgcccatacagctactgtgaa

SEQ ID NO: 108285 - DNA, 431 bp, Aquilegia coerulea
  Intron number 2 from transcript AcoGoldSmith_v1.001847m (l ocus AcoGoldSmith_v1.001847m.g) derived from phytozome v7. 0 (chr-ID scaffold_37; pos 1476664 to 1477094)
ttgttgggctcttggcccttgttcctcttaggaaggtacatttctctcttttctattgtcatttcatatctcctcgggtatacgaataatgtcttgaataagtatttcacttttttatatgctggttaatttgcatcaattttgttgagcttgtttgatgtaatatcttttgtatcgaatggaaaagacctacaacaaaatgataaatagtcattgcttgaaagtcccactcatttaacatgatatttgctttggtgctgacaactaatgcttattgctttcagcaaaacagaggacttagttgtgccctagcatttgtttatttggctttaaaataatttgctctggttttagtgatattattgtgaatttgctggaccatcattcaaagtgatgatttactcatggaaatttcttttcctccatagatt

SEQ ID NO: 108286 - DNA, 557 bp, Aquilegia coerulea
  Intron number 3 from transcript AcoGoldSmith_v1.006623m (l ocus AcoGoldSmith_v1.006623m.g) derived from phytozome v7. 0 (chr-ID scaffold_7; pos 6777447 to 6778003 reverse stran d)
ggaagcctagaaaagcatctttttggtgagtcaccatacaccaaaatgtctcctctcgtttgtctttattttaacctttatacgtgtgttgcttgtgtatgccagttagtgtatttcttaggtgtacaaaatatctcttaatctagttgtatctgccattttgcaaatgcaaaatattgttatttctagtgatagtcaaaaatcaatctctcatcagtgtaatttatgtctttttgatgaaatttgttcgaagcaatccatttgtgttagacattaattttactgttactgtaagtctggttagatgaagtttttgacaaacataatggtagtaaacatgtgaaacaattttgcgaatgcactatcaattgcttattcttcaatgtgaaacttgtggtctgctgaattattgttgagggattttaatatgtagactctgtctaggcatcagctataattgtaactgtgctgatcttttccttttgatcctggacaaatttttttcaagactaaagtaaacaacgtatgatctgaacttcacgtattgtctatttcag

SEQ ID NO: 108287 - DNA, 439 bp, Aquilegia coerulea
  Intron number 2 from transcript AcoGoldSmith_v1.006623m (l ocus AcoGoldSmith_v1.006623m.g) derived from phytozome v7. 0 (chr-ID scaffold_7; pos 6778141 to 6778579 reverse stran d)
gtagggtttataaaggtcgcctcgaaacaggacaggtaagtttttttcttcttgatttcttttactttggctataatcgatagttctttgtgacatctaatctatgactgaatttggaaggatttgtaattgtggtttaggttgacttaatattttcatcaccgtgaaaatttattttgtctttaaaatattgaatttttttttttcagaaggtaaagcctttatcactgtcgtggtgattctagtgatgataattcaatgttttgattataaaaaaaacactattttctataaattatactttacttaattactgatttaatgtgccatggtacaaattgcattagttaacaagtagcattcaaagtttactaatacatcactgttatctactttttgaatatatgacagattgttgccatcaaacaacttgaccaaa

SEQ ID NO: 108288 - DNA, 970 bp, Aquilegia coerulea
  Intron number 2 from transcript AcoGoldSmith_v1.007955m (l ocus AcoGoldSmith_v1.007955m.g) derived from phytozome v7. 0 (chr-ID scaffold_11; pos 1765768 to 1766737 reverse stra nd)
caactttacctggatcacttgatttcttgcttcaggtaaacatttttgtcttctattttcttttatttttcaatttgagttattgggtttttattaaacataagtcaaaagctttatccattgaaggggagggagggaggtatcataattcacaagtaaagcaagtttgaattatataaaatttgtgtatatctgtaattgaaaaatattgttttaaacattaaatttgcagctttcaatgtaaatcaggctcttttgggggagttttacattggattggtgtgactgtgtgagtatgaaaaatcgggaattcaatttgcagaaaatggggaattggtttctgtaaaaccgacattttgaataaaccatttttcatcaaacacactttcaggaaaatacatggaagaaaaagaaaaggtctataacatgactccttgaatatattcattgctagacctctcactttttgttcaatttactttcacaagttaagctcaacatcattgtatcattaaataaataagcacggcagaactgactcctctatgtaaaggggtttagtgtcgttacactatacatggttatgtcttgtggccagatgttaggtgttggtctaaatgagtagtgcaactaagttttcttgcattcatgacttcgaaaaaatctcctttctcgtctgttacagtggctaccttttaccctctttcattctctgtctttcttcccccacatggtttaagctagaatccttatccatgcagttaacttctttaacttgtatgatatgttcctgtcatttcgctgaggtcattgaacggtttcattcagaaatatttgttataacttataacctttccctttcacgtgtgcaaaacgctttttattcttcgctttgtactgcttttggtgaagtggatgatgttttgatgttgaatttctttccttgctccctttattttgcttgaagtgc

SEQ ID NO: 108289 - DNA, 878 bp, Aquilegia coerulea
  Intron number 3 from transcript AcoGoldSmith_v1.019903m (l ocus AcoGoldSmith_v1.019903m.g) derived from phytozome v7. 0 (chr-ID scaffold_60; pos 681099 to 681976 reverse strand )
ttagaggtggtgttgcaccagtgccttcaaccgttagagtggactttatttgttaagtgcattgtttagttatgttcttttattttgagcctttcagctattgacatgctagtgagaaaggacatcatctcatgtttacctatctaatacaatattattctgtgcaaatgttgtattaattggagtaagtccttattgtgacatactgatgtcttaatttttatattgccatattacattacataaatatgtatgaaaatcattgaagagaagaaacccatgagatgaaacttttcttccagtctatgtttagatttaattgattcaacagaaaatggagggttgaaattgactcttactcagtatcgacgtactgacgtcttaatttccatagtgccatattacataacataattatgcatggaaattcattgaagggaaaaacaacccatgagatgaaacgtttcttccagtctatgtttagatttaatggattcaacgggaaatggagggttgaaattgactcttacgcagtatcatagtcgatactcgataaccataaagtgtaatctttttcgatttgtaatatgtaaatatgaagaatgtcggtaagcaaaaaacaaaaaagtaaaaacctagaataagcacgcaatgagtttacgtaggaactgttaatgtgtcatgaaatggaactatcaatgctttcgttatatttttattctaaatctgaaaatgccataccttcttattaggatgtctgtttttgtgaagttactttatcgtccaattgcagtaatatctgttcggatgttatatatccttcttttactcaattctctgaaatagtttctatttattttaaatcttagggtggtcct

SEQ ID NO: 108290 - DNA, 516 bp, Aquilegia coerulea
  Intron number 1 from transcript AcoGoldSmith_v1.019903m (l ocus AcoGoldSmith_v1.019903m.g) derived from phytozome v7. 0 (chr-ID scaffold_60; pos 682251 to 682766 reverse strand )
gctgatccgaagaggcctaggggtggagaatcaaggttgatattttaacgtgttttttcttgccatctattaatcttttcttctttaataaacatttttattttttgatagaatctttatatctgttaattttatagcccgtgtatatgtattttacaagtatatgagtaaaaaaaacatgggattctgatagtggctccatgcccattggaattaagccagacatcaaggctaagtaatgtactattcacccggtctcgtagatctcctatttaaatttgaaggaaagtgagtgatttttttttttgttctttgtttacaagtatggccgcagggcctctatttacatttgatttttaactcagattgtctagctaaaatttctattcccctttacatgtagaggcttgttgtgtacagtttatatagtttgtgcagtttcatgtgcgagtgctgaattgatatccgtttttctactcaggggtggcgtacctgcatttggtggtcctggtgttg

SEQ ID NO: 108291 - DNA, 883 bp, Aquilegia coerulea
  Intron number 1 from transcript AcoGoldSmith_v1.009903m (l ocus AcoGoldSmith_v1.009903m.g) derived from phytozome v7. 0 (chr-ID scaffold_10; pos 166874 to 167756 reverse strand )
tcatctgaagttttggtccgaaaatttcttgttgagtgagtttcaagttcttatcttttgcattccaattaagtataattgatagtttgattgggaattaagttaattttgtttgcttgtttggttgattgctgtgttttatacttgattagtaactcaattatgtaattagctactttttcgtgatagtaattaagaatgattgtttaattgatcagtttaggctattagtggtggttgaacatcatgaataagttctaggtcttactgctagttcagaattattaccttttgtttgtcgttatgaaaattaatgtagaaatcatgaataattctacaatcctttatagtgatctaaatttattaatctaaattataaggtttaaggtagactgtgtttgggactgttgaaaagctgtttgttactggttcggagtcacttttgttggttaaatacacaaataggatataattcagcaatttcaaatgagtcattgcccttcagctaatatactgctgtcattttttcccttggaggccaagacaaattgagtttcagagatattcttaaactacaaatgaaagttccaattttccggccgaacctattgtttgatttttatttatttttgaaaatgctggagccacagctgagagaacggcattatttgtttcctatttcccgtattactcactctggctgtgtgatgaagtatgaactgatgattcaggttccctcttatgtatgaagaattagggttattcaaagtagttataatagaattagattttttttaagaatatgttaaggtttattttctctgcttacttttactcaacccataattttgacaggttggcggtagatcttggtctgaaggtt

SEQ ID NO: 108292 - DNA, 643 bp, Aquilegia coerulea
  Intron number 2 from transcript AcoGoldSmith_v1.005828m (l ocus AcoGoldSmith_v1.005828m.g) derived from phytozome v7. 0 (chr-ID scaffold_69; pos 892690 to 893332 reverse strand )
atcttcaatccccaaacacaaacaaatcttttcaggtgagtaataagagctttcaatttctttctattctgccatacttgcttttctgtgcttcttcttgttgtttgtagaattccaactttcaaacttttaaggaatcttattgtatttaaaagtttggtcacaaagtggggtcttataatttttaatgctaaatgattcattttttttttcaaaaattctgccatgagtgtttggtgaggtttgaagatttcaggttgaagatatgtattaaggccttaactatgattggttggtttgaggttttgaaattatagtttgattttaaaatatccttttttggaatgatttttattcaagctgtgtcgaaaacaaagaatcgagttttccagagttctcttatgcaaattaatcaagtttccaattgaaaattctagcttttttctataagaccatctacttccaattttgacagtatcaattcattttttttggttttgtttgtaaagaacctggaagtataatttttgtttcagaaggaatacatacaactatttatggggaatgcagaatccattgatgataccaaccgtgatgaatacttgcagttgcagcgaccttcatttcgtgctgagagttccat

SEQ ID NO: 108293 - DNA, 885 bp, Aquilegia coerulea
  Intron number 4 from transcript AcoGoldSmith_v1.011573m (l ocus AcoGoldSmith_v1.011573m.g) derived from phytozome v7. 0 (chr-ID scaffold_6; pos 8461457 to 8462341)
atcagattaccaaaggcaaaactgatcaattcaaggtagggttttatttatttattttccttcttatcacagttttgattaatgtattgatctttgttaaatatctgcaatttggtctatctaattaatgtataggcaggcaattgagcatttcatatatgtactactgtttgtttattgaacacgtctgtttgaattggtagatgtgcaatccagtcctatgttggtgcttgaaatagaattagaatagcctggtggtccttgacagcaacatacaagccattcccacattttatgaaagctcttgcccatgttagtgataatctgtaatctgactaatgaggcgtattggtgctttgtagccatgtgcttcttaatggggtgtcttaattataaaaacctagccataatctgagacagatttaagggttcaatgaagggtgagtggattttttcgcatcgatcaatatccctctacagtagatggtcttgttagtattgttttagaatgcgatgttttcaattaataatgatatggcataatatttatattttctttctctttctgattacatcatctatttaatatagtacgcattgaataaacaaaagtaggtccaatctaattaagcaaccgactaatgttaattttatttactcgctataggatgtaacaattatgaattgtttttttatccgatgtttctgtttgctgctttgaatctgaaatgaccaagacttgttgatcatctttttgtcataagtccttatattcatgaacactctctatcgttattggctcgatctagtgatttacctgccttaataaacgtttcctcttttttcaaagggtttacgccgacaccttttggaggaactcgatca

SEQ ID NO: 108294 - DNA, 968 bp, Aquilegia coerulea
  Intron number 3 from transcript AcoGoldSmith_v1.008942m (l ocus AcoGoldSmith_v1.008942m.g) derived from phytozome v7. 0 (chr-ID scaffold_27; pos 2325908 to 2326875)
cagatcggtaaggctttctttcttcttcatagtactcattgttttttggtctattcattgctgctttccagtacacactgcaactctttttactctttagtaaaaaaaaaaataaagagaaaaagctagaaacccttttgacttaattattatgattctgattttgtaaactttagtttggtgtctgtaaaaaacctgtttacagtaccttcttcttaaagaattggtccaccaaagctatgtgtgacgtagttggtgtgaagtcagtcacttgatgacaaatgatttccatgtgactattgttgtatatgcaactctttgataaggttttgcttctcagttctcagtattttgaaagcctgcattgagccatttcatttgttctatctgttggatttaataacagacatgaacatgtaaatgttgatattggtttgtgatatattttctgtacaagcacgttcttgactgttcccaaaatgtcaattactgtgattttttttttttttttttgttggcatgggaaaggccagactactgacaagccttcgattaggtacgatatagttttgatggaaaacaactttctatttgatggaagtttactttttatggtaactgtagttctttataagctgtcctttgtattttgagtactttgttgggtgttggctctctgttgaatcagctttgttatgaaatgggtgggtgggtgggggtctagaaacataaagtctgaaacacagctttaagtccaatctacatcacatccttatagtagagccttaaatcatattttcattgacaattattttgttttggttatatgtttacatgcccctacttaacttgatatgaaattttgttttggttatatgtatgtttacatgcccctccttaacttaatatgaaatttcgttttgcttatctcagaagctcaaaattggaattgaaggaggaagaaatcg

SEQ ID NO: 108295 - DNA, 770 bp, Aquilegia coerulea
  Intron number 1 from transcript AcoGoldSmith_v1.005378m (l ocus AcoGoldSmith_v1.005372m.g) derived from phytozome v7. 0 (chr-ID scaffold_1; pos 2174820 to 2175589 reverse stran d)
tctgtgtacatcaaagtactatattttttatataggtgaatgaatcttgctttcttgctctcttgttaccattttcattttacataagagaaactctatttgttttgtttttgttctatttaagagtgtagcagaagagaacagaggaatagagaataaagacaagagggtaaaaatgaaataaggtatctgttttgtttaaagaaagaagaagaatagaaaaagggttgttttgagagtgaaaagaaaactgagtagattcacgagattgtcagaaagatgatgagagaacaccacacacacacactgaggtatcttttttttgagtacacaactacacatagctccagaaagtttcattagtgagaaaaaagggtgttcttttttgaatttgagaaggtgggtttagtctttgttaatgttgttttatgattgtttaagattgaggtttttgaaagggtttattaatctttctgtgacatgtttttgtctttataatgccagttcttcacgaggtgttgacagtttttcttagatttttttttgttaaaaaataaaaattgaatctttatctttctctttctctctcttatctttttttaaagatttctgctttttatttattcttttattctgccaacgatagataagtgttttgattgcaacatttggagagttttctcagaaagctttaataagaccgttttactctgaaatttctacttgggtatctcttaattttcttgaatttttttttctttttccagaag

SEQ ID NO: 108296 - DNA, 847 bp, Aquilegia coerulea
  Intron number 1 from transcript AcoGoldSmith_v1.000465m (l ocus AcoGoldSmith_v1.000466m.g) derived from phytozome v7. 0 (chr-ID scaffold_27; pos 2353322 to 2354168)
gagaatctcttctgttctcgtaggaagtttgaaaggcaagttttgactctttagttttgtttagggtttcgtttgagatctgtttttgaattgtttcacctttctttcttcttcttcttcaattgattgatgttagggttagagattctattcttaattctgttcgatttgttacttcttaatccttattattgatatatttgattttgaatatcatcgtttcattttaatcaatcatgtattgttgttgatttctggttcgtgcaaatcttagggtttgtttctttgaatttatatgtttgttttataaatttcatctctaaggttaggtttgatcttctacagagacttgcaagtgtttgtttgctgtgttctagattatcttagtttcttctcttttgtctagcttcatttttgtcacaatgaacaaattgttaatttcttttggcaaattagcaccattgactgtgcattatgccctagttttcttattgtgtgagttagacattattacaaatatataggacttgcagtgtctctgtaccaaaaagaacgaattattaatgatttgcacatgatacagatattattaagttcattgtcgtattgcctgagggattattttaattatatgtagtttctgtttgtggacttgttcaaaaacttttaatttattttttcaatatttgaacttttgaaggtaaagccttctattatctagttacatttgaagataatttttgtgcttgggaatccctgatgattgaataatcgttttctttatttttctaatgattgttttgtagtttcagaatcttgaacgagtattcagatcgattgtaaagat

SEQ ID NO: 108297 - DNA, 649 bp, Aquilegia coerulea
  Intron number 2 from transcript AcoGoldSmith_v1.011654m (l ocus AcoGoldSmith_v1.011654m.g) derived from phytozome v7. 0 (chr-ID scaffold_9; pos 5015032 to 5015680)
ccaaggtagttggaactctaaacaagaaactgcaggtctgtgaagatatatgtgcttcttatgttgttgtttaactgttgaagaaaagacatcttaggtttttatagttactaattgtttaactgttgaagaaaagacatcttaggtttttatagttactaatgccaactgtattttatatattaattcaagtctatatatagaatggggttatagaatgatgaagatgaatgtgggatgatgattttgtatattgtagtttgctatcttgtttcttattgccttctgtttgctagaatatttttagtggctagcgaggttggagggacccctactctttcgttattcacgaagaaactgtcaacactcagctgttgaggggtttcaatcccaagtttgctagaattgttttaatcactcattcactcctgttttgttacgcaactagtgtatatagaataccaattctcgcaaccccttgttccagaaatatatgtaactcttgtgaatttttcaaatcaaagttctcttgtttagaaatatttgatttccctttggaactattatgaatgatgagagatcctgcagcctcttaaaaggtgttcttggttcaggaaacgcttcaaagaacagtgaaaatcagggacaa

SEQ ID NO: 108298 - DNA, 655 bp, Aquilegia coerulea
  Intron number 1 from transcript AcoGoldSmith_v1.003749m (l ocus AcoGoldSmith_v1.003749m.g) derived from phytozome v7. 0 (chr-ID scaffold_9; pos 1604692 to 1605346)
tcagttgatttgctcttagaaatttttggaaatcggtaagttgttttgaacttggtttgattagttggttggtcagtttagaagttgacttaatttgactgtattcttagctgatctgattcacttttctttttaagaaacttgagattcatgattattattggatataattttgattagcatttttaatttattttttgattcaaatatgatttgataattttttgttcatcatcgaataagatgttagtagaagcatgatctgaacttaattagtgtgtctggtataattagattgaagtttcaaactttaattcgatttcaatggtttgaatgattctttttagtgcgttgaattcattcctctttgtagaatgttgtttgtagacttaaaaatctacatttttcaccaagatcgcatattttcctctcaaattagaaaacttggacttcttttacttcttatcacagactcaaaaaaacaaaaatagaaaatagaaaaacatcttcaataaagattaaaaatcttcagaaagctgtttgcttgctgaagccaattttggtaaattgttattatttgtgttatattgatttgatatgagttttgaacattgtgtggaacatgttgttcctcaggtagccagctaattaaagt

SEQ ID NO: 108299 - DNA, 603 bp, Aquilegia coerulea
  Intron number 2 from transcript AcoGoldSmith_v1.019765m (l ocus AcoGoldSmith_v1.019765m.g) derived from phytozome v7. 0 (chr-ID scaffold_81; pos 449563 to 450165 reverse strand )
tttaattgccatatcagtgttgaggtttgtgtttattcgagttgttaagtatattcacaaatatatttataatggttatgacatgacgacgttggtggtgggtggttctaatgatgagatttaggaatatatttattcaaggtattgttttgattatgttctcatttaagtccatgattggattgttttgggaacgatttgtttttattactattcatttgtatacatgtgtttctacacaatttttttttctgttgtttcatgagtagtgcccttccttattttatttcttttagatttttttttcctttttgggatgtacttgaaactagatgttgactgtatgtatattggtcttgtggaggcggtgtggcatctgtttaaaaatcctatgcataacgtctacatgttgaagtgttgaagaactaccacttcatttaaagggtaagcatcatgtctcatttaatgaacgtgacactcctcaacagattcaggccagagctctggattaaaaatctaaattaacagcctactttgattattatacctcctatatactcaactacagctaaattcacttaccctgattttccagaacatttg

SEQ ID NO: 108300 - DNA, 596 bp, Aquilegia coerulea
  Intron number 1 from transcript AcoGoldSmith_v1.010221m (l ocus AcoGoldSmith_v1.010234m.g) derived from phytozome v7. 0 (chr-ID scaffold_1; pos 9698644 to 9699239)
tgctttcctaaaacatagaagtaagtccacttcaggttagtattaaagttcaaaataaccccttttttctacttcagtcttcagttcttgattctttgccatttcttccattttgttttgtttattggattaatggtttgattaactataatacttgacataaaaaaaaaaaaaaaatcaagaaatgaaaatgggggaggggtattttattcttggggttgttgtagttgagaggttgctttactttagcacaagcatagattctctctgttaatgcaaatctaagtgaccctcttagttgccattgtgggtctcaatctcattcatgcttatatgatctatatattgtggattctctccccataaaagatttttaacttttttgtgggtgcctttcactttctggggtttctaggctgtttcaggaccagtttttagctggtgtaagcaaaggatagttgatgcagacacatggattttattccatttgcaaccctaacccacccttaagtttttgttttataaatagagattttcaatttgtttgtttcatcattgcaggtgttcatctaatatttttgcaataggagggtgtg

SEQ ID NO: 108301 - DNA, 650 bp, Aquilegia coerulea
  Intron number 1 from transcript AcoGoldSmith_v1.004317m (l ocus AcoGoldSmith_v1.004317m.g) derived from phytozome v7. 0 (chr-ID scaffold_1; pos 1129817 to 1130466 reverse stran d)
cctacaggtaacaaaaaccattttaaacatttaatttatcttatctattacatataattcatgccccaacatgctattgattcgtatttccaacttttaattgaaacccatttgatattaagaattgggtaattgaaattcgaacttgttatctgatttggagttttgggtatttttttgttttcgtttttgtgatttgggttttgggaattttcctgatttgtgattatgagtgattgtagtgaaggggtttttggtttagacctatttctcagttggtttaagttatttattgtaaataagagtttgcagatgaaatttccaaaacttgcgactcagctgtttggttgtaattcttgcttaattattgttgtttccagaataatttataactactaatttttttttttaatgctggtagttataattagaactctagtttgaatggcaactgaaaactagaagtgttaagtcataaatagaataagaactgctgacagtctgcatagcataatggaatgaagtaaaggttttgatcaaaatggttttggggcttaggcgcccgtgagtaaataagtatgatttcttttttcttattttgatgttgatatgtatttttcttccatgcaattcttcacagttagcgtaaa

SEQ ID NO: 108302 - DNA, 654 bp, Aquilegia coerulea
  Intron number 1 from transcript AcoGoldSmith_v1.002288m (l ocus AcoGoldSmith_v1.002288m.g) derived from phytozome v7. 0 (chr-ID scaffold_30; pos 546953 to 547606 reverse strand )
ctttatcaggtaataatctctttgttcatttttcaatttcagctttagatgaactgatttagatcaagataagttttgcaactcaattgattaattgattttttttttctatgaaagcaatcagttgaatttttagaataaaatcaaataattaatgtcgaacaatccaaataagtactgaggaaaattttcaataattggtgttattcatatacaaagtaatgtcaaagtgtataggttgaaaatttaggagattagagtaaggtagaaaaaggaattgggttgatgcagtaatcgaaatccatatatttggacaatagtgaatgagagtacagtatattttgaaagctgaatccagataatgataatccttttttgttgttcactgaaaagagaacttagacgaatgatcgttcattcgttcaaatgttatcttaatgtgtttctcttgatgttcatccctgtgatatacatgatagctagcagcaaggttttcatgattaagagttggaatataggatttcgactgcatgtgcttattgaactcttcatcttactgaagttcacatacataatttatgacattttcaagagaacacatttttttgttatgaatctttcttaatattaagttacatttttccaggctctaca

SEQ ID NO: 108303 - DNA, 1023 bp, Aquilegia coerulea
  Intron number 3 from transcript AcoGoldSmith_v1.011538m (l ocus AcoGoldSmith_v1.011538m.g) derived from phytozome v7. 0 (chr-ID scaffold_7; pos 375556 to 376578)
caataaatacgatattgacaatacgggtcttgtttgtgagttcattcaacccgatatatgtattatgatgttttttattagttaatcataaatgtcattgctgtgcagatagaacaccactagtaacgagtaataataacacaccatggtactgtaccataaaagaaaattggataataagattgatattcgcattagatttttcgatatatagatggtattaagcatttattatgatatgattatctaaacatgaatataatagcctgtgttttataagctggcaatatatgcttttgttggtgtttcgtgatagagaaaaatgaagcactttgtattttacatttgaaataaaatggtgatgcacttactaagtggccactggccagtatatcaacgtcacaaaactggataacatttcatggtagctaccgctttacaacttcataacatcagttacacttagtattacaattcagtcaaatttactcaacagtaatgaagaacatcgtcatattttgcatttttgcttcccctgccatctgtacaggaatgttctttgcacatacccatttttggacatttttgtgcccttcctctcttcgccttcaagataaggattaaacttaatggagaggagcaataggaggtttgatatcaacatacagtttcctataacgattaatagttgccaatcacatcaataaacagatacacattcctgtgtttgtgtgttatttacagttcactgccttgtacagcgggtctctttttaaatttcgtgacggtctatttttgtaggcaattgttcataatatcgtttgatactttttgtcattttttctgaccctagtcggtgcatcttatgtttgttggtatttcgtgcttccaaacagcagtttgcattattcccaaataatctttttttcttgtttttccgaccttaatctgtccatgttgtgtatcttgagttactcttccagtgattatgtggttgttttacaggtcattggccatcagagg

SEQ ID NO: 108304 - DNA, 577 bp, Aquilegia coerulea
  Intron number 1 from transcript AcoGoldSmith_v1.001511m (l ocus AcoGoldSmith_v1.001511m.g) derived from phytozome v7. 0 (chr-ID scaffold_37; pos 1168728 to 1169304)
agtttccaagaagagaagtttgtcaggtgagtaatttaagtttatatgcctatatcttgttctggattctgtttttcacattttgagatcactatttaaattggtgccagtaggactagcatgaagttgtagagctttggaactcgtcaaagttgaacttatttcggtgttagtactatcttgttatcttaaagagcactcaagagctcatattttcgatgaaaatcaaatctgtccagaggtcccaatatatatctctggaacactattacggcaaccctgttacagtatcttggattgttcttggtttcaactacgcgtctttgatgccagtcgttaagtttgaagctgccaatcctaattacaatgattctgaatttaatcttatacagtattaatgctttttcgacctactatagacctatctcatttcagttttacaataaaatgtagtgtttctcttccttagatttactaaagtgttcaaagtaatctaatagcagtaatcaacattgaagtaagagagcttgcatttaattcaggtttcaagattggacatctgataaaacttcaagac

SEQ ID NO: 108305 - DNA, 468 bp, Aquilegia coerulea
  Intron number 1 from transcript AcoGoldSmith_v1.006540m (l ocus AcoGoldSmith_v1.006540m.g) derived from phytozome v7. 0 (chr-ID scaffold_21; pos 1463963 to 1464430)
caaacctttgtacgagcaagaggttctgtagtatttattttattcaatttcaataagatttcttcttctgctattggatctttgtttaattctcaatgatttttcttcaattttgacttcatttgattaaaacctaaaaccttctttcaaactttatccgtctaatttgaactttgaaatttcaaatctcctaaaatctgctttttctcaattcccaattggaggtctattttgatgtatatttgtcaaaataggctaataattggtataaactcgtaactccctttaaagttagctgaggagaatgttaagtatggttcttgttatgtcaatcctttaggaccaagtgtggttaagttttattgtttttcttctctattgaaactattatgttgagttgttactaattgcttgtttgtttgtttgtttctaggtaaattccctcccagaagttgattttcaacaagt

SEQ ID NO: 108306 - DNA, 897 bp, Aquilegia coerulea
  Intron number 2 from transcript AcoGoldSmith_v1.008760m (l ocus AcoGoldSmith_v1.008760m.g) derived from phytozome v7. 0 (chr-ID scaffold_15; pos 1556055 to 1556951 reverse stra nd)
tttggcaacactgtaagttactttccttttttatttatttattattatgatacaaattgtgattccattatgcagataatgttgggagtaattcaacacgcattataataactttagaagttgagtaggatgataaatcttgcagactacccattgtacgttactactagccactaggtttatttttataaatatgttgttgtatgtgttctttactatcaatgcttgattttgcggtttaggttgttttgtgcattgggcacggactttgcttagcagttacgtaaatatattagaataagaatttctttgcaaaatatccttcacggaaaatattacattacaatttcattagtgtcatctgattaactgatgaaattcaaattgggatagtggtttccctttttttttttttgcattagtctctcttttatttcttgatgatcctttcacactaacgtaagtagttccaatccagtatagtatatgcaactaatgctactcttaaggctttagttatgttttgtttttaccaacatacatcttcaaaacttggtaattttttgttttattcagaatgctgagaatacatacaagtttaccatagcaaaacaactttagaaaaatcagatgtagattgttttcgttcttcacattgtaaattaatcagtaaagacaccacaagttagaaaggatgggtaagttgttttaaaagtttggcttatcagattgtttctcaataaatgtttttatagactgtcaatcttttttatctaacttcaaacttagtttctttcacttaggatttattctttggtgctatttctgtgaatgattatgcattactaattatattgttgaaattcatttcagtgaaaacaggtcctagttttgctg

SEQ ID NO: 108307 - DNA, 690 bp, Aquilegia coerulea
  Intron number 4 from transcript AcoGoldSmith_v1.010074m (l ocus AcoGoldSmith_v1.010074m.g) derived from phytozome v7. 0 (chr-ID scaffold_21; pos 3246369 to 3247058 reverse stra nd)
taccttgtaagtatatatgtattaataccttttactgttatgcacacctgttagttacaccttccatcggaaggtcgtatgttttcttaatctgatttaggctatattttgttctctacattctgtgtgaagaaatgtgtttacccttctcgttacttgtacaactatactgaaaactaggtatatgatgttgactgtggctttactgacataacgcactatgcagaaataatatcaatgaggagtccttttgttggtatatgacaaaccatccgataccattgcaaaactaagttttttgatatttcccatgcttatttaatatgtattctttattgtctggtcggaaaacaaaagaccttcactttccaatgatgtttactagtatggcctttgtttaagagttgtatatgtgtttgtcagatctagctgctgttctgttccttgttttttttcccctctgataggtcagttgtagtagtgctgcttaatttcaattcaggtgtcatgtaacagctcccatagacttcatgcctatgcttcttctacgctcttttttttctttatctgttaatgtataccatataatcattattgtcatcttgtcatgttcatatgttatttaatatccaaagcttgttaggtctgataaattggtcttacagttgcaactggaaggcatccacgtgg

SEQ ID NO: 108308 - DNA, 680 bp, Aquilegia coerulea
  Intron number 3 from transcript AcoGoldSmith_v1.008225m (l ocus AcoGoldSmith_v1.008225m.g) derived from phytozome v7. 0 (chr-ID scaffold_108; pos 244596 to 245275 reverse stran d)
cactagataaaccttcagtggtagggtaactgtctaaaacaactcattcttcatactcatagtccccattggctgaagctataaattttagtttgcacaaatgtctgtcagatttcatcaactattgtgggtattgtaagttattttatgtctattacaacagacttaatgctgttaatatggtttaattgtattcataataaaggattaaaatcacattactttctcattgttttagagttcaggatcggacatgactatacataccttggcagtactatttatattatcatcatagctttaggattgggtgtgattcattaaacaggtttgttcaacacatgatcatttagttgttagtgctgccaaatcttagcatgtatttgtgtatagacccttttatggaaacctcaaagttggtatgatatcatcacgggagactggaacttgttaggttttagtggtataggtctatgattaatgagttgtaattaagaagctagaaagttttgtgctttattacgatcttcttccgctggctcagtcccctttttagcaagtattctctgactcttttttttttttttaaaatatcaagtttcagtttcttttcattaagtgtttatgttcattgttattctgatacattaacattatgtttcttgcagacagtacaagaa

SEQ ID NO: 108309 - DNA, 362 bp, Aquilegia coerulea
  Intron number 1 from transcript AcoGoldSmith_v1.011371m (l ocus AcoGoldSmith_v1.011362m.g) derived from phytozome v7. 0 (chr-ID scaffold_6; pos 7268098 to 7268459)
tgttgatttcctacaccagcaacacttttccaactgtgagtttgtttccatcttcttcttcaatttctgaacaatttgtgggtttatttcagtaatttgtttgatcaattgggttaaaggttatttcttttgtagttcattttccagaaaaaaaaaaaaaaaactgctttctagatctcttatgagttatgacaaaagttgtgtgtgaaaattcaaaagttttatgcttttttagattctgacagactttttgttgtgtggggtggggcaatttggcctcatttcactgtttttcaagtttttgagataaaagttccaaactttttatgattccttttcattttggttggtaaaacaggatt

SEQ ID NO: 108310 - DNA, 954 bp, Aquilegia coerulea
  Intron number 1 from transcript AcoGoldSmith_v1.006141m (l ocus AcoGoldSmith_v1.006141m.g) derived from phytozome v7. 0 (chr-ID scaffold_10; pos 3960986 to 3961939)
tttgatttctcacttttacaggtacaaaaagaagcagcagacactaatctttgtcgatccagttattaattagtagttgttccaggtaaaaagctagctagcttgaccttcttaatttggtgattttattttaacttgatttgtgtgatgaattagtgaacctctcatctcatcaagaacttctcagtagatcgcttactactctggcttccataatcaatcttgcttatgacttatgagattgttggtcctcattgtatttcagtctcacacatataattcaacactaagaatttcatctttctgacactttttcattccatagaaattttagttagttagttgttggaatgatttactgctgtttgtgaaaaattcaaaaatttgagctatttggcctagtcaccgaggggccgaggcctatcatttgggtcagcaagaacgcactactggtggtactggttcgtgttcggacctgattgtaccttagattcttcaagcagacccttttgtcaatgttcagaccccaagaccagtaatcagcccattacagccatgccaaagtctctgtctgcatttgagtctccgtgggacagcaacacctacataccatgtcttagaaagactcctcccaattaagaggcaattccgcaagtctatgttcctttttaatgtctgattcaatcactaagtccaaccaaaccaacaaaagagatatatatataatttggtatgtatttggttggttctttgtgtattagtcgtgaacttatcctggatcgaatttttgtgtactgtccactgcgtgttgctatacatggatgctgttgattatttaagttgaaaaggttttttctatattattgcttgccttttattctttgcattattttgattattatcgtttctactttctcagacgtgattaagccatcgtcttctacttgttgagct

SEQ ID NO: 108311 - DNA, 848 bp, Aquilegia coerulea
  Intron number 1 from transcript AcoGoldSmith_v1.009020m (l ocus AcoGoldSmith_v1.009020m.g) derived from phytozome v7. 0 (chr-ID scaffold_49; pos 963261 to 964108 reverse strand )
ctgaaacattcaccaaactgagagaacaaggcaaagtaagaatctttagatctcaaatatttttcctttatatcttacattaagttttatttgtgctaatgtttcaatttctctagaaaaaatgggattttttttagttttgctcttgggttttgttttcataacagaatcaaattcgattttggccaaaatagaaactgggtatatttgtgattttatttgattcttttcttacctacatttatagaataatttttgggttttcatttattatttgattaagtgtttatcaagatatgatttttacttcattttgaaaaggcacattttcatggtggtttttcattgaataaagggatttttgttttataatttcacttttgaatagagaattttcataatagagagaagtattaatggaaagaattttccatgaaagttcttgatggggcaaattattcccttgcattcctttcacatgaactctgtatctctgctaaaaattaattttccaaggggaaaatcgcttgtccaattaaaactcagttttctaaataaaatgtgtggcttatttgaaaaaaaatgaatccgactttctcccagtttctttcctccactaccttgattttgaatccggcttattggtccatgtggtaaactgatcgggggcgtcaggggaggcatggaagttgaacacttcattcaacttgtgaataacatccacaattataccttccatgtcgctaacagtgtcttacaaatgaatttatgttctccatagtgatgtactaacgtgtggtttcgaataaaaaggttgcattaattccatacatcactgctggcgatcc

SEQ ID NO: 108312 - DNA, 611 bp, Aquilegia coerulea
  Intron number 2 from transcript AcoGoldSmith_v1.004751m (l ocus AcoGoldSmith_v1.004751m.g) derived from phytozome v7. 0 (chr-ID scaffold_9; pos 1801278 to 1801888 reverse stran d)
aaggtaatacaatatttcttttaaaacaaatcttttgctcaatattttaggtatgatcaacaaagctttgctcaagattcaagaacatataaaattcaattaattttgacggtgcatcttaggtaatggatccacaaaagtaatgctttagaaatcaaaaacagaaaaatagaataaaaaagtaaccatatgtcaaaaaacatagtagacagtatactttttgtaggccatggactgaaaaagatgatgaaaggaaactatgtagaaattatgtttagatagaatagttttagtcagggtcagcccaacccacagcttgcatatttttcaaaccaaaataaagcaaagggccaaacaaaaagactcaaaaggatatggggacagaagtgacaaatacattaacatatgtttgggtagaatattacattagtagaaaacagattctatgcttatcagcttatgggaagaaaagaaaaaaaaaaggattctgataaattatattgaaattcagtcttcaaaatgttattttcttactagatgaccattaatacactcattgtattatgtattgaacagaaggaagcttatttccagaagaattaccccgtata

SEQ ID NO: 108313 - DNA, 510 bp, Aquilegia coerulea
  Intron number 1 from transcript AcoGoldSmith_v1.001700m (l ocus AcoGoldSmith_v1.001700m.g) derived from phytozome v7. 0 (chr-ID scaffold_9; pos 1659959 to 1660468)
catcgaattcttctgtcataacagctgtttccgcggtgagaattattcgatctattgtctgatttaaataattgtcaattttattttttcggttgagttgaattgattgatattagttctgaattatatcttatttgattgataattgagaaaaaagatgagttgtatatatatgtgtaaatttctttgctaaataatcatatagtagatcaccatttttgtgtattcgtagagttatatttaattaaaaaaaagatagttgataggagcaagaatcttgttccttgctacatttttgctcgtatcaaatgtttgtttatccagcatgtcatttcgattctagtaacttaaatggaagatctggccgattttttaaccccagaggtgctaagttggagattaatttggtaaacagtgagtgagctgcattttttaattattaaatcttaacagtagctctttctctcttttacagccagtaaagacagacacttctgctgaacccaagcg

SEQ ID NO: 108314 - DNA, 712 bp, Aquilegia coerulea
  Intron number 1 from transcript AcoGoldSmith_v1.008092m (l ocus AcoGoldSmith_v1.008092m.g) derived from phytozome v7. 0 (chr-ID scaffold_9; pos 1846407 to 1847118)
gcttgtacttgtcattggaggcactggaggcgttggtaagctatgctttcctttttgtttgattccaatgccatgttgaatatataaattagtagtagttgtgacttacatgagtattattattataggacattttcttcacaatggtatctttaacaactccttgtaaatggttttaattgtttaaatcttggtttatacaaagagccagaaatgataatatagcatgttagttagagactgcccggaaggcaacaaccaaactgacttgggatgggaagacgacggaaaccaacgaaaatttaaacactaccctatgtaagttttatgaccaaactgagagaaaataacttttatgaccaaactgcaaaaatgtgtaaagtacaatgaccgaaatgaacattttatcaactaattaaatgtgttgttagtgttttaattttctttgttgctttatagatgttgggaaaagaaaagagaagaaatgatgtcctagagtactttggtttttgttcatcatggaagcgaacagccgaacatagtttgaaacagtttatcccagtccataattaattgtcagtataaccttcgtttatatcgttgtacctctgtgttatgcatacgcttttgttatccttcttttgagtatggatctaatgggttacttcactttccagggcagttggttgtagcatccttgctcagtcggaat

SEQ ID NO: 108315 - DNA, 684 bp, Aquilegia coerulea
  Intron number 1 from transcript AcoGoldSmith_v1.022581m (l ocus AcoGoldSmith_v1.022581m.g) derived from phytozome v7. 0 (chr-ID scaffold_75; pos 541460 to 542143 reverse strand )
aggttgatcaagctactctcttcgatctcatcttggtatgactttttttctcttattttcatttttttattgttttattgtattcaaggttgtgtttgattgatagatttttttaattgattgaagattatattttgtaatttggggatttttattattagggtttttttttaattattcgattggggatttgattttgtttagtaagtatcaatttcttaaatccttgtatgaaaatctaaaatatgatgtttattattaagaaatgatagcaatttactgaattttactcataattgatataaacaatgatttaattagttaatatatataattggaaactttaatatcaacagtaaagttggttcctttttgttgcctgcttcttgtacatgtttcaggagatagcatatgttttgtcaaagttttaggatttgtagttgccatgttacttgttttgatgattgtccagtgtagtatgaatcacagcattattgtctggtcatgacttgctgatgtaacattattgttttacagaaaaatttgtatggtattttgtggtctcgcttgttttgttattttaattagcatatgcttaattatgttgtcagtttttgaatcatttcttgtttgcattttgtcgtttcaggctgcaaattatttgaacatcaagagcttgcttga

SEQ ID NO: 108316 - DNA, 622 bp, Aquilegia coerulea
  Intron number 3 from transcript AcoGoldSmith_v1.018222m (l ocus AcoGoldSmith_v1.018222m.g) derived from phytozome v7. 0 (chr-ID scaffold_1; pos 5267164 to 5267785 reverse stran d)
agcccaaaagtggattgaagaactgcaaagacaaggtgtgcactaaaattcaaacttactgctgctgttgttttgtcctattcagtgctcactattcctgtttatttttattttatggggggatgacaagcagtgggtgttgcgcattgtgctgttgtactcgaggaaagctaacaacatacataacaagggcataatttcattgtttcagtgacttgagaataatgactagcacttatttccgaactttacagtatatcctgttcgaaaagcatcagggatgcttaatcaaccaggcttattcaattgaggagattgttcattgtatcatccattttgcaaaaaatataaaaatcttcactattcaaggtcttatctagtgtaacttgtaagatgtcttcatgtagtataaggtgtctccattttgatgatctgatagtgagatggcagatgtaattccttgtatccgagtagtcgtgcgattctgaatgaatttttttgctttattagagagaggtttataatgcctatgactgcatataacctctgaattgttttgaaaatattagttaacgcatctgacttttcttttaacattctcttaggaaatccaaagttggta

SEQ ID NO: 108317 - DNA, 926 bp, Aquilegia coerulea
  Intron number 1 from transcript AcoGoldSmith_v1.003235m (l ocus AcoGoldSmith_v1.003251m.g) derived from phytozome v7. 0 (chr-ID scaffold_10; pos 5403716 to 5404641 reverse stra nd)
taaccatctgtaagtcttctctctctctctctctctctgaatctgtgtttaattgcttatgtattttttcttttgatctctctgttaaagtaccgagttttaatcctgattgatttttgatatttagtagaaatggtgatagaatttgggttttatatcattttttatgaataatattaacattcaagatttaaagtaagaattgaagtttaatggagataacaagattcagggctggctcaagcaaattggaggccctaggcatctgaaaactgagccattttgtaatttagaatattaagaacaaaaatttgtcaaataaaaaattactgttttattttgttaaatgcaaacccactacccactaatccatgtaagtatcgaacaattaaagaagaagcagaacaattaaacatataaaagttggggaaaaagatttaaaaaataaaaaaaaaccccttcaaaataggaaaaaatcctgaaaaatcataaagaataacaaaatatgaggaaaaactacgtagaattccacaaaatgggggcctcaagagaagtggggccctaggcacctgcctattatgtctaaactgtagagccgcctctgacaagattcaaaatagattgaaggaaatcttctctcctgaagagttaatttaaataactcacctgcaacaatttacacttttaggtttatagtatagatcttatttcccccttcttgtttatatacttttttgaatagaacctacatcaaagatttcacatatttgttgaatagagataatataaacaaatttccgtagataaagttgccctacatactttaagttttttaagagctcaacattacaccatccgtcaccctaaagtacttcacactcttatctagtctgcaactaattttcttttcatcttatatccagcaa

SEQ ID NO: 108318 - DNA, 901 bp, Aquilegia coerulea
  Intron number 1 from transcript AcoGoldSmith_v1.014713m (l ocus AcoGoldSmith_v1.014713m.g) derived from phytozome v7. 0 (chr-ID scaffold_30; pos 499251 to 500151)
agaaagaggtataaaatattttcttcacaatcctatactatatataggctacttaagagaataaagtgtgtgttgaatgctctctctattccgtgcactaggtactaggtgcaaccttccatcctgaagccttcccagttgatgaaatgatgaaatttcatagaaattgctctgccttgtatatatatatattggttttgaacaataacttactcattatatttgaaattttcattcccttaatagtaatgaaagcatgcattccaagtaatcttgtcattgaagagagtatttagtcctcttattaccttccaaagcgagattttactactttgtttgtttcttacctttctgaaattagcttaacaaattcttataatagtgttaactaagtaagaagtgcgatgatactcaaaaattttgtccagacggagccatttgagttgtgaagcagagctaagatgctctgcgcccagggaaagaaattttagttacccatctcctgcaaaacaagaattttgaatcatccttgggatagacttgcagaaacttgtctaaggccttgatctgatcggccataatcttcgagattgctcacatgaccttttgatataaattggtgtcagcgatagcgacaaagtggtttctggatttttcttgggtttgaaattatgtatgcagtgctatttgttttacttgaagccttgaaggacttgtagcttacgttacacataagtaatcacatgcaacatgtgtgtctacgaagattcgtgtcattgccataggcaatttttcaggcttatgtacttagcagaaaggaaattaatatcaacaataatgatgaacaacagctaactaatctgtttcattatcaggtttacaagctttccattggagctgt

SEQ ID NO: 108319 - DNA, 766 bp, Aquilegia coerulea
  Intron number 1 from transcript AcoGoldSmith_v1.007808m (l ocus AcoGoldSmith_v1.003392m.g) derived from phytozome v7. 0 (chr-ID scaffold_1; pos 2361908 to 2362673)
ttgctcaattagctggtaagttgttagtttaaagttttaatttttaatggttttagaggaaaaagatttgatttttattgatttggggagtttttttttatttttgatgggtaggacagaaaggaggttgtatgattgttgattctacaagaaaagggaaaaggtttccagatagtatgtcaaaaactatacctatatggacttgtgtgttgaatagggcaattgcgaattataaaaagaaaatgcagattgatggtgttgaaaaggagttcatggtaaattatttttgttttaaacttatttaagtatttatgcgtatgtatgcattgattagaaagggagattatatgttagtagtagtagctttaggtaaaagtttgattactgaagtgttggtttatatcaattttaattatttgtacgaaattttatgtcattttatccatctcaattctcaacgaatgatgtctaacaatcaaatgcatcgtgttctcccttgattaactgttttggcataccgatatttagaaaataagggtatggtggtcatgcgcagccaacagatttatttcttttgcatcggtaagagaaacctgccttaaggctatgtgacaagcttagaatgcagattaaactcacactttcttcgtacctacataatgtagactacattcttacatattcaaatcactatttactggattggtttctgaaatccatattttttgcaggattcagatattgtgaattgtgattctcacaattc

SEQ ID NO: 108320 - DNA, 961 bp, Aquilegia coerulea
  Intron number 1 from transcript AcoGoldSmith_v1.002277m (l ocus AcoGoldSmith_v1.002277m.g) derived from phytozome v7. 0 (chr-ID scaffold_30; pos 1091215 to 1092175)
tctggtaatttcgctatctctcgatcaaattgcatctttcatattgttgaagtcgattttgtttagaatgttgacttttttagtagaatgaatttcttttgacgtatttcaacttgattgaattaaacatttcttttgattaacaaatgtgattttatattcctaatctaaatctataatgttgatattggatgtgttttgttgaattcttcgtaacatcagagtttttttttttttactaagagagaatgattggagagaaactatttgaatgattttgataatcatttaggttacagtgtttatgttcgtcactccgaaatcaaaattttctaatttgaagtggaagcaaagttatgattgtactgtatttgcataatttttatagagattttggtggtgagtcagctagcaggacaaccaaaccccaacacatgttagaatattttggcaatgaaacggatccttaatatcacctttattttcatactttttccatgggtggttaatacaatgcgcgttgcagcctacgttttcggtaatgcctttctacatacattatacattacgcatccttttaaagaactaattttctggctagaacatgaatcccgaagcatttcagtaaccatccaccactgactgtcgccatcgtttttaagccttgattcagtctgaattcgttctttaaaccatgattggatggaattgggaggttgccattagattatttccaatatctaatctacgtgaacactttccagcatttcacattaaacaatcattttaaactatgacgagctaagcgagccgtagttaatcagctcaagcttgagcataactgaatgaggttcctagaaaggattaatatcatcttgcaagtttaatgtagctcacataagtcatagatctgatagacttgcggattttcatgcagcaacaactttgaagacccttcaaa

SEQ ID NO: 108321 - DNA, 341 bp, Aquilegia coerulea
  Intron number 5 from transcript AcoGoldSmith_v1.007890m (l ocus AcoGoldSmith_v1.007890m.g) derived from phytozome v7. 0 (chr-ID scaffold_6; pos 7744048 to 7744388 reverse stran d)
ccaaagatagctccaaacgaataaaatgtatgttcctatatgactttagtgtttattcttttttcctttataataatccgagataatatatcctttataattttaattggcttttctgttttttgatggtttgatatctatatatggtgtgttcgttgggcaaaatatttttgagaatatagatcaacacagagaatgctgattttaatatctaagcatgattttcaagtaacagatatttgagttatgatcttccatcaatgggagaaccatatattcaaaaagttacttctaattcttaccgcatatgtttatttgaatttgttcctaaatacttccag

SEQ ID NO: 108322 - DNA, 346 bp, Aquilegia coerulea
  Intron number 4 from transcript AcoGoldSmith_v1.007890m (l ocus AcoGoldSmith_v1.007890m.g) derived from phytozome v7. 0 (chr-ID scaffold_6; pos 7744509 to 7744854 reverse stran d)
ccttctgagaataaattaaagagtatgtgtctatttagttattactcgttttgttttttattacatttatgactgaacccacaattggacgcctttcatcccagaagtcttgaagactacaactctacaactgagcatttgatttattattaaatccatttattgttacaaacttacaatgaacatttagaagagtaacaataacactataaaattatattaaaatgcaaacaggatacttactttgtcttttcttttctttttccatgcgtgattgtataatttttggcacaagctcttgtattctcacaactaatgttgatttaaatttgtactgtatttccag

SEQ ID NO: 108323 - DNA, 1059 bp, Aquilegia coerulea
  Intron number 2 from transcript AcoGoldSmith_v1.007890m (l ocus AcoGoldSmith_v1.007890m.g) derived from phytozome v7. 0 (chr-ID scaffold_6; pos 7745123 to 7746181 reverse stran d)
ttttttgtttctctctgttcaaaatcgtttaattggtaagttttcttttaattctgcgtgaatttgttgaaattaattgtttttttttttcctatgtagctaaaattcatattctctaggtatgatcatgtgtaatatggattttcaaatttgattttattgattagttggagttgtgaattgtttatgcaaatcataagaaatatcatttagggattgtgctgttttaatttgctttgtattgttttaatagtttgcggtttcgagtcccccaaatacaaggtttaatcgaataaagtgaactttttacatcaaaattgttcaaccattaattggggttgcttgaaattataatccattcgattcgattttttttttttttttggggggggggtgttaaatgctaatttattggggctacacagagcatgaccttggatcactaaagagttgttagcaagataatattcaatcttaaatcttgaccagctaaacaatcaatgtggatgaaaaggagtagaaccagtaattctcacatccataagattatttttagcaatcaggttctgaaaccattgaattgatatgcgtggttagggaagctgtatgttataatattgcaatactaagtttaaaacaaccactgtagcatggcatctcaacaaaagatgactaatatcttcagcacagtcattacataaggcacaagtagtatccaaggatgtcaatttagaatgcaagaaaactttagtaggtaattgtccatgtagcacagtccaccaaaagtgtttgatttttggcgggcattgcagtttctacaactttctccacacataagaggttgtcagattttgaaagttgaaaatgtgtaacagttaggggtttgaatgcagcctccctactaacttgcctagaaaagctatgtttattgattaattttcatatatgttcattcacattttgctggataccctccatattaatacattcacaagtccgtaccatgtttttttgtattttgaaggcaatagagagacatcttaactaggtttctctacc

SEQ ID NO: 108324 - DNA, 856 bp, Aquilegia coerulea
  Intron number 2 from transcript AcoGoldSmith_v1.001576m (l ocus AcoGoldSmith_v1.001576m.g) derived from phytozome v7. 0 (chr-ID scaffold_69; pos 1111050 to 1111905)
actcaggtagtatacaacgtattttacaattttaactatgtttttttatattgtttggaaataaaataaaatcacagcttgaataaaactctatttgattagctaattcgtttagcttcttttgatatctatatataaaccctaaaaaatttaaaggcttagatacaagtcatgctcatcggcccataatctttatttgttaaatgtgtagtactgtactacttagtaaacaattactagtaagaaaatgtgtcttttttttcccgaatattagaacttaattgctgcatagtcgaattaatcaacaacatttgacttatactctagactatagtccagtgatttgttctcgtaataacctattatagcaaactgtcttttttgagacatttttttatcacttaatagaaactctaatattagccgttaggacaaaaaatgactaatgatagtagcataaacaattactgctcagggtattttatatgctccaacagactttcacgccccagacttctttagtcaatctcatgttttgatactgtgtttataatctattcttcttttggtaaattactattagtttgttgcatattgtatttcaattattttatatgaatatgaactctatgttcaatttgcttgttgtatttttttcaccttctttaagaaaattttgtgccacctggtaaacagcaattttaactccatattgcttcttgacatgattgtatagttccgcccattatttgaaatcatctttagtgtcaatggaaagcctgcaattcctatttgaatatgtttcatattgacaattgcagatacaagctagatccattccaccacttctggaagg

SEQ ID NO: 108325 - DNA, 669 bp, Aquilegia coerulea
  Intron number 1 from transcript AcoGoldSmith_v1.006434m (l ocus AcoGoldSmith_v1.005785m.g) derived from phytozome v7. 0 (chr-ID scaffold_18; pos 1419637 to 1420305)
aattgagtttgggattgaaattaaatcacgaaaaggtactaacggcttggtcagatcgtgggtcgccattttccgacgacattttggggacagagtcatctgaatctgatgcaattgtatgtttcttattttctcccgccggaatataaccgttgcagttcatttaaaacattgttacgtagaatattctaaaacacgccgtatgcgtagtacacactctgcacacttggataacattttgttattgtgcttctgttgtcagataaatatcatcagccacatggtagtcactagtcagaccatctgacggctaagaaagcatgtcagtgataaatttttggtagtttcagtaggattttttttttcctcttttagaaattaactttttaattgtcattagcccacaaaattccaaataattattctttttctttgtttaataaaataaaataatgattaggcaggagaaattaatcaaattttaagaaaaaagagaatgttgaagcataaaaaatatattttatttgtcagtgaaaataactaaattgttttttagtttatttttatattatttatttttggagtaccggaatggggtatctaattttttttttattgatttatatattggcaggccaggcttgctcagattgatttattttcagaaaa

SEQ ID NO: 108326 - DNA, 844 bp, Aquilegia coerulea
  Intron number 2 from transcript AcoGoldSmith_v1.002639m (l ocus AcoGoldSmith_v1.002639m.g) derived from phytozome v7. 0 (chr-ID scaffold_81; pos 179548 to 180391 reverse strand )
gggttctcaggtaaaattttgatattttttgtgtagttttcatggtctgtatatatatttgaaaatgaatcactttttgtatgaaagttttgcttgataatctggtctggttttttgtctagaagttattgattgaattgttttgtttggatgcaggtgtattttttttttttgttaatattgatgttgcaatgttttaattccttatagttagaaatgggaaactgaagcattaaatcctgacgcattttcagctctggaagttgtttggttaaactcctaccttcattttgttttgtagcaatatggtgtacaaaattatcaacatatgtttaaggttttttgtttagttgatttaaaaggtatcttttaaaaaatgaaataggaatagggaaaaagagacatggcaatctttacatttacaagaattggtgacctattgtcacaaacggcttctaccttttcgcaattgatcaaactggttacagcatctaagatgattcttttattttttaaattcgttcagtttgacaaatgtttgaatagaacaaagaagtcaagttacttctttcttatcggttttcatagggttacaggaggcgagctaatggctctgtttttttattaacttttacatatatacatcatgtagttttgtcttcatgttcctgaccaaatctataattcatcaaatttctgatttggctctgctgtatatcacatttgtaactatgatttacataatatagttgctaaaacatgactctttttattccctcatatgaacacaaattcctttgctcatgtagggtccagcccaggctcagaatttgagagattctct

SEQ ID NO: 108327 - DNA, 829 bp, Aquilegia coerulea
  Intron number 1 from transcript AcoGoldSmith_v1.000718m (l ocus AcoGoldSmith_v1.000718m.g) derived from phytozome v7. 0 (chr-ID scaffold_72; pos 519971 to 520799 reverse strand )
ctgcagaggtatgcttctaatagcacattgattcatggctgatttgtgtttaggaaaataatgagttatgacaatggtcaatggggtttagctattttattatttgagaattttggacaaccttttgccagggaagtctgatacattacatatagagaaattgtatgcactgattaggttttgcagaatcaaattttaagtacctcatcgtagtaaaagctctattaaatgttaaaattagtcttatttatccaacatattcacgttattttgttggtagatattgttcttggtctaaagttaccaatatctgtgacgatatattactgataccttaagattacactggtttctaaaaggttggatctggaatgtccaagatgttgcgctccacacacacacacacacacacacacacacacacacacacacacacatatatatatatgtatatccttgtttggggactcaatattcttcaaagataagaatatagaaccgtgatacggtggagaccgatgttaggggaagagagaggaagagaaaagaaaaaaatagagagatttcaaaaaacagaaaaaaagacggacagacggaaaattaaaaagggaaaaaggggacagacacgagtttgagttccacccgactctaaatggacctcctaacgtcggtcgaatatataatgtgcttaatacttaatgtagttcttgttaagtgcttgaaaactatgttcaagaaagactcgtttcgcatgtaaataatgtggattactaataatactttacccattgcagtcataccagaaggccttacttgcagatccgacata

SEQ ID NO: 108328 - DNA, 560 bp, Aquilegia coerulea
  Intron number 1 from transcript AcoGoldSmith_v1.003418m (l ocus AcoGoldSmith_v1.003418m.g) derived from phytozome v7. 0 (chr-ID scaffold_10; pos 1778928 to 1779487 reverse stra nd)
cttctccttctatcttctctgtaagttctctttcttcttctttaattttctctgttttagatactttttaagttcacaatggagtgatgagcatcaaatactaaggattaggaaaattatgttttcaattggtagtttaattgctttactagtaatttgattttataagtgtttgaaattaataaatactgtcaaagaagtacagttaggctttggaagctaaatgttttttttttttttttttgttcaatttgtcgaaattataagtttcacatcttgtagtctttaaaatgaatatttgtgtgtgaattgaatcttcaacagaaattccttacaggatgattgtaaaacacttgttcaattttgtgacaaccttgtaacattaaatttttgtttgcatataatggttactaaattcaaagattgaaggatacataatgtacatttgtgctcatcaaagttatgtcatgaatgtttagatctgagagagtttacaagtagttgaattgtgttttttgcttaatatttcagttatataaaaagacttccatttcgcagga

SEQ ID NO: 108329 - DNA, 460 bp, Aquilegia coerulea
  Intron number 2 from transcript AcoGoldSmith_v1.006420m (l ocus AcoGoldSmith_v1.006420m.g) derived from phytozome v7. 0 (chr-ID scaffold_27; pos 3331005 to 3331464)
tcatcttcaacagtatagctattataaaccatctagtaagtatgattttttttgtcttgctttttctttttcaacttctttgactgtcacattttttataattcttggttttggggattttattatatttgattcttgtttgattttatgtaacagacatatatataatgccttaaaatacaattaaaattgttttttatcttccttttgttattgatttctcagttgctgggcttgtttgactagatatcaagaaaaatatatacagatgttgatattagtcatgtactttgatcaatttaaagatttgggctatgtttatagtacttcaattttctaagtaacatgtttatatactcttttgtggattactgcaaagtaacatgttttacatttatgctacttttcaatcttaatgtccctagtgttacgaactgggtactggggaaactctgttgat

SEQ ID NO: 108330 - DNA, 529 bp, Aquilegia coerulea
  Intron number 1 from transcript AcoGoldSmith_v1.005491m (l ocus AcoGoldSmith_v1.005491m.g) derived from phytozome v7. 0 (chr-ID scaffold_95; pos 571989 to 572517 reverse strand )
aacaaaggccctcctgtcactcctcttcacgaaaggtaaggtactactaagttgtaatattaacttgtattattattattatattattaaccaaccaaccatggcaaccaactactgtactgtgtactgtactagtccctctccctcttttatttgaagattagatccatgattgatgatccatgatccatccataattccacatccacctccacctccacctccagttatattaattaaagtgttaactctctgcctcatctcatctgcacttttattgagaaaaaatgtttttttctttattaatttaaatttaaccaatattcacccatcccttctagtattgattaatattcttattactaaggattaaataatattactcccggatttttttcttcacatgtgattatgttgtctccaacagcattactactgatcgcaaaatgtgatcagattttggttgacaatattgttgttaatatattcatgccttttttttgagtttaccttttttttcaggataatt

SEQ ID NO: 108331 - DNA, 548 bp, Aquilegia coerulea
  Intron number 1 from transcript AcoGoldSmith_v1.003942m (l ocus AcoGoldSmith_v1.003942m.g) derived from phytozome v7. 0 (chr-ID scaffold_72; pos 1195052 to 1195599)
tccggtgatttcaattcattttccgatatcaaacggtaaacttgaagcaagatctttatttcattttaatcaatttattttcgcaaatatctgatagggttttgtggttagattcatttagaactcttctttctttgctagttttaatattgatttgacctagaaatgatgcatggttttatctattactatatgttcaaaatgaattgaatttgatcattttgtggttaatttgacaaatttgattaatgagttttgaaacaagtttctataattgagaccatttatttcttaagaattttgaggttagtgatttagaaatccagtttgtcagattcaaatgccctgaatttcaatgttgattattgttctcagtaactacatgtaaaattgagtgattgagatatcccatttctataagattccaatgcctttaagtttgttgattcatggtcacactaaactatgtaaatttcaatgctgattttcagagttattttagaggttttgattaatctcatattgttcaattttcagagttattagcc

SEQ ID NO: 108332 - DNA, 866 bp, Aquilegia coerulea
  Intron number 1 from transcript AcoGoldSmith_v1.026745m (l ocus AcoGoldSmith_v1.026745m.g) derived from phytozome v7. 0 (chr-ID scaffold_6; pos 1782110 to 1782975 reverse stran d)
tcttcgatcctaagttaaacattgtctcaccggccagtcaccgggagctaatatgagggttcatttcgttactgagccaatgccacatcgggagaggatggagtagtgaagtgattcgactccggcggtggagtgaaaggagcagttgatagctctgttgtaaaggttgataagtattttcaaccaaatcttatttcaagcccaattcgaaacataagaacaactaaagcccatctcaagcccaattaaaattttttttgctaggtataaagaaaatgcagttggaaaaaaacaaaattgttgttcaagcccaatttaaaacataacagcaacttaagcccatataacataacaacttaagcccattttctgtctttgtctagttatgtttatctccccaagtttgtgtgtccacgcacagtataatatagattaaaacaaaatatattttcctttaataaaaattcattaaatttttgctactttgcaaaggttaataatagaccctacaaagaggtccccctcccttgaaaataagtccagtagcagtcaactaaagcaaaaaccctagaaatctccgatgaaaagaatctgattatttattggtccgtaccacttttggaatctttttctttttcattaataattaatccaacggctaattacaatcattagattaatctcaaccatccatttaccttaagttcttcaaagttttcaaacttctttcaaagggtttaaggtggtggtagtggtggtgggtttaaggttgttgtttttcaagagagagagattgttgagggtgttttgattgattgatgaagatggaagattgtgatcaagggaagttatttgttggtgggatt

SEQ ID NO: 108333 - DNA, 286 bp, Aquilegia coerulea
  Intron number 1 from transcript AcoGoldSmith_v1.005482m (l ocus AcoGoldSmith_v1.005482m.g) derived from phytozome v7. 0 (chr-ID scaffold_11; pos 2728384 to 2728669 reverse stra nd)
atcaaagtgagctttcttcttgttcatttcattctcaaatcatccctcaattcatctgaatcgatgttttaaatcttttgtttgtttcagttttattcaataatcatctacaatttcatcactcaatcagaattcagatctattactaatgaattaacatgcgttttggtaaataattgaacaagttttgtgatatagaagtttgaattgcatgcaattttaatcttggttgtgaatgttgttttctgtagttgcaacaacgtgtagaacatctcaagaatctcgc

SEQ ID NO: 108334 - DNA, 795 bp, Aquilegia coerulea
  Intron number 1 from transcript AcoGoldSmith_v1.000342m (l ocus AcoGoldSmith_v1.000342m.g) derived from phytozome v7. 0 (chr-ID scaffold_108; pos 179883 to 180677)
ctcgcaattggtggcgtaaggtatgcttttaactacaatacttatgttatcggacttcatatataattcttgacctggcattttgattgttcattgttttaagactgttaaaattatatttactaaatttgactgcctgttacctacccatgtcgcattaagttgagccggtgactgattgatagaggagaatgcattaaatcataccttagctgtattatgcattgaacacgaagatgctcccaagacgtcttggttgataagggccaaggtacaagcctcatcatcataacagccatgtactgcttacacaacatttcaaccttttattgaaggtactttagttcaaattgtttcttattccatgccccaccaatagcgatagaatatttaagagcctaggttcaactctttttctacatcgtaactcatgccactgtacccaatactaacgaccgatgcttttcgaactgatacctttgcccttgtatgtgagttctataatattcttttttattgttgagctgatacatctaacaatttttcttgacatgttttgtttagcacagaagatgatttgtgttatatggtattatggttgttttatatctcatttgttagttaattctgtatcatggtctctgcgatatcatcaaaatcatctgtcgtactcacaagtgctgatgtcatacattttaatatcaatatttgtttcaaaacttatattaaaaaaaattatttgcatcttaatgagttgcagctagaacttgtacgggaactgttggcaggaagtct

SEQ ID NO: 108335 - DNA, 569 bp, Aquilegia coerulea
  Intron number 3 from transcript AcoGoldSmith_v1.013282m (l ocus AcoGoldSmith_v1.013282m.g) derived from phytozome v7. 0 (chr-ID scaffold_43; pos 209437 to 210005 reverse strand )
gaagagaggtacttttacagttattgtgtttttttttttcatttttatttaaatcttcttcagctatacacacacacacctgtgaatccacacagcattgatacataaccctccactagtctttttcctctttggaaatgaattggatgttgatttttggtgaaaatgatcctatttaagggcatgtggaggtttgtgtaagactcgtgtcgatttatttatttatactaataagtaggattcatcgatattaagcagctaacatcaaagaggatcccatacaaggtttgttagaaactatattacactatcctaaattcatcttgaggctgtcatgacctcccaaattgacatcgctgaatctcactaccataaaagtggttcaaatatacgatcgatccactgatttttattcttttcgaaggtgttttcgggctttctcttaaatacgctttatcataatgagaataaaaattatggtttatgaaggtcattttgtctaattatgatacaatgccaattcttttgcaatagaaacggcctggagtgttgccattacctacaagctc

SEQ ID NO: 108336 - DNA, 445 bp, Aquilegia coerulea
  Intron number 1 from transcript AcoGoldSmith_v1.013282m (l ocus AcoGoldSmith_v1.013282m.g) derived from phytozome v7. 0 (chr-ID scaffold_43; pos 210347 to 210791 reverse strand )
gtggcaggtaagaaataaaacaataatcaattgggttccgttaagaatgttgcaccgattatgtttcgtttttctctcttatcatatatcaaacatcagtttccttctgctaaacatggtcaacatcatgcatttttctcattatagaacatttttttttttgttctgtgtgcatttatttttgtgggggaagggtccttagtcgaaacaaactattttcccttcttcatttgattccattattaattctattgctacttggtattaatttacaagctctatgctggaactattttttatactaaaacagtatcaaaagccctcttttcaaggttgtgatttgatatgatctgtaaattttatatgctgacctacttattatggcgattttttttttttgttactgtctttatagattaattgaagctaaggctgtcgtctttga

SEQ ID NO: 108337 - DNA, 467 bp, Aquilegia coerulea
  Intron number 1 from transcript AcoGoldSmith_v1.018076m (l ocus AcoGoldSmith_v1.018076m.g) derived from phytozome v7. 0 (chr-ID scaffold_9; pos 3790041 to 3790507 reverse stran d)
aagaaagttgaatcagaattgggtggtaattttgatttcttcttctttatttgattctgttgatttggtgttttgtctatttagttatatgtttgttagaagattttctcttttgttttttccctggttattttcatttcaagatttagcatgcatggtttgtccttttttatgcctgttattttgtttgattctcctaatgatttctacatttgtattttgttatttcaaatgcgtttgggctcttaggctccgtttgttaattcttttgttttacagatagagattgcaagaggggttgacctcaaatagaaatgatgaaatcccaacatttgtttgtttgtttgcttagtaaatgcagttttgcagcaaattagtgttgtgatattaataccaaatcatttatactgattataatgtttgtgatctaaggggtggaaaaggtttcaccaaaaaggaaagttcga

SEQ ID NO: 108338 - DNA, 917 bp, Aquilegia coerulea
  Intron number 1 from transcript AcoGoldSmith_v1.026955m (l ocus AcoGoldSmith_v1.026955m.g) derived from phytozome v7. 0 (chr-ID scaffold_18; pos 1264569 to 1265485 reverse stra nd)
aagctgttgcaaagatcattcgaaaacctgaatctgtaatcaacttaaacttaaacccccttattgctattaaattgtttctactaatatttttttattcttttttcatgttgttgttgttgttgttgttgttgttgttggtttgaatataaagtgtttgatgattttactatgagaaaacatggggttttactgttttagttttgttttagctctttgtagtctaatatatgtatgcaagaatggtttgtttttttattccttcctttttaaatgattgggagaaaagaagaaaaatatattataaatatgacgcatagagtagagtcatagtccattacattgtgtgtacacttttcatatcaaagaatctgcagcagtatttcgtaaacaaaaattatgatctaattagtcatatccactattatgtttactccgatagaacttgctacaactgacattgtctgacaaggttgtttacctatttactagaaccattttctagacttagggttcatcgttgattgaagaatagcgtaaatagttttcgtctctaaacctaataactaataaacgggcagtggatatacattgccagctttctacatgacaagatcctttggatttgtatctatcttaataatcttctatcatatcttattgccaataatttgcccatgtactagaatctcttggattcattttgccaatacattttttttgataaactaaacaaaaggtggacatgaacgatcctgcaaacatagtgtcatgactcatgagagttgagtaatttaaaatttctaacagtcattttctaactgttgacacttgagaggttccttgttcggtcactgataattttaacagcaaaatttcctgaacttatgttttgatatgggtgcttatggttcagt

SEQ ID NO: 108339 - DNA, 533 bp, Aquilegia coerulea
  Intron number 1 from transcript AcoGoldSmith_v1.001912m (l ocus AcoGoldSmith_v1.001912m.g) derived from phytozome v7. 0 (chr-ID scaffold_27; pos 2749622 to 2750154 reverse stra nd)
aatccaatcaacactgtttttggtaagtatttcatgaaaaacattgtttagttttctgattttttttgtttgtagaagatgaatttaagcttagatctgttaaaatagtgagattttattttttattttcataaaaaaaaaagttgggtttaaggtgcttaatagctattcttcaactactgtaagatttaaatgtgtgttttgtttagaaaaaaaattaaaaatttgggaaatctagggttatctaagagtttaagattagtgaaatctaggagctggtgatattagttttgaaacgtgtagaatcaaatttggggttttttgtgtgtattagtgtagttatttgaaagaataccctatttgtttaagtccaggcatgttattttgtgtagattttagagaatttgaatcgaaattaggggttctttgatgttaggctagagtattactggtgtgttgttattcttttgttttgatctctagatgtgtgtggttcaatagcttatctgaattgttatttctttttgtaccag

SEQ ID NO: 108340 - DNA, 813 bp, Aquilegia coerulea
  Intron number 1 from transcript AcoGoldSmith_v1.008738m (l ocus AcoGoldSmith_v1.008738m.g) derived from phytozome v7. 0 (chr-ID scaffold_49; pos 1680631 to 1681443 reverse stra nd)
ttcaagtctgcgcacctgattcgtaagtattgtaactctttttttcattctttgattattatttacagtacaattttgttttcaagataatctatctatcttgttcaattacattgaattttgttagtatttgattacctaagagaattttgattcttagcattttgatcagtttaattatttgaaaaagtaggatttttgtttttgttgatttgatacttttgagaaaatttatagaaagaacaattataatagcaatctttatacaagatgaattggtggatttccgtggaaatttattaccatcttgaagagttttcatggagaatttgctcaacaatgtaatcaaactggaatgacagaaagaacaatgtttatgtgttctaaaatatttttcttcttaggcaaaacctaagttttttatactactgaagcatagttcattatcacataattctaatcataaaaaacatcctgtcttggatttttttttttttttttaatgttgaaaggacttcttccatgagaatcatgtgcatttatagacgcaaaagtatatgccaatagaaatttctattatcactttgcttgattatcttgagatgtttacaactgtcatactctcataatgtgctatatttaattatttatcatgagatgtttacaactgctagtaacgccgcaggatatacaattgtttctcactgttggtatgtagtcatagtccttcatgcactgttgccgcattcttaatgtacctcatctgtatctttcacagggaaaagtctgctgttagccacagtattacctggc

SEQ ID NO: 108341 - DNA, 356 bp, Aquilegia coerulea
  Intron number 1 from transcript AcoGoldSmith_v1.005284m (l ocus AcoGoldSmith_v1.005284m.g) derived from phytozome v7. 0 (chr-ID scaffold_123; pos 249761 to 250116)
ctgaccattgccctggtatgtaaaaagctctccttttttagttgaattaatcttttattccaaatccaggttcaggttacttagggttttgtcttttttacattcatatgatttaattagaaattttttttaatgtaattttgtcaaatttcaattgatttctgttttaaatattttgttggaattttggttttttgtttttaaatggtgggtagtgtttattgttactccatgttcttttcttttttcacaaaaagttttcaaaaggttttttttttttttttttttttgattcttaaatttgtatatagaaatcaagctctcatctgtgcttattttgtttggcaggttctgtg

SEQ ID NO: 108342 - DNA, 189 bp, Aquilegia coerulea
  Intron number 1 from transcript AcoGoldSmith_v1.015368m (l ocus AcoGoldSmith_v1.015368m.g) derived from phytozome v7. 0 (chr-ID scaffold_40; pos 1562063 to 1562251 reverse stra nd)
ccacaagcctgatcgcaaaggtatttcatcagtttttcgatcaattgatgattatttcatttagagaatttaaaattcaattctattttcttctcgatctattgaattaaacattagaaaattttaatttgattttttatttttgatcatgtagaattctccaaggttgcgattcgaactgctattggt

SEQ ID NO: 108343 - DNA, 927 bp, Aquilegia coerulea
  Intron number 1 from transcript AcoGoldSmith_v1.005515m (l ocus AcoGoldSmith_v1.005515m.g) derived from phytozome v7. 0 (chr-ID scaffold_40; pos 284218 to 285144 reverse strand )
ccttctcaacactctcttggatatctctatatcttgtaagtctttgatttacatttttttatttttattttttctttcttgctacttttttttattttatcaagtgtatttggattttgggtgatttattaaaattaatatttttgctattttggggtttgatgaaaagggaaatctaggtgaacaagtatttgggtttttttttttggagataagggtttatttaacaatttgttggaattttgccataaaggtttcattgttattcactgttttaacattgagtgggtttgtcaattagggtttttacttttacttatttatgggttttgttgattcagaatttgctataattaattatatagtgaaaaacgcgattttagcagtattttggtaactatctaaattttaaaatttgtccacaagggtgatcaatgatccaaattggaagctgtttaggacataggataaggattaggaaagagaaggaagggatgtggagtttaaattgtaaatatgtaaatttggggttttagaatagtcattttgtacttctgcttgtggtgcttgtattgtaggttatattatttttctgaagtttcattgatagcgattgatctattttattttgtgtgaattgtgattaattagctggataggtgcacctctataaaacaaaggttatgtaggaatccgttagagtgcaaagtattttatgtgtgaaacttctgcgttcacgatgtgtattaattaactggtgctttactttttcgatgtggatctcaatttgatagctagtgccctagaagcatacttattttttcttctgttcaaataaatttgttccttgaatttggctgatgccagtttttatgtacttattgtttcatagggaggcattcacatcttcttcaacttcaaaagatc

SEQ ID NO: 108344 - DNA, 805 bp, Aquilegia coerulea
  Intron number 1 from transcript AcoGoldSmith_v1.022882m (l ocus AcoGoldSmith_v1.022882m.g) derived from phytozome v7. 0 (chr-ID scaffold_18; pos 4466795 to 4467599 reverse stra nd)
gaagaaaactgcccctgcaacttactgttaaagaggttagttcatttgattttttattctaaaaaatggcatcatttaaggatataattatgttgtgtaatgcaatggtccgtgtttcacacttatatgtaaagccttataatttcggtattgattgttctgtgttatgcatcaattatcgatcttgagtttcctgttatctaaaaacacattttcaatattaagtaattctacttatttaaaacttttcaatctgatatataaaatcaaaattaattgcgacgttaaactagaattgataaattttgcaaagattgcatggctttgtttgaattgacatttgtcaacagaaggcaacatacttgaaagtaatttgtttttttggtaaatcacttaatcaaaaattgccgatgggaacactgtgttggactgtttgttctctaaacttggttgttgaaaactaggctttgattagtattgtaatctggtcgattgatacgcgtttagtataagcaaaatggttaaagcagtactttgccgtatcaagaagattttgtagtatagttattgttgtaagcagtatcattgccatctgaagatataataaaaggttttgcaacattttcgttgtcctaaagaactgatttgcaatctcatcaaaatcccactacttaaatataggctgttggtgtggaaaaactaagagttgcgttaaagagaaaagctatggaccatagtttttaaataatatttgcttttgcatgaatttaaatgatgagccctgtatcttccattagaacctgtt

SEQ ID NO: 108345 - DNA, 641 bp, Aquilegia coerulea
  Intron number 1 from transcript AcoGoldSmith_v1.023919m (l ocus AcoGoldSmith_v1.023919m.g) derived from phytozome v7. 0 (chr-ID scaffold_10; pos 2223696 to 2224336)
gtttttctgccggagttggttgccggaaaggtatgtttgggccatgatttttattttagtgcattttgcgccgaaagtggaagattttttgatattttgactttgactaaaagttgggtttattcgacactaatggcagaattaagattaattaaacgtgcatgattatccttgctccaacagataggaattaggtaagatgtagtctcctgtgggagtagactaatatcagtttgccgcgaatatagactatgggactatataattgagtccaggttcatggtgttttctgccgagtcaaacctgccaagttgcaatgtataccaaatgcaactaacgtatgcattgccactttgccagtggcaggaagaagacacttccccgaagagtgaagatgatagcaatatttgatttgacttgaatgactaggtcatagaagatataaacccaacccaagtccataacgagagttgcgagacctgtgaccatgggctgattatatggatgttgagcccagtagtccatctcttgttttgtgattagcttgcttgtttttttgctagcaagcttgcttgttaaagtgactgtttttggtgtttctaatagccagtttatttttgtatttctacagcttcttctaa

SEQ ID NO: 108346 - DNA, 760 bp, Aquilegia coerulea
  Intron number 1 from transcript AcoGoldSmith_v1.013424m (l ocus AcoGoldSmith_v1.013424m.g) derived from phytozome v7. 0 (chr-ID scaffold_37; pos 1582042 to 1582801 reverse stra nd)
gagaaagaacattctcaagtaaacctcttttttttttctcaatcaattgattcattcatgtgcaaaatagattaatttgaattacaaattctctttcaaatgattaatgatttctataaatgatgttaattttggcgaaattgattgattgaaaaaaactagggttttagaattgagtttgttggtttaaattatctaaatgatgacatgataataaccatattgaatcaagattagggttttccagaagtttttgttggtggatgaagaacttgtgtttattgctgctgtatatgtttaaatttcgaatgaagggttctagttattgggatttatatgccttgattattttgtttcgattcaattgcatgttctttttaattataatgtgttttattaagccagataagtgcagagaaactacatattagaatttagaagtatcttccgtatgtgattgagtaactaaacgtctttttatgcatcagtatgatttcatgtaccctgttgtatatgcgttgattattttgttcagggtgaaattgcatcagatttgggttttagatagaaaaaagaagggtagatgtttcatattgtaatatgctttatgtacacatggttttaccagtacatgtagtttgagaaacaagcttgtttgatttttattttttttaattcaaaaatgaagacaatagttttgagttctgacactgaatttatattttcttgcaggtacgatatctagcacttctcatcattg

SEQ ID NO: 108347 - DNA, 914 bp, Aquilegia coerulea
  Intron number 2 from transcript AcoGoldSmith_v1.005292m (l ocus AcoGoldSmith_v1.005292m.g) derived from phytozome v7. 0 (chr-ID scaffold_40; pos 1224093 to 1225006 reverse stra nd)
attgacattcctcctcgcttaaatcaagactggttagattcttattttttcatttcttctagatttcccttagaatttggttttatttattttccaatttgaatctgagcgtagttgagtaattggctgtgatatagttcgataaggcattcaaatctgttattgagcttggattaggttttattacattcaattaagattatttcctagggacagtgtacatgacatcacgtactacctagcaggtgaccagatgttctgtagccaacacttgttcctagttacatatggaaaaatatcatagggcttgaatctgagtatagcttcaatttctcactgacaaattactaacagtacagcaaaaataagaaaataacttaaaattatatttattgtagaagcctagataagagatcatagacagtaatacacaactatacactatgttgcatagacgtttttccaaacatggccgtaaacactcgtgtgagacatctgattttacctcttcttatatattaaatggcattatcatatgtcaggtttgttacaattgtaatgagaatatgcagtgtgtaatgaagagcatattagaaactataacatagattagcagtcttttatttgttacttatcccagctccatgagtcatatttttggggttttgtagaacagaaaaacaaaatttgacataaatggtttgtagaagttagtgcaattctcacattgagtgtgaatgtttgaataacacgggtgattgctaactgcacactatgtgagagtttaacttcttccagctccactatctactcacttatctcaataaataaaaaggtgataaatgaataatgaaatatttgacattgtattggggttgctacaggtacgtttttgcaagaccttcagggaagcg

SEQ ID NO: 108348 - DNA, 922 bp, Aquilegia coerulea
  Intron number 1 from transcript AcoGoldSmith_v1.016694m (l ocus AcoGoldSmith_v1.016694m.g) derived from phytozome v7. 0 (chr-ID scaffold_9; pos 1567729 to 1568650)
gtgtagtacaaagaccagtattttgagaaggtttttctctgcaatgtgtcaagtaatccatgcccatcccattgaatgtagtctgctgtctgcggaagttttgctttatctgatattcctaccaaggacaccacaattttgattgctgtagtaatttgaaaataaataaatattctatgaatcactgcctaggtaacaatatcacctattttcctagcaagaaatacgcagcaccgaactgtgagttggatggatatctgtaaagttgaatttcaatttaaactagagatgcaacttggtcctttagattttagactgctgcttagccaatttagcaaaaatttcagattgcttacccttggcagtctacctgcccagaaacaatgttaacatatactatgtatttttccataataccatgttttagtcaactcatgctgcaataagggtaggaaggaaactggaaaccaaaacaagctagaggaaatcagaatcaggcttgtcaggctgtgttgggcctagtatttccttgggttaataaggtttaagccatcgacccattaacaagagattgggcccaaaggcctgatcaggcctttgatcttactgacacgtatatagccttatgaattacgattagagtttattaacactcttaaaacctaattattatctagagcaaggaaaggaaccctactttactcggactcaacaactaattaattatcaaaaccaaaatccaaatcaaaatcttcttctcttttcttattttcttcgcactagtagtgtactaagctaaacattcttacatatataaaccaacccaaaaactgtcttctgttttatattctccaacttctctgctttagtaaaaaaaaaaaaaaggttttagatttatttttttctgcattgaagatataag

SEQ ID NO: 108349 - DNA, 619 bp, Aquilegia coerulea
  Intron number 2 from transcript AcoGoldSmith_v1.021378m (l ocus AcoGoldSmith_v1.021378m.g) derived from phytozome v7. 0 (chr-ID scaffold_67; pos 1070928 to 1071546)
acgacacgtatccttttttttttatcagtatttatattgatttgaagcagtatgaaataaaatatttattttgatctcaataataactgtgcgatttcctttactataagatcatcaatgatcagtgattcatatggagaagatattggtgacactgagaatgaggcctgtgatgatgatgacgaagatgagtacgaggatgattttattgatgatgatgacatacattttgttgcagattctccaagaccaaaaagtccaggtatattttgtctaaatatttatagtgtaaagtgcatacgtaagaacagaacaattatgtgtacatttatctgttatttggtatgagggtgatactctgtccgtgtctattctccttttagttgttcagttaagctcatggcatactttttttttcaatgtttgttattctcatttaaaatttgtggtctatcgcctagttttgtaagaggtagacgagcataatattttcatagaaagggttcagtatagagatgaaatatccctggtgtaccacatgttcaataatactccaaaaggttataataattatattctacttgtcagttttgtttaactaaggtattctttcattgaa

SEQ ID NO: 108350 - DNA, 645 bp, Aquilegia coerulea
  Intron number 3 from transcript AcoGoldSmith_v1.002538m (l ocus AcoGoldSmith_v1.002538m.g) derived from phytozome v7. 0 (chr-ID scaffold_18; pos 1513470 to 1514114)
ttgctagaagattggccaagacgcgaaattggattgtaatctctagcatctcttcctagttgtttctggttttaattttatattttcatttgcctaaagttcatcatgaagtatgataacatgctggtttcaagtctataatacgaatagcaataccttatacatgttgcgggagtgcttctcctccagtaatgattaaactcatagcaggaattaggttttattactggaaactcggccaaaattgagttagaaagacacctgaatttgctaatggaagtgttagcctaaaatgcactaaggttgcccatgattagtcaagaaagcagatgttgtaattgtgagaaaactctgaaaacaactgtttataatggtatgtagctgtataacatcatcgttataggccaaggccaagccatggtattcaatttggtgctgccaaataactagaccgtcagtttcaattagaatatataattgagaaaatggatatggttgatagttagcttcgattcctttctcttatggtgaacgggacgtcatggctcatgcacaaactatatcaatatggagtacctttgattttgattataggtgaaattttctacaggtggcattgaagacattgatagttgtacacagaac

SEQ ID NO: 108351 - DNA, 426 bp, Aquilegia coerulea
  Intron number 2 from transcript AcoGoldSmith_v1.006222m (l ocus AcoGoldSmith_v1.006222m.g) derived from phytozome v7. 0 (chr-ID scaffold_108; pos 188195 to 188620)
gtacttttttccaattcaaatactgctaccaaaaggtgcgtcttcttctattgtcatctagttgacctttatattttcaaccatcttttccttataggcagcgatgtctgcagtctgcttgtactactagttaatcaatttgctacatataaaattctcatctcatcggttgtatattgttttcaatttttcttttatttcaatcaaagagacaatgggaaccatatctcagaaattgaaatcaaagtacccgtgtaaagtaaatgaaaaatcagagagatgttttgaatattgtttccacttcactaattcaggctcatttatgtactcaacaactctgaattttagtctgaatcaaattataatttttcccatccttttaccaatatacttgatgtttcttaggcacaagaaggagaggtggca

SEQ ID NO: 108352 - DNA, 530 bp, Aquilegia coerulea
  Intron number 1 from transcript AcoGoldSmith_v1.004315m (l ocus AcoGoldSmith_v1.004315m.g) derived from phytozome v7. 0 (chr-ID scaffold_1; pos 4872444 to 4872973)
atattgtaagctctctctctctctctctcaaatttgtttaatttggctcattttttcttcaaattagatactatttaatctgtttagttaagatagagagatctgaattatgtaaatgagttctttttatgaaatgggttattgtattttgagatgaatttgatcaaaaatcgtgttttgacgatctggggtcttgcctttttctttgatttgggcatttggtacagtactacagttatagaaacgtgttcttttttaatttgtcaatttgtggggcagtatgactgaaatgatctagtaaacacgatttcttgcgtggatcggttatttgtttcccttggatgcagttgtatgagttttgcagtttgagtcaccaattttgctcctttttaccccaaatatttattcctattgaacttaaatacttgtttcatcatatgtatggtcttgctattagataagcattggttgtgtaattacagcttattttgaaaactgtgtagttacagttttttatgttataattgcag

SEQ ID NO: 108353 - DNA, 859 bp, Aquilegia coerulea
  Intron number 3 from transcript AcoGoldSmith_v1.027693m (l ocus AcoGoldSmith_v1.027693m.g) derived from phytozome v7. 0 (chr-ID scaffold_11; pos 4277889 to 4278747 reverse stra nd)
caagtttttcacgaggcgtgttcgacggcacagacgtgcagctcctccaaattgaagaaacaagtatgcatatagctacagattggtttgcagggttttgttttttgtttttgggcggtttagtgattcaagcagactgttggaatatctccacttgtccagctaatagaggaaggatcttgacaacaaaccacaagtgtgcatctaaagtttcctcgtgtaatagtgatttgctgatttagtataactaattttctgacagtttaaacaaatactaattcaatcttgttactataattgtttgaaagctgcatagaaaatttaatctgaatcttgtgaaaaaaaatgtcataggatttgaaacatggaaattttttatttttgatgtgcattgatacttacatcgatgtgtattgagttttagtcagaattgatttttagtctgaaactctcacagtctcaccatattaataaaattatttatttattgacaaaaaaacccttaatttgaggtaaaaattgtcactagaataagagtttaacagggttgaacgcaaaaaggtcggcttttctttctctcacacaggagcacacgtaacttactgtatggttatattttagtaattaacccgtgccttcaacaccgatatccttgcaactgatgctaacgtcttgggaacatgttgttgtttaagtggtcggctttatcaagctctatgagcaagatctcgctttctaattatgttccttcctaaaggattttgaatgagcaacagatttttttgtttttctggagtcagagcaaaccaatacttcattaacagggtgtaatagagtgcatcacgtcaagaacccttcg

SEQ ID NO: 108354 - DNA, 541 bp, Aquilegia coerulea
  Intron number 1 from transcript AcoGoldSmith_v1.008718m (l ocus AcoGoldSmith_v1.008718m.g) derived from phytozome v7. 0 (chr-ID scaffold_10; pos 1353858 to 1354398)
tgaagacgttgaacaactcagaaaagctttcacaggtgcattttgatcggatctttagtctaatttatattgatttatatcttgatttgattgatcttgaatttttatatggatcattgagttatatggattttgatttggagaaacttaattaaattaagttgatctggatgataaaaaaatgtaaattatatagaagattgaattgtatgtttagatctgattttaaatatattagatcggaaaaagtatgagtgatatacatctttaatcggattatatattattgtatacaacttaagagtgagaagtatacttccatatacagttgtagtactttttgatcaatgtgaccactgtagttattggtagaattgcaggtttagattgggtttttttgcgacaagaattgtttatgtgtgtgagtgagattatagtagtcttttgtatatatgtgttgtgtgacaaaactttgatgcttttaattgtatatattttatgtggaatgatgccgaacaatttttattacttgatgtgcagg

SEQ ID NO: 108355 - DNA, 583 bp, Aquilegia coerulea
  Intron number 1 from transcript AcoGoldSmith_v1.026473m (l ocus AcoGoldSmith_v1.026473m.g) derived from phytozome v7. 0 (chr-ID scaffold_10; pos 2088299 to 2088881)
tcatccatcccgacattattaaagatcaacaactcgtaattctccatggctctcttttccaattttctggtttggatgtaatttgaaacatctatattactcttcactaaagcatgcaaagtcggtttcatatttcgtgttccatatggtcatgcaatatatgaaatatagcacggtgagctacagagaacaacttatgtataacgttaagttttgtaccacttatgtaataagtctataaatgtgaaattcttttgttctagttggggttttgagttttgttataagttcttggtgacttggagagtaatgtgtggaaaataatgtatcatgactttgaatagtagaattaggtcgttttagaaaagaatatctgaatctaatttgttctccaaaggaaaaacttataggaatactgtatttaggaatctggcaaagtatatcatttgctgaaatccatgaactccttataactatgttcacaaaactatcgcacttaaacaaaatcattagttaattctttatctttcaagatataacatgatttgtgtacatgctggcaatcttgcaggatttgcctatt

SEQ ID NO: 108356 - DNA, 876 bp, Aquilegia coerulea
  Intron number 2 from transcript AcoGoldSmith_v1.024794m (l ocus AcoGoldSmith_v1.024794m.g) derived from phytozome v7. 0 (chr-ID scaffold_21; pos 1447416 to 1448291)
ttgtgtaagaaacaggttgttggcatatattgatagacatcaatgtcaactgaggctataaaaagatgtattgggctcaaaggtgtagtagactagaagtaaaactatagaacatgaataccttcaaattttgacataaaattgctaatagggagttggtaaggcaaaattatagttgtttatacatcttttttatgtagtataacagtaggaaccatcaataagcggccacatgaacaatgaaagctctgtatgatctgtacactagaaaaaggcttgaatgcgaaaatctcccagcaataaaggattaacaattccattttactaggtagctctttatccgaacattggtatagatgatattgcaatacggatagccagataggctctataaaattgcacctctgatggtcttagggagcatatgctttatcacctgccttttgtgctcagtatatcacctcttgagatcactatcgtgatcatcttttcatcatgataactattatgaaggtaagagaagttgtgtaagttgtgacttgtggcaaggatcgaaatctgattactataataataggaaagaaatatatttgtgtttgttgtcacttgtcagaatattgattcctagttggaagcaaatgttaggctactatgtcagtgataaatttgattggttcaagatcaactcctctttttgtaaacatctccacatagtactgaaaaagtatgacattgtcatgatcggtttttctttatctttcagtgttcataataagctatgtttataacttcttgccatgtctttttcgcattaaaatggtcttcgtgtttccttttgcagttttccgatttaatagaatctatagaaagaaggat

SEQ ID NO: 108357 - DNA, 677 bp, Aquilegia coerulea
  Intron number 1 from transcript AcoGoldSmith_v1.020402m (l ocus AcoGoldSmith_v1.020402m.g) derived from phytozome v7. 0 (chr-ID scaffold_9; pos 2399818 to 2400494)
ggcaagcaggttagccttgactgaatttagttgtacgtttagatcctaagccactacctgattgcatctactgttaggtacttaggtttgagtttaatggactaatactgttttgcaatttgttattgctcgagttatgacaagttcatgggtctgaagtaaaacatctcaaaattcaaattttattgttcaaattaaattccttgtttctggttattttctagctaagtatctcttttcatgtgtacaagggtgattagtgaaccccaaatgaagatcttggaactcactatgacttttatgtttctgttttcatttctcaactaaattttttgacacaatcttgcatcatctctttggcaagagtcatcgattagttgtgccttcaatgctaggtttagttctgtcgatgaactcggattaagcaattgtaatgataatagaatacccagtcactattatatctgccgtaatcattatattattatctttctagaggttgcagtcaattcgaaaatatactgttgaaacttgaaagtgcctttgatgaattgtgatcgatggtgcatttgattcttatcttggctatggtcttctattgacacagcttctttggttaaattgttttttctgaccgtgaaactttgattttgatgcagaagttgaagactagtgta

SEQ ID NO: 108358 - DNA, 731 bp, Aquilegia coerulea
  Intron number 2 from transcript AcoGoldSmith_v1.020402m (l ocus AcoGoldSmith_v1.020402m.g) derived from phytozome v7. 0 (chr-ID scaffold_9; pos 2400538 to 2401268)
tttctgttacagatcctaatcttccaataaagcttgtaagccttcttacctctctttgtttaatagaagatataaatgtgaagaaagttgtttcattcacaacgattgggagtatgtttatgtgcgtggttactaatattaatctctatgataaatttggtctactggacgttacaaagatccccttaagcgtgggacagcagaatgtattgttcaaatttctaggacttatcttcacaatgaagatgttttctctttccatttatccgactcataccctattaaacttatttaattagaacaattcactgatagttcatatgtcaattcagtaggggtgactctgatcactcttgagagcatttcgttgtaaagttctattattactagattcatcttttctttttcttttcccggttgtctagttcaagttagattactttgagaataaattggtaaaaacggatctgtacgggttcaagtcccactgtgtggaagaagagtacttcgacatagggttaatttcaatgcaggagcgacgatatgtttcattctgctggatataatttcgctagtttcatttcattatatgacgtgaaatttctcacataccttttataaactaatttcagcatggctgacctttacttaatttgattaatgatgtttgtttcattggtgaattgtactcttattgtagaattcgttttctgtatgcttgcagacagtgt

SEQ ID NO: 108359 - DNA, 558 bp, Aquilegia coerulea
  Intron number 4 from transcript AcoGoldSmith_v1.011829m (l ocus AcoGoldSmith_v1.011829m.g) derived from phytozome v7. 0 (chr-ID scaffold_10; pos 2989083 to 2989640 reverse stra nd)
ttggaactttggctactgttccaatacaccatctggtattttttttttcttctctaagcatatattcttaatttccattgttttggaatgtatttttcatgattttgtttcctaatactaattaaccttcatattggaaattttttattgacaggattgttctcttgacttcaatgtcttatgtgcatttgtatgctatagctggtataatctcaaaactctgtatatatgatatatctgcattgtattcattttttaattaattaggtcaaatgttctggaagaaacttcattttgattgtagtttaagatattgacatatatatggtgttgatattagtcaaagatctacctatggttgatgcaccttatattagtcaaagatctacctattttcattaagctttttttatcattaaacagtgatcctatgcattactcccctgtttttaagttcattgagggtaggaatttattatgcagtcagcagtctcctgttttaatgtttcgatttattttctagtttgcgggagctgcacaatctctgggtgctggagc

SEQ ID NO: 108360 - DNA, 890 bp, Aquilegia coerulea
  Intron number 2 from transcript AcoGoldSmith_v1.015759m (l ocus AcoGoldSmith_v1.015759m.g) derived from phytozome v7. 0 (chr-ID scaffold_30; pos 1125131 to 1126020 reverse stra nd)
gagcttactcaggttcactcccttttgattaattcttgtgtttgagtaccttttcgttgataccctttactttgaattatgtttgtggactgtggagagtggagttgttcagttgttgtatgaaattggttaagtattgaaggaaatgcgccatggtgtaattccttgcacaccacatgtttggtgcattgctttattttttttcagtggagatgtagaagtattaatgtattattatttgtttgagtattggtttgttgagattttgagtacaaaggaccaggagattaaacattagattgtcaactaatacacgttgtgatcttgatcttgataaagacgagttatagtaggaaagagatgaatttatttaagaacaatgtggggtgaaattaaggaagagcaactcccgaatctccctgtgactgattctctaggcctctgaagtcatgacttaaaagctacgggtttatgattttcaaattaacagtcaatatgatctgtcagatgtaacctttcaagcaatactttaatgagattgagaacaccagcattttcttgaaggaaaacaatattgattgcttggtatgtagaaatttattacactgctagtgtatgtagaaaatgcacttgagttttatacttatatgacttcatctgaaataaaatgtcaatagaattgttgctgggatgttctgtacctctgtaatgatgttttctgcatcccgccagtgtttgacaccagctaacatataatttaagctataatttatcttagattcttaattcttcttcttgctatgtaatcgtttcaagcagtaaaaagaaggctgacagaatttagtttcctaacaggtaaaagaggctcttcaaagcaaaacaaaggaagt

SEQ ID NO: 108361 - DNA, 578 bp, Aquilegia coerulea
  Intron number 1 from transcript AcoGoldSmith_v1.014685m (l ocus AcoGoldSmith_v1.014685m.g) derived from phytozome v7. 0 (chr-ID scaffold_11; pos 3210820 to 3211397 reverse stra nd)
gaggtaagatcatatcagctatagataattggcaggattttggttattttcgcaaattcatttgcaaagttttaaggggaagagaaaagttaagtatcaatcattcgagctaaaccattagttaggacttagtcttaggatacttcatcgaaagtcacaggataattccatgtatttgatctcaaatatcagactctcattcctgggacagaagggacaagtaattttctttcggaaaatatcatttgttttcctgccttgcttcttaattgtctctttgaatatgaaattttagagacacgagggggcaaagagagaaaaaataaataaaaaaaaaggggggtaaagagagtacaaacttaatttcttattgtgcgactcaaattgttcttttttatatactgtacaattgatccttttctgagaaactattagttgtggaaatcatgagatgtaggctttgtgtcagtaaaaagtatgttctaataccaatagaccatttagtatattttgtgaagttgtttttgctcatctttgctacagattttacgccatctcgcggcagtacttcaagtcat

SEQ ID NO: 108362 - DNA, 645 bp, Aquilegia coerulea
  Intron number 1 from transcript AcoGoldSmith_v1.005745m (l ocus AcoGoldSmith_v1.005745m.g) derived from phytozome v7. 0 (chr-ID scaffold_18; pos 859270 to 859914)
gtcaatctctctcgctttctcgattaattgcaaaggtaaattttaattttgaattttttgataagaaagaaggattaaggttgtttgaattgctagaagatttttgtttttattttttcgaaaatattggatgagtgaattgggaaaaatttagtaatgagagagtagtatagtattgtgatggattatggttgaaatcttgatttattccattaaaccaagcaattgttcttgttttgatattttacttagcaatggttggttgtattatcaattatcaaagacatgatcagtaatgagtttatcttggattttttattctttggtaatgattaaatctccaaagtttgatcagattttatttatgaagaaatttgaaaccagtgcatcttgttaggattaggatgagacaattaagtcgcttctaatttgggttccatgtgaaaaactgacattttttccttctacacacaacccgattttctactttgtgtccttttttatggggggcttttcagtttctgcatagctttataaattggtacgttttgcacttttcattgtcgacaacaacttacagtatgttggttctactgctataatattgcaggtgtttttcctcagtgtgcttgtggtgttactggc

SEQ ID NO: 108363 - DNA, 951 bp, Aquilegia coerulea
  Intron number 1 from transcript AcoGoldSmith_v1.002954m (l ocus AcoGoldSmith_v1.002954m.g) derived from phytozome v7. 0 (chr-ID scaffold_15; pos 3964084 to 3965034)
ttgtaagtttgattcttcttttcttgttttaattaattggtttttgtttaattttgatattaatatgatatgatcttgctatgttctgttttgtttgtttgatcagttttttttttatgtgtgtgaaatcattttgatcatgatattttcatgctttgagttgaatctagagaaattttatgcatattgaagaagaataaattgccccaaatcaactacattgattccatttttaattaagattttatataattttttgagaggatgatggtgtggaaaggtataatgactgaataaacaacaacaagaagaagatgatgatgatgaagaagaaaataatgtctcatctattgacttttggattagtgatgaagaagaagaaaacttctattgacttttgagaggatgttgattgatccttacattagactatacaaatgaacaaatgtactatctaaacattagaccatttagtatccaactcaactatgttgaattggccctttatccgtgttgtgctatggagtatatcaaaagcactctgtcaccaaatatagtgttcaatcacatatatttcacaaacttattctcagagatgcaggagttgtttggttgaactattcattggaaggggtaatatgactaccatatgtatgaattaatagtcgtctatctctagatataattgaatagtaacataatacagatatggagattttgttcagaatctgtaatgtgtatgacctttatcaagcagaacagaaaagggaactttgactacatctttatcttccgttaatagaatgaaattttcgtgttggcattcatgataaattttttgtttcttgtataacatttgcatttaaattctggaatagttaaatcattaaggccctgttctgttcacttattattgagtaggttgccacattggctccaaatacttcagca

SEQ ID NO: 108364 - DNA, 758 bp, Aquilegia coerulea
  Intron number 1 from transcript AcoGoldSmith_v1.023990m (l ocus AcoGoldSmith_v1.023990m.g) derived from phytozome v7. 0 (chr-ID scaffold_6; pos 8039072 to 8039829 reverse stran d)
agtagtgtacagttgtactgtagtagtgtgcgttggtgtgatttgtaatacacgtggcatcccattaacaattttatcacttaaaataaaagaattaatcgttggctgttcaataattcatctgtcaccaccatggcaccatcaccatgatccacttgttgcttttttttgttttttccctttctttttctctctttttcatcaacatcaacaaggtgttgaaacttgatacttgaaactttgaaacaaaacaaagaatctttcgaaacacttctctcaaggtacacttatttatccaaacgttagaatttctgtaattttcgtataattttgttttttcggttaatgattattattattcttgaaatgcggctgtttttatttattttgtgaaatttcttttgttttatcttcatcaatgcataataatttcttcatcaatttatcaaagggcggcttcagccattttcatgtaaatttgatttgcagtttgtaaacaagcaatgctattgcagtattgctagctcatctcgaaacatccttttttttttctcttccatctctctgtctctctcacgatctttctctttaccgatcgattgagatgttgttgaatggagagagagcagttgttattctattcatatatatctcgcattctattctctcttccttttttttttctcatataccaaggctttgttatttccctccttattttagttcgtttccaccttgagatcttggcagagaattct

SEQ ID NO: 108365 - DNA, 657 bp, Aquilegia coerulea
  Intron number 2 from transcript AcoGoldSmith_v1.001645m (l ocus AcoGoldSmith_v1.001645m.g) derived from phytozome v7. 0 (chr-ID scaffold_30; pos 1630734 to 1631390)
gttggttggtaatattatatgcttttacaactttccactaagttatctacagtttggaaactttgattcaatgtttatatagtttaacaagtcaaacaattttttgacaatttttgttttccaacttctgggttatctattggagaatccacagtttcgaacgttgccgggtatgataaagcaaaatacttttgcttgggcaggtttctctatggatggaattagttttgtagagtagagaagtgaacccaagctgaaccatacagtccatcaacgtatgcaagatgaatatatagcttgttttatttcagatgtgtaaaaacaccagattttttatgaagcaaattttcggaaagaacacattggttttaaataaatctgtcaatagcacattgaggagtacatttctttgtttattttaaagctcattttatatgaataagtgaataattagatctttcttgaatcaagaagaaccgtaagtaaaacagattaatctttgatcaagtcagttagtaacacaatatttatcagatctattatatcaagacatttaattttgagctagtcatttgtgactgttgcccacaattatttcaggtctatttcatatgcttcccattttagttgacatataaatttatcttgcagattaat

SEQ ID NO: 108366 - DNA, 874 bp, Aquilegia coerulea
  Intron number 1 from transcript AcoGoldSmith_v1.022136m (l ocus AcoGoldSmith_v1.022136m.g) derived from phytozome v7. 0 (chr-ID scaffold_1; pos 6719500 to 6720373)
tttaagaggcttgtagtcataggagcttctccaaggtatatacatattacatatatatcctttgctcttcttttttattcttaattactcatgtaaatcatttttctttgagagctagtgtttacatgtacatataatctctctctctctctctctctcacacacacacacacacacaagagtaagtatctgaccagtagcttagtagagcaagctaagtgggactgtgggaggagaaaatagaatgaaaggtttttttattggtagaataccagtgaaagggtgaaattcttagcagtttgatttcaatatctaccaaaggcatatgtacaaattcttgatgaaaacatacttaattcaatcagtgtaatgactataagttctgcagagtgtggttcaatcaatccgtggctgtgtcccaacatatattaaagggttcactgggcacaaagtgtagttttttcttccctttgttttttctttactcaattcacatcaggtcaacagtttcaactttcaaggacccggccactagacccttaaaaatatggccaaacaaattaaacccctcaatttaaattctgaatgaagtttagccatagtattcaattgttttgatgaccacaacttttaccaagattcaaagcccacattgaatagaatggtcaagaatttttccctctctctagataaaattaatagacacaaccacacgtatgcacttcatggggggccaaagccttttcaagttagttggtgtagttgagttagttcaagtccctggctccctgcaccctacatacccttgaccaccattaaatagaatggtaaaataatgcatgtatctaatgacccccttgtttattgcagatac

SEQ ID NO: 108367 - DNA, 380 bp, Aquilegia coerulea
  Intron number 1 from transcript AcoGoldSmith_v1.000422m (l ocus AcoGoldSmith_v1.000422m.g) derived from phytozome v7. 0 (chr-ID scaffold_7; pos 2749689 to 2750068)
ttgtttattttctaaacaaaaggagctggactaaggtaagactctgcttccttttcttctgattgaagaggggtttttgttttgttttgttatgttttgttttgtttattcttcatagtttggggtctttagacttctgcaacatttatagggtttaaaaaccccatttttgatttcccattttcgatttcttcttagaaagctctgttctcaaatgggtttttcatagctttacaaacactataagggttttggtattaagattctgtgttgcttgcatggtagctttagttttgggttttttgttactttaatctaaaaccctaagtttcttgtttgttttaggtgaaggagcttaatctgaattcagaaattagttg

SEQ ID NO: 108368 - DNA, 1027 bp, Aquilegia coerulea
  Intron number 2 from transcript AcoGoldSmith_v1.000422m (l ocus AcoGoldSmith_v1.000422m.g) derived from phytozome v7. 0 (chr-ID scaffold_7; pos 2750080 to 2751106)
agctccagtatgtattttggcatttaattaagtgatggagttttatgatcttatcttctaattaatagctttgttttagttactagcatttctctaaatatatggtttttggtctacttggaacctttatattgggggtgaagtattgggtgtatttgcgggactttgtgggaaatcagatatataccatagtatatgctacatagcatccacaatatagtcttcattaatcactttaatttttataatttacaaatataaaattcagaccaggaggaatatcgggttaaagttaaacaaggctaattggggacttaggttgcatttggtattggttgattttatagccaacacactacacaaaagaacccccattggagtttactgtgaatgtacacttgtgtcttacaaggggatgaatagaagctgccctgtagatggatctgcatattgcttttcgaattgtgaaattatacttatccaaacttcaaagtagtgcatgagatagtatggtaggcatgcaccataagctcgttgattaaagtttcaaaacaggcatacaccacgaactctgttcaaaagacttaaagaaatagttaattaggaagcgcaaactcgctcactaatttttttttaatatagactatatactgcagctgaaggaagattgccttccgggtcaaaatggatatttaaaggaatgaatattttatcaaattgtttttcaacatataaagaagtcataactcgataagttaacagcataaatccattctctggacatgctaggatgtgcattgagaagtacataggactcattgatctacaatcataatgtttttttgtttttgcttgttttgttgtttgtttatttattgttctgaattttccattgattaaggtacctttttctgatatccattctaaattttctcttttatgttatgtacttaagggtagacttcttcagtttctcacttctatgtttacacataacacagagctttacccgcggaagcgtaaaagg

SEQ ID NO: 108369 - DNA, 614 bp, Aquilegia coerulea
  Intron number 1 from transcript AcoGoldSmith_v1.018473m (l ocus AcoGoldSmith_v1.018473m.g) derived from phytozome v7. 0 (chr-ID scaffold_10; pos 6777498 to 6778111 reverse stra nd)
tgctattgcaggtataaatctcaaaataaataaataaataaatattttttattgatctaacaatggttcttattctttatatgtagtcatatacacaatcgaattttagaagcgaggtcttcctcacgcacatatcttgctttggttacatcccgacgacaaaccaaaagatccatctgacattgataaattaatctcagcagaacttcctgataaggatatcgacttcctgataaggatatcgagccactagcatttgaatccgtcttgtagtatatgatacatggaccatgtggagatcttaatcggaattcaccttgcatgataaataaatgttgttctaaacattttcccaacaaatacaaaataaaacccagcttgacaaacatggttttgctatctatagaagaagagcaaacttacataaatcaatgaagaatggaatagaagtggacaatacatttgttgtcccccataatactgatttagttgtaaagtattaagctcatatcaatgtcgaaatttgtgcacgaggaaaaattataaaatatttatttaaatatattaacaaaggccaaaacagtcaaccatagttattgaagaaaacttatcaa

SEQ ID NO: 108370 - DNA, 675 bp, Aquilegia coerulea
  Intron number 1 from transcript AcoGoldSmith_v1.003310m (l ocus AcoGoldSmith_v1.003310m.g) derived from phytozome v7. 0 (chr-ID scaffold_10; pos 1735072 to 1735746)
cttgctcatcaggtttgttttaacccattttttgttctcattgtaaactatttctgttgaatttgattgaaattcgaagtggggaggtttaattattgagatttttagtttaaaaaccgattctttttgtttaatagttgggaattgtaagtaaaagttactttttttgattgattctgagcaatggtgcttaatatagaatagattgaagttcgtacattaaaatgtagtatgaagttatgaaccttaaaattatgtaaaagcatattggttgattcacaccccatgtccttgcaataagaaggtcatgtctagtgtcaattaattgacacttgcgagtatctttaggagcagttgaagatcatttcattattcagctagtaaacttacacgtctcgattcaacttgggacttcctggtattatataaagtctgcgattgaaggggactggtaatttatttgcaaaggacttaaaatcgagactcaagttaggagactagttatattacatatagattaaaatttgagatgaataaactgtgttattttgtctgatttttggttttatggtttcttgtttccccacgtaagtttttctatatctattttatgttatgatcacaacttcttataaaggacaaatttactaagtttgtacctttatgcagggtttg

SEQ ID NO: 108371 - DNA, 697 bp, Aquilegia coerulea
  Intron number 1 from transcript AcoGoldSmith_v1.009821m (l ocus AcoGoldSmith_v1.009821m.g) derived from phytozome v7. 0 (chr-ID scaffold_75; pos 1078410 to 1079106)
gattaaggttcgttcaatcttttctttctttgtttgattatttttctttcatgccctgcatcataattatgtatgtgttggttcaaattaaaaattattactacactttttaacaaatctaaataaggattaatgatatattttgttatgttttcaataacgaataacgattatgatgaaattaattagagagaaagtagagttttttgattgattagttagaagtgaaatcgtaggaggataactgtgacaagctacgaatcttttcttgttgattctttattagctacctaaagtggaaagatagaattaattgtgatttggaaattgtgcgaagtagtttttttttgttaagttttgtaaagttgttctgttgtttcgcgaaaaatgagcattttcttttactggcttggttttaaagagttagaatatttggttattgatagcaatattggtttttaatttggcgaagagagaaaaagttgtaaacttgtaataggtagatggacagagaaagagagagcctttgttccaattgttatgttatgtagagatgccgagagtagttcttgtttggaacttcttaaactgattgatctgtctttttgtcttttacttgaatatttggatattgatagtaattgtggttttaattggtatagaaagaaagagagcaagccaagagagaaaggcagaa

SEQ ID NO: 108372 - DNA, 997 bp, Aquilegia coerulea
  Intron number 1 from transcript AcoGoldSmith_v1.016288m (l ocus AcoGoldSmith_v1.016288m.g) derived from phytozome v7. 0 (chr-ID scaffold_10; pos 1506219 to 1507215)
gttcttacaaggttataattttaaaatttatattttctcattctctattatcaaagttagatcttgattacccttatatttcagccttgattttattgattatattggttttatttatttaaatcaagacccaattttgtttggggtttattatttattttttcctgattattttttcctggtaatacaatggtataaatgtattacataaaaaagacttgtatgctcttatataagttataattctgagattgttgtcagtgtcccaattacattattgaatgatgcattgcgagacgaacactagtagatatgtgtgaggaagtgacatttcatttgcaagattcatattatgatggcaatatgcaattgtatgagtaaagagataggattgactttggcttggttctcgtctgcacacctctttgagtttgagttttctcctgtaaggaatggcgcttttattaagatggtagctaaacatgagtagcatatgtagctcttctgtgagttggttattttgcatcagactgactcttttaattttcttacgttcacgcaatgtctcaatatacatgtagaggaaacactttatatgaatgtaattcagttaccacatcagtagccccagtttggcactcaatttcaatgtattagaaataagagctttggtttcttgagatagactgtgcctctcagtttccattggtacagtggagtatccggattcctgcataaactttaactatatttttcactttgccacactttggagtaattattttgtgtctaaacctaatttctagtacatgttttcactttcaacaccaatgtgattaatgcaactagactacacgatcatccactatcaactccacgtctccacttttctgaaatttgtatttcttattactatgtacttggctttaccattgcaggcataaatattatcatttgttttctgttttgaaggttacatttggagtgctctttaacg

SEQ ID NO: 108373 - DNA, 1011 bp, Aquilegia coerulea
  Intron number 1 from transcript AcoGoldSmith_v1.000296m (l ocus AcoGoldSmith_v1.000296m.g) derived from phytozome v7. 0 (chr-ID scaffold_30; pos 2922756 to 2923766)
ggatcgaaaagttctgggtgagttaagtcattatatgtgtatatgtttatattttcagttttatttaaggggtcaggttacatggcacagtgaagcatgacaaactaaatgagtaaatgacatatatttgtggatcacacattgagagagtacagggatgacttgtggaaaatcatacaaggattttcaacctcgttaagctttcttaattattctccacagtctataacgtttgattttgtaaccatattttagtagggttagaaatgtctgaaggagctgcttgtgttgacgatgactccatttttttttttgtaaccatacatgagtccatggtggggagatcttatctgtaaaagcttagctcttgactcttcttcatctcgtgtgcccttttgtgtgtcgtatatccatcaacacacacacacatgtgtgtgcagtttgtctaaaatttctgtatcgttgtatatattggatttcctaataatatttacaaaagaacatcggataattccgagtttagatatgttgtatatcgagctcctaattttttatatacatatcaattgtcaggtaacattttttttgttttggcaatcattatctggtaacatcagtaatagtttcagaccatgcatgtgtatgcatgttggtgccaaaataaacttttgttaatttgaaagcaattatccaatctcaaaatatcatggtgtgtgggtgtacctatttcgtaactgctaaccattagttggcatgaatgagttagagttaacatttaaaagagacatggttttgctgataagtggaacccttgattcacaaagacctcatgatttgatcctgagaattcttctattatgtgaatcactaaacatttactgtttacatgcaaccaatatgttttagccacaatctaattcaattgcttgttcttagactaaaataaatattttatgtgtattttgaccttgtacaggactggcaagcagcggtgtgtttctgtttacaaaa

SEQ ID NO: 108374 - DNA, 895 bp, Aquilegia coerulea
  Intron number 3 from transcript AcoGoldSmith_v1.000506m (l ocus AcoGoldSmith_v1.000506m.g) derived from phytozome v7. 0 (chr-ID scaffold_7; pos 682225 to 683119)
gacgattcagagcagctaaagacgctgctgaagcggtatgtggtttattctcttttgatttttagtttcagctctactttcaaaatgatatgtaaaaattaagattgatacgtaatgtacaccaaccttttcgacttgactgtgttcaatgttcaaaaaatggtgcagagtaaatttattttctgaatttggaaaacaatgttctttgctgtttgttactgaaaggaaatgaataatattgagataaattaagtgttaaacagaaggggtaaaacacaaatagtattatattggaaattttatttattatcattattatctaagtgttttaaagcattatgtactgtgttctgccttgttccatcagtagacttgccaaatgcatcaatcaatatgaagttcttcagagtatttggtattggtatttataaacagttggaaaatgatgatgcacgtattcaagtatctatgtagtgttttaggtccgagttgctctcttttggatctgaagtgagaatcaagaggggtcattacctttattcatgaaaggacaataatggatagtgtgcctttgaagtttgaacccttcaaatcaaggataagaatcccccctcttatttggttggaatgccatgtaacagaaatagttcttgacagcgccgaaaaaattgtattcatttaggatgttaagtcgcgaatataacagcatggatgtgagtcatgaaattttacattaaatcaaactctctacgatttcatattaaattcttctccatttatggttatattgaaaggaacttctgcaattgttcttttgtccacttataagtggttttgaactgtgaatattccgtgtgcaggcagcagaagaagataggttgcgagaagagtttga

SEQ ID NO: 108375 - DNA, 543 bp, Aquilegia coerulea
  Intron number 2 from transcript AcoGoldSmith_v1.010661m (l ocus AcoGoldSmith_v1.010661m.g) derived from phytozome v7. 0 (chr-ID scaffold_9; pos 4279501 to 4280043 reverse stran d)
ccacaggtattggttattttttacaattttatcagtttttggtagaatatagtttgtatttttgtttatccgatgaagggtttgatcttaatgaaatcaattatgtggtaagttcaaatagctgatgatattgtgatacctatattggttagggaattgtatgtctatatttaccaatacatctccactctatccctttaccaaaaaaaaaaaaaaaaaactccactcgatcccctcctcttgtccatgtggtggatttcattgggaggtaacacagtaaaactattgcgcctatagggctttactttcactatctgtatctaggggacaaaaatacacagtaatcaagactacggtaatttgttggttgaggcatgtctttggaatgactttgaagaggattataccgaaaactgacaattctcaaatttctcacagccaatctctaatttttttcggattttcaatatgcgaattaagtatccttagaattggaaataatctctaagaaacatttttcatgaatttggtagggtggcattg

SEQ ID NO: 108376 - DNA, 1019 bp, Aquilegia coerulea
  Intron number 1 from transcript AcoGoldSmith_v1.012756m (l ocus AcoGoldSmith_v1.012756m.g) derived from phytozome v7. 0 (chr-ID scaffold_1; pos 7797113 to 7798131 reverse stran d)
tggcctgaaggaaacccaaacttttggtgagattttctgtctttttccacatgtgtctgtgctttctatgctggtagttttgcaaaattatgctgttaaagtgaaagtaaagctaagatgttttgattgtcttcgtatgtactgcatccactaccacgaacctaccaaagataataacaattcaattaaacttctgttcatgttacgataaaatagttaccatatatctgattagagattttgtatatgttggatgatgtcgaagtgagatttataccaggtaatagccaaactcatactaatatccatttgttataagacccatttaagaatctctctgcgatctttaaaacaagcagattcaatctgtattgtgaattttggttgacaagttttcacagtaacattagtaatgtacaatctctaatatttgagatttttttagcaaaagtcatgtcaaataactcaaatagcgactttgtttgtgcacttctttcaattcagccacaagttgtgggaatcaagtgctttttttttattggcaagcggggttgaggggcccctacccctttaaattacgtgtggaaatttatttcaagtgcaatgtgtacaatcttattctgttgtaagaattttctaatttcatgtaaatctttgaatctgcactgccactattggagatgttgtttagtccatcaatgtcttgattatgagaaaatgctaaaagttataaagttgcacatagaccaaacaattttatttcatgtatttgtttattttgatttcttgtgtttcatttgtgcaatcttcaatccttgcaactccttcaaggagttactatttggctctttttatactttctactatcaatcagatgagagaattcattgttttcagattccttgttatgtttataagtataattatctttataggttgttaaacagataatgttacatctccattatgattctgttttatcagcgaaactctgcactctattagtacaaagttgcttg

SEQ ID NO: 108377 - DNA, 519 bp, Aquilegia coerulea
  Intron number 1 from transcript AcoGoldSmith_v1.024986m (l ocus AcoGoldSmith_v1.024986m.g) derived from phytozome v7. 0 (chr-ID scaffold_28; pos 720177 to 720695)
acaatcttacttccaacgttctggtatgtctttcgtactataacgcattatcatgctgctactaaaactataggtgagctctgatacacataaaaatgttgttttcttccatttttgtcattctttagaagcttgaaggtgatctaatatgtcaaaacaggcaagggatctttgtgggtcaatggagttaatgatttcaccaacttatctagttgggaacttgggatttacatctccaatatagttttttgttaaaaacatctccatatatagttgccaaaaaggctaaggctgcatttgcttccagccatcacgcccttctagatgtacatttgtcgagaattgttctagttctaagagcaattatttttggccctacggaaaaaaggaaacaaatgcagtatagcctttttggcagaaaatttgagagactatatattttccatcattttttgaatttgcattgcgcattttatgttgacacttttagttaattttaatgtgcagtctgtgatacct

SEQ ID NO: 108378 - DNA, 546 bp, Aquilegia coerulea
  Intron number 3 from transcript AcoGoldSmith_v1.001075m (l ocus AcoGoldSmith_v1.001075m.g) derived from phytozome v7. 0 (chr-ID scaffold_30; pos 575199 to 575744)
tctcaccgggaatctatttgaaacgtttttgaaacgtaagcgggctacccctatttctttttaggagttttttgtttgttgttgtctgtatttcagattgatgttgtttatcatactgtttttctctgggcctttttggtatgttctattaattaggtgcatattatatatagagtatatgctgaattgttgataactaattattatatgaaatccttatgcatgccatcagttctacatatatgtatatacttttcttgatagcgaaactagtttgtacttcaaactagttttaattgaaggtgtttatgttaatgttatcataattaaagtatgttgtgatccttgatggtgacaacatacttgtccaagagttatcttctgctcatgttaatagaaaaaggcttctgttttgagatgctatgaagtgcaaactttccacccctttgtttttagtagattaactatgtatagattacttattttgttttgtcaactccaatttatgcagcttatttcctggaagcttatcgccccgtaaggaag

SEQ ID NO: 108379 - DNA, 613 bp, Aquilegia coerulea
  Intron number 2 from transcript AcoGoldSmith_v1.010914m (l ocus AcoGoldSmith_v1.010914m.g) derived from phytozome v7. 0 (chr-ID scaffold_54; pos 1351517 to 1352129 reverse stra nd)
cgtgagtactcatctccctaattcatttgccaattttatatttgagtcgttatttactgttggtgtgcccatctagtcatcccacaaatcctgtccttgaaacttgaataatatcttaacacaagaaaaagaaacatgagtaaaaatggcgacctagtgctaatctgactgctcggcgctcacttttccaactcatcaatcttgaaaaatgcagttctacaaattatcatagcaatcattatggtaggcgattggtggtttagtcattagtgcagaagatcattccattgttatggcacaatttttatcatacaaatctctaaattctcatacagagaccacacacgcgtgcgtgcaaatttttgacgttcagtgtagacgggtctgtagccatcattgtgaaggcaaatccactttatgatcagatcatcaatttaatcaaatgatttatgatgtggcagttgatcggaagaataccttcttcctcttttaatgctgacaatattttatttgttttatctttgagtcttgtctttatttgtcctgtttcactttggactcctcaaaatgcctcactgaaaatacctctatggaacttgcagattcttcaata

SEQ ID NO: 108380 - DNA, 811 bp, Aquilegia coerulea
  Intron number 1 from transcript AcoGoldSmith_v1.003066m (l ocus AcoGoldSmith_v1.003066m.g) derived from phytozome v7. 0 (chr-ID scaffold_7; pos 1421600 to 1422410 reverse stran d)
aatacaaagtaagtttcatcaaccttattatcttcttttgcttattttgattttatatttatactgctgattagtacaatttcaaataaaactgcttttaattacagataattttgttttagttaagaacttatcctaattcaaatgactaagttcttagaatacaaaacaggctcctaatattgataagaaagcagaccattttattctaattcaaataacttattaagttttgtgataaattttctagaagtacaacttgagttctacagagacaacaagtagaatttatatagtttatataaggattggattagtaggtataactgtataagctaagacaagataatggagactgacgtttggaaccatagataatgagtctgtttgtttggaaattaatttactagagtgaggaagaaaaggaaaacactagttatcaagaatgagcgcatttgattgtctgtctctcgagtaattttaataaatggaattagttcttttttttttttttttttggtgtgttttactagtaaaacaaataagcagccctgtattggaggattgtattttagtttgaaaagctagtgagatacgtatagtttggaactttagagaatttgtacaatgcacctcttattttattccctggggatgactctgacgaatattccattcctcttctcaaccctatttgtttcccttcaacaagaatatatccttgtttgtccattaactgtctcctatatgcttttattatttttgcttcctcacagaacaaggaaaatatttgggatttctctttctctca

SEQ ID NO: 108381 - DNA, 639 bp, Aquilegia coerulea
  Intron number 1 from transcript AcoGoldSmith_v1.015404m (l ocus AcoGoldSmith_v1.015404m.g) derived from phytozome v7. 0 (chr-ID scaffold_63; pos 1280317 to 1280955)
ggcaggtaaaatatcatgacttgatttaattaaaggctaaatagattatattatacattgaaatagaacacttactaaagttgcattacatcgtgagaattatctgttttcaataagaacttctttccaaattgattttggtccatatatgttttcaattgttagtctaaggtggttgaaaactataaggattttttattaaaaaaaaaaaactataaagatttgacttacagttactatttttttttatgaatgatttactattttagttagttggaattttcatcaatatgtaaaatcatgtaagtgattggtttattaagtgaaattagaattcaaatattattagatacctggttgtagattctagatgtgcaacacctgatttcattaacaatacaacatgggtctggtaaaccatgatatgaataaacattattcagtgaagtccaacgtactaccatctttaccaatggcctgagcattaacatccacaataggggtgccaagtttaaaatgtaatcagaggagctaaccaagctagctaattagtaacatatatttgttcaggcaaattctcttccctagaaacgtttttgtcctttgaaataggatatgatacatgtacctacagacaat

SEQ ID NO: 108382 - DNA, 1069 bp, Aquilegia coerulea
  Intron number 1 from transcript AcoGoldSmith_v1.000131m (l ocus AcoGoldSmith_v1.000131m.g) derived from phytozome v7. 0 (chr-ID scaffold_1; pos 1813988 to 1815056)
ctttgtagcaccaccaccctctagtgtcctagcatgtatattcaagttgatagaatagacataagaagatcagtgaaaaacaaacttgacatgaaacatgccaaacactgtatacacaacatgaataatgcatccctctttctatgaacatctgaagcacctcaaaagtcacttgagaagtaatactacaatagattaaagaaatcataaaaaaacaataaaaatgaattttcaaataacaaaatcaagacaagcaatcacaaaacaaaatcttttttattataaaaaatgtgaaacaataaaattttcatgcaaaacaatatacacgtggcttggtaagataaagggggtatggtgtaagcaaaacgacacgtttaactatttttaccattttaatgcttagctgtcatcatcataccttttctccatcagaaacagcaaaagagtcaagtgatgtgaatttgtgaaagaagaaaccaaacaaagcttccactgtttctttcaatcaatccttcttctttcaagtttactgcaattaattaattttaattttactgtaatttatcgatcgctttcactctctctccctttttttctttctcttactttttaattaaaaatataaaataaaaaaattaaacaaaacaacttctaaaaaaagattcctcaacgatttgcagatttctgatcgtgcaaagagatagagagagagaaagagagagagagagattgtttttgcagaagaagagattttgttttagggtttttagggtttcggaatcatttttttctttttgatttctctttctctttcaaatgcaattcatcttcttcgattgtttagatttgtcattgttagggttttggatgtaatgagttgttttcgtaaatggccagaacttctcgattcttcgtttttcatggaatcatcaataaacatgttcatgttgttgttgtgtttgttagtttcttcatcttgttcagttcattttcaaattcaattggaatcggttttgtttctggttcaaaagaagatttctcgattcttgatttcgattttggtgaaaat

SEQ ID NO: 108383 - DNA, 1042 bp, Aquilegia coerulea
  Intron number 1 from transcript AcoGoldSmith_v1.001103m (l ocus AcoGoldSmith_v1.001103m.g) derived from phytozome v7. 0 (chr-ID scaffold_18; pos 3092828 to 3093869)
cttttcgctttcgttgaaagaaaggtgagtgaggtgagtgaataagacaagtcttctaactaggttttctcacagaagaaattgttagcttgtttatcttcatctttcattctcattccactatcgcttgcttttaggttcaccagctttttctttcgatacatttgtttgtttgtttgtttatagctacttgatgtaatgatgtgatgtttaaatgtcgatcatgatcatttaattgtttttaggttttgaaatcaaagagttttaatgtttttgattattgtgtagttattgtttatgatttcagagttttattttaaagatttgttagaatttcacattgtttttatgatgaccaaaatagattttcagaccaaatttgtgattcatggtttgtacattatttagggttttagacttgtaatttttttgaatttgggtttgagatgttgattatcacatttctttatgaaaagtcttttatcggagaatttggctgttagaattttgcgattatgattcaatcagcttctcagatggttttctgatttttggtttagagaattcatagtttgtgtttaactttttacgattaattgagaaaatttaggtaattattgtttgggcgaatgagacctagattctgtagaggttacattttattagagtttggaaaatctgttcactgactgagatagtgagttttgagactgtttcactgcaactatggtttacatattctgtgtattttgcttttacctaccacaatgatggatttaaataatgaggttttgtacagaaacaaaaacagtgaaactttgacactgttcttcttataaatcacttgttagcaatttcagtaatcccaaagtggattttggtctactggtttacagtgctgtggttttaatgaatatgttcccttttattgtttgataattctaggcaaaatatttgtcgttttgaaacttccctggttttgaacattctgtaatgtgttttttcagagaagcatcttgttgacctcgagggcatatactag

SEQ ID NO: 108384 - DNA, 134 bp, Aquilegia coerulea
  Intron number 1 from transcript AcoGoldSmith_v1.008316m (l ocus AcoGoldSmith_v1.008309m.g) derived from phytozome v7. 0 (chr-ID scaffold_40; pos 999113 to 999246 reverse strand )
gattaagaaaatatctgtggtaagtgacaaaaatatattatatcttttattaaaagtttaaattactagggttttgtttttgatttttgggtgtttttttcttttcttaatgcagttagaagaattattgtcac

SEQ ID NO: 108385 - DNA, 862 bp, Aquilegia coerulea
  Intron number 1 from transcript AcoGoldSmith_v1.000469m (l ocus AcoGoldSmith_v1.000469m.g) derived from phytozome v7. 0 (chr-ID scaffold_1; pos 4778469 to 4779330)
aacagttagtcttcaaacttatctcagttcaggtggttagctagactgttgtgctctgcaagccaggtcttgacacaaatttattccaagtaagaatgtgtaataagcacctcattctaaacatggttttcgaattagtctgggtagtttagaacaaattcttccactgtgtgtctaatccaccatctataaagagtttagtatatggaaggaaaacttgcaagattacttattttgatcattatagtagaattggtatagttgctgggacaaacttatgcagtccaactcttttgaggggttactgcaagtgaagaggcagtggtttctgtcctaactaagcatttttaacagtcattaacaaatttgcgcgttactaactaaacccgacttccattagcacaatatacttcatgctctcatatctacagcaagtatcaatcagtcgaatatcagacattgttcctgaaaaaattcttcctgcagcgtatctctgacagattgaactgaactggtaaatgcttaccaaacggcccatataacagagtccatttaaaagcccaagcccatttaattgcaagttcgattgttctcgtctctattatcagaaaaccagagaaacagaaaggagagagaaaacttactcactcactcacttcaatgttggactttttctttcccgccaaactcaacaaccaccaccatcaccaaaccctaacatcaccatcatcgtcgtcatgatcacaactcgaactacctttctaattcttctaatttcaatactcattcttcatttccaatcatcattcaaaccttctttcgatcagatcacgaaatctccaaatcttgaaaccctaaacct

SEQ ID NO: 108386 - DNA, 630 bp, Aquilegia coerulea
  Intron number 2 from transcript AcoGoldSmith_v1.023819m (l ocus AcoGoldSmith_v1.023819m.g) derived from phytozome v7. 0 (chr-ID scaffold_15; pos 593788 to 594417)
cattccttgtcaaggaattggtaaacactttatcctcatatatctcgcctttttttttataatttatgaatctttttttaccaatgttaacttaaggtttcgtgttttgaagacataagaacaatggattcttggattttaccttagtcataaatgtatttgttgttttatacatttgatggttttttgggaaacttattaagaaatattttgttttcttgacttctcttataatatttaatagttgaagttcactaagaacaattatttttagattattcatagatagtacaccacatttgcatcaaggagtcacccctacttctcattcttcactatatctggtttcttttaattaaattataatagaccaaagatttttttgtcaactttgctcggatataagaaaaactgcttcagtgcacattactcactcatcttaaaagtttaagcatttttggccaagtactcttagaaattgacagtatttatcttatctactcttatgagctatatcatatagtctgtttagatttccttcagtttctcgtaatattgtgtatcagtcttgaaaattgaaagaatttttttgattacgtttcattattgacgtgctcatctgtgcaggat

SEQ ID NO: 108387 - DNA, 1013 bp, Aquilegia coerulea
  Intron number 2 from transcript AcoGoldSmith_v1.006832m (l ocus AcoGoldSmith_v1.006832m.g) derived from phytozome v7. 0 (chr-ID scaffold_27; pos 1466637 to 1467649)
accaatcaatccttcagatatcaatagaatccaaggtgtggaggggtttttgttatgtttgtattgcaatgtattttaggattgcccaattttattcgaatatggaaaaaaagattgtataaacttatgacaatagagaatccccaaggagatgatctacagtagctaagactttttgaatattgtgctttttgttgctgctaaaatcttataacagtttgcctcgtgttgtggtagttattctatttttttttttttttttattggaaagggaggttgaggagacccctaccccttttaaattacgtgtggaaacttatatcaacaatcagctgttgaagtgtttcgaacccacaacctttccgcttttggtagttgttctatggactagctgttttgagtaactgttattgataagagagttttttttgtagcatgaagatgtgaatgtattctattgtagatcatgtcaggttgttctaattcagtaacaaaatctggtataccatcccaccagacttcactatcttgtttcatccctgcaccttgcttgccatcacatcagcactaaagttacgtcagctgtaaggttcaaacttggtaaatacttttggtctagggcccttcagaaatacaccagtattaaaaattttaattgattataggggatggtatatcagtttcatattcgtaaacttatgaagttgggtagagacaatcacatcatttttggatgtttaataagaagtgacaaactaattttctttagttatgtactctgcaatatgcttcgttaaaacttaaaagatttcaactaacaaggcgcagatactaactaagactgacattttttagtatatcacctattcacctcaattaatgaagtaactctgatggttagtgtttgattagaatagtcgcggggtgaagtatttgtttggctgacatgcactccctatttcaaatattgttttataggtgtctatccggttaggcctacagtgcctgcaatt

SEQ ID NO: 108388 - DNA, 263 bp, Aquilegia coerulea
  Intron number 2 from transcript AcoGoldSmith_v1.000705m (l ocus AcoGoldSmith_v1.000705m.g) derived from phytozome v7. 0 (chr-ID scaffold_15; pos 2841271 to 2841533 reverse stra nd)
ctagcggatttctcagccttattggaggtactttgtcttcttaatgttgtcttgatcatcaccccattattttctcttcgcattctttgatggaaaaacaaaaaatgtggtggtggaatgaattgaacagaggagcactcaatcacaaacttagctttgttgttttctttgcttatgttgtgtagaattagtccatacccaattatctggtgtataggttaataatttaatatgaatttcattggcaaacagctttgcaattt

SEQ ID NO: 108389 - DNA, 728 bp, Aquilegia coerulea
  Intron number 3 from transcript AcoGoldSmith_v1.005336m (l ocus AcoGoldSmith_v1.005336m.g) derived from phytozome v7. 0 (chr-ID scaffold_18; pos 1608318 to 1609045)
gcagtaacgttggtaacttatatcagcctttggtggtaagcacatcctttgttaattcaaattgttgtttgttttttaacttaaacccttttccatttcttatctcttggctattgttacttgatattttgagtccacgagtagtctttcctcttctatgtttgtaacacacacaaggaattgatttcttaactgtagaaggaactggctcatgaactcaaacagaacgtattggccttcaaagtaatctgttgaattaggaaacatggagttaatttctcatgtattcttcttcgtcttaacttcgaattctttagcaaacttactccatgatcagtctgattttctgaaccttttaaccagtatccagttccctattccaccaatatcgtctatctgaaaacattttattaatgtttgtaaatcctattttcttggttgttcactttgtcacgataatatccatgtccaaaccttggtttgttctaacagccttcacttttacattcagtaaaccttattcttttgtttgtatttgtgactttctgagtcacttttagtccttcgctaataaacagtttgaaacaccaaatcgatatttatcgtattttagcacagttctttttcattcagatttccatatcatatatagttctgaaaattcacttaatactatgcatcgctgtggtcacattttaggtttggagtatttaatcctgctattgttt

SEQ ID NO: 108390 - DNA, 426 bp, Aquilegia coerulea
  Intron number 3 from transcript AcoGoldSmith_v1.015690m (l ocus AcoGoldSmith_v1.015690m.g) derived from phytozome v7. 0 (chr-ID scaffold_10; pos 3780995 to 3781420 reverse stra nd)
cattcctcctgtcataggtcttggtgatccggtaagtgagagtacttctgtattctgtacgtctctctgcattattcccattctcccaacaattatcttggctcattggggttgtgtattatattatataggtgctctatcaacatagggatcttttacgaagccaactatgcactggaaattttcaatggttgtgctacctatcatcaacaagtaatcttctgaaaacagtactgaacagttttgtcttggtcattttatcaattttggttttacctggctaaacaataatttattaaagatattttgacaaatgggatcaaacgaaacttaaccacaactaacaatgcatcgatatacagcaattgcatcttcccatcttggcatttcatctcatatccttgatattgtggtatgcaggtgtat

SEQ ID NO: 108391 - DNA, 912 bp, Aquilegia coerulea
  Intron number 1 from transcript AcoGoldSmith_v1.025855m (l ocus AcoGoldSmith_v1.025855m.g) derived from phytozome v7. 0 (chr-ID scaffold_9; pos 5066031 to 5066942)
aacaggtgtttggaaagcggccctcttcatcatcggtaaggcttagtgtaacacactaacatggaatgaaaacaaagaaaatcagttaactggttgcatttttaccttctccagataatcagatataaattattccaaaaaaatgttgacatgcattacataagttggtatcggttaatttgtttatgtacttaatcaccaatatatatacattcagagtttcagaacattggatagcgtaaattgtgcatgttttttttctctcctgagctcataaaaacaagtataaatccttcttcttcttcttggttttgatatgatttcatttgattgaggaattcccaaaaaaaaaactttgtattagttgaatgggaggcaagtcaaatctgatgctcatttgagtggagtggaattttattaagtggccaggctttatgaacaatctaagtaggccaccaacaatctaagtaggccactaccataaagctaagtagaaattaaagtgctttgataggttagaattgattttcctactcaagacctatgatgtctttttcattttgaactagttaacacacttaaagcacaataaactgaagtaggaatatttgttttgatcacacatccaactttctcaatgatgtacagtcgtagttcttactctgtgatcagatcagaccatctcatctgccacagatatggatccatgtttttgtatccagggataccagacctcagatgtacgtaagtgtagcagtagtgctcactgagacgtctatacgatcttgttaatggttaagaacttaattaagatcaaaatgaagtgaaaatatatggattgtttttaacatgtctctttatctataatatgtcacagctattgagtttagtgagaggttaacttactttgga

SEQ ID NO: 108392 - DNA, 857 bp, Aquilegia coerulea
  Intron number 1 from transcript AcoGoldSmith_v1.004554m (l ocus AcoGoldSmith_v1.004554m.g) derived from phytozome v7. 0 (chr-ID scaffold_15; pos 323509 to 324365 reverse strand )
caaggtattttattacccttttacgccatcttgctcaagaatttgtatttaaggggaatagaattttcagtaaaatgactataatgctatattaagcatgaagaacattggaacatcatgtaaatatgtttctactgaaaattagttaccattgagatccaataattcccaacaatttaaattatcctttcgttttaaaatcttactaattatttttcatgtaatcaaacatgagaaattgagatttaccgaaaaatctatttgctggactctaatcaaacagaccctagaatgacatttatatgttttaaaacatgttagttacatattggttttgtatttggatcatactttctgttaaagcaggtgtattagagtaattactcctaaatttgttaaaattagagttcaagaccaaatttggtaaatcgtaagtcaaatcgtagtggcaaaattttgattcgaatcgtgaattcaaaacagttttttattaatattattggtagagaaatcagaaatgataaactacacctttatattgaattaatagtagcaagcaataaagtaatataaatgagaaatcttccactaagagcaatgccaatgcaagtgtaagtgcgttttccgttacttaatgcatccgctcagggtttttgggctaaaatgtggaaaacatatgaaaagtgtgtttccacacttgcattggcattgctctaaagagagctttacaataaagtctgttgaaacttgacagagtaagagaacaattgaatcacttagtgtttcaattatacatccctcaggattaactgatgtaagatcttttacaggtcgtataacccaaataaatcagtgaa

SEQ ID NO: 108393 - DNA, 798 bp, Aquilegia coerulea
  Intron number 1 from transcript AcoGoldSmith_v1.001978m (l ocus AcoGoldSmith_v1.001978m.g) derived from phytozome v7. 0 (chr-ID scaffold_10; pos 2790258 to 2791055 reverse stra nd)
gaaaactcaggttagtttttcttttctatctgcaattaaacgaatcgtttaatgtaactttgtgcattcaactgttttataaatggaatgattgttttagggttttgtattcaatgttctagggtttaatctttccatctggtagttgtttttgtttctttagtgcttgatatatgttaattgagtttgtttaacttgcttttgatgatgaaattgttagcgagggttttcactcaatcttttagcttgaaatttgatgttgttgttctgctaagttttaagaagcatatatataaaggaggattagctagaaacttaagctcaactatggttttgtgttgacattgaacccatataaagtacaaaagctggatgagattgtgcaatgtagtttattgaggatttttcttttacttggagcaaacatgaggattgtccagtagaaacatcattgaacgattttaatagtcacctagttgagtcttgctccatttttactcaattgctggggtttgataaacacacatggacatgattgattctcttttggatttgagtacttacgagtgttaagataaacactggtttccatatgacaaaattgtatgtcatatctaagttttaccctgttcttccaagctgtcttatgtcaaaattgtaggatgcaaattccttttcaataaggtgttttgcttcttccttctttttttttcttttttttttctttctataagagacttcttgtgtttatgctgcctaagttattctttgtttgctcaggagaaaatcatcaagatt

SEQ ID NO: 108394 - DNA, 1020 bp, Aquilegia coerulea
  Intron number 1 from transcript AcoGoldSmith_v1.012021m (l ocus AcoGoldSmith_v1.012021m.g) derived from phytozome v7. 0 (chr-ID scaffold_27; pos 2335183 to 2336202)
caacgcagcgcttacaggtaaaactatttttatcctaactctttaacttgatcattcatcgaaaccttttgattctcttcttctcgattagttttttatttcgtttacttttttattttaactttgaaaaaatctgaatctatcaagttatctttcatcatttgtttttattttgagatctattgtttgtattcttttgcgatcttaaatcttatgtgctgtaactagtcaaaatcgaatgatttagggtttcttttgagatgaataagtcagattcgtatgattctttgattacttcgtctgtgtatgctatttaagataagttctcttgtggctatgtatgttgttcgactatgtcagatcattttttctatgaatcagtttcatttgacatttaagtagactaaacttatatgtactattacatttatcattgagtatgatgtttacttaaacttatattagttgaatgtgcttagaaacaattagtgattaggttcttcgactcatgtactgaaatctgattattgaattttatcatatttcagagactctttatcaaatgttttttcttaaatgatattttgattgttttaatgtgtttgagcgatattttctatgtcatagaccttttgaaagtcacttgtgaatgtgataaaacttcagttttttttctatcagaaaaattgtgcttttgcatatatacctagaagagtggggaatacttcagaaaaatataaaatgtttgctttctgtgaatgtagtaatgtacactgttttctcatttctataaaatatcaatcaaaatttgtttttgaaagtttgtatgaggtaaagttggcaaaaatcaatactaatttataaagtatgataaatctgtgtgtaaatagtaggcttagagcctaaagtttaattatattttcaacaaactatgttatcagatcacatgaatatttaaacctgttactgacatgtaagtctttatctgtcatgataattgcagcataagattcagcaagg

SEQ ID NO: 108395 - DNA, 837 bp, Aquilegia coerulea
  Intron number 2 from transcript AcoGoldSmith_v1.010635m (l ocus AcoGoldSmith_v1.010635m.g) derived from phytozome v7. 0 (chr-ID scaffold_102; pos 192829 to 193665)
ggggcttttgttatagtggtatgttctcaactttgaaactataccatattaccatccttttattaagctattgggtagttttaaaatgccatagaaagtttggatgttggaatcctttttttatttgccgaataggattttttatgtactacatatctatgaaatgtactaactactaaagtaagttattgtggtatgctcataattttgaaattagagtccttttaatcagattagattgcatatggttatatgaagagtaatttgtcagaaggaatttatcttttgtatccagagtcagtgttattttcgaaagcaatttctgcatttgatggaacttttaattattgcatttgtggtatgttcttcctcgtgtttgttttgaaatttgaatctggagtcagtgttttggttgatgcaatttgcatttgataagaatttatgatatattgcagtttagaaattgtttagtagtaataatgcttgtatacggacatacttgttttgtatgcttgtatgaaacgttgttttggtgcttgtatggatagagtaggctgctgaagttagtaaaatcacaataaacttggtgtgatgagagaatattagtcttataatacgctgtatgattcaattttccttataaccatggacccatgctttccatataaacctttcttctggatcctagttctggcattacacttttctacagttgatgtgtgtatctcatcacttgttttcagataaggatacggaatggtgtctaaatttatatttctgaatttttcttcacttgcaaatctgacctgttgttttgttcttcaaacatgaaggtaa

SEQ ID NO: 108396 - DNA, 489 bp, Aquilegia coerulea
  Intron number 1 from transcript AcoGoldSmith_v1.017552m (l ocus AcoGoldSmith_v1.017552m.g) derived from phytozome v7. 0 (chr-ID scaffold_1; pos 5976095 to 5976583 reverse stran d)
ccagagaccaaggatagcaaaagccctctgcacgcgttagtttatttgtagtcagactgacaaactttatggaagagctactaagaacagccatatacattacacatacgtatgttttgagtttgaaacacttatcagggtaaaaaggacctcgcccattatacctacaagcctaaagttttcagaatataattaagtgtcgctggaattatttgatcggtagcaaaatgttggctttttggttgtatactgcttttatttctctctttactcttgcgtactcacatttgaatctgaaagcaggtcttggatttggaattttgtttctacttgctgatagttcttcgttatacctgagcatgaaaaaaagaaagatcttgaaactgaaagaaaaattctttttttcagcaaaatggtggcttactgttaaaacaacagatttctttactcgaaggaggtgcagaatcaccaaagatttttacaacaaag

SEQ ID NO: 108397 - DNA, 881 bp, Aquilegia coerulea
  Intron number 3 from transcript AcoGoldSmith_v1.009799m (l ocus AcoGoldSmith_v1.009799m.g) derived from phytozome v7. 0 (chr-ID scaffold_1; pos 1623191 to 1624071)
taaccaggaaattcaaagttcatttcaagttgaaggtaatgtgaagatatcctgattactctctctctctctctctctctctctctctctctctctctcaaatagaatgaaattcattctgagaaaaggagttttgtatttgatctgtatttgtatttctcctggactttgaagtaatgcaaaaaagaagagacctctctctttccaattccaaatatctgaatttttatttttgagaagttctttatttgatctgtatatgtttttcttctagaatttgtagtaatgcaaaagaaaagacttctctctctacctaattatacggatttcaatttgattgaagataacttgaatttgattatttgttcatcgcctatctcctattttgatcttgttttgtcagataagtgttcgtcaaatgtgttcttaatgcttcatttcatgatttgtcaatgctctgtttcataaatcaagaatccttttatcttttcgggggaaaaaaaatcatttcatcgaatcagtattcagttctactatagaaattatgttattctggagaattaaaagtggtgatgattgagttgaatttaataacacaatttcatttcatatatttcagattctcttctctctgcttctatcgaactctcaccttcttcccattaaaaaacgcactcttacctaatagattattttaaaattttcgttactctcaatcaataatgagcatttcgtagcttttgtttctggtttgaatttggttttttagtagttaaagtctaaatcaattatgaatgttctttattcagattgcaaactctagttaagtaaataactaaccatggttacattattttcttggtgatacccatagattaata

SEQ ID NO: 108398 - DNA, 698 bp, Aquilegia coerulea
  Intron number 1 from transcript AcoGoldSmith_v1.025223m (l ocus AcoGoldSmith_v1.025223m.g) derived from phytozome v7. 0 (chr-ID scaffold_54; pos 1123114 to 1123811 reverse stra nd)
tttcttgggttcttcctcctgatcttacaattaaggttagtttttttttcaattttgttcattttagaagattctcgaatgtgcagtttatagatctagctgaatttttttggtaattgggaattttagattttagattgaattggtatggaatttggtagaagagctgtgtaattgatgaattttgagaaaaaataatgtatgattatttatttatttattatttgatagattacgatgatgtttgattagtggataatgattaagagtgggatttcattgattttgagtggttagtgacttagtgcaggattgatgtgacaagaatacgaaatttgtgaatgtgaattgaccagcatttttttctcaaaatctaaaatagaagaagaaaaatctttatactgtgtttccattgttcagaataggacatgttgtttactttagttgccagagacttaggtgtgaacctgcctacaggattcttttacttgccaaattgttacactaatgttgataatcttcttttgttttatctctgtcgagtcaaatgtgaactagcatcagtatgatttcattttacttttttctcttcttctggtattttagtgttgatatcttcaactttgggttttcaatgtctgattggtaaagtatttgtatatttattaattgtgagcattgatgtgtagatattttcc

SEQ ID NO: 108399 - DNA, 778 bp, Aquilegia coerulea
  Intron number 2 from transcript AcoGoldSmith_v1.006917m (l ocus AcoGoldSmith_v1.006917m.g) derived from phytozome v7. 0 (chr-ID scaffold_1; pos 2600425 to 2601202 reverse stran d)
taacatatcgcatacctaaggcccatattacagaggttcgtcgtacgatattgttcccattttatttagcattttttaataatataaaattataccaaatgtagtgaagtcgcaaatattcggagattaatccaatttcaaagaataggatacttcatactacaccccatttggacacgaatttccgaatcaccaaacatccatcaccaatcacatctatcaacatctctctggaatcataatttttcagcttgaaataattgttccaagtgtttgcaatatttattgaatccaccaatgttggagtgcaaatttgttccacactctttaaaaagtgcggaacaatactctccaccaaatcagtccacgtaattgttttaaaaaaaaaaatttaatttttttttaaattataagtaagattaattagatatctggtggagagtgttgttcaattcaaattcatatttacccagcattttaaaatctatgatatcaccaaatatttgctataattgtagaagatttcaagggtttgttgtccccagcccacacaaaaaacatgtattctttttgttgcacctgttccctatctactttttttttcctccctagtcctacatagtttttttttttggtaatccctaactagctggttttaataattttacatgatcactaattcaaaattgtatataatttcttttgggtttacattgaagtacatgttggaaaattttgtacagattgacatagagaaaatagaggataaaagatttat

SEQ ID NO: 108400 - DNA, 595 bp, Aquilegia coerulea
  Intron number 2 from transcript AcoGoldSmith_v1.003601m (l ocus AcoGoldSmith_v1.003601m.g) derived from phytozome v7. 0 (chr-ID scaffold_30; pos 2264163 to 2264757)
aagaagcagtaagcaggcttacggagctaggaaaggtactctaacaaattaagctaataatatattcttctccatgtttttttcttcttgttatcttaatcaaaaggatctatattcatttttcttgtacagatgattttgttaactgttttgtattcgcatataataactctgtacacagttttttttccaaatactgggtgaattcttaagtttgatctaaaacaatacagttcagaaaaataagaaggttggtcttctgtctaactcccttcccttaattgtcaaggagaaagaaatggctcatgttgactatacagattcatacttggtaattttttggtattttgattaagggtaagatgccatatggataccaaggtgtgtacaagaagggtgcttcaagcaccagatgtttgttaaataagcatatcttctactcattacaaactactagtgtatcatgtcaatttttatctcgagtttctgcacagtccaaaaacatgttactgtcacaattttcagtctggatgagaatggtagctaaatttgtttaattaccataacatccagttttctttggtgaaggttagtg

SEQ ID NO: 108401 - DNA, 1012 bp, Aquilegia coerulea
  Intron number 1 from transcript AcoGoldSmith_v1.014059m (l ocus AcoGoldSmith_v1.014059m.g) derived from phytozome v7. 0 (chr-ID scaffold_81; pos 384507 to 385518 reverse strand )
ttctttaaggactcctctagatctatcaaaatcatgtaagttaagttgatgttcctgtcaaatttgtcaagttctttttggctaactgaacaagcatacattgtaaataaagtaatgtacaacacctatactagtagtagttgaagcagtggctgcatcattttgattgtagtgacaaccgtgttaagtataccagaactactataggacatttatttcttgttccatctatgtatcaaatttttcaaggttatgttcaaagcttgctattacaatccatgtaagattaagtggttcttctaacggcaatcccagagttgctggtattgcctctgtatgtagagcatttcctactcgttatgtggttaaaaggaggtaatcagcaccaccacatggcagaatgcatgggtatacatgactcagatgaatgcttggctacatgaccaccatataccagaatcagatgaatgcttgggtacacgagcatattgctctggaaaactaccttggaaaatttaatacagagatggaggagtctgtgtttaggattaattttgtagtggaggggctagccggtatccagaaatgttctaaacgctgagacaatactaaccactccgggattgcctttagcgtcaccattagtccttcacagttagtcttgaactatgaatcttatgtagcgcgcgttcaatagcgttctttgaccattaagattttgcatgcttagtaggacatagtttcagaccatgtttaggggtttaggttgttgatattttctcagattgccttggcataggtaccctgtttcttaagcgtgtctgtgatctccttcatacagtaaacctgttttggctctaacttcgcaattaactttcccactgcagtatgaactgttttctttttttgcaagttattaactaaacgaactcttaccgattccatatatttgatgtttcttgtatgtttgtttacaggtttaaccaaaatttggttaggtctttcttgacaa

SEQ ID NO: 108402 - DNA, 759 bp, Aquilegia coerulea
  Intron number 1 from transcript AcoGoldSmith_v1.008800m (l ocus AcoGoldSmith_v1.008800m.g) derived from phytozome v7. 0 (chr-ID scaffold_10; pos 940107 to 940865 reverse strand )
tcaactttggtgttattcttctgaagacattcaaggtacctaaaaattctttctaaatttgtttaattcagtttgtttatctctctgttaatgatgaaatatttgataattgggcatactcgcatttttcctttataagttgtggaaatgtaaagttttgattgaaatgtatgtgggtttgaagttagagaaataggaatacacttgtttcctcatttcatggaaagggaatgcattttactttaggttgggctcaaattgctggaaatgtgttataaatttatcgaagaacactttattttatagacatcatcaaatcatataatgtatggtggttttatgtacctcacggcaatcatttaacttttctctctaaatcatatttgtttaaccatctatatactcaaaggatgtatgtaatcagtggcggagccaggaaatcaatcttgcagggttgacccccacctgccccccatgtagctccgccctgtaatgaacttttacgatatggaaactatctcgaagaaatattatgtagcttacatttcatgattatgaactaagtacagtacaaaacaatcaattcgaattctttctgaatggtgttagaaataggcatgatttaagctagcaggtatactgttgtttacattgcttttttttaatgttttgcaatatgtgtattcatcttgtgctgaccagtaacttctatctttactcactactgtgaagctccagcagaagaatctgagacaaatt

SEQ ID NO: 108403 - DNA, 969 bp, Aquilegia coerulea
  Intron number 3 from transcript AcoGoldSmith_v1.008281m (l ocus AcoGoldSmith_v1.008281m.g) derived from phytozome v7. 0 (chr-ID scaffold_10; pos 1228002 to 1228970 reverse stra nd)
gcagccatttgcagcgcttcttggagatcttcccagtatgttgctatttcaatttctttatttgattaaaaaaattatctagttttaagatttgatacttgataaccccaccctgggggtttgcctgttttcatattgtggatttctatttcagagaaaaatgtgttataactaaacattccatctgtggtatatgcatttgtaattaaattatattgtatacattttacactttctgctgtgtgtcatttatctttatgaacaaaagtaactcaatcaataaaattacatgttcctcaaaacatattcatatagagtcctaattaaatacattgaagggcttgtctatgaagacaacaatagtgatgtaggagcaaccaaaccacagtctgcatcatttttctatgttatgcagttgaacactctgctggctacataaaagtaggatcttgggtaaccgtatgaaaattcttaggtcattgtttaataaaaatgtaaaattacaatcatttatgatttacctctctgaactatattatgtgttggaatgatgtttacaaagtgtgaaatcccaaataatagtttgttattgggctgaatggatgactaccaattcttgttggggttttcctctgtggttcagttatttttgccttttattttctccttgttggtcagtcaattatgccctttaatgacttatgtaggatgttctcatgtgttacatttatagtcctatcctgacaattctataacaaaacttattttttggcttcctcctgctttgggttcttcattgatgctttaatgtttattaaattttgcgcttttgtgcgtctctgttgattgttgtacattcatatcttccctgaatatttcatgcatgcttctctctatttatacatctagtaagatgctcattatactcaccttattttcattgctcttcttatcttatgataggcgttg

SEQ ID NO: 108404 - DNA, 961 bp, Aquilegia coerulea
  Intron number 1 from transcript AcoGoldSmith_v1.002053m (l ocus AcoGoldSmith_v1.002054m.g) derived from phytozome v7. 0 (chr-ID scaffold_37; pos 2343307 to 2344267)
ctatctatctatctctcactagtacgtacagtcaggtcaggtcagtcactagtacttgcttgttactcatttgttaccccctccctcagctccctccctcctaagtcctaacccttttttttttaattcaaatttcaaattgtggatgaggtatgaatatgaatatgatgcatttctagtcttatttaatacatcctcatcatttactacgtaatttcttatgttatgtatgatttatttatgttatgaacaaaggatatgataatttatttatttatttttggtcttattaagtgtggattgtggaggaggtatgtatgaattatgatgcatttctagttttatttgttttcaaattgtctttttttggtttctttaatagcattctacccttctacattattaaaaaacaaaagggttggaaaaaaaaaaaatatgcatatgggcatatgggcatatgggtgggtattcctctaatttagacttttaaaagcacatacaataatacaatatgtttttcttttcaaaaaggaaaaagcacatacaaatatacaatacaatatatattatgtttttcacttattaatggatactttcaagaaacctttatgtttcacctgcaactctgcaagctcatttcatcattcattcattcataaatgttgaaatggttctgaccttttatcattgaatactatcaactctgctagtactcaatagattgattgatacttgatagtcctctgtctctgatactccaatagtccaattttcatttcattcagcaagtttgaagtttgaacacatttactgtaataacaagttaagaaccaaaaaaagaagaaaaaacttgtctgcttgctgtcaagtgctgtgcatatacagtactcagtacactactgaagctaattaagttgccgttccttttgattttttacaaacagccaaacagttgcgtgca

SEQ ID NO: 108405 - DNA, 586 bp, Aquilegia coerulea
  Intron number 1 from transcript AcoGoldSmith_v1.026110m (l ocus AcoGoldSmith_v1.026110m.g) derived from phytozome v7. 0 (chr-ID scaffold_10; pos 1267021 to 1267606 reverse stra nd)
ttccaaaattcgggtcttcgaatggtaagaaagatctaagggcctgtttcatttgaagcctgtgatctttgatcgatacattctaccattttattatagaaaaatacattctaccatatggtcaggtcttaatatagaaaatggaattattgttatacccttttttttttcttgaatggaatttattttttccaagtttgtaacttaacactatgggccaactgctcaactagcacgatgccacgatgtgcacaaagtgactcagtaagtcagtagtgagcaataacggtgaattaacccttccatccgaaaagaatggcgtacatgagaagttactagttagtgtgttgcgtacataagaagcttgagcttttcttctttcaatttccctctataaattcattaccctaattcggaaaactctgaaccgtagtgcagaagaagagtcttttgatttgtgtgattgagtagttctgtacttctgtttttgttaccatggctcctcgaggactgttggcctctaagaagaagaagattgcaatgtcatcaagcaacaaattgcaagctgttggtccagacagaatta

SEQ ID NO: 108406 - DNA, 461 bp, Aquilegia coerulea
  Intron number 5 from transcript AcoGoldSmith_v1.015863m (l ocus AcoGoldSmith_v1.015863m.g) derived from phytozome v7. 0 (chr-ID scaffold_126; pos 410472 to 410932 reverse stran d)
ttcaggttaggcttcttttatgttaagtactaaatgacacttctaaaagaaagttcacatttgaattttggctacgtttatgcacacattcgtctggacaatttatctatgggtggtcattgcagcggaatcatattacattgtgttcactcctaaaatagcccacttgtatttcctacatatgtgtatgcttagcttaaatccctgagcagttgaatgtactctctcgtataaaatgctttcaataagttttgtctccacaatgaatctcagcttgattaggtagtccattatatgaagtttagcatgaatgttatggcagtatgccatccagattgctttgctttgctttttttttttccctttttcttttcaagtaagaatttggagtataaaactaagaatcattcggcaatgatgttacaggaaaggggttgcagtagatcgagtggttgggtttc

SEQ ID NO: 108407 - DNA, 831 bp, Aquilegia coerulea
  Intron number 2 from transcript AcoGoldSmith_v1.000080m (l ocus AcoGoldSmith_v1.000080m.g) derived from phytozome v7. 0 (chr-ID scaffold_7; pos 1646435 to 1647265 reverse stran d)
tacggagacagtacagctggggcgaaccaagattggtagttaccattcaatgatctagtattgtttttgttgtacagataatgtttatgtgcatgtgcacttatgtttgtaagatttttatttttttatttaacagctacgtatttatgggcaggtagtagagaagatttaccatctgcgaatgacgattataaggaggatagcacagatcattcaaagagttcacatattaattactctgacagttatttggagaagtatatggacccctatggatctggtatgaagtctgacgcaattcacaacttacagacgcacaatgatagcaagttcggcgtagaaggtactgcacatatatctcaatcacttgtatgtagcaatagcataattatgtaatatattcaaaccatgccttatgcatatatgactattcttgcctgtgtataacctttgaaaaacgaagcccattaaatgaacacaattattatttgttaatcactttatttttgattatctgaaaggaacttctcacaaaatgattggaggtttaacctcattttattgacttggtaaataatggtattatcataaatgaccccactggggttctaagtttttcttaccatcaacacagtggatgttcatggtcatttagtttgaaaactaggattgtgcatatatcatgaacatagtggtgatttacaaatataataaagcacggtaccatcttgagtttttaatctaattgtgattgttagcatttttcttcctttcatttctgatgttcattgtgcagtggcgaggtcagatacagcttcccataatagggct

SEQ ID NO: 108408 - DNA, 628 bp, Aquilegia coerulea
  Intron number 1 from transcript AcoGoldSmith_v1.009943m (l ocus AcoGoldSmith_v1.009943m.g) derived from phytozome v7. 0 (chr-ID scaffold_6; pos 7435545 to 7436172 reverse stran d)
agctagaaaaggtgaattttttttttgaattggttaattatgaatgattgtttttttccaatttagggaattttgatgttacattgtagctgtttatattgatttgctttgttttttttttttttagttaaaaatgagagttttttttcttctttgtttgatgttgttagctttatcaagtagttaatttcaatgtcggcttttgtttatcttaatctgtaataaaaaaaaggttttttgtttgtttgtggggttgttcaatttgcttgatttgttgaaagaagttctgtttcacatgtatctaattcagtcacgagtttaagacaagggaagaatggggttaatgattattgggtttggttttgctctagagtttgataattgcacttcattccatatcaattctacaagtacatgtttaaagagttattgcacccacaacaagtaatggtgctgagtgttaaactgttaaagtacagcctaatagctagaaatcattttcgttaaaattgaagaggagctcaatgctgtgtataacgtgaaactgcattttcttatgtgtattcctttaccgtaatgcaactgtgtattatttatactctgatgtgttatgctgatcaacaggtca

SEQ ID NO: 108409 - DNA, 933 bp, Aquilegia coerulea
  Intron number 1 from transcript AcoGoldSmith_v1.026359m (l ocus AcoGoldSmith_v1.026359m.g) derived from phytozome v7. 0 (chr-ID scaffold_46; pos 903465 to 904397)
agagagagagagagagagagagagattgttttaggaaatttcatatagatttcaatatcacttaatgcgagtaacattgtaggataaaaaactgaaagacaaacttctgaaacataaagtggcctattggattttataaacctcaatgtatggttaaaaactacattatggacatcggagttactagacccctttatttcggaataaaggagattaaggtttatgagttttcaagttgccaacttatatttttctgggctagaagtaatcacaacttaaaaaaatagttttgtgccatagaaacaactttgctatggttaacataaaatttcttcattttgccttttttatacttttctccagatattgactgaaggtggtcaatgttcttccttccactcactaagcaggtttgaaaacatgccaaaatgatgttcctcttttcttcacgaaaaccttagcaaatcgtgtccatattctagattatggacacatttcgtatccattgatataaacatccattactcccctcagcactagtgtttaacttgagaacccatgacgagagggtttactgctttgatacgatattagtaagccactttacaccaaaaccctgagctgatgcagatcaaacggattgcggatctaagaaggaccaaacggccataccacaataccctgagtgcagaaacatacactacgacaaatagcataatagtaagatttaatattccaaaaactatatatgaaattggaagacattttgtacgatttggcaaagtttcagtaggatagaatattcaaaacaaatatgcaattggaagatatttattttcgttgtacagatttgcaaagtttttatgtttaaccctaacatttgtataatatattttaggtgtctctactctcaagaatacatcatagaaacct

SEQ ID NO: 108410 - DNA, 571 bp, Aquilegia coerulea
  Intron number 1 from transcript AcoGoldSmith_v1.002223m (l ocus AcoGoldSmith_v1.002223m.g) derived from phytozome v7. 0 (chr-ID scaffold_9; pos 2241978 to 2242548 reverse stran d)
agaaggagaagatcatcgaaattgcagagaaaacggtacggattcgaaaacctcaaatcaatcttcttctcataatgtctcacacgatcacaccacactctacatatcattagtttcttttcgtggtcaatctttgttttctgagctttgagtttttgtgaatttagggttagggttcttgtttattgctttaattttgatgtcgttattattcttgttacgacatcagaatttctaattttgttgattttagatattattatgctttaatacgtagattggtatagcaattggccaattgctcagcttattagcttaaaaaaagttacaaacattttcgacattttcgtttctaacaatggtcagtggtatgccttgaactgagttgaacctcctgaacttcaatttttagttatcaataccaattgaattcccttacctccattagtttaaactgatatgttgcttttgttataatgttgagtcttttacgtaatatgtgtcagtgtaactgtactatatgcattgtaataattgtagagatggcgatcatttcaggtgcttggtttcc

SEQ ID NO: 108411 - DNA, 710 bp, Aquilegia coerulea
  Intron number 1 from transcript AcoGoldSmith_v1.001656m (l ocus AcoGoldSmith_v1.001656m.g) derived from phytozome v7. 0 (chr-ID scaffold_10; pos 1080820 to 1081529)
atcaagagttccttttctcattcaccttcaacaaggtacaagtagttttctttcactttcttcaatcaatttctcctctaaatgtccactttaatcatatattgttttgttgtttttacatcaagatctctcttttattgctcatttctacttgtggggtttctttttctttggtttttttttttagcatataaacttgactgttcaacttattttgaagtgattcaacaagttgcaaagagtgaaatgtagttttttgctccttgggactcttttttttttgttcttttgattcttatttctctgtgttttacacacatatacacattgagaagttggtttaataaggtaaaagtttattagatcttaaatacccatttctctattagtcctatagaatgaagtcatgaacaaatctgcaatacccacttttttcatttggtgtgtttttgttcttagaatgaagttaaatctattttggtgttttttttatttaatctgtaatggatcttaagaatgagtaaacttatctggggtttctcaaactaataaatcctgtttttttgtccctattgaattgtttaggtggggtttacaggttgatgtacctatttatttctgtcgatttttgctcaatagatctttcctaaggtaccctgttgtttgcttccttcctctgaattacttatgtgggttttgtaggtgggaga

SEQ ID NO: 108412 - DNA, 530 bp, Aquilegia coerulea
  Intron number 3 from transcript AcoGoldSmith_v1.001656m (l ocus AcoGoldSmith_v1.001656m.g) derived from phytozome v7. 0 (chr-ID scaffold_10; pos 1082442 to 1082971)
aatcatatttcattcaggctggggtgagtaaatctttgaaccagttcttttacttaacagtgtactccactttgtactcatacacatttctgttactaattagtgcgtctatactttgtcctcacagtttttgttttggatcagtattgcataatgattttaaaattgatttgtcctgctttttggtgaaattcacatatgccggttccagttcccatcatgctggtctgaaaatcaaaccaccatatccaaaaactttatcagtgttctggttctgttttcagttattttatggttattccccaaaaatcaatgagtgagagctagagttttggttatgttctggttaaaaactaaaatgagtgactctattgacacccattgcctagctagtgatgtgcatacccaatagaattctaatttaatccttatattattacttactataatgcaaaagaacgaggaagaattcatctatgtttgtatatccattgcacaggttagaactatattggatataggttgtggtt

SEQ ID NO: 108413 - DNA, 878 bp, Aquilegia coerulea
  Intron number 1 from transcript AcoGoldSmith_v1.017224m (l ocus AcoGoldSmith_v1.017224m.g) derived from phytozome v7. 0 (chr-ID scaffold_9; pos 5071267 to 5072144 reverse stran d)
tccgtgttgtaattcagggtttggagaagaagttggtaggttatcttctctttgtattcttttctatataatgaaattgtttgtagttttagactatattgttcattagagatattgtaaaacaaaaagaactctgctttatgaaaggactgcatgtagatcgatataggtttccaacagaaaggaaaaaacatttcaacaagatagatataaacaggaaaaaacatatttccagaccaagatgtagataatctgtaagcaatagttgtattatagggtgaaaatgtgaaatcaggttagaatgcaaataggataataataagtatgatattgcagatgttgtagatatggacttgtgtgtgttacttttgttagtagacgggaaatgtttatctttaggtgaaactggctctggaatttggaattcgtataatgttgtcgccattttctattatgtagttgaaaatattacagaccgagctttacttcccgtgtcaatcacttaaaaaaataggtattagcacttgctataggcaaagaaggtgaattgtttctcttaaagtttaagatccaaattattaaagatgtaatctcaatcacacagacaaacatccacatgcacatttgtttcccttgtgtattcatgcagatggttatgttattctgtaaaatgttcttggctgtaagatttgcgttcacagtcttaactcgtgttgcttctttgatttaggtaaatcgccatttatttttagttttctgatcaattaatggatcatttaacactcggttttccttcccccttctgctcttccttaatgcttattaactctctctactttgcagctgattccacaaaattttgcaaggcagattgcaga

SEQ ID NO: 108414 - DNA, 609 bp, Aquilegia coerulea
  Intron number 2 from transcript AcoGoldSmith_v1.014243m (l ocus AcoGoldSmith_v1.014243m.g) derived from phytozome v7. 0 (chr-ID scaffold_108; pos 50113 to 50721)
cctccattagctttacacaaattgcatcaacacttgtgagttagtgctgaacttggttgttaaccctatactaatactaacatagttagagctaatttattagcaaatacagattcattatttttgtgtgcttactatacttatgaacagatcaccaacacactgcactgaatctgttcttgatggttttaagaatggaagaaaacgtggaaggtgatatacttatgttttctaagttagttatagacttgcaaaatttgttagatatctttggtgaacttatttgagttgcaatcttaatccatatagatatggtgacttcaatactgcgtggaagagattttacatgacaaggtggcctaagactggcaggcagattcatcctgtggatcacttgacagataaacaggtagtagaaattgaacccgagagccatgtttctgactggcatcagatgtactgggaagcacatttacaagagtaagcaacttgtttaaatgaggaaattgatcgtaatcataaagttctgatgtgactgaagcatatatttatagttttttgttctttgtaacagttgcttggataaagcagctgaggaagcacagctcc

SEQ ID NO: 108415 - DNA, 646 bp, Aquilegia coerulea
  Intron number 3 from transcript AcoGoldSmith_v1.014243m (l ocus AcoGoldSmith_v1.014243m.g) derived from phytozome v7. 0 (chr-ID scaffold_108; pos 50726 to 51371)
ctttgatagacgtattagtgaaataaaaattccaggtaaaggtttaccaaattcgggtactctactttgttatgtgatattactatgatattagtgaatctgcgtaaagtatgttgcagctttccagcaaacaaaaacaattaacattaagagtgctaaaatccagaataatatagtccaaaacataattttatatgttgcaaagaagttcaccgtcaatttcacattctcgaggaagccaaaagtgctcgaaaaccaacattcactctataagataataaagttttcactcagattgtcctaaaataaaagtgacaatccaagatgactactctagtagagtcgttttgatatcccttgttaggattttacccaaagctgtacatcttacagaagaaaaaaatttggaggggtttttccatccaaattatagaaggaagcattagtacttgcctacgatctggtactaccttgcatatccaatatccttattacatttcatgtactccttataagtgcagtttcgttgttattgagcaaaaacaataatgtggctctttaggttttcaagcggtagattttgtgttacatgtgttgaagtaaagaaacctgattactcttcattttgactactacagacgatatt

SEQ ID NO: 108416 - DNA, 563 bp, Aquilegia coerulea
  Intron number 2 from transcript AcoGoldSmith_v1.012040m (l ocus AcoGoldSmith_v1.012040m.g) derived from phytozome v7. 0 (chr-ID scaffold_21; pos 3463647 to 3464209)
cacagaactgttggtgataagaacgattataactggtaatgtagtgtgtgaagttattttgatttgaatgtggtttgatatgtatgattcaagtctgattgataaattgattcatggataaaagtataccaagtatgaaggcaagttgaaacaaattcctgcaattgatagacgcgttttcccttattgtgatagtaattgttagagacttcattgtacatttcaaagtggttaagtacttagaaagtatgaagtatgaactcccttgggaaagcaattgaaaataaagtttctgttattactgagtctttcaattacttcagtgcactttctgacccccttatcgcccttccaatcaaaattaagtttgtatctgccaattgagagaacagttttgcttgttttttgttttccagagttgttttctgcgattatttgaattttggatataatgatttctgttaatcaagtttgtaaaccatatgcatcttttttttggtatttagcaatgttcttttcttgatgtaggcttttaacaccatctggtgctccttttatttctc

SEQ ID NO: 108417 - DNA, 1007 bp, Aquilegia coerulea
  Intron number 1 from transcript AcoGoldSmith_v1.025685m (l ocus AcoGoldSmith_v1.025685m.g) derived from phytozome v7. 0 (chr-ID scaffold_109; pos 393141 to 394147)
tcacagacaggtgagtgatccatcactaaattgaagtgatacagtagctatatattcaatctgtctgtggagtatttcttttttctggattcattaatgataatttcaaataatggatctatttagagtagattggacaagcgtttttgcttccatgactttcaagacaactcctatccaagcgtgaacctcgaacagtgatattttgatcgatccatcaccattactggatgtattaacctatttctagattaatgcatcaacagggtcaggtcgttatggagacttgaccaaatgggggtgtttgagatcggggtggctgcacctcgttgagatcgagattgcctacgtactctagctcgggggaattgaacttagagatcaagccatcgtagttctgtttatatagaagatagaagggcgtggatcgtggatcttgcagattctccgccatcataatgaagaataaatgagtaacgcgcgcggatcatccctgtgaattaattatgtaactgatgagaatattctgtgcattgaatgagagcacgtgtgtatagcaggtcgctgctcgttgtgtggtcaggtcgcttcgctagcaggtagagaccgtggcgacctgatggatggatgactgtgccacgtggctgcttttgattggtcgaagtatgtagtacccctacactggatcacgagctagtaagtaccaaaggcaataatatgaccaaccatcaataatactgaaagtagtaagataatactaccaaataggccaccacagaaagtaaagcttatagtgtatactttgcattgtacaattcttttgatcattttgaaccacaaacaacatagaaaagagtttggagttttatatatataacaaaaaatattcaatctgagagtagtgagatatactatggaaagatcaaagcatcacaccttcacatctgcaatgttatttgtgttttatacttgttttcatcttcttgttctactagaattcccaagaa

SEQ ID NO: 108418 - DNA, 669 bp, Aquilegia coerulea
  Intron number 1 from transcript AcoGoldSmith_v1.000199m (l ocus AcoGoldSmith_v1.000199m.g) derived from phytozome v7. 0 (chr-ID scaffold_12; pos 3818530 to 3819198 reverse stra nd)
gagcaaggaaccttctaactcttgttggtatagtggtgagcttttctcttttgattttgtccatccagttgcaaaagtagcatttggtggcttgcttttgtattgttattcgtattttcaaatgttttgatggacatatgtttccttgttaaatattgtatgctagcatctaatgtttagctattctttgcttgcttcaggttttatttctttccctcccctccaccccaaatgtaaaatattgttgatctcaaataagtggatgataggacttggtagcatctggtgtatagaaagtttatgcgctgctttcagattattggcataactggaagccctgctgattgcttatgacttttgtatggaataaatggtattttcggtataccagctactgagcccagccctataaataaatcatggaaaaagttgtatgattgactgtgcctgtcttgtcctgcatgggccctataataccagataaaaacctgtgctaaaaatgaatgtgagatatgatacatatctcaaatcgtgatatccatatagaacaatgtggtgcagccatgtttttagtatagttatccatatgttgattagattcttgatactaaagtcagtgctttatttcttgtaggtgttgcgaactgctttaagcaataggctggcgaa

SEQ ID NO: 108419 - DNA, 406 bp, Aquilegia coerulea
  Intron number 1 from transcript AcoGoldSmith_v1.008048m (l ocus AcoGoldSmith_v1.008048m.g) derived from phytozome v7. 0 (chr-ID scaffold_27; pos 2595067 to 2595472 reverse stra nd)
gaaaaacacaaccaattgaccaaaggtgaaacaacaatgtctttcgttaagatttagatctgaaaacgtttgtgttttcgtaatcttaacgttttcagtttaagtacttgtgtttttaatcatatttgcttcaatttcaagtttcaatcaattcgtttggtgtgtttttttttgggattatttaaagctttgatcttcataacattttcttattcatcaatcaacaaaaagcctttaaacctttttgtttgcttgtttattacttcattgaggtttgtagtttgtttatgatttgagcctacattgttgatttaaagattaaaattttgattttgagatttattggagttgtttgaggactgattgattgaattggggaattatgacaggtaacaagatataaaca

SEQ ID NO: 108420 - DNA, 529 bp, Aquilegia coerulea
  Intron number 1 from transcript AcoGoldSmith_v1.007759m (l ocus AcoGoldSmith_v1.007759m.g) derived from phytozome v7. 0 (chr-ID scaffold_9; pos 2138033 to 2138561)
ctctctctcatcagtcatcagacataagtaggtaggtaagttgttctttcttctgacctttttgaaacaattactttaatcattttattctaaaaatgaaattgggattttgaaattcgtgtattgaatatgcaaaaattgatacttattttgactttaaattgttaacgaatgttcatgttttttttttttttttttttcattttataatttataatgcatagtggtagactggtaagttatagcttttagtttgttatttgttattccattaatgaaagtgagaagagaattctatatctatggaggtttttattttatcaaagtatggattttgtttaatttttggatagaaagctaaaaaaataataaaaatttgtggtcacttttgtgttaatcatgatatgctttaatttttctgaaaattttcgattttgggcttatcaattgttgctgtttagttttgttgtacattaatttggatttgtgtgcaggttttaactactgtcttgcggtatttggaaccttg

SEQ ID NO: 108421 - DNA, 762 bp, Aquilegia coerulea
  Intron number 2 from transcript AcoGoldSmith_v1.027346m (l ocus AcoGoldSmith_v1.027346m.g) derived from phytozome v7. 0 (chr-ID scaffold_12; pos 3906028 to 3906789 reverse stra nd)
gctgcttagacaacaaggtttcagtgtttcccaaggtatgattttgacaaattcaatcgtaacatacaaattagtcgtgcatttccaaatcaaatgtgcaaacccaatgtggactattgtattgaagaataatataagatcattttcaaacgcaatggtgttcatatcaatattgtaaaatacaggcatacaatgaaaaaaaaaactaataggctagtagatcgaaaatatttgtaaatgttcaaaaactcatctatcaacctggaactcaatcatatcttcatgagtatactcggaaaaaaaaaaatgaagtgtacaaaatgtacaaagggagagctaatgactccggttacaaagctcagttcaacctaagtaagcatactctgttagtctgttatttacaaagcagtttaagattaaatagattagagtagatacagatccactattagagatttacttaacttatgattttattttattttttataacattataatttaagattattattattttaaattaagatcaagtagagtagataaagataaagggcaagtgcactttaaagtatataaactacacagcaattttttttaaaatacatattcattggaactaaacctgtattagaaattcaaagttaaaagtccattgtatggttcctaacatatgatttacaatccattacgagtattattttttattttattttttttatattttattttttgtatttaggtgctacactttattttgcag

SEQ ID NO: 108422 - DNA, 397 bp, Aquilegia coerulea
  Intron number 1 from transcript AcoGoldSmith_v1.019353m (l ocus AcoGoldSmith_v1.019353m.g) derived from phytozome v7. 0 (chr-ID scaffold_30; pos 2349068 to 2349464)
gggttagctctctgtctttttttttttttttttttgttggggggggtgggggggctcttgttattcttaacatgtactggactggagtcgggatttttattttatgttaccatagtatcttgttttgtgtgactatgtgtcaatgagagtctagattaatttgggaactggaagcttattctaggagtgcaagttttcgagggagccccttgatctctgattgagacatgagtttcaattcaaaactgattttggagaggaatggactgggaaatcctgctccacagactgttatagcaaaaaaggactgagatcggcaactaatagtttctttttgttaatattctatttctcttcatcttcattaattttttttttgtttccagtattactacga

SEQ ID NO: 108423 - DNA, 752 bp, Aquilegia coerulea
  Intron number 1 from transcript AcoGoldSmith_v1.008390m (l ocus AcoGoldSmith_v1.008390m.g) derived from phytozome v7. 0 (chr-ID scaffold_49; pos 1292706 to 1293457 reverse stra nd)
attaagaaagatccttctaacgctactctctacaggtttctttctttgattcaacttttcctccatactgtattaaattttcaatttttttttttttttgtccatttccattgcttttaactactttaatgaagttgtctgagactcagaagagaagagaagagatgagatgaggtggggttgcgctaatttaccaacaacttccattaatgaatgaatggcataattagcatactactgcaatactttttctacaactggttggtacttgatactacttatgtaaggtagatagaataacggaaatacattaatttttaaaatcatcactatgaatgcccagataagtactgtacaaatatcatcactcatgacaccccgtcacaaattaggtacagtatttatttcaacctgtatgtactgcctgcagaaattgcaattgttggcaactacgtttagctgttttactctaggtttattttcttaatacatatttatgtatatgtaacaatgcactacttttaattccactaagatttataaggagttgaacaaggtgttgttaatttattagttacttttggtaaatataaaagtggagcaatagaatagtatcatcttccataacagaatttatctacttaaatctgtgtcgattgtatcttttaccatgcttttcttatgttccattttcttgaaatctgttgtcattgacagcaaccgagctgctgcatttctgaacctggtaaagc

SEQ ID NO: 108424 - DNA, 689 bp, Aquilegia coerulea
  Intron number 1 from transcript AcoGoldSmith_v1.002310m (l ocus AcoGoldSmith_v1.002310m.g) derived from phytozome v7. 0 (chr-ID scaffold_6; pos 8643599 to 8644287)
tccactctgaatctcagttcttcacacacacaaaggtttgttttctcttcttttcatcagcactctttgcttattctattcattaccatttgtttactttcacttgttttgttccttattgtgtttattatacctgtttgttcatttatttgttttgcacttttttttttctcaatttcattgattagtttcacttaaatttgtacttcttgtgatgattattatactgtcagtttatcaacttccatttgtgtttataagcaatggtttcccctatctacaaggatcttatatgttgttgaagtcgatattttaagttggtctcttatatgttgttgaagtcgatattttaagttggtctgtagtctttcgattgatgatattaattttagtgttttcttgtttgttcttgtaattttgttattccaatttccaagtatatgatttggctctaagttttcttcgggagagtattcttcttatgtaagagatattatgagatgatctaataagctccaagtaaaaattgctgcaaaaattttacctggtttggtgccaaaagttcagaaattttactacacccagcatttgattgtttgaatcttgagtgcaggattcaatttgtgtgacatacacatttgttgcagtctttcttacatctttttctggttcaaatgcaggtctatttc

SEQ ID NO: 108425 - DNA, 773 bp, Aquilegia coerulea
  Intron number 1 from transcript AcoGoldSmith_v1.025940m (l ocus AcoGoldSmith_v1.025940m.g) derived from phytozome v7. 0 (chr-ID scaffold_9; pos 4894299 to 4895071 reverse stran d)
ccaaagttaacataagagttcagacaactggtattgtgctcttaattttccattaacattttagttcttttctgtgatgttcatctggagctctgtcttaaaaagtttatagtattttcttttattcttctttttcttgaaagtagtaggcttgagtgtgtctgtttatgatttccctgtttgcattttgaatgatgggaaaatagtgcatagaaaatttgtaaacacaaggagacatatatgtgttgttttaagaaaaaaaaaaaaaacatattcgagagacattgttcctttggttgcatggaggtagaagttgtcctggactatctcacatttgacttctgttttctttttcccaactatctttcatatgcacctgattgctaagaagaactttgatgaagcttaatgtattataacagtaagttatttaggctttagcctatgtgttctgtcgattcactgatatcataaaaagattaaaactgtttatcgattaatcttgaattgttaaattagtggttcagccaactaaccgtgatcaacatccttgacatattcgaagcacttgtcttcactccaacgtatgtccttatgctactctaaaaacccaagatggttgtttacactccaacttgtcttcacctcaacattcgcacatcataccttctgcagtctacacttggtttctgtcgagacctcccattaacatggttgtttattccttgttgtttataggtgatccagcaaacgaggtatttaaagacgcgctg

SEQ ID NO: 108426 - DNA, 770 bp, Aquilegia coerulea
  Intron number 1 from transcript AcoGoldSmith_v1.015603m (l ocus AcoGoldSmith_v1.015603m.g) derived from phytozome v7. 0 (chr-ID scaffold_37; pos 987782 to 988551 reverse strand )
ctcaaaggcagcactttcacgctcgcacacgaaccgtttacaccaaatttggattatgggaggtaccttaaagtgctaaacttaatacaaagaagagatttcccttttgtggatctaagttacatatttttatgatctgtttactgaaaatgtttctaggacgacgattgtgataggctaaaagctttggttatttgatttttcgagcacacttacaaaaacttcttcttataggttgacaaaatcatagaggctatggaatctcggaacttgatcaatagaagaacagatattttctccaaatgtgctatattcgaggtaagtataaattatgtagagatcatttggaagtcctagaaaaagatgactggctgactgccacaatttacattatggttattatgatttatgagtatgagatagtttatacatatgtgttttcatcttgggacaacaattctttttacttggttgtatgtaaatgggaaggatgatatgcatgttttcgtcaagtttctctgtacttattgaacggaaaaaaatataatatgatagtagttatcaatgcattcttggttttcagattagtatattgtacattttttctatacatgggaagagtgttatcaatgccatttcttcttgcatgctatttagaaacctgggcttcttaatgagccctatggtgactaagaagaattgcataattaatcaatatgatacttttctcaaggaaaactattgttgaaaatttgtagaacaacaagaac

SEQ ID NO: 108427 - DNA, 630 bp, Aquilegia coerulea
  Intron number 3 from transcript AcoGoldSmith_v1.011500m (l ocus AcoGoldSmith_v1.011500m.g) derived from phytozome v7. 0 (chr-ID scaffold_18; pos 4436886 to 4437515)
agtattgttttgcacatcttcttctggatagctaggtaaggatactctcttcattatcttcccgtgttagttgttctatattatttcttgaacagattagggaagtgaatattcaaatttttatgattcttttcaatccattgcatttggatttgaatccttatagtaccttgatgcatgggccttatgaacttgtaacatcaagttgtaagcgacccagtttatgttaatgctcgcttattctcgttcccacacacatattcctttttctttatacttatttcccgttagattttgagccagaaatgtattggcctcttctttatttagttccttcttttatctggacaactgattgatttgaacatttttttcattacctaagaactcgtcacagctttctgtttgtttttatcttaagctgattgtatgatggctttctgtttgttttgagggattcctcatttatctcttgctgcccttttcagtgtcttaaacttttgcatcgttatatctgtatggatcgtgtccaagaaatgtatatttggtttttgcatttgtatatgtgctccttgctaaaatgtcttcatgtgcttgtaatgtagcatttgtactgtactgggaggagga

SEQ ID NO: 108428 - DNA, 511 bp, Aquilegia coerulea
  Intron number 1 from transcript AcoGoldSmith_v1.022090m (l ocus AcoGoldSmith_v1.022090m.g) derived from phytozome v7. 0 (chr-ID scaffold_49; pos 1733978 to 1734488)
gacatacaatcaggtttgttttcaatattttttttattgtgtttttaaacactgattgtagaatacacatttcaattacttatgtaggtctgatcagtgcactgaaccgtattatttggtattcaatttgatagattaagatggctgttttttttttaaatattttgtttaagctgaaatggtgggaagatgcattgtttaatataaatttaaaattcacagataagggtttggttgatgtagtaatctgggtttaagtgacaatgccatggaaatgtacttaaaatattttcggtttgttaaccttcacataaaaatatttttagcatgcgttgtgcgagtaatgtaggcaaattgctacaacagtaagaaaactagttcatactggatagggactgaatgtataagatgatgcattttggacattctatttgagtttccacctaacaatattgattaattgtctcaataatcaggtgggcaaactggaattttcatttaggctttgacg

SEQ ID NO: 108429 - DNA, 855 bp, Aquilegia coerulea
  Intron number 1 from transcript AcoGoldSmith_v1.019574m (l ocus AcoGoldSmith_v1.019574m.g) derived from phytozome v7. 0 (chr-ID scaffold_6; pos 4091970 to 4092824)
atattggtaaactggaagcatcatacagcttgacggtattctcaattttcacataatattctaggttagacaagcacttcgatattcagtagtgttgagcatgttatttaggtttgagatgattatagttttaaatattcatagtggaatgttgttcatgtagataagtcataagtttgctaggaatctgattcctttctattgcatggaacacattttttgattggttaaagttaagaataatattgagaacgaactatgtgacttttatatgaattttctgtattatgcttgactatgcattgttttataaaagtactattgtacataatatttgaatgtctggaatattttgtaaacaaccaaaacttctgatttataagcatgattgtgaaaaatattgggggcaatgataaacagatcctacatgtaccctttatattcagaaagttgttggttcactgtcttttgctaactttggtaccttattgaataatgtataaccttgtgatttcactataaagagctctgctctactatagatttgttacaggggaaaaaatcaagtctagttaaggtttaaaggttgtatttttgcattatctgcacgtttcggtccggcctactcatgtatgagggtgcttttattctttgtaaagtagaacctttggctcctctgtgtataatcttcacctaataagataatatttttgcacacattttgaactacagttatcttatgcattaaaagatgcatcctagtattttttttttaacatcaatagtccacgataatttcctaaatttttcacatttgaatttttgtagtttgattgcacaagaggtgttaccctc

SEQ ID NO: 108430 - DNA, 427 bp, Aquilegia coerulea
  Intron number 1 from transcript AcoGoldSmith_v1.011579m (l ocus AcoGoldSmith_v1.011579m.g) derived from phytozome v7. 0 (chr-ID scaffold_1; pos 3444745 to 3445171 reverse stran d)
gtagtggtagtggtggatcttcaaaaactaaacaagtaggcttattttttcttcttctcaacagttcaatttctacgttgattttccttatttagatgatttgggtgataattattctatgtcttctataaaatcagaggtgcccatctctcaaattttactgaatttcactttttggttcatcgatttttcataattaattcatttgggtatttcagggtttttttttttttttttttttttacaattgcgtgatttttatactgattttatgatttccaattgttttggtttttgatattgaaaaaaaaaaaaaaaaaaattatatttgttggttaatctgatttaatagaatgtctatgtaaatttttgtgtttatttttggaatgaaggtgaaagcgaaaacatcatcaagttcctccaaaac

SEQ ID NO: 108431 - DNA, 717 bp, Aquilegia coerulea
  Intron number 1 from transcript AcoGoldSmith_v1.014166m (l ocus AcoGoldSmith_v1.014166m.g) derived from phytozome v7. 0 (chr-ID scaffold_49; pos 67151 to 67867)
aaatagctatagcatctgaatttgctgacagtaagtttcttgcatatctatccttctttatctatgaatatgtgttgtggtatcgttcagttctcgcaaccccaagtgaggcaagagatactcttctgcttgtcttattgcctgtagcagggcattgaaaagttaacatccgcagtcttattactttgttgtgccaaatggatatgggagatgtgagtatattatgtcatttgattgacaaatggaattacactatggttgtcaagtgagattaaccatggtatccttcatacagtaggatatcattatggttctcaagtgaaattactttcttgctctagggttgttggacttctgaaccaaatgatttcctttgatgtcaattcaactcactctgaattacgaaatgaatcaccccaaccatcccccaagtctgaagcaattttctcttataaaaattaaaagaattttaaaaaaataaaaagtatagtcaatcccaactggacagtgcggataaatgatgtacaccacagtaggaacatagggctactgtaaaatagtttcagacttctcattgttctgcttgtaagtaattaattatctggcgaatatctcattgttgtacttttggatgcaccttcaattggattgttaaaggttattggcttactctctagcacatttgattggcagtgccagcacttcgagggaaggatt

SEQ ID NO: 108432 - DNA, 539 bp, Aquilegia coerulea
  Intron number 1 from transcript AcoGoldSmith_v1.007891m (l ocus AcoGoldSmith_v1.007891m.g) derived from phytozome v7. 0 (chr-ID scaffold_9; pos 3355138 to 3355676)
ttcttcttcttcttctctggttcgtctcaacataggtaagagaaatagttgtaattgtctttaaacttcagttttcttcaaatctgtgtcttcttgtgaatttgtgaatgaagttaaaagtgtttgatctgtgctcgtgctaaatcttactttaaacttttcttaattaagagaattcgagaaagttgtagttttctcgatttagattcattaataaacaatgttcggcaattaggtaagttaattgattatatttaagtttgaaagtttgattatttgaaatgttaggttctaacttggttcaattttctaactttgcacataaatatttatatttgagaattaagcttgcatcagctttgtgattccttacaattgtgtgtttgatggaatctggtgtagaagatgggatttagtttgtgtcctatgataaaatgtgattgttaacatgatacgagcaaatgtaagttctcattttgttttgctttgtttttttctttatagggggcaagaaattttgtacaaccagagatacacta

SEQ ID NO: 108433 - DNA, 773 bp, Aquilegia coerulea
  Intron number 1 from transcript AcoGoldSmith_v1.027774m (l ocus AcoGoldSmith_v1.027774m.g) derived from phytozome v7. 0 (chr-ID scaffold_9; pos 708677 to 709449 reverse strand)
ttgctgatcacctctatcttaatttttcaagtgagtttcttcttcatattcttctatatgattgcgtaaagttaaatacattataagagtttttactgcttttgtcgtattgggtttaaagaattagggggtttcttgattttttttttggaaacgtatagagtttatctgtttcttgcatttttcaatgtagtatagttttgggaattaaaattgctagggttcttgcccaacatttaaattggtgtttttttgttagttatggttcttggtttgccttcattgtgtccagtttctcaaacttccaaaaatttagtttctcattgtagttgaactttgaaacttaaataaggggattttttgttataatatcgcaaattaaaataatcgaaatcttcaaagtatccaagagtttgtttgctgcattgcagtgtttttgctccctttcttagtgtagtcgtgatctttatgtatacatgcaaatcaaactgactaattcatccataatatatgatggaatcaatctatcaagtaacttccaaagtttgtttagcttgcactgttacacataatttcgttgtttggtaatttcgataaattcttcatgaaactcccagcatcttgatcgtaagtgttatctccaccttcgttcttgccagatttaataaattccctttgtgtagttgttgtaattgtaagatttaccattgtagacacttatattagtattatttgcaggactgtacagtagaaatcaaactgtatctgtggat

SEQ ID NO: 108434 - DNA, 473 bp, Aquilegia coerulea
  Intron number 1 from transcript AcoGoldSmith_v1.000684m (l ocus AcoGoldSmith_v1.000684m.g) derived from phytozome v7. 0 (chr-ID scaffold_7; pos 3457523 to 3457995 reverse stran d)
aagattttcaaagagcttcaagatcaatctggttagtctttttccccttaaagctagtctctttctttaatgcttaagttgatgattaatggtagttttgctagaaactagtaaagcttgagtagttaattgataatttgatactagcatttaagcaaatttgaaaaatatcaatacacttggattgctttgttttcacaacaattttaaatcaacccgaatcaaaatgcaacttgaacattgaaccaaacctgctctctctcatggggattagtccaattcatcttcctcagatgaatgtcttgaaagactgatttaagaaacaaaatttcctaactatttgctgttgctaaagcagctacctttcatattgtctaagaaaacttcgtattctgtagtctaaaatatgaaattttgctttgattgttgttgatttagggacgagaaagagtatacattcggagctttggcat

SEQ ID NO: 108435 - DNA, 889 bp, Aquilegia coerulea
  Intron number 4 from transcript AcoGoldSmith_v1.022236m (l ocus AcoGoldSmith_v1.022236m.g) derived from phytozome v7. 0 (chr-ID scaffold_6; pos 7119301 to 7120189 reverse stran d)
attctgctgtccaaggttacctacttggagctgaggtaatgcacattttttaaatgaccttataaaatagaagataagatggtactcccgaacatggcttttattgaacatggcttttattgatcgattttaaatgaccttataaaggaaaaatggtattcccctgaacatgggtttattggtcaatacatactgaacaaccaaattatatgtaacaattgatgttgtacccacatattttgcatttaacttcactaggtatatactaaattttgaaatgactttctttatagcttcctgaaattgctacatgttcactttgtgctttatttcgttatgcttgtttcggtctgacatggttatgaagagtcgaacacagatttcatacaaatttaccatgtccataactccatacactctttacagcatagaaagtttgtcattagatatgatgttatgcatggaacaacatttgatgttgtacccacatattttgcatttaacttcactaggtatatgctaaattttgaaatgactttctttatagcttcctgaaattgctacatgttcactttgtgctttatttcgttatgcttgtttcggtctgacatggttatgaagtgtcgaacacagatttcatacaattttaccatgtccatacactctttacaacatagaaagtttgtcattggatatgatgttatgcatggaacaacatataacatgcattatgctgttggccgaaacaagaatatgttgaaataattagatttagaaaagcttagtggaatgtttgatgttatttgtatcatttttaattttgagcgacatttgtaaccataattactctacagcttggttttgattccctgcactttgcgagaattga

SEQ ID NO: 108436 - DNA, 601 bp, Aquilegia coerulea
  Intron number 1 from transcript AcoGoldSmith_v1.019170m (l ocus AcoGoldSmith_v1.019170m.g) derived from phytozome v7. 0 (chr-ID scaffold_71; pos 1053096 to 1053696 reverse stra nd)
ctttgcttctctcaactctgttcttcttggctgtaattaatcttcttcttcttctcctctttttctttgtttaatttagctttttggtgaataccctttgcttgatttttctttaattgcgcaaataaggttgttatgtttgttagaaactgttaatgattttgtactgaaaattgggaagaaatttgtttcggattttcctttaggtgagagaagccaaaaccatctattgattttataacttattcatttttgagtttattacttgatctacataggaatgaaggatgtgattcattcatgtgtaatgcaaattgcgaatcagctgaaaatggctcatactttacttgccggttgttgttggcgttttgtatagaattagaatatgtagattaagagacacaacaatctattggaatgtcttgtcttgtgagtaatatcaaactaagaaactgtcaagtctcaaccaaattttgacatttgtcaaatacgatcttattccttaatacctaaacttactacttcgggtgttcagtttctagaattgctaattttaatgtgactcttgaagttatagttaattttactctttgatttacag

SEQ ID NO: 108437 - DNA, 690 bp, Aquilegia coerulea
  Intron number 1 from transcript AcoGoldSmith_v1.007956m (l ocus AcoGoldSmith_v1.007944m.g) derived from phytozome v7. 0 (chr-ID scaffold_9; pos 5383984 to 5384673 reverse stran d)
acattgtcttgatttcaagttgcattattgtgtaggtaggtttgatttgttgtgtttttttgaaataataagatgaaatcaaagtcttgatttgatttaaacatcttgaagagtattttgagattatcagagtatctttactagagtactacatcaaattgcattatttaggcaatgtattgatcaaggtgtgatgtttctgtgtaactagtaatctgcacattgtttcccttaggtttcattttcatcaactatttgtatgagtttcatagattgtgagtgatcgtggtgattgagacgtgcagtcggggttttcttttgttattttgtaatttaagtactatccgagtgctaagggatcaggggttatccttgggattaactgcattatagtataccatatctgtcaaacaagttcaattgttccacattattgtgaagtacagaacaaacaagattgtgtaaaaaatatctctttcagtctttcatcaatgtataattatttgattattgccatacatgatactttatgctctattagtagctttaacttattaaccttataagtttcccttgcttaattatggatattgtaaatgttattgcaattcttgggttaatgatttttaggcttcttatatattcactggtttttcatatatattattcagcccaacattcaaagttgag

SEQ ID NO: 108438 - DNA, 950 bp, Aquilegia coerulea
  Intron number 1 from transcript AcoGoldSmith_v1.003602m (l ocus AcoGoldSmith_v1.003602m.g) derived from phytozome v7. 0 (chr-ID scaffold_1; pos 3539376 to 3540325)
cttactcaggtacttaatttcctctaaaaaatttctaatttttgttaattcagatcattattgtttcaattgattgtttctcagtatcaattttagaaaaaattgaggtcttttgaatgaatttgaccaatattttaattttctttttaaggtaatttgtttatgtgagcactgacctgaatttagctaattcttgcaataatttatgatgggttttggttaattcgatttgggtatttgtttgtttttgatttggtggagtgatggggttacttgcatgaattggatctctaatgagttggaaattatgataaaagattggtttttgatgtttatgttgaaaaggcatattattatttgatgattgtttgtttttacgagtgtatggaaatgtgtgtgaaatttcataattgatatgattatgttgtgaatgagtttgttataatttggttcagtggatttatcaattagtaggaaaaaataatggtctcttttatatgtttgcacttttagacttagacacgcgtttatattagctgtcagggagtcaactataataagtacactggtttattatagttgtatacatgagccgacaatgtactataacggtcacctaacggactaaatccatccgataaatgttggttacggacgcctgtttctatcttatctcagtcagataagatcgtgtttcctttatctcatagatactattcttctcatttaatctcactcgattccggcctcttgattggtaattaaaaaacaaacgtgaaatacccggggtaagcggaaatcttgttttatacgttatatctggaataggaaatattttattcctctgtaattgttccttgtgaattaatgctttttgttgaaacaagccgtttttatcatttgatgtctaatatgagtttagacttctctatccaggcattaattcgcgg

SEQ ID NO: 108439 - DNA, 713 bp, Aquilegia coerulea
  Intron number 1 from transcript AcoGoldSmith_v1.008634m (l ocus AcoGoldSmith_v1.008634m.g) derived from phytozome v7. 0 (chr-ID scaffold_37; pos 1589562 to 1590274 reverse stra nd)
gaagagaacttgaaaaggcagctctttggtaagtactttgatcatcaacccttatcttctaacttttctctatgcatgttttatggtgttttatgtattatattgaattatgaaaattgtttgtttaatcaagagttaagtaatccttgcaaagaacagtgaataggttgttggtgatcagatggttttaatcttgtgtttaaggcaataatcactaatactatatccattagatagacagaaaaatgtttgtttgattgtcatcataccttgaggttgtttttatttcatcagattcatggtttttgcttacttctgcatttctgcggtaggaattcattatatatttatcataattcacacgaataattgttagtttcatgttcatatatgagtttagtcatttattagtgtgaagttcatctcatcagaaggttattacattaatattatatttatttataggggatcgaagtaccaattatcagttggtcggaattgtttgtgtattgttgatatcttgatatatttatttaatttcatgagattataatgttatttgatttttttttttattatttgactttaggttgcgtgttatttttgttcatgaatttgcaagacacgggttttttatgtaagaatgatctttttaactattttgattttgattaacaggtcttcctccaagatacagagactcggtcagagca

SEQ ID NO: 108440 - DNA, 900 bp, Aquilegia coerulea
  Intron number 2 from transcript AcoGoldSmith_v1.006924m (l ocus AcoGoldSmith_v1.006924m.g) derived from phytozome v7. 0 (chr-ID scaffold_11; pos 1378231 to 1379130 reverse stra nd)
cttcttcttcttctgttaaagaggtagtataatctatggcttcttatattttttcatctttaaaaggtgcaactgatggctaacaagtcagtactcagtagagtatattaactagaaattactttttcttttttctgaataatcaacttgggatttctaatgtgaccatgttggaatcagagataactatgcactttgtatatgtagatgataatgaagttggaagtcgttgaatattttgttgatgatttacctaatatttatgaatcttaagttgccataaggtttaggataatttctctatcacaaacagttttctgaattgactgattaactgaaagtcagacttgtttgtattgctaagagaaagttattcatgaaaagtcacgactatgcgaaatagttttcttgattaaaaaatcaatccagtttaaatcaaagtcgactaagcttattcaaaaccaaatatgcttttggaaaaatgacattcacaatactgattagtagatactctaatacgtctggaagtatcattatattatatatagggatcagagattcagaggtgttaccatttatattaacgatcagggaaatcgtaatgtccattctagatagtcaacctgtttggtattgtacattatgatgttggttcattatgttatgatttgtcatattcattgtcatccttgttatcatcattactatcatgtgtagatatgtatactcttcaagctccactaagatcttgtgtcaaatactgtgatccatcaattattatatgcaaccttagacaaatttaataggttagagtcaatttattggtgaaatactttcattgattacctaattatttgtttttgttttgtgtatgtatgtctgttgggggtggaggttcag

SEQ ID NO: 108441 - DNA, 995 bp, Aquilegia coerulea
  Intron number 1 from transcript AcoGoldSmith_v1.002785m (l ocus AcoGoldSmith_v1.002785m.g) derived from phytozome v7. 0 (chr-ID scaffold_11; pos 4646583 to 4647577 reverse stra nd)
cttcattggactacttatcttgggtactattaaaggtcagtgacttctttctttattcttctctttatttatttattttgcttctggttgaaatttgttgattttgctgttgtgtttaatcttttggggaagaagtaattttttctatcatttattcttagcaattgaattgggacaatgggtcatagtgatcctatcaatgtctgagaatttgaattatttattaggacatgaagtctgccagtattgctagcatgattgtaggaatttaagcaaaaatgtggcataaattgacaaactaatacatgttttaaattacagtagtggggatgatcaaataagaaggaaatgaagttatggggatgtgtccttgaacaaaaataaaaatcgacatcaatgaaattgatcgaattttttgataaaaaataaaaggttatctcatgaaaacgctttaaacactcttttttagtcttttaatcataaataaacccttgtgtttgtgtacaatccccttacttacttgtggacacatagtatagctcaataacaaaaatggactcttgggcttggaaaacttggaccatgctgccctggacacgcgttgcatcatatagaatcatgaagacttgaagaggaagtagagacaacattagaggacatgagaagagggggagaaagggggaatgaatgcgaagagaaaggaaaaggaagaacagataaatgttggagaaggagagtagaagaataaactaaattttttggcaaaacaggcagattttaaacccatcatggtaaaacttgcttgtatatagcatcattggaacgttgcatgtaatcttagaacttggaagatatgggttttcttataactaaaatatcattgcagcatgttaatctcttagcactggaagcatttgggagaatatgagtactttatttaatgatggactggatatgcctcattatgtttgttttatttttttaggtgccatttt

SEQ ID NO: 108442 - DNA, 336 bp, Aquilegia coerulea
  Intron number 1 from transcript AcoGoldSmith_v1.008794m (l ocus AcoGoldSmith_v1.008809m.g) derived from phytozome v7. 0 (chr-ID scaffold_10; pos 3148709 to 3149044 reverse stra nd)
atagttcttctcttcattctctgattctgcttctggttggtttcttcagtctttccaatttcagttcatagattaagcttttgtggccgttttgaatattctctttacaattctcagttgggatttaagatcactttgatttgctttattgtcctcttgtgttttgatgttttggtatatttcttgaattggttcatttttttgttgtttcttcttgaaaaatcgtcatgtaattaccttaaaagctcgtttttggtttattgaatttcatttgaatttgtttttgttcattttggaacaggcttcctcaagcaatctcttattttctcttatata

SEQ ID NO: 108443 - DNA, 883 bp, Aquilegia coerulea
  Intron number 1 from transcript AcoGoldSmith_v1.020850m (l ocus AcoGoldSmith_v1.020850m.g) derived from phytozome v7. 0 (chr-ID scaffold_10; pos 82087 to 82969 reverse strand)
agcccatctcacgtcatcaatgcgtgtattagagaaatttttaagaaagcctccattgtaacagtgaaggaatatgataggtgactgttcacacgtgttaaaatggttattttggctataaaagatcaataagtactagtctttctgttggtgttttaggacaagaagtttgggtctttttgcataaggtgacttttcttagctattgtcttaactatgaacaatgggtttagtcttttgtgtttgctttcagaatatgaatcttttgaaatcttcaatgttctgcttttgatgaatcttttgaaaacccagtttgcttatgcaaaaggaaaaaaaaaaattctgttccacattgagttcatctttattcaattatctgagaatctgaagatcttggggtgcttttgggatccttttccataccatggcttttcttcatttgaagtagtgttttttcattgacatatgatttctgttgctaaaaagaaaattcaaactcgggttagttcagatgattaagttatagctccacctaatatagttaatttttcttgtaggccttcttttcaggatcttctaaagcatttcaaagcaagataaaaaaaagtaaacttgtattaatggatatgtctcattggttatcggaaatggtgagttttttttattgattttattctgatcattcatgttgttatattgcatttagtattgatacctcatggagtacttaaagcaagcattatagagttgttttggggtttggtgaaatttgtagggaatggaagattctagctttaaccatcaatatcaaatgaactctcttagtgacttcgctccacaacagttagcagctgcatttggggaggatttccgtcactctttc

SEQ ID NO: 108444 - DNA, 195 bp, Aquilegia coerulea
  Intron number 1 from transcript AcoGoldSmith_v1.026204m (l ocus AcoGoldSmith_v1.026204m.g) derived from phytozome v7. 0 (chr-ID scaffold_51; pos 442584 to 442778)
gttaattgggtgagtttctcttatttatatatatcttttccttccaacttttttttcttttcggttttttttacgtaggtttgatctatgttcaacatgaacaattttgcgtaaattatattgatgatgccgtttatctttatcgttgtaatcacattagttttgatttaatggcaggtcaatattgagttgcat

SEQ ID NO: 108445 - DNA, 620 bp, Aquilegia coerulea
  Intron number 2 from transcript AcoGoldSmith_v1.005250m (l ocus AcoGoldSmith_v1.005250m.g) derived from phytozome v7. 0 (chr-ID scaffold_10; pos 3758062 to 3758681)
ttatacgaataagaacttcttcaagctcgtcgaaggtaagattcacttgttgttcttttcttagttttgatttgagacaaatttcagtttgtccaatttgattaactcatagatttgaaattcgataaattgagaatataaatgttaattaatcattttgatcgacaagtaatagagaatttctttcttttttttttttaattttttttagggataatatgtatgactttataagtaaaaataatattttaactaggagatatttggttaattttaaatagttacagttgtttagtttatagaagatattatttttggaaagtttgttttagaatcatagtgcactttgcagctgtttgatagaggtgtaacaaactaccaatttattagttttttttacatttataaagaaaacgagttttaaataatatctttgccagataactatatcttatatggtttgtcgactaatcttaattttggcgtatgtaaggtcgactgtttaatttgttagatatttgcctattctaataaaatctatataataaattttatggttgactgtttgagttatgatttttcatcaatcttacaggactagaaattgcaaaatctactaa

SEQ ID NO: 108446 - DNA, 616 bp, Aquilegia coerulea
  Intron number 1 from transcript AcoGoldSmith_v1.005602m (l ocus AcoGoldSmith_v1.005602m.g) derived from phytozome v7. 0 (chr-ID scaffold_28; pos 1429415 to 1430030 reverse stra nd)
attggaagtggtttacaggttgggtttttttgcattttatctttaaaagctttcattgtatgattttttattttgtccacatttttggttcttaagtttaaaaatgtgaaatgggttttctttcttttgatatgggttttgtgtattgttgccgaagatatgtttaaaattctctaggttagctttaaattgtttgcggttggcaaaagtcaaattaaaagctatttcagtagtaacgtgcaatgcagtttctgggtttatttggggtttgtgatcaagtacaaatgacaagctcgaaaaaagttggttgagtccttgtgatgtttcttacatagttttcagccctgatgcccttttttatgttgcttgtttgcattgagcatttggtgctttttttacaactatacactagtctttttgagaaatttgtgtacgaacttattcattgagcatgttggaaactatttttggccgattgcattgtcgttgaaactgaccagaggttaatgctatgttgattattgggtttttcgtcaaagttaagtggttggtaatatgaagttttgtgattttgatatcagggtgttgagttctttgctatcaatacggattcaca

SEQ ID NO: 108447 - DNA, 854 bp, Aquilegia coerulea
  Intron number 1 from transcript AcoGoldSmith_v1.024019m (l ocus AcoGoldSmith_v1.024019m.g) derived from phytozome v7. 0 (chr-ID scaffold_10; pos 2484418 to 2485271 reverse stra nd)
ggctttgtattgaagtatagtagtataccattggaccatgaagaggaaggtgcaatgcatctaccttctttcttttccataatgacattctacatgttaaaatcagatggtccaaatttgattataaatccaaagtgttcaaaaatattaacagacctacttccatggagaaagggacctaaactcttcagtaggtcgccttatcagtaaggtactataaggtatggtattaaaggtattttataacactcacacaaactaatcagtatcccaaagcatgatgtggcctgccgggggagaaaataagaaaacgttcatggcataggaaattattagtacccattttcaaaacattgttatcttggacaggcggcatttgttcatactctattttggatggaggatctcatagcaacaaagatcatcctcaatatttatttcgagcattgttggcattgagctaatcccataataattatttcgcagttagattcttgctaataaaaagccgactatactaaaaaagacaaattatacacgttagatcttatggggcaaatagctccaatcaaaatctcatcgatatttcctcaacaatagcagacaacaaagtccatttctctccttagtataggatggactttggagacaatttttgaacacactatcatcatgtgatagatacttgcaatcgttttcttagttttcccatatataatttacaataagagcacagggcaaatgaatatacaacttcagaaatcatcaatggcagaaaacagaaaggataacgatcttgataatagcaaaggagcgttggagcttaaacgcagtaagaagttggctgctaaagg

SEQ ID NO: 108448 - DNA, 945 bp, Aquilegia coerulea
  Intron number 3 from transcript AcoGoldSmith_v1.011907m (l ocus AcoGoldSmith_v1.011907m.g) derived from phytozome v7. 0 (chr-ID scaffold_6; pos 8703627 to 8704571)
gatcccaaggggtgagtctttctgcctctctgttgtttctttcttttcttatatttgattaattgaatcaagttgttaaaatgagtttgaattctgtatgatctatgctattataataaattgatgccttagagtcggtaaacaacaatttattgttctgcctgtgactgaggctgatttataatattgtgtctacatggatatgattacagccatgctctattgtggctacatggattggttatacagtagatttatggttcaaaatcatcctgctttatgtatggaccaagtttaccctgttttctggtctccatttccgttagaaactaggaatcaggaatgtaaaagggttatcaaggggcttgatgcaaactggggagagctttctagccctgaaaatccggcaggttctctgctggatgcccaagcattctagccctagacaataagatggcctcatagtacgggttttgtgcttttggatggatgattggagaagtggcttttgcctgcagaagcttctctctcttgttacccctccagtgaatcttccacaaatccgcctccaaatgccattatatttattatcatctctgaaaattgggaactggaaaatccttagttttttataggcaaactatctaaattccaacaccctttagactttaagggtgtttacaaatgagactgttttaagttggtatgtaccaacttgtagatagaattgttataaaccttatactgcaattccttgttatccctgcatcatagtttggccagcagcgtacctttacgttgaatcaattattaaggttgtaaagtctacttactagcttgcatttgttcgaaatatccttctgtattcagtctaatggtaggttgtttattttgccacattttgtaacagtggaaggagaatcacttctattggtcgccgtgatc

SEQ ID NO: 108449 - DNA, 684 bp, Aquilegia coerulea
  Intron number 2 from transcript AcoGoldSmith_v1.012546m (l ocus AcoGoldSmith_v1.012546m.g) derived from phytozome v7. 0 (chr-ID scaffold_6; pos 5370726 to 5371409)
tgtccccaaagtccgtggtgtccaacaaactattggtgagttgaagtttttgtttctcttactcaagtaaacttatattaaatttgtttgatggtcattaattcgtatatgcttataatttaccaccattaaatatccatgtttggtaaattgactgttacttttgaaggatgttttgtacgtttatatgaagattgagtgagatttagttgcccatataatcttgacacactaacatagtaacatttactcacggattccacagagatgctagaaattatggttgatggagatgatatttacaattgggagtacattcttacaaaatattttttttcttaaaactagcactgaaatgaaatactatggattacaatgtagcactcagagaagttggaagtaagcaaagaacagtttattttaggatgttgaggggtttatctcctgataaaataaactttttctcaagttatcttaatgtcatttcactgaccgatgcaaattatgtcagccattcgtattttaagttcatgttgagggacttccatgttttgactttttcatagcttgagtagtgtacattaataataacatctcacattaaaattgtggttatgtgtatctttgcagcttactgaatcaactttcttaatgtagtgtctttgctttcgaaaagacaagtaa

SEQ ID NO: 108450 - DNA, 585 bp, Aquilegia coerulea
  Intron number 2 from transcript AcoGoldSmith_v1.018695m (l ocus AcoGoldSmith_v1.018695m.g) derived from phytozome v7. 0 (chr-ID scaffold_28; pos 3047226 to 3047810)
gccaggtaatgtgatcaccaaattttacatttattttgtattaatacgcgcgcgtttacaaaactgggtgtagaggaagcaattgagtccacctatgtcttcagcttaaaacacatctttaatttctagtcgttgttcatgaataaacaccttataattagccggttagtcatgttcagtactacatacaaataattgtaaatctttgatgctttatggtgttgtcaggatctacccaggcattgagatatatggtagccccgaaacggaaattttcttctctagtaccctttttaccaataaaattgtcccgaaacgggtcatttcttgcactcattctttgattcccttgtatgaaatatgggataaggtccaactttggaaagaccataacgcgcatgcataccatagttcttttagcctaaggctatattagccaaagtagtccactttttcgggagcttgttctggcatatgataccagggaagagaggtccaaacgttttaatctgattcatctatgtgcctgtttttgtttgtattttcctagagaacataatattttcttttacgactaggggttgt

SEQ ID NO: 108451 - DNA, 631 bp, Aquilegia coerulea
  Intron number 2 from transcript AcoGoldSmith_v1.010746m (l ocus AcoGoldSmith_v1.010746m.g) derived from phytozome v7. 0 (chr-ID scaffold_9; pos 6465959 to 6466589)
tctcttttgtccaagcttcctactaagcaaccaatgtatggctattcaactgtgttgttattatttgtctataaattcttatatagtataatggtttcagtaaagttataaatagttttctttttctttgcaaccaatggtcaataaagccgtttttcaatttttgttttttttattattggcatgtgattatttagcagaagtggaaaactagtctaaattagaagcggctttatttttttagtttttgtaggttcacttaatatagtaatgaaatggaagcagaaataattaggggaatgggttgcttgtatgtatatctgtatggtgatcttttccattcttgttgaaggtgtcagaagctgtgtgataaaaaaaagaactggttttagtgttcaaaacttgaaattatgtggtcatgtagcgttaaattggcctatattaattacctcattgtcagatatttgaatcttccccctccagaccttgcaccttgtttctattcattgaggagctcctaggttcaaaattctattgtatgtaatgagcggtatattaactttgtggactgcatcttatctgaagtttatatccattgcttccttctgtaatgcacagaacagaaaaagaa

SEQ ID NO: 108452 - DNA, 778 bp, Aquilegia coerulea
  Intron number 2 from transcript AcoGoldSmith_v1.003705m (l ocus AcoGoldSmith_v1.003705m.g) derived from phytozome v7. 0 (chr-ID scaffold_11; pos 4969329 to 4970106 reverse stra nd)
cttttattgctctttctaaaccattagttactcaggtaaactataaagttctaaaaaccctaaaaagggttttagtaatataagcttatttattcattctactagtaattctttgattgttgttactaagtaagtaagcaatctaaaataatgagtgatcgacaatggtcgcgaatgtgaaaaaggggtattttagatgaatggtagaatccaataactttgaggcattgcactatcatagtgcacaatgagagtgagacgagtttaaaaatataatgttgttgagcatatgaactttggattaaaccagtattttgcgcaaaatttcgtaagatgcaagttttcttgtcttacgatagggacttggattaaattgtgttttcagcatctaatagtatagattagattatgatgggagaaataaaatttagtgttgtatcatgtagctttgatatggttgacaagtttacattgatatgaagacatctaatgccctttggtagttacatcttgttattcatttaaatgaattggaagtttcagtttagcatgtgattttggtcattatgtttcatagtactcagtgtgattaattctttacaaacccattatgttttggtggttgaaaggccagcgtgccaaatcttagctttttatttccaggttcatagtttgtaactttgtaagacctgtctatttatgtatgtcttttttctcctatgtcgtgaaaccatgtaagttctaattttaattactatgttctttcacagacggcaga

SEQ ID NO: 108453 - DNA, 1008 bp, Aquilegia coerulea
  Intron number 2 from transcript AcoGoldSmith_v1.000749m (l ocus AcoGoldSmith_v1.000749m.g) derived from phytozome v7. 0 (chr-ID scaffold_1; pos 3537393 to 3538400 reverse stran d)
ctggcgaggtaagtggttgatattagctctaggaggttggttttttctactgcattacatatatttaatgaccacattgatatattgctcctattgtattctggtattatgaagttcagaccaatgtccgaattatatatgtatatattgtggcatcatatcgattttgcataaaaaggattgataaaatgttaaattatagtgtccccaaaagtcgtaagaaaagaagttgtagaaattgaaggagaatgtaatattatccattagattgtaggatgggaaattttatggacatagacaaacaattgttagggaaggcatctatttaggaaaaggcaagataagctttttcaaaccattgaaatgcttgatggacatataatttatgattaaagtttagtgagtttcttgttaaatactgctattgtactctcttttcaagtacaaggatcgagatccttttttatataattttataatattttgtgaagcaactcatctataatttatgcagttgtcagttttataagcattttaatcaaaagtgtaggtgagtaaattgcactttgcagaaaaaataagagaaagaagaaaagacggcaaacatcagttaaacatgatatgctctcatttataagtgagaattcaaaagaggtccttctattttgttgcatcattaagaagaataacctttgtgtaaaaaaaacgaaatataagttctatattattcttttccctatactggacaaaggtatcaattaacccaccgcgaacacaatatgcttagatgtaatcggcgctgacttcttgattcaaaaaaatttgcaaggaaaccttgtttgtataatttaattctgtacatattccaatttgatgatgaaattttatcttcacaatatcttgttgatgataagattgttgatgtcttctgagaggttcaatcctaattcctaaacaagttttcttcttataggggttgcaacgttactgtactgaacacaagatcaa

SEQ ID NO: 108454 - DNA, 533 bp, Aquilegia coerulea
  Intron number 2 from transcript AcoGoldSmith_v1.010887m (l ocus AcoGoldSmith_v1.010887m.g) derived from phytozome v7. 0 (chr-ID scaffold_1; pos 8220837 to 8221369)
tggtacgatactgtatcttcaagtcttgctgaaaggtttgtgccaaattggatctatctattcttcaattatttgttttttgtattgaaaatcatactaatgtgaaatcttgattacatttttttttttccaattttcaataatagttcaactgacctcactgctaaaccattcactactagtaatatgtctaatcctaaggatttgttcaattaacgattaatacaacaatgagattttagctattcaattacttgagtataatttagttgctactgtgaactgtcatatgtttgcaacattgaaaacagagctcttgtgtttctcagatatatcttcttcttttaccacatttaaattgtttctatgtttgtatttgaatggtgtgttggtttgcttaactattgttctttttctactatggactattggacttcccttgtgaattgtcttgtatcattcattctttataattctccttttttttgtatcttataggttccccggaaaggctgctggtgtgagaatttgtg

SEQ ID NO: 108455 - DNA, 785 bp, Aquilegia coerulea
  Intron number 2 from transcript AcoGoldSmith_v1.011289m (l ocus AcoGoldSmith_v1.011289m.g) derived from phytozome v7. 0 (chr-ID scaffold_37; pos 2085087 to 2085871)
gagtggaaggtaataaaacttattagtactccatttttgtttttgtttttcattttgaaccatctagggtttaattttgttctgtttcatttgttcgttaagtgtgatttttagattttgggattttatatttctagggttttgattgagtttcgttttattttgtattcaaaatattgagatgtagaaggtgatttggattgtaaaatggttggaaaataatatatgcacacacaaatacatgtttttgggtactagatttatttacctggcttgggttattattagtcgatatagcatataatatgggattctcttataaatcatttgtggcaaaaagttttggaacacagcatatttaaaactattactctcagactcgcagttacttatgatttaaccccttagcatcatctttagatagatatcagtcaaatgtgtgtcatctctagaaatgagtctggtttttgctggtaatgcaaacttttagttcagaaattatggacttatggtatgatttttccaagtcactatttctatgtagtaggatcaaattatcatttttattgcagggttttttattaaccacaagtatattttaactcataaatgtattttaatttttaaaggaaagtttggtaatttttggtatgcgttagtgtccagtctctaattcatttataattgtcttcattaattgttgtatactattgaccgattggttttttttttcttgattttacttgataggtgagcaaggtgcaggtggaaacgaaaattcaaag

SEQ ID NO: 108456 - DNA, 758 bp, Aquilegia coerulea
  Intron number 1 from transcript AcoGoldSmith_v1.010668m (l ocus AcoGoldSmith_v1.010668m.g) derived from phytozome v7. 0 (chr-ID scaffold_1; pos 3829788 to 3830545)
catgtatggccccttggtaaactttgtggaagcactatggatgtgcactatggatgtgccttagtatgctctacttaactaatgcttcgaatataagaaacaactcttaatatctacaattcactcggtggaaccgtggaagtaatagtaaaatcagctaaaaaattgtttattttctcctttcatagctcattaaacttctttacatcaaaatattaagaaataagaagcattaatggcctggcacgtataacaaagaagatgcttcctctctgtgaaataatgcggtagaaatatttcccatggttgaaaaaatgatttatggtgaagttggcatttttcttatcagttgagagagacttgtaagctacttgaggttgggagaggagaagcttgaagcttcattcaaattaataaatttccacctccattttcattaaagcgagcttgaatgctttgagtcttaggtggctaaggctccaacttcgagctggaggtcaactttagagtgtcttttctagcacttttttggtatgctttatgagagttttgtactgttggagggtaaccatgttactacaaaattataagtccgctagatgttcatagacatatttcgtattcattgtgatttgtgtgcaacttcaaagtattcagttgattccaaatatgagctatactaggacatgcctttacttattaaatgtcttcatatcttttcagtaagaacgggactagaagggccaggactgactaca

SEQ ID NO: 108457 - DNA, 903 bp, Aquilegia coerulea
  Intron number 3 from transcript AcoGoldSmith_v1.013289m (l ocus AcoGoldSmith_v1.013289m.g) derived from phytozome v7. 0 (chr-ID scaffold_11; pos 3724045 to 3724947 reverse stra nd)
gaccagaatcctaccacgtacgttctgcaacaggttcattttataatatttttgaactaactcaccaaaaaaaaactatatcgtcatggattcttatttttggtcccatacctgatataaatagctaaccaaaggcgggtgtaattccgattaatatgatatttaaatttaatttccataatgtggtacatattagtgagtgctcacccctcaaattatatacagggaatgaatcgaaaagacttcggatatcaactcctgattaaattccggccagagctccaaaagaataactaataatttgtccctctaaatgatttttttaaataagctatctaaggaaacctctaaaaagttgtttgaccattttatacaatgtgcttaatgggaaactgatatttgattgatttttcctcttttcttttctttttaactttctttttttgttcttggttcttctctctctattgatttgtttgtgtgaaaacctcctgtttttatcgatctatctgaaaatgtagcacactggtatagtttgtaaaaaaacaaaactaggtcatgagttgacacctctctgtcttattaaaacaaggtttttagtggattgagtttaaaatggaaacaacagacgtgctgatattacttctaaaatggaattcgcgaaattatctttccaacttggtggtcaacgagagaaaagaaatttaagaaaatgctagacctccgtcctgataatagtttctcgtcaatgtgagtcctgttaacggattcctcgtatacatatgtgtatgtgtgtgtattcatctgataaagacattgttctttgttatgaattcctttcctcgtcctcatagtgattaattttcagaagggagtttggaaggtggaatcaaccagcaaggc

SEQ ID NO: 108458 - DNA, 942 bp, Aquilegia coerulea
  Intron number 2 from transcript AcoGoldSmith_v1.003717m (l ocus AcoGoldSmith_v1.003717m.g) derived from phytozome v7. 0 (chr-ID scaffold_10; pos 2742453 to 2743394 reverse stra nd)
gaatcgctcagaagttctgcagattcatctgaccagtatgtatcttttcatcccctttttatgttattattcttttttaatgggaagctgcatctttgtgaaaagtatctccatgttatgtgttgcatttgctgcacttgtatttatatgtttcgtgcaacttttgatgtctcaaattttcttctgttggctataattgaaaatttactgcggtttgttgtatgttatctcaacaaatttatattttcaattcctatctattttcacgaattattcttttatgttgtggcacatgtaataagtgagtgtgtaagggtgtagaagtttttaactaattgttgtggttattaatgccacagatttcaccacttaagcatgctgacattttcttaacatgctaaaaatgtgttgcattctgaaagaatcaactttcctgtacctaattagtgaaagtaccaaactatctgcaagaaaacctgtttatcaatctctaaatatgcatgatgctatgaattaggactccattcttgtgtatgatgatgtccatctgtcatgattaaatggtattgttcccgaaaagaaaactgtggtgttttggttttataaaggctctgtgttgtaagattttttcaattaagttattgtactcttaaactattttacgtggtgtcagattgcaaattgcaactatgcatgctattgatttgcagatttttatatcgttttctatgtaaataattacatccttgcattcgaatactttggagaatatatttgatcaactaatttcaactgtatggctttgtcaaccttgtttacaactataaccttttcatgtgtaccacaaagacatgaataaagtatggtctcgttgtgactgacttgtattgctttgtatgaaatacaggaaagttgtagcggatagatcccttaagttgctat

SEQ ID NO: 108459 - DNA, 861 bp, Aquilegia coerulea
  Intron number 3 from transcript AcoGoldSmith_v1.014202m (l ocus AcoGoldSmith_v1.014202m.g) derived from phytozome v7. 0 (chr-ID scaffold_37; pos 1932271 to 1933131 reverse stra nd)
atcagattaccaaaggcaaaactgatcaattcaaggtagggttttatttatttattttccttcttatcacggtttttcctctccctctctcatcacagttttgattattgtataggcaggcaattggacatttcatatatgtactactgtttgtttactgaacacgtatagatgtgcattccagtcctatgttggtgcttgaaataggattagaatagcctggtggtccttgacagcaagtcagcaacatacaagccattcccacattttatgaaagctcttgcccatgttagtggtaatctgtaatctgactaatgaggcgtattagtgctttgtagccatgtgcttcttaatggggtgtcttaatcataaaaacctagccataatctgggacagatttaagggttcaatgaagggtgagtggattttttcgcatcgatcaatatccctctacagtagatggtcttctttgtattgttttagaatgcgatgttttcaattaataatgatatggcataatatttatattttctttctctttctgattacatcatctatttaatatagtaggcattgcagaaacaaaagtaggtccaatctaattaagcaaccgactaatgttaattttatttactcgctataggatgtaacaattatgaattgtttttttatccgatgtttctgtttgctgctttgaatctgaaatgaccaagacttgttgatcatctttttgtcataagtccttatattcatgagcactctctgtcgttattggctcaatctagtgatttacctgtcttaataaacgtttcctcttttttcaaagggtttacgccgacaccttttggaggaactcgatca

SEQ ID NO: 108460 - DNA, 484 bp, Aquilegia coerulea
  Intron number 2 from transcript AcoGoldSmith_v1.003713m (l ocus AcoGoldSmith_v1.003713m.g) derived from phytozome v7. 0 (chr-ID scaffold_10; pos 3867971 to 3868454)
gagaaaagaagatctctgtaagttctctctcttagaagaagaaaaaaaaaagattgcttttatttaagcttaattaatgtgtgattagtagttaatttgatttaacttgtctgtaaatatgatggcaaagcctggagaagacagtagtagagactagacatgttattgcttcttgagggagtaatcacagtctctgatcactgaaaggactattcttacttccctatatatctaaccttcctttctatttaatgaaaaggaagatttcccagcaagaaaagtcatgtctatttcaccacaaaaaaaagatgtcagaacactctcactttatcttctttcaataactgaacttaaaagtcttacaaacatggggtttctcagttttaacaattttttgtctggagaaagaaaaagaaaatcattttttcatccaaatggatcattttgacattattattattattatttttttttgtgatcaggt

SEQ ID NO: 108461 - DNA, 1062 bp, Aquilegia coerulea
  Intron number 1 from transcript AcoGoldSmith_v1.023226m (l ocus AcoGoldSmith_v1.023226m.g) derived from phytozome v7. 0 (chr-ID scaffold_1; pos 7318962 to 7320023)
gttgggacacctccctatccatttcagtttgggcagtcctggactttttcaatcctacaagaggagattccagaggtttattcagaatttgaagaaaggtaaactctatatatgcaatttgcattccagcaattaagttgacttatttgatgataaaaactccgccccatagttcttaggagcaaacactctcctaagcatctatttatccattgtaaagacctaaacaaatcttgaggagttgagtaaaatgatgattctcaagatttgtatagatgcataatattaatggtgatggatgtttaggagaacactttgctcctaagcactcaggagcagagattttctcttatttggccttgaccatccaactgttttgatacaaattaagtcaactaatttatactgtgtttttaagttttaacgtttaacaccatctaaggacacaaaaaacaaccaaactcatgatataagatttcaatgctcagtcgctcagactttctaaatttagtatgaggtatgaacttagaactgtaacaaaaagttgtcgttggcatgtatataagtttattactttcagtatttggtttaagactggccaaattaaccctgtgattctcagtgtgcatgggggaactcctccactttactcagatatgacgaccactccggataatgcgacagaaattcttgagatgcccagaaatagcaatgacgattctgactccacgcctctcttagcaaaggaggaagagaagatggacgaagaaaaagaggagattcatgacgaaatgggtttgagtagtctgttttcttccgtaggagatgagttcgcttggggttctacttcgagagaacgacctttgcaaagcacccgacttaatgcggaggaagagaagacagacaacacaacagaggagtttcatgacgaaatgggtttgagtagtttatttagtgttgcaggagtaaacgacattgcaccaacagaggagtttcatgatgaaatgggtttgagaagtttatttagtatcgcagggattccaaaggtcgcctatagcagtg

SEQ ID NO: 108462 - DNA, 875 bp, Aquilegia coerulea
  Intron number 1 from transcript AcoGoldSmith_v1.008475m (l ocus AcoGoldSmith_v1.008475m.g) derived from phytozome v7. 0 (chr-ID scaffold_1; pos 2478691 to 2479565)
tgattgttaaagaagcggtaagcgggtaagatttctgacttcactcttttgatttcgataagtaatggggttttcatatttttttgatttagttatgaaaattaggttatatgttcattattcgacttattcatatttgggatttttttgaattaaatgatgcagtcaaggtgtttgataatatgtctatgagaagtgtttttgaagtttttgttgaatatctatttttctcaactaataactattattttgctataaaatttgatttctcacgaaaccatttgtctgcacaatcaaccacaagttaatatgagagtataatggcagtaaagttgtatcaaacttatcaagtcatttgattagatgcgaatttttttgttgggagttcataaatgttgaggtaggcggagctttgtttcaagataaaactaaactctccttctgtggtcttttgcattggaccaagcaggggtctgtaagctgttgttgttgttatactttttaaataaaatgttgtgttagttgaaaaggatttaagtatactctatatactgtaccaggtacattaactatattcaaatgccagaaccatatttcccttgaaacaatattacaggaagttctacccatcactaatgtctttcctagatggttctccaaagttcttgttttctgagtaaaatagaaatgacaatgttccttggtccatattggcttcggattttggttcatgtttatgtatttgactttgttgtttttcatggaagataattgttttttttttttttttgtgtgagatcacattcaaggagaaacatgaccccttgactgtttccataggtcttcctcatattgctatcaaagaagaagggaaa

SEQ ID NO: 108463 - DNA, 788 bp, Aquilegia coerulea
  Intron number 1 from transcript AcoGoldSmith_v1.001617m (l ocus AcoGoldSmith_v1.001617m.g) derived from phytozome v7. 0 (chr-ID scaffold_37; pos 1389121 to 1389908)
gctaccgttgctccatcttcggatcgtatccttaaatttcaaattttttatttttctcgattgagagatttggtttcttctgtttttataaattttgggatttgggttttgtttctcgtgtatattttgattgtgggtatgcttgaatttattaaatttcgatctctaattcatttttttgttgatttagatctatagaaatatagattttgtgtttttggtgtatatgagattgaggttcatgttgggttaagtttagatcttgggttattcttttggattgagtgttaagggttttagtttgttagggtttatggaaattgtatgggttcaaaaattgttacaattagtgatgttttctttggtttttgtgatgcttctgctgatgattaaatttactttttatttagcaaattattccatgttcaagttgagatttttgtgctctactgatttatgtggtttcttaatttgtttggttgaagggtttagtttctatcgataaatcaattgatctggatatgcttatgttacatcattgaaaaagatttatgtttcttatcatagctttgaaagatatcatagaattgagtaattaatatttgattgagatttttatttagtgttaattgcaatagaaatttttgtgttgagaattagtgatgctgtcgagtttgcttaattgtatttatctagttttagagctatgattttctttcgacatagagttggtttccttcactgtaacaacagcagctgcagatttactacagaaattatccctagaa

SEQ ID NO: 108464 - DNA, 500 bp, Aquilegia coerulea
  Intron number 4 from transcript AcoGoldSmith_v1.001387m (l ocus AcoGoldSmith_v1.001387m.g) derived from phytozome v7. 0 (chr-ID scaffold_9; pos 5587185 to 5587684)
agttgcagacatagcaatctggtcaagtcttgctggtaagtttcaaactgtcatgactcatgagatatgttgaaaaataattaataccttagaatctagtaacattgacatgggtccatgtgtcagtgtccaacacggtatttttaatccactttgacacggggacacaggttgtgatttgtatgtaattttatatttacagatagggaataacatctctccttctcaccgtttcttttctctttgcactagttcttattaggtgtagtttgattagaatttatggattgcagcttgaaggttcttacatgattacaaccaattttgcttcgttgaatgtcataaccatctggtcgaatgatcacacattatgtaatgttaaaaaaaaaattcttaaaagaagccacccgatgcttactctatctatattagtgtttttttttgtgccacttattttgttttctgagttattgtatactctctacaggcgttggccaaag

SEQ ID NO: 108465 - DNA, 318 bp, Aquilegia coerulea
  Intron number 1 from transcript AcoGoldSmith_v1.001351m (l ocus AcoGoldSmith_v1.001351m.g) derived from phytozome v7. 0 (chr-ID scaffold_27; pos 1001772 to 1002089)
gcttctgctttctttcttctcttcattgtttcaaggtaacatagaaacctcttttcttttttctttttttttttgcttttaaatagatattcttcttcaattgtaatggagtagatacttttttattttagggttttgaagattttagtagagattaatgatttaaatgattgcttggaagctagggttttagtagggttaaatatagttcagtattattttttttgagtttctttgaattatgttatagttttaaaagacattttgcttgaatttcttgtagggaagaagattttatcgacaatttgagactcagac

SEQ ID NO: 108466 - DNA, 740 bp, Aquilegia coerulea; identical to SEQ ID NO: 108147
  Intron number 1 from transcript AcoGoldSmith_v1.008970m (l ocus AcoGoldSmith_v1.008949m.g) derived from phytozome v7. 0 (chr-ID scaffold_27; pos 1153089 to 1153828)

SEQ ID NO: 108467 - DNA, 907 bp, Aquilegia coerulea
  Intron number 1 from transcript AcoGoldSmith_v1.016774m (l ocus AcoGoldSmith_v1.016774m.g) derived from phytozome v7. 0 (chr-ID scaffold_27; pos 2956427 to 2957333)
gccgtgctagtatagacaagtttatcaattacttttttgtttcccgtgttttccccatcaacaagttgatttaactcaccaaaaaataagaggatttgtcgaagttgtgatgcatctaagaaacatatgcagatatgtgtttggtccaagcaaagtttcggaagacttacttttcaatccgattactttttttttttttttgtttccttgatttgaaaattattatggttagttttttagattcagtttttaattgattttattaaagcttaaggaaaacagatctcataaaattagggaagatgtaatgtagaatcgaacatcttgaatagtaaattaccatgaaagaattttttttgtcatacattttttttttttttattattattattattatgagattttggcacttaccgaacatcttgaatagtaatttaccatgaaagaatttttttttttgtcataaatttatttatttatttattattattattatgagattttagcacttattgagttgcccaatttgaagatttaagataccatataccttaatttgctgatggaggtaaattatgaagatttaagacacatataccttagttttggcatttaatttaattaaaaatttgttttcaatttataagatcagtaactcggtaatgctggcgagattcgaaccccaaacctctagtattatcacccgaaggttttaccagttaagcccaactggcaccctacaattaaaggttactttgattattacttacaagtttacattgtcttttgtaacagtcatcaatcatggtagtcaacaataacgacaagaagagaaaaagaatttatgcaaaagatgataatgaagaagtaaaacaacaacaagtcgtgttatcaaataagctcccag

SEQ ID NO: 108468 - DNA, 944 bp, Aquilegia coerulea
  Intron number 1 from transcript AcoGoldSmith_v1.023008m (l ocus AcoGoldSmith_v1.023008m.g) derived from phytozome v7. 0 (chr-ID scaffold_111; pos 282974 to 283917 reverse stran d)
caccgattttgggctttcagtcttcatcgaagaaggttagtttctgactttctgtcatgctctttgcaattatgatgttggtgaatatccttttgtgttcactgctttctttatactttgttctgaaaatcttctgttgacacaaaatgaatgttggactttaagctcgatatggaaaaaagagtagatactatacttttcagatgagctgaacttgattaactcattcaagtgaataaagaaaacaaacaagtacagaaattcctggacatatatgaatgtacagtattcgacaaaagtcaaaaactgtcgtcagattctataaatgatgcgtaaagtgttggatatggtgaggccatgggtcgaaacagatcctcttttttaagaaacgcatagattctttaactgataccgcattaccacccaagcaacatcaaatgttttttagtatcctaccagtataagcagggcaaattattagctgaaatatcaagctcctgcatcaaatagtgtcaaagccacatttggtatttcatgtgtgtgcccccgactgctgcaacacacattttggtcttcaagctttatacactctggacttcttaggggtactctcactcaccttcattgtactgaaataacactcatacaggtaggatctctaaagagggtagatgggctcagaagttggtaagaagttaatttagaactgctggttagttggttctattgacattgatccatttgcatgtctgttttttttttttttctacttttcttcgttccactatggggtaaattcccaattgcctattggtgtacactgaaaggatgtgtaaacaaacaactcctgccttctgtttgatatgttcaataataaagggaaacatattgagtttctcataatgattatttgtcttggaaatgaattgcagggaagttttacc

SEQ ID NO: 108469 - DNA, 789 bp, Aquilegia coerulea
  Intron number 1 from transcript AcoGoldSmith_v1.021482m (l ocus AcoGoldSmith_v1.021482m.g) derived from phytozome v7. 0 (chr-ID scaffold_21; pos 3274813 to 3275601 reverse stra nd)
aagatttgccggcagccactcacctcctccctctggtaattcaatccttctctttctaacttgtctctcctttcttaatgaaaatctgcaacagaagacttaaacaatcattctttcaacttttttatattcatctttataaatacattttcttcaagtaggtatttgttgaagtattgggaacagaatgattttccttgggctgtaaggatcaaatttcattctgaccagttttagtgttttattgaccgagtagagtagtagacaatatatctatgcgacgttactctattaagctgaattttgtatttaaattcttagtagacttttagaaatctagtattaggccaaaaacataatttgccatggtataggtgtttgtcgaatgattgtaacaaagaagaggcgttctttttgttttgtggctcattttgccgcaactatgatgcttatggtgaactgagaacatatattgcttcctggttcttgcttatctaaagagttgtattttgaaatttcctgctacctgcatgctattgagtgaagtgtcttaagtctttaacaacattgtcatactaaaattaggtcccacgcactgagtcagtaactacgattactcttggtttcctctcaacttactttctagtcctttttgctacattaagcgctgaatgttattcatatgcatgttgcactcttctcttgatctatatcttcctagtaacactataataatgttattttctggtcttagaattgcagcagcagtataaactctgtagcccggag

SEQ ID NO: 108470 - DNA, 1018 bp, Aquilegia coerulea
  Intron number 1 from transcript AcoGoldSmith_v1.004840m (l ocus AcoGoldSmith_v1.004840m.g) derived from phytozome v7. 0 (chr-ID scaffold_9; pos 2508344 to 2509361)
tctacacgtaacgaccataactccacaagcacgaggtaggcttaaggctttgcctttcatttgttttcttagttgtgtcgaatgttttcttcaataccacctagttttcctttataagtaaccaaacaaaaatatctgtttatctcttcttttttttctgtttctcttataattataaagaaaaagaaagcttcataatatcaacatcacatgtatgaactcttaactctatactctctcattatctgaattctgttttctataatatcctttttgcaaattgatgttcagttgttaaattgttatgttcttcctgcccaataaagggtattttttttttttttttttttgatgtttgaaagatattttttctgttctgtttttcagaatttctctgttcatttttcacattaagggcatctgttggtataattttgtaaaaaggctgattgaccatcagattagaactttaagggggtttcatatatgtttgatgataatttgtttcaaaattagggtcttaagttctttttcaatggtcactaaatttgatattttgaactttcaaaaacttgtcttttgcattatactctctaaaatgattgtgaaggatgtaagcacaaattagttgttcatccacattggggtttggggattaattaaacacctgtcaacatatgaaatgaactactgtagtctatatacattctaggctgctaaggatttatttcttatcatgaaaaataaacctaaagttatattacaatcaaggttattgagtgttgcagagatattgtcacattcacatatatagtatgagattcttttttgttttcgaacaataccctcaccccatctgctctctttttctctactaaattaatcttgtctactcgagcattatcaaattatcaccattccattgtttaggctcgtaaattgtagttatatattgtcaattgttagcaagtccaaaattaagtgaatcttttgatttgtattagattgctttgaagat

SEQ ID NO: 108471 - DNA, 334 bp, Aquilegia coerulea
  Intron number 2 from transcript AcoGoldSmith_v1.004840m (l ocus AcoGoldSmith_v1.004840m.g) derived from phytozome v7. 0 (chr-ID scaffold_9; pos 2509491 to 2509824)
ttagtattcttaacagacattggactatcaccaaggtaacttatcatatcatgtgcgcattactttatgcatttcagttatcttagatcacatccaacaccaaatatgacttattggcgaggtaattgtatctactatcattttcttaaaatttgaggcctttgcattccgaatagaatccaactaagcaaaagataaatttcaataggaatcaatcgcccacataataattttactactgaattaatttatgaacgcacccttgtgtttttactgggaaagacattcattgtttgtattttgatatctgtatttgtcaatcttctttatagag

SEQ ID NO: 108472 - DNA, 654 bp, Aquilegia coerulea
  Intron number 1 from transcript AcoGoldSmith_v1.010799m (l ocus AcoGoldSmith_v1.010799m.g) derived from phytozome v7. 0 (chr-ID scaffold_109; pos 113723 to 114376)
aggaaaacgatcagaacaattcaataggaccacaggtactctctccctctctctccttctttgctttgcttgcttgttttctcaattggaatttgaatttgatttgaatatggttcaatcaattgaaccaggttttgttcttattcactgaaaattgatataagatcaatccccaatctcatggaaagagtctatgagaattcagattggcatatactgtattcattttgcgaaaattaaaatttcgttttgaaacatgtataattgtggagaagcttttaaatttttatttttttaaccatatattttattgatcagctcagagaattacacaaaagtggaggacaagcgcgctacaaggtgcactgcgagtcctttctgaatagcaaaacgaatcattctaaaaacatattaatttgagccaggaagcaatttcgattttcgaccgactttgatgataataataaccatgttagtattttacaacaccatgttagtagtcattccttgctgatttcttctcgctgcttttccatccaatctaagtaacctttattttaggtaagctgtctgattgaatctgctttaatttatcttactttttctttttgtgttgtagaattacggatttggcttcttttcagacaaagagtc

SEQ ID NO: 108473 - DNA, 731 bp, Aquilegia coerulea
  Intron number 1 from transcript AcoGoldSmith_v1.009766m (l ocus AcoGoldSmith_v1.009766m.g) derived from phytozome v7. 0 (chr-ID scaffold_37; pos 445125 to 445855)
ttgctaaggtattaatcctttgtttaatacttttattgttaaaattttatgattttagtaattacccctatcagttttttttttttttttttttgcaaaagagaatgtaaaggtttctcatttttatttttctgtgattttgaatgatacccatttgataatttggtgtaaaattatggtattttagttattattttggtgtattttatatattttttttccttctgttatagaatatagagttccttattctttgggattaatgcaatggcagcaagaatgaggaaccatttattaggcattagggtgtgtgtactaactgcttgctgaaaagtgaaaattcatcaaaagctactaactttttcgaggaaatttgatggagagagagggtttgatcagttgagtcaaaaacatttttggttaaaggaattgtttatgtttttatattagtgttagttgaagtaaagattatgaagaattcataatcttatatatgtaatgttttgtcacttatattgcctttggctattttcctcattaggtgtttttatggctatatcaaattatcaattcctattttctattattttacacgagtatgctttgggtcccaaatgtttgtttttacagatattaagttttagtaatttctgaccagctttgatacatcttaatgttttttccgtatgttaacagacaaggttgcaagcacaggctgctggggtttctta

SEQ ID NO: 108474 - DNA, 516 bp, Aquilegia coerulea
  Intron number 1 from transcript AcoGoldSmith_v1.002620m (l ocus AcoGoldSmith_v1.002620m.g) derived from phytozome v7. 0 (chr-ID scaffold_37; pos 1357931 to 1358446 reverse stra nd)
ttgttggtttattcatctttggttctttttctcgggtaagaaagaattctctttcttctgtaatttttctttctttgtaattcgatggaaaagttccaaactttattaatcaaacaatttataatggttaaatcttcaaaaccccattgacaatttttgtttttttattctgaattcagaaaaaaaacccatgttttgatttagagtttcgaaaatttctgattgaattgtgtttagggttttgaattgaggggatttttttttattagattgatttgatcgatttcgaaaaattgtaaatcacttagggtttgtaaaagctataaaaaaaaaaaatcgaataatttgaaaaataataatgtaatttttgtattgtattaattatgatgtatttttagggttctaattacttggagacattttcgttttcttcttgcacagaatttggtctattggttggttgttttggttgatcaattgatttcaaataaattggttatttgtttttttcttcag

SEQ ID NO: 108475 - DNA, 612 bp, Aquilegia coerulea
  Intron number 2 from transcript AcoGoldSmith_v1.008946m (l ocus AcoGoldSmith_v1.008946m.g) derived from phytozome v7. 0 (chr-ID scaffold_37; pos 728907 to 729518)
cttaagcaaactggaaggtactttctttcgttcaattagtgtaatgttttagggtttggagtctttaattgtgcttattagttggacaaaaccatgtgatggaaagtatattgtagagtgcaagtttgatccaagaaattaaaattttttacttgacatatggatttatgatgctttgagagaaggagcctgtgcgtgattttgtttatcaattcttacattgttatcagctcaatgtataaagtattttgtgcttttaaggaagttgtacttatggaaagatgatatcttactgtattttatgtccaaggatccactgttgtattgtactttgtggttttcttttcctcttcttattattatatgttcttatcccagtactggaaagtggaaaccaccattttagtctaggccagtttcacttaatcattggttgtgtgttttcttagtgttcaggtttataaataattcggttagccttgagattgtgctgtataaattaagcaattcaaaattttaacttcattagtgagttgctcttttactaacaattctgtaatggagaattcgaagttaatgtaattcattccccttatgtttttcagacccgag

SEQ ID NO: 108476 - DNA, 967 bp, Aquilegia coerulea
  Intron number 2 from transcript AcoGoldSmith_v1.003097m (l ocus AcoGoldSmith_v1.003097m.g) derived from phytozome v7. 0 (chr-ID scaffold_11; pos 2335165 to 2336131)
gcacggagaaattctgtttcatctcgagctgcctcgtaattatcaatctaatcttttattatatctatacatgagattgaaatttgaattctattaatgaagtttgttttatattagttttatggttttatatttaatagatagattgttttttctctaatctctattatgtatgtaatccggtaatcataacaagttttgttagatttttttattatgaatgatttaacattgttggtttgataacaatatcatttttacaaaacgaataatatgaattcagacacagtattatagtgaattagttcgattttagtcttaacttccatgattaaacaaatggcaagatgttgaattttttctatctctggatatcatgattatgagctgatcattttcatccttgtgtttgttcacaaacatctgcataatttatctgctgcagattctcatattacatattattaaaatttcaattgaacgccctacatcgagtttataggctattgactatagtattgcgcatgttgatgctctcaattcctcattgtagacctcgtaatttactatatggtcttggaagttacatgctctcttctgtttatagatcaccggtacttaatgtatggtcaattttgtttaatgttcaaaaccggtcttcaattttgtttaatgctctcttctgtttataggttttcatgaacacctgatagcatgctttactgttaacacactgtacaacttagccttaggtccctagattttgcacttgttaagtacaaactaagactgactgacaaagttatcaaaccatgaactctgcaactaagacagtagaatcctttttgcagcagcatctatagacctggaattggaatagttacgtattccgagtgctagtaataactttcataaattttctctaaaaccagggcatcaggcgagcgtactgtaaagcggttgagac

SEQ ID NO: 108477 - DNA, 612 bp, Aquilegia coerulea
  Intron number 2 from transcript AcoGoldSmith_v1.002103m (l ocus AcoGoldSmith_v1.002103m.g) derived from phytozome v7. 0 (chr-ID scaffold_27; pos 3444326 to 3444937)
ggcggcagacttcttcataactggaagcgttggtaattaccgtttttcactttctttactcttaacatatttttttaccagatatctctgaatggactcacataatttgtctatgttattttaagaaccattatgtgatttggaaataaactcttatctttctcaaaaaaaaattcttcttagtgtaaacccaaattttttccaaaaaaacttatgacatgttgaaagcctcttaaatgtcagcggagtcttgccttttctctttgagtacaaatttattattgctgtttggaaaggctttcaatttacttcttaccttagctctcaaaagcaattctttttcttcttacctgtatatttatcttaattaagaatttaagataaatgcatccatttatccatttaacattccaactaaatagtctcttatctgactgaagctttgataatgcacatacatgatttccttaagtacaatttaagtcttggataatgtttatccaggatcttcacaatagaagtcattgcacattgagtggagtttattgatcttttatctacttacctctacttacagggcatttaaagttttggaggaaaaagcctattgga

SEQ ID NO: 108478 - DNA, 591 bp, Aquilegia coerulea
  Intron number 1 from transcript AcoGoldSmith_v1.017842m (l ocus AcoGoldSmith_v1.017842m.g) derived from phytozome v7. 0 (chr-ID scaffold_10; pos 4894669 to 4895259)
ttgctgaaggcgctaagcttttgcaagatcgcattgtaattcatttttccttccgttcaattctttcttttacatttttgttaattattttcatccaaatcttttttttttaattcttatgattttcttttaaattgattcctatcaattgtttgctttacatgatatttgggaaattaagaatcctattttttgctaattcaaatgtaaaatcacaacttttcaacattaattttgcaattcgaatttccaatttttataattttatattccttatactttgtgcttgttttttttttttttttttttaacacatgtgagaagaacaacacctgaaatcccattgctcattttcctttactttccttcctcaaactaactggagtctctgatagagtgttctgcatttaagtttattacttcacatcatatatagttatttccctcggtaataacatgccttacttcaaaataatttatctgtagattagttttaattagtaaggaaccttagtttacattccttctgtcttgtgcaacttgcacgatattgcagggagctcgtaactttaaaagctttaggcatactgt

SEQ ID NO: 108479 - DNA, 363 bp, Aquilegia coerulea
  Intron number 1 from transcript AcoGoldSmith_v1.001189m (l ocus AcoGoldSmith_v1.001189m.g) derived from phytozome v7. 0 (chr-ID scaffold_27; pos 1646319 to 1646681)
cttcacaccgcaggttttagcttgtgtgctttgtagttttttttttcttttatcggtaaaatagattttaatttgtggacaactatgtagtagcagttgttttgatccttggcaatgcactgagtgtgctttgtatataaaatggtctcacaaacttcatgctgtttagatttgattatttgacatttattattattaatattttgttatacgagtgtctggcccaactcccgagtacggtgcaggatgatgatatatatgctgttgttatgagcttagttctttgcagggtttcacatgttgaagatttgggtttctaacttccaagtttttcctcgttgtttttgacatctttaataggaa

SEQ ID NO: 108480 - DNA, 764 bp, Aquilegia coerulea
  Intron number 1 from transcript AcoGoldSmith_v1.000485m (l ocus AcoGoldSmith_v1.000485m.g) derived from phytozome v7. 0 (chr-ID scaffold_18; pos 2373781 to 2374544)
ttagggtttttttctggttgatcgagctttatttggtaagaaatatcgattatagttcactatttacttgccgtaataaggtttagtttataacgattcatgttttctatgtgcaaatccattgtggttttagggtttaagttaagttttaaagctcttgatgatgatttttttttgttgaaattataaggttttaggtatgtttattatcatgtatggtttattagtttgattctttaaacattagagagacttttatgtttgttttctgctcaacttttatagtgagctttgatgtatagctgtttatttactatgacaatttagaatgtactgttgttgtgattcagtaaggttgttgagttttttgcaattcgaagagtggttattgatgtatagatcatataataagatagaatgtttgaattgtattgtgctacagtctgacattgacagttataatggtgttggccgtaaattttttttttttttgagacaaattatagatttatagatagtatactgttttcagttttgtttcccccgattctttgatattaaatttcagcttcagatttcggctactatttaggaattattgaagtcatatatcttataatgcatgctgtgttactacactactttataggattgacttcctaaatctgttgaatttatttatctaaggaaattatctacaacaggtggttcctagagttgcctccgtggtcaattgcttaattgatattttcgtgtgtgcaggc

SEQ ID NO: 108481 - DNA, 956 bp, Aquilegia coerulea
  Intron number 5 from transcript AcoGoldSmith_v1.011130m (l ocus AcoGoldSmith_v1.011130m.g) derived from phytozome v7. 0 (chr-ID scaffold_27; pos 2048145 to 2049100)
ttgaggtatgtgaaagattgcttaccttttatgtgatagatgcctagacggctaggcttattgtgtttctctgtttatagctgttcttgttagtggtatacccattgaaatcaaatctcatgtacaaactgtttcaaaatgcatgtgttaggtaacgaatatggccttgtcgaggaggtgaaattgtaataaattagataggaaataagtataaggatcctattaaactaatatatatagtcacatgttagtagtgactgattcagtatggagaaggcatgccaggtttctgttggaaaagaaaggaatcaagagcatgtatgataaactgtaattatcatgacaacaaatagggagaaaaagatatgagagtgtcaaggtcaaccctgcaatttttttagtgatggatgaattgattgtatacactccacatgatgccccttgatgcattctgttggctgatgattagtattagaatagagttgactgtgctagagatttaatctacgagaaatttgcagaagtggtcactgttgatatcttcgatcaatggttcactgggacaggagagatcgaccatgttgcctgtagaattaggattggatggttcaaccttcaggattgctgttcacattgacacagtccagtaaagattaaaggtgtgtggtcagatgctttctgggaagaatattggttagcttaagagcaatatgttttttaatttgtcagaccacattgcctactgatcaaagagtatattttgctgatagaagatgatctcttgtgcacattttcaaaattatgcctatggcgttgatatttgctttactcattatctggaattttcataatgagttagggtaagctaatagtttttgtgttctgatttttttttttttttttttttttttttttctgcagttgctttttgctcgggagtcatttctaaagacaaa

SEQ ID NO: 108482 - DNA, 654 bp, Aquilegia coerulea
  Intron number 1 from transcript AcoGoldSmith_v1.012825m (l ocus AcoGoldSmith_v1.012825m.g) derived from phytozome v7. 0 (chr-ID scaffold_1; pos 458491 to 459144 reverse strand)
acttctctagctttgtaaggcagctcaacacatatgtaagtatccgtgaatcataacttgttatatagttttagacttttagtttatgttcttcattctgaaaatgttcatcacatattttttttaattggttttcagggtaatttgggtaaccggttttgatgatgctacttgttaatttaattaattactagtctgccaattaatttattttggttgagtactaggatgccagaaaccagttttgatctgaaatttttgtataatttgctagcttatttgatagtttcacaagatataaagtttgattgtttatagtttccagtccattcaaccattctgcaaatttcattgtgaactaggagtctaggacactagaaataaaccagtctatattcaaaggtaggtgacatttccttaactctcgaaagctctaaactataagtatagtttcttgaattagtatgttttacaatttacattctgaatacactagtcagtagatttgtctatacatttgtcaatatgtaataccaaattgttcaacagtatcccaagctatacaattttctgttaattgatttctataaccatctaatcgatgtggcattgggtatagggctttaagaaagttgatcctgatcgttgggagtt

SEQ ID NO: 108483 - DNA, 164 bp, Aquilegia coerulea
  Intron number 3 from transcript AcoGoldSmith_v1.027331m (l ocus AcoGoldSmith_v1.027331m.g) derived from phytozome v7. 0 (chr-ID scaffold_9; pos 862768 to 862931)
gaagaaaaagaacgggtaatttctatttttagtattatcttttcgatatatcttcttaatttttgttaatggtggttgcaaaaactcaaatccgttgctatatgttattcacgtattttggatttctaggttgagaaaattgcatcccaactagagctcatatt

SEQ ID NO: 108484 - DNA, 663 bp, Aquilegia coerulea
  Intron number 1 from transcript AcoGoldSmith_v1.011226m (l ocus AcoGoldSmith_v1.011226m.g) derived from phytozome v7. 0 (chr-ID scaffold_30; pos 80901 to 81563)
ctctagtactgttgaagatcttccacctactattggtactgtttttttttttttttgatcttttgtgatgttatagtttgttgattgatttgattttgttctgcgaatttgaagttttagtaattatgcatgtattggtgaacttgttcttcagctaattttctataagttaagtttaaaattctctctttgattgttgctttgaaacttcgaggtaaaaagaatttgttgtggagttgtaattaggagctgagaacattgaaatggcctttaattgatatttaacaatcaattaggtctacttgaagatatgtccaatttttaattgagtagaaaaaactattggaattgaaaggatatgcattgatttcagatgatagatgatactcgattattgtatcttgttagaattccaaagaaacacattttaaactatttagttgtgacttggaaagttgtaagtcttggaagtgataattcgtatatgtattacctatgctcttgtggtgtttaaaatcaaagcaagtacgatttgtttttctagctaggatgtcattttcaagaatgcagttctgtttcttgtgagagattttatgttgatatttgaatgatatctcaacatctgcaggtgtcgattttaaaatcaagcagctcacagttggt

SEQ ID NO: 108485 - DNA, 796 bp, Aquilegia coerulea
  Intron number 2 from transcript AcoGoldSmith_v1.011226m (l ocus AcoGoldSmith_v1.011226m.g) derived from phytozome v7. 0 (chr-ID scaffold_30; pos 81590 to 82385)
ggatactggtaattgcaactcaaatttttttataagactttttgttatccacaataaattgcactattgttgtttagaaatttgaatgttagtattctttaaactgtcattatatccgaaaaaggcttctgcttttgtgattttactgttgattgggaaatcatctttatgtaactttggccttgggggttgtgcttcccttagtgctttgctggggggtggggccttatgctgtccagaggcagaatgacaaattataagtgggttgaaggatgcatcttaggtggcagatttaagagttctttagaataaaggaagtcgctcggaggtctgaggaaaagtcgagtgtgtcgatgcaggtggtgactgcaatatcgtaactccagttctgttttttacctcagtgaatggaaaaggctaccatgttgagttccattcatattctggattaactccatgttcaccctttttcgtcctgtacttgatacgccatcaacactttgagtgagaacaaaaaattatggatttagatatgatgcctttcattgagatgaagtagatttagagctttgtcatgtatgtttctgttctttgcatctttttcgtttggggtttgtatctatttagcttgccagttttccagatgcctgacctatcttttcatcacagcatctcactagtctgttgattatcaaatgaaataaattaataaataaaaaaaaaaaattaaatattaataagcttacttatctatattgcagctggacaggagaggttccgtacagtaacaaactcg

SEQ ID NO: 108486 - DNA, 500 bp, Aquilegia coerulea
  Intron number 3 from transcript AcoGoldSmith_v1.002403m (l ocus AcoGoldSmith_v1.002403m.g) derived from phytozome v7. 0 (chr-ID scaffold_18; pos 2341223 to 2341722)
tggttttgattgagggtattgttcgatcccgtccggttgagtaagtcaacaagaagatgaaaaccggaactattgaggtcaatttttaagtaattaagcattgttagagtatcattctaatattgttaaaggtctagtgagtttgaataaatgtgggtagcaacattctttcaaatgcagtaccgacttggaatatacataataacttaccaattaccggtaatgattctctttttaacagaaatgatgtttgcacaaggaactcttatggatattttatgtactagtgctgtatatagcttagagttctttatgggtctgtttcacctgctgtagtttagttcactgattctatgtttgatagaattagtgaggaccttcaaaaccgtggccttgatttgtttcgtagtagtgtactttcatttgagttggtagctaaatttgtgttcatttatggcatggcaggttgctgcagagaaggttcaggtgttgaactctgt

SEQ ID NO: 108487 - DNA, 368 bp, Aquilegia coerulea
  Intron number 2 from transcript AcoGoldSmith_v1.014994m (l ocus AcoGoldSmith_v1.014994m.g) derived from phytozome v7. 0 (chr-ID scaffold_11; pos 2708159 to 2708526)
tatctgcggagcgatctaaagatcctaatcggcaggtaagcaagaaatttttatgaattgaacatcaatttatgctgttttcgttttttttttttataggatttttatgttgtttagggtttagggtttttagttcagttggtttctattttctagtagttgtcctgtctaactgtctttgattatattcaatagggatattgttaggcaaggtaatcattagaaaagggaaaacgaaaagcattttttcgactataatatatatgttatcaaattataagtttattgttcatttcttcaaataaattatatactgttaaaatttaggactctgagaagcatcttcttttttgtgtgcaggttggagc

SEQ ID NO: 108488 - DNA, 776 bp, Aquilegia coerulea
  Intron number 3 from transcript AcoGoldSmith_v1.014994m (l ocus AcoGoldSmith_v1.014994m.g) derived from phytozome v7. 0 (chr-ID scaffold_11; pos 2708530 to 2709305)
cttagtcagcgaagacgggataatactaggtacgttcaaatatctggggaaaaaagaccacagtagttaatgtcgacctttctttttggagagaaattataatggtgtcaattatgcaagctttgttgaaaacttcaaaaaccttaggtataattagtggattttatcattttgtgagtatagttagaatataagtggtcttgctcgttccgaaccggcctttaaggaattgaatgtagtgaaggagtgaactcaggttatagagaatatagtattaattttttctcttctgtaaattccgaaccctgaatgtgaactcacatataataacctgcagaaaggcttttctttgttttgacagaaaagcttttctttacagaatttaactcaatggccaagaaagtaaagcttgtacaattaccttttaaaactgcgttgaaggcagcatatttcaagaaacaacctttacgagaattcctttagtgagagtactaatggtactggtgctcagtgactaattttgataactaatcccatctagttcatcaaataagtttgacttggtgctgcattttctcactaattaatatctttctccctttacttgcagtggtaagttaccaccccataaaaatgatgttcccttaataagttggattttctataatgtacttataatttgggacggagggagtattaaaatgatttttctgttttctgactttctcatacttcacatgattctaacattatcacttatttaggcattggatata

SEQ ID NO: 108489 - DNA, 668 bp, Aquilegia coerulea
  Intron number 4 from transcript AcoGoldSmith_v1.007465m (l ocus AcoGoldSmith_v1.007465m.g) derived from phytozome v7. 0 (chr-ID scaffold_9; pos 4561860 to 4562527 reverse stran d)
aactggagaaacatttttctagtgaaggaggaaaggtatatatattctttgtgatgttcaattatttgcagatgattgtttgtgagcatgtgattaattaatgtttattgattttgattcgtggtaaatcaattgtaaaaattgatatagtatccaatttaaattttgaagctcagtattttcttaatttagaaaacatactcccatatcatccatgaacacttaaatattatacttttcggtatatttattaacatctttaaggacttgagcatattctggtttggtttatgagtcaagcattgcattgtacgaccctacaattttgaagaagaactaggtttatgattcagcattgtattgtaggtccctacaaattttgaagaagaccagtgccttaacattaccttaaattcatcattgctatgttctggataagaaaaatcttctctgatctctcgaattttcaagccagggaagtaggagggtaaagctgctaatgcttaattgattataaaaacttgtaatttgaggccaagtcaatttatagaaaaccatttggctcatttaggatcagtgtattgtctgagattgtgctaatagtatgggttcgaaacttccaatttgtatgttctacactgaagtatgactttatttataggtgattg

SEQ ID NO: 108490 - DNA, 981 bp, Aquilegia coerulea
  Intron number 3 from transcript AcoGoldSmith_v1.011324m (l ocus AcoGoldSmith_v1.011328m.g) derived from phytozome v7. 0 (chr-ID scaffold_27; pos 2367414 to 2368394)
agggtaaaaagcggcagcgccgctgataatccaaggcaagcatttattcattcgctttaagtttcttatgatctaactagcaggaggtagagcatctaagttaaccaatccaggtgatatttgagattggtactctttggaaagataacatttttgagaatgatccacgtttctgaattgagcaatctctgtgcaggctatccggtgttagtttcagtctaatgtttgttgtgcagccatgcccacactatggtagtttaacaaggatgttcactgtttatttgttttttgaagtttgctgaatatatctgacacatttgcggaaacatctcactaaaatcttgctggaattagaaggccttggtgcagaaaatacaatttgaccttctgaaatttgtaggttatttattgataagtttcatgtgttctacgtcagacgggtctcaggtcatatgtaataattcattaatttgcttctttattagatctgttaaagtttccaactaacacgaactgttatacaagtacccaaggttgctttaagaccaatgcaaacaatttgtgctctcatactaatttgaatattaaataagaacagaaaaatactagttagattcgattcccaagcttgtcttaaggtttccaatttcccacttgtggctttcttgtctacatgactgttattcttttaaaaatgatatttatagtcactgctcgtagacaataaattcgataatgatgacaaaaaattacatactttataattgtactcaccaccattgatatatcctgctgtctaggtgatctaatccatgtatgttttggaaagtatggatatcatacaaacttcacccctctaactaaatgttgaatatagcttaaatttttttccaatgattcttgtttgatattaattaccattaaagtccgtatcttgttttatttctaatgttttactttgttattattaggaaggagagc

SEQ ID NO: 108491 - DNA, 377 bp, Aquilegia coerulea
  Intron number 1 from transcript AcoGoldSmith_v1.003186m (l ocus AcoGoldSmith_v1.003186m.g) derived from phytozome v7. 0 (chr-ID scaffold_7; pos 5310291 to 5310667)
accttagttgaatttcgacgctctgtagtaaacaggtatgttcagttcattataatcttcttatttcttcgtcttctcaacttctactatttcttcttcttctgcgaaattgtttttttttctcaaacttctactatttcttctactacttcattcgtgttgttttggattataattaatctaggtttatagaaatattgagtaatttcactactgagattgagggttttgaataatttgataattaggtttttttcttttatcaaattaggtttacattagttgtaatttgatattacaactttgtttgatggctagtctttgttttttttttccttatctattttccttcttctgtgtctccttggcaggcaagc

SEQ ID NO: 108492 - DNA, 488 bp, Aquilegia coerulea
  Intron number 1 from transcript AcoGoldSmith_v1.002648m (l ocus AcoGoldSmith_v1.002648m.g) derived from phytozome v7. 0 (chr-ID scaffold_9; pos 3815659 to 3816146 reverse stran d)
caacaacaggtgattcatctatttatttatctattgttttctattaatttcaattgtgataaagtagaattacgtggattttatttgaattgtgatgatttagattgccagttctgtttaatcatgagaatttttagtttgtagttacgacttacgatcaatattgatcttatctgcttgatttggatactttgatatgtttggcattagattgaaattaaagtcactattaagataaaatactgaacgaaatagttttagtgggagtgttcatgtctttgtcacttgcatgatactgacaaatcaaattatagaatgtgctaattatattgattgtgctgcttacgtatgtttgatgagatttaaatagattgaagatcaaacctttttaatttggtttttctaagaactaagtatctgtcttactgtcaaattacgtaatttacactcacttgttcgacaatcatggatatattattttttgacag

SEQ ID NO: 108493 - DNA, 616 bp, Aquilegia coerulea
  Intron number 1 from transcript AcoGoldSmith_v1.005652m (l ocus AcoGoldSmith_v1.005652m.g) derived from phytozome v7. 0 (chr-ID scaffold_27; pos 1749280 to 1749895 reverse stra nd)
agttgagccagaagttagagaacattttaaatcaggtgtgcagtcaaattgtcatatattttcactggctcatgctaacaggacttgagaaatagcgaccgcttttaaggaagataatacgataagagtaatttagtgactatgtgcatgagagtgagtgcttcagcagcattatattcagattcagattcaaggtctgtccgattgagggttgacattctaagctgtcactggatccatatatatatatatatatatatccttaaatacggtcatattagatgcattcaacttggttcctttttgggtttaagtttggatcttgtttttgttaaagaaagtttgattgggtttcatgtaaaagcatgtgtgtatatattagcctattaggtgaatttatggaaaataaaatggcaatgtcctgcataatgacctatctagttaaagcaacaagtatgtcttggtctgatgtttgttttcatttagttcagaggacagtacttatcccagtttttgacgttatgttttacatgcatgttgttttatgtgttgcttacttatctattctgttctgttataaattgtaggttctcatactaaaaaacgcaaactggac

SEQ ID NO: 108494 - DNA, 874 bp, Aquilegia coerulea
  Intron number 2 from transcript AcoGoldSmith_v1.011228m (l ocus AcoGoldSmith_v1.011228m.g) derived from phytozome v7. 0 (chr-ID scaffold_27; pos 2820842 to 2821715 reverse stra nd)
cctcaacagcatcttcatcaaatttggatactgaggtcagatacattttgattaatcaagaaacaactgaatgattatgttaataatttttggaatttggggattatactatgtaatgtcttggtgcaaatcctactccaaaatcatggcagggtgcaaattgcaccacctgcggatacacaaattaagcccaaacagtcttataaattatgttatgcccatcaattgtgagtcctttgtgtgtgtagccttgctttggttggatgctctcggcttaagtacttacagccaagttgtatactatgatctgctagcttaagcaatttcatcttgttaatcaaaggtgtagacactttgtttgtgtgatataaagaggaaaacttgcaattgttatggatactgtcagagtgaagatggaagcggcatatatagattttattttgattgatattgtttttgtagcaatcatttcacttcagtaagaaagaatctctctctccttgtcaatgtaaactcgattaaacacttgtattatgaaatcattgaagtgccattccgctgtaaaagtgctatacagtaactttgaccaatcaaaatataagcattactgtttatcagtcatcattgccattactattgctgtaaaaccagaagctcccttagcaagcactgaagggtaaatctagtcaacattgcataaaacttgggaatttatagttatgcgttagtatcaaaaaacttgaaaaccaaaacgttaagatcatatttagatggtactttaacttgataaatgcactagtttcgtatcattttctaataactaaagcatggtgtttttcttttgatttgttatagtccactgggtctttcttcc

SEQ ID NO: 108495 - DNA, 1044 bp, Aquilegia coerulea
  Intron number 1 from transcript AcoGoldSmith_v1.014224m (l ocus AcoGoldSmith_v1.014224m.g) derived from phytozome v7. 0 (chr-ID scaffold_15; pos 762550 to 763593)
cgaagccggagaatcaggtcttccaaacccatctccttacgtttgtgtttaagatagttcttaaaatctttccatgaagggggtaacttctcgatacttacttaccgcaaggctgcaaactcacttttgttgtgtaaatttgtaatcatatagaagagaatctataaaagatttaactaggtatttatcaggacttatcagactctaataccacctacctgttttacacttgtgaagcatgtgagcacatttcctttgtatataaaaaatgatcatattgtgaaaagttgaaaccccaaagcaacagttccaggttcatgttatatgcaaattctaaagatccaaactatgggattgaaggaagcaatgctactgagttttgcaacatgtttttctcatcttcaaccggggagtggtaggaacaagtctacatgaagaggttcaatctccaaatgagcgcgttataaagaccattacagtgtgtacatcttttaacttgcttcatttacagtttaggttttatttatcaacctttttagatctacatgagacatgcataaagcttgtaatttctgcttattaagacattagattaatgttgaatccatggtttgcaacaaaatagacattaactgatttatttatttcatttttacagactgaagcaggtcaagtatttgattgcatagatatgtataaacaacctgcattggatcatcccttgctcaagaatcacaaaatccaggttttcagtttcacattcttatgatttctctgtcatccttgtcatatacaacaataacattgcaaaccttaaatttttctaattcaattaattgctcgtcaaatcttcatgtttattctatggatggattatctcaacaaggacctaaaaataaaattatccctcttctattacaaatttagccccaaggttttttttgcaaattatacctggcaatagtcataatgtacatattaagaaaacctttttatgatgtaaatgcagttgaaaccatcttcctatccaaaaagaaagaagat

SEQ ID NO: 108496 - DNA, 801 bp, Aquilegia coerulea
  Intron number 1 from transcript AcoGoldSmith_v1.001748m (l ocus AcoGoldSmith_v1.001748m.g) derived from phytozome v7. 0 (chr-ID scaffold_10; pos 344844 to 345644 reverse strand )
tgtatgtttgatctctctattcaaatgatttgtttctcgtttgtttgtagttttaacttttaatcaaaaaatttaaggttataaagcattttagtgttttgaagattttataataaagttagatggaagggtgtaaatttttatttttttattttttttataaagttttaatcttttatattcttaaatatgaaaatgttgaaactttaatcttatgtcttatgtatataccctttttgttagatttatataagtttctacatccattaagttatttttttggtggtaatttcgtccagggttttgtaattaatgggtatttaagaatttttttgtcttgttagagttgattttggattgtttgatgatatcatctgattaagcaagtgcaagttctaattatgtttcataaaaatttcatcttgtactgtctgataaatatggatttttttactcattttcatatgtaatttttttttttttatagacattttcatatataattgaactataaagatctgttttttttttattttagagattatattttgaacacagactaaacaattcaaatcctgtattacccatctttagacatgaagtttccacattttataattgagtcattaggtttacgggtttgttctaagcttggcactaagtagcagtattgcttgttaattagtatgtggagacatgatgcatgtcatttcttaaattgttggtatgtgatgaatcagttctctaagtgcacaatcttattcgatttattgtctttgtttggtttacagctgagtggaa

SEQ ID NO: 108497 - DNA, 489 bp, Aquilegia coerulea
  Intron number 1 from transcript AcoGoldSmith_v1.005881m (l ocus AcoGoldSmith_v1.005881m.g) derived from phytozome v7. 0 (chr-ID scaffold_27; pos 3026727 to 3027215)
tactcgagttaaagctgagagtccaatacatacaggtaatctaatctaatcaaatcaaatgtcactcactcttgatgagtttgttttatgtataattagtgttttcttccatttttagtaactggggtttgatcaaaactgttttttcagttaaaaatttgatttttattaatttttttatttgtttgattctttctattttagatatttgaagtatattcaaaaccaggatttgattcttctttgtgtggagttaattttgctggaactcatatattctgtttagttggaatgtttttgctttttataaatgaaatcattaattttttgtttttccttaaaattgcctgtagaggttgctaatgttttcggactgatttataaaccatggtctaatgccggatatggaatcaccattggagaggaattcacatgttttttttttcttctcttgtatatgtttaggggagacagcaaaatacgttagta

SEQ ID NO: 108498 - DNA, 626 bp, Aquilegia coerulea
  Intron number 1 from transcript AcoGoldSmith_v1.023511m (l ocus AcoGoldSmith_v1.023511m.g) derived from phytozome v7. 0 (chr-ID scaffold_28; pos 2683973 to 2684598 reverse stra nd)
ctggaaccattgtgttagaagagttggaaacccaagtttaattttcccttaaaagtacaaaattgattatgatataatatcatgttccacttagtaaaactaaacttcttaatatgtattattttataatgttcacctttaaaatacattctctataataataaataaatgattgtcgttatccttcttcattgtcaaatcaaaatgatgataatatgcagtgggtatattttggttgatcttagaggaaagctggtgactgtctccggccctggctttcatcttcccattccggagttcagcgtttctcttgttaaacccccacccaattgaaagatttcaatttttttaatctaataaaaaaaaaaacaagttctaaccattgtatactagcctttcttttaaaaaagacaagtgtttaatcccactttataaacaatgagaagctattttaaagatcacatgcgtagggtgcaatttaagcagaacagctcaggatctgctcgggcttggctcgtttttagcttggattgagcaagcttcttttctaaaggggtattttgtatttggtccctctagaagatgggtaattagcatttggtccaatatttatcgtttattagtaa

SEQ ID NO: 108499 - DNA, 567 bp, Aquilegia coerulea
  Intron number 1 from transcript AcoGoldSmith_v1.013581m (l ocus AcoGoldSmith_v1.013581m.g) derived from phytozome v7. 0 (chr-ID scaffold_11; pos 4032086 to 4032652 reverse stra nd)
tctgagcttggctggtatgtatggtcttttctgcatataatgtattcttaacaaagtactcatggaagacatcaacagtatctaaaagtaataagattttttcaatcttttacggtttcttatcttattattattattttttagggttttggtagtttgatctgttttgaatgatctctctcatagatccatcctagctaatagagactttttctaatttcctttagttttggtagacatgtaaagtgtggaaaacatatccattttagagggcatgcaaggaaacagattgtttttgcatttatcattgattcaattcattcattgaatgtcttgatttctctttctaaattgctaacttatgttgttcatgtgccaacaactaatgaggatctaatgccacttttttcactggctgattccattgtcatcataatttatgcttatagttttgatctgaaaaatacgtgatgagtttatatataattttttaccttgaaatgactgaagatttaacttgtaatgtgcttaggggtcctggtgtggctatactcattatatcgtggg

SEQ ID NO: 108500 - DNA, 376 bp, Aquilegia coerulea
  Intron number 1 from transcript AcoGoldSmith_v1.002504m (l ocus AcoGoldSmith_v1.002504m.g) derived from phytozome v7. 0 (chr-ID scaffold_72; pos 79109 to 79484)
tctttgtgctgctagcttggagattacgctattcggttagtgtttttttttttttttattgtattgaacagtgatttcagtttgtgattcggttcttgagaagttgactttcgaagattcgattggattttcgatctaaatcgccgttatttattgtcagctgttctagaaactttacaaacattgaagattgattgattaaaggcggcggatttgattggattttcttttcttgaaagatttctttctttttatagaaagaaaaggaaactcgaatcattttaaccgaatcattttactttcgaaaagagtgttcaattgattgcagttcttgtttgataaatctcaatttttctgttgttggaaggctttagtg

SEQ ID NO: 108501 - DNA, 861 bp, Aquilegia coerulea
  Intron number 1 from transcript AcoGoldSmith_v1.026297m (l ocus AcoGoldSmith_v1.026297m.g) derived from phytozome v7. 0 (chr-ID scaffold_63; pos 998055 to 998915)
agactttggcagccgccagccacccattacccatagtaagttaatagaaaccaagacccattacccatagtaagttaatagaaaccaagtgcctactggaagctctctctctcaaaaagaagcttacatggtgggactctttttcaagaaaactaaaaagacttctagttgcaagttagagaaaatatattttgtttggtgtttgctttacgtagattagttttatgatggatgactaagataacaccacatcttgaaatggggtatctcaaaatttattttcaaaggggtatctcaaatttctacttttaaattgagatacccttgtttcaagacagattagatttacaaacgtaggttagtaggttagttttacgatggatggctaagataacacctcatcttaaaatggggtatctcaaaaaagaattcaaattgggtatcttagagaatctccaatggtctcttaactttgtaagtttaagagaaaaaactcaaaaccatcaaaaactatctccaatggtatcttaaagttgataaaatctcaacatttcattaagctttctcttagagttcagagtttctcaaacttgagttttactaaatacgcgaaaatacaattttcgcacgaaagtactacatgtgcgtcaaccgtgtatatattccgaccattttttctggttagctcccatactttacaatatttgtcacattttcgttattttattttgtgttttcttcttgttctcaactatgtcttatttccaatttatgcatgatatgaatgaagaagacatcaatgacttagttcaacaaactcaaataggaactcaaagccaaagtcaaaaaggaaaaggaaaa

SEQ ID NO: 108502 - DNA, 959 bp, Aquilegia coerulea
  Intron number 1 from transcript AcoGoldSmith_v1.003764m (l ocus AcoGoldSmith_v1.003764m.g) derived from phytozome v7. 0 (chr-ID scaffold_11; pos 5356226 to 5357184 reverse stra nd)
gattctgttatcacggtatgtacttctctgtccttctctagaacaacacataccagaaatatagactggagaccaaatctttacaataacaacaacagcaaaataaacctaactagtactgctatcgatctattaaagtcaatggtatcaagttcgcttattatgaatgtttgttgatttcttaggacacaattgtgtgctatttgtaacaaagatatacctttcttggctctgtttcattatttagatttcttaaacaactctgaagtggttgatctgatgctgagacaggaatatatccaaatggcaacgcagtctcaagtgtttttatttcctttttcacatacctagcatcaaacgaaagtattgtgtcatgtgtttgttccaacttatagaagcagtctattgtcttatgaaaatcctactacctatcccaccaattgcagcttggatagaggcacagacagctaatagtgtagagctttaccaaaatcatattgtaagattttataagcttgtgaaatcaaaccatgttgatcttataagacaaaaacaaatggtcttttaatgttatcttttgcaccagtctttgccacaagtgagtgagagagttggggtaaactggtttatccattaggtcaaatacaggccttaagaagataaataacggctcattggtaccaaaaggatctgcttgacaatctgctagcagtggtaatacatttcacaatgagttcgttgcgcacaacttgggaatgtggatgatcacacgcgtgctaaactaaatttatacacctaaaaataataaagtaatatgtttctgaaagtgtaacacgttaatttgtaaattacatttatgtttttgtaagagatcagtaaattgcatgataataaccctaacataaattatttatgacactacaggttcaagttttggatcaaaggtcatcattggtgag

SEQ ID NO: 108503 - DNA, 425 bp, Aquilegia coerulea
  Intron number 3 from transcript AcoGoldSmith_v1.020669m (l ocus AcoGoldSmith_v1.020669m.g) derived from phytozome v7. 0 (chr-ID scaffold_18; pos 2614224 to 2614648 reverse stra nd)
agtgaaggttaagatagccaagccagtaactgcaggtgaatttcttgtttggactagattatttgggactgcaattgtggggacagtttcaatgtgagaaacttctgtggtcagttaaatcagattgcaacatcccaagtgacatgtttatatggttttgtacagtccacacaaagtgtataaatgaaacgggaacattatctgacaactgactttgatctcgagttttcttaatattgaattagataacagtcacactgtatttcttgtttgcttgcaatatatctggtaggacatatcggaattaggacatatcctttttatttctattattacaataaaaaaaattcattggagaggagctcttatattagatataacttgtgagactgtatttattcttctttaccatgttacaggcactt

SEQ ID NO: 108504 - DNA, 166 bp, Aquilegia coerulea
  Intron number 2 from transcript AcoGoldSmith_v1.020669m (l ocus AcoGoldSmith_v1.020669m.g) derived from phytozome v7. 0 (chr-ID scaffold_18; pos 2614631 to 2614796 reverse stra nd)
ctgccttagtccagctcaggtactaaagaaagtgatacatgtctatttcttaatcatatatcaattgggttcttatctttgtttttatgtatgtaaaattctagctttttgattccttttcttatctgcagactcaaaaggagcttgcagtgaaggttaagatagc

SEQ ID NO: 108505 - DNA, 1042 bp, Aquilegia coerulea
  Intron number 2 from transcript AcoGoldSmith_v1.003661m (l ocus AcoGoldSmith_v1.003661m.g) derived from phytozome v7. 0 (chr-ID scaffold_6; pos 7684050 to 7685091 reverse stran d)
agggtgttgatactgctaaggcagagcttttggaggtagcttacttctcttgctgttatattgtgaaataaatttgtacataccgactctcgcattgtaaactgagtattctgtctcctgtttttatagtcgataacttttaactttcagtaggtgatagaagtagcactaatattgggggaatattatcttgtgcatacattaatagaactgaataaaagtgtttttatacttgaaattgaaaaggattgataattgactgaataatttttgaaaattattctaggaaggtttgatcggtaaagacaatttatttacacttcttcaaaatctccacaatgatatacacagaagtaactattttgtattggtaagaaaaaaaagttgtttgaggctaggcagtatagtgctactatgttttttggaagagtcatctaaagatattgttgaagattatgacaaagatactgagctaaagggaaaagttagtcatttgttactccaacacaaaaacctattgttatcctcttaaaactacccccttccctttggttttaaggtgattgtgctgaatatactcaacttctatagtgaaataaaaatattaagctaaaacggataattatataaataatgttgattcttagtgcagcctggcagacctcaccagatatattgagtatatagcaacatcattaaatctttggaatacacttgttaaatactcgtaacagcttctgtctttaagctaaggttttgactgttgaactgccaggttaacatttagaaatataagttgctctagcgcaagttgtatcacaccagcatgtattttcaatgattatagtgtcttgtgttgctaatggagaatgactatatgctatggttcctgagggttatcctactatagtttgtctttattaatctgactaccaatgcaatatgttcttcacatgttcaattgtttcaaataaaatcttaaatgttttctttcgtactttctctagattgtattgtgtctacaaggatctatcaattacag

SEQ ID NO: 108506 - DNA, 1035 bp, Aquilegia coerulea
  Intron number 1 from transcript AcoGoldSmith_v1.003661m (l ocus AcoGoldSmith_v1.003661m.g) derived from phytozome v7. 0 (chr-ID scaffold_6; pos 7685853 to 7686887 reverse stran d)
acactgactcgaacttcatcaagggtctcaaaccaccagcttgcaaagttgcaatgctctgcacaccagataacctgttctaaactatgcatgcaggtttttttgtctgtgcaaagaggattctttcttgtaagaaacaactttcagtgttttacaagaatgctatctgaactacaacataaaccattttacaagaatgctatctgaactatcttttacaacattaatcttcatatgagaatttgagaagtgggtagtttatcttgttgctgcaaaggagaatgccattgccatgaaccatgaagaagcttttcaaaatgttttctggtttgtgggtgaaggtggtggtgatgatgagagttttatggttataaaccgacccgaaccataaccatgacccggttactgttattagataagccgaagatattggattggagaagaagacgacgacgactagcaatttttttttctctccatttcgtttaataattcaaagttttcagatttaagtaaatcaaacaatacccacttcatagtttccttgttgaagctaagaaaacaaggtatttgtaatttttttaagctcattttagtgtatatatttgctattttatttgatgaaaagcaaaccattttgatcaaataagagaataaaagtatcttgagatcattttggtaaatgggtattgtagaatttgtgaattagtttcagaaattgttgtttttaaggtagagtaataccatatagtttttttttttttttttttcaagaatgtccaactatggagtcatgggtgttcaggtttcttgttttaatcaatcaatgatgttttataatggagataaggatagatttcatgtaggaaaattacaatctttggagaaatatagaagttttggtagtgcagtttctatttcatgttcgagtttattgtgtttttcttcttggaggagtagtagatgtgaagttagaaatgaatcattgggtaagaagaagattaggtcacagattgatacaagcagagaaaatcg

SEQ ID NO: 108507 - DNA, 831 bp, Aquilegia coerulea
  Intron number 1 from transcript AcoGoldSmith_v1.027757m (l ocus AcoGoldSmith_v1.027757m.g) derived from phytozome v7. 0 (chr-ID scaffold_11; pos 4178747 to 4179577 reverse stra nd)
acgcttaagccaaaacccaaggtatattcctttctcttaaatacatcttggttaatactgtttaactaattcaacttgcatgcactacacacctatacaataaaacatattgctctctctctctctctccaacttaaagaaaaaaaaaagcaacttatgtgtgtttgttcttttggagtttgtagcaagcaacacgtgaggctttatcttcggattgttcataattatgggacaaatcaatttgatggatgaaacacaatgttgaatcgtgaagctatgggttgtcaacatttaccatttaccttttatgcaatgcctatttgtctatagaaacagtgacaagagcaatacaaatgggcaaagattacgcaaggtggttagagattttctatttcgttcttatcataccctttttctatctgtatttaaaaactccaaaactttgatttgcaaattgatatgtgatgaatgtcttatcttagagccttctgaacaagatattcatattagataagtacgcataggaaagaaaatgacacaataataagcaacggaatactgctcttaatagagggcagcatgttcatgaagggactataaagatattttagcaaatatctatcttacaaaatagatgtttgtacaggattttgttttatcagtgcaagaggcacgtgtgaaaaaaggtgtatcgctgaatttatgtagtatcgtctgggttggaattactctctgcttgaagtatatgagggttatatttcacagttcatataatctgttgaccccaaatataaagatgtgcttgatttggtatttcaggaagagaaggag

SEQ ID NO: 108508 - DNA, 1030 bp, Aquilegia coerulea
  Intron number 4 from transcript AcoGoldSmith_v1.006865m (l ocus AcoGoldSmith_v1.006865m.g) derived from phytozome v7. 0 (chr-ID scaffold_1; pos 313994 to 315023)
cctatctctgcacaaggtactcaaatctaggcaattattgtgtgaaggactttcttcttggatttcgtgctgatgtccaatttaagtataatccgggtaacaagatggctatacgtaggttctgataaggtgtgctagcattaggatatattctgtcatatatgaagagaaaaagattcatcaacaaccataggaaagaacttgtacaatctatttgagccatgacagcaggttttattagataaactcattgaaggaccttcaaagaaatattaggatatgtatttgcccatatcttgctagaaacaaatacaaaagtcaaagctcatcagtcacttcatgcatggtttaaagtttaaattattttatttatgaaactatatgcatgatacattgctactgaacaaataagatagtctgacaatgtaaaccagggaagcctgagatgagagtatgacactgctctccctacctcactcaataaatagaaaagcgtaagaagaaaataaaatgaacgaatattttaccttgacgtttaggatagagattttttgttgagagattttgagacaggaggccttaattgattttgtggcaaggtcgcctgaatgcttgacattttctttcttttcgtcaagtatcattcgatatagctatgaattatagtaaaccatttgtgatactgtatgaccactttcgtctgttgacatcacaagacacatagttccttatcatgtatttttgaactttaactttatttgaaatcaaaccaaaagacccactaaataagttttatgtctcacatcaagcagctccaggtgattttaatttatgaattcaaatgaaaaggcataatttttaatgttgtgaagaataatatatttttctcttcatatatatatatatatatatatatatatatatatatatatatatatttattttttgcatgtatctgtgccttctgctgacttgtcaaattgatttcgtttcaggaaaaactttaaagccagatcttgaattagtgaat

SEQ ID NO: 108509 - DNA, 853 bp, Aquilegia coerulea
  Intron number 4 from transcript AcoGoldSmith_v1.013452m (l ocus AcoGoldSmith_v1.013452m.g) derived from phytozome v7. 0 (chr-ID scaffold_10; pos 3714322 to 3715174)
ggctaacgcagaatctcgttgtctgtcagaagctggtaagtggtaaccctgcttgttcaactattttctcacaatctcacgttttctcatgaaaaatactaagcagaaccgtagagcggtcttctttaaagtagactgcctcataaaattctctgttccttagcccattctccagtatacacatggcagttcttacttactttgagtttgagttcctctatttttattcaaatggatacctaagaacccatatatatttagtaacttattttttttttcttttgatttgttgttaacttgcttctaagttctactaggaatttgagaaagaaaaaagataagaatatgtagatgagaatggtggttcacgaagacaatttatcaaacatctatcactacagggctatagcactttttgtatctgtgactctgtgaggggggactaggccttacctcactactggaatatcatttggcaggaaggaacatgttggatatccttttaattttccttgaagagaaatttgatgcttgctagctacaaaaactaaggattatattcaaactgttttggatgagtagatgactaatggattcttttagtgcactttcttgcaaaataccttggctgatgacccctttacttttaaccaaatgggttaagccactggagcgagcccctggtttttactgataatatatatatgttgtgaatcattaaaaatggctctaacctgcctgatatgtttccacatcttatataaatgtgatgtttacataggtgtcaaagtgtcagctacctgtaattgcacttgaagtaatttttatttggatttcagcttttggtaaggct

SEQ ID NO: 108510 - DNA, 894 bp, Aquilegia coerulea
  Intron number 2 from transcript AcoGoldSmith_v1.017927m (l ocus AcoGoldSmith_v1.017927m.g) derived from phytozome v7. 0 (chr-ID scaffold_30; pos 1605037 to 1605930 reverse stra nd)
gttgtgatttagccaggttagtgttctttaaattgtctacttcaatttaatgtttcatgaccttaagatatgtaaatcataattccccagaagccattagccggctttgcatgataaccctttttatgttgtattaatgtatgtattgtgcaactacatgccaaagaaattactacctgtttacagtactgtaggtgttaaagtgttccatgaactggtttttgtctgcaaagaatgttgaaatttgattatttttaaagtggtgtgggcttgaagagtttgaaggcagtatgtatctcttgaatgttgtaaaacttgtgtatatttgttggattgtgtgcccatgggctaggacttgtaaattatgaatatgataaagaatgtcatcctctgtcaaaaatctacataccagtttattagtagtattttaagtggtatgtcacagtttcatttgtttataaatttctaatgatagattgataggataatggcgccgaccagggaattttgggtcattggattgggtcaaatatctgccaaatagcatgttcttatgtctcatagagattagagaccattaagcaattagataatatatagtttgtggatagggttagtcatttggtacaaaactaatatatagtaaattaaggtggctaggccagtattgctaacaaaactgatgcaaaaaactaaacttcccacagaaacattattaaaatcaaaactaggattttaaaacaaagggttttatgatgactggcaaccttatctagagtgtaaccacctcaatgatataaacatataaaaaacgcaccaagttagtttgaagttttgagagaagtaaagaaaaatcaagagaagtcttcatttgtctttagaagagtcagagat

SEQ ID NO: 108511 - DNA, 585 bp, Aquilegia coerulea
  Intron number 1 from transcript AcoGoldSmith_v1.010244m (l ocus AcoGoldSmith_v1.010244m.g) derived from phytozome v7. 0 (chr-ID scaffold_9; pos 3689074 to 3689658 reverse stran d)
ggggtctctctttcaagtaacaagtctgtaacaaggtaaatcaacttactctcatcttcattttgaagagtttgtttaaatatttcttgctattcgtttgtaattcaatctgctcaattacttgtattctgatatcatattaaggtactaatatagctcaatatatagatcgagtagaatcaaattgaggggtagaccaattggtgcatttcaattcaatacatggtgtgtacattagttttgggattagcaatatcatggttaagagaatgtcttgaaagaatgttggaaaccttactatggattatatggcctgcactagaagaaaattcccaaataacgcaatttgttataagtaacttttttactttgtttattgtttctgggtggatgattagatgaatctctcctcatttcttcattttatacgcagtatataggttagacactttattcaagtcatagcatacatgccaatggggatatttcctatcctagctagatgattgcaacaatccatcttagagagaatatattgtatatctcatgtttaatcgtgtatctatcacttacaggtttggttta

SEQ ID NO: 108512 - DNA, 813 bp, Aquilegia coerulea
  Intron number 2 from transcript AcoGoldSmith_v1.023852m (l ocus AcoGoldSmith_v1.023852m.g) derived from phytozome v7. 0 (chr-ID scaffold_30; pos 355437 to 356249)
ggttcggcaaaggtaaaaaaacaaaaccccccattgtcaaacttttttcatacttacattataacttttaattgaaatcctacattataatgtttttgcttctagtgaacatatggttttcccctttgcgcaaaagtcgatatggcttctggactaatctgaatgacattaagtatgcatatgaatataccattgcgtgtttatctctaattttggaattactgaaagtttgagtctggcatttattagaagtttgttgagattttatggtaatgtatgtatctgtgcctcatagttgttgttgttgtctataaattagcaacatggtacaatgtatttgtctataagttgaaaaacaaacacaattctagcttctgataaaaggattactgggatactgtatgttcctttagcttgtcatacatctttgtatcaacacatgatgcattctgatggatatcggagagttgccttataccttctaaattgaagctaactcactcaaaaggaaaaacatgaccatactattgcctatgagattttatagggttggatacatcgtcatacactggtcaccatctgacgtactttttgtttacagaatgagccactggttggttatccttcggttctcctgtaggtggatatgcgattcgttttttattctaattgtcttctcctgacagctaaatatagcttattatatttatgttgcatgctatcaagtgtccaacagtgtttcactattttgtaatttttttcttgaaaatatttgtaggtacttgctaaggaagtagtaagatctagaagagc

SEQ ID NO: 108513 - DNA, 923 bp, Aquilegia coerulea
  Intron number 2 from transcript AcoGoldSmith_v1.007765m (l ocus AcoGoldSmith_v1.007765m.g) derived from phytozome v7. 0 (chr-ID scaffold_27; pos 2165365 to 2166287 reverse stra nd)
gttactcttcttgtatacggtgtattacaggcaagattattcctctaattgctctttttcattttttcgtatatacattttctattgttgattatttgaatctaagaaattttaaaatcaattttgtttttcttcaatatttactattgtttatagatatatatgcgaaaatagaatcttgcagagttcaggtaacaataaaccaaagcatgccatcctctattgttcatttcaaatatcagtaacttttgtcataatctattgactaaacaacttagttgtcatttagagttgatgtttcttactgtagcagcaaattttgtagacctttggtggctgcctataccctcattttagtgtctattgagcatgctccacagcaaaagaacatagacttgcacgcacacgagcctagtaaggtttaggcaccatccttactttagtcctaaaaagatgttaacgggttctttggtcatctattcctagatcattcttcctgtccataactgaggggttagcatagtttttacatagctggaacttgctcttgaagaccatttaagatgccaacatttactaccatctgtatggaatcttgtgaaaatgggattggcatattggaaggttttagaaatgcctatctaataagaaaaagcttaaattattttggagaaaaataaacaaccagaaactagctttttctagtgaggattgtagacgtgttctcttcaagtactttaaacagtgttgatctctatttaaattcactataccagaaaattttctccccactttctgtatcatttccacattctttattggtattgtttttctagttaaatgtgttctcttgttagagtttgtcgtatatgttagatgttgccattgaactctaactgagaaaaaatatgcaggaaaagatc

SEQ ID NO: 108514 - DNA, 638 bp, Aquilegia coerulea
  Intron number 2 from transcript AcoGoldSmith_v1.005102m (l ocus AcoGoldSmith_v1.005102m.g) derived from phytozome v7. 0 (chr-ID scaffold_9; pos 2881902 to 2882539 reverse stran d)
tactcttgctcagaagtggaaaccccatctacccagtatgaattctcaatttatctacagtatcttctaattttaggcttttttggtattttttaaaaagactgggattttggagaaattttgaatttgatctttaattaggtgttttattgtattatatctatcatggctttaatttgaaaacgaattttttatgttggttgtgctgtattcagcttgattttgagttttaggtatttggtattttattgggggtaattaattaagcaaaattacgagattttggcatttgggttttcaatttgtttgttggttgttcttagttaagtaagattttgagtttctaatgattggttgggcgattttgttgcttgtttggacttcatttagtgaattttaacttaagtacttaaagtttgaatttttatagaatcatatcctttttggactgttttttcctgacaagtttacttactcaagctttagttgaaaccccaatagtttatgagtttcaaaaagttattagggtttttggaaattggcaagggtttatgttatattcttgttatattttataagcttttttttttgttcattgtgcagtttgtactgttctaggacttgaaaaagacaaggaa

SEQ ID NO: 108515 - DNA, 693 bp, Aquilegia coerulea
  Intron number 2 from transcript AcoGoldSmith_v1.001907m (l ocus AcoGoldSmith_v1.001907m.g) derived from phytozome v7. 0 (chr-ID scaffold_11; pos 4717434 to 4718126 reverse stra nd)
attgcctatctattatcctgtgaacaagccatcaggtacaacttctttaatttatattattgcacaacattttaatttttataggatggtcttacgacttacgagaatgattttgtaaatgcattgtcaaagttcacaattgtgtatgctgtataatgtgagttaaccctaaaccaaaataaactcttgttcatgaagagaagcttcatgtgatgaactgtaaacataatcaaatgtacccaaacttttctagttgctacttgatgacttgatgtagaatattagatttgtcatagtaagcaatgtatgttacttttgtgttgtcccttaaattggatgcatgaagcgaagttccttaaaacatgcaatgttgctttttgttatccatagaaccccccccccccccccctcttcccaagtttattgaaaagggtaaggaaattattcattttataattatgagattatctaaaaaacaatatgactcacttgttacaacgaattaacctaattttttatggaaaaaaagcacatgtagttcttgatatattgtgaacagagaaaaccagttcctttattagagatccacctcatcttttggtaaaaggtcaatatgccattcatgatgtgactgacccaaaattgtggtatgttgcagattctgtaggtgtattttcgtctgcagttgacgct

SEQ ID NO: 108516 - DNA, 426 bp, Aquilegia coerulea
  Intron number 1 from transcript AcoGoldSmith_v1.005141m (l ocus AcoGoldSmith_v1.005141m.g) derived from phytozome v7. 0 (chr-ID scaffold_9; pos 759112 to 759537)
tggattcgagacacgtcttcttcctgatcttctaggtaaaattcattctttctcttatttgttttcatgttcttacatcatgttttcttttctcttcttgattttttttttcttcttgaaaacccatgcgaaaatttaaaagaaattagggtttgtttgattgaaatgaatgattttcttcttgtgggtattaattaatcattcatctatctttttgtcaaatttgaactgatttagattcgattctagtgtcctttgtgatgaaaattatcattttttgttatcctgtttgatccaatctttgaaaacccaccattttcttggtggaaataaacatgattgagaaccatagtagatggggatgataactcattcgtgttgcgtgtttgttggattttgattgtaggggacaaactgggattacct

SEQ ID NO: 108517 - DNA, 542 bp, Aquilegia coerulea
  Intron number 1 from transcript AcoGoldSmith_v1.003673m (l ocus AcoGoldSmith_v1.003666m.g) derived from phytozome v7. 0 (chr-ID scaffold_123; pos 231140 to 231681 reverse stran d)
agttttgtttgaattcacgaagatcgattagttaggtagttcatgaatcttgattttgattctatgatcaacttcaattcagcttgatcttcaatttcaacttgaattgaagatcaagttgtgctgattgtttgcttgatagttgaattcaatcatttttgctattgatatggaatgtgaattttttactatcttcaccactagttgaccttcatctccaattcactttttcattttgaatattttctgttttaacatgatcattttgaacattttgtgaattttttatcaagtatgtgaaaccaacagatccatatcttttgaatttctcggatatatgtttatctgctcattgtctcatacctatacttaattcagtttatgattaattttgttcagaaactgaaattgtggttaagtttgacttttgtttttaacaaatagttagttttgaggttgaaagttgaaacactgctaacttctttcagtttatggttttgtatgtaggtttcaaggagtattgttgcctatactagtagagt

SEQ ID NO: 108518 - DNA, 728 bp, Aquilegia coerulea
  Intron number 3 from transcript AcoGoldSmith_v1.002078m (l ocus AcoGoldSmith_v1.002078m.g) derived from phytozome v7. 0 (chr-ID scaffold_7; pos 1441523 to 1442250 reverse stran d)
gagaagatccatctttggagaattggatatctgacgtgagtaatcatctcatttagcaagtttatgtttatcttcaagaggaatgtcaatgctatttttttgtatcaggaaaattagtttttgattatatgacttgttaaaaagggagttcaacataatatttattgctgaggcgggttttttattaattatttttgttttttgtgagttaaatatttagagatatacaataaaaacaaaacgataacttattaacagtcactaattagtaattaccagtttaccacattcaagtagtactgtagtaaaaaaatgtatccatgtacttgtagccataatgtgcaatgatataaactacaaatgattgcatacggtctcacgggaagtattatgtgtgtatgaaaaacgagctccacatggtattttttgccaaggtgatttgattcttcttttcttgtttgcatcagtatatatgcaattatactataggtgctaagctacaaaaatttgcatgcccctgtcctacattgttaagaaatagaagcatcctctatttgtatatgtaaagtctgagagaaaccaaaaactgtacaaaaaagctttgtgactttgcttaaaaatccaagaatttaggtatattgctattctatgttttctcgttgggcgttggcatcatcatctggagtttaatgcatggttgtaatcattttatctttagaatctgccgg

SEQ ID NO: 108519 - DNA, 699 bp, Aquilegia coerulea
  Intron number 1 from transcript AcoGoldSmith_v1.023309m (l ocus AcoGoldSmith_v1.023309m.g) derived from phytozome v7. 0 (chr-ID scaffold_60; pos 924809 to 925507 reverse strand )
tttcaaggttccctcccattccaacttgaaactgggtgagttactaactactacaccaaatcttgcactatacagtgtatagtatacagtccattttttggatattttagaacttgggtaatctaaattctaaacaagtaagaatccaagttataaaaactgtcaatttgatataaaattcaaagtaattaattaactagagagaaattattcttttgccaattgccatatatggttacaagacaatatagtacttaaactttatctgtattaatagagcatctctagcatccaaaaagatttgacacatccatataatggtaacttggttccattcatagtactatacaacaactaagaatgattttaatgttaggagattaatagcttgtcatacttagtacttagtagtacccttttaagttaaaaactcaatctacttcatggcatatgaggactaaaatgaatccttaaggccctgtttagttggggacaatgggacattattaatagtattgggaatcggatctatggcgcttggtctggggtcttctatagctttatagtcgaaatccatattttgcaaggtagtatgcatggcactgttccatccattacttatttgtccaagtagctagaagaattttcaatgttaatttttaatgaaattatgtttattatgcagatacattggtgtgg

SEQ ID NO: 108520 - DNA, 644 bp, Aquilegia coerulea
  Intron number 1 from transcript AcoGoldSmith_v1.018450m (l ocus AcoGoldSmith_v1.018450m.g) derived from phytozome v7. 0 (chr-ID scaffold_72; pos 824237 to 824880 reverse strand )
agtgctcgaatcttcatccattatctctctgccacgtaaccacacatctctctctctctctctatctatttctctctcttagggttttgaattaattagatctactagatttgtaaaacttataatttttccttcaaacatttctgagttagggttttgaatcaccttgatttaattgaaattacactaatttagtaccaatttagccctaggtcatgaattacaagtatataagcaatagaagcacttgaagactagctatggactgtttattttgtgcatttgttggtaaagctttaatctttataccgtgtttgacaatttggggattttattttactgtaatgaatatagatgttgtttcgtcaccgaaaaagtggtaagactctctgattctcttcaaacatgtgttttgcatgtatgtttatgttttctaatttctataggtattgcgatatattgtaatatgtttcttactttcttaagcaatctgtttacttctaaaataaacatttccctgtatttgtcttgcgttataactattacaaggatactatttgaatttattttcacaaaatatctatactgtatgtggttttaccttgcatgtttcttttgatgactattattctgttgcagtgcaa

SEQ ID NO: 108521 - DNA, 780 bp, Aquilegia coerulea
  Intron number 1 from transcript AcoGoldSmith_v1.023729m (l ocus AcoGoldSmith_v1.023729m.g) derived from phytozome v7. 0 (chr-ID scaffold_9; pos 936021 to 936800)
gatttatccctgaaaaggtaaggcaaaaaagagttaaaaaatgggtcctataggtgtaatttatttgttttaatttttttcctctccttttatattgtaattaagttggtagcctcctccctttcttctctaatctctaatccaatcattaactcaagccacaccccacaccccacaccccatctggtatatatatggtcagagagtctctggttgctacgtatattactaaagaaccaaagaggcttttctaccagccgggggaatctagtaattaagtttggtatgggggtgcaagtactttttggggagactagcttcccacaatctccattagattcaacattgcaaccattactttgatctgatggtttactccaacttttcctatataggttttaaatggaaaggagaaaaatgtcagaaagaagatatgcaagaatattgataaagatgagaggtaaaatatgcaacatctttttttttccgcgctagatagctaaaagttattgatgttgtatgatgttacagtgggaaaaagatttcttctttggaggcattttctttggtttcatatcccccagattcctctaatcatggtaagattgatgtgctttgaataaaagtgtagaaaaagtaggaaattttttctttttctctcagattggatatcccaaagtgcatctaatatatttattttttgttttgtttcaatttatttgcaaaaattaggtgagggtgggcgtgttatgcttgtgaaggtaagcaagacatacttga

SEQ ID NO: 108522 - DNA, 942 bp, Aquilegia coerulea
  Intron number 2 from transcript AcoGoldSmith_v1.015808m (l ocus AcoGoldSmith_v1.015808m.g) derived from phytozome v7. 0 (chr-ID scaffold_1; pos 2377369 to 2378310)
ggcaggtaaaatatcatgacttgatttaattaaacgctaaatagattatattatacattgaaatagaacacctactaaagttgcattacatcgtgagaattatctgttttcaataataacttctttccaaattgattttggtccatatatgttttcaattgctagtctaaggtggttgaaaactataaggattttttattaaaaaaaaaaactataaagatttgacttacaattactatttttttttatgaatgatttactattttagttagttggaattttcatcaatatgtaaaatcatgtaagtgattggtttattaagtgaaattagaattcaaatattattagatacctggttgtagattctagatgtgcaacacctgatttcattaacaatacaacatgggtctggtaaaccatgatatgaataaacattattcagtgaagtccaacgtactaccatctttaccaatggcctgagcattaacatccacaataggggtgccaagtttaaaatgtaatcagaggagctaaccaagctagctaattagtaacatatatttgttcaggcaaattctcttctctagaaacgtttttgtcctttgaaataggatatgatacatgtacctacagacaatatgttaacgttgatgttgagaggtagatgttacataccatcactgtattattattattattattttcattattaatttctgttaatatagatgttgacaggctcttaattatctgtgcaagtgtgggtgttatatttttagattcttgacatcttcgactaatattatctattggttatttgattttgcatattcagccatttacacgatagagttccagaaaagaggcttaccgcatgcacatatactaatctttctggatggagcagacaagccagatacttcagtgaaggtaaacaagatt

SEQ ID NO: 108523 - DNA, 475 bp, Aquilegia coerulea
  Intron number 3 from transcript AcoGoldSmith_v1.015515m (l ocus AcoGoldSmith_v1.015515m.g) derived from phytozome v7. 0 (chr-ID scaffold_49; pos 1461924 to 1462398)
tgtacgttttcttctgctctgtttatcaattcaaaacaacaaaatagattatgggcatggccatctaaaggatcaggcgatcagccatatgttaccttgactctttaaaaccttcaacgtactctttgaactcaatagttgatcaagaggggtatggatgtggaccacataccctactaaatgttgtatacaaaggtttaactgtcagattattgtgcagtaagtaaataagaccatctatgttaattttattgattctaaacctatatagcagtactattcctattcttaattgtgatttgcttgactttttgtgatcagaaagttttatgaacaaatatgcataatatggactgctttcttttcctcacaacttatcttcattagtgtgacttgttattttctacatatttatatatgtgaactttatcaaactctccactttgattttgcagaatactaacaaagcatcagc

SEQ ID NO: 108524 - DNA, 664 bp, Aquilegia coerulea
  Intron number 1 from transcript AcoGoldSmith_v1.008991m (l ocus AcoGoldSmith_v1.008991m.g) derived from phytozome v7. 0 (chr-ID scaffold_9; pos 4714542 to 4715205 reverse stran d)
ttcctgtggttactggtgttgtcattgccagtggggtaagaacaatttatcgtagaaatttatttgaatttgttttatttagttttgccttttttttttaatctttttcattgccattggttgtctttattataattctgtgttttatgttgtaactatctgggtgttgaagaataatatttgtcgctaaatttatattaatttggaaaagccttttcgaaagagtggaagtggtagggttgtttttgttggaaaagggaacacaaaatacttgtttggagccttgtttcaaaatatttgttgtgatgtctccacctatatctaattagttcacaaattgtttctgtatactttttctccgcatatatgtttcaagttacaaattggaacgttgcaatatctccacatattaattgttttgatttacaatttacccctgttagttaaaatttgatttgtcattccgtgtggaatatgctatgtgttacgatggacatgagtcatgacacttattacttgcttgtaaatttcctaaatttatcaactttgtttgtacatacttttttttgcatatccacttgacggatcttcagatagttggacttattgtcttggataattttgcgcagggtgaacctagtttccatctatttgggtttataat

SEQ ID NO: 108525 - DNA, 1037 bp, Aquilegia coerulea
  Intron number 2 from transcript AcoGoldSmith_v1.001324m (l ocus AcoGoldSmith_v1.001324m.g) derived from phytozome v7. 0 (chr-ID scaffold_30; pos 120015 to 121051 reverse strand )
gattcggacctacagtttcaaggcaagtgtccttagtttctattgttttgatttattagtctgatgaccatgcatcacattatgtattgcaggctagtacatgaaatattgtccatccttttgttttcaaggttgttatgaaataataacttactgatcgctaagaaagggtgatctctatgccaatcataatcataccgagtcatgcagtagtaatcaaacatttattgtaggataatcgcttagcataggctactttggttttatctgttgcatgactttacatgtgctatttttaagaataaagtcaataacaacaacttataggtcaaagttacctacttcctctagattttcacttcctaatttattaagtttttctgctcaatgtaacggtgtttagtagctactttaacttgaatcctattcgaactgattttctcttgtattctataaaaaaggatcattaatctacattagaagggacaacctatttgtttgaaattacagaatgaaacaggctcatgtggctgtcctttgttgatgtactaaattagttgcatggaacattatattttttcttctgcaccctttcccttgttttgtcttctctttattgcaagtggaaatctcttaaggctctcgttgacgagacatggctatttttgctgctctgatagcattgagtaaatgtgcctcattgtatatcattaactattagcttacaatggaatacattgtcagaaaaactagattatctctatactggaactgtgacaaatcagtggttacgtatgcttcacgtagttgtttataatgaagacttttggtgacctctcacctctgtactaggtatcgtatttgtcatggcctgaccactttagcttaattatgttgctttttatgatcttgccagcgaatttacactcctttctcttaagatgaggcatgtattgccaaattgtttgcctacttataaattctagttattcttgattgcaggattttcgcaaccaactcaatctcagcgcagtaag

SEQ ID NO: 108526 - DNA, 392 bp, Aquilegia coerulea
  Intron number 1 from transcript AcoGoldSmith_v1.020696m (l ocus AcoGoldSmith_v1.020696m.g) derived from phytozome v7. 0 (chr-ID scaffold_7; pos 1014444 to 1014835)
gcaaggagtttcatgtcaacgaccaactgctatcatgcattaaatatgagacagagaaatttagcttcccatctttttctttacttagccaaaaaaactcaaaaatataaaaccccaaattatcccctaattcgatctaattgctccttagtcttcgttgcgtgcatctcaatgcactgtctacctttcacgtacaacatcttaactggctcaccaaacaactgaagcagcaagaagagctaaacttcttaatagagaaacaacaaaacttgtcactcaaaacacaacacagagtagtctgaagtctgaagtctgaacttaactgaactgaatatatagaattatagagagattgaatgagaggaagtaaagaaaacacaacaacatcaacg

SEQ ID NO: 108527 - DNA, 239 bp, Aquilegia coerulea
  Intron number 1 from transcript AcoGoldSmith_v1.003715m (l ocus AcoGoldSmith_v1.003715m.g) derived from phytozome v7. 0 (chr-ID scaffold_1; pos 3508492 to 3508730 reverse stran d)
atcttggtgtttctggtaagtcttttttcttcattgtatacataaaaatgtcttgtggtatatggctaatttgattttgtcggtttaaatgccgttttttatttggtttcttttggtttaatgattgttttaacttttaattttcatttggatttgggtaaatttgattttgtgaaagtaaatgacaaattagaaatacttcataattgacacatatatatataggtggagtgacatcc

SEQ ID NO: 108528 - DNA, 872 bp, Aquilegia coerulea
  Intron number 2 from transcript AcoGoldSmith_v1.020468m (l ocus AcoGoldSmith_v1.020468m.g) derived from phytozome v7. 0 (chr-ID scaffold_6; pos 7806518 to 7807389 reverse stran d)
gcttgccaagatttttggtggaaggttagttactcattattcaacccacccacccacccacacttctagttctaaccatacaattacgaaattaaattgcattgttcagagttagataccatttcgctacccttcctcgcaacactcaacttttgagttactatgtatttgaactatcctatgtatcttgtctcaagtcattaagaatgtatggtttccttgtactactagtcctgtatgtatatgtttgggagttcttattttctttctttgaaaacaaaatatatggcttgggtctagtgttcgtcatcttaatatgttgccatcaatcctctctatgatgcaaacaaaggaaaaaaaaaatatcaacagccctccattaaatttggtggtttatctcttccatctttttgattctccaaagttggtagttaattatttgcagtttccaattattatgggccttaaaaacagcatactagaataggacacatggaatccttgtgcaaaattacacaaatacgagcctcaatagtttgagaaaacaatacattttgaaattttttgaggcacaatgagaagctttgggaaacaattagaagtcaatgacaatttagaatattgttcttacggtgaatatgacttcaagttttcaatactggaagaaaattaaattacatagctggaaagtattgatgtttattgattgcactaacattgatcactttgtaagttgaatactggagtcctattcatggctttatcccatagcttgactgtcgacttcattgcattcaagtggctgttatcctttctattcttaccatttacatcatggctgatacaggaaggttctcgagatcggagttttg

SEQ ID NO: 108529 - DNA, 702 bp, Aquilegia coerulea
  Intron number 1 from transcript AcoGoldSmith_v1.017338m (l ocus AcoGoldSmith_v1.017338m.g) derived from phytozome v7. 0 (chr-ID scaffold_10; pos 3595047 to 3595748)
tccacccccttcccttacaccaagtgcacctggtggtgagacagaggagcctgcacaaattaacatccatacacatggttcttgcgcagtttgtgatggacctggctgttccatcatgtaacacacatagctcaaatgtgtaaccaggccttttttcttcctttttctccattgttgtttaaacttattctgatcaaacataggtgcaagttttagtgctagcaattttattatatgaaaaaaatgattattaattaaaccaatcttgtttattttagttaatctcggcaaaaaatttatctataattactcttaatcttgttaaaatctgagtacataatttgtattattctatgaaaatcagcttcttatttcttcaaaattgaaggtgactatggatgaaaccaaatgcataaaattattttattgataatcatatcttgctagtgaaaagaacaaaatcaatgccaaatggtgccatatctctaataagaatcaagcactttcttttctttattcctcaccaaactaactggcaatgacaagaaaaattagaaactcatgatgcccaatcaaacatgcatgataagtgataaccaaccaacatgtgtgtgttttttaactctgacatgcctttttaactgctttaattctctcaataaaatggatatgtgtgtgtttcaaccgttaactctgacaggg

SEQ ID NO: 108530 - DNA, 973 bp, Aquilegia coerulea
  Intron number 1 from transcript AcoGoldSmith_v1.016754m (l ocus AcoGoldSmith_v1.016754m.g) derived from phytozome v7. 0 (chr-ID scaffold_46; pos 66437 to 67409)
gataaatgtaagtcgtaaggcattactcttagatattaaaactctataaagaaagaaaaaaagggataaaagatgtaaaaagagtaaagaagaaaaaaaatgaacttgatgagaaatttacaggttgttgttgttgatgataatgatgacaggagagagaacgcagatgacagattgtgagatttgttgttattaactaaaaaattcacgatcaaacaacagtgattgtagttaatagtctttagagattaaaacagatgttagaaggaatatgaagagaataaaaaaattaaaaccaatgctagttcataccttagattcgagattggagattcacagagagaggaattaaggtttggttgaagcaaagcattcgtaaagagaaataatggaatagggctttctagaggaaaagaaataatgtttaggaaaaaagaatatacacaatgtagttttaataatatcccaaccgtcagatcataaatctgcatcgtacggtcttagttgtctctatgtttgtctctggacaaacttatgtacccgttgttgcttataacttatgtatttttcagcccatctacttcatggtattttatataaactcttttcctccaccactctccttgcgttagctgctaaattccatattcttttacttgaatacatgttagctagaacagcatagtttcccgaactcatgctacatctagatatactgaagatacaggtgcattatcaaaccctcccacaaacatttctcacggttctaagtatatgtacaaaatttactgtaatgtgggaagtgtgataattaaagtttgagtataagagggtattctgaatccaaggactaacaaaaacttacaaaaaaaatctaactatagcttgcaagccaacatttaaaatatcacagttcttgattataaaaaatgattgagctcattttgcaacctgcagtcacaccctttattct

SEQ ID NO: 108531 - DNA, 943 bp, Aquilegia coerulea
  Intron number 1 from transcript AcoGoldSmith_v1.013705m (l ocus AcoGoldSmith_v1.013705m.g) derived from phytozome v7. 0 (chr-ID scaffold_6; pos 2696016 to 2696958)
gagccaggttagactgcttttcttcggtttattgattatttttgttggaaattattttatatatatagggtaggatacaacttttgattgaaaacatattgaggaaattatttttggtttatttgagattttatgttgtcattgctaggttagattgccatttacaattgttgttgatattagtttcaggaagtgaaattctgttatacgactttatagcggttctcagtttctttaaagattaaaaagattttgttgatgtttctggttggagcattgttaaatatttgttgcaaacattgcagtatcatgttggttgtagtggaactgaatttatatcgtgtagttaggtataagaagaaatgtaaatttttatttagaaattaatgtagaataagattaaataaggtccatactattgtattaaccagtttgtgttgggtagtacatatatggcaaagaaaattttgttcgttgggaatataaaatctttgccaagtatttgtgaatgaggtttgtatttgtgagctaggtttgtaatatttgtacaaatatagaagtatatatagtacctcatcgatttgtaaaagttagtaagtaatagctgcaaaataattgtaataatggacagcttatgttatggtaaagccatttagagtagtagaatgagtttgtgcagtgatctaaatagtgtagatattaatatacacgtaagtgttcgaggttgacaatatttgcatattttttgtgacaattctgacattttatcagtggaagatattatattaggaaattagagaaatattaggaaattaaggaaacaatcattttataatatgtaatcaagtaaaattagatctttatttgatacatttaaaggagtgatggttaaatttatatgtttgcagaatattggatcgggatagaattagttatttgccag

SEQ ID NO: 108532 - DNA, 986 bp, Aquilegia coerulea
  Intron number 1 from transcript AcoGoldSmith_v1.024560m (l ocus AcoGoldSmith_v1.024560m.g) derived from phytozome v7. 0 (chr-ID scaffold_30; pos 2733765 to 2734750)
ctgcttgttatttgaaattgcataattttaaaaaggtacccctttttacaccttttattcatttaaattaacaaaaggattggttttaacttttacatgtatgtttgattgattgttgctgggaaacacacttaaagtgaaatggcacggtattagtaactaggaacaaatttcgtcattaaatagcaattttatcatcaaggtgttttctaggagaattgaatgaaattaaattgagtgattccttggtcttcaaacaatggattcgaaaagcattaatttcattatgtgcgaaccttactatgtaatagactgtgtgatggcaaacatatttatagttattcttcatttggggtatcagagaggtcagttgggatgtctgttgagagcaaagttaagcgacatctgggagaatggttggatgacatagtgtttcaattgggaaagtgtatttactatctctctcacatgacttaaaaaaatctagcggttgtcccataaagaaaatagagaggaagaaaaagagacagagagagggacaaagggaaagcgaaagccaaccaaaaaaagggaaagcgaaaaacatactagggtggcgagagtattggcaaatactcaatatattttttcatgcttccagccacttcatgttgagaaattgtaggagaatgtgtacacatataaagctcctataaatacatatcaacttattatgtgattattggcatatatgagatgtcttttttgtgttgcctgacacttgtttgtatgtcaatatgtgatactgatacataacacgttgagaaagagctgtctacatataaagctcccattaacgagttaagtcatataagaattaactacgagtctatgactttgtgcctgtatattatccaaatgtaataaaataagaaatgagttgtcgtatagcttttattttggtatccatgacaacattaacggctatcatcataggcagcagaaga

SEQ ID NO: 108533 - DNA, 313 bp, Aquilegia coerulea
  Intron number 1 from transcript AcoGoldSmith_v1.018788m (l ocus AcoGoldSmith_v1.018788m.g) derived from phytozome v7. 0 (chr-ID scaffold_18; pos 977801 to 978113)
attttgtcttcgggacatcttcttcttcttaccaggtagataaaaattctgtttgattatattgatcaagttattagctcagccatggcatattgagctatccgtacgtactaagctcaacaaaatcgcaccattaagcagcatgtttttataatgatctacttactccaaacaaaacagttggtactatgtggcttgtttgaggggatatgagatgcattttcagtgccatggttgaggtatttgtataagttaggtttgtattcaaaggaaaatgcttctgattcctgtttcttcttcgtattgttttagt

SEQ ID NO: 108534 - DNA, 740 bp, Aquilegia coerulea
  Intron number 1 from transcript AcoGoldSmith_v1.005029m (l ocus AcoGoldSmith_v1.005029m.g) derived from phytozome v7. 0 (chr-ID scaffold_27; pos 1097397 to 1098136 reverse stra nd)
ttcttcttcgcggcgctttaacttccattcctaaggtaaaagatcgatcttaattcgtgttcttgtgctctattatgttgtttaatctgtttattgagcttcatatcagctcaatttccatatgattttgctataatatagtgctttttagttgatttacttataatctttatgttgagctgaacttatgttcctttgatttgttcaattgttctaatgaatgttatttagttcaatttccaaatgatagtttgttttgagtgtaattcacctgatttgtatttgtatacatgtagattcttcatcttgagctcaactttatatggaatcgtagtttagttgatttactttatatgaatatctaatcctaatcttgatcttatcttatctatttggagattctgagatctagctaaacggacttttcaacgaaacataatgattttttagagatctgaatatctgatttataaagacatatatcaagtgtgtcaatacttttagttgggtaaatctattattatttatcaaccatagagatattttgttttagtaaccaaaatagaatgatctgaatcacctgtaaaatcttgctttatgcctttattttgcgactcttgatatcatgaaatcatgtcaaagattttcagtatttacaaaatgaattgaaattagaagtttcttactgatagatgctcttatttttttttctaatctgcaagtttccatgtcaatgcaga

SEQ ID NO: 108535 - DNA, 655 bp, Aquilegia coerulea
  Intron number 2 from transcript AcoGoldSmith_v1.003751m (l ocus AcoGoldSmith_v1.003751m.g) derived from phytozome v7. 0 (chr-ID scaffold_7; pos 6625454 to 6626108 reverse stran d)
atacccttgcaaaacatctattccactgtatgtgagagatttaattttaacgcaattattttgtacttgtttttttatttatttattcaaattagatagttatgaaatatgttcgatccttgtagtattgagtagaataagttgagcatacatataagtatataactgagttgaattactacattggagaacagtacacacaattgagttcattgtattgtgtacaatgagtcatttagttggtggacgcattttcttttgagtaatcaagtgtatatttagacagtggaagacaatggaagcatttggctctgcgtatgtataggttgattagagttgaatgtaggaagacttgtgttggttagctgaaatgaaacatttggacaggatattgttcttgatattgttaatgccatttatccgtacaaggtttaagtgtaaggatttgtgttggtagacttacttaggatttaactagttatataagttactttacatctggcacgatctattggtggtagaatgcaatgcatatactgaagctcattatatatgtcttttggtttggggttagaatttcattctcttatatttaatcttactggaatgaatgtgatcttgctcgacaggggaaaatcaaaccattgagtgggcc

SEQ ID NO: 108536 - DNA, 751 bp, Aquilegia coerulea
  Intron number 2 from transcript AcoGoldSmith_v1.019263m (l ocus AcoGoldSmith_v1.019263m.g) derived from phytozome v7. 0 (chr-ID scaffold_40; pos 1913295 to 1914045)
ggaacattgggaaaaacctgttttccttggtatggaatttgttgcccatatatcaccatatttattcaataatttttcctctctttacagaggcctcgtcattgagtggttattaggtcattactatcatgccatattattgatataaacatctcctgcatcacgaaatgatgttgcgcaatgatgttgcactgtatatccttttgtcctgtgtgttgtgttctgttttttgccttgtcgatagtaatagttaaattttttttttttttccgccagtagtttctattactaaggaggtatatagaagagaaagagacttctaattcttatagaaaggtagacaacaatgtcaaacacgtctgttcttgcattcacttgccatatatgtatctcttatttgaacactgtacattagagactgcaatgcacatttgttgtcattaagttgttttagtttcatttccgatttcttgtcttgaagtgactcgttcgacctttataatatctctcattttcctataaattagatcctatcttttgccccttgcccattcactatgttgaaatttaatgacctcacggattgagttgttgaataaaattttgctccagttagcagcacttaacattatgacatgtagtcaattttgatttttgcttgaaacgatgatcaagaacagtgtggttaacttgtgttgattgtatatattgtttaggtttctattttcttcgaccttgtcttcatattcca

SEQ ID NO: 108537 - DNA, 906 bp, Aquilegia coerulea
  Intron number 1 from transcript AcoGoldSmith_v1.025786m (l ocus AcoGoldSmith_v1.025786m.g) derived from phytozome v7. 0 (chr-ID scaffold_9; pos 6660845 to 6661750)
tcgatttcaagttctctcactttcagattcttcaggtacttttcttatctcttctcactcacattacaaatcttctttttctcttttcatttcaatttcttcttttcatctctaaaaccgctattactagttcttccaaaaccgcgtactgcaaaactctcttgcaattgtagagctttcagttcgcttttttctgtaaagatttggtactaatttgagcttcagtttcgtctctaattactcgctagattgaaaaaaacactgcgatcttttcacttaattatagtgcaatttcagattgcaaaattcactacattcagatttaaattttgtaattcattaccttcagattaagttttaattacaaaaaacaagtctgtcagttcaataagttagtgaaatttgacaattgttagtagatgaatgttgcttactagcttaagtggaaagaataaccagtttgtttttatttctgtttttggattcaactttgtagcatattacttaatgtttctagaatttaataagttttatcgcagtttaccaaaataaagagttaatgcgttatttgttaatgagatttggtgaattatctagctattttgagaattttgtagaagtcacacgcagtccttcagtcacactgttcaagttcaaattctaagaaagttaagtttatcaaatatgtagagcattgagatacaaaacgtaatctaacatttaacatcatgaattttatgatgtgttttggctgattaatatgtgtgtttttttaacacccttatcggcaactatgcacttacttcaaatcagagttccatgttttgatgggttcatttgtgttgcaagtgtgtcagtgtgtgttgggtactaattaatgcaatttcaaaaacaggtgccgaaagg

SEQ ID NO: 108538 - DNA, 1031 bp, Aquilegia coerulea
  Intron number 2 from transcript AcoGoldSmith_v1.011514m (l ocus AcoGoldSmith_v1.011514m.g) derived from phytozome v7. 0 (chr-ID scaffold_37; pos 1043112 to 1044142 reverse stra nd)
gcatcaggattgttggaggagatcacagactaagggtatgcaattgttttgtttattgttgtccactgatttttctttcaagaatctttctgatttgaaaagattgagttagcagaaatccctatgggataaacatttactgatccaatatttgtgcatgattgtgttaatttgattgctttatttcaacagaaagcttatatatatttctaaaaattgtggaacatgcttcatgttttgttaatctaggtctttgctttttatcatgtttggttttgttttgtattttgtttgtttgttatcttgttttagccaaagtttaaagctcttgtttgtattaccattattggaatagtggataagtatgccagatattaatgtaagattttttaatggtctaagcaactctagttggtttgactgctactatgagcctcctacacagtttgggtcaaattaactggtaaaataaagtgaaagaagtgaactgatgtgtttacgtttattctttctttatgtacaagcttgtgtatgtatttcagttgagttttagaaactactgaatgcatttagaacgtagtgagcatcctacattgtttgtgtcctaaatcctaataccttctagtgttttctgttcatacatgtaagttctagagtattttcttgtttcatttcctgataagatacattcaaattgatgatacatggaaagaaatcaagaatacagtggggacgggaagtacttccctacattgtcccatcctaaggcaaattcaggccagctcattaagtgattctactattacaattatctggtggtagaaaaacttaaatggtaaacattctttgatattctatagtgatgctatgttgaatttcaaatgtaacatgaatttgctgttgggtacaaatccgattcagttagcccttattgtgtttcttgtcatcctcaatgatgcggtcaattaatctcagtatcttaatattttgttgcagaactattcttcaattctcactgtccatccagagat

SEQ ID NO: 108539 - DNA, 542 bp, Aquilegia coerulea
  Intron number 1 from transcript AcoGoldSmith_v1.011514m (l ocus AcoGoldSmith_v1.011514m.g) derived from phytozome v7. 0 (chr-ID scaffold_37; pos 1044289 to 1044830 reverse stra nd)
ctattgttaagcacattaaagctccaattcatcttgtaagtttctcattttgtttaatttattcttataattcatcaagttttagttagatcggtgttttttgttgcctttttatgtaaattgtttggttgtttaactgtagatctgtttgatttatagttttaattcagtttttagttcttgtgattcttcaactttctagaaattcacatatctttgattaattggcttgtaattgagtcttcatcctgctattcatgttgttaatttcatgtaaaagtgagaaaactgtgtgtgttttgtttcatgaaagtttgagttgaaaaacgttaggtgagatgaaggtaccactgtaggagtagatataaagctctgtaatggtcttttggttaataatgtgaagtaaagatgagattttttggtaaatttgttatacatgatgtttaacttcctggaataattctctgctggttgaatttgacttttttatttgattctgcatttcaggtgtggtctttggtaaggaggtttgatcaaccaca

SEQ ID NO: 108540 - DNA, 706 bp, Aquilegia coerulea
  Intron number 1 from transcript AcoGoldSmith_v1.024231m (l ocus AcoGoldSmith_v1.024231m.g) derived from phytozome v7. 0 (chr-ID scaffold_6; pos 7971353 to 7972058 reverse stran d)
gcaagctgctgcccttcttgcagttggaagagttggtgcataatccaacaaaagaaaaagacatgacttgtcttcaactagtaatgaaactattgtagttattgatgttgatcaatcgtcttcgaaacttcaacaacaaactatcactggactttgttctttgaagaataaagaagttgttgatgacatggttgcatatcattttttcatcaataacattcttttcaatgttattcaaaccaaatcttttattaatatggtcaaggcaattggggcatatagtattgggtatattttaccatgttataccactcttcgaacgaagttgctagcaagaagaagaaaacacgtagaaggttatgttgatgaagtcaaaaaatcatgggaactttctggaattaccattgtttcagatatttggacatgtatgaaaactagagctttcattaacgtggttgcttgttgtccaaaatgagcagtttttcttcaatcttttgaaaaatcacttcccaaaaaaactggtgagctattgaatgaacttatttctgctgtcattgaggatattggaccacaaaatgttgttcaggtgattacgtacgatgcgtctaattatgtgagtgtcggtcgcatgttaatggaaaaatccccatatttataaaacaaagtgtgctgctcatggggttcaaacttcttctaaaagatatat

SEQ ID NO: 108541 - DNA, 373 bp, Aquilegia coerulea
  Intron number 1 from transcript AcoGoldSmith_v1.020328m (l ocus AcoGoldSmith_v1.020328m.g) derived from phytozome v7. 0 (chr-ID scaffold_1; pos 2911964 to 2912336)
gtctctcaactttgtaagtttaagagaaaaaactcaaaaaccatctctaatggtattttaaatttgatgaaatcgtaacatatcattaaactttctcttaaagttgagagtttctcaaagttgagttttaagaagctgataactgtgcgtcaacggtgtatatattccgaccattttttctggttagctgtcatacttcacaatatttgtcacattttcgtgattttattttgtgttttcttcttgttctcaactatgtctcactctcaatctatgcatgatatgaatgaagaaggcataaatgacttagttcaacaaactcaaataggaactcaaagccaaagtcaaaaagaaaaagaaaaaaaaagatcga

SEQ ID NO: 108542 - DNA, 424 bp, Aquilegia coerulea
  Intron number 1 from transcript AcoGoldSmith_v1.010546m (l ocus AcoGoldSmith_v1.010546m.g) derived from phytozome v7. 0 (chr-ID scaffold_9; pos 4051615 to 4052038)
aagttcaaaggtttgtcttctctcttgcaatctcacttttttcttagggtttcgaatttctaattttgatttcaataaataagccataacctactaataaaaataaattgagttaattatgagtttctctgtaatttctgctcaaaagtcaaaacaaattcttgtgattcattatgatgtttgaattttctgaattcgagctgagattgatgttctgttgtttttgaaaaaaaaaaatgtttttattttttattttcaagtgaattgtttcgaatcctcttttgataaggagagtgaatgcttttcaataacggtttattataaggctcttgaaccatttgtcaaggttgcggttgattctcttttgcatttttaattgtcatgtgtgaataatgaaaccataacaaaactgcaggattctttc

SEQ ID NO: 108543 - DNA, 834 bp, Aquilegia coerulea
  Intron number 3 from transcript AcoGoldSmith_v1.010546m (l ocus AcoGoldSmith_v1.010546m.g) derived from phytozome v7. 0 (chr-ID scaffold_9; pos 4052226 to 4053059)
caagcatccacaagcaaaggaagcatttggaggtatttcaacataatctatcatacttagtttaggatagagttaatcttttgaattcattactctatgaatgaaagtgcaaatttttccctcttggccacttgttttatatcacgattcaacgagggaaccaggatcatacttgataggaatcgctttagagagttacctttcggtaatgccagaagtgattctgtagtcattaaaattgaaaccaaatataaactgaaaattaatctaaagttttatgggaagcaccgtgaaaacctccaattgaatgtttaaatgccctactagtttaaagaagatccgaatcctccattaatctggtttctaaatttgatgatccgaaaccacttcacaaaactatttcatcagtgtgattttatgtcagtgaagttttctgaatctgtcatgtcagacaattggagcagacattcatgttgatccattataggggttctagttgatatgcatataagacagagagagaagttgtggatacatgaaggaagagagaacttgtgaagttttacctgagttctttccacactgttgcatgttatttgtgtcgtgcatttcttgttctttgactgaaaacttgcttgaattgtgggatagttgatatgttttatttggactttaatggcgttgctaggggactgggcaatagcttcatgctattcatctctgtgtatagctcctaatatctttgaatctttatatgtttatctttcacactgataacgagtttgttactcttgagcagcattggcaaaagcccagcagttactgcttgaacct

SEQ ID NO: 108544 - DNA, 411 bp, Aquilegia coerulea
  Intron number 1 from transcript AcoGoldSmith_v1.009287m (l ocus AcoGoldSmith_v1.009287m.g) derived from phytozome v7. 0 (chr-ID scaffold_1; pos 1871522 to 1871932)
tggcgatcgcagcagaatctcaagcaggagagaaggtaagctataataataacaagattgaattatttagaaattatcgaatttcaattatagatctttaggaattatcgatggttttgttttgaatattagggtttgatcgtaattaggttttgattcttgaatacaattagatcgataattagggtttatctcagaagattttgtattattgattatggaaactagggtttttttaccattttggggaaaaaattagggtttctttaggattgaaaaggaaatttgtttctcaaattcattttccattaaattgatctattttgtaagaatccatttcgtttttctgattgtgatcttattcttattttaacagccttcttcagaggtttcagcagcttcagataaaca

SEQ ID NO: 108545 - DNA, 989 bp, Aquilegia coerulea
  Intron number 2 from transcript AcoGoldSmith_v1.009287m (l ocus AcoGoldSmith_v1.009287m.g) derived from phytozome v7. 0 (chr-ID scaffold_1; pos 1871998 to 1872986)
tttatttggcaagggaaaagaaggtaaattggtttattgcatttcaattttatcctcttaaatcttatattattaggtttttttgtttgttttttgcgaaattgattgatttaagtggggatctggaactgcattttgtaaagtaaggtttctgtgtgatattttgagatgaggtatatgtgaaatcttagagagtatgtatctcagttgccgatctgaatattctattttgttggtttgattgtgttgccgatctgaatattatattttgctggtttgattgtgttgccaatctgaatattatagataaataaaatctaaaatttgggtttgagtatgcatcccagtagctggatgaaagttgcatttgtaaattgacaatgatgaccatccgatgctggggaaatggatattagtagagcttaaaagttatatcccgctacacttgggcacttggcaatagttgtataactctatagtatgcaacaatatgtctagattacttgatattaaagaactgaatacgtttttttagctgaatttgggcctacctattatagtgttatgtgactttgaatttgtgatagtcttagggatgtcaatgccgatcttcaaaattgtttgctgataaatgtgaaaaacatagggtcaaataatttaggagcttggtgaataacttttgttgtgttttgttactgttcgttgatcatttttctgtaattttaaattgagctctgaagtgataattaagtttgatgggtaccataaaagtttttttttttttggtagacaagcggggttgttactgaggtaccataaaagttagttttgtaatatctcaagtatctcctcattaatcaatatttatttggattttttggtagagaacacttgaattgaaatgagtgtcattttttagtaaagactaatcaaatttctttgtttttattacagagtaaccatatagttgctctcaaagtactctttaa

SEQ ID NO: 108546 - DNA, 992 bp, Aquilegia coerulea
  Intron number 1 from transcript AcoGoldSmith_v1.017288m (l ocus AcoGoldSmith_v1.017288m.g) derived from phytozome v7. 0 (chr-ID scaffold_30; pos 2571473 to 2572464 reverse stra nd)
ggttagctcgcaagatcaggtattgatttggaattttgttattactaaattatgcgaaaaggtccttttctttattttggaacattgttgttagcattttatcagtttttgcaacatgagtgatctctatttggggtaattttactcttggcaaacatggggctttttataattttgtttatcatggcgagggatgttagtaagtttctacttttgcaacataaattaattcaatttgcaaaaaaaggtttaatttgttcaagcaggaaagttggtagtcagggctttttagattgttatgcaacacatgttgcatccattttgtatgtcatgtcacatagtttatgtcgaaatttgctttagtcactacttttaattttatttgagtttatagtcacattttggtcttatatttatgaatctcgagaatgatcaatagcactcaagtttgttcttagatcgattatcctcaagatgtgtgaaaataaacaaaataagtgccaaactcatatatcaatataaactgagtgatgtggcttcaaaaaactcataatttaatttgactattgtgaaatgtcttctatgcgctcttaattccatccatatgacgacattagttttggtgtctgaggtcataataaaatctataaagaatgtgtaattttaagaatagttcgtacacttttaagagacattagtctgatttttgactacaattatgacttcttgtcattttaaaatttcagtttatcttggttcgtagctaatgctagttgttgtagattgtatataactctgttctaatgtacaagcaattccaaattttagatgtttaatcatatttgtatttgcgtccccttaaaaaatgaagtaaacatttttcatgcctgatttacaaaaggttgaaattcttttcacttttcaaattttttttttcacttttcaaattgtgcctgataagttataattttttcgccattttgttacagaat

SEQ ID NO: 108547 - DNA, 862 bp, Aquilegia coerulea
  Intron number 1 from transcript AcoGoldSmith_v1.003072m (l ocus AcoGoldSmith_v1.003074m.g) derived from phytozome v7. 0 (chr-ID scaffold_69; pos 541523 to 542384 reverse strand )
aaagggtattcttttttcttcttgtagctttttgggtatgccattcaatctttatcatttcatacatttttttttcttttttttttttttacagaaaatgtttgtgagatgaaaaaaaaaaaaacgagtggggagttcacatttggaaagaaatagttgtaccatgttattacgcttgttaatttcttggaattattgaattttctgtagatttgaagcattgtatatgagattaaccgaaaagcgattccccaaattttaatcatggttgataaattaataagtgttacagctaattcataattgactgagaattcctaagataattcagctgttccttttatatacaactagagtagctggttcatgaacttattattgttttctgatgggtgaaagagtttccgttgacgatattagagtaataacttttatcttcaatgattgattctgcaataagcattttagcatttcatcgttaaactcaaaatttaagattgaagttgaacaagcaattgcaatattgaagaacatggaaaagattattagttttatttattttgtctatctttgtagtctttatacttgactgtgaatattattttgcttcattatatatcttgatgtttctggaaccacacaaatatgagtcagttaaaagttccagagtcccattatcttggaagattgttttatatcttggagtaattgaaagccacgagttcttccattctagccttctaggttatgcttattagaagtttcatttcctctctttcaagtagaacttcagtttttattgatactgttttttattatatttgaaggattttggttgtctttctggagttctgttacatca

SEQ ID NO: 108548 - DNA, 735 bp, Aquilegia coerulea
  Intron number 1 from transcript AcoGoldSmith_v1.010834m (l ocus AcoGoldSmith_v1.010826m.g) derived from phytozome v7. 0 (chr-ID scaffold_96; pos 278823 to 279557 reverse strand )
caatctccattgaaagaaactcttctttcatctctgtaagttaaacttctctctctctcagttctgcatttctcatgtgttttggttttatttgaagaaattgttgttttgggattttagtttctatactaactatatttgttgttgtgttgataagtttagggtttaatgaattacaaattttagggttttgttgttcaaagagtttagataaatgggtcaagttttaattgttgtctttttgcttcttcttaggtttgttattgtaatttctatgatatctactgtccttttagattaagtgagaatcttattatgttaagcttggatttctttagtaattagggtttatgtttttcacattttatatttggaaatgtggggtttacaatacttgttgatatatataaattggagtttgtagtctctaatagattattgtgttggtcagatgataagctgtattctggtggcctttgttgtttaacatatggaatgagttgttttgaagttatatgacggaaccatttctcctcttttataagcgtctatattatttgcagttggagtggttatatatatgttattacttattagcctttgaatttgcatcatttggtgattttatatgaaatgcttatgatatataaaaaattatggttgaaaactaatcatattaaatctctgtgtactgtgatgcaggtgttcggctgaacagacaagaacaagcagatt

SEQ ID NO: 108549 - DNA, 784 bp, Aquilegia coerulea
  Intron number 1 from transcript AcoGoldSmith_v1.006914m (l ocus AcoGoldSmith_v1.006914m.g) derived from phytozome v7. 0 (chr-ID scaffold_30; pos 2860922 to 2861705 reverse stra nd)
ctcaaaagtctcagtctttcactacacccttcaatgtaagtttatatatttctctagaaattatcaatattatgatcaaaatgtaattttgattgatttgaagtaaaggggttcatgttttatttgcttgaattgtctcaattaacttgttttcttaatttttactgtttttcttacttatttgttgattgtttgtaatcaattaccacatctgcatttgtttctactatttatatacataatttcgcacagtttttggcaaagtatttcgatttccaagggttttaattttgttttgcgctaatctgaccaccaccatcactatgcatatctttgatgtttgtctagagttagtattgttttttttttggttggcaagcggggttgttactgaagagttagtattgttgccgatagcatcaattgttttgttctcccttttgtttaatacttaagcttgttaaagggacatgggattatcagtttcctcaagcaggaatgttgtttattaactatcacaacccccagtttgaatatgaacgtagatgacagcgggttatttagcatgtattcttttgatcctctatttcatatacataaaactcattttatgttttctgattaattaaatagtaagatagccatattttgatttacatgttattccatttaagtactggctacctagtgactttctgatattctatttatcttcatgcaatgagataattcttatgttttatatgcagagaaaagcattttccccacgtgctcatccttcttt

SEQ ID NO: 108550 - DNA, 1038 bp, Aquilegia coerulea
  Intron number 3 from transcript AcoGoldSmith_v1.025524m (l ocus AcoGoldSmith_v1.025524m.g) derived from phytozome v7. 0 (chr-ID scaffold_1; pos 7409677 to 7410714 reverse stran d)
gtagctctcagccaagactcatcacaaccttcaaggtacatatcttcttagttctttgcattatgctactcattcacattgctgctcatctttctgtgtttaatacagtcctggttagctgaagccgaaaagagaaacaaaatattgtaaaagttaaatgaaagaaatagacataccaatttacattctcaattcaaggggctatcccataaggcaataatgcggatagtttagaacatctacacttgtgaagtcaacagtgaagaaactaaaatgagcctcaaatgtaactgtcaaatttggttctaaatcaacaagctagttctggtttatgtgtactcccctggccttctcctacaaactgtcatcttgttttgggatgggaatgaattaacaggccatttttagcctcaactgctatgtgctataatgccgagtcaaggatgttctgccttatctatacatctagttaagtgactagtgaatgaactagcgccttgataaatcctcaatctatatgcttcgtaagctacgatgggaaacttcgacatctggactctcaagagtcaagagtcaagagagacaggactccaagggaagagaacttagctacattacagaccttaaaatccaagatctcaatgggaaatgctagcaaacaaaccatcaaataccctctatatacgttgagtttttctgtccacatattagttatttcatatataggtgtcagagttcttgacagaaatctacttttaaccagatggcttacacttgtttgtaaggtccggcattttattggttcatcgtcttactctaaacataaatatcacacgtttgactccggaatatctctactgacttctaaaaaacgaatatggtttgtcgccttacacttgaccacttgggtatcggctatggctcacttaaaagaaattttttattacacaataggattattattttacaagcttgagatcatgaggtctgattatttaattactttgtttatttatcagccagttcggaagggtacaa

SEQ ID NO: 108551 - DNA, 903 bp, Aquilegia coerulea
  Intron number 1 from transcript AcoGoldSmith_v1.004151m (l ocus AcoGoldSmith_v1.004151m.g) derived from phytozome v7. 0 (chr-ID scaffold_37; pos 1922641 to 1923543 reverse stra nd)
agagaaataaaacttctttaaacttcgaaacactggtaagcacaaacactcccttttctctaatcttcttgttcttcaaacaaaataaaacatttattagggttttgtttttaatcttcactagttatattgtatttgttctgttagatttttcatatctagggtttcttttgatttctcgattaaaccatcagttcgtagtaaaacacctacattgaatattttttttttttagaaagagggagggaaagagagagaaagagattctttgaaataactatgttttaatttgggtgtattattaatttgattaatgtttgtttattgtgtacttggggttcaactaggcaaatgaaattgtgtttgattatcaatttgacaagactaggttatgttttggtttgcgcatagctatatttattgaagaattatggaaggaaatgataactgttgatgtgtgggttgaattgttgttaagatagatatacacttgttattgtttttagaaattttttgtttagatatgtgagttctttggtctaaactgtgaaaaattcttgttgtgtttgcctcttgaacctgtgggggatcctttctgattaccgctctgataaacctgattacaattttaccagctcagctagctcatatctatctctgattaagaaatactaaaaaaacctgacaataatcatttcaaaagcatatatcaatatcatgactcctagattccttaaacattcttcttgctctacaaatcttgctgaccttaatacttgtcttcttccccactccgtatccatattcctctgtactggaaatgctactggtctctttgcttccccgcggttctcatgtaaacttacaggtggtctaggtggttgaacgaggaccgtgataaat

SEQ ID NO: 108552 - DNA, 960 bp, Aquilegia coerulea
  Intron number 1 from transcript AcoGoldSmith_v1.005864m (l ocus AcoGoldSmith_v1.005864m.g) derived from phytozome v7. 0 (chr-ID scaffold_1; pos 320362 to 321321)
tcttcagcaattttcaatcaagtttcaatcagcaggtcgtttttttattcttaaactttcaatttcattttcctctcttaattagctacataatttattttctttggtgttttttgaactagattttgttttagtttagataaaaaatgtttcttgttataagtctttcttttgtttgtgttttatgagagatttaataggatctagagtttcatttggatttttttactgttttttcgtggatctttattgataatgtaagatttcttgtttgtttacatgtatcaaagtaattgttacactcattaaaatgttaaatttttatgctttattagtttgcggcaaatggtgtgatggggaaacaaataaagtttatgttatttcactatttgtataggaagagttggcaagagtcaagaagcagatgatttgttggataattttaaaaatttagggccttgatgatgtcctaattctttgaatatggaatacgcttaatttgttataaacatgcttagtttgttatgaacatacacttcgtattcattgtatgaaatttagatcacgtttaagcaatatatttgtgttgaacctatgtcaggcttcgaaggtattttaggtcatgattatgtttatatatagttatgtcttagagaacttagaaccggcatatagtcaaacatgatggtactactatataaattagggggaatctgttggttaaagtttgtatttagggctgttataggattaaacattacacctctatgctgattcgtaggagaatatgcctcaattcatcttaaaagcaaagaaatatttacagtatttattgagaattttcactttacctttgattttaagtcactgatttttatttattctgtgacctgtgtcaaatatttttcttgacattttcttattctactactgtttatgaaagactttttggctgcagtc

SEQ ID NO: 108553 - DNA, 766 bp, Aquilegia coerulea
  Intron number 1 from transcript AcoGoldSmith_v1.023185m (l ocus AcoGoldSmith_v1.023185m.g) derived from phytozome v7. 0 (chr-ID scaffold_72; pos 1070901 to 1071666)
tcctctctgtcatcctttgcgcttttctcctccctgtaagtatgatctatctatctatctcagtaattggtttgtttgaattattagtattgagtgctacttgtgttattgatttgtgaagtaaacttgactactatatatgagttctttgaagtttgaattgaagctttataaacactttaaacaattagggcatgtttggcttctcagtagtaactttgattgaataatatggcacaaaggaattaagacggaaacctctttataactctggaccattgattcattgttgttgtagctggttcttctggtgtactctacaggggtggcatctgtgttaaggtttccatttgtcattttaatattttattatgtctctattatgaaatgtggaaactgaaaaaggtgttttgcatatatacaattgtttaccacaactgacacatttatatataactcttcgtattaatagaagcttagggtgccaaacagatatatccttttactcatttgcttccacttcctgtttatataaaacattacctacccacgaaaaattaagcaaatatattttccgtattgatgatcctttgttgtcagtcgtttttgcatttttattacttttggctaattaatttttaactctgtgtgacaataattgctactgttcttattttcgaaataattctactcattttgtgcgtttgtttatatgcttgtttttttttttttttttgtactcatacctatgttcttgaaatggtag

SEQ ID NO: 108554 - DNA, 440 bp, Aquilegia coerulea
  Intron number 1 from transcript AcoGoldSmith_v1.003475m (l ocus AcoGoldSmith_v1.003475m.g) derived from phytozome v7. 0 (chr-ID scaffold_7; pos 6550546 to 6550985)
ctattgatcttcatttgattcgttaggtaaattctcatcttttagtgtttaatttaatagaaagtttaattttaatataaaagttttcgatttggttaaattccatctaggttttaatttcttaatgaatgagatatatattattcttaaagttttataataattctatgttaactaggtttgacttagtttgaattcccaattaaaatgttagttagttgaagattgagttttcggagaattgggatgtttttgaagtgttaagtgagaaggggtgaggtggcagtgtttgtttagttttttccaaattgtgatcaatttggggtttttttgatattgtcgaaatgatctctttgcgatatccaatatgttttttttttttttttttcagtgaatatgttttgttttcaggttttgattaagtaggattgtagaaagag

SEQ ID NO: 108555 - DNA, 1019 bp, Aquilegia coerulea
  Intron number 1 from transcript AcoGoldSmith_v1.002573m (l ocus AcoGoldSmith_v1.002573m.g) derived from phytozome v7. 0 (chr-ID scaffold_27; pos 1241881 to 1242899)
tctcatctccatcaggagaaatatttgtttctcaggtattcatttcgatagattcatcttctttctgatccaattgcgaattctctttgttacagttagggtttctttcttctctttcatgttttagatcaaattgaagttctcaatagattttctctgtgttattttttgtacgaaagtttaatttcatcaatatttcatgtttttgagggttttcacttttcagccatatttctgtacggaattacatctattccacataatttagctgtaaaaatactgtatagaattgacgataaggtgtgcaaagatttcaatgtatctgtactcgagagaagtgtttagatttgttgactagagattgcgaactgagaaatagtatgtaatatttgattgtgattcgtagagtttcacttgtcagcagattgtattgagtgatatgtaaatgtgatgtgagtctggttgaagagtaatgtagcagattgcagaactttgtatgcattaatttgatgatttagggatcatgaagaacttaaagttcatttcagaagaagacagaatacatatactcgcagctgaatatggcctttttatcccttattttttccagagttcagatttttacaattttaactataaaataaaatattgtctatggaattacggaacacatgtttgaaaatttgaaataggttttaaatgtgcaatcaaggttccatgaataggaaattaaactactgctgaggtatgtgcaattcgatttttcacaaggttaatcgttcgggcacttgaagaatgttgctgctagcataaatcttattaaaccccaaaatttaacaacaatgtttcaataaaacaacaaattaaaccttttgaactaaataaaaccatggttttgcaacaattttaagcaaagtcttaagaagacacgcctttcccatatgttgaactaccaacagttccagttttccaacagtctataaaatattgattatttgttgacattttctaggtgcggg

SEQ ID NO: 108556 - DNA, 555 bp, Aquilegia coerulea
  Intron number 1 from transcript AcoGoldSmith_v1.011753m (l ocus AcoGoldSmith_v1.011753m.g) derived from phytozome v7. 0 (chr-ID scaffold_1; pos 4061512 to 4062066)
tttggtgttcctggtgctttcactcctacttgcaggtaaacctttgtcttatcatgttgacttttttttatgtaccgttggattcaatgtttttgttgggtggtagggttttcatcatcttatcttaattattagaatttaaatgtgtggtgttgtaaattctaaaagctcatttgattgcactaagaaaatttttatatatctgtacatagtgattagaatgtgggaagattatgtttatccaacaaaagggaggattgaaaatttacttgtggaagcaaacatacccaattcttaatataccaaaatttgcgaacaattggggataagatgcattgttttctttattcctaatgtttttgaggcattttcaagtttatggatggatcattatgtttttggacattaagaaaaaaatattgatgtaggtcgcaatccatgtgatatttaattagaattgcaggcagacaggcatgatgtttattggttctcaattgttctacagaattacttaatactaatgaatgtattttgacattttctttagcaatcaac

SEQ ID NO: 108557 - DNA, 528 bp, Aquilegia coerulea
  Intron number 1 from transcript AcoGoldSmith_v1.027771m (l ocus AcoGoldSmith_v1.027771m.g) derived from phytozome v7. 0 (chr-ID scaffold_21; pos 1123715 to 1124242 reverse stra nd)
tcacggagattgtatcacgagcgagtaagaagattggcattctgttctgtttacataaatcctgctataattttatgggtttcgttaaaacatattgacttaatgacaatgttgatttttagtagaatttctttgcttttatattgcctcaggttggtggtggctctgtaaatggtgcctgtttggatggcagacatgaggtaggtgaaattgttcagaataaatttgtatttaaaactactcgaccctaaagagtacttgaagttcgatgtccaaatagcaaatacctgtgcatgatgaccttgcttataaattattaaattcacacttcaaagtggtctgcgtctttgttatatattactaggtcaatagatttccataatagaattttcctttcaggagatcaatcaagttcaccctggaaatatgaattgttcggggctggacgccacaaaaccatatccttcattggaagctgatcgacgtagtcaaccggggcaagcagtttcggaaaagaatttaacctgc

SEQ ID NO: 108558 - DNA, 485 bp, Aquilegia coerulea
  Intron number 1 from transcript AcoGoldSmith_v1.025463m (l ocus AcoGoldSmith_v1.025463m.g) derived from phytozome v7. 0 (chr-ID scaffold_7; pos 4131666 to 4132150 reverse stran d)
acaggctgtcatcgaggttagcatatgaagaccatttcgttagcttattttttgtcttttctgttgcaataggatcagtaggtttcttcatcaatattgatcggcgacatatcatcatttcttgcaaactataaactttgagtcctttcattcaagttcttaaaaattatttagtggaatttatgtatcgtcataatgactataagtttgaacttgtgaatatgtcattgatcacttccatgagcactaagttctcataataaatttttgttaccagatgcattagtgaatatatgttttatgaagagagcctaatctactagtattttaactttaaaatttcccttatgttaatttcttttgcatgtgttaatggggcatcatgacaatgtaattaatttcacacttatattacatcttcttttccatacttgtgtgtatgcataacagagagtacatagttgatctagtcggggaaccaggaa

SEQ ID NO: 108559 - DNA, 630 bp, Aquilegia coerulea
  Intron number 2 from transcript AcoGoldSmith_v1.019292m (l ocus AcoGoldSmith_v1.019292m.g) derived from phytozome v7. 0 (chr-ID scaffold_27; pos 2561306 to 2561935 reverse stra nd)
tgatatagctttagaagttgatctacgatcacgtggtgagtgcgacagtgctactgtcttcttcttcttcatttcatttactttactgcctttttgtttgttgtttttgcatgatttgtgtttataagaatttcacaaaatacagtagtttgcttttgcaaaattggaatcaaagtttttgtttcttgtgttttaaaggaatcgaaagttttccattttaaagcatttcttgttaggtggaaatagggctttctttcagaggtttataggttataactttaggtggactgttaagtagttgtgaactttgatgcattcctattgaccttttttttatggtgaactagcagtaaggcgtgctcgtatcatactctttttctttctccatttgtatgagatattggtgtcatttgatgtttgtgttgtaatcttctgaaacagtacagatttcttaatatgtgttctctcctgtactttcttactatccgatgtaaaattgaagcttattaatgtgtgctttataagatactactgggattcatactgtatgttgaaaattccatttcgtattttccaaatctagttttaatttttgtgcaaaatggaacacaggcataattctcaacagag

SEQ ID NO: 108560 - DNA, 933 bp, Aquilegia coerulea
  Intron number 1 from transcript AcoGoldSmith_v1.011015m (l ocus AcoGoldSmith_v1.011015m.g) derived from phytozome v7. 0 (chr-ID scaffold_6; pos 6492778 to 6493710)
agctcactatccatcaaagctaaagtggtttgtggataattactgccagaccactgtatagactttgtggaagaagtgaagtaagaggatatttgaaaattagatcaaagaggaccacaagatccttatggaagctaagaacacctatacaattagtctagggagcgtattgcttttaaggatctacactatcaagatttcatgtgtgtgtgggatgacaatgtaaggtggggtgagtaatttcattgtaaaagttaagagcgtgggatgtgtgttccttagtattttgccaaggcatatctcccctctctatacaaagacaggtggttggaaatggacaaagaatatcagccaacaatgtcctgagatcttcaacttggtgagaagttaactctactactgatgctttggctaacggaggtgtacacttaggtcgtaatgcagtaaaaaatatggttgttaggtcaccatttcctataagaatagacgaatctcagagatggcatttcagatttgcttcttagttccattaggacttgcctttctcattcagtgagggagagccatatgctttggatctttctaatgatgttttttgtttccgtattttcacttcattcatttctaaaataattttcattccaagcaaaagaattggctgttcctagctggtgcttgtttgaatcatctactatgttggtatgtgctctagtaaacttttatttagaggatggatgtgacccttaggctttgttgtctgatcatcatatacaaactgaaatgaaaaatatgcagtatatgcagtacttggtcaacagatgttattaattatagacgtttaatcttcgtattaaacattaacattgatgaaattccaatgctttaaaaaatttgactgtcttatattatgtcaattttcagcttaaccttgga

SEQ ID NO: 108561 - DNA, 684 bp, Aquilegia coerulea
  Intron number 1 from transcript AcoGoldSmith_v1.025333m (l ocus AcoGoldSmith_v1.025333m.g) derived from phytozome v7. 0 (chr-ID scaffold_9; pos 763612 to 764295 reverse strand)
atatccgcccggcacgcacgatattttcacctgtaataagaccatggaattttctccaagcatagtatacgcaagcgccacagatgaaacacgttgaacaacttttagctggaatttaaatgatcaactaaactgctcgatcgaactagaatacaatactctctgtttaattatgtagtccttggtgtaactacaaattggtattttagttgtgggaattatcaattattgctcagcattacacaatgccctctgttttttctactgtcttttactctttttattcctctgttctgcttttagcctatgttgttctacaatcagagacatattttttattattaataaaaaaaaaaaaataataatcacaaaatactttattaagactttgagcatgcaaattaaggcccatgggtcatgggctatatcctttatttttttttggaggccccatttaaatgggccggagagctttctttggcccacgctgactatcgaagcttaaaccctacgatgtgcaagttttctaattggactagaccttgtcttcaatggaaatactactaccttaattcggattcggtgttttgtgtataaattcttctatgtggatcagtattcggtataatcaaaatttagtatatatatttgtctataattagttttaacttttaggttttctca

SEQ ID NO: 108562 - DNA, 819 bp, Aquilegia coerulea
  Intron number 1 from transcript AcoGoldSmith_v1.007655m (l ocus AcoGoldSmith_v1.007655m.g) derived from phytozome v7. 0 (chr-ID scaffold_10; pos 2565467 to 2566285 reverse stra nd)
ttttgggaaatatcgtcttccttcatcctgaacaggtaatttattaattttgtttaatgaatatattttatttttctttgaaataattaaattatattggtgtgttcttcacttgttctcaaatctcaacgtttagattaaaatttgggagtattgattatgagattgagatacatttttgacataaaggtgaaatctaaacgaaattaaatttgattttattttgaaaaaattgagatctaataaaattttattattttcatgttttttctttctacaggcaaaaacgtgtacaaattgatatacaatttacacatgtttgagagatggtgaccttaactcaaaggccaaaccacccttgttgtaccaagtaccaccaactgtgaccaaaatttgtggagattgttgctgtccgatttgcttcagatggaaacattttctaaaacaaaacagatttttaaaaaaaaaaaaaatactccattgaatcaaaactgatgggtttgatttctcaactaactgatcattgagtcttatagtgctcatgatcaacatatatgatatatcattctcactcatgtattatactgatctgatacatcaattagtattggtattgaatattgatcatcaaaactagtccaaactaatttgtttggaaagaaaagaaatcagaaaaaaaaattagaaaaaataacatatgttcttgaaagggtttgtgctactatcagagaaagtgtgtgtggtcatatgtctaatattgggttttttattttgattattacaggtaacaaaagcaattggtggtattattcctttgtc

SEQ ID NO: 108563 - DNA, 928 bp, Aquilegia coerulea
  Intron number 1 from transcript AcoGoldSmith_v1.018781m (l ocus AcoGoldSmith_v1.018781m.g) derived from phytozome v7. 0 (chr-ID scaffold_59; pos 274291 to 275218)
gtctgtcagaggttttaaagcaataagattatctgtcatgcttctctctaaagatatgtatagaatgacaacaacataattaggttccaaaatgtaaaactgagaaagaagcaacatggaaacacaagctgtaaggggctttgcatggaactttaactaattttgcgtgtttacaaacaactaaattgtgtttttgagttttaagttttaccacgtgctagtcacgtgaaatggtagtttggtcattaagaaaatatggatgccttggctctggtcaactgggttgactgacagtcaagtgacgaaaaagggaccatttactaataaacgataaagattagaccaaatgctaattacccatcttctaaagggaccaaatacaaaataccccttatttttacttgttattatggctgtgatcggaattctatgaatagatttttctttatacgtactatgaatcaatggatatgtgattttggaagttagcactcatctgtttttgttgatcgataattatgagcattgctttagaattataaattgaaagaatccaatgtgaattctgtttgcagttgcataccttctcaaatgcttttttaagggccaggaatatttataaaagtttttatttctcttgatgtatcacctaaaaactgtcaattttcttctattttttgctttaagtaagcttcctgcccataaatacacttagtatgcgtgttttttgtggtaccatgaattttttttttatatcttcaattcagatatatatggtgtttgcacgcggaattactatttatggctatttcatcaagaaaaaaaattggtgttcctgtaattaatttgtagacatatatctctttattccatttgtttttttgtaattttagggttggactatttttgagatattaagatacgcacc

SEQ ID NO: 108564 - DNA, 630 bp, Aquilegia coerulea
  Intron number 2 from transcript AcoGoldSmith_v1.002736m (l ocus AcoGoldSmith_v1.002736m.g) derived from phytozome v7. 0 (chr-ID scaffold_10; pos 1314670 to 1315299 reverse stra nd)
aagacaaatccatcgttgtcacggtatttaaatctcatttctcattcaaattttagtgttttcgtttcatttttgtttaatcaggttgttgttacattatgtattcagaatcatttcagataaaaatcaattttattctgattgcattttaggtttttgattggtgtttaggctttaattttattaatattttgtctttgttgtttgaattttttgttgctcggtaaatgatagcaatgctaggttggtgtctgagaaaccatgtgtgtaatcttaagtcttaactgtttcttgaatttttctggcttgctcattttacactgttacacggatacgtttataggaaccaatatttaacaatgcaatattcaagtcttatttcttcaagtttgtgaatgagattctttttctacctggtttgtgtggatgtctgtgtttctgttcatcacgccatttaagttgttcatgatcaattgtatctaatactattgatattgcatctttctattttttcttgacatgtgtattttctttcatataccctcttcaaacttcactttgaaatttattggatgttttaaatttaaattatgaattgttactaataggtcaacggggagatttataacc

SEQ ID NO: 108565 - DNA, 891 bp, Aquilegia coerulea
  Intron number 2 from transcript AcoGoldSmith_v1.011304m (l ocus AcoGoldSmith_v1.011304m.g) derived from phytozome v7. 0 (chr-ID scaffold_49; pos 1251115 to 1252005 reverse stra nd)
tggtcgtcgcttccaaccttgcatttatccgaactgtaagttttttcttcgttattatttttgtgtgaggtgaaatggtttgggaaacactaaagagaaaaggatggaccctgcacaaatctagatataacttggagcagagttacacgtacgtcaaattaattgattcatcaagacacacacattcattcaaatgtttataatcaatttcaaaacttaataatatattttcttataaaaattataaatatatagatcacataatatggactcctaattcctaagtcattcatatagtatactgatatgcatgtcaatgtccttgtagcccagaatataaatttaaagggttttaagctacagaaatatttgcttaaaacaaaaataaatcaaatccctgactttgttaccactaaccataaaatctgaaactatctggtaacaaacatagaactaggtatgaagtatcacgatgcagccactgcagaatataaaatctaaaatagaacgagtagaagaaggcttgtttaagctaggagatcatcttgtctcccttgtgcacctagatatacacgtaatcacctcaagatatctgtagtttctactcatatctagacctcaagatatcacctcaagatatctgtagtttctactcatatctagacctcaagatatctgcagtccacagaaatccgtagtttgtactattatctcggtgatcatcagagatctatcatcatctgacaggccacagaaaaactgtcatgtatctgtcaggttaattcaatattttagtcacttgtcaacatcagcaaaagttgacaatgatacatagctgctgaaatattaaaactaacagtgatgcacttacattttaacctctcaggtacc

SEQ ID NO: 108566 - DNA, 640 bp, Aquilegia coerulea
  Intron number 1 from transcript AcoGoldSmith_v1.016507m (l ocus AcoGoldSmith_v1.016507m.g) derived from phytozome v7. 0 (chr-ID scaffold_11; pos 5353061 to 5353700 reverse stra nd)
gaatctgccaccacggtatgtaatatccaatagtatcaatgatatatcgtgatatagaaagctttctgtcaatcttattatcaacttttgcttgaggtcatttttccccagtggagctttgcggacgaaagggtgacttcttttttttcccggactaattgtacactatatctcttttgattttttgaatgctattctttttgtttttttatctgcttttcctgcacaatagctttttcatttttaagtttatgctttattgataaaaagtaaagaaaaaaaattaattacaagaggttgcccagactgtgagagagggcttcacagtctcagtagaatcacacccaagctatcccctatactccaaaaggagataatagcatatgcgctcaacatgcagatattatatggtttgatagaatctaatagaatggatggcaatgatatttgtatgagttattaaccacaaccatatgcctgcaggtctaactattggaataaaggttctcatcggtaagtttcccaattagtttcacaccacttaacgagcctagattgacacacttcttctctgtctttgagcttaagatgctttatctctacaggtgtattatcaggagttggagggctactttcaata

SEQ ID NO: 108567 - DNA, 1026 bp, Aquilegia coerulea
  Intron number 1 from transcript AcoGoldSmith_v1.012464m (l ocus AcoGoldSmith_v1.012464m.g) derived from phytozome v7. 0 (chr-ID scaffold_1; pos 5768114 to 5769139 reverse stran d)
caacaccacattcaacccacccaaagccttcattggtagtctttttttttaccctgtcaacaaccccgcttgcctatcaaaaaaaaaaaaaaaatgtgtcttaaaaggacgctagccttcatttcttttggtttgtgaagattgaatttgaattgatgcaagttctacaatcccaagaagatgatgaaacctatgccgtagttttttttttttattactaatatatttcctgatataaatagaatttgattatagatgtatgaaccccagtaacaccatgtatgtgttcttataatattctttgcgtagcatacctagcgaagaaattgtgttcttttactatatcttccgtttgtagttttttgcattgtttgaaattgtattcttgcaccttgcgctgccggcaaggtgcaagacagcaacatttgataaaagtcttgccaaggaaaaacttgaaacaatgcagggcggtatttgcgtctatggaccaaccaacttgattttataatagttaagaactaagaagaccttgttaatattagtttttcaatacataactatttaccatttgttggtggatccatctccatgtttggttaggactgtgggcctaaccgtttgtacggcccgtgacccagttgagagtgtggaaagtccacctccgtgtttggttaggtatgtgcctaccagtttatccagtattccggttgatatacattgtggtagcctctccctacaagttcgagcttttagagaaactggtttacaacatattatcaaagtggttaggtatgtgcctaccagtattccggttgatatacattgtggtagcctctccctacaagttcgagttttttcctacaagttcgagcttttagagaaactggtttacaacaccattagaagatgcctttctcgtgtttactttgtgtgcagatttttctttattttctcactaggcgtaggctcacttctttcattctcattgcaggccttggatttggttttctgtttctacttgttggt

SEQ ID NO: 108568 - DNA, 402 bp, Aquilegia coerulea
  Intron number 2 from transcript AcoGoldSmith_v1.015262m (l ocus AcoGoldSmith_v1.015262m.g) derived from phytozome v7. 0 (chr-ID scaffold_1; pos 8261487 to 8261888)
aagatagcaggattgcaaggtcaaacctcactgtttgtgtattctgtttgcatttgctttactaaagattaatagtttatcctttttgtttttctatcaaagatgaaatgaaagatggaagaaaaagcaaaaaatcaaataaaaataattaaaaatatgcaagtatatagtttaggggggggggagggatttggctttcccattgtaaggtgtcttttcgatacagtcaaatatgcgagaactccttattctaaaaataccaatctggattttgcggcttgcaatcatttggggggataccaaacaaagcatatgtttaacgtcagcatcagttagtaattctaatttaggttccatatatgctcagcagaaaccgagaatttaaagtggtgattaaatttg

SEQ ID NO: 108569 - DNA, 800 bp, Aquilegia coerulea
  Intron number 1 from transcript AcoGoldSmith_v1.012819m (l ocus AcoGoldSmith_v1.012819m.g) derived from phytozome v7. 0 (chr-ID scaffold_6; pos 6944048 to 6944847 reverse stran d)
ttcgccttcttaataacatcttggaccttagtaaggtgagatatctgaggccagtttgattggttttgtggtatgttatacagtggattcttaaatatctaccttgaaagaaaagaaaaatgtttgtaatgttgatcgtgtgtcaattatgaaaattggatctacaccatttggtaccagatttgactcttgtaaggcagatacattataagtatcagctccaagagcactctgagaattaacttgtgagagaggaaattaatgtagccaagatttttcatcatctactacagcagatgacaaactcaggtcagagactagtttgtaggtggacaagggtttcaataggccagagttattaagaagaaaggaaaatcttatgatggacctaaaagcaggcctcattatgctcagaagatcctatcacccttgcatccttgcttttttagctcatccatatctccattcaggggaccttgtctagatgatgcagggtcaagctcaaatcgaaccttttaatgtctgcgacccatggtcctcgtttctatgcaagatcctcgcgaggaattcgactgtgaatttgttgactacagtggtatacattatactgtaaacacagtttggatacattatactgtgaatttcggatgatgaaattcgatattcgagtggcaatctgtcgtactgatctgaagttaatctccaataactattattttgttatcaagccaaattattttatcttgctccttgcaataattgtaggttgaatccggaaagcttgtccttgaagaagctga

SEQ ID NO: 108570 - DNA, 992 bp, Aquilegia coerulea
  Intron number 1 from transcript AcoGoldSmith_v1.019276m (l ocus AcoGoldSmith_v1.019276m.g) derived from phytozome v7. 0 (chr-ID scaffold_18; pos 3028269 to 3029260 reverse stra nd)
ctattcttgtctacaagggcatcgttagagatttcgtaagctttttttttcttcaatttaatttctaaatctatagttttcattgttaattaaaatcccatttcttcattctattgtatcatcaatctgtttagattattaaagagttttggttgaaaaaaaaaaaaaaatttagttcagatcatttacaaactgtatggaaagtttgattgaaacccatctacaaactctcatcgggattttattcatttgatttgatgaacctaattataggcagaaaatgaccaaacatcaatcttcacttatatcagagctttaaattaataaaaatagattcatcgaaacttagaatgacttggctgattagatgaaaaggtcaccctgttacatatgagatgaaggcgaaggctaagacaagtacggggtataacgagatagtgcattgcttgaggatgtggatagcagctacttcatggtcgggtccctcaatcctattggagaaacatggacttctctcatgttcagtcccacaatgctatttcatggtcagtcccccaatgctattggagaatgggagtataacgatagtacattacttgagaatgtggagggcagctactccgccaatgttattggagaaacatggacttctctcatgttccattatcatgggattattttggtcgactttcctgtcaaactatggtgtgattatatagttgtccttgtttttagatttccaatatcaatttctctatatctatttgaaagatgttgcggtagtgcactgtcaaatttgttttaccaccatgtgtacaacaagattaaaatcaaaagaaaattgaaagaggtaccggtttttattctgtcttactgtacacatggaaatacctgattgggtagtaaataagttgagcagtacactcttgcagcataatcacatctgaaactgttgcatttacttcatttcgcttttgtgtgattggcagcac

SEQ ID NO: 108571 - DNA, 455 bp, Aquilegia coerulea
  Intron number 1 from transcript AcoGoldSmith_v1.010878m (l ocus AcoGoldSmith_v1.010878m.g) derived from phytozome v7. 0 (chr-ID scaffold_1; pos 1059613 to 1060067)
gaaggacctggataaattatacaaagtaagaatgatgctgatctattaatccgattgtggccttgacttagtttgtgggacttgaacatgtgtaatacgaaatccttttaattactatcattttattagagacagattctttctaatcccacttaatataatacatcaatgttccattaccttaaattttgatctctaaaagcactcgagttttgtattttctttatcttactttttcgaagataaaagtttgaaagtggagtatgcaaaccttctgatgacagtcttggccaaaatatcgtgttattattatcgagtttatcattttcatgataactgactctgttgtcgatgcatacatgtttgtagctagagatatattcctatttgacttgacaaggaatgttttgtcttgagcagattgtacctggagaacttactatagtaactggtgt

SEQ ID NO: 108572 - DNA, 611 bp, Aquilegia coerulea
  Intron number 2 from transcript AcoGoldSmith_v1.010878m (l ocus AcoGoldSmith_v1.010878m.g) derived from phytozome v7. 0 (chr-ID scaffold_1; pos 1060156 to 1060766)
gaaaacaaagtaagcttcctctgcctctctctttccacccgttgatcctcatgtgcttgcacttgccactgtgaagctgattttaggtatatattaattgcaatattgaggttcctaaactataactttcttgtcaagttggtctggctgttagcgttcagtcaatttatcttttagttctcattgtataccactatactatgcgtacacttccctccagatttatgaaaatcttctcatcatctattcttgtatgaactatgaacttcagaagcagtcttgaaacaaatgtttagcttaatcttttgaattctcttttacttttctgttgttagggtacaaatcttttttccagtttttagaaacttagtgattttcgattggagaaataaaatttgtagttttataactatgtagcctactttccttaatccaggtattgaatgtctataaaactggtgggcccatttgcaattacatatttctcttcaatccatcagttctacattcttttcttgtatccagactagagtaacattattcttgaattgtaataatctctctataattattctcaagtgtgcattttactcctcattaggttcgagaac

SEQ ID NO: 108573 - DNA, 410 bp, Aquilegia coerulea
  Intron number 3 from transcript AcoGoldSmith_v1.010878m (l ocus AcoGoldSmith_v1.010878m.g) derived from phytozome v7. 0 (chr-ID scaffold_1; pos 1060784 to 1061193)
gagaagcatataaggaagcccttctttacagcaaggtaagctttagagttataacttgatttttcgcactttgtactttagattgataaatttgtgaacataaatttatcggtattaagttaccttgattttagtacagaccaagtctttactggtcgcacaatggattccgttatgttcatcaataatagtcattcaaggtttcttcagttcaacacgtggaagaaaaaataacacaatttgattttgttttggaagaaatcaatatacttactaattgaagatcatttcagattaatctgtattagatgatacatgatagcaaatactactgagctgtttagtgctaggtcgtttgactttctcggaattattttggaacctttagttattcaggaacagttgaacgg

SEQ ID NO: 108574 - DNA, 981 bp, Aquilegia coerulea
  Intron number 1 from transcript AcoGoldSmith_v1.007250m (l ocus AcoGoldSmith_v1.007266m.g) derived from phytozome v7. 0 (chr-ID scaffold_15; pos 3771396 to 3772376)
tttgggaagcagtcaaagcagaggctttattggaggtaatttttgttttttgctttattcatttcaaataatcttttgttaaaaattacgatttttgattttttttaggaatttttcaattttttactcaattaagtaggaaaaaagagtttggaagctgaagtagtagtgaatgagggcatttgggaaggaatccgagtgtcgggaatggggagaagttgaaaaataaaaatagtaatacagtagtactgatttattattattattatacattttgattagctaaaggctggaccattattaggttgtgggacagaatgacagattggacattgcatttgtcagttaaaacttagaagacatggtgatgacgactatgtttgataattacatgttatttgcggcttaggatctgaatttttttagatgtaataaaataaccgcctttgatattaatttgtgagtagtaagtgaagaaaactctagagactgtgtgtggtctgacctgtgatgctttcttaaaacaaacaataatcttgtagttacaatggtgttggtttctagtttctacttttgggatcaggtgctatgatctcatgggcgccaaactactaattttaatattaaatttttgttcatctggagcaaagttttgatggaatatgcatcatctttggtaaatattatagcagtatgaccacctacttaagacaaccaaattctttgtaactcctgaggtttgctatcttgtgtaaataatgtccagactttgtaaactgtgtatggttataattcgtttgcattttccatttatccgacgtggcaacagacctgaccaattagataattaatatccatctccccttatttgttgtggcgtattctttttatactaaaattcaaagagtagaaaatcagaattcagatactcccttttgtgtttcaggcagagaaagagccgattttgagtagctttttgta

SEQ ID NO: 108575 - DNA, 640 bp, Aquilegia coerulea
  Intron number 1 from transcript AcoGoldSmith_v1.003362m (l ocus AcoGoldSmith_v1.003362m.g) derived from phytozome v7. 0 (chr-ID scaffold_1; pos 7822566 to 7823205 reverse stran d)
aagctgagataaccgaacaagattctttgctactggtatgtccacgattaacatggttcatactgatttctttaccgatcgttcaaaatttctgttgttttaaaagttttttgagtttttcttcatttcggacttcagatctggagattttgtttagatcgaattcttagatctttctaggacgatttgttgtgaatgagctcaattactgaactaattatgtgttttacttaaatttcattgcaaatcttctcttcctcgattgaatttctgtaaaaaaattggagaaagagcttgatgtattcgaagtttcattagatctagctattgctcgctaaatttcgaactccagttcatttatcaattatcatagtagttctaaataagtttcagatctgatgtattcgcagcttcactagatcaaacgattgtaactttccgattctcaatttgtttttgaaattataatctaatttttcaatttcagctcaaattagatgcgaatttatagattgcttcgtcatttgatttcaaaatagttgaaatcgatgttgaagtttgttgtcttacgaatctgacatctcttctatttacatgatgagcagactcgaaacctgcttcgtatagcaatattcaacat

SEQ ID NO: 108576 - DNA, 631 bp, Aquilegia coerulea
  Intron number 1 from transcript AcoGoldSmith_v1.012848m (l ocus AcoGoldSmith_v1.012848m.g) derived from phytozome v7. 0 (chr-ID scaffold_18; pos 3048790 to 3049420 reverse stra nd)
gctgggtaaaatatgttctggacaattttagtgaagaaacgttgatgttgtgggctgagtatctacttgattttataagggactctcatggaaaggaagagtgacaaatttccgtcttttttaattattataagtgattcttctaattaagcatatatattgattagattttattgatgcatgaaaactatagacatgggttttggggatgattttgatagactttggttgtggttgattgaaaatcttaaattttttatgtgcgttgtcgtgttgaacatgagtattttatttagtagttttgtgtttaaagaagaattccaaattttagaagtaaatcatattagctaactggccaatgggggattcaacaaccttcggaaaccacaaaggattttgtgaaagagatttttgagaaaaataaaaggcggaaggagaaagctaattccagaaattactttccaaatttgttttgtgtttattgaacatgctttctcctttcctacattatgaaagttaagaaatgcattaacggtgctttgccaaacatgctcttaatataatgatattttatgcgtagctagaacttttgggagttgttccacaatcttacagaaaccacgaaggaatt

SEQ ID NO: 108577 - DNA, 526 bp, Aquilegia coerulea
  Intron number 2 from transcript AcoGoldSmith_v1.004009m (l ocus AcoGoldSmith_v1.004009m.g) derived from phytozome v7. 0 (chr-ID scaffold_54; pos 1282923 to 1283448 reverse stra nd)
aggaacagttttggataccagggatcacttatcaagtaaggcttttattgttattgtgcttagcgttatagcttgtttgttttcatcaattgaagatgttgattaattaatatttaaatttataaaatccctaaaacatgacaattatgtaatcagaaggatgtgaattgtaatcaagttggcggtttgatgcattgctaattattgttattgtttaattttctcttctcctcaagatagtatgtacctagatgcaaagaaaaacatggagttgttaattttcgatttgttcgatggtcttggcatgttttgataatttttccaaaaaggacctcaaacgacaaattattcactcataaactgtaggcctaattagtggtatatatacataatatatttagaacgtttaaggttttgttttggaatcttgttgtgtattagaaaagataggatgaggctcttgatttcccttccctactttcttttgaattggctctgatctttctttgtgaaaacagatatccag

SEQ ID NO: 108578 - DNA, 841 bp, Aquilegia coerulea
  Intron number 2 from transcript AcoGoldSmith_v1.005022m (l ocus AcoGoldSmith_v1.005022m.g) derived from phytozome v7. 0 (chr-ID scaffold_6; pos 8174719 to 8175559 reverse stran d)
gcaaagcaaaggacatacaatcagctaagtggcaggtgagtttttttttttttttatggagtgtacacacccacatgtgaggatgcattgttattcatcacatggttaagtatactggtttgaggaccaacaaacatgaaataaatctgaggtcttaatgtagactctcagttaaattccgatataaaccttcgaaaatggacaggctgcacaatgtgattcaagttaccataatcttgggcttaggaggcgttttttgagatcatccgcatctaatagaatcagattgcccatgtatgtccatgtctacacagccacacaacctggacatagacatatatataccaccaacgtgcatatgcagaattaacatggtcactgttgaatttgactgatctgtgtatgagaacattcctcgcaccaaaaggtttaatattggaaaatacaatcttgttttccctatcatactcacattattagcacattcttaaagttttagcttagtatagattgaaaaatcaaaagatcaaacatattgttaagttataactggaatacacatttgtatgttttagtaagttcttatttttcctttatagtttctgcttgatggtggagataatagagttttggcaatatagatcttcttaaagaatacaacttttgtaccagcatagctctcagttttatttttctctttagcactatttgtcaatatttttttgtttgttacatttccagccattaccccaatgtatgtgattttttgttgttcactcgatcttttgtttccctgtttgtttcagaatattatcttaccaagccaagatttcagctttca

SEQ ID NO: 108579 - DNA, 346 bp, Aquilegia coerulea
  Intron number 1 from transcript AcoGoldSmith_v1.016393m (l ocus AcoGoldSmith_v1.016393m.g) derived from phytozome v7. 0 (chr-ID scaffold_10; pos 1671970 to 1672315 reverse stra nd)
gggtaagagtcctcttcaaccttactctattcttgaatttttcatttataactatcttattaaacagtatataaaagaaccggtgaacacagaaagtggaggaagatactgtacaattatacagtaaaatagtattttaaaaagcttcttagcacttcaaccaaataattctcactataatgtaataataataagtataaacaacaatgaaacggaacaagtcaaagagaaaagataaaactatattgttagcctatggtcatgttattgtcctcatatttactgtcctaaaccataattttgtgtgttttcagaagcttgcgcaaacaattgttggttgctaagg

SEQ ID NO: 108580 - DNA, 828 bp, Aquilegia coerulea
  Intron number 1 from transcript AcoGoldSmith_v1.006539m (l ocus AcoGoldSmith_v1.006539m.g) derived from phytozome v7. 0 (chr-ID scaffold_9; pos 1263723 to 1264550 reverse stran d)
aggttacactgttaaagctactgttcgtgatccaagtcagtcagtccttttctctaactcctttcacatttttgttaattaattagctagttttccatttgtattgaatctgttcttcaaatgacttgtacatgtagtagtatattgatggaaatcccagtttattctggggattgagttaataattagtgtaccttttcatgatttcgcctacagatgctaaatttgatctaaagcaactcattacattgttcctgatttggcgtgaaaatttttaagtctctctgaaagaactcaatcagtcttagtatttgtcaagttgaaatctttttgttgagttattctgtacgtaattcattgttctacatatatggtcttaaaattggatttccaactgtgttagagacatataggccgctgcagtgttatgacctgaaatggtgtacaagcatttgattttacttttgtcagagaagtcattgcattgttcaatgttcatctacttgttttttaacgaaaagcatactcaattcgggattaagaattctggcagaaactaataaaatgttattatgagaaatgttgaaccattatttcgatcagtttgtttcagaatttctcatccagatgaattggtttataaaattaaacacgtgaaaggggatttataaatatcccaacactacacttcttttccttattgtacgtgtagcaacaaattgcaatttttttcatactacacactataatccaattctttaacagtttaactgggtttgatatgaaattgcagataatcctaaaaaaactgagcacttacgtggactt

SEQ ID NO: 108581 - DNA, 892 bp, Aquilegia coerulea
  Intron number 1 from transcript AcoGoldSmith_v1.001361m (l ocus AcoGoldSmith_v1.001361m.g) derived from phytozome v7. 0 (chr-ID scaffold_28; pos 1963118 to 1964009)
gaaaaccttatctggtgattcttcttcttctacttgtttcatttgttttgaaatgcttcattctttcattcttcattcttcttcttctctctctctctctctctcttcttcttcttcttctacttctacttgtttgatatgtattgaaatgcttgatgattcttctttttcttatttagataagtttagttttttctggtttttgtctaattaagtaattttttttttttttttttgtttctgagatcttcgatcagcaagagagagagagagagagagagagagagagagagagagagagagagagagagagatttagttctaagttagttttgttgaataagaaagtggttttagttataaatgagctgaaatttgtttcaagaatctggttttagttgattatgatcagtattttagaatgtgtttttaatgaataattggagaataatcattttgattatttcttttgtttgctatgatttatacttcttaatttccagctcatacttctcaagaatgatagaatctgtttttagttgattatgatcagcataaaaaatgtgttttttttatgaataatcattttgattatttgttatctacaattaattaaatgaaaaaaatgaatgagctaaagttctcaagaaatgtattaattcatatgatagaatttgaagtaaagtttaatgatttagtcctgttatggatgaatatatattttttttcaattaactgcgccaattttgttcttgaaggcataggaatttgtttcctctttcctgtgattttgttcaaagctgtatctagtatgattaacttgagtgaattgctttgatagtcttttaagaggatgcaagcatgcttacaaaaaacttctcttttacaggag

SEQ ID NO: 108582 - DNA, 463 bp, Aquilegia coerulea
  Intron number 1 from transcript AcoGoldSmith_v1.007186m (l ocus AcoGoldSmith_v1.007186m.g) derived from phytozome v7. 0 (chr-ID scaffold_10; pos 2950763 to 2951225)
attttcttgatctcgtcttctcaagaaaccctactgtaagtttttctatattacttttcttttcatcttcttcaactcattttaaacaatttgtttataaacattgttttatgatttctatgtaaaaaaaaaaaaaaaaaaaacccgttaaacccttttattcttaaataaacatttaaaaccctaacatttgattttgtttactattttactaaatagaaaaacaaatttcaatttggggggtttttggttaatttgtaattaaacccaaaaccttcttttaaaccctaatttttaattcatctagggtttcttatttgttaaaaaattggtaggttttttagatttattttcctttaattatctacatttcaatttggaagattttttttttttttttttttttttaatataattatttttttcagtattgaaagaggagaattagcttagaaacaaatat

SEQ ID NO: 108583 - DNA, 568 bp, Aquilegia coerulea; identical to SEQ ID NO: 108282
  Intron number 1 from transcript AcoGoldSmith_v1.007469m (l ocus AcoGoldSmith_v1.007469m.g) derived from phytozome v7. 0 (chr-ID scaffold_10; pos 273316 to 273883)

SEQ ID NO: 108584 - DNA, 870 bp, Aquilegia coerulea
  Intron number 1 from transcript AcoGoldSmith_v1.027584m (l ocus AcoGoldSmith_v1.027584m.g) derived from phytozome v7. 0 (chr-ID scaffold_30; pos 1800612 to 1801481)
gacaatctccttcgatgttttcggcgtactattactttgatcttctcactactaaccagcatttcccggctgatttgtcaggtacgctaataggttcaattatttttgtagagaaatgtagtgtactccaacacattattgatcttttatacgatcttcaatgaatgttgaaaccattgttcaaaatctcgtgagatctcgcgagatatctcgaaaatttaagtatacggtacgagatattcatgagatctcaaacggtatgattttcataccaaccttgccttgccgataagttcgagatctcacgagaaatgatgagatctcgtgagaaatcatatttttagtgtcgagatgctcgaaatataattatttaaaaatgaattgtttgattttttttttaaaagttaaattaaaggattgctattaattgtaaatattagtttgttctaaatgtaagtttgaccttgaaattgtgaaattcgtacaattcaacttacatatcttgttaaaattgacttaataaactcaaaattagttgatttggggttattgctaataacttattttaataaaaaaaaaatctagtgaaaattgaatttaggaatgttaattaagtataaatgtgtgtcgaaatttgctccaaaaacctgttcatctcgacaaagacatccgagatctcaattgagatctcgaattttagacttgtcgagatctcgaggaattcgagattttgaacaatggttgaaactaacagaaatttaattttagctagtgtgaaaaacaaattctcattccgaacagatctcatttattttaaacttcttgtatggtagagcgaggagccgaggtcatagactacatccctggaat

SEQ ID NO: 108585 - DNA, 375 bp, Aquilegia coerulea
  Intron number 1 from transcript AcoGoldSmith_v1.000068m (l ocus AcoGoldSmith_v1.000068m.g) derived from phytozome v7. 0 (chr-ID scaffold_6; pos 7958347 to 7958721 reverse stran d)
gagacaggtgaggatgagatcttgcttagtagaatgacctttttggaggcatcttggtgaaacaaaataattgacaattacacatagcttaacctatctgttagaaacattgtaattttgtggccaaagtcccaactcccgaatgatactactcacaaaagtataagggttcttggattctttgcaatgagcactaggtcatggatgaattatttaatgctttttcttatggatgtattaagtttctccggatacataattttgttctcaaaataaatgtcgctctttcatgcaacacagagatgactaatggattttatgccttttgatattcctgcagagacacgtcttgcttctgcaaggcagtctgggatc

SEQ ID NO: 108586 - DNA, 817 bp, Aquilegia coerulea
  Intron number 2 from transcript AcoGoldSmith_v1.016756m (l ocus AcoGoldSmith_v1.016756m.g) derived from phytozome v7. 0 (chr-ID scaffold_220; pos 2508 to 3324)
tctccggcagttttccattattgtagaggtgagttaggaggaaggaagacaaaattaagagttgggaacttggctcaagtgcttgatatggcatgaatagtaatcaaattgtttatgttatattgttatgtaaaaaggaaagcacagcatgataaatgctacttttttatttttattttttgtagaaacgggatagcagtatgattatatatgtataatgtgcagagaattttatatgtgtagcctacttgcatgtgggtgtgtacatccactcacaaaatgccatgtgacaataataatataacctatgtatgggtttagttaaccctagtgggcttatcagttacccaaccactttatagacatgtggcgtcatatgattgggtgtacacacccacatacaagtaagctcatataaatttttttggtataatgtgggtctatatatgttgtttaccagagaattttatatgtgtagcttacttgtacgtgggtgtgtacacccaattacaaaatgtcatgtggtaatctaaattataatctacaaagggtgcataatttgactaggactaaatttagtatgactaggattaaataatcaacaaagggggactaggactaaaatttagtatgactagaattaaattactatgactaggattaatatttagtaactgggattaatatttagtgggactaggatttgataaaatatgactacgatcttcttatcatcatcttttctcatcatcatcgacatcatcttaaaaccttaaaccaagatcgatcttcatcatcttcttatcatcatctcttt

SEQ ID NO: 108587 - DNA, 248 bp, Aquilegia coerulea
  Intron number 3 from transcript AcoGoldSmith_v1.019742m (l ocus AcoGoldSmith_v1.019742m.g) derived from phytozome v7. 0 (chr-ID scaffold_1; pos 6422450 to 6422697)
aggtattattgtttgttagtgaaaagcgtatgtgttttcttgaaaatctaaaatgcagatttgtgacagaacataactttctgaaatatgcattcactatcaccccttggaactcaaaagatattgtatagtgaaatcacaaataaaaacacgagttgcagaagaaaaaaaatgatggttagtttcttatcattatgtctatttatcttgcagtggaattggaagactgctgttataggaatcatctt

SEQ ID NO: 108588 - DNA, 501 bp, Aquilegia coerulea
  Intron number 3 from transcript AcoGoldSmith_v1.006065m (l ocus AcoGoldSmith_v1.006065m.g) derived from phytozome v7. 0 (chr-ID scaffold_118; pos 57774 to 58274)
ttgctaatttgcgaccagcgactgttttaccacaagtgatattttttatttatttctatattttaaacttttaaagttcttttttattctgtcttatgatccaatcaaatgtaccatgaaaataagttctgtacttctgtcagctctattgataaatgtaactcgcagagtttgagatcaatttattgaaactaatacacaatattggtatctggaagtttatacttcaattgtggtgcacgttaatttgaagacctgtatttagcagagttcaaaacatgcacaagccttgcgcacttgcttgaggaaagggggccaagcagaagttgtcaacccaacccccccattgatttgttagaaagcaatgatgaatgagaaccttagctggtcatgttgctctttcttgtaagattttgtttttcatagcatggttcattatgtaatgtttagctatacacattttcagttggtggactcctcgacattgaagaaagaagtggc

SEQ ID NO: 108589 - DNA, 628 bp, Aquilegia coerulea
  Intron number 2 from transcript AcoGoldSmith_v1.020049m (l ocus AcoGoldSmith_v1.020049m.g) derived from phytozome v7. 0 (chr-ID scaffold_1; pos 5537487 to 5538114 reverse stran d)
gcattctttctgagttacacatttctcttttgaaggtgagggttttattgattttcagtttctaggtttttaatttggctgttctgttatttattttcaccaagttcaagttgatggaatttgattttaatgctcattgaaacattttgaatgttttacggtaaattagaatatctgagaatagagtttgagcttcgttttcccccttttggtatcatattttcaaatttagatttttcttttagattgcatctgtgaatcaatattttagagtgcttcttcaatctactggattttcttatggtgtcagtcacttggtagactgtaaacgtctccaatgcacaagtttctaaagatttaataaacccccctttttgagtgacaataggggagtgttgttagttttgtctcgatggagagaactgcactgttgatggtaacttattaaacgaaaagtggctgtggatacgtggctgctgtgttatttattttgatatgccttttatttatgaaatatgaatgtcagtaatcattacgaatttacgacatctgctgctcgtacctgcttaaatttccatgcaatgtccctttagggttttctgcaagccatattacagaccattgaagg

SEQ ID NO: 108590 - DNA, 886 bp, Aquilegia coerulea
  Intron number 1 from transcript AcoGoldSmith_v1.008587m (l ocus AcoGoldSmith_v1.008587m.g) derived from phytozome v7. 0 (chr-ID scaffold_11; pos 5622103 to 5622988)
ttcaaaactgattatcttatttgcgaatttttttggtatgttttcttcataactctgttttttttttttttcccgaattattaaactcaatgtgatgactcgaattgtttgaattaagtatatgattattttttttgtgatttaattagatttttgagaataagaaggatataggaaacaaaacccaattttttcttaacgacactgaaattgttttgaaacttttttttttttttgtataaatctagtattttcaattgttgataaatttggatatttttaattgttttgttttacgtattataattggttaggatgaattgcattatagaactcggtgacattgttgtttaccatttaccaatatatgggagaagataacaaaacatatattctgattgtcgagattgtcttatcaaaccccgaaaaactttgggggagtttaggggtgtaaaagtgaataaatcaggtacagggggtgggggagcagcgcgggaggccatgatcaccagctgcattccatttcaaatttgttgaagctgtttttatttttttcctagaatgttttttgaactaggccttacatccaccaaaaccatattcatgattttgtagtctgaaatttgtttgccatgtatttgtacttagtatagacaccattatacataatgcagatatggagtatggtttcccttacgtgcaacattaagataaaagtgcattctctctatatccagatgattctatgattctatgaatttgtgcttttactagtccatttacgttcaaacgaaccatgagagaactatttctatcctggccagttttttgtttcttgactatttcttgtttggtgataataggattttctcactagctatacata

SEQ ID NO: 108591 - DNA, 577 bp, Aquilegia coerulea
  Intron number 2 from transcript AcoGoldSmith_v1.012883m (l ocus AcoGoldSmith_v1.012883m.g) derived from phytozome v7. 0 (chr-ID scaffold_10; pos 3220451 to 3221027)
tgtgcgagcttgatattgtttttaattttagcaaggtttggatcatgccccctttttctgtcttttttttctcttttctatacggaatttatttttttagctaaagacaaaaggagaaaaaagccattgaatattatgataagttgataacataatctttcctgtgcctttgaattttgttgccatttttggaagtggggaggggtgaggggtgtggtaactaagcatgtaattcagactgacgataacaaacgaagatataaggttaatgtttttagtatggagcatgaacatgctctgcacaaaggttaaatcatttccagtatctccttttcaatccaaccttcatcgtgcagtcgaagtcaacttttaattgatactttcccaagtttaatttggctctgccatgtaaactgggagattcagtgattttgccaaatttatgttttatggatgatgttccagactcccagctagactgaattaacgtggctagtttacgactatatgatgcaatggacatgcagtgtttgaggtgacaattatcttgaactcatgattttttcttctttctcag

SEQ ID NO: 108592 - DNA, 955 bp, Aquilegia coerulea
  Intron number 3 from transcript AcoGoldSmith_v1.011465m (l ocus AcoGoldSmith_v1.011465m.g) derived from phytozome v7. 0 (chr-ID scaffold_67; pos 169846 to 170800 reverse strand )
caggtttgatttacattttgtgtgtagatgcagtaatcagattcttgcgacttgcgtaacaagataataattcatttcacttgaaccagtcatttcttggtttagaaaaggggcctatgcattggataaatataatcctggcttgcctataggtatgtaagaaatccaatattgtaatagttgatattaaaaacccaaacctatcttgattactcaccaatcaaaggagaatggacgtgaaagttaacattatggacctattatgaacaagtcatccatttcacttgaactagtcatttcttggtctagaaaaggggccttcgcatgggatgaataaaattttgacttgcctataagtatgttagaaatccaatattgtaatagttgatattaaaagccaaatctgtcttgattacctgccaatcaaaacgtgaaaatcaacattatggacttatcttatatgaacaagtcatatcatcaatgtagttgtcatcacaccaccactaatttcatagattttatgtacttatgcagtagtatttgtaaaccaaactaccgaagtcaacattatacttggggtttgtttgattgcaatagtttagttctacccaatatcttttttggggcagaattgtgacttcagtcaaattcaaacaaaactcaattgctttggtacgtctgtccgttcttcccctacgtgctttctttggttcttctcactactttccatgtatttcccggaaaacttaattttgtaactcaaatcaaacacacccttatatttcttttcagctggaaacattgcctaaaccgcctgaacgctatagagtgtgatatataatgtccctttgataacttatttaagtagctatttgttcttctgaatgcaattttattaactgaaatctttcttgatttgttgttaagtggatctgagattgggagatttcttgca

SEQ ID NO: 108593 - DNA, 612 bp, Aquilegia coerulea
  Intron number 1 from transcript AcoGoldSmith_v1.011742m (l ocus AcoGoldSmith_v1.011742m.g) derived from phytozome v7. 0 (chr-ID scaffold_123; pos 257123 to 257734)
tatataggagaaggtaatgggccttttctatactctagttttggtataaacataatatctaaggaagtaatgatatacacgaatatgtgtattgataatgttttgtaatgaggtagaatattaatgcgaagctttttgcctatatctagtgatgaagaagttaaattcaatgagtgaagcttttgcctatatggctatatcaatgtgtaaagctttttgtttaaagagttgtatcaataattatgataacatttaatgggaagcatatgtaaaacctgaatcaaaggaggctatatggatgggagaaatatacaataatacgaattccacggtaggtacactagagttgtcaaggtacaagaatatgttatgtgtcaagggcactgctataggctgattgtaatgtcatatataactactgcagtttcctatatcattttgatgacactttggtctaaacatattgttgagttagtcagtgcattcgtctacatgtaaatgtcatatgatctgcattacttttctcaagtttggttcatttatatcagaaagttcatgatagagtttttatgaataggcaaagagaagaagaaggtagaagtgacacagaag

SEQ ID NO: 108594 - DNA, 829 bp, Aquilegia coerulea
  Intron number 1 from transcript AcoGoldSmith_v1.004397m (l ocus AcoGoldSmith_v1.004397m.g) derived from phytozome v7. 0 (chr-ID scaffold_9; pos 3063333 to 3064161 reverse stran d)
gaggggtaaacatcaagtaagcttcaacttgtttttctactttgctgaatgatgaagtaattttattgattagagtaactatcacttggatctaaattaacttgatctatgctcttttaatatgcatttatttggatatgttgtccatccttttgtggcgtatactattagattacttgagttaggtgtgatactgcgatgtaatgtgaggtatttttatttatgttttacaaataatttaatgaatcttatgagttatgatctcatctatatcacaggtcaaaagattggccagatatggaaggtttaaaatgatctttagtccatgattaaattgttaaaaaatgatgtagtttatttaacctcatttttcaatagtttttatatgaattacttgtgacgaatatttggtatcaatttagattaagatttgaaacatgaccatcatcctttccttggctgatcttcaggccagccttcttactgaggtattaaagtattgtattagaagcgtatttggattcaattacataccatctataacttcaatgtcctattcagttccagagaagctctgaaaactatattacaacacatgtaagttcggcacaaacagatgacaatgaattacaattggatatatgtaattagattgtgaaatgactgtaaaaattggatacaaaatataatgattgctaaatatataggatgcatctttaacaatattaaatcttagtttcaagtttcgactgcaggcattttgttgtgaatggtcactagcagtctggtaaaatgtatttgatattttttgtttcgttattctgcagat

SEQ ID NO: 108595 - DNA, 385 bp, Aquilegia coerulea
  Intron number 3 from transcript AcoGoldSmith_v1.004061m (l ocus AcoGoldSmith_v1.004061m.g) derived from phytozome v7. 0 (chr-ID scaffold_21; pos 3564184 to 3564568 reverse stra nd)
taatatcgttcgaataactccacctttgtcccaatgtatggctgctacttcctatgttacttatttttattattttgtatgattagacatcttctattattggtaatggagtgtttcaacatgggaaatctatggcctgataggaggatttgtatgaggaaggttgctctttagataggggttgagggtagttgtggtcaattgtcaaaatggtgttggttttagggggtttgggtgtattggggctggggtcttcttcttgattttgacatggtttgattattaataaaacaggaaaatgaaaaacataggaacatgatattgatgtggatatgtttcaactctgtgagtttattttgcagatagcagagctagattggttgct

SEQ ID NO: 108596 - DNA, 609 bp, Aquilegia coerulea
  Intron number 2 from transcript AcoGoldSmith_v1.010683m (l ocus AcoGoldSmith_v1.010683m.g) derived from phytozome v7. 0 (chr-ID scaffold_108; pos 156025 to 156633 reverse stran d)
cgccggactcgtcttgttctcaaggaagtctgtaagcttttctttgctgctttgcaatcttttattgaaacaaaaaacatggaccatcattctgcattaaagtaataggaagaattctaagaagaaacacattgttatattttgttttggttggttcaaagaaaccattttatcattttaagagagcatatatctgtatataaaaatctccaagtatctaatcttctgcggaggctcgaaactcttgaacacaataattatcctggttgttggcatgaaggtttgcagaataaaattttgtttagggaaaatgttgtgagggctttgatcgtgtcttgttagaagacaccactatctacttactacaatttcacattaaagtggttgctgaactcctcgtccacactccctcataaaaagaaacttatctgcattctcttgctttatcgtgaatactagtcttaatatctatcctattaagtcacagtgtaagcaatggggtgtgtgcatttttactgcattatatctaaaagttgagtttgagagtgtaataggtttgctttctaacgtcttaatggttaatttatttatttgaaaggaacacgagcc

SEQ ID NO: 108597 - DNA, 470 bp, Aquilegia coerulea
  Intron number 1 from transcript AcoGoldSmith_v1.010683m (l ocus AcoGoldSmith_v1.010683m.g) derived from phytozome v7. 0 (chr-ID scaffold_108; pos 157007 to 157476 reverse stran d)
aatccatatattcgttcgttgcgttgcgttgcgaggtcagtgaaatgaaagctactcaacttctaatttgcttatcttttattatctatccgaagttttttgctttctcaaagagattattactcatagtttaattcatgaaaaacactatgactatgattccattggaaatttgatttgcaattaatcccaaaacatcttcttgaatattttgggtattcactattcaagacatgctagttcaggtttgggaattgtaggtgtttgacaaaatgtcaatgagagatagtgactgcgaataccttttgtttctcttagcttcacttaactaatctcgaaagtatatatgttaatgcccattttgttaattctttctagggaaccttttatcttttacctttgggaaggtttaacaaagaaaatgtatgtctataggtttccgacctcacattgtcctcattgtgctgtgg

SEQ ID NO: 108598 - DNA, 609 bp, Aquilegia coerulea
  Intron number 1 from transcript AcoGoldSmith_v1.006244m (l ocus AcoGoldSmith_v1.006244m.g) derived from phytozome v7. 0 (chr-ID scaffold_6; pos 1390963 to 1391571)
gaggagaaactccttccaggttagaaataaaaattttaaagttttaattcacattcgctatcaatttgtttatttaggtttcttgcagagttgaattcacgttgaaatctaagcaattagattgattgatgaacaaactaacttaataacaatcaaatttcttattattgttttcttaatttagagtatgtttagcgtgttgatcaaagtaagaaaacgtcaacaatgatgaagaaatttgtgtatctgagttatgttacacttcatttgacttgtgttatttgtacttgttacaatgttgtcaaatgaaagtttgtgatccaattgacacagttcatgtttaattaggacatttgtgagtacatatatatatatatttaaatgtatgatttctgatgttctgcacaacatgatcatatttgaatgtaatgttctgcagactgcagaagtggttttagtccattttatttgtatgttaaaagatttaggctcgagaactcatttgcctcctttgcgcttgtcaataccaacattaagatatggatatgttttgtcagcattaatttttttttttctcattgttttgttaataggtttgaattgttaaat

SEQ ID NO: 108599 - DNA, 885 bp, Aquilegia coerulea
  Intron number 1 from transcript AcoGoldSmith_v1.017701m (l ocus AcoGoldSmith_v1.017701m.g) derived from phytozome v7. 0 (chr-ID scaffold_110; pos 92170 to 93054 reverse strand)
gattctagcaaaccccaggctgtgagttgttcatttgtttattcatatatctcagtctgattttgcgtaataggtattgttatcagttcttttagagtcattcgtttagacatgtatgtataaacatccctgatttgattttaggattcccctgggcctgttaatgatctacaaggttgagatcttcttacctaaaaagtcagctcaagatgtttttcttctatcgagaaaaacaagatgctgctggaaaaggtttcacttgaattggttacagttaacattcatttgggttagttgctgccttgttggcttctaactacatcataataagtgacttgaatgtcgcagtttgggcctggtctcttcacacatttattttactaaatctaaatatatgagcgtgttaactgcaatgtatgcaatgttggaatataggatggaggctgatactacagatttatgtttatcatccataattgataaacaaggattattctctcttaatgaagcctttaaaaacactgaactcttttgtggaaaccaacatggaaatctacttttatgtgtcaactgactattcattcttattctagtgtgttttattggtgctgtgtgatgataacccaatcttgtgatctgatcgtctgaaacaatgagatggtctgccaagttgtatgtaatggttcattccaagtaggttggggcagaattgaatagaagcaatctcaagattataagcatagactcataacctcatagctaccagatgcaacattgacatgttgtataatttgctacttttgttatagatagtgattaacatggtcttcatagtaggttaaatgcaatatgtaatgttgaaaatttatttgctttgcagaaaaa

SEQ ID NO: 108600 - DNA, 559 bp, Aquilegia coerulea
  Intron number 1 from transcript AcoGoldSmith_v1.027141m (l ocus AcoGoldSmith_v1.027141m.g) derived from phytozome v7. 0 (chr-ID scaffold_1; pos 9787627 to 9788185)
ggtcttcttcttggtgatattcaggtaattcaacccacaatttataattcatatgcttgctttcttctatttcatatttagtctgatttacttaattttgggtataaacacaaatttcataatttaggcattttgttcaatttttgagttcaaattgttaatgggtatttgtacaatattaatttgtggtttttgtgttggtttatttttattggaatttttgagaatgtgattcatcagttgaattattaagtgaaaaccacaaaaattaaatactaattttgtgttttattgttattttttggtttatttttgtatcgaatttagtttattgttacttcactatctattaaagaaagagaaaagattggtttattgaaatgtgtatgttttcttcttttccaagctataaattttatgtagagggaggaatctggcctacttagtagttcggcaatgttactcattgtttgataattgtaacaaagttgatctccattaacttagtatgatttgccttttcacttattgttgggtttgttctttcagcaatcaaaga

SEQ ID NO: 108601 - DNA, 1011 bp, Aquilegia coerulea
  Intron number 2 from transcript AcoGoldSmith_v1.021088m (l ocus AcoGoldSmith_v1.021088m.g) derived from phytozome v7. 0 (chr-ID scaffold_51; pos 1263488 to 1264498 reverse stra nd)
agagcttcagcacaacagttgattgtatgtttcctttcttagattcttactgttattaatattattagatagaaatttttctaaaattgcatcattttctggactttccgctgatccgagtttgccaaattcattttttttttttttttttaccaaaataaattatataccattaagtagaaaacaaaccatacaagcattcagcagtttgtttaaagacagagtcaacaaatatttgtacggtactcgatgacacacatacatttattgtattgcagacacttccatatagttcttcctcacttctaacccgaccataattagctagtcagttcgaacactttaatagtctcttggtatataagcaaaatagtcaaaatccagggaattgcgcaattgtagattgttaagacaagttccatgcaaattccaagctagacttacaccactatcttcaaaggacgagtctgcatgaccttaatagcagattcattatcacttcctacatgaatatcttgacttaaaatttatataacccctattttcgattgcaactaattctgcctcttcgggagttgcggctgagacatgcttgttgcctgcaagaaatggaagaaaattccaatggctaagagtgaatccaatgcctgcagatgtcgatgcttgatatgattcaaaggatccatcagttagtaacagcgacaggtttgagaaggtaggaaggggtaacatgtacttgataggtttaagactttgagtggggttttagagataatagaattgcttgcttgagaaagtcatttgacactgatttatgatgaactattggaattctatccctaatttagatcacttaggtagacagatatgtctcagttagaacttccattgttaattcatctgccttaatgaccgcgtcatttgactttcagaatctctatgttctaatgacccttttgggtttatttttatttttgcagcattaacagagcccatagatatctacagtga

SEQ ID NO: 108602 - DNA, 655 bp, Aquilegia coerulea
  Intron number 1 from transcript AcoGoldSmith_v1.010504m (l ocus AcoGoldSmith_v1.010504m.g) derived from phytozome v7. 0 (chr-ID scaffold_11; pos 6377599 to 6378253 reverse stra nd)
tcatcttctttcagtctcatttgaaactgctacaggtatgtttgttaagtttctcatcttcatttatttgtgcttcttcttattctttttgttagtgtaataactgttgttgtttgacttaaattaatttgaagtaattcactgttacacatgtaagattgattagaatgaaagaaaattgttgttggcttatatttaattacttgatttgaaatggggttgtgttcatttttgttaaaattgattcatatggtagagaattggagtttctcatcttctgaaggaaaacaaaagggttgtttttgtgtttttaatttatctggttattacttgttttgcttgatttcaatttgggttgtttatattcttcgagtttagttcttataatagtgtgtactgcataaaaaagggatagttcacaaatctaataaggttgagaaaaatccgaagtccaaacactgtttcgtgaagataaagtagtattcactgcaatccagctttgttgtattgaacaccttttttttagagttatgctactacacaactacttattgagcttcatcaaatggaaattttatttggtatgtcacgagttttatgtgtgtttcttatgcttctaggtattcttgcttatatttatttctaattgtaggcg

SEQ ID NO: 108603 - DNA, 920 bp, Aquilegia coerulea
  Intron number 2 from transcript AcoGoldSmith_v1.007667m (l ocus AcoGoldSmith_v1.007667m.g) derived from phytozome v7. 0 (chr-ID scaffold_72; pos 405219 to 406138)
ttcctggtatacacctttttaattttgatcaatttgaatttcttttatggaaatgtagatagtcttaataaccttttatgttgaatcttgttctaattaatctttgaaatttttggtcggttactcgctttgttatagaatgttgattatagtaagaattggttttgtgatgtgtgttaattcccataggtgatgaaataatgtaaaatttatccagatggttgtaaattgtaatgtatgctaactctgttaatgtagactttcaaaacgtgtattcaaggagcaaaagattggaagaaagtatagatcaagggtgttattcttcccacccaatgaacttgtcaaaatttatgaacacaatttgagtcgagcatcttgagatttgatttatatatgtgagcgcaacaatttcaacatttttgaaatattctcttttagttcttctgcttattttttcgacaactgtaacattttttattttggcaatatatggattaagcccttaaatgttttgccctctctgctttcttttgtcttcattacttttcacactttctctgagggtacttgtgacatcaggattcaataacagaccatgattggttatagtaatagactacaaacgttatgcctgagataatgttttgttactatgatctcatatatatttacatttttgaatctatacactcttattagtaatttgcagttattcctgtatgttgtgatttactggttttggcctcaccattgttcgttggatgaatggatatactcatatacataacttggaaaattaatattatacttttgaacgatgtaagtttattatcagtcattgcaatccatcaaagtccctatgtaaagtataatttcttgcacttgctttaataggtcctgaagttgaacgcttggcggca

SEQ ID NO: 108604 - DNA, 619 bp, Aquilegia coerulea
  Intron number 1 from transcript AcoGoldSmith_v1.012907m (l ocus AcoGoldSmith_v1.012907m.g) derived from phytozome v7. 0 (chr-ID scaffold_72; pos 917143 to 917761)
ggggccctgttgcaaactggggatttgttgctgcggtatgttttgcttctttctcttggttgtcttgtgtaagctactcttttatgatgactttgaaattataaagattgcaggttggctcaggtcttgtatttgagtccggtattctagtctcctttaatatagtgtcaaatgtcaacctactaggacaaatccatggagtttgtatgatcaggctgtattggttcagttcttatgtccaagtatttggtcttctttaatatagtgtcaaatgtcaacctaggaattcttagggtaactatcaggacaaatccatggaatttataagatcatgctgtatcggttgcctgtcagtgggtttgactgttaccttgtctattcatttatattgcattttagggaagtcagttccatgcatggaagttagatatattttttgtcagactcgttatttatacaaaatactgtacccgtcatacatgtgatccccttttccttactctttgcggatctgaatatgattccttggagcttactacactctgtttcattattttctatttgaggcaatcatgagtcatgacactgtaactggtggcttcaacagggattggtcgac

SEQ ID NO: 108605 - DNA, 773 bp, Aquilegia coerulea
  Intron number 1 from transcript AcoGoldSmith_v1.024805m (l ocus AcoGoldSmith_v1.024805m.g) derived from phytozome v7. 0 (chr-ID scaffold_290; pos 11111 to 11883)
aagaacaagaagatagagttgttcatttgtttcaggtttctttctttctctctctcttactatttcacttgttattattagtttattgatgagattgctttagaattgtttgattggaggagaaatgtttcttttgtagaagtttttagtgaacccctttatcatattatgaagtcttcactcagggaattttgaagaaaattgaattctaagtgaacccctttactcaaaacccttttaaaataaagtaataaggaaaaatttgatgatattgagtttttttttttttattttttatggtattgagttcttaatgaaacaattttattgttcaactctatgagaggttttttatgtggagatatttgaagtatcgttggttttgatttagttagaaggaatgtgagtatttagcaaagaaaaatcattcacaatagttgtcttcggtaaaagaaatttgttgtcagaatcatgagatatgcccaatgtgtcttatcgaatttaatcatatatatatgaggtatctattgcaatacaggtaagttttataaagtgtgcacacgattataggataagcaagttctaaatatctaaaagaacaaatgtacgagtcacatttaagtgtgtttgcataaatagctcaaattatttatttcctcgtctagatcctaatctaatttgagatatgcttgtgattgcaatggtatagtataaatgcagttttttttatgattgtaggaaacttcaccttcggtggttcttattagagacat

SEQ ID NO: 108606 - DNA, 334 bp, Aquilegia coerulea
  Intron number 2 from transcript AcoGoldSmith_v1.003281m (l ocus AcoGoldSmith_v1.003281m.g) derived from phytozome v7. 0 (chr-ID scaffold_11; pos 5583705 to 5584038)
ctgactggggagtggattttggtaatttagtttaatttatgccatttgaataaatttatacatgatattcttctgttgtgcactgaataaactgtggtgctataaatattactagagatttatattgcgtacatttatagataaaagccccttaacatttctacagcattttctaactactattttggtgctcctatgatcaaaaattgcaagttcagtaaccaatcacaatcaagcatacatggaatgcggaaatctcatgatcctcttagttcaacttgatttcctcaagagtgttttatattttgatttcccccttttcccacagtgaagc

SEQ ID NO: 108607 - DNA, 837 bp, Aquilegia coerulea
  Intron number 1 from transcript AcoGoldSmith_v1.007229m (l ocus AcoGoldSmith_v1.007229m.g) derived from phytozome v7. 0 (chr-ID scaffold_21; pos 3240837 to 3241673 reverse stra nd)
gaagcctactggttgtgacttgcccaggtacttaaaacttctctctttcttattcattttgagtgtttctttcccttgagcaatgctagaagtccttgtcacataggttttagattctgtgatgcttggttgcctaatagtgatgactgtaaatgttatctcacattctcacccttccatgattgatgccaacatttggttcagccaaggtacttggttgttatggaaataaatgatgttagcaaaaagtccttgtcacaaaaactgctggaattggttgtccaatgtattggtgaatggtgataaaaagcactggcaagttgcaataactttatgagagtgaaaccatccttacagggttgttgttctggtttgactttgtattgtttcagttttatctttattggttcttgaaaaataattgaagcaatcaagattcaataacaaccaagcaggcatacacaagagacagagtctgaaacctatttagtgggtgcaaagaaagttaccaattaccaaagagtgaatgattgcagatcttgtcagacccatttaaactgtactactttctcttgtcatgtgacaaagattctttatgttcttgtgattagagaatctaataaaaaagtttccccaccaagaaatgtgtggtgcactgtgcactacttaccaagttaccaactttttcatgtcaatatctaaagaagaaaacacaagtagttggcactaaaaatagtgattaaccccatggaattttgttccacagacaccaatttagttgatatatgatactttatcatgatattaagttactcatcaatgtatcatgtagattca

SEQ ID NO: 108608 - DNA, 504 bp, Aquilegia coerulea
  Intron number 2 from transcript AcoGoldSmith_v1.023154m (l ocus AcoGoldSmith_v1.023154m.g) derived from phytozome v7. 0 (chr-ID scaffold_37; pos 476250 to 476753 reverse strand )
aaaggtctaaaatctctctctcaacattaacaacatagaaaactgaagaatagtttatatgagccttgtttgagagtgccatatttgataataagagggcttattatattttgtttgtatctcatattctgtccattcttttcatattcaagagggtaggttaggtatgtggctttatttagtagacaggtatgttcctcattaagggagaacttcatcaatatgacaatatgtgtacagtctaaggtgtttgtgcaattgtgctagacaactttgtcaccattagattgaatgagtagatcaaaatctcatttcactataaaaaagggcaaaaagcaactataagacagggctctgggagtatagaaaagattgttttgcagttataaacattagtatataacaatgtcaaatggcttctgatgtatataaaatttactaacgttttttttccccttcatttaactaggtgtaagatcggtccaggtgaatcgaaagcaaagt

SEQ ID NO: 108609 - DNA, 1031 bp, Aquilegia coerulea
  Intron number 1 from transcript AcoGoldSmith_v1.012376m (l ocus AcoGoldSmith_v1.012376m.g) derived from phytozome v7. 0 (chr-ID scaffold_54; pos 1269231 to 1270261)
gtcaatacaaggaccccaatctacttaccaggttggttggttgattggtttgttttgcaaagtgggttttggaatcaacgacaactaagaagacgccccgaatcaaacatacataaacagctttccagaattggaggtctaaattgaaggataagtaagagcttcgacacttggaattgaatggagaggaattaagtggagaagaaatttatttgtagtcgagagcagaaagaagcgaacttgaattgaaggaagagagtagggaagagcaagaagggaagggtgaacttttgacaagagcaagaaggtaaggctggacttttggcaaggctggaacgggctggggcacgaaatcggtgggcccgaaggagaaggacacggaggaaattatagggaagacgacgatatggggggcaaggactgtagatcggtgggcccgaaggagaaggacacagaaaattatagggaagacgacgatatggggggcagggactgtagatcggcctttacaaagtagatagatagatagatagataattataatttttggatctaatatttcttttcagaatttaacttatttaatttaaatattaatttatttattttattgaaagaaaatggcattactcagtagtctgatgtagaacagaacggtattctctttgcataaaaatctgggttttgtctgtctttggtgtttgtcctattggtttgattgagagagagagagagagaagaaagcagtgatggcagaacgttctgatttgcatttctgagctattatgtgacccaccaagttttgtatacaatatggtagaaatttaatggaagaaagtgtaatgctctagcaagtgtggtccagatcacagtaatgatgatggaatttaatgtcttgagtttgaaatgaaaatgaatataaacaccagttctagatacactgtaacagaatatttttagataaactggggtttattttattatctaaaaaacaaggtacaaccatacaactttacaaagccgatcagccc

SEQ ID NO: 108610 - DNA, 648 bp, Aquilegia coerulea
  Intron number 1 from transcript AcoGoldSmith_v1.025728m (l ocus AcoGoldSmith_v1.025728m.g) derived from phytozome v7. 0 (chr-ID scaffold_1; pos 1520439 to 1521086)
atttccttagtctcaccttgatccaagcatatcaggtaaatccctttttttcttttcaatatatatttaaaccctgccgtgaaaactcacaaggcacttttggctggttgggcaccttggatttacataatgtttcagggcacggtaagattgtacccacaatccaattgtacgtatgcccagttccactccttagtatcatgtgagtgatcggcttatcgcggcagaaatcatctatatttcacttccatgttaagcacatttgaatcattgttagatgatcacacatcaaatccgtccagtagactgttttgaaccagggttgatccaaggaagacaaaatctgagtcagagtcagtcaagtgctagatatgactgtggatttcaaactgccaattgggtttgctttagtctgaccaaacattgggtcacactgaacccagcccaaacacatttccactactagtactcattcaaccttttttttttttttttttttagatgaaactcatttaactttcactgtcaatcaatctcacaaatctagaaatctcttttccctgcatatatgatacagtattcattccgagatgatccagattttattattgattgaataggctgtggtttcaaatcttggcgataaca

SEQ ID NO: 108611 - DNA, 991 bp, Aquilegia coerulea
  Intron number 1 from transcript AcoGoldSmith_v1.008419m (l ocus AcoGoldSmith_v1.008419m.g) derived from phytozome v7. 0 (chr-ID scaffold_9; pos 1257997 to 1258987 reverse stran d)
aggttacactgttaaagcttctgttcgtgatccaagtcagtcttactactccttcttatacttttattgtgtgattttttaaattaattttcaaactctttgatagttgacttggattcaatttgggtgaatgagtgaaaaattaatttacctattgcttgatttttcccacagatgctcgatttgatctaaagtttgtatctttgttacagaattgttcatctttagttaattagctatttagtacatatctgtgttttttttcgtaactattgaaatttatatcagttggtataaacaattgacaaataacagataccccttcagtgtttagcctaaaaatgctaaatttgataatttttaagatttgggttggagagccgaaaagtgtttagcctaaaaatgctaaagtttacaaaacatattcttcttgatgatatgtagacattgattgctaatgtactggtttatgtctgtggaccatgagttaggccttgtcctgtatttagattatgtatctagtgtgtatcttagaagaaggtaatctgctgctactgatgtactcctacttttgtataatagaatagtttggttgttcaaaaaaaaaagacattgattgctaattgcgtgctaaacaattggatttgagattttgaggtgatatttggtttaacaattcacaaggtatattttgggtagacttgctgaactgcgaaaagtattattagtgaaaaaatattgatgttgactgaaacaatggaaaaaaaatagtcataacacaacactttatattttgttttgtaaatgaacatgtccatcgaattgcaactttacccgtgtacttgttctatatctctgattaatagttcaaccaatttctctcaccaattaggtgatggatactgtttaattggtcatttctatacacattccccccccccccccctttcaatttttatcaacaactaaacaaagttatgcgatgtttcag

SEQ ID NO: 108612 - DNA, 739 bp, Aquilegia coerulea
  Intron number 2 from transcript AcoGoldSmith_v1.018689m (l ocus AcoGoldSmith_v1.018689m.g) derived from phytozome v7. 0 (chr-ID scaffold_6; pos 2813992 to 2814730)
aacgtcttgttccatctcctaattccttcttcgtaagtagtaacttatcattttatacatattttcttgtttcttgtatttatgtacataatgtttgagttgctggattaaagttggattttgaattatttcattttataaaacagaattacttttgtttgaagaatttgttaaaattagattacaacaactttgcagaattgcagaataaggaaataaatatatgaagtatgtaatggcagcatagaccctattctgttactggaaaaagaacgagttagaaacttgttttgtttggggtctttgttccattccagtcgtaaaggttatacgtatatcttatactaccatatgtgctgttttgaatagaaattaaataaatgattggctgcattactttaaatgtagttttcttgatttgacatttgtgggatagatttggactgggactctgtggttaaccttattaagttgaaatcccatggagagacccaagggaaaaatttcctgacaattttaaattctttcttttgatgcattagttgatcccagtgatgttatgttacgaattcatatgtcctgtgctttgttcgagtgtattgtttggaatactagtattcttattattaccttcttctcctttacattctcaattgtgtatgtgtgaaatactataaccttattaccacactggacttgtttacaacactaattaacctccttgtttccctattgtagg

SEQ ID NO: 108613 - DNA, 496 bp, Aquilegia coerulea
  Intron number 3 from transcript AcoGoldSmith_v1.001232m (l ocus AcoGoldSmith_v1.001232m.g) derived from phytozome v7. 0 (chr-ID scaffold_9; pos 403761 to 404256 reverse strand)
ttcaactgaccgaacagagataaaacgtgttgcaggtcttaagaatcaaatcctcaaaattttgctatatatgcatgtgttcatattatgtaatgcatgtaattacattcagaaagtttttatgaatatttagttgatatgtgttgtatgattggtgtaattatctttgaaaatatattgtagcgtgataaattggataggaagaaagactaaatgaactgtcaatgtattaacagtatgtagtgcataaattattaatgcatactcaaatatcctttagatatgaaggaaggttgcagatttcaattttggcgggaagttgtaacatgcatgtctcttttttctgtctgggtttcagcatataagttcaatctttcatgtatatttctaggtagataataaaagtactagattgggcttttacttgacccttttggcattttgttgaatgtggattattttgttttttatgctgaaagccgagctggaggagagc

SEQ ID NO: 108614 - DNA, 921 bp, Aquilegia coerulea
  Intron number 1 from transcript AcoGoldSmith_v1.004233m (l ocus AcoGoldSmith_v1.004233m.g) derived from phytozome v7. 0 (chr-ID scaffold_1; pos 3458227 to 3459147 reverse stran d)
gtcatctggttagttactttggatcacgattattcatgacattttttcttgtattccccatctatctctatttcaataatggtctatcttcgtctttttatattagtatctttttccatcttttttgggatcttttcattatttcaaaagacttctatatataatgagtttgatgatttagtatctgtgggatttggagatatttgaagattggggtttgttacttatgcatgtgtaagttatttatggtagattggagttatgaactagttttgatttcttatggtggaggaaatgggtatatttgtgattaattactacttctacatgtattctgtttgtattgttgcatttgttgaacagatagtgctgtgataatgtatgtcttgagtgtcaatcaatgtgtagaacttggttttctattattttttgaaatgggtattttggttttcatggtatctgataaaatggttgctaaattagattatcacatgagtgcttgtccgttcttattttgtcactcaagctgtaagcatgatttgatgttgcagtcacatagagcctgctttagatactactgtttttctttagtgacttagagttagaggaaggattgtaacaatagattgaactcatttcgcccatcttgatatattattgcataaaggttgtgagtagagagaatcatatttctctttttccttcttttatctcaaatagacatacccttgcagaatcttgcgacgatgatatggacacactttccgtaaagagtggattgattgtgtcccactttgtgatatattttttgaataacagaaattgatggatatactattacaaagatgcttgttacgttttatgtgattggttgtttctccatatactttgcagtatcataaagcttagtcatatatagac

SEQ ID NO: 108615 - DNA, 451 bp, Aquilegia coerulea
  Intron number 1 from transcript AcoGoldSmith_v1.009895m (l ocus AcoGoldSmith_v1.009895m.g) derived from phytozome v7. 0 (chr-ID scaffold_27; pos 510083 to 510533 reverse strand )
agttgtttcttctacatcttcatcatcaacagcaggttagtaggagtattagggtttctgtttctgtttctgtttcatataagtaagagtattagggttttgaatatttttacaaattaatttcttgagctttgaatgagtatttttaatttttatttgtttgtaaattgctatgatttagtagtaattatagttgttgattgttagtaataataatgttaaggttatgttttcttgataattgttacttgttagtaataataattagtttttatacacatgaatactaattactggaaggaaacagtaatttgatctctgaaataatatagaggaagatgattatagacactataacaccaccacctgtccgacctttggtctataatgttattatgatgtcaagagggtttgatggtttgatgttgtatattgtggatttggtacagat

SEQ ID NO: 108616 - DNA, 532 bp, Aquilegia coerulea
  Intron number 1 from transcript AcoGoldSmith_v1.027656m (l ocus AcoGoldSmith_v1.027656m.g) derived from phytozome v7. 0 (chr-ID scaffold_54; pos 266275 to 266806)
tcaccaccttttcttttgtgttttgcaagaggaaggtttgtttaggcaatcccgttcctgtgtattagatcaaaacaaaattacaacctctagcatacagttctatagcatcttgaattagagttcagctcgttaagcaaatggttaaaggataaaactggttttaatgaaatattaattctacctcgtgcctaaaagtttgccttaacaccattgtattgaactttcttctgtgctttagacgcatgttcactattggcttgcatctccaatagggcctacaaaacacccaagataatgtcaaatgctatatttgactcatcatttcaaggtatctgtacagcatggttttagctagttgaaaattttcagctatggcattgatgtgacttcttcaattattattcttattaataaaaccattattgtttgttttaatttgatgtgacttcttcaattattattctcaatcatcgtattccaacgcaactcttgtgatttctcttttaaccccaagtttgcatcaacagac

SEQ ID NO: 108617 - DNA, 832 bp, Aquilegia coerulea
  Intron number 1 from transcript AcoGoldSmith_v1.002201m (l ocus AcoGoldSmith_v1.002201m.g) derived from phytozome v7. 0 (chr-ID scaffold_10; pos 3269577 to 3270408 reverse stra nd)
cgactgaaagtgtaagttttgaatgcataacaaatcctttccaattttaagtataatctgcccttaatttatctttgttttgttattttgagatgcccactccaacatcaaatgttggaagatcgtggccgatcactgctgaagccttccttgttttgtctttgttgtgttttactaagtagttgcaaaacaagttattataactaagtgtaggatatctgaactagttagattgctttatctctgccgattataagctctaaaacatatggaatggggacacacaaacatagggaattgctttgtcagtcttctcttttccagcgctctttgttcttaattttgaatgatggctgtcttcccagattttaactgcattgattttattaatacctcttctatatcttggtggtgtatcagtttcaaccctgatatctgaaaactcttgggtgcaaagtaatgattttgtttttgtagtggaagctgtataaaacctcagttctgaacaaacttaatcaatttattgaagaaaaaggtatttaggcagttattttatgttttttttttggtggtgggggtaggggggtaaagtagatggcaataaataagaaacaaaggaacggagagagaaaagtggagattatgggttttcgtggaggggacaggtgagagagacttgtgtttaatttgttattgatatgcttggctatgaggccaaatttacaaaacatatatagtttgagttgtatttattaatacctttgacattggcgtgatagaaatttgtttgattgcagaccccaggtaaccatagccacagcaataatatttt

SEQ ID NO: 108618 - DNA, 808 bp, Aquilegia coerulea
  Intron number 3 from transcript AcoGoldSmith_v1.001262m (l ocus AcoGoldSmith_v1.001262m.g) derived from phytozome v7. 0 (chr-ID scaffold_11; pos 3134874 to 3135681 reverse stra nd)
tttggtgctcctgaattgattgtcaaggtaagttcactcttgaaatgcacttcctctattacaaatttgtttcgagcaacacatttgtaatttatggacagttatcagttatcacagccctgcggttctgctcactccacactgagggctacatcagagcttgttatcaaagataggtgtgggaaaggaaaattaatagtaccaactgattgattaaaaacagagatgaagaactgctctaggtgtcatatggtgcaacaaaacaacaactatactggaattggttgagatgctaagatttgcattgttctaatgctaacttagtgactttgattgaccatcctctttcagtctttcagaaatccccattatttactaatagctgtttactcgagttgcgaaagatctatatatgggtttaacctacattatctggcaacccaaaagtcttgcccgagtttttcttgataaagggtgttgagctcacactatgagagggtgttcaatttagggaagcaacgatattagattatgatataaaactgtcagaaatccagtttgtgataattgtccgaatccgtataacttctggagtaaaaaaaacatagatttgatctgatctgtgataacttacgggtagttttcaaccatattgcatttacgaaccaatcctagactggcaaaaacatacaacattactcatgatttgagaacaaaatttattatactattggatgtagatgaccttaagccttgtttcttcacctctgcagatatttggaagcattggagcagtctctgccggtct

SEQ ID NO: 108619 - DNA, 512 bp, Aquilegia coerulea
  Intron number 2 from transcript AcoGoldSmith_v1.013070m (l ocus AcoGoldSmith_v1.013070m.g) derived from phytozome v7. 0 (chr-ID scaffold_12; pos 4932397 to 4932908)
aattttattctgtcaaagaaggaattctctaataagtgagttatctttttttttttttttgataagtgagttatctgaccccgttaaattaagattgcgatttttttttgttttgcttgcaaacaagttgtaaaggacctctaccttttaaattgtgtggattgttaatgtgttttggatatgttctcgctcattgagcggttgaaccgaagtttaagattatattcagcaaagttataatttgattccctgtgatcacctttccatgatcatactactgccttaaaagaaaaaagtcagcccaggccagttcttataagctagcatcatcaaagataatatatgtttgtcaaggagtaggaagaagacctatattatatattttttttccaaggaatcatatggattttatgttatctttttgtgctcaactatttttttttatccttgcagatcaatattatttttgtacatcagtgaggttatctgtcaggtttgtcttctctcttttt

SEQ ID NO: 108620 - DNA, 456 bp, Aquilegia coerulea
  Intron number 3 from transcript AcoGoldSmith_v1.022572m (l ocus AcoGoldSmith_v1.022572m.g) derived from phytozome v7. 0 (chr-ID scaffold_15; pos 4884133 to 4884588)
ctcaaaaacttgatccgtatcagagtctctctcctttttttttttttttttttattttgagaggtaaacgagcataatatattcatatcagaaagttgattacaaacaaagccaagggatgagatatccctggtcaaggaaacaaaaacaaaacacagaagaacaaacaacaaaaactataagaaactctacatcaagggccactttgaacattctcccaagagtaagcaaaagaagcataaggaatctctctctaatcatgccatctcttgcaccaaaaggatatgcgtcctttgatgtcaaggatggtgtgatccacatcacgttgaactccctgaaaatgtcttcgattccgctccagccaaataccccacagaatcgcatacggaatgatacccaaattctttttttttttttttttttagagtctctcttcttaatatctacacccattaa

SEQ ID NO: 108621 - DNA, 576 bp, Aquilegia coerulea
  Intron number 2 from transcript AcoGoldSmith_v1.008085m (l ocus AcoGoldSmith_v1.008085m.g) derived from phytozome v7. 0 (chr-ID scaffold_1; pos 2657641 to 2658216 reverse stran d)
cagcatccctctctcttactacactggcattctcggtatgtttcttaactaaattgtccatacaacactactaagtactaacttatttcaaaaaaatttgtaatccatatacaatagtgattcattccccattttgcttatacccatttcaacatacttctattccaccaaatcattacaagatcaattttagttcccatgacactgacattctaatatccacaatattttttttttcttttggggtaatacatcagtttccacattctctatttgatattgataattggttcatgattagttggctagttgctcaatggagaactacgcatcgcattccgtagcaggactagctctatagctctagatgtgaagaaacagagcactcctcttgtactagctagataactagaagcataactggggtgtttatgcctccctctccggctctccaccaaattaaatgctctcgccattttaccgtaacaacgagtcagtcgggtcttatcagttatcaccctctttttattccaaaaaaatgtcttacaccctgtctttattgtgtcattcacagga

SEQ ID NO: 108622 - DNA, 949 bp, Aquilegia coerulea
  Intron number 2 from transcript AcoGoldSmith_v1.000173m (l ocus AcoGoldSmith_v1.000174m.g) derived from phytozome v7. 0 (chr-ID scaffold_27; pos 2505225 to 2506173 reverse stra nd)
tacgtaagaaatatatttctcttttatacatatgcttctaatgtttaaatttctctttcttgagtgagttgttttgcatattggaatattttcttatgtacttaaagagccatcttcttgcttcatttgtatacatacgaactgcttacatggttggaaaatgtcaagtgagccagaaaggagtcaataaattaatggtacaatcctaggaaaagatcattgattcagggtttcgtttgtctttagagatcaatggatggttagtaatttgattaattgctccgttaaatgttttcccaatgtttttaaaaagaattagaaaagaaatgataagttaaggtaaatgctttgccatacaaacaaataaaaaaaaattaatttacacagccaactaagcctccacactaaataatatcctcaacatctaaagataaagcatatttgtaaggtctatctcatatccatcagaagttaagttcacattattgcaacaatcttcaccttggtgatggcctcccgcttccggctaatccagaacaagaatgagggaggctgaaatttccatgagttaagtactttcatcatacgatcagtcatcacagaggtcatccttaatgatcaagatagagctccaaaattcacaagacgatacattacaggaaaggaattggtgatatatagataaaagactccgaattttgtccatttcacaattaatttttggtttgcaacagtacgcgtgcatcacaaattatggagtgtggatggaatgacagctttaaacttttcattatccttgttattggaaacctactttctctctctctctctcacacacacacacatttttcagttttatatatatcaggttttttttatcttactcgatttttgtgaccaggctgctgttgcaggtgaaccaactggtcatctatttgaaagtcctatc

SEQ ID NO: 108623 - DNA, 880 bp, Aquilegia coerulea
  Intron number 1 from transcript AcoGoldSmith_v1.004819m (l ocus AcoGoldSmith_v1.004819m.g) derived from phytozome v7. 0 (chr-ID scaffold_6; pos 8618409 to 8619288 reverse stran d)
atcagcaacaggattacaacaccaactggtaattaattaaaccacttttctaatcttcttcatttagtataaaatcatggttgatttgttatgcatagttcaactaggttttacaattggttcttaacttaaccctaatttgaagaaaatataatactttaacttactaataaataatttaatatcattatttgagtatgatttatagtttatcatgttttgtttgttttaattatcatgttttgttgttgcccaaatatattcagaatttccctccaactttgtacaaatatgctcatcgaattaaccagtgttgatttcacatggataatcagcatcaccttgtttatatagttgtcatgtgttcatgcctgtagcaatattggatctgttcctgccataaatttatgtataatggtattgaatttgatacctttgtttacaggatagtaagcatgttttagtatcaatttagaaaaataagatccaaatacgtggttaagttcttccatcccaactcagcagccattagagtgccttctatgatggctcttgtctcagcaatgtagcaaatatggatatgcatagttgagcttattgtatacgataattcaaaactattaattaccctaattgtactgtaacttactatatcattattgaattccattaaattaattaggatattacacaaaattggttatatggttgattttgtttgatggaataagggttgcaacttgcaacaggacatcttggtatttaagaatactaaagcatatttaagtattgatttagcaaaaggataagttagtaaataagattttcttttattgaaactcatttatattttttcttattatttgtaggcaacaaacat

SEQ ID NO: 108624 - DNA, 485 bp, Aquilegia coerulea
  Intron number 1 from transcript AcoGoldSmith_v1.003866m (l ocus AcoGoldSmith_v1.003866m.g) derived from phytozome v7. 0 (chr-ID scaffold_27; pos 2720859 to 2721343 reverse stra nd)
tgttgtgaaggtcactgtttcttttcgattcaaaggtaaccctttgaagatccaagaaaatccttatttgggtatctttttaattaggttttgggtttgtagatcttttgttttttttttatttttgttaaaattagggatttttaatgaagtttatattgttttctcctcctgttttcgtttgatttcaggaggagatgttgcattccttgatgggtatctgaaataattttatctcaaagatttggttggtggggaattgtttattcatttttagggtttttaattttgcttgagttttttttttaaagagtttgattgatgaatttagggttttttagttggatatttgggataaatttatgggggtgtttatgagttgtttgtgttgttgactgtggtgggagtgaagtttcttccaccttatcaacaagaatagagtgagaagaaagaagaaaaaagttatagggttcaaaaggaataaa

SEQ ID NO: 108625 - DNA, 969 bp, Aquilegia coerulea
  Intron number 1 from transcript AcoGoldSmith_v1.009933m (l ocus AcoGoldSmith_v1.009026m.g) derived from phytozome v7. 0 (chr-ID scaffold_37; pos 1277532 to 1278500 reverse stra nd)
gcgttggtcttcatccattaaacttgggtaacttctctttcttcctattcttttcaaattagtcatgaaactaaagaaaatggattttttttttttttggaattttttcaaagttggaatggtgaattgaaaagtagcataatccccatttctttttataatgaattgaaaagttcaaccaccaaaaagtatcaaaattttgactatagtagtaattcatttacaagaaacccatgtttgatattcttaattttagtgaaaatttatctaaatgaggtacaatttgtacagaacttgtgaatgttgttttcttcagattccctataatttagtgacaataagtcaaataacaccaatgatgttgttaaagtttcgcctcttagcctcttaggctttatatacattgtaacacagttgccatacttggaactgctctatgagtgccctgaatttgtaggttttggtgttctaatttttgtaagaaaatttaaatctaaaaactgaagtgtgtatatagaattcttcttttcatttagttgttagttgaagtttaggaacgaagaatcaagaatgtcaaagtaaatataaaatgtgcagttgattctgccatggttttggaatcggtaagtgtaatttaagaagtcagtgatactaaaatggcttgaggtgactcttggtaataaataataataaagtagtttggaacttgatcttttacttattattaaggcattatttgctaatttggccgaatttcatgcgttgcctgtctggagtgtggaggagtttaggtcatcagaacgtgtagccctgcagttcaatttaaaagtgccttagtgcaatcacttgcatgctcacatgagtacgattatgatggttaactgtcaacatagctgttggtctatcaactcaacatcactccatcctcttatacaccaggggccttcttcatctcgtaaacttcttccc

SEQ ID NO: 108626 - DNA, 689 bp, Aquilegia coerulea
  Intron number 1 from transcript AcoGoldSmith_v1.000316m (l ocus AcoGoldSmith_v1.000316m.g) derived from phytozome v7. 0 (chr-ID scaffold_6; pos 8226138 to 8226826)
tgaagcatttgtcagtaatttgcccaaaggtatataaatcaacattggatttggaaacttaaaattttgcattgaagttttctcgtaatgcaaactacattattccataactcaattgttttggatggaagccaagtatgggtgggatattgacatttgagataaacattacgggtctcccttataatagtgtgtcttaaaattttgtccaaattacttcgtcaggttaaaatcctattaatgttgttacttttgttaatattgttatcttgattttaaatatgtgaacgcatcttcttgctctcttggtactctataaccgaaccttgaagggtgcaatatcagaggctttttctgtcattggctttaagaagctaaacaccacatgccactacagaatgctgcaaaattgaaacacaaaacgtcaaactttgttgtataccctgtttgccccctcttcttaggggcaacaacgtaactatggcttggtttcttccatttttgcagacttcaaatcttcagaatatgataccaactctggctattgatgttctccacagtatttcatgcatttttctgtctcataataatacatctgataaacaaaggaaacttattattaatattacttttaatttgtggtgtacacatttgtttgtttggtttccagattttgaggattggtaata

SEQ ID NO: 108627 - DNA, 640 bp, Aquilegia coerulea
  Intron number 1 from transcript AcoGoldSmith_v1.022933m (l ocus AcoGoldSmith_v1.022933m.g) derived from phytozome v7. 0 (chr-ID scaffold_1; pos 1472218 to 1472857)
gaatctgccaccacggtatgtaatatccaatagtatcaatgatatatcgtgatatagaaagctttctgtcaatcttattatcaacttttgcttgaggtcatttttccccagtggagctttgcggacgaaagggtggcttctgttttttcccggactaattgtacactatatctcttttgattttttgaatgctattctttttgtttttttatctgcttttcctgcacaatagctttttcatttttaagtttatgctttattgataaaaagtaaagaaaaaaaattaattacaagaggttgcccagactgtgagagagggcttcacagtctcagtagaatcacacccaagctatcccctatactccaaaaggagataatagcatatgcgctcaacatgcagatattatatggtttgatagaatctaatagaatggatggcaatgatatttgtatgagttattaaccacaaccatatgcctgcaggtctaactattggaataaaggttctcatcggtaagtttcccaattagtttcacaccacttaacgagcctagattgacacacttcttctctgtctttgagcttaagatgctttatctctacaggtgtattatcaggagttggagggctactttcaata

SEQ ID NO: 108628 - DNA, 612 bp, Aquilegia coerulea
  Intron number 4 from transcript AcoGoldSmith_v1.011116m (l ocus AcoGoldSmith_v1.011116m.g) derived from phytozome v7. 0 (chr-ID scaffold_21; pos 2061983 to 2062594)
ggcatttctctgcgagcgcacctttatttcacgaggtatgaatttgttctttcgtcaaagcttatacatgtgttgcttaactaataaccagagagaaaatggtgacatgcagatttgtgataccatgtacttgtgattactttttttttttttccgataaagtaaaatttcatagatttgtgataccatgtacttgtgattacattttttacgcagcaaatgatcaaagacattttattgttgtacctttcacatgtttcaccagatttcctctgtttattgggacacctctgaaaactgcatcattatgcatcttccaagtacactaggacaatgcataggtgatctttttcatgcttgattagtgactgcaccatctattttgaatgatttatcaccatggttgtaccacttattggttgtagggtagaaaacacacattgaaatgcttttccagagctgtgacagaatgtttaataacatgtttagaatattaagcatttttattgttatgtacagctgcacagggcaagatctcactatattaactttagtcattgcacaacattaatgagtttcttattatgtatatcttcttttttgtagggacca

SEQ ID NO: 108629 - DNA, 866 bp, Aquilegia coerulea
  Intron number 1 from transcript AcoGoldSmith_v1.026312m (l ocus AcoGoldSmith_v1.026312m.g) derived from phytozome v7. 0 (chr-ID scaffold_1; pos 8398124 to 8398989)
tcacgtatctgtgataatgtttgaataggatcctgataacccttaaaataaccttaacctacttactgatacatgagcagtggctatgtagtttcgaaccaacaaatttatatcattggagataagtatggtttggaatgaaatatgttattgcattaattgtgtctatgacaatgtttattggctgcttgtgctctttattaagtcgtgaccttctgtgacattgtttatagggttgggtaggttgattgttctatcagtgaatatgtttttatttatataaaagaacttttgtaggcatatccaagtcatcaagtgctaagcaattgagaatagattttttgtggagggtaagtcaacgtgtgttggcgggaattgtcgcatagaagtaggattttatttttgactgtggacattataatccatagtctcttttatagccttttaagacatattctaggtcgacaaaagattacttaattatactaggaatcaaatactaacattgtggtctgtattaagtcataaccctctgagaaactgaatctcttagaatttagagttgcacttcaatgagaatacttgctgcttgcttcatatatgaaagttggagcctctgaagtttattttgtagcaataggcattaattttgtttgaagggaagcaccctgtttttgttttcacatgtagaccggtgttactatgtgcataaacaggaaagatattacatgagatatgcaatgatgtctagttcccttgaacatttatggtgttattgtgcacttaaatatgttttgttaatagttctgttacaaagtttcttctctttgtcttcagtgtaatcttttgtgaagctgtggctatat

SEQ ID NO: 108630 - DNA, 211 bp, Aquilegia coerulea
  Intron number 1 from transcript AcoGoldSmith_v1.002408m (l ocus AcoGoldSmith_v1.002408m.g) derived from phytozome v7. 0 (chr-ID scaffold_10; pos 5112604 to 5112814 reverse stra nd)
gcttctagttcttcaccaccaaaacaaggttagtttctttcatttttttcttcttcttcttctctaaattgttataatatttttcaaatttttagtttctaatgggggagtgatttactgattattaattaattaattaattaattgtgctcttgtttttttttttttctctttgattttgattacaaattctaaaggaggtaacaaagat

SEQ ID NO: 108631 - DNA, 815 bp, Aquilegia coerulea
  Intron number 1 from transcript AcoGoldSmith_v1.009326m (l ocus AcoGoldSmith_v1.009347m.g) derived from phytozome v7. 0 (chr-ID scaffold_7; pos 1852632 to 1853446)
acttctctctcttgctcttctgattcatcagttccgtaagctctctctctctcatagtagttcctagcgaggttgaagaaagtaaactacaaataacatattaatcttcattttttttatagatgttgaaatttttaattttttagaattgatgtttatattataagtatatatttgtgcacttgttctactttaaattagatacccaaacttttaattgagactgtaatctagcaaggatgccttttgcaaacagaaccttacactgaaagagtgaaagggggttaaatggttaagtagggacaacaataagggtgtttttgagaattgggttttttttgttttgttttgttttggaactaaagttttgttaaattgctaatgattaatgatagttttgatgatgatgatcatgggtattatgtcaaatttatttagttcatttagtggaggtatgattgacaatggacaagttaaccaaaatcagtgtggatgatggaagagtagggggacaagactcgagagaatatgaaaatacaagattagggagaaaagaaccaattcggcaattcttagttttgtgttatcatgttagagttatttgccatgattatatatttggtttttgtataccaattcttgttttttaattgtactcttgtcagttcccttctgaatctgaaattggaaacattatgtaaaattagtctgtatgtagacagtttaatcttgtgcggaaaacttattagcatagattttattcactcttgtaaagttcttgagtcaaaatccttccaggttaagaagcagttatc

SEQ ID NO: 108632 - DNA, 770 bp, Aquilegia coerulea
  Intron number 1 from transcript AcoGoldSmith_v1.009960m (l ocus AcoGoldSmith_v1.009956m.g) derived from phytozome v7. 0 (chr-ID scaffold_30; pos 2310119 to 2310888 reverse stra nd)
agctggcgatttcatcctagctactcagatttcaggtaatgggataaagttctattctttcatttctttttagaatatttaagcaattggttgttcattttgatcattgggtgttataaagattcgtaattttttcttgggttttcttgtttgaagttatatgagctgaatctagtgttaaatttatcaaagtaaccacatttcttatacaaattagtaatatttgagttttatttactgttttggataatgggtttgttttgttatgttcggaaatgaagcatgacagtttcctaaagatgggtttttcatgaagtttatgatgaagcattggttttaagatagctggattggatgcaattctagattggcgagaaagtgaaagtttaattaggatataattccagtatgaagcaatgttcccatccgtttattttgtgccttttgtgatcatatatttgtttgttaattgaatagattttatctgtagctagaaactcggttttttaacaggaaaccttaatcagaaataccagtcattcttacatatccaaaaattgaaagttatacgcactccattaacttctacttggattcatgtccagcttttttaatctgtaaaccagtgtctgaattagaatcatgatatgtctttcttctttccacattcgtatatctatttctttaattattccttctaggcagccgctttatattcttaaagcgttactatgtcattttaaatgctttatacagagaaagttcgaaag

SEQ ID NO: 108633 - DNA, 953 bp, Aquilegia coerulea
  Intron number 1 from transcript AcoGoldSmith_v1.017343m (l ocus AcoGoldSmith_v1.017343m.g) derived from phytozome v7. 0 (chr-ID scaffold_40; pos 1228524 to 1229476 reverse stra nd)
agtcagcttgaaacgattggcaactgaccatcgtaatataataaatggtagtaatgataacctaacccttacattagggtttatcagcctcgtcagttgttcaagaagaatctcaatagaagaaatcgtagcagtctttttatttaattaggttttgaagtcaagatttcatgtagcataacatctcaaatgaactagtagttccaactgttgttttcaagagaaataccaagatatttatggaagatacttcacaaacttgcgaaaattcacattttgatcatttgatgtataaccaacataaaaagacatgattccttgacctataataatccatcaaatacagacgccaaaataaatatataaaaaaattaaaaaatgttgcagcgacggaaaagaacaatccagcagacgcgacaacatttgaagcacaccccaagggtgaagtggtagtggaaatgttttcttaccgaggtcgaggtttgtaagaaaaacttggttgggtttgagagtttgagtgtgcccgaatcttaggggttgtgtttgaatgactgaacttaagtgggtggaccaccatattcagtcttcggactatttctttttttgtaaatggttcagcgcttaactgattggtcaaattttggcagaatgaagcactgaattgctttatgtgtattaagaacttaatcagtattcagaccattaagtgcataactaaagaaaaaacaaacgacacctaaacctcttgatgcacttttaggtatggcagtgtactgagtacatttttgtttttatttaatctcctattcttggttgagtgttccttttccgcagtattataaaagaaaaagtttcttttgatgtttgattagattgagttcgtgttgcattagcttacctatacatggtttatttcagctcataggaacgagcatcttgctacatccttgagg

SEQ ID NO: 108634 - DNA, 364 bp, Aquilegia coerulea
  Intron number 1 from transcript AcoGoldSmith_v1.025075m (l ocus AcoGoldSmith_v1.025075m.g) derived from phytozome v7. 0 (chr-ID scaffold_12; pos 2289033 to 2289396 reverse stra nd)
tacaggtatgtcccttgaagatatataatcactatgatttgcaaaattctaaagtaatcccttgtctgttgaaagaaactactcagaatgttgttaattcatccaaagaacatcaggttcccctgtgtacgtcgactgtacatttcttaatggtcctcaagatgtaatacatgcataaaccttgtaaaatccacttaattgtatttgcatctgtaaggactacaaaagatttgactgttcatgcacgcctatcttttaaaacattacataagctaagaccaaattcttattttgcttttttcacactattacactaatcatgtttgttgttggatgatggtgtccgtctcgtcactagatatta

SEQ ID NO: 108635 - DNA, 311 bp, Aquilegia coerulea
  Intron number 1 from transcript AcoGoldSmith_v1.005098m (l ocus AcoGoldSmith_v1.005098m.g) derived from phytozome v7. 0 (chr-ID scaffold_72; pos 1128849 to 1129159)
gtcaagctatttatatcactggtcttcaacaaacggtaacttattcttcttctttcttccatgatttgagttgaacaaagttagggttagttgatcacaattgtgatctttgagcttaaatgattttttcgaaattcgtgatttttaagctcaaattagttgaatttctgttacagatcaactaatttgtttctcatttagattaatttcatgactttagagaacattattttgtttctttgttttctatttttgttttgaatggctatgacaaagtattgtttcaattataggttgttggtattttcaag

SEQ ID NO: 108636 - DNA, 962 bp, Aquilegia coerulea
  Intron number 2 from transcript AcoGoldSmith_v1.003520m (l ocus AcoGoldSmith_v1.003520m.g) derived from phytozome v7. 0 (chr-ID scaffold_11; pos 4452399 to 4453360)
ttaggtaattcattataagtttcttgtttgcaatttgatgaaattttaaattttatagtttgattgcttgaatgtatattgagaatgtggggactgtttgaaggggtttttgttaagaaccaattaaacaaacaagaatacgggttagttacaaatgaagtacggtgccaaatgtttgaatagttgatattgattgtacaattggcaatggttaacttggttaaaagaaactaattcactctgtaactgtctgaatgatctctaatcgttttggtttatctcattgacattagtttttatttagatgctcttattgtcttcttgattttcaaatggtgaagtatgaagcatgataaaaagcgtacaacagatatggcatattgccaatcagaccattgttaggatcctagattatgtaattagcttcctgctccttgaaagcacactactagtgtattatccggtgctacgcaccagttatgtattgggcatagtgcaaagtcacaagtaattgataggagtaagagagggttgtctaccattttcctagctatctttattcttcctgctggaaggtggttgcttccccttgcaattcttgtataatccctatagactcgtgttgttctcgtgtctactaatataatgaagggctacatttggtcatgtcaatagagtgctgacaaggacattaaccttggaagcgatcgattgttaggatcctaggttgagtaaagagctttcaggttttgaggagtattggctggttattttacagtaatcaacttgttctataggttctctttactcactttacaaatactgcttcttatggcatacctttgtttttagaaatctgctctttcctctctgggctcaatctaaatcattgttttgccatggttgttttgtttaaatttgttgtaggattttacagcactctggagtctatcctgattata

SEQ ID NO: 108637 - DNA, 959 bp, Aquilegia coerulea
  Intron number 1 from transcript AcoGoldSmith_v1.019708m (l ocus AcoGoldSmith_v1.019708m.g) derived from phytozome v7. 0 (chr-ID scaffold_9; pos 1574143 to 1575101 reverse stran d)
gttcctcttagtactgaagatccaggtagttccaggtagggtttttcattttcctttaaccctaactaaattatttcagattttatatttaaattgatcgattttttttttaattacttgtgaagtttagatttgtgtatttatcaaaacaatcatacatacaaaatttgatacatttgtctgcaatattgaaattaacgaattgccatttgcgagttaaattatggtctcttattgcaatgtgaccagtcaaacctaattgagacaatttaggctccttaattttgacctatatacacttagaggtactttagtctagagttgaacttagtagatatggataatcagtgttgccattgtttccgaagagaaaattgttgaaatgtaaatttgggattttgacgattgcttagcttatcaggcaaataaaatttgctagtgtttcttgagatgtgactatggaagtgagtgtggattttattcaaacaatgttataacatactaacttagagatttggctcaatgtcctagcctttattgttgggagaaaattattgatttttttgtggttgaatgaatttgatcttgtcatagactcatagtccataagtcctttctttgatgtaatatctacaacgaaatggtgcatatttccttttttttagcttcatatagtcggttaagtgttctatcgtcaatgtttaccacaaatcacaattccctggtttccattctgtttttggggtgatcaactttttcaactccatggaaacgttttaattttcagtctcatgtgcttttgaccagtgtaatagactgtaaccttgtgcttgaagatctcagttatcgtggtctttcttatacatgcagctgtgagctatataattttataagcaaatactcattaatgtttatctattgcagtggtggtgcggttacagtaggtctacctccagctt

SEQ ID NO: 108638 - DNA, 459 bp, Aquilegia coerulea
  Intron number 1 from transcript AcoGoldSmith_v1.008680m (l ocus AcoGoldSmith_v1.008680m.g) derived from phytozome v7. 0 (chr-ID scaffold_10; pos 2953732 to 2954190)
gagtttcttcttacatattctgattctggtaatgtataaatctcataatgaaactaatttgcgattttctattatttgattgtttattctccattagcatccttgcatttcttctaatggaagacatgggtgaaaatttgatgcaagggagatgatctaaggctcttaagtccctaatgcttaaaaacctgtctgtccattttaaggataatttatcaactatatgctattcgtttacagcagatatgaaagggctagtttccatgaagttttatttttatacagaatctctgtaattgactgaccttaatttcaagtcttggttttcaaccatattatgaatattgaacacagtggttgttacattattaaaaaatggcagtagaaagtgcaactcatgtctaaggccttgttgtatctatgtatatatagtgcgtctttgagggtggaggcagggtg

SEQ ID NO: 108639 - DNA, 429 bp, Aquilegia coerulea
  Intron number 1 from transcript AcoGoldSmith_v1.006482m (l ocus AcoGoldSmith_v1.006482m.g) derived from phytozome v7. 0 (chr-ID scaffold_9; pos 1959161 to 1959589 reverse stran d)
ctttcttctcgactctcttcctttctctcaaacaggtctgtatctctctctctctctctatatatatatatatatcctttttgtgtaaaacttgtagtcaattagaagcaatttcttctaactattagtaatagtttaatagagtaaattttgcatttttgaaaatgttttaggttgaaatattaagtttattgcccatccaaattagttgtattcgtgcatcttttaatgacccaatttagccatctcataatgctatgccctttctctttgctcccaagatccaaataacttttcatgaattcttccccctcccaacacagatatgttaacacttcaaacaacacttattagtgggtctaattgtagtatttctattttctgttctgtgttatgtaatttgttcattctgtattttgattttacaga

SEQ ID NO: 108640 - DNA, 719 bp, Aquilegia coerulea
  Intron number 3 from transcript AcoGoldSmith_v1.007593m (l ocus AcoGoldSmith_v1.007593m.g) derived from phytozome v7. 0 (chr-ID scaffold_6; pos 8153880 to 8154598)
aaaggttagtgttcttttgttttgtcgttatgtggatgattttagcttgtttggaccatcttttttattgtgtttagatacaatgtgaaatgctctataagtttcaaagctgtatagttacgagcaatcagataaagaactacacctcatttgaatgaaattattttaacaggtatgaaaacgattcacgagtgacactaatgaaagatttaggacttcagtaaattgagtttattgcactatcaacagtttgactcggcttccattgccactattaatggttccggatgtagaggatagtattaactatgactcagtagcttgtgcgtaaattgatttaagtatgacatatgactatgttagatggagcttctagtattatagcttaaggacaagggggtatgggcagcttgatagttttaattaggaattgcatatcttcagagcctgtctatatccttgtgaacgaccatgctggcgagaggacttgaacaattgaatctttaactcttttctatatttcatttgggattttcttgtgtgcttctgcctccttgttattcttgtaatgctttgctaagaagctttacaatatttttcttttaggttacagatgactcttttttctctcaaacttctttattgctgggaagatcttcctcgtaattttaattgtccatgcaggtttcagatattgagagatcttctgccacctagcg

SEQ ID NO: 108641 - DNA, 877 bp, Aquilegia coerulea
  Intron number 1 from transcript AcoGoldSmith_v1.006395m (l ocus AcoGoldSmith_v1.006395m.g) derived from phytozome v7. 0 (chr-ID scaffold_10; pos 1993643 to 1994519 reverse stra nd)
tgggtgatagaattttagcagagaaggtaatgctatcaataattttctttaatcttggtgctttttgtaacacatattgataatgtttatatttcattagttatgtttctatgatgaattgttcttagaacttaggatatattgatgacttaaaaaataagtgtcttaatttatgtattgatgttctaatgtgaattgtaatcttacttaggcgttattgtacagtaaatattatactatgggcgaggcgaaagatatgtgaaggcaatatatgcaaattttgcccatcagaaaagagtcttccctctggttattccctttctaaattaccgaaatgatttgtttcctagcttatgattttcattatgtttagtttatcttgggaaacaagccaacccttgatggttaactccaatttcaccgagggtttctgttatgttggtcacaattattcttcaatttctgcataaactgcagtatgtaaacattttcttactcatgttgtcatgcttatgaatggaaacttatccccactagctattaaattgaagtatttgaatttataatttgatctatagtcatttagctcttattcctttgggcatatctcaaaatcctatatctaagtgcattactaaacaacttttcattaacttcgtataatatccatgccaccctagtctaacttcataatgatgtaatattgtaatggttgtataaacatatgcaacattttattttacctgataaagtgatttgccagtattgaatgatggtggatgagacaaggtctgagtcttgtcctgcaattgctgaagctaatatctttctacttgtttttataacttccaggtttcttattttttcaaaaagcccg

SEQ ID NO: 108642 - DNA, 804 bp, Aquilegia coerulea
  Intron number 1 from transcript AcoGoldSmith_v1.011139m (l ocus AcoGoldSmith_v1.011139m.g) derived from phytozome v7. 0 (chr-ID scaffold_11; pos 3425887 to 3426690)
agggtctttttttgttttctgaactcttaacaaaggtaactcctttggatataagtttggatctacaaatgtttattttgattgatttatatatatgttataagtttcatttctgttaatggtgttgtgaaattcttagattttttcagttgggttgttggatttgttttgatattttttagtgtttagaagcaattagcttgttctactacaaattcagtctaaaaacctaattaaatttcaccccttttattatatatagagggatttgctaattagggtggatttaattatatatttgaagaatgttttgtgaaaaattagcgaaattgatcaaaagcgctgacatagtaaaaggtaagaattatttaggataatacatctgaatatctgatacactagcttttaggttctcgtcttccccttgatgtaaatttgtatcaatagaagaaatgaatgcgtttcagtctcccgtctttcccttatgattcatctaatttctaactgattaaattaatatgatttggttcatgaaattactattcgttttgcgagaattgaggggaaataagacatactttatcttcgttgacttggttggtttgatgtcggttttttaattgatagagtggaaacagaattggaattacaaatgaatcacactctttggattttttttgtgatgctccatatttagcacgggatattgaggaagccttacttttcattaaaagtcaaagtgtttcttacaataggtttttaggctctcgtgtattgataaatgttgtcattttgaatttgcag

SEQ ID NO: 108643 - DNA, 689 bp, Aquilegia coerulea
  Intron number 2 from transcript AcoGoldSmith_v1.011139m (l ocus AcoGoldSmith_v1.011139m.g) derived from phytozome v7. 0 (chr-ID scaffold_11; pos 3426870 to 3427558)
gcattacggtgaagagggtgtagatcttattgtgagtattgtttataaaagataaattagttttaaattttctgtactgtttgttactgtttaaatgttactgccatacgtcgatgtttctttcttatagtattcatacatgaaaacttattctggtaaacataatttctgctgcagttttgtggatatgtagtatcagcgtaggtgagaagaaaggattttaattacatagatggattccatctttgatgtcagataccaccagacgttactatcacaataaggctgtcacctagcacacacaagttttccacgaaaaggccttgtttttttcaagtataatataatttagactcaagcttacggaagggaatgattaatgttgagtagtctaagaaagatgtgcatctctatttggcaaagttgcagaatcattatattttgatcaaaacaacatttttaactttattcacttaattataattttttttaaccttgtttgcctcagcacaagtgaccgtgttaatttattgaatttgtcaggttaaaggatcttctggtgatcagatacctgttataagtttaatttgtaaatcatctttttaaagtaattgtttgcatcttgaaccagtgatcgtgttaatttatttgaatttttcaggttaaaggaccttctggtgatcagattc

SEQ ID NO: 108644 - DNA, 999 bp, Aquilegia coerulea
  Intron number 2 from transcript AcoGoldSmith_v1.015742m (l ocus AcoGoldSmith_v1.015742m.g) derived from phytozome v7. 0 (chr-ID scaffold_1; pos 7497798 to 7498796)
tggtacctccccttctaatcaggtataaaaccttttaccatttagctaaaataagcagggcagggatgatgatgagtatcatcaaacaaataagtggcattggatagtttcttaagcgtactggttggcctgggatttatgagtgggaactatgtaatctagtttagtgtcccttgtgtatttcttcttaaggtgtaaagaaagtgtaccttaatgtttatataatcaagtcatcagctgattgatgcgtaatattaagttattgcagaggacgtgttttgtcaatgcaaagaaacatggtggaccatgaaaacaagtcatactgcttgcaccagtctgtggctcaattaattttcaagttgaactatgctatgtatttgccatcagaaaattagatacactctcaaaggtgttagtgcgccaccagataaaaggttgtgttgtatattaataattaagcgggctggtagtttttgaggccaactattgggaaatagatatgaggcgagcctggctgaactattgaaaccatgggaggtgtagtttcttgtagagttttaatcatgactcgagtcttgtttttcggacaaaacatccactggcaattttttgactttgttttcttactttattaagcttgctggaaggaacatcttagattttggaagccacattaagctatggattattttgttagaatctgaataaatttgcttttgcaatcatttccaacttgtagatcttgttctccatgtccaaatttcgaaataatgcaagattctcaaagttgtctgccatatgtttgcagaaacaacccaacattgcatgcctaagtttagaacttaatattaaaacatgttcttcatttcttcgtcagcagtgtgttagatataatcatttatcctatttgtgcccttatctatcagactcttcgattgtttaatgattctatttaattgcgcagtacatcatatacaaagaagtgcgtgagaggttcag

SEQ ID NO: 108645 - DNA, 800 bp, Aquilegia coerulea
  Intron number 1 from transcript AcoGoldSmith_v1.009493m (l ocus AcoGoldSmith_v1.009493m.g) derived from phytozome v7. 0 (chr-ID scaffold_6; pos 2874380 to 2875179)
ctctcttcttgtctgtaagaagaaatacactcaaggtagtctcctatcttagggtttttacaagtattctttctcttcgttattggatttctttaaatgtttaggttttttttttcatatttcaatatgataatgagattactggttacattgaactattcttgttttagtactatgtatattctttttgaaacttattcaaaaggaactaataaagagttcttagcttaggagttgtttgtatttcaagatttcagttttgatgtctgcaattcatacctctggcttcaatcatcgtaaatgcaatgtttgtatttttagggttttttatgctaattaattagattttagttttgattgtctgcaattgctacttcttcctaaatgcaaaacaaaactagatctgggtgattgcacatcttttggaattttgcctctgttttctaatgttcatgtggagttttctacaacaaattacattttatcttctgtgtgtgatatgctgttcttgattgatattattgttgtatactaggtagtgaaagcaaatgattcctacacagatatagaatgttcatcattttacttttaagtatattttttcagataaatgtgtaaagaattaagatttgtagcctttgtgtggatagagatattcactggaatgaagtgaagtacttgagttatccttctcagtttttatgggttatgcagtttgagtaaaattttaacatataatgctatctgttgttgtttttaaggcatcgtttttcctgatgttcattttttctgctttccag

SEQ ID NO: 108646 - DNA, 846 bp, Aquilegia coerulea
  Intron number 1 from transcript AcoGoldSmith_v1.009521m (l ocus AcoGoldSmith_v1.009521m.g) derived from phytozome v7. 0 (chr-ID scaffold_9; pos 3904151 to 3904996 reverse stran d)
aacggaaacacattaattgacagtttgattacaaggtaggttttgcagaatatcttttatatatccgttttacatataattcgtttgattcattggaattttcttaggagatatagaaacctagggttttgggtttatggagataaatgtttgacaaaatgccaatgagaacttttcacttaatttgtaagtttcaatggaaaatattggttgtatagtgtaattcttctggttgtaaataattaaatttatcttctttggttggatttcaatcttattatgtggttagctgagattgaaattttgtgaattttttgtaacttcgtttgaaaaggttgtgtcttgactcttgaagttattagcaattatatttgtttttaagaaaaatgtttaataacatatcttattgaatttaaccaatttgggataaatcttttcgtttgtgttccagaaccctggtaacttttgtctgaaggtgagcagtaattgaaaattgcattaacccaagagtccagctgtaactattagtgacactggcaggtgttaacatattcactgaacatacttatatgcgattgatttaaataactcagcaaatcacaatttttttatcttagttaggaattatgttatcttttttcttttgctatatcctcctgccatattggcgcatgcagcacatgcttccagttgattggagctttatttctatgagcataatttatctttgtttcgttatgatatctgaaaagggtcaaatggcttactactgttcaaatataaaaaaatctgctctggcatgttttattttgaaaactgaatagtttttctggtggtgcaggagag

SEQ ID NO: 108647 - DNA, 873 bp, Aquilegia coerulea
  Intron number 3 from transcript AcoGoldSmith_v1.009907m (l ocus AcoGoldSmith_v1.009907m.g) derived from phytozome v7. 0 (chr-ID scaffold_7; pos 997367 to 998239 reverse strand)
ggtgttttatcatatatcccaaggtaagatgatggggtgtggttttctaatatcttcagggtaatgttctgctctttcatgatttaggtgaaccagacaaccagtcacctttttttgagagtttgactaactattctattgatataaaggttcagtacagcagctgctacctaaggagatatccctggctaataacaattacataaaactgaaataaatcatacttacatcaaaccccaaaataatatcctcccaggaaaaacaaaagtctcaaatgtcattaagtggtactccagcatcacttgcaccaaaggattagaagacctttctggtgagcaacaataataccatctcttggaatgttgaatcttctgtctctccatctacactggggccaaaccgcgaaacccacgttgctctcttggctgtgctatcaatagctctgatttaattactaaagagtcaccacgaatatcagaaattgacccggctttagctgttggtctttcaagatgcacatgcattttcatttaatatggagcttgcataagaaatgcacaatataatgatggaaaagggaaagaacagtctaggtagacatttgttatttaacatttgagcaagttagtttgggttacaattttgtgtattcattgagttcagctagttgttattgacttgctacaatattccatggggtgtactatattaggtgtgtaaaattttggaattgatatttttctcagtggagacttcagtttcttccgtatatttcattttattttatttacatggtaaatataatagtggttatcatttaattgggtattgatttgatacttctatcacagatttgcaacccttgcaacacga

SEQ ID NO: 108648 - DNA, 1022 bp, Aquilegia coerulea
  Intron number 1 from transcript AcoGoldSmith_v1.002318m (l ocus AcoGoldSmith_v1.002318m.g) derived from phytozome v7. 0 (chr-ID scaffold_7; pos 7264727 to 7265748 reverse stran d)
tcttcaggttttgttttcattttctctcattattagggttttgtttctttcattagtcgttattctgatttctttatctctgtattagatcatttcttacatgttttgttcttaatttagatcgttttgttttgttttgttgaatcgaagatctgaactccgtttattttcaatgtgtttgtttgtatagagtagaagtagagcttttggtagtatcttttttaaatttttagatttgttgttcactagttttggatctgtagtggtttgcattgatgtttttacttgatctgatcagaaattgtgaatagatcaaatgatgatatttcttaattttgtgtgtttggactgagatttgtaatgtactagggaaagaattggtgagattttgatattatttggtcagaaaactttgattttgatttgcgatggattgatttgaatgctaaagaactagatattctactgtatcttttaaatcatcacattgttatagtacgtgattctgtttgttcagattgacttattaaggtgcatgaatgctgcagttgactattatatgatttgttttgataaaatattttttttccacatgaaatagaatatgtgcttagagattgaactcctttttgccaatagtgagtactaagtaatcttcttctgctcgggaaacacttttgttactaaaaaaagaaaatgcttatgtcgatttgtgttgtagactatcttcattgtttgggtttcttataagaatgatgttttgtttaggataaaataaattgggtcggggggatcctttcaagttttgaccaaactataacattatgtgtgatttggacccctatcattaaaactgatattttctcccaccaatttgaatgttgacatttgaagatatgtcaattttattgttgagataaaacgcggaaattatattaatatccttttgcgctgggtgatttattgttaagattgtacaatttcatcactgcagggaactacagtccgggtagagtttggcg

SEQ ID NO: 108649 - DNA, 505 bp, Aquilegia coerulea
  Intron number 1 from transcript AcoGoldSmith_v1.026712m (l ocus AcoGoldSmith_v1.026712m.g) derived from phytozome v7. 0 (chr-ID scaffold_51; pos 13183 to 13687 reverse strand)
agagctatcagaaaaaaaccaaggtttgtgttttaagtatgttattctttttatactgttttcaatggtattttgtgtttgataaaactttgtttatgtacttttagaagcagagacaacatgtattgttggcaaaatgccattatacacaagcagaagttaacgggtgccaattttatctcggcgatgatgtatatgttgaggtcagcattttttgctcaaagggattctttggatcttctgatatatgagctttagcaactctgtttttcaataaattgttttacatggagaaactatataatatctagcactttgattggtttgtcggaaatggtggggaagttaaacaacttggttcaagattaacttaattctattatgaaagtacacataatattggtgcaaatactcacataatattggtgcaaattccttaagaaaaaccaaacaatttatttcttatgcaggcttcagaagacgacaagccccattatatagggaa

SEQ ID NO: 108650 - DNA, 820 bp, Aquilegia coerulea
  Intron number 2 from transcript AcoGoldSmith_v1.003714m (l ocus AcoGoldSmith_v1.003714m.g) derived from phytozome v7. 0 (chr-ID scaffold_9; pos 6350555 to 6351374)
atcgattgaaagaggtgatttgtttgctaacttctagtatctattgtagtcactagttatgatttcagtttcggcgatatttagcattgttcacagaagatattagtttcgcaaaaacataatctatactaaaagcaaagacacagagatatactgtatgccacttgcatttatttcttataaaaggaaccaggaacctaaatgaaggaatactcaaaaatagaatgataactaaacttgagttaactaagtaaagaagaaggcagagagcacattcaccttctcttaagtttatcatcatggtgtatgtctcctttcttggtatttaactatttatactatgtggtgggcagaaaattttcacaaatagagtccaatgggaatacgaagagtgtttcagtgattttagtttatgattgctaaattaatcttaatactactatctaagtaaatgtaacacttatgttacttgtttttatgtgtcaaactcaaaagccttatatttaaaagtggacgcttgatatgttcggattgttatttgaagtcgtgtgagaggaatgatgtaactgttagttgcatatctactaacctaaacaatggtatacatcatgtaatataataatgcgatcatgcattattacatttctggttatcctgtgggagtcactgtgtcacacgagcactcatttctttcttttgcttttctaatacaatttcttcccttaaaaccagggtattagtttgtgttgttttattcatctttattcctaactcatgcattatctattgcagattcgtgaatatcatagacggcatccaa

SEQ ID NO: 108651 - DNA, 1044 bp, Aquilegia coerulea
  Intron number 1 from transcript AcoGoldSmith_v1.005578m (l ocus AcoGoldSmith_v1.005578m.g) derived from phytozome v7. 0 (chr-ID scaffold_28; pos 1349623 to 1350666)
gaccttttcttaaagattctgattgtttccatcaggtattcaaactttttttcttcaagtttgcaaaaaatttagtttatttgtttatatgtttggattgattatgtttggttatatgagatttgaagacatgggttttgttgattatgcgaaaatttaagtgggttttggtgatttcatagaataatgtagaaaaccaagaaaaaattagtagagttgatttgaatttcattctgctaaatttagttaattagagtgaattaatgattgttatggacttattgttacttacttggaattggattacatattctttattaatgttgattatagactgtttatagtgatttaattgagttagttagttgatttagagtttaaattgtcgaacatggtcttagtatttgacacataactgtcggaccattgtttgtattagcattgatctagttagtgattgtcggggaggatataatcttgatgtcatggtctcaatgttgaaagtttcgacaatttaatgcaaaatttacagacacaaaatttaactcgtggcagaattttgtaaactgagaaacttccaaccagtctggtatctaaatatatcttgacagtgtaattattatcctctaaaaaaatacaacgttaatagctcaatgccggttgtcaaatgttcttatgcaactaatgtttggatgctgttgtatcgaacgtgatggaccctagaacaactctttcacaataaaatttcatgtaattactagtttgacaagtttatgtgaagatgaacaactgactttagtttaggcatttagtaccttgttttattaagttgagtattttgaagatcatttttgagtttaataaagtttggttgtatgcgatggactgaatcaataatgtgtttgattgccaaaaaatcgacaaatttacattttcatggcacttaaagactgatcgaagatgaccttgtctttatgttttaaatgaaatacagaactcatttcttgcattttgttgtagtcttctctcaacaagtttgtcggt

SEQ ID NO: 108652 - DNA, 738 bp, Aquilegia coerulea
  Intron number 2 from transcript AcoGoldSmith_v1.006398m (l ocus AcoGoldSmith_v1.006398m.g) derived from phytozome v7. 0 (chr-ID scaffold_9; pos 1613105 to 1613842)
ggcagggctctttgccaatttaaacgttgaaaacggtaatggtaattttacttggtagtacaatagattgctcaaagttttgatattagataaggtagctagatagcctgaaacatgaatgtttaatgtttgaactgcttgatatgctgcatactaaattttcttaaagctaaattttacattcaaccttttgtttaaaactgaatttgagcatcttagtaataaattttacaattattgagtaatgtgggacatttggtggagtcctaaattggaactctttgtggggttctttaagagacaaaatcaatattggtagctgaagaattttcattgaattgtgaaatcaatttttacaaatttttggattttttttataaacacagtgtattatgtggtgttctagaacaaaggaatcaaaactccaaccttttcaattaaactatagaaggtacccttacgcttaattcaataatttatactcgccatcatcaaccattcgataattgtgcagtaaacaacttctaaataagtgacagatgaccaatatttgattttacactcaaacagtcaaactcctctagtaccagatgaatacaagttacattctaataaagtagatgtaaatgctgagtaactagcaagggaacattgatgatgtttccggtctgctctcagttaacctactattataggagaaatgacgcccttttttctgtatatttcatgttgcaggtt

SEQ ID NO: 108653 - DNA, 376 bp, Aquilegia coerulea
  Intron number 3 from transcript AcoGoldSmith_v1.009172m (l ocus AcoGoldSmith_v1.009172m.g) derived from phytozome v7. 0 (chr-ID scaffold_37; pos 469619 to 469994)
ggacaccaaagtaccgttttgttgttcgttttgtatccttcacacttaggagttatgtgcatatttttttcttttccattgtgacaagttgtcatcatagatatcaacaaagccaactttttttttcattgtggagagtactatatcttccaatgtttcaacaacttgagttcaccagaaaaaattgtatctcactgttgtcttgaaaacaaaatcttaatactgcaattaaatagttttattttgcttcctagtcaacatgcatgtttattttgaatatttatgtggatgctaccatagtttcttcttgtgatattattagtccttaacaatgtatttagaccaacaaggattgtattgcccaaattgtatctgc

SEQ ID NO: 108654 - DNA, 1010 bp, Aquilegia coerulea
  Intron number 1 from transcript AcoGoldSmith_v1.023942m (l ocus AcoGoldSmith_v1.023942m.g) derived from phytozome v7. 0 (chr-ID scaffold_30; pos 2682675 to 2683684)
agctcaagctcaagctactactgaccctgttcaaggtataccctctcaattcttactcttatttaaattttcactattatgctatgctatactatactgcttggtagctaaattaaaagataaaatacatacaaacttacaaagggtatttttcatttctttgttagagataagtccatggagcaatctcaatttcttacacaaaatgaatataacttgcctgcgagttgatcaccctttgctttttattgctcatagctcatagtagagttatatatattgaatttttctagttgaatttagcttggttagattggattgatattatttaagactctaacttcatagccggaattattgtttgattaaattgttagggattatactctaggttagcattttgaattccgtgttaacttctcaaatacaaattgaggaaatatttggctttttgtatgtcagatccgaccaacaactcattaagaatccctaaccctgtaaccaatcttcaatgatatctgatactgtagaaaaaaaccgaacaacacatggataggaagaagcaacaactttaaaacaaagaagacaaatagttagtggaagccctgtaacattaaaccataatgtcacgtctaaacggctagtctagatttaaaaggattatcgaatggctatagttaaactatacaaaaattaagcttgcgcatattaggcttcatgtgtaaagagcctttcctactcgtagtagcaatctgtacagttgtgagacctggttggtctgtcacattccttatgcaacttaacattcaaatgctgaaataatgtagcacattacatggttttgtccctttgaagggtcgtctcgaagcgcccctttgtactgttgtttatgtatcatctttattgtatatcattcctctcgtgtgttacttagctttccttgttattaacacatttgaatatgtggtgtggtgtggtatagcgcgggccctgaattctattttccaaca

SEQ ID NO: 108655 - DNA, 683 bp, Aquilegia coerulea
  Intron number 3 from transcript AcoGoldSmith_v1.002986m (l ocus AcoGoldSmith_v1.002986m.g) derived from phytozome v7. 0 (chr-ID scaffold_30; pos 1997399 to 1998081)
gcttagagattcaatatcctgtaagataattagtccccaccttttccttcctggaccacataggagatggatttatatttgatttacttatatgcatgcttcaatttttggttgtggtagatgtggtagattcttcgtgtaaattctatgttcctgatgtagcttctttatggatgcatcttgtaataaattatgttaaatatagtaaatgctggtggtgaggtatttcatgcattcttgtttattgatgtgcaatgctctgaatttattatcattcgagtcctgtaagtgctgttttgcatatgtttggaaaaaagaaattataattgaattttatgcaatattatgctgtagtctggttccttaatagtttttgcatggaaggtggtagccctacctttatcttattgtgaaaaacagacagcgcccaatttattcagctctaccctaatctttttgtatgagttattgtcatacatggttacatgtactgtatctgatggtagaaatactttttgtgtcatgttgaatgctagtttgttgtgtattatacttttattagaagaaaatattttcgtgcatggtgttgtgtgcatgcattatattcgtgcatttggtaccaataaaagaattcttccaacttctatgtaaagtgatatcagtgctcctttctttttcaggct

SEQ ID NO: 108656 - DNA, 944 bp, Aquilegia coerulea
  Intron number 1 from transcript AcoGoldSmith_v1.001060m (l ocus AcoGoldSmith_v1.001060m.g) derived from phytozome v7. 0 (chr-ID scaffold_11; pos 4446268 to 4447211)
agcagacaccctaagactggagattggtatgttacttgttagtgcttcaatgtgtttgatgaattgttgcttttttattgtagattttaattctcgctttttgttgatctcttgatctcgagttgtttagttttatttatattttaaggaccatatacctgattgctcttatagtctcattcagcattcttatagtccttgctgtgattgtaaacaatttttgcttcgaacgccagatttttgggccaacttgtatcattctggtttaagacttcagtttaatatatttagtggccaaaaacaaaagaaaagattaagaaacttgcatgtttcatatcggctgagttaacctagatatgtagataatcgaaatactatgtctctgaagggggaagctcttatagcttaagaagcatatcaaaagaaaagaaagagatttactatactgtaacatgagccaatgcgaggctgccacttacgatgaaaattgtggaaaacatggatgctgtaattcataacaactgtcttttgtaagctgtaatcattatatcttctcctgtatctgtaggttctctcaaaccacttcctccttcatgaacaaattttgtacatcgctgagaaaaaaatattataggcatcagtcctaaattttgtttattaaaattgctgctaaagcctatttgatgatcgtatatggattcattcatgtatgtctgacgtctccatgtatttgtaacctacaatctgatgaaaaattgtggacatcaccactgtctacagaactgcgtaaaatccctactgactcttttctttcaaaaaagggtcttgttgtcatcaagatctttgtaacgtatccaaagcaagcctatttctagattcctgaaggcaactttttgtttattttggtaggtaccctgcaataaataagccagccggagtagtcc

SEQ ID NO: 108657 - DNA, 490 bp, Aquilegia coerulea
  Intron number 1 from transcript AcoGoldSmith_v1.005945m (l ocus AcoGoldSmith_v1.005945m.g) derived from phytozome v7. 0 (chr-ID scaffold_95; pos 110578 to 111067)
tgatccacaagaacctgctcattcataaaatcaaggtaaacaacaacatttagtttcttcttcaaacttctgttgcttttatgtatataatgcatttctagcaatcttttgtaaatccccattacattttacaccattgattctttgactgtgatttactactaaacaatatttttcatcttttaattgtaaaagtaaccagtaatctttacctctttcttgcatcataattaacaacataagaaccttggagatacttgaggatattgtttgattcttaaatcttaatcaagatccagtattcgaaatcttgttacggttttcttcttctaacatcatttttgataaagggatttctttgaaatatcaatatattaggtgtttgagtttgaaattagtagatatatttaccaagaacttactgtacattgtttaaatgctcttttcaaatgcaggagatacagatttaatttgtacagaaaatatatcg

SEQ ID NO: 108658 - DNA, 552 bp, Aquilegia coerulea
  Intron number 2 from transcript AcoGoldSmith_v1.003755m (l ocus AcoGoldSmith_v1.003755m.g) derived from phytozome v7. 0 (chr-ID scaffold_15; pos 4537165 to 4537716)
atactcttacaaagcatctattccattgtatgtatgttattgaattttgtcaattttgcgtgtttggattcatagtgtaatgtggatatatagttttgtaagtttaatttagatgcacatagtcaacccaattacagtagtttgttatataatcaagatacttataactattccaaaaatcgttatttaagcggttgttgaacatttggggagtcacaagtcctctgttgaaaaagagtaatttgtctgaagaggaaaaaaattcctatttagtgcattgtcttctttcagcgcaaatttcaggaataatctgaaggtttgaaccaagcactaaataggaataaatatagcttaagcattaatataagttgggattgcattgtagaccaacttcatgtttttttggatgtagatgattggtaagacaaggtattggtagcacaccctaaactagaataaattcatcacaaaacggcataaaatgatattgagacacgactgtgttttgttttgttcatattgacaggggaaaatcagacaattgagtgggtc

SEQ ID NO: 108659 - DNA, 433 bp, Aquilegia coerulea
  Intron number 1 from transcript AcoGoldSmith_v1.026917m (l ocus AcoGoldSmith_v1.026917m.g) derived from phytozome v7. 0 (chr-ID scaffold_6; pos 7819147 to 7819579)
aacacagttttgacccggtttggttccagttcaaggttggttttccggttttttgcccacccctatcaactaatcaactatatatgaccatgagtgcatcatgacacacaaaacacactttattttgtacaaactcttcaatgctcatttgaactcaaagtcagtcgtgcacatacatacatactagtttcaagaacattgaagccaggtacaagcatgaagcatacatatacagctagaatcattaaaaacttttcgcatctctagagatgggaagacaaagtgtcgctttgatgtctttataaggacttcacccatcaaagaaatggtcagcatagtcacttgagtggaaacatggaagggcaatcaaaatcatcaactcagccaactctctttagattcaaaactgaatacttctcatcactttcaactt

SEQ ID NO: 108660 - DNA, 989 bp, Aquilegia coerulea
  Intron number 1 from transcript AcoGoldSmith_v1.012016m (l ocus AcoGoldSmith_v1.012016m.g) derived from phytozome v7. 0 (chr-ID scaffold_7; pos 2727911 to 2728899)
gtgaaatcttttcatacagaattcatatatttgaggtatgttttgttatctagtattaattacgagtaattctttaatttgattctaaattaaagctttattgatcaattggattgattgaatttcgatcttactgtagtagtaaaattggagagtggagtgattagttgtcggaacgatgtgaaagacgattggatcttcattgatttaagacacaataataaatgcctaatatggattggttatttgtcaatattgttaatttgagagagaaattgattaaattacttattatcatcatcatcattgtgatttgtgaattgactttttctttagtgcgattgggtgtgtgtgtgtgcgcgagcgcgtgaggttgtacaagtgcatcctttatttagcttatgtttcagatatagatgctaatttcctagatatatgcattagaagcagaaaagttatgaaatgcccacaatctataaattttacacaagtagtagccaaaatgtcaatattaagcctagtagcaagatacaacttctttggatgactttagaatgcgactatgcttccgactactcgaaatttggttaaactaaaaatttattctgttttgctgtttattttctcttcttgattcccctctaaactagctgttttactaaacaatagacctaatgactctaggtttgatggattttaaactattttgctttgggttatgggtttaagaagatatggctgttttattgaaaaatgtaaattttatgttatttggggattcaggtggacttagttaaaatgatgaattttgtttttgtctggtttaagatagtattaggtaagagaatccttaagaaaaaattgggtttgtggatgttttgttaaaggtggactagttattaggtctattgttctgttaaacaatttgtagttttataacttttgttgaaaagatttagttatataattttattgtttcagaagtaaat

SEQ ID NO: 108661 - DNA, 529 bp, Aquilegia coerulea
  Intron number 4 from transcript AcoGoldSmith_v1.005286m (l ocus AcoGoldSmith_v1.005286m.g) derived from phytozome v7. 0 (chr-ID scaffold_11; pos 5600837 to 5601365)
aacacaatttcgatcatcctggtaagtgtacatcctatataattttttatgtaaatttaagttccatttgagatactttattcgtgactcattcgttaaaataaacccttgtcatttattgttgtcacttttaattaagtctttatgagaagatccatttttgtccaagctacatgtggtataattattatacttaattcaggctactatggagtatcagatttgtgttttcttgtcattagattatcaatggtcaaaatatggtaaacgtctaggaaaaacaaaagcaggggaagctatagtatattaggttctgttgttctgaggaaggcatttgagataaagcatctacactgataccataatgtaaatagtctactcttgcatccctttgctttccttgcctttcctatacattcactatttgcctactctatttgtgcatatgggcttgttgtaggatatgttttaaatctttagttcataattatgtatatattgttcatttatgtttgttcttcttctttag

SEQ ID NO: 108662 - DNA, 445 bp, Aquilegia coerulea
  Intron number 1 from transcript AcoGoldSmith_v1.002451m (l ocus AcoGoldSmith_v1.002451m.g) derived from phytozome v7. 0 (chr-ID scaffold_30; pos 1285478 to 1285922)
cagttggtcagtccctttccacaaggccagatattattggtacagagatttctaaggtcaggcatccaatactactaggatttggctttcttttcaagaaaatcacttgtaaagcatgcagatagattggtatttaactgcgtcctgctaaaggtttgattagcagaggcaaacaatcttttgagtggtcaaagaatttaatacaaaagagtaggttgaggaaacacacgaacaaacaatagaaacaagagtgagcaatgacgttcccaagcaggaacaaaatgcaagaatgcacacatcaaaatgcatcatgcttgatggctcgtatggcttttattattatgaattagcagaaggatgctatctttgtttcttattgcaagttgtgcagtaaatttgtttcttattgcaagttggctatatttgcaggcgctggcagaactga

SEQ ID NO: 108663 - DNA, 980 bp, Aquilegia coerulea
  Intron number 2 from transcript AcoGoldSmith_v1.017296m (l ocus AcoGoldSmith_v1.017296m.g) derived from phytozome v7. 0 (chr-ID scaffold_11; pos 3493240 to 3494219 reverse stra nd)
gaggctgagtaccgaaggaaaatttctgaggtcttcttttttcagaatgtgtttgtcatttagttgttaattactttttcacagtattgccccgcaaagtttactgaataatgttagtcggtgaagaaagcctatgttagggatactatgttttcagcttttctttatctgcaaccttcaaaccctgtcaaggagttaagataatgtcccatgttgtcaccagatctctgatgttgtattcttcattcttggacttccctccagtccaaatttaaagtaatgccttagtactcatgattaatctctgttcattggttcctttctctgtgaatgttccatccattttgaccttccatgttgcgttgttgcctacatagccactgccggcatgtattcccatattcttgcacacaccttctctgcaatttgttttgaacatgccacaatataatggttgcacaatatctgcactgtccaatacttttatggtagactggcgatgatgactccagtggtctactagtgtagtcttggtatgtaagaccatgccacaagtttgtctgagtgtctagaagctacattctcctcaagccatctctttacctccatctccatccatggtaagaagaaactagacaaacaagccataatgcagattaagccattgttttgtaactggaaaccactcaatgcatgttagtatgctactaaagggatttacttacactcaatactactgaaagattggcattagagatttagagccacacgtcattggtgaaggatgtcgacactgtctctctttctctttttgatctttgaaattcataatactgtatgaagtatggaacacaccctttatatttcaaaactttacagaatggaacacaccctttctgaaacccgaccagcttttatgactcttatatatgttttactatgtagagcactgataattctggatcaactgtgcgaaggct

SEQ ID NO: 108664 - DNA, 819 bp, Aquilegia coerulea
  Intron number 1 from transcript AcoGoldSmith_v1.001038m (l ocus AcoGoldSmith_v1.001045m.g) derived from phytozome v7. 0 (chr-ID scaffold_18; pos 1819610 to 1820428)
ctgcgtgtcatctaagttgtaatcagtaagtaaaaagctttagtgattgttgagttttaacaacttatttaatcgattgaaatcatgtttcttacttatatatatattctatctgctttaatgataggtatatttgattgtaattaagctcactttactctcaagataaaagttattacttgttttgtgtcttttaatttgagcttcttcatcaatggaagtagttcaataggcacacatcacacttcagtttggctattcctgctttacttagttaagaatttgagttcttgtttgtttgtttgttaaatgaattcaattatttatgttgtttgatttgcattcatatgcagtgaagttctatggtattacttcagagtgaattttgtgtttgaagtgattttgctggtaataagaggctaagttgaggttgatctagactatacttttgcaattcatcttccctcatatttgatttggcatgttggttgggcaagttcctttatatatttttcagccagttatatataaaataaaatacactttaattgtctatgttgtgttttctactcatgcatcttggattgcagttttttttttcatgatttttttattcaattgttttattattttatttaacaatagagcttctttcggttttccttttctcacaatattctgtagcatgctttatgctctctctctctctctctctctctctctctctctctctctctctctctgtataaatattttcttactcttcctactttgatgtggacagcagccaaggactttgaagaaacagattgtgtagct

SEQ ID NO: 108665 - DNA, 347 bp, Aquilegia coerulea
  Intron number 3 from transcript AcoGoldSmith_v1.002158m (l ocus AcoGoldSmith_v1.002158m.g) derived from phytozome v7. 0 (chr-ID scaffold_1; pos 3469799 to 3470145 reverse stran d)
tttaaaaggtgagttaaatcaacatgtgttgtaagtatttgcccaagttattttatcctggtcaacgtgcatattgtttttgtttttttatttctcctgttctaccgttgctcatcaaatgcaaatcgcttgattttgggcaaggctgcttttcactgttactattttcgtctcttgcctttctttctcactgatttgagtgccgtgtctggaagttttatgttctttgtgcacttgtttaatttggactgtatttctgtatgaagataagatgtttctcttaatggttttgtttcttttgaatatttacttatttatttgatcacatctgcaggagctataaactg

SEQ ID NO: 108666 - DNA, 760 bp, Aquilegia coerulea
  Intron number 1 from transcript AcoGoldSmith_v1.027622m (l ocus AcoGoldSmith_v1.027622m.g) derived from phytozome v7. 0 (chr-ID scaffold_1; pos 10525465 to 10526224)
cagacattacctaccagaaacatctgtttgaaagggtgactttggggcttgacattaatttaatggtgctaataactttgagttgagaagttcccatctgtgtgcttgctgttcattttccatcacttcttgcatcagccgtgagacaaaaaggcgctggcaattgcttggttgatgccactctactcttgcatccatttctgttcattaagtaggaaatccaggtagtctcagaaaaaacacaggggtcccaaagtgcaaacacattgttttcattttaccacagaagaaacttttttcaggtctaaaattgtcttcttggacaattgataaacacaaaaaacgcctaaaaaatggacgctatattaattattaactaatcaataccaatatcctcaaagatatatctaagaataaagtaatagctattcgatacaaattatatctaagaacattaatgagcaccaaaaacgcctaaaaaattaatagctaatcaatacaaaattatatgtcctttggttcaattccggttaattccaaaagaaaccattgaccccccaaagtcttacgtcatgaaccaataaacatgtgtctataaatttgccttttaagtcatcctccattgctcagcatagcagcagagcagaccactaagaaccattacttcttcttctgcttcattcatatcccttctcttagtttcttctcttcttcttggttctcagttgtctgaaacaactgcacaagccacacctccttt

SEQ ID NO: 108667 - DNA, 757 bp, Aquilegia coerulea
  Intron number 1 from transcript AcoGoldSmith_v1.012047m (l ocus AcoGoldSmith_v1.012047m.g) derived from phytozome v7. 0 (chr-ID scaffold_43; pos 1249027 to 1249783 reverse stra nd)
cgtgaaggagagactgaaaaacaggttatcttagctgccattatgttatgtgtgttatcagtcttttattatttacttaaacttcgttgaaactagacatggaacagtggttgcatagtccatcgggatccaaaaattttgatgactaccatcctaattggaatttttaaagatttttctgttttcattacgtccaataaaatttatagtataactaaccaaccatattatattttacaattacaaactaataaaaacacataagtttattaacttttatcagaagatcctttaaagccaagtttacaccaaaatctattctacagttatgacctataaaggatataagctgagtgaatccagagttccagactcctaggtatacagttagaaaatggaagtaacaacaaaaagaatcatgtatcctcaagtaacatttttctttttcatctctttgagtctttgcagcagtttgcagtgtcctctgaaccatttctaaaaatttatgggttatgatgttagatattatcaaaacttatactaaaacttccattctatagcattaacgattaagacataaaccataagaagaataatcattgtctgtctctgaaattgcatgcaatcattagacctgacgacacaactgaaccttcctatctagaggagcttaacatgaagcatacattggattataaactaattcttttgaaatttgagttattaataatagggatgtattttgtgcagaaacaat

SEQ ID NO: 108668 - DNA, 921 bp, Aquilegia coerulea
  Intron number 3 from transcript AcoGoldSmith_v1.001000m (l ocus AcoGoldSmith_v1.001000m.g) derived from phytozome v7. 0 (chr-ID scaffold_9; pos 5687000 to 5687920)
ccccaaagagaacaatcagaaagcagagtcgaaaggtataacttttgttctacttgttttaaccttaatgcatgcctatttctgttttctatagctgtgattttaggctatttaggttattctttccagtaatataaaaggtcgaagcttggattatatatgttttgggaggtgttttaatgctcagtccaaatgtgttgcttatgaaatagaaatgactatttgaagatgaataaccacggttatcatcaattagctaacagcattgtgcatttttgatgcaatttagattggaaaattatgtttaaattattggtgaacattgagacttgaactgtaatgtacacatgtcccagtgtcagattcctacttgtaattctctgaattagcattctagtacttgtgtttttcactctttctgtgattcactgaccaatcctgaaattattgagctcattatcagctgttaaattacaatatattggttggaatatgacagtatgttgattgagcatcccgtaatgacttgacttgatgggaagatactgaaaagaaaaattgttgtgtttctttttgttatttataagccagacttgacaaacaagtccttttcacatgtttttagtccacatgtgtgcaattcaaatgctcattaataccgttatattctttctgatggggaatgacagatgttgtgttaaatatgatccattggaatggatgcctgcttatcagtcgaatggaatgcatcatgcattcatgcctttgtagaaacttgtctgttcaatgagtttgattaatatgatatgattttcttttacctctgatttggtcaaattgtttattcaaatataagttgccttgtgatcttgtatgacaatttttttttaccatatttagaggatccaaacgcggaagatc

SEQ ID NO: 108669 - DNA, 508 bp, Aquilegia coerulea
  Intron number 1 from transcript AcoGoldSmith_v1.001530m (l ocus AcoGoldSmith_v1.001530m.g) derived from phytozome v7. 0 (chr-ID scaffold_30; pos 929793 to 930300 reverse strand )
aaacaaggaggtgctcttcagaaagaactcattaggtaatttctttctttaatttatctcacatggagtttagctcttgtttcttgtttcttgtttcttgtttcttggttttttggacttgttcttgcatttaagattagttggtagctacgtgagatttagatttgttttcatataaaattataaataatgttaaaaaaataattgtaacagtcaaggattactactgtatattatccaaatcataaaaaataagagaagatgtttggtggaaggtggtagagctagctagctagctataatgtgaggaagaaaaaaagaaatacaaaacttttctgtagtgtgattgtgtgaacaaaacagaaaagtaaactatcaataaagtcaaaatcccatgcttggcttgtttagaactttttatctggtgctcagtccaataagtctgccccacacaaatttgtgctaataatactgtactattttctttttttttggatcagatttttga

SEQ ID NO: 108670 - DNA, 853 bp, Aquilegia coerulea
  Intron number 1 from transcript AcoGoldSmith_v1.004965m (l ocus AcoGoldSmith_v1.004965m.g) derived from phytozome v7. 0 (chr-ID scaffold_1; pos 7169330 to 7170182 reverse stran d)
ctctgttgggtttaacaattatcaggtatgtttaatcttctttgtttatggtcaattttatttgattttttttttttatagatttttcaaacatatttcttacccaaaataaacagattgaagaacccctttttcatcttatcttgcttaaattattaaatcaattggtatgtttttagtgttagatcggttaatttagttctaaagacagctttttcaagatggtcaaagtgtaaaaaaggttagggttttcttttgattttgaaatttttcttcttttgggttttgaaagagctgaaattgaaatttgggtattgcttagtagctggaattaagactggttttttgtgattttggttttcttttgctgatttagttggtgggtcatgttctaatttggaaaattattcatcttttggttggatgatgttaatttagctgcaaaggagttatctttgatcagattttggcagatgcttttgaattatgactattttttattgggatttgactttttggtgtggtttaagtggtagctggagtcatttttttttttaatttgtaggtagttctggttgcagtgcttgatggttaatttatttcagctggattttttcatgaattcatatcttatgattggtactactgtggtatactgtcatgtcatttatttggattaaactgaaaattatttggattagtcccaccaaactgaaaatgtatgtaaccatggaagcagagtggtcaaactttgttttgctgctcaataatgtgactttatcagttatagatattaatgaagcacatattctttgtaggttgtggtctcctttgggcattgcacttatttaaa

SEQ ID NO: 108671 - DNA, 458 bp, Aquilegia coerulea
  Intron number 1 from transcript AcoGoldSmith_v1.017167m (l ocus AcoGoldSmith_v1.017167m.g) derived from phytozome v7. 0 (chr-ID scaffold_1; pos 5795579 to 5796036 reverse stran d)
gttgtcaaggtatggaaataattataaaatttatcatcataaactctgcaaatctgaacctttgaaatcgaatctacattcccaaacctgcattcaattaaaagtatttacacaactcctttcccagaagaggaagctagagaggtcaatgatgtcccttcagttaacaatatgacttttattctctgttgtcttcccatcaaacaggcttggaatcaaatataattcaccatgttgacctctgcaacaatataaaataatgggagacaggagaccctcttcttgttgtggaaaactcatgaggaattgaggatgaacacaatgatagaccatgttttatttgttttatttttcataactacaactcaaacttattttatctggtcaagccctgaatcccatgttagtctgtaatcttccaagctaatgtggtctttgtgtttattgtggttgtttag

SEQ ID NO: 108672 - DNA, 834 bp, Aquilegia coerulea
  Intron number 1 from transcript AcoGoldSmith_v1.023392m (l ocus AcoGoldSmith_v1.023392m.g) derived from phytozome v7. 0 (chr-ID scaffold_1; pos 10563549 to 10564382)
tcagctagcagtgtcagctgttaaggaaaagacaggtgcaatacctcttgtcaattgtccgattataagatttattactcatttacacaaagcctgtgacaattactttcataattaagcgcatctattttattgtacttgtgttcttgtccatgatcatcattggggaagagaaaatgttacccagacaggtcgagttaatactttatttttatatctcaaagcacctaaaccaagtgacccatttcttacttaatttatacttaaacggtaacagtttcttagctattacagtcttttatttgcctcttgaccagtacagattaatcagcgtcatcaggcatacatttcgccgttagttattttgttggctagtactctggcatgggtgatatactatttaagtggctgctattgttctgtcagttgggccaataggagaaatgtccgaagaatggtagattggtaggattaaatagccaactatagattatgaaccaaaagtctgaagcagaacacatcaaaacgaaagttctagaatactaaatcagatggatgaccaaactgcctatgcaaagactactaacacatgcgaagcttgcatttattagaaaaaaattaccaacacaagtagtacatgatgataatataacaaaaaagttcttgctgctgtcttactcattatattggtacttctctcctaagcaatataacaaaataatgagtacaatagtatatgttgagttagtacttctttgatatatggtacttaattgcattaatgtatcgctttgaacagatattaatcagacagatctcgttatcttgggaagt

SEQ ID NO: 108673 - DNA, 946 bp, Aquilegia coerulea
  Intron number 1 from transcript AcoGoldSmith_v1.000773m (l ocus AcoGoldSmith_v1.000773m.g) derived from phytozome v7. 0 (chr-ID scaffold_1; pos 7113954 to 7114899)
ctcctaaagaagctaatctctttaaactcatcgttgtaagttttctaatcttattaaatcacttttaactttcgatcatcttaatcgattttcaactttaaaaccctagggtttcttttgacttcaaatacttgtcttaattaggtttctatgtttcattctttacttaattttaatcattattcatcaaaggcttggaacttgaaatagaattttttttttttttttgagcttaaaagaaattgaaatgttagctattggttctgtttgtattcttgttgattttgacttattagggttttagttaagactgtaaattgcaatcagactatattccaatttccaaatcacttgcttagtggattttattagtgataaatgcattttttgttataaatgagaaagactgaccgacttatttttcactgtttatacaaagacagaccttacctcattgtagcaataacataatagttacaattgaagtatttattatcaatctagtaacaccaaaagtaaacacatctagattatggacctagacttggaagattagattgagtttatttttatcactaatggtgcactagagggtacacgtgcttgagaattttctcacttttcttagaaacaacaaacagaaagtatatgaccaagaccaaaccaaagtctatccattccaaattcatattgtcatataaagagacacacaagtaagaactacttaggtggaatgagagccaagggtttcctgttatgttctgactgctttgtgtttcctttcaattccatgccacagaattctgctttgtgttttcatcttatattatctttgtagtatttttctattgaattctacatcaagttccattgtattacttcaggttaatgtacgtacatttttgcatattatacatcttatgtgttctcattgtgcagaaatcct

SEQ ID NO: 108674 - DNA, 939 bp, Aquilegia coerulea
  Intron number 1 from transcript AcoGoldSmith_v1.004181m (l ocus AcoGoldSmith_v1.004181m.g) derived from phytozome v7. 0 (chr-ID scaffold_21; pos 3191196 to 3192134)
tccaaagcaaagcaagtgcaacacaggaagatcaagtgagtagtttcttttcccttttcacatttttttttcaacaattatgtgtgtttgcatatatgtttgaagattatgaatggtgtgaacttcttatgaattacctcaaaatatattactactgtttagtgcttaccaaaccaaaattttaatccccttagttactagaaatgttgaagacattagatagtattgttctaatacatagagaagaaattgccctgctaggtacattgtcacattttgcaaggaaaaatcttggttttgttttgtggaaaaagcttcctaataattattaaatgagagaatagtagtgggagtgaatttctacaaaattttacagccattaagtagactagatacaaacttttagtgaaattcactttgtatatactataatttggtgctagagtcttgtatccaaatttttctctgcacccttcttcattatacagaatcaggaaagaatgtaaatttgcagatttgttgggtgttaggttgttgcttggcaacagataaaatgtaagcaaagttttattattttcttgcaccaaccagtctaacactcttaactgcaaattttgaagacttttgactattttacttttgtgttctgatccacatctaacaatggaaagtgagccttcttaacaatggagttcatctctgcatatatttttacataagaagcatatattaaatttctcattattcttcttttatgtttatttttgcaaaaagcaaggcagaccccaaccggattttattaactttgttagcagattacattctcaagtttgctttcttaaattgaaactgctatgcatataaagcagttcattaacaacgtgtttttatgttgttaatgtgttccgccagtaggtgaagataagcacaggggggaga

SEQ ID NO: 108675 - DNA, 520 bp, Aquilegia coerulea
  Intron number 4 from transcript AcoGoldSmith_v1.004357m (l ocus AcoGoldSmith_v1.004357m.g) derived from phytozome v7. 0 (chr-ID scaffold_9; pos 326870 to 327389)
gtgtctctctggtaatatcatttccattccctacagtttatatgtatatatacaaaattccatatttttgttaacagttccagtatgaaaaacacaagttaaacattcttcttttcacttctttttttttttgggtggggtgggggggggggggggggggttgttgtttatactttatacatctaaatgagaacacatagaggaatttcatttgaaatcagacactacagatggtatgatcatggacatttgcgttcttaaaattatagtaaaggctttcgagactatatgtggacagtggacaagctactgaatttactttcgagcacccacctggccacctgagaatccttattcaaaagattgtttatgatcccaaacctgactttgaatataaatgattgctcttgaccatattacttgaagttaaaagtttgcccattttagcttaaagtctttgtgtacttatataactcaaaatcgttggccatataaccctattggctgattttaggtgtca

SEQ ID NO: 108676 - DNA, 579 bp, Aquilegia coerulea
  Intron number 1 from transcript AcoGoldSmith_v1.024695m (l ocus AcoGoldSmith_v1.024695m.g) derived from phytozome v7. 0 (chr-ID scaffold_30; pos 373502 to 374080)
tacttgagtactgttgaggcagtaaaatttggagggtggaaccaaatcccgtcttgctgctaacaatagctgtgtacacttagaacctaagtaaagtaggatatcacttagaacctaacctttgcaaagttctacagtagtagaagcacttttccaactgaaaaagtgatcaagtttaaatctcacataggattaaaaatatcaaaccaatgctgcactaatgagtaaggcaagatgtggagtgatataatctcttctgtgatcttgtttattagttatgtttgagcaaaagaccagtgctcgattatttagataaagcagtgataggtatgatttgcatcctactttgaaatcagattcttctcatattttgctgacccctttctatattggtgataaaccgactgtgctcccccttttcagaccgccttaggaagatgaagagtgaagacgacatgtcttattgtttaaatggtctagggcatttgcttattgtatctcaaactgcattaaaggggctcttactacttaaacatgttttcaggtgccaggtctgcagccaaattcttccaaaattct

SEQ ID NO: 108677 - DNA, 735 bp, Aquilegia coerulea
  Intron number 1 from transcript AcoGoldSmith_v1.006239m (l ocus AcoGoldSmith_v1.006239m.g) derived from phytozome v7. 0 (chr-ID scaffold_1; pos 5212209 to 5212943 reverse stran d)
ccacatctcaattcgcttctctcaacactgctcaggtctctctctctctctctctctctctctctctctctctctctctctctctctctctctctctctctctctctctctctctctctctctctctctctctcctgatctaatgcactattagcttggacaatcttttaaacatcaaacaattagggtttctgaacttcaaactatatgaatcaattgctcatttgtgtttaatttgtaagtaaatttcaaaatttggttatttatttgttgaattcaattatttatgaaatgagttttggcgcaagtaattgaataatttacacttgtcttctgtcttcatatatttgaatttgccattttatttagtaattcatgctgtttggatcaccttttctgtaagagagagagagagagagagagagatgcaaggataaatgatgtgtgcagaggaaggatcagttaagaattgcgaatagaagatggaacacaatgaaatcattgatgaggagaagaaaaggagggtgaacaaattgttggacatgtaataacaaaacagtcactctgctccttccggataattattctttaccttagcatttttttattttttttacttcagtgttgttcttgttatatatgttctctgtcttctagtatttcatcacaatgtagcgtagtggttgttatctccttttgattgattttttgttcgtttttctttgttgttgaagg

SEQ ID NO: 108678 - DNA, 961 bp, Aquilegia coerulea
  Intron number 1 from transcript AcoGoldSmith_v1.013954m (l ocus AcoGoldSmith_v1.013954m.g) derived from phytozome v7. 0 (chr-ID scaffold_77; pos 95046 to 96006 reverse strand)
cttatcttactaattgcttctctcacactggcgaggtaaaaaaataaatcttttcttatgagtcacagaattatatctaatttatttctattgattggttggttttggaaatgattagggttaaatcttcaattttatatccgagtaacgactttgtttgtatttttttcctctctttgtgttcaaaattgtaactttatgaatgacagcttgctaaacaagtaagattgacaccagattttttttttaaaaaaaattgggagggttgggggttgaaaccacaatattatgttggcgaggtaatagtagtaatgtactatctctggagagagaattctcaatttatgtttgttgattggttggtcttgtacatgattagggttaaatcttcaattgtaaatctattaagaactttgtttgtattttattatagaaaaaataaatctttttacccctatgttcaaaattttaactttatgacagtcagtttgccaaacaagtaagattgactccggatttttacattcggtgagttgagggtacggttaaagcacaatttacttgtgggttgaatatttgtatgtgaatgaaagtttagctgctcttgatttacttgagatatcatttaaatttgagtttttatggatttatgttagaagtaaccttttgaaaggttactaattgcatctgaaagagtataaaatcaaaatgttaacagcatgcattttctttgttttgatgactttatgagcagataggagaacttaatatatgtctgtaaagggctcatagaccatccctttcacactatgttaatataatgtagtatactgcagaagacaataacaaccagttcagtttgtggcgtatttgtgttttcttttttcagttttctgaattttttttttgttcatcttattttacaggtagtctcagtgaaagttatccgtaacaagcaaac

SEQ ID NO: 108679 - DNA, 591 bp, Aquilegia coerulea
  Intron number 2 from transcript AcoGoldSmith_v1.001688m (l ocus AcoGoldSmith_v1.001688m.g) derived from phytozome v7. 0 (chr-ID scaffold_9; pos 5762240 to 5762830 reverse stran d)
agaagggaagctgattctaaaaacccctgtaaaatgtaagagtttcttcttgtaaatttctttggggttttctaaattctcaatatcctctgggttttgtagaattttttttttcatggtgatcaattggtgttgcttactttgatatataaaatgccttctttctctgctgaaattcacttactttgatatcattaatggtccatgatcataattttttatttaatttaagtgggttctgccgttactttctacatcatgttcatcaagggtttaaccgtttaaagtagtttgataaatatgttgccttttttcataggaattgatgtcatttgtgacactaattttctgtgatcctgaaattgtcttttccctccctacatctattatttgttaaatctgaatcgcctgaaggcctaaatccatcatgcatcatatgtattccatatattgtcttccttaaaagaccacttgtttttcttatataaaaatgatcttcatttatttttacttttggagttttgggcttgattgcattcggtggagggtgcattctaataattatgctgtttttgtctatgtatagagtga

SEQ ID NO: 108680 - DNA, 610 bp, Aquilegia coerulea
  Intron number 1 from transcript AcoGoldSmith_v1.001688m (l ocus AcoGoldSmith_v1.001688m.g) derived from phytozome v7. 0 (chr-ID scaffold_9; pos 5762850 to 5763459 reverse stran d)
tgtaaatcttaacagaatttgtttatttttaggtggtgagttgatcgaaattcttctattaattcttcttcttcttctgggttttttttttttttttttttttttttatcttaattattatggattttttttgaatgcggtgatttttgtttttggtttggtttttgtgaattcttgagttgtttggtttgagatttgatttaaatggttagaattatctttttaatggatttgatctacctttttattaaattttctttatgttttcaaggaatcgtgtattgaaagctatgttttctatctcaaattctgatgagaaattgagatctggttgatgatcatgtaattcaaagcaattgcctaatttcttcttgattcatcgtttttctggaggggttttgtctgaattcctttttttttttttttttttttttaatttcagacaattttgtttagagattttataacctgctattgtttttggtgttaatttgttagtttgtatatgttttgtgaaagggtttatggttttgttcttctgatctaagagaattctgtttttctttttttctcagaaattgtagacaagaggtataagattcattttggg

SEQ ID NO: 108681 - DNA, 521 bp, Aquilegia coerulea
  Intron number 2 from transcript AcoGoldSmith_v1.006553m (l ocus AcoGoldSmith_v1.006553m.g) derived from phytozome v7. 0 (chr-ID scaffold_30; pos 2674489 to 2675009)
aaaagtaagttttgtagccctaattgattgatggtgtgaaatcaaatctgatttagatcttattttagggaataatttgatcagatgtgaagtgtttttagttgaatttaacgcagttacgcaaattataatgcttggagatgatattgtagatgtcaatagtttagggtaagaagaattagagaaaaaaaatttggtcttaaattttgctaattggccttatctaaagttgttgtatagttaatctttttgtttaattgtataagtaatgaagaacaaataagcactgtacagtttatgagtaacactttcaacaagtgagttcgcaatgatatcgtctggtatctggattttttactgagaaataagcttgttgtagaatttcctctagtgaatatttattggttttgaaatgaaactttaatgtatagtttttctatttatggttttgccttttactggttttgaagttgggtttctaagccttttcggatgcatttgaaacttttgcagaattgctg

SEQ ID NO: 108682 - DNA, 599 bp, Aquilegia coerulea
  Intron number 1 from transcript AcoGoldSmith_v1.016874m (l ocus AcoGoldSmith_v1.016874m.g) derived from phytozome v7. 0 (chr-ID scaffold_10; pos 2863842 to 2864440 reverse stra nd)
tcttcaaaggttagttaattagaatttgattttatattatgttaaattgaatggctaaaaatgtgttaattaagaaatttacgacattctcacaaatacaaaaatgagactcaaattcatatttattaattttacatatgaaaaacacaaagaattcgttttttgaattttttgggctattgtttgaaattcttggattttgtataaactaccatatatttcggtcacaacataaattcttaattaatctccaggaatattaacatttaacagcttgggttcatgggttgaccttgctttgctgtcccttgtttgatattctaacatctttccaaaactgcagttgctttaataagaacccaacgcggcgacaaaacacagtcttgatcgactcttgatctcaagttctcaactctcactatcaagaaaacctaatcttaaccgtagatactcttaaaattcatatctcgagaagaaaagcagctgttttgagttatatgctcagcgtactacgtaataaatactacacataagccgctcattctctccttaaacctctctctctctctctctctttgttttgttgcagagacgaagac

SEQ ID NO: 108683 - DNA, 565 bp, Aquilegia coerulea
  Intron number 2 from transcript AcoGoldSmith_v1.009857m (l ocus AcoGoldSmith_v1.009857m.g) derived from phytozome v7. 0 (chr-ID scaffold_9; pos 2828626 to 2829190 reverse stran d)
tgaaggacgagggggcagaagtgagttttctttgtctttctctttcttcagttttgtacaaatcagagtaataactggaatctgaacgtttttgtgagaatcaaatagggtgttatatatagatggtgaaaatattatattgtcaggtttaatttgatttgtgtctttgctaaatggtaatgtaaggaatgtttgcaaatgcataccctgtcttgggtgacctaggaaatatgtttttatctcttgctttgaaataacaaagaacctgtgattctgtttacataagccagtattctgcttagtttgtaccctgtttgttggttactcttacaaaacatgacactgtccacttaattttgcgaccttttgtaaataatgaatattcaacaatcttctataaattcttacttggttacctttggaagcatatactgtatagtgagttggacatgttaatgacacaactttttgtggaaatctattcagtatatataaattatatcctattcttaatgtctacgttcttgcagcttgccccctttgatccttcaaagaagaagaaaaa

SEQ ID NO: 108684 - DNA, 958 bp, Aquilegia coerulea
  Intron number 1 from transcript AcoGoldSmith_v1.009231m (l ocus AcoGoldSmith_v1.008987m.g) derived from phytozome v7. 0 (chr-ID scaffold_9; pos 5564088 to 5565045 reverse stran d)
aatagggagcatcaagggaattggcctggtaatagatttggttcagttgtgcttcactcccatgttaatcctaatgataaataaaattcttggtgttaattaacaccatataggtgagtagctaagcttcttgatctttattattactatttatttgtgctactcatatatcattctctgtatgtatgaatttttttcttaaaatgttccaatgtttaaccagatcaatcaggtttttataatcagcttaagatgaaatataaaaagttgaatgtgaagaaaatcatgagtagtaatcacttatagaatatcaaaccaatttcacatctggatatttattacaatatcattctgatgaaattgttagtttagaaatagttccgagtaacctcctttgttgtttttggttgttcgactatcaatattataggatctagacaggacaagctgtgtttgtgaaaaactgaaaattggtttttgcacaactaagaaaacattatttggttactcagaagaacaaaattttaaacaaggtcactcatttgatattttgatttttgagtagttctgagtttcaattgctaagtgactttgtgagagtatagaagttctcccgattgtttgattacgcttggaaaaaattctaatttgttacaaaaggcacggaaactgttctgtgttccacctgatgaatcttctccagtgaactttttttcatgagatctctatggttggtaatcatagtagatatgcttgctgtttcatgcactttcccacaacataaataggtttcccctgaaaacattcttgactacagtatgtttgcctgctcagtaatggacaccagtttgcaaaagcagtctactgaagcttcagtttttgagctccttctgtacatatcccattgtccatcatctctaaaacatgttaaattgtgattctcttatgacaggaaact

SEQ ID NO: 108685 - DNA, 435 bp, Aquilegia coerulea
  Intron number 1 from transcript AcoGoldSmith_v1.009048m (l ocus AcoGoldSmith_v1.009048m.g) derived from phytozome v7. 0 (chr-ID scaffold_6; pos 8718003 to 8718437 reverse stran d)
tgttcaacaaagtcttgaaagcactagctgttggtatttacttcttcttcttcttcttctattaatttcttattaaattcattcatggtctagttcaactggtaaaagaaatgtttttttcttctgcatatgagttttccccaaactcattgaaactgacatttctcgatatacaatactttgatgaaccttgcttttgcaaacaaattctatatgttccgatttgattagcttttttttttacaatcagacgcaatgttttaattgaattttaattggtcccagttctataatttaactatgagcacaaatgtttcacagttatggaacacaaacaaaataactctaggacaactatatggattacatgcttttctgacaatgtattgtttcttttgatttctttttgttattctcagtactggaagccaaccc

SEQ ID NO: 108686 - DNA, 1051 bp, Aquilegia coerulea
  Intron number 1 from transcript AcoGoldSmith_v1.013463m (l ocus AcoGoldSmith_v1.013463m.g) derived from phytozome v7. 0 (chr-ID scaffold_37; pos 1757601 to 1758651 reverse stra nd)
gagatttattattgggattcatattgggtaatcaggttagttatgttccatgagcttctattatatttggattcaatcgcacttaagagtatttaatcacttattattgcgccgattatattggcaaacacattctcaatgagctctggataaaggcaactcatttgagtggattaatattacattgagtggattaatattacattgctatcacaatcaatcacacatgactatcggaaggtaaacacacgactcttctgaggttgataccccctttcaaaatatgaataggatatgtgcatagttgaaatgttagacctctcctttagatacaatgaatgaagctcaaaagtactacatgcctacatggatacatgtcatttttatgataataaggggaccacacgccattaatcctgactcgcattgagccttgatttttcatctcatactatatatgataaaccaccatccataaattatgtgtatcactgatatgttggaaacatcgaactcaaggcaaaattgaaaaagaaagaaacaatggagatataccagtatcaagtgaaccagataccatatattggatgtaggtgacaatttataaaatgaagggttactgataattgtgatagccctccacctttattgctgtattcttcgacttcattttgaactttaatatatgtttaaacatgtaaagacttcctgagcatgtggattgtgccctggacattttaagcatgttttcttcagctcatagtataataataactcatacgtctggagcttaagtagttgcggttctttttgtggtatttaatcggagtcttataggacaatttatagaaaacttaaaagagcattttgtttgggaaaacagtgaaactacttttgctgaccctatcttcttatttaaaagaaaacagggataacgttacactttatcacatgataatattcatatttggtctatctataaaaatttacattgttttaggaaatggtaatgttacactttattgcatgcagaggattgctagtgagcaaa

SEQ ID NO: 108687 - DNA, 831 bp, Aquilegia coerulea
  Intron number 1 from transcript AcoGoldSmith_v1.013404m (l ocus AcoGoldSmith_v1.013404m.g) derived from phytozome v7. 0 (chr-ID scaffold_60; pos 1543309 to 1544139)
cttgttttctctaccaagtttgaagtggggtaagggacctctgaaaacaaccctgctttcttaccaaaaaaaaaatgtctactttgccttattaccccagtttataaaactattagcttcgtcgccgctcatccttggtttgggatttgggacacttatttcattgaaggtaattttatctctttctgtgctacgctggagtgcattattagtttactaccatagacaaaggaaggaagtacaatataggaaacttttgtcagttatgtcagggatgggagtttgtggaccatgtattgttagcgagtcctttctcttgcagtgtttgggctgctgtcttcctttgttgaatgtctcctgggtgagtcggttgggaatatactaccctctaggaatatggatccattttcttgtttagggagattcctttggagctttcttttgcagtgccatgggttgttcagcgaggggaatatgcagcatttttatggtattttctacttcacaggggaaggttgtcttaatgatcaggggactcatcttctattagtccaaagtgcttcaaacaattggagtgttctttgagtattttgtgatcagatggaatcttttgttgcttggaaattgggcaattacatttcttgtttatattgggttttctttatttgatgtattgacctacttctgtgaaattatgcattacttttatactgaggaaaaaaagtcattgttaattgtagaaaggttagatgaacagtatgttgtgtggtttcctttcttttcgttttttactcagacctgcagtattgagtataaagttattgttatctg

SEQ ID NO: 108688 - DNA, 547 bp, Aquilegia coerulea
  Intron number 1 from transcript AcoGoldSmith_v1.001878m (l ocus AcoGoldSmith_v1.001878m.g) derived from phytozome v7. 0 (chr-ID scaffold_1; pos 8653364 to 8653910)
ttttgtttccgtcatcagatctcttgttataacgtgtatgatctttctctctctttctttcttctgtcatttttttttttgctttattacttttaacttgagtatgtttattgcttaataactctttttgattttttttttttttgggatgaaataaagatcattacatggttgactctgttgaattcaaattgggtttttgttagattgggttttatttgggtatatgtcattgaagtagattaagctttgatatctggatttacagtacttgtttctattaaaagttcatttttcgtgtatttgaattgcccgaaaggaacttttttctctccctcaaaaatggttttttagagaaattgttttggtggtagataatacttggtattctctgtgaaaaacaaggtcttatttgtgcttagtttacttgctgttgtttgaattgcttactgaaaaatggcctagctatatttgggttgtaaatttgagtgattatatccatcttaacacggtcggtaactggttgcaggtgtttattctctgtgtg

SEQ ID NO: 108689 - DNA, 908 bp, Aquilegia coerulea
  Intron number 1 from transcript AcoGoldSmith_v1.009708m (l ocus AcoGoldSmith_v1.009708m.g) derived from phytozome v7. 0 (chr-ID scaffold_54; pos 1605800 to 1606707 reverse stra nd)
cgaaccatttgccttggaaatcgaaatctaaaaaggtaagtctttttccttctcattttccctttagatttttttttttttttttgttaaaattcactgcattttagtttcaaatctgttttagttatgattttgttgatgaattcttttgatttctaagttgcatgtttataatttctagttagatttggtttttagtatgattgtgaaggttttaaggtttttgatgataagaatgattaaggtctggtgatttattttagcctgtagtcaatataggggtaaagatggaatctttgataatgaacaatgtgtttatgtttgaatttcacttaattttacccaactagttcatctctttagtacattttaataattactaggaatatttggaatacttgcaagctaggcagttttaaatctgggcacaagagtgagccgaaagctttagtgctacctaggtttggttttgattgcatagattgagaatgtactaaacaagtaaccaagactagaagttgtgctagcttctggccatttcactcctaatacggagcaaagtaatagtaatagtaatagtatattagggaattagtttggaagaagagatgtgaggaggtgaatcaagtattgggttgtagtcttaggagttaacaacactgaatccttttgcgactttggatatttttccggaatggaaggaatggctgtgtggttactttgtcagataagtttacggccacaaagaagtcatctgttctcaattgtatggatttgaatttgattgcagatttttatgacaaacttcagtaataaaattttgttgttatggtggagtttaatctatgttttttctttcttgcattttggtgtaaagcacaacttcttttcttattctttccagccat

SEQ ID NO: 108690 - DNA, 835 bp, Aquilegia coerulea
  Intron number 3 from transcript AcoGoldSmith_v1.007842m (l ocus AcoGoldSmith_v1.007842m.g) derived from phytozome v7. 0 (chr-ID scaffold_49; pos 1336666 to 1337500)
agtaagttgaccagtttattattgtaatgactgaagttacactttgatttgtttggaatagtttataattagtagggactatattcataattttcgcaggtgtgcagactgcagacttgtttgtttcactgttaaatcatatcaacttatactgataactaacaatgtcttcataagaactatagtggatcatgtggtgatgtaaatgtttgaagtaatattgagatattctagcattaatgttacagagaatatgatccatttcatgggatggccttgatccattttatattcctcaggtcaacttactcatactcatgggtgctatattgcaagtgttataagataatttctttattttaacgaatactataatgtgtatgtgcctgtgtctggaagcacactatctgaacaaaagacaccttagctactattgctgtttcagtagtcatacttgtatgatgtgcaccaatataaaattgggtcacttctgctttgtctggggactcctgcactcaacttcaatagctttctctggttttcaatctttcccttttagagcagctcctctcttttttataagcaacttttctatgtgttacaattcttaacatctgaaaatccaatgacctccttgtttctattgctctgctgaatgtataagatctcttcttccatttgacactatctacttgtacctgccagatgaaagttatatacagaaaagaatgaacttatgagggcttctattgcaaattccagagtttcttgtgcaatatgtctactagctaataattgtccttctctccttatgtgtttcttttcagtggaaact

SEQ ID NO: 108691 - DNA, 575 bp, Aquilegia coerulea
  Intron number 1 from transcript AcoGoldSmith_v1.024189m (l ocus AcoGoldSmith_v1.024189m.g) derived from phytozome v7. 0 (chr-ID scaffold_1; pos 5717438 to 5718012 reverse stran d)
tgaagctgaatctcaactttcatctctcatcttcggtaagattatcttctccaaacctaattaagatttctctctctttacatcgattgtttcttttagtgaattcatccaacatttcgattcaattacaacttctttcacaagatcttatcaatcgatgtatgttttgaggaatttcttttagaaattttacttctagttaggtttttggaagaatttgttcggatgtgatctttagtccgatttgtgttgtttgatctggtttcttcagctgaaattgatactcgttttctgtaattttgatctgatgttgtagaatacttgatttcgttctgaatttcatcgatctagagttaaaactagggtttctaactctagatctaagatattttgcggatttcatttagagttatgaaattctaggtttcgttgattagttgaaatggaacttgttgataagctatagattatggttagaaattatttctcaatattacaaagttgaaagtgtttttggttttgccttgattgaccttttcttcttttgataaattcagatctctcacagcaggtga

SEQ ID NO: 108692 - DNA, 1039 bp, Aquilegia coerulea
  Intron number 2 from transcript AcoGoldSmith_v1.004542m (l ocus AcoGoldSmith_v1.004542m.g) derived from phytozome v7. 0 (chr-ID scaffold_7; pos 3035129 to 3036167)
cccaaggaaaaagagaatatccaccacctcatgtaacaactactacatttgttgatttcctttcaaatctataatacttgttttactagtagtggtctaaggaaactgtttgatgaaatctaataaaactttcaactagcatgagggtgttgttttaagaggtatgttggaaattcccaatttataatttttttgatttgtcgaggagatcatgataagaacctggaagcggattttacttagtccatggagttatttaaatttataatgtgttgaaatatttgtaactaattgtaaacactaaatgttgattcttatattccacctgccaatgctttttaaattcttgtgggcatcatcaataactttaatgtctatactcgcatataatcttatcatctaacagaggaattttccaaatattttgaatgtataggattccgagaaagaagaaatctactgtaatgtcttagaaccgaaaaatgtaggaggggaaccttcagaaacgtgaagtagaggcatacggtccatgaaaactcattaatatgattcatgtatactaatacttgagggtttagaataaatctctagttgaatgtaagcattgaagcccatctttttgtgtgaataatatacactgatgtaaatgcaccttttgaattaagttacggacatcttaaactgtgctttctaatccaagacaatcatgatactgaaaatcaactagatattctcattaggatttattgggttgtatcagctagtgatgcttcttgagttgcaggtttaagttaacttggttcatcgaattttgctttctcacatgagggtttgttccttaaagagtttttttcacaattatttacacataaaactgctgctcaaggatctatgatggaacaaatcttatggaagagctccttcttttgcctacttttgatcttcagttgtatgatacatctatccttgtaaacttaaaagcttgtttttggttgtctagacagagtggaaacacaaaggattgggcaggctcttggaa

SEQ ID NO: 108693 - DNA, 529 bp, Aquilegia coerulea
  Intron number 1 from transcript AcoGoldSmith_v1.010385m (l ocus AcoGoldSmith_v1.010385m.g) derived from phytozome v7. 0 (chr-ID scaffold_37; pos 1927367 to 1927895 reverse stra nd)
aacaaacaccgaactccgaagagcactggtaactggtaagtagaactcttcttaatttcttcaacacgaaaccattcaatctgaaaaaaaaaaagtgatatgttcgatcttcagtttatacttcaattagttttctagggttgtataattttcaattctagggtttaataacttaattaggtttttcaattttataaaatctttgttttcttgaacaaatttttgcttaaaaaaaatctcacattgaaaataagaagtcaaacatttgatccttgagaactagaagtaactttatttccttgtatcttattttgaattgcaagagacacaaatgaacagctaatctttacattcacttgtaaaaactgtaataatgcttatacctgctaatttcatttatacagcgaatgctactggatcctctgacatcagttgttatcgagtattcgagtacattgatctttgtatataaggcatattaagaatgagaacttttaaaaggtaatgcatatcattcatctacagcaag

SEQ ID NO: 108694 - DNA, 539 bp, Aquilegia coerulea
  Intron number 2 from transcript AcoGoldSmith_v1.014508m (l ocus AcoGoldSmith_v1.014508m.g) derived from phytozome v7. 0 (chr-ID scaffold_9; pos 1797904 to 1798442 reverse stran d)
tgataacgacaaagctttgctcaagattcaagaacgtataaaattcaattaattttgacggtgcaccttaggtaatggatccacaaaagtaatgctttagaaatcaaaaacaaaaaaatagaataaaaacgtaaccatgtgtcaaaaaacatagtagacagtatacttttgtaggccatggactgaaaaagatgatgaaactatgtagaaattatgttagatagaatagttttagtcagggttagcccaaccacagcttgcatatttttcaaaccaaaataaagcaaagggccaaacaaaaagactcaaaaggatatggggacagaagtgacaaacacattaacatatgtttgggtagaatattacattagtagaaaacagattctatgctcatgggaagaaaaataaaaggattctgataaattatattgaaattcagtcttcaaaatgtaattttcttactacatgacaattaatacactcattgcattatttattgaacagaaggaagcttatttccagaagaattaccccgtata

SEQ ID NO: 108695 - DNA, 966 bp, Aquilegia coerulea
  Intron number 1 from transcript AcoGoldSmith_v1.003074m (l ocus AcoGoldSmith_v1.003074m.g) derived from phytozome v7. 0 (chr-ID scaffold_69; pos 541523 to 542488 reverse strand )
gaaattaatactaccaacgaagaacacaagtgaaggtgaaaaatctgcaaatcttagcattctatattaatttgttgatgttgaagaactgaacaaaagagactaaagggtattcttttttcttcttgtagctttttgggtatgccattcaatctttatcatttcatacatttttttttcttttttttttttttacagaaaatgtttgtgagatgaaaaaaaaaaaaacgagtggggagttcacatttggaaagaaatagttgtaccatgttattacgcttgttaatttcttggaattattgaattttctgtagatttgaagcattgtatatgagattaaccgaaaagcgattccccaaattttaatcatggttgataaattaataagtgttacagctaattcataattgactgagaattcctaagataattcagctgttccttttatatacaactagagtagctggttcatgaacttattattgttttctgatgggtgaaagagtttccgttgacgatattagagtaataacttttatcttcaatgattgattctgcaataagcattttagcatttcatcgttaaactcaaaatttaagattgaagttgaacaagcaattgcaatattgaagaacatggaaaagattattagttttatttattttgtctatctttgtagtctttatacttgactgtgaatattattttgcttcattatatatcttgatgtttctggaaccacacaaatatgagtcagttaaaagttccagagtcccattatcttggaagattgttttatatcttggagtaattgaaagccacgagttcttccattctagccttctaggttatgcttattagaagtttcatttcctctctttcaagtagaacttcagtttttattgatactgttttttattatatttgaaggattttggttgtctttctggagttctgttacatca

SEQ ID NO: 108696 - DNA, 721 bp, Aquilegia coerulea
  Intron number 1 from transcript AcoGoldSmith_v1.018242m (l ocus AcoGoldSmith_v1.018242m.g) derived from phytozome v7. 0 (chr-ID scaffold_6; pos 3320707 to 3321427)
ggcataaatcgagtggagtgactccaaaatttattgtgttgcttatttttttggattaaatgacgatcatatcacctgcaattataaatataggcaatcaaacaagttagtagatgccattgctctatgcttcatctcatgctgtcgctatatcttcttggaccttggattcttcatcatcctgtaaaatttcttgccacttttgaaccttttctgtcttattagtggcatcaatttattaccattttggttcctttttttgtctcattgacagataatatctcaaagacaaaaaacaaaaaggattttatatgagaagtgcagcagtgtgctggtaactggccaagatccatgaatagataaaaactataaacatgcaacaacaacaattttttgttcacttgttgtagttgttcttcatggtcatcttcttataaactttacagcatgtaaacaatacttattgtaatgtacaaaggaaggattgccctgtttctcaacgccactagctatgtcttttttgtttagtattttgtcaaaaaaaaaaatcgactttttcatccaaaacctcgagaagtgataaggtttggcggacctttctatgtgaatctcttatcccttgttcataagggattattaactactaggaatcttttacttatttaagcaccattgaattctgttagctaaacctatcgactttactattatacaagtatac

SEQ ID NO: 108697 - DNA, 595 bp, Aquilegia coerulea
  Intron number 3 from transcript AcoGoldSmith_v1.015480m (l ocus AcoGoldSmith_v1.015480m.g) derived from phytozome v7. 0 (chr-ID scaffold_1; pos 3692578 to 3693172 reverse stran d)
acaagagtgatatcaaaggtaatggctcattcttgactttatttttgaacggccttgcataagccactcttgtggatctaacttgtctttattcacttgaagattagagcattgggatattgggatgattttctctttgttttgtacaatgatgagaatcttgcataagccatctgttataatgattctattttgtcagtgcaacatgtagatattcaggtgactagtatagttctattttgcataagctgagtctaggcaaaacgattgaatgttcaaaattgtgatagttcctcttcccttgggatgttatctttactgttatctttttgagtctcatgaatcacaagattcttatttggttctggccctgacacacaatcacagatgtcccccaatcacagatgtccccagcagtctattctaatctgttttttgtcaaggcaaatgattattgagaacttaagttgtaaatttgttgattttaggtggaaaaattggagtaacatgaaagaagtgtggcagagatttaaaactggaaggcaaaaagaaatacaaccagttgtattttttccattgtaggaagaaacacttt

SEQ ID NO: 108698 - DNA, 646 bp, Aquilegia coerulea
  Intron number 1 from transcript AcoGoldSmith_v1.018458m (l ocus AcoGoldSmith_v1.018458m.g) derived from phytozome v7. 0 (chr-ID scaffold_40; pos 851555 to 852200 reverse strand )
ttaaagttctgcatttaattcataatatgtagctccacatgagtgatcctcagaatgtagttttcgcagatttttgtccaaggtatgttcataaccggccattgttttgatgctttccctccatttattagctcgaagattctatatttactattcattgtgatatttagaattggaaaagaaataaatttagtggaccaacttactagtaaaaagggagacctttcatcaaaatacactcttcttgtatttcctgttcctttttgctttattttacttggtatttgtttcatattaccacatatatatatatatatatatatagtttcctttgttttaaataatgtttacattctcttatgactactgaccaatatttaataatgaagttgctactgaaaaaaaaaaatcttccttttttggatatgtctataaaggttggaacattaccagatgaaaacttagaaatacctgctgatattcagaaatgcaacaatgtggataatttattatcttcggtttatccagccctaggtattgaaggcactgcaactccttcatttctcaaagaacgaagtattctggctccacaaaatgatgatgtcaaatagattaataacacagctctagaaatactttctagaaa

SEQ ID NO: 108699 - DNA, 470 bp, Aquilegia coerulea
  Intron number 2 from transcript AcoGoldSmith_v1.013585m (l ocus AcoGoldSmith_v1.013585m.g) derived from phytozome v7. 0 (chr-ID scaffold_11; pos 4112025 to 4112494)
atttcttgattcaggtttgttttttagctaatttactgaatttttatcttacaatgggattctgatttcattagggttttagtgggttttgtgttaatttaatttgatttgattgttttgaatgaaatggggattcttgtagaaacgtgatggatctgttctaatggattctcccaatgctggaaatcaatctgagaaagatactgtacctaatgggtcaatgaaaggcttcaatataatcgaaaaaagcaaatccaaagtcgaagaagagtgtcctgcaacagtttcttacgctgatattcttattcttgcagctagagaaggaattgttttggtaatgcattgattatgttggtgttttggtaatgtattcattattttggtgttttggtgttttcgtcgatttgctcttctgattgtttgttgttattgcaggctggttgtccttactatcctgtgactaccggaag

SEQ ID NO: 108700 - DNA, 971 bp, Aquilegia coerulea
  Intron number 1 from transcript AcoGoldSmith_v1.007456m (l ocus AcoGoldSmith_v1.007456m.g) derived from phytozome v7. 0 (chr-ID scaffold_27; pos 2072031 to 2073001)
ttcttcaaggtagatctctctcttgcttacttttatgtcttatgggtattttgatttttgttttaatccgatgatttaatgtatttttgaaagtagattaactttgttgtatatactgatatacttgctttttgatttcaatctatacacttttctctaatggggctactttttaagttgatttgatgggtattttgatttttgtttgaattaaattttaatcaaatcaattattatctgttttgtttaaaggaatctgaagttatgtagattggatatactgattttgtgattgtaaattaatcttgttcttatgaagaatgggataaatatgatatatgatttctaaacttctaatctatatgatcgtttaacttttttttttttttttttttttagttttcaactttactctgttgatcggcattaataggaagattatacatattaataaaccacatggtgtgtttcaatcttgattgtgtgtactgttggtttgatttggattggggagatggtcggtgcccacaaccattatgaacctttttaaatcactttactcttggtatcactttttatcgaaatttttttgaaaattttgatcactttctattgatgttgttttcttgggatcttgatatcaaattatatgtcaatggaattgattcttcaaattgctgagataccttattagtcgacttctatgttctacagtttaattctgtcagtattagcactacaatgtctgtgccagaaaaggttaaattaagttaatgctatctatctaaacgaggatttttgtaggatgcaaaaaatattggacttggttgaattcctgcaaataattttctgtttccgtattgttggtatttaatggctctgctaatgaaactcatatcaatggctaaaacttattatttacttactttactacaggaagtggcacagctggaattgtccttccagaagca

SEQ ID NO: 108701 - DNA, 585 bp, Aquilegia coerulea
  Intron number 1 from transcript AcoGoldSmith_v1.019204m (l ocus AcoGoldSmith_v1.019204m.g) derived from phytozome v7. 0 (chr-ID scaffold_9; pos 336136 to 336720)
gcttaacgagttgcacagtgagtttactcgtccaaacttatttgttttacaatttttatggaattttttgtgtttatcaatctccagttgaaaatattttctagttgctgaatatcgagaacctattatatagagatccaggtcacaaacacgaggggactgtatgctactcagtcgcccaattataagagaaactatatgtttgattaggtaatcataatcaaatgacatatctgcaaatcttttaatagtatttcgtgaagcctcaaaacaaaaaatttggaaatggtatttatcttcgagggttaatattacaagaatcaattattgtgaggttgcggacaattcaaatgcaatgtgcattgttcgtctaatcttctacttgatggaaaacaaaattagctaaacactcttctcttgcttaaaaaatgttttggtgcgtcttataacgttgtgcctgcctttcacatggttgcttctctgtatcagctatcatgtcattattcattagtatatctttttggcttataacgtaggaactgaggctagagttgtgattcatctttctgagcagctcactcttat

SEQ ID NO: 108702 - DNA, 920 bp, Aquilegia coerulea
  Intron number 2 from transcript AcoGoldSmith_v1.004035m (l ocus AcoGoldSmith_v1.004024m.g) derived from phytozome v7. 0 (chr-ID scaffold_18; pos 1402944 to 1403863 reverse stra nd)
tcaaagtctctggggtatgtataatatttaggaaaaacctaatatttcgtttacctagaggttttttagaaaaagaacttgctcatatatttgtgagatggttaccctcttcgtgaggtgtaagtgatggtgttgctatcatgtgcctgatcgatcactgtagaattggccatggcctatatgtctgtatagtcacatagtttaccttaatgatcatcttaacatgaaattttcttatcttatgcgaatgtcattctaagaaggctgtctaatctagaaatagtcctgtttaaaattttatatgtgaagaaaatactttttgatgataaaagtataaaggatatgaaatttatctttgctattaagaaaagcttctttattgctccagtggtagactttcgttcttttaaatcttatgaggtggtttataactttatatggactttctttctttcctcccttgccaaagaggctgttcttatttttctttaggtttgaaggtttaatcttgcataagtagtatgttgtatttatgtgcataaagaccaaatgtaatgggaaagttgacagccatttcttatccttttggtgtgttttaaagcagcctgagtgtttaagtcatgaatgggaacggcaggggagggagtgtaagtagggccgtgaaagtagagcgtacgggagtggtttttgttttctcgtgtatattatggcaaaaaactgattggaactgtaactatattatgttcattgtaggttttttctcttctttttacgtattagatgtgattttgagtatctagataccacttttgtgggaatttatctgtttcttgcgtactacccttggttggagtagccttgtgccagacagccgtttattaatggagacttatgatattttcaggttgtcacctgtggaa

SEQ ID NO: 108703 - DNA, 982 bp, Aquilegia coerulea
  Intron number 1 from transcript AcoGoldSmith_v1.004035m (l ocus AcoGoldSmith_v1.004024m.g) derived from phytozome v7. 0 (chr-ID scaffold_18; pos 1404833 to 1405814 reverse stra nd)
attgggattgttctttgttgtagaaattagtttgggtaggtcttgtttcagatttcaagtgttgaatgtattcaggttcatttatattcaagtagtgtattgggtattctaaatctgatctctctctttttgttattgtagtgcttgaattaaacataggggatgtttgttttttgtgatttggaattccagtgatagttttgagtacagatgggaaaagtgtcgtggtattttgcagtttagcagaatttgtgatctttcatgtattgttaggaggatttgaagtttaagttgatattttgatccaaaacacaaaaattgacttcttttcttttgttctacacttagatatctagtagattctgatgtgattgagttgttcttagaatggcatcttttgtgtaatttctcgatggttaaaatttgcccttccattcttgattgtatatcgacattcatgacctaatccattatgttgagagtaagttcatctgccataatttgcttgattttgacaaagtggaaaaatggttactggaactggtttatcctataggaggatatcaattatgggattcctaggtgacagactgtcattttcagttttaaagttgtcagtgaatggggaatctgatgtgcttaagttttctgttatgagtttggctttaggttatagttctctgactaagtagaaaggaggggaacttgttctgatctctcatatctgccattgtcagtttagtatgactggtccccgcttatatgaaatttatgtgatgccaaagtctaaacatgagtataattttcaaatgattgagctcttatttaatcattgtctcatactttggtagttctcgatgcactattatgacttggatgggattatttgatttcttttccttgtaatgaagcatgtcattaatcgttcttttactttatacttgaaggtctctagtctgtacctgggcaagttgcagtcaca

SEQ ID NO: 108704 - DNA, 652 bp, Aquilegia coerulea
  Intron number 1 from transcript AcoGoldSmith_v1.020773m (l ocus AcoGoldSmith_v1.020773m.g) derived from phytozome v7. 0 (chr-ID scaffold_9; pos 6283629 to 6284280)
acacagcgaaactgccgttcctcttctggattgtgagtttttaaacgaacataagatgtctcttggtttcagaataaagttgttagaagtgtttgatttcattgaaatgatattgccctttttttgtgaatttctgtacttcgtttgagcacaacagctgttgttattagttcaccttctaaattattccttgttttcaaaattattcagatgggagattgttacttttcttcttcttggaaggacttttggttgctttgacagtagctggttacatattcaacaaaaccaacgaaaatatactgatggtttgtactcctttatcatgtttactttatattatttggtcttactttaatgtaagtactgaaatctacttggcactttggcagatgacaaaacaacctgaacttgcgttacgaatcatactgataataacagagactgttagttttatatgtgaatactcaggggactaccattttctgactatacccctaacaagcatcatcttatatgtgacgtgggttcgaaaccatcagtattgcacatctgtggtgcacatgtgttttgatataggccttctgtttttcacaactcagctcacattatacttccgcctttgtgacatctgtggtccagacataccccc

SEQ ID NO: 108705 - DNA, 594 bp, Aquilegia coerulea
  Intron number 1 from transcript AcoGoldSmith_v1.001121m (l ocus AcoGoldSmith_v1.001121m.g) derived from phytozome v7. 0 (chr-ID scaffold_49; pos 702691 to 703284 reverse strand )
gtgaacgggagctctcgtcagctcaggtatattcttttttgagttccatattgtattgaaagtcgtagttgaaagtgctgaagtaaagtgtcactttatacttgatttcatttatgtcagtggcattatcattatcattaaaatgatgtgctctttgattttgtattgttttgttcctcaaacatttgggtttgctagtcatgtgaaacatctctaggaatcctttccattattatatgtttcatcgacaaaaataataataatatgagctatgcgtctttatgaagtaaaaaattgttcgattagttgttcggcaatgttccctgttcagtctctgttttccctttgaggcgtagtgtgcatcataagtaaaactttctaagtgatatttggctttataaagaaatcaaatgtatgtaatagggtattttgctcaagaacttataaataaactcattgtgctgtagattttttttctttctttttcgacttagtgtgactgttgttcttttaaattctcagaaaacgaatgatccttacctatatcttcaccattcagatccaggagttattgggactctatcgacctaaaca

SEQ ID NO: 108706 - DNA, 797 bp, Aquilegia coerulea
  Intron number 2 from transcript AcoGoldSmith_v1.000511m (l ocus AcoGoldSmith_v1.000511m.g) derived from phytozome v7. 0 (chr-ID scaffold_30; pos 1499432 to 1500228)
caccttacagattgtttttgcacgtcttgatcgttgtaagtaaattactttctaactttaaaccatccttcctggaattgttgctatctgtgaaatagatttccaggaatatttgctattcttagcctacggttgttaatttgaatttttttttaggaatgtactttgcacgtctttattgttgtgagctatgtaacatggacactccatattgtcaatcgaatacatggagactcgacacacgtgtcagacacacctggacacatgccggacacacttacaaacatatgcatatgattagggttagaatttggaataaaatcctgatatagaaagaaaaggaaagagatgagcaagaatgtatccccatcaaactatactcaaagaaaagataaaaaagaaaggcgagaaggaaagatggcatgttctatgtcgaaaaaatggtttataaataaatcacaatccgtatccccgtgtcgactagttttaggactccgtatcggacacttcgtatctgcgtcagacaccgacacacttacccgtgtcaatgttacttaggtcgtgagtaagagaaaattactttctatttcaaaacaatcgttctatttataaatgattcatttccagaaatatattttttcagcgcaaagcaattaagtcttagtttgcgaggaaaggggtttattatcatattctattagagtacattgctattcttttcttctcttgttttagtgttaattttctgctgttttttttatttatgattgtattagtggatctggccaccagttgct

SEQ ID NO: 108707 - DNA, 994 bp, Aquilegia coerulea
  Intron number 1 from transcript AcoGoldSmith_v1.012231m (l ocus AcoGoldSmith_v1.012231m.g) derived from phytozome v7. 0 (chr-ID scaffold_9; pos 2424101 to 2425094 reverse stran d)
ctggaatcttacttcctgagaaaatcaacgtaaaaactcaactaataatctctactttatcttcagttattattatatgcttggattatatcatgggtttttctatttaaagggaaatatcatttatggttgtttttaattttcattttggttttattttgctctaatttatttgtgatcggaatcgaaatctatccaatagaacttatctactaagggttctgcttgttctaaacttgtagtttgattctgcttgtgtcatgtaacatcaatcccaatcaagcttataaccctatttgtgattatttctttcttttcattctactgcgtcaaatcaaacaatatgatttctactccgtcaaatcaaacaatatgatattatgatgatgtattgttgatttactgtttactggttagtgattgaattttataaaacaattttgacatggaagaatcaatttgcgattaaaacattatttaaagaatcatatctcatctaactgtacttaaacacaatgccatcgtttaatttggagaaatgtcttcttaacatgggttatttgccattttgaaattaatcaattatcccttgtggatgaagaaataatttattcacagtgtcctatcacctgtttgacatatccaaaaactaaaacaccacaagtgatctgaaacttacacctcaagagttcaagctttggtttgctatatgttttcttctctttcactttttcgttctcctttagaaacatgtagtgtttgtttgaaaatttgagagttttgtggccatctttcataaatgtttgatgttttgttcatatggatttgtgttttcttgatactgcaaaggtgatggatatatagtcttacgtttaatgtctcagttaattgtgaagcttattggactacgattttccaacaacttatgtctgatattgtttcctttaaaatggatttagctgaacacgggaaaagttattgcagtaggtcctgg

SEQ ID NO: 108708 - DNA, 696 bp, Aquilegia coerulea
  Intron number 1 from transcript AcoGoldSmith_v1.023756m (l ocus AcoGoldSmith_v1.023756m.g) derived from phytozome v7. 0 (chr-ID scaffold_27; pos 2172102 to 2172797)
atattatcaaaggcgttatacttgtgagtaacagctcctccacaaagtagcaattaaaccacatccatatatcctgttgtcctgcatgcaaaaacatccttccaaaaaaattacttccatgagaagaatttcatcatttctcttcattaaactagaattttttccaaaacacacacacacacacacataacgcacatacaaaatacaaaccaatacacgcgcaatggttcctcacaaggttagaacttagaagcataatggtaacaagcattttcggaaaataatatcaccatatactgtatagattatttttgctaattaagctaactttggaagtgggtacataccccccaaattaggttccggttgagttactaacttccacgattagtcaaaatcactctgcgagtcattagattatgtttaaaagaattgaagttaaagttgggccatttgtgtagctctaatcataactaccaaattggactttgaaaatgcagtgagaaaattcacaacttcaacactggttgtatgtctcagttttcaggtggtttctccagttaaagaatttgtgctttattaaagactgttgtttgattgagtacttttgagttacagagatattagtctaggtataggttatttgtgcatcttaggttcaaccctttaattttcttcaaatgtatttatcaggtc

SEQ ID NO: 108709 - DNA, 771 bp, Aquilegia coerulea
  Intron number 2 from transcript AcoGoldSmith_v1.010875m (l ocus AcoGoldSmith_v1.010875m.g) derived from phytozome v7. 0 (chr-ID scaffold_18; pos 3234144 to 3234914 reverse stra nd)
tacagtgaatcaagaccttattcctggttttaagagtaagtaaccaaagttttttttttatatttgtttcatttatttattattattttttctttataaaatgggggatttttttttatcagctgtcaatgtcatgcaatgcaaagtagatttgtccatatacccaatctgtttttatgacaatgttgtatatgggctgtttaaattggatggttggtaagctttgacgcttattggttctcctcgtacgttgtttttagcatcaagagagtatgtggtttgaacttttgtgcggcttttctgtttgtttaactagtatggtgtatttgagcttaatttagatgagtaaagtgtgtaatggagttctatcagtactcttgttcaagggtctatggattttaagggaatgtgattacaactgaataagtcacttgttttagattaaaggaaaatctggatagcattgtacacatgttttgtacgacctgctcctactctttactccttggctagtttgaattcattgtttgagaaccggtgttgtctttctttctttattattttggtgaagattcatgatacctagtgtatgtggtattgtggatcctttccggttattatgtatttatattgttcaagttatgaatctatcggaagtgggatcaataacctcctttgtagtttgattactattagattggattctgccatttcaatatgtgaacttgaaagtaaataactgatcagatttttgcaatctttgctttgtag

SEQ ID NO: 108710 - DNA, 526 bp, Aquilegia coerulea
  Intron number 1 from transcript AcoGoldSmith_v1.024660m (l ocus AcoGoldSmith_v1.024660m.g) derived from phytozome v7. 0 (chr-ID scaffold_9; pos 3427526 to 3428051 reverse stran d)
cttctggtatgttgtttaaacacttctttgcttatattttgtttaggtttcatgctcttttctctatgttctttcacttgatttcaagaactgcaatcaatttcggaatctcagagtactttgtttactctcttgtcttggattcaattgttagtaacatagtgaaaactgaaaacccttggattgatctttacaattagtcttgataatttgttattggaaaataattggatctgagcaatggacactttgattgatctttacaattagtcttgatttaaactttgattgatcttggttacttaattaagaataactgtgatggaattgttggcagtttgaagatcagtaaaaaaacaaactaccaatttcatcttctaaacaaactaaaatggatgaatttgaattgttcttgcaattagaaatgttgtttacaattgttcaagagcaatgaatttcaaatatggatattcttcaatgtctttttgcagtgtcagctttacaggatctgtataggactctctct

SEQ ID NO: 108711 - DNA, 709 bp, Aquilegia coerulea
  Intron number 2 from transcript AcoGoldSmith_v1.016212m (l ocus AcoGoldSmith_v1.016212m.g) derived from phytozome v7. 0 (chr-ID scaffold_15; pos 2789605 to 2790313)
gaactaactagtcagattgtcctgtaagtcagatgacgagaagatactgcagcaatgtcatgggagctggtaccttcaaactagctaaaccatccaatttttgttagatgttaatcatgtaaatactttttgtattagagatacgggagacagaaaatttaagtgtctcccttttacaacatcaatgaatagaaacttattctcctgacttttttttcgaaataatctattttttcaactgagtattatattgactgattgataaaagcaaaaccatttgatctatctttcatgaagcctgtcggcatggtgtacctacaacactagtacgcatatcagattctaatggattatctcaagtactgcaggccgtgttggatttgtctctctgcaactctgcaagggtctacagcactattgtacagagtatcgacttaaatgagaaagttcctcacttgaactatatttgctgcaacaaggcctagataatttcactactgcgtatatgacatcgaagatatatatcagacaaaacatgtatttcacaaagcatcttacctttgattttgtcaagtaccttatccaatcttcagaatgtaatttagtctacttggcagttgcatctgcactgtaatttcccctatgaccaattgtgagtgacggatgcccttgtccatcattcagaatcatttcaataactccttcataa

SEQ ID NO: 108712 - DNA, 623 bp, Aquilegia coerulea
  Intron number 1 from transcript AcoGoldSmith_v1.013841m (l ocus AcoGoldSmith_v1.013841m.g) derived from phytozome v7. 0 (chr-ID scaffold_1; pos 2473355 to 2473977)
gctgatctatcttcttctgataacgaccaacccatgtaaacccctttcttcttctttctagtttctttgtttgctttaattttcatcaagattagctcaattgttgatttggttattagctaggtcaatgtttagaatcaatttgttgaaacattttttattgaaatttcacctttttgtggatctgttgttaatatgaacttctaatttgctcaaattagggagaaatcgaaatacattagatcctaatagggttagaaactcagctgtatctagattttgaagaaaaacgaaaactccagacatctttttatataaaattaaaattacacacacaatgaaatagataattaatgtcagcaagtggattatttatgtatagctacaaatttctacattagtaactaagattattgaaatggaaggtggtcaaattgactatttcgcaacattgctggaatttgggtaaatgatgttataatttgaaattggtagcaaacaaagaggtttgacatatcttcttaagaacacaaattgttaatgcttgcctcttgtgtttgtctagtttgattattttttttcgttttctaatctgttttttgttttctctcattaaaggactc

SEQ ID NO: 108713 - DNA, 678 bp, Aquilegia coerulea
  Intron number 1 from transcript AcoGoldSmith_v1.009597m (l ocus AcoGoldSmith_v1.009597m.g) derived from phytozome v7. 0 (chr-ID scaffold_6; pos 7543594 to 7544271 reverse stran d)
cgttgttgatcgaattggtgaatttgattgtttaggtaacgttttatgattcaattgttgttgttgttttcttgtttgattgcttgatttggtgttattgttggaaagatattgtaagatagagatcgtgagttttatttgtttgtttgtttagtttgatttgttttttgttaggggttttgaagtatttgatttatgtttgttttcgaagagattttgtgcgtgaaaagttttggtttttgtgaaattggtagttgttagggtttggttgaaggaaaatttgatggatttctatgaattaggagtctaattggaaatgttgttgttagggttttggtgttgtttgagggcttggagtttggattttggagtttgatttcgatttctgtgttgttttgaaatggtaaaaaattggggttttgttgcttatagtggtaaggggaatttctgaaacattgcgatgatttctgttttcttgaagtgaaattaagggtttatatgtgatgatatcagttttgttcgtgtaattgtagctgctttgattttgttaaggttttaagaattcttttaacatattttgattttgatgattgattgtgatcaagggttttaagttatttgataatcattttctggaatgcagctggtggaaatacgagtttgccaagggttgttgaa

SEQ ID NO: 108714 - DNA, 775 bp, Aquilegia coerulea
  Intron number 2 from transcript AcoGoldSmith_v1.015647m (l ocus AcoGoldSmith_v1.015647m.g) derived from phytozome v7. 0 (chr-ID scaffold_21; pos 1075768 to 1076542)
tgcaaattgtaagtttcatttttctcattttatattagaaataaatttacttttctcaataatgagtttcatttgttctcttgagagttgagttagggtatatttaaattcagtatcttttcattgatttgatcattgaatatgttgcaaatttactttaatatgaagaggaaaatttgtactgctactgcattgtggctgttaagttaacatatatatatgtataaataattttgaagctcgatgttaattgaaagtttctgcaactcttcaagaaatcttattggtaataaattaagatggttccagtgtacctttgttagttggagataattgctttacagataaaaaatggagcttcaagaatacgataatgtcacataactttacattcattacttaacacatgggacatatggttcaccctctttgttttgaatcatgcaacccgttatcctgaatctgtcaattagtacaatattatcaatgtagaaaccattgcaatcaaaatccaatctgaaatatatattttggttccatttatggtccattttgagaactgattttcctcacacctcttacgtgcactggatattgttttccctgatgcctctttgagcagccactttttcagttttgttgtgtatgtgtgtgagtgatacaaccatagagcagcattgcagtttactttttaatttagttttcatattttctgactatattgctaaatttggaaaaccttaggcattgaagttgagcgacgacttgcatctca

SEQ ID NO: 108715 - DNA, 337 bp, Aquilegia coerulea
  Intron number 1 from transcript AcoGoldSmith_v1.026156m (l ocus AcoGoldSmith_v1.026156m.g) derived from phytozome v7. 0 (chr-ID scaffold_10; pos 2869063 to 2869399)
gtggtgctcaagcatctatagttgtaagaaataaggtgacattctaaatttggttattcttttctaacctttccttcttatgttctcaattatcgagatagtatgtttcttcattttcatcgatctttttcaaaaaaataaaataatatcattgcaagttttatacttcttctacaatatggatgtccatgtgtgttgtggatttttatttaattggaggactatataccttttcttcccctttccattggagattcgtatctccattctcttgcaaaacgcatttctttatgtattcgtttatttctaatgattactttgatggttttacagttgc

SEQ ID NO: 108716 - DNA, 937 bp, Aquilegia coerulea
  Intron number 2 from transcript AcoGoldSmith_v1.021071m (l ocus AcoGoldSmith_v1.021071m.g) derived from phytozome v7. 0 (chr-ID scaffold_108; pos 302849 to 303785)
aagtaagtttctcatcacataacctcagctgccagtgactcgttctcttgccttaaacttatactattacagtattactgcaatttcgcaaaacattttacaattgaatttttaataactttgaagaatgttacccttttttcccacctaattatttcctttcactagatatatttagacttgtcttttaaccctgtctcaaatctcgactccattttcatctcaattttatcaacctaatcttatccactactattacattccactcagtttcacacccaaactcaccaaactttgttaccgtatctgtttcacttgtaaagacactttttccaaacatgagaatgggccattgaggggtttcactcatcttccccacttagataatgttgcaaaagtcataatccgtccatctgcttcacttctttaatcttcggaccctcaattgtgaaatcaaacagataacataaagatcttccttccgtagctcctgtgttttctaaccaggacatatggtaattataaagagagaacagaaagatctgttggagatgtagagaatcttccattgttatattgggcaaagagtggttctgagaaatagagtgattgacgcttccatcattagatcgtctttaaagaataaaaaaacacactcaaatacaataatttggagtgagaaacaggttagagcttatgattatattagctttcgacaatcttgatttcttccatgtctccaactctttatgaacatatccttatgactccgggattggtatactactcaaatgtcatcctccggcgcaatgtttaacagccacatctattgatcagtataatattacttcattatacatgttagcttgtgtagttgtgtttgctactggcagtgcaattctgatttgtttatgttatatgctatttgcagcttgaa

SEQ ID NO: 108717 - DNA, 690 bp, Aquilegia coerulea
  Intron number 1 from transcript AcoGoldSmith_v1.020316m (l ocus AcoGoldSmith_v1.020316m.g) derived from phytozome v7. 0 (chr-ID scaffold_1; pos 6535505 to 6536194 reverse stran d)
tatcaattgtaatagtttggtaaattttcaatcttaaccttgtcgagtttaattgcaaatttatgaattacaatgtagtaaaaatatggtatattaatagaatcaaggcacttgatttgggaggaaaatgatcataaatgttaagacttccattttactacgatttagattttatagaatgttcggttttctgttatttgtagctgcgaaaccatgttgcttatagcttctcaatgaatttgatcgcttctcaatgaatttgattgttttcttatttggataaccggtatattaattgctttgtattatttagcaaagtccccagattcagtggttaaatactgacattcaatctggagttcatcttcgaataaaagtattagtgaatcgttattacttaccagagaccagagtgccagagtcattgttctcccctaaggtctatttattactttttttttttgacataatgtgacacatattactcagagcattaattgttgttcttcgaaatcaatattagtacatgcatgctaatcgtccgtttgttttaattaatgttgacacaccattatgcattataaagaagttaacacattgcatttcgatagatacaaacacaactagacacatactccactttgacatgattctggaattgatattcttttgataaacagggaccacagt

SEQ ID NO: 108718 - DNA, 307 bp, Aquilegia coerulea
  Intron number 1 from transcript AcoGoldSmith_v1.013224m (l ocus AcoGoldSmith_v1.013224m.g) derived from phytozome v7. 0 (chr-ID scaffold_9; pos 80814 to 81120)
ggcatcatcatcatcatcatcatcacacaattaaggtactcaaaccgcctctactctatctttacctaatttctttcttttctttttacacataataaatattattattctacttgataaatatgtattaaagaaaagtgtatcaatcaaatcaaatcattttacatttttattttcttatttctgcttcttcccataatatatatacaaacacaacaacaacaagaggaagataatgatgatgatgttattcctcattccaacattgccaggttgcttttgcataccagcaaacagccagtctcgt

SEQ ID NO: 108719 - DNA, 1012 bp, Aquilegia coerulea
  Intron number 1 from transcript AcoGoldSmith_v1.003867m (l ocus AcoGoldSmith_v1.003867m.g) derived from phytozome v7. 0 (chr-ID scaffold_51; pos 1631586 to 1632597 reverse stra nd)
tccagcaaaggtataatctatctccctgcgcatctgaatataatcatatatatgtataggttaattattctgtggtcagctagttttcagattcttaattgtggaacccaacaggcaatgctcaaatgagttgcgtctatgtcacgtagtgaaattcatatttgttttgggattacaaataattaacttgatagttgcaatccaaggcaaataatgccttttttgttcaggtgacatttgcacaattcatttgtgtgttgcatgctaacattcctctgcccagttaaactagtatctattttggttgtattgattgtgattctactttctgtctctttacaattttttttattaatttttatttccttcgcattttaatcttttcgaatttacatttaatctcaaggacgtctttttttatttgtatatctttttcttttatcaaaatttgtattgaacctcatatatgagatttttaactttggggcacatacttgtggatttttattaatgtagagattggataattgattcacagtcattgtatcttgtttggattggctttcattgttggacaattagagtgtgaagaccctccctttccttgttattttcactttctttgatttatgaatatccttcaaagtaatttcttaaaagtgatggaagaaaggtaatttatttccttgctaagtatgtgtatgcattctttagtgtactacagtgtaatactgtatgcaatatcaattcactcatcatttacattctagcatctcattgaaccttttatataacgtaatgatgtttaagctacttgtattatttccaacctagtaacacaagtggccaaagtttcacacacttgtgtagtatataaagcaagctgtatattagaaagttgttgtgtgcgtgtgtagattcttactgtctgtttgtatattatttttagttacttgatctattttactattgaacaggataaattcgcggtacaattggaatttgtcctatt

SEQ ID NO: 108720 - DNA, 423 bp, Aquilegia coerulea
  Intron number 1 from transcript AcoGoldSmith_v1.010868m (l ocus AcoGoldSmith_v1.010868m.g) derived from phytozome v7. 0 (chr-ID scaffold_9; pos 811974 to 812396)
cttatctgtatatctttacattccaaatattattggtaagtttaatcttattcgtggtgtttttaactttgaaatttgctttataatagattgattagtaataccacagaaaagaaaaaaatgtgatgttggttaggttactaaatttaatattttgaatagagaggtgttttagtatatttttaagaatcaatacaaactaaaaagagttgttgaatgctttaaaatgggttttttctattgctgtaattttgttggggaacaaattgggtcacacaataaatcttaaatttttaatgctttttttgagcaaaatgatattggatctagctacttaaggttatttgttcatttgccaatcactaatgactatagtatcattttgcatttttgcatgtggatgcaggatacataagagttctt

SEQ ID NO: 108721 - DNA, 391 bp, Aquilegia coerulea
  Intron number 3 from transcript AcoGoldSmith_v1.010868m (l ocus AcoGoldSmith_v1.010868m.g) derived from phytozome v7. 0 (chr-ID scaffold_9; pos 812581 to 812971)
gttggtttgctcgcaagttcaatcaaggtaacattctactaccataaaattaccatcaatgattcactttcataatttgagtattcctagaataatttgagcaactttaatgctccagatttcaaagtagctatgtttttgttggacaatgggattgatctgcagttgtgcagcttgtcatctagaattttatttctcttttatttttggaattaattgtgtgaagtgagtattgctgcagaagattctatgtatatggatatggattgtgataatgtgaaactattcagagcagattagtttctttctgttattttatattttcttgagtagctactgacatggttaaatttttcttcattcagtttcaacttttggtgctgttttggac

SEQ ID NO: 108722 - DNA, 439 bp, Aquilegia coerulea
  Intron number 2 from transcript AcoGoldSmith_v1.010987m (l ocus AcoGoldSmith_v1.010987m.g) derived from phytozome v7. 0 (chr-ID scaffold_108; pos 151173 to 151611)
gaggaagaagaggaagtatgtttctctgtttcattgtcttcccatatatcatttattttttgtttttattcattggaatgaattttttttcatattaagtctgctgatcttaggagagaaccattttctgactgaatcaaactactttgttgtctctcaatttatcatagctgattatatttgtgatcaatgttaaattgatccaaaagttatgcaattagaattgatgaacatgaccaaccaatcggcattgtatgttttaggcattaaaaagaaactaaaatctttatattagaaattaattaaatacttctgaagttaacaaatataatatggttatgccaagggagattataacatgatatgtgagtgattagtggtggtcgttataagtttattttttggttgattcttattttttcctattgcatgtaaaggt

SEQ ID NO: 108723 - DNA, 541 bp, Aquilegia coerulea
  Intron number 4 from transcript AcoGoldSmith_v1.008184m (l ocus AcoGoldSmith_v1.008184m.g) derived from phytozome v7. 0 (chr-ID scaffold_11; pos 2735401 to 2735941 reverse stra nd)
ctgtgtattttgaagatccaacttcgttgaaacaggtaaaaaaagtaaatctttcgggttaagattttctgcttaaatggtttatgttgataaccattggagtatgttgtagattgtgtaatgtgtaagttgtttatggaagagagtatgtttttttcctccacattataatatgaaattcgctacaactattacttattattgaatagaacgaaatttctaatcgtcatatgagaaattgaattccttagtgttatttgatttgaacatgttactttttcttctcgtagaaacttaaaaatgtggttattacgatgagtgataaaacaaaattagtgagcactgagtaaatcagatcacattacatattataattcttgttgtgctcgtacgcagagcggatccctattcttagagactatttaattcctagcttttcttattaacagccaagttactgttggtctattgtaacgagagtctgttctatttttgataagtaatttgtattgattttggggcaatcttggtgctaggttcc

SEQ ID NO: 108724 - DNA, 803 bp, Aquilegia coerulea
  Intron number 1 from transcript AcoGoldSmith_v1.007507m (l ocus AcoGoldSmith_v1.007507m.g) derived from phytozome v7. 0 (chr-ID scaffold_37; pos 2183474 to 2184276)
aaactccattctctccctctgttcttgttgtactggtgggtgagttgtttctttcttgttctctctcccccttctcattctatctgtaagaatctgttatctatgtagctatactataattgttggttggagttgtttaatcaattgatagaatcatgatctatgaattatgatgatgttatgtttccacacactagagtctagatagattcatgttgaaatacccaaaccatttttagttctgatgaacatatttttattttcaattcaatatttatatatataaatgatatagggggattcaattgattttgatattatgcatcaatgtttatattatatatacttattaaactacgtattgaggagccaataagttgttgattgtctataacataatactcccttttactttgagcatcaatatttatatcatagagggtttcgaaggtcttgagtttgcagattgatattacagtatatactattatgttgaagccctggtagcaggatacaggtttgtaactatctgacaggcgtgtcttggtttaatctgcataaccagtcgcgtgtgttccagtctgttctatgccgtctatctatgtgtttcttgatttatctttcaatttcaaattgtgaataccagactcacaatatgtgactacctacatccatataggtgtatttagattttcttctttaaaatgaacactaaccacatgtataagtaccttaatatctttggttcaacaactttgctgttttcaggatcacattttggcatttagtattcttcctttctg

SEQ ID NO: 108725 - DNA, 918 bp, Aquilegia coerulea
  Intron number 2 from transcript AcoGoldSmith_v1.007507m (l ocus AcoGoldSmith_v1.007507m.g) derived from phytozome v7. 0 (chr-ID scaffold_37; pos 2184349 to 2185266)
tctggcattctatctccttacaaattcagtcgcaggtatgtactcactacgccactatcttttgtccctattacttgttatagtttttggtagaaaacccttgcaaagtctgctattattagaagaagaaataatccaattttaagaggtttccaaacaacttatgggcttctattcttcctattgaaaatttgtaatcccaatggtaaagtctatacaaggatctcagcttctattctcaaaatatcaaaagattgcatcccttttgatattgtgatgtgtttttttttgatattgtgatgtgtaattgacaccgtatatcacatgtcccttaatgaagatgtttaaatttgagttgagactacgcccgtaatgtgatccaagatattgacaaacgcagagaatgaattcgtcactaaatgaattatttaagtctctcatgaagccctagttttgctcgagtccttactctgggatagacaaaaactgattgtagagccactatcaggtatttaccattatagttttactctgcctagagttgttcaatttgacaatttgtaattactttttgaaagcacgaatccctttatacatcaataaaatacatataagtaaattatcatcttatatatgtatttccttctccctcctcgcttactctctccctcccccgtcatgtattgccagcttatctttttttctgcagaagtcatgaagcaatggacttcactgtgcaatttagcaaaacagttgttgtcttgttgatgtcattcatgttgttgttgttcattcatccatcagattatggatttcagtgtgcactttcacaaaccactataggatactagaagcttccatgccttacttttgcttactaattggtggaactaaatctactcagagaactcgaagctg

SEQ ID NO: 108726 - DNA, 617 bp, Aquilegia coerulea
  Intron number 2 from transcript AcoGoldSmith_v1.014935m (l ocus AcoGoldSmith_v1.014935m.g) derived from phytozome v7. 0 (chr-ID scaffold_6; pos 3950982 to 3951598)
gtcctccgcaggcaagcacttttatcgatcttattagtcatgtgaattagaataggttcttgcatatataacatttttttgtttttttttcgtttccagaagaaaattgtcccaaaagagatttaataatacaagagttaacatcagacaagtaaacatgaaaccaaacataggttcatatatattgtttttatgattagagacatttttttatactcatcaatactgtagtaattacctatatatgagtaaacatttgaatgagaagaggttaagaagttatcacttttgaaatatgaaccaaaacatcttcttaagaactccagttttatatcctatacaaaatgtagaaacgtatatttgctactcaatctccttataaaagaaaaaaaagtaattatctgttgtatattcaaaattttgttttctttcttttcaagggaacaaatttaattttacaattcagttttgtgacacaatcttattcccctacacgtctgatccagcagttagcaactaagtgatataatgccttcttgcagcaaagatgcataaattcccaaataatattgtgttcattctatctaatgtctttattatcatttacaggaagaagg

SEQ ID NO: 108727 - DNA, 890 bp, Aquilegia coerulea
  Intron number 2 from transcript AcoGoldSmith_v1.018329m (l ocus AcoGoldSmith_v1.018329m.g) derived from phytozome v7. 0 (chr-ID scaffold_10; pos 3366395 to 3367284)
gtccctctgttactggctgcacaggtatgtcagttgcatcttatctccatatagtgattatacaatgccaggtagggagggaggtcgacacaagaaataactaataaaaaaaaatttagttttttaccagtttttggatttcactattgtagttcgctattttgaggtataatttgactgttctatatatgaacgaagaagggtttgtaatattaatactatacaccttgaggattagcaatttctgcacaccgtcacgtcaccaattgaggatttcgtcagttttttttgggaataagatccattccataatagatgctgaaagtagtttctacgagttcttttcattgcgacttctgataatgttacctataataggacacacataaaaagattcagatctactagatatagtcggaatctctttttgagggttagctaattgctggcttacagtgacaaggcaatccaatatcagatcttcagggcagaatcagaaagcagtatatcccaacttctttatatgtcacatgtacaagctctaagctggtacatgtcagacttatcttccaagttcaaatacacccaaaaggagttcttagtgaagatactacagatgtgtaatacaaattacttgctgagcgtcattagaaaatagcagcctatgggatgactagtgtttctgcattatttgtttgtctgtatgtttggttcttttgttttttcaataagaaaacacacacactgttggatctttgcccaatgtcatttcttttgatagttttatttttagtgttgatcgatcttcctatgaagataatacgttttttattggaagcaatatgctatatctgagttaaattatcctcttcagatctctgcaattgttg

SEQ ID NO: 108728 - DNA, 964 bp, Aquilegia coerulea
  Intron number 1 from transcript AcoGoldSmith_v1.010368m (l ocus AcoGoldSmith_v1.010368m.g) derived from phytozome v7. 0 (chr-ID scaffold_10; pos 1100822 to 1101785)
ggctagacttgcagaacaagccgagagatgtatattgaattttgattatattagtatttatttttttcactacttttactattaagaaatgaacttgttctttttgattgatttgattatactagtcatgatttacaagttatttgaaatttttatagtttaattgttctgttgttatgtttagatttttctagctgtgaaaaacagatatagtagtagtgataattagtactattggttttcattaacttatctgtgaaatgtgtggtagagatatgatttataaagacaacttgtcttgttgtaatgcatagagtagctaatcgtgagatgtttttttgaaatgaagatggttgatccaaaatgccgggataattaagattgtattcatgaaattcaattcaactagtataagtttataacataaaatggattaactatcttgatgtggcctattatgcgcaaaaatgaaactctcttgctggacaaagggtcctctagatgaatagatcaaaggtttcaatgatgggtgaatgttggaaatggcctggatagagattaataagactgaaagtcatgtgtattaattcaatttggcactgaagaattcttattgtgtaaagatagggttgtatgttattttgtgcagatagttgtgcttttgaaatgacaacttggtaccgaaaactctttatgttcataagaatctgttttgaatttttgtcatccaatcatttttttttcataggaccattcctagtatgactataaaaaactgaataatgtgcatgtatcccatctttttaagtaattttgcctagcagcacatcacatgtaattgaaccagcaactcacttatatatttctgcctcttccaatctttgtttggggtaagtctgaactaccgtcttttctagctattttattgatcttaggatagtatcatgtgtttctctgtgcagag

SEQ ID NO: 108729 - DNA, 642 bp, Aquilegia coerulea
  Intron number 2 from transcript AcoGoldSmith_v1.017695m (l ocus AcoGoldSmith_v1.017695m.g) derived from phytozome v7. 0 (chr-ID scaffold_9; pos 1012289 to 1012930 reverse stran d)
tttctgagaacaagaacattgcagggttcgataatgtgagtttgatttgttttattgatgggataatgggattgagttggaattttttttctaattgctttagaacaaggtaaattacccaatagtgtgttagcgacttttggtgatagttattgaactcgtttaggttgaagatttgattgaccacacatgttgtataaatccagatgatggtatagattgataaaacatcaacaataatttttacgattatggttcgcgaagatcagtttggtttacaatcccattaattcctgaactgatttggctgtaagatgtactgatagtttaataaactggaatgaaatgccttttaaagcttgaggcagtcttaatttgttaaaatagagttggcctgaaatatgcaaaaggttggcctaaatattcttgatcctatagaggtattttgggatttctaaatacctagttttcttaacaatcaatgcttgaatgtaccttatattcttacactaatgtttttgtactactgatgctacatagagatttttttgttcatacctttcttgcattgaagtgggattgtaatttgaagttttgtaaatttcagcctgggaaatctctctacacaactgttagagaact

SEQ ID NO: 108730 - DNA, 895 bp, Aquilegia coerulea
  Intron number 1 from transcript AcoGoldSmith_v1.002845m (l ocus AcoGoldSmith_v1.002845m.g) derived from phytozome v7. 0 (chr-ID scaffold_9; pos 995299 to 996193)
gatttctatccgcattgtcgccattgcaagtaattccttcaatttcctgcaatttttattatttttatttttattgttttgcatgctattgatttcgttttataaatgctagttatgttgaaagttgcttgaattttggctgcaactgttacccggtggtgttcatgtgttagtatttgtttagctggaaacttcatgtctagtttgtgcatagattggcattatttggagtttgcaggtgtagtcatttcaatcaaagccttaaagatatcttaattgaatatttaaaaaatcgatcacctttctttgttgtgttatacagtatattgatgttaatgaagtatatacttgttctgaaggctgtttacaagaagtgtgttgtatatatgtcattatggaaaccggtcgattaggtaattatgcattgcaatggagttttgaatgcaattggagaaatatccttggagaagtatttacttgttctatattcctgttttgttgggaaagttgacctagctgctaaaattttgattttgtatttactttgtgtacacatatgatatatagttgttctttaaatgtagcatagttgcaaggttatcttctaatgaaaacatggtgatgaatattctgaaaatgttctgcatttgagattcataaaaaaggtttttaaattcatcaggaatttgagtttaagggtttgtttagtgtagagagcccgcaacacaagagttccacttttagtatgcttttattgtgatctaagaattggaaaatgtaatacaagtttttattgtgatctaagactagcttgagatttggggtcaatgttaagttaatctaagatcggtgtatcatcattttgcagcttgcaaggagcaacagccgtcggttc

SEQ ID NO: 108731 - DNA, 987 bp, Aquilegia coerulea
  Intron number 3 from transcript AcoGoldSmith_v1.004082m (l ocus AcoGoldSmith_v1.004082m.g) derived from phytozome v7. 0 (chr-ID scaffold_9; pos 1407855 to 1408841 reverse stran d)
accgtgcagaggtaactgcaatgcgttttctttttctaaaacacaattaggttacatcatacaatatctatggattgcattacagatacaactgcaacacccttaatttccatccccaaagaaaacaacaaaatttgaaacaaaaagtaaaccaattttatttagttaaacctaactcttttagaatttttgttcatgtgcgcaactatgtattaataggtccttgacttctttagagtgagccatattgatgaaggttggcttatttctttccctctacaaacaccaaagtgctatggaacacaacaagttaagggtagcatttctcttccattttaaccaccatgtatttcttggaggagttggttttgcagatttgacataccgattaatcaaagaaataatctagttataacatagacatttcccaaacatcaagcacacttatcttctcatttgctctttaaacaattcagtgaacaggttgacatataacttgttctgtgtaaaagactaaaatctaaatttaaaggatcctaaacattgaatatttaggaggtaacaagtgtcggacttactatacaattgaggcttacaccatataagcctgaggcaccatcatagaacgttagttatgtcaagccaaaatgccaaatgctccacaatgttgcaaagggtaacaacatttcaaagttattgtctcggaaaagagaagggaccaatgtttagattaagttaatagattcacccctgaaccaagcaccaaagtaatgtcgactttaagaatagcgggggcacccattccaaaacactatcacacatgattcattggctccaactaatgctgataattttatggaatatacttttgttaaatttaattggtctatcttgttaatctcatctattatattatgtttctgtttcagtatcttcattccttggttgtagactaacttaatgcatcttggttcttgctttcagatc

SEQ ID NO: 108732 - DNA, 897 bp, Aquilegia coerulea
  Intron number 2 from transcript AcoGoldSmith_v1.015056m (l ocus AcoGoldSmith_v1.015056m.g) derived from phytozome v7. 0 (chr-ID scaffold_49; pos 366177 to 367073 reverse strand )
catcatccggatttggttcttcttcagacatattggtaatcattcagtcatacttaaaaaagttttaggctatatatattttattgctttcgtgacttactgacttgtgaacagattgatactataatatcttcatattatttttttgcatttccttgtattccctgttaagcataatacacgttctaattcagtgttcgctcaaattcgttgtcttatattcatctccgcaattgtttaagagatgaacattgttcaatttatgaaattggattttctacaaagtaattgtactttttgattgaacacaaaattcgttgggaaatcacttgactgtatgttgattgggacttcgttagggctgagctcctgtaaaattttcaccttttcacatcgtacttttctgaaatttgggttttcccaaaaattggacgttttgacttggaaattagtagctttgttgaaaatcaggttcttcttagacccagtcataaataatcaaacggacccttacataagttacaattaagttattgagttgatgcattgtggatcccaggtcaattttttcacaacttggcgttgctaaaatatgtagttttcaggttaaagcataaagtatggtgttatggaggtattattccaattataacatattttaaggaaatatctcagaacttttaaaggtttgtatttgaaccacttcctgaactgcactacatactaacttactgttatggcacacagggccaactgtataatgcaatccattaaacacatactgtactgctcagcttcagtttgttactctttatcttttttaacctttgacgttatgattaattttcgtaatgtatttcaggatcctgagggtctcttcccgtgtattcttggtca

SEQ ID NO: 108733 - DNA, 717 bp, Aquilegia coerulea
  Intron number 1 from transcript AcoGoldSmith_v1.002075m (l ocus AcoGoldSmith_v1.002075m.g) derived from phytozome v7. 0 (chr-ID scaffold_37; pos 30667 to 31383)
tcaacaaaaagaaaccctaattcactccaattcaggtaatttatcaattgttttgttgttcaattgctttcttttaattctgttcaacatcaaaattttcagatttgcttaaagattgcatatatttaacatgatgttaagctatatttccttgaattactttgaaagttgtattccttacttgcttgttaagttgaaagttgaaaatcaataagatatgtttgtttttatctaaattgaatctcattgattaaattgttgtttggactgaacttcaattgtaaaaacaattgcttcttttgttgaacttgagttgatttggagatcacttcaactgttaaaaaggtcttaatagaattttttttctttatcaaaattacgctaaagtcagtattattagagacacatttcatcgcgaatttatcgttagagcttggatctcaaaatgaaggtttagtgctatgcattgcttgaagtttgtaatttgaagttctagtctttatggaatttgaatagtgtgtatatcctttcgataagtttgagaagtcagttcactttctatgagattttggttttattcaatctaaattatatctactaattaatgttaaactttatcagatttctcttgaatatgacaattatacacaaatgtgaagaaatcattttgtatgagactgacatatatttttcttgtttccatgactttcttgacag

SEQ ID NO: 108734 - DNA, 635 bp, Aquilegia coerulea
  Intron number 3 from transcript AcoGoldSmith_v1.002075m (l ocus AcoGoldSmith_v1.002075m.g) derived from phytozome v7. 0 (chr-ID scaffold_37; pos 31953 to 32587)
tagaaactttctaagtcagattttcaacagcactcatatccttgaatatttatatacctttttcatgattattattttcaacctgaggttgttgtatttgttcacatttagttaatataagaattacaacttttcaaaataagttaaacttgagtccaccattatattcttagtctgagcatggaaagtatatttgagattttgagccatcttgaagccactttattttaagataatatacttgcttaatgttctcgagtcctgatgatgccttgatcataattcaaaatcaagataattgtaactagtggcgatttatactagtctttctttccatgcaactgacatgtaccaatatatccatctgattattgatcattcagatgatttggtcttctaatcaaagtcatgatgaaacttgggatcactaattaattagtttgtttagttctaggattaaattagtcaaatgatttgaacattttcaatcagtttgagaatacatttagcaatatcaagcgaatacttttccagaacaaaaaaattgatgcttctcaaagtttaattgagtttcacaatgcatatccttgaccatcctacgcatcccttccctattgaagatcagtactgagaag

SEQ ID NO: 108735 - DNA, 925 bp, Aquilegia coerulea
  Intron number 2 from transcript AcoGoldSmith_v1.016693m (l ocus AcoGoldSmith_v1.016693m.g) derived from phytozome v7. 0 (chr-ID scaffold_6; pos 6468221 to 6469145)
gtgatcctaataggaagtttatttttgcagagcaggtatttgattgttttcatacccggaagttctgttctttagctttttgtgcttcttagtattgatatttattggagtgtgtttggattgagaatcatcattaattaatactacaagttgattcaatgttgactccttgagcttagacaatcactgataacgtgtatccggagtagactatagaataatggagggggaaatatgctataggctccactatagtcataccccctttaatttacaaaataaactccttcctaatgaaattataatttaggtggtcgattacagaattctgtattaaagaagttgcaaaaaaggagaaaatagagttttgattatatttgacatttctttgatatatattttggaggttggaccaccttattttttatttatttttttgtctatccataggcaccagccttttgacaaaattataaggtgcctagactcctagaggggccatatcagagtgagacttggtaatttttgctaaccaatggacaatgaaacttacaggcttctcaaaaatctgaaaagaaaagtaaataggatctgaagaactctcctcttcatcttttcacaagaaaatgattagccacaaatgggaagaaaataacaaaattcttacctataagcttcaatgttctcattttctagtcttaaatatttagccaacggaatttttagaacaaagagtcatgtgacctacctatgccaatcaaccataacctatatatcagttccgaataaatgaaatagtttagttgcttcccattattattgactttcaaaattcatgcaagaagtgtagagaatatgttgtcacatcgactgacattcttgtctggctgctaggctttcttccaacgttggtgggctgaacaaa

SEQ ID NO: 108736 - DNA, 894 bp, Aquilegia coerulea
  Intron number 1 from transcript AcoGoldSmith_v1.009223m (l ocus AcoGoldSmith_v1.009223m.g) derived from phytozome v7. 0 (chr-ID scaffold_30; pos 2075208 to 2076101)
cttcttcttctatttcacgtcgttttatacgtcaggtttcgtttctctatcttgtttctctttattacaatagtgatttttgtaaattttattgtcaatcagaaactaatcaattttacttttctttttcaattagggtttagagatttttttcagaattcctttcatcgttttgttgttgatttaattgttgaatgaccttttagttgaagtattgtgtttgatttgatcaaaagagatttttatgtgttgatggagttttgattcgataatgagattgttttgtctggtttatatagtactgtagactttgtttttaagttaaacttacaaaacaaatgtattggacatggttgatgtttgtaaagtttgaatctaatgtgttattgttggattgaactttaaattcgttactgttggattgaatcagtactttctagcatccatgagtagttctctgacatttggattaaaaaagagaatacaaatttaggcaaactatttgatgattgaaattattttgttttaatcaaaaatcattctgacatggtttgctttgttgccttaacttcaagtacttgataataaaaaaatttattatcaaattttaaccgtgattaatggaaattgataataaaaaattgggattaccttaacttcaagtacgaagttgggcttagttgtcatcgttcttgtcatagttttaagttgaaaacccagaacaccgcatacaatggacaatggttgaatgctgtattggatttggaattttgaattaggatgttgatatggctttttcagatcagtatttgcctaacctatagatatttatatttaccaccagtacaaatttcattatttttagttatatctgacaaaaaatttaatttttag

SEQ ID NO: 108737 - DNA, 827 bp, Aquilegia coerulea
  Intron number 1 from transcript AcoGoldSmith_v1.002802m (l ocus AcoGoldSmith_v1.002802m.g) derived from phytozome v7. 0 (chr-ID scaffold_95; pos 169473 to 170299 reverse strand )
tcgtttcacttacctttaccattaccattactaaggtgcgcgctagctataagcctataagctattcccttctttctttcttttttattgcttaatcttcaataatatacagtacaaattcatttcataattgcccacaaatcactttattattattattattacattttcattaatttcttctttcccatactactagtactatactgtattaagtattaacacaaacattttcccattctactatactgtattaagtattaacacacacattattatgcttcaaaaccttgtctttcacaatcaaacacacacacaaaatgccacatatgtttcaactttcaacatttgggttttcatttcaagtttcaacaaaatgcaactttctttctttctaaccagtacatgtagtactcttactaatttcataaacctcccagtcccacactatctatttcagggggtaaatataaaatatacatacacatgcttgttgtatctttgatttctagctttaagatttcaatttcaacttttcaccatttgtttcttattattacaaatattgaaatgctacactaaacctctaatgctagctagctgctcaatcctaagtcagtaagtccaaacaatataaactagctcaggtggtatttgtcagatgtatgtcctttacatttttggtggagagattaattgtactctagagctgaccacaattaaaattctacttttgtataatggaaagtcatgtattgaaatatacaaaaaaatttatccttgatgttctcttaatatcaaacttcttccattttcaggtgccagcc

SEQ ID NO: 108738 - DNA, 268 bp, Aquilegia coerulea
  Intron number 2 from transcript AcoGoldSmith_v1.011404m (l ocus AcoGoldSmith_v1.011404m.g) derived from phytozome v7. 0 (chr-ID scaffold_49; pos 1439918 to 1440185)
tataggtcagtttgattttcttcttccatagatatattaattagttttgatccacattccgattgtgatcttttgttatggattaaaaagttcattactgattaaaatgtatgtttgaagttattctgctgtaaacatgtatgatcttctgtttcagctatcaccattattagtacactttataatttttttagtttttgaatctgaagtcaaattctaattagtttcctactatttgcagaggcgaaaaagcattttgtagccgaga

SEQ ID NO: 108739 - DNA, 666 bp, Aquilegia coerulea
  Intron number 1 from transcript AcoGoldSmith_v1.006109m (l ocus AcoGoldSmith_v1.006103m.g) derived from phytozome v7. 0 (chr-ID scaffold_37; pos 699912 to 700577)
ctacgcgttcacagtcacacagagctacaaaagggtttcgcttggtatattcttgttttcatctctggtcgtggtcgtggtcgtggtcgtggtcgtggtcgtggtcgtggtcgtggtcgtggtcgtggtcgtggttgattcaattccaattccaatgtatgttttgttttctttctctaattctgttttctcaaattgttattcggataatttcactacattttataatttcatattagtttagatttcagaatcgagatctgttcttacattttgtaagttgattttgatttcgtttcgagatctgtttttacattttgtaagttgattttgatttcgtttattttatttttgttccgattgttacgtttatcttcttattttattttaacaaatttgttaaaaattcagaaaaatgagactgtctcttaatcttagatcgtatcaatttttgagaaaagatatgaaaaattcaaggctgaactgttattttcaaatttcatctattttttttttctgcgaaaaaagaagtttattccaaagattatttccaaatatttaggaaaacagattggcatctttacagttgtgagtgattgtgttttgttttttcatggtgtagatttttatagcatatttgggttcaattgtttttcagaaatcgga

SEQ ID NO: 108740 - DNA, 973 bp, Aquilegia coerulea
  Intron number 1 from transcript AcoGoldSmith_v1.006975m (l ocus AcoGoldSmith_v1.006975m.g) derived from phytozome v7. 0 (chr-ID scaffold_109; pos 352064 to 353036)
gctgctttgggtatgtatgacttcttgtattgtttttgttatttatgtttcagttttaatccttgtttttaatgttatatgtttctattgccacttgaatgaatgaatgaattctatctttaatgcttttggtgggtttgtggggaagttttttttttcttttctgttgagattgggttgtgatctgaaatggttgattgctacgtgagagaagaattgatgcctctttaaaaagggttaaagagaagagtttctgtcttgctggaagttagggtctgttggatctgattatgacttggtgttttaagaaattacttatatgcccttctctatgtttccttccctatggttctgcaaggattaaaacctgtaaatagattttcaagaatgaaaataataataactaataaattcagtcttttaagctcattcatttttttggtttttaaccaactcagtttgcaaatgttttttttatgataagggtcaatattaatttagtttatgttattgctttttcgaagtgtagtttctaaattctgctaagaagtgtttaggaaggaaaggacatgcaatgctccattttaattttgtgaatcaatgttttaaaccaaaagtcttattgctttattcagaaaatatgatttggaaaaatgaatttctgttggtggtatctgtttccctcggtataactattgaccagtaatatcattgttttggatctagtaaaaacaagaaaagtaagaatatggtacttctttttctccttcatattcgtgcattcaaaaacagtatttagtatgttcaagaaaatcaaacatgaaatctttatttctgtatgtagataaattttttacttgagaagaattttgaactatatcacagttcttgcagcctttatattttccagtttgtttaaggtatgtttccattcactggcttgcaggttcagcaggaattggattcacacctc

SEQ ID NO: 108741 - DNA, 746 bp, Aquilegia coerulea
  Intron number 1 from transcript AcoGoldSmith_v1.001300m (l ocus AcoGoldSmith_v1.001300m.g) derived from phytozome v7. 0 (chr-ID scaffold_37; pos 2377409 to 2378154)
caacagaatattccatccaatccaatcaatttcaggtgaatatcctatcctatcctatcctatccaatcagtttcagatcgtctttttttttttttttttttcaattatcatatgattcacatataatatatctgatcctttttagttagctatttttttttttttttttgtctaaagactaaagagagatctgctgcctgcgttccattactacaccctctttttcaaattcaaattaaaacttttttagctcatgtatgtataaattttaactccaaccccctctccctatgttacaattttaattaccttatatgcaggattaaaccaataattatttttaatcatttccctcttattatctttacatttacatactcaacacaaatactgtatgagtatgatttctcttttcaaatcctaacctcaacctcaaccccaaccccaaaccccaccttaaggttctactttgtatgtcatgtccctgctcttgccacatttcatgtaaacccagtaatacctagtttttccagctaaaaccctgccccaacccatgatgcttagctgctggggttactaaatgctaagtaggtgctgttcttcctttctggtgttatttttattagaaaccgtatcacaccactaaaacattttctatcactaatacacaacctggtaggtgtcttcattcattcatacttctcacaacaatgaaaaatcttttcgttatacagggtggactatt

SEQ ID NO: 108742 - DNA, 606 bp, Aquilegia coerulea
  Intron number 1 from transcript AcoGoldSmith_v1.022751m (l ocus AcoGoldSmith_v1.022751m.g) derived from phytozome v7. 0 (chr-ID scaffold_9; pos 4529634 to 4530239)
tcgtttgcaccttcgtcgtccctccaagactcactgtaagatatatttaagcaactttacacacacacagagagagagagagagaggtttctttaaagtttctaattttttataacttgttcgttcacctatagaaaattagaaattaattgacattgaaagaaagagtaaattcagtttaattatggaatagaaaattacgaatacccaattgaaaaaaactagtaagaattcttcagttggtatgtacaagctacacaaacaccaaaaaggggaatcctcccccaccccccacaattcttgttataggatttactatcaagccatgaacccagtggaagtctgatgtattcaggctaccccaactcgtcgtcaatggaggaaatttcttacatttctttgaaaactcatttgtctgtgcctggttctatatgattcaaaacaaatagtattaccaagctgctctagccaactcctaaataataagatggtagttaagttaactgcctttatcattattatgatgaacatgctaatgcgtatttgccatagaaaatatgtggagttctctttgacttgtgaattgtgattgatcaatcctgcaga

SEQ ID NO: 108743 - DNA, 793 bp, Aquilegia coerulea
  Intron number 1 from transcript AcoGoldSmith_v1.006432m (l ocus AcoGoldSmith_v1.006432m.g) derived from phytozome v7. 0 (chr-ID scaffold_9; pos 1794807 to 1795599)
cccgcataccagtgtaggtaaataatttgcattccaaaattattatcattattattattattttgataaaccattccaacattattgaattttcatttataacatatctgaattaattagcatattatttagataataatagtgttcaatgctgagagaaataagtaaataagataattcactgccgaacatactttttgttttttatcccttgatttgttttattgcatttgttaatttgtaggatatttttctcctttcggcaattttattatatttggcctaggagaactcattaaattaggacttaggtgaatgataataaattaatagacaacatttgagttcatcatggagaactgtaagaggattttaatctcatatgttgtcatatttctcttaatacatcctggcatctttggtgatgacgaacttcattcttgcctaatctcaaatggagtccaaaacttcaccttattttctcaatcaccatcttcagattatcaccattttctatatcttccaatgcaaaatctcatatttgcaaactcaacgttccataaaccgtccacaattatcttgccacatagtaaggaacaactagggaaggcagttctatgttgtcgaagagggtcatggactattagattaagaagtggtggtcatagttttgaaggattatcacacatagcagatacaccttttgtgattattgacatgatgaatttaaatcagatttcaattgatttggattccagaacagcttgggttgaatcaggtgcgacattgggtg

SEQ ID NO: 108744 - DNA, 771 bp, Aquilegia coerulea
  Intron number 1 from transcript AcoGoldSmith_v1.015943m (l ocus AcoGoldSmith_v1.015943m.g) derived from phytozome v7. 0 (chr-ID scaffold_6; pos 8375755 to 8376525)
ttcgctgcaatttctgtagcactgttcttgcggtaatttacttaatattttcttagtatgaacatatatgtatagcttatcatgttagctagaagataagtatcatatgtgacctactaaagttttctacaacttcatataaaagaacaaagtgtaagaaagcttatttcacatagatctgatatcttgatgaattgaagcaaaagtagggtagttcctagtataaagaaattataagaaaggttgtaataattttcttctttttgtaaggaaacaaagataattaaggatgtatatatggtatatccttgaagaaccctattttcattgttacttgatcagttacttctctagcttttttttcttcaagaaaaaccatccccctttagaaaagaaaaatcaattagctgcagtcatccactaaaactttggaaattcttctgaatcatgcttataacatatattgttagggttgttgtgtcttgaggtcttggtgagctttaggcctggtgcttaattagctttcctttgatttgtagcatacatagagatcaatatataaattatttcattttcttagaattgtttatatgcactacttagttataaaggactttttattatagtaaatcataatcatatatatccctttcaagatcattgacagttttagtagtaagtcgtatcattagaagatgtttcacatgaaaatatgaagttatggatccttttttaatatgctttgtggctatttttgtaggttggaatccc

SEQ ID NO: 108745 - DNA, 978 bp, Aquilegia coerulea
  Intron number 1 from transcript AcoGoldSmith_v1.027407m (l ocus AcoGoldSmith_v1.027407m.g) derived from phytozome v7. 0 (chr-ID scaffold_37; pos 1441467 to 1442444 reverse stra nd)
ttaattatcttcaaaccagagaatctgaggtaaaacatttgatttatattttttctttaatataatattattcttgtttgaagtttggaaaaaattagaattggaacttatttgtttgaataattgcgagggaatgaaatagtgaaatttgagataatgagattatgtaaacattaatgagaaatgtgaattacaaagtacattcaaatttgaaatattaacaaaatctaggtaacataatgcgtgctacaatgctagatagtggtaaattgttctcattaagcgtaaagactaaagagacgttgtattctcgatccaataacacataatgcaacttgagacccagatcgtttccagtttcttgtagattaaagattagcttaattagataaatgcaccaatggaacttatctttaactgtacatatataatttatgggattttccttgactatgttctctttttaaacacgtatttcatcctaaaagctttgtgttaattatgatttttcttgaagccacatctgagcttgcatcttaccttgtaagtattcttatcgagttattggctttcctgtggcgcatcaaagctgggcacatgtcattgtcagatgatcagacagtttgccatattccagcatttgtcccttttctctttgcagcttgtccgttgtggatcggcatattgataatgttggtctgtgccgctgtgcgttatattctttgtttcattgtaagactccataaactcccactaccatgttaatattcaaaataaaaattccaaatgcaaagtccttgttagatgtaggccaaacatctaaggttttgactttaaggttttaaaggtgtacgagtgaattaacccttagggattttttttgtagaattttggctgtgcccttgatatttgcagtttcttgttaagaaatttattgcaattgttaaatcggatttcatgtatgttcaagattgcaga

SEQ ID NO: 108746 - DNA, 831 bp, Aquilegia coerulea
  Intron number 2 from transcript AcoGoldSmith_v1.009643m (l ocus AcoGoldSmith_v1.009643m.g) derived from phytozome v7. 0 (chr-ID scaffold_15; pos 3181427 to 3182257 reverse stra nd)
agagtagaggtgatttggtcctgggtttcttacaggtaaaaacaacaaattaagaagagatcattgattaattttgtatcattacttctttggaaaccatatcacccccttcattctgtaataccatgattaaattgactctgtacttatcttagcagttggcatacagtatttggttttctttaaattaacgttttcttgcaatggatgtgagcatgcaatattgcaatagtacttcttttctgatgcaagttaattaccgacctgatttcatctgggctgtgttggttgcgtcatcaatcttattgtatgagctcaatctacttgctgacatcccagcttctaagaacaagattatgtgcctagttatcatatgacatttagttagggttacccagtagtacacattcactttctaattaactgaaaatactctccatcgtacacagttaccattttgtattcaaacaatatcagagtcatggatattaaaagattttcaagatttgtggccgtttatttatatgtctattgaaagaattgtaatagccaaatatgctgaaacaatatttgcaccccctttgaataagtagtttttattgtatacccattcattttcttatcttttaataaaaaaaatttgtagcaaaacttgttcttgaagcccaaagtgcttatcatttaaacacgctccatgtactataacaactgtattagactaagccaactttaactgtagcacacttgttgtaaactccctgttatttttggtttcctgttcagtttgtggtatattaaaggttgtataaatcgcagagcaagaaaagaccg

SEQ ID NO: 108747 - DNA, 781 bp, Aquilegia coerulea
  Intron number 1 from transcript AcoGoldSmith_v1.022912m (l ocus AcoGoldSmith_v1.022912m.g) derived from phytozome v7. 0 (chr-ID scaffold_37; pos 1287657 to 1288437 reverse stra nd)
attcttggtgcttctctttctttctggattggaaggttagatactcagatctctttctctttttgataaaaaaaataatgcagaaactattaatttattggaaagtaatttgttgggaaaattttattttcagaaaaaataatatgaagttttacttgttctgggaaatctaagagtaattgctttgttcgccattggagtggtatatgtagttgaattttttttgcttgagtaggattagtccctgcattatttatgattagtccttggttgattgtgtattagttgtgtagctaatactttagtttagggataccatatagtcatacagagttcccgattgcgatatgagctagtcgtaattttttgtccaagggagccaagttctctgttagatgtatactctccaactagctgttgtgctatatttctttcttacagtactatcatttgagatttgggattgggaggcccaagttgcatttgataattgggacttagaggggtaactttgttcagctgtttaaaggttgttctacatttctcatttgattattcggattttctgtgacaatgttgtgttttatacaatttgagaagaatgattccatactcaattcatacgaggtgcattatatcaaaaaaattcactcatctatgttgcatgtactgtattagtagttctcgctcatttattggattttattatgatataaccatttctgattttgattactgtgtgggattggtcaggcttgtttttaggagctcaagcgcaacg

SEQ ID NO: 108748 - DNA, 1017 bp, Aquilegia coerulea
  Intron number 2 from transcript AcoGoldSmith_v1.019208m (l ocus AcoGoldSmith_v1.019208m.g) derived from phytozome v7. 0 (chr-ID scaffold_12; pos 5654870 to 5655886)
ttgctgtttggaaggaggcacaacatcagagggtattgacatgccaagcttcgataggccttttttaatctcgtcaaaaccaactttgtcagaatcgaaggaaagtattttcataatagcttacactaataccctttgggtaaagatgtgctttaatttatcccattaaaaacaggtttatcaaaccatttttttttagccccatggaagcacctttcttacaaagtggagaggttgtgggttcgaaacacatcaacaaagagaaaaactttggtccctaacgttttgaaaacagtccaaagcattcatccaccactcattttaattttatatacaaattttgaagactatcattataataaatctcgagatctacataatctttgtaatgtgtggtggatagatgttttggacagggtttgatcctaagcgctatgtgcctaagtagttaatcgttgggttggatctaaaccatttaaaattattaggtagtatatattatttgatttgtaaagtatagacggggatgtagctcaataatctcttgcaattgtcaaagcacactctaccaagagtgattggtatacgaggttcgactcctcgcatctccattttttattataatatttttattatttttataatgttattgtaatattttggagataggggtgttatttttcagtgttctagccaatttttttttttcaattaaaacatgtatttattgggaaaaaaataattagggaatcgagtttgagaaatagattttttgggaaatctcaattttttcatcacataaaaagtaaactgtaaaattttaaaacgaaatacattagtagggttgggggctcctacccctttatttaaattacgcgaggaaacttatatcaaacaatcagttgttgacgtgtttcatagataaaagctatcatacaaatggatatctcgacaagccagttgacttcatccagggactaatgtatatttgactaagagaccttccgagcttttttt

SEQ ID NO: 108749 - DNA, 851 bp, Aquilegia coerulea
  Intron number 2 from transcript AcoGoldSmith_v1.008344m (l ocus AcoGoldSmith_v1.008344m.g) derived from phytozome v7. 0 (chr-ID scaffold_1; pos 9942371 to 9943221 reverse stran d)
agatcataacagtgaggaagtgggtccaaaagctggtgagtttcttttcagttttgattatataagaaattctgtaaaagtaaataaaataaaaataatcttagagagttaaaaacctgattttcacgttcttttgattgtttaagcaaatatgtggttgatcaaatttaagctacataagctttagtggtcctcttctacagttatacttttataaatttactataaaagattatcctagtagcagtgtagcaccaccaaaggttctgatttcgattattagggtgattcaataattaggttaagaggtgaaatattgaaaacgaactcaagatcgtctatactaagatacctcaggatatgcacagtcaatgagaaacagtactaggattatttttcctattctcaatcctgtcaagatattttaataataggaagggtcctagtctcgctatacgtcagaaaggtcattgctcttaagtaagtgatggctggatctacacgtttctctgttgtagtctcaatgacttttttacttgagactgaagcaccattggtttggtttgtggtaattactaacgagaaccatcttatagcccatttttagtgttcatttatgtatatattactaatgttatactctttctgacatttggttagtaattacatcagcacattatgaatacaaaacacaagaaaagtaaactgaaatcttacagctatgacaataaaaagggctaacttgcacgatctgtacatctaacttgttcagacatgataaaacgatagctcaaatctcagtcttctttatttcagctctaaatcctgacaagtggatcgagtttgagctg

SEQ ID NO: 108750 - DNA, 829 bp, Aquilegia coerulea
  Intron number 1 from transcript AcoGoldSmith_v1.008425m (l ocus AcoGoldSmith_v1.008425m.g) derived from phytozome v7. 0 (chr-ID scaffold_6; pos 8530377 to 8531205 reverse stran d)
ccatcatttggtccaacagagattaattgggacaagtaagtactatctattaggtttcattcatttctgctttatttaactaatatggggtttgatgtttttggtcaatttgtttgtttaacatattgttttgattgttgaatgttattagttattaatgatgaacttgaacaattgtttattgtaatcgcaatccattttgcgaccatttgtgctatattgggtgttgtttttttttttttaataaggaagcttattggaatatcagtattggtaattttctttacgcaaatctaattctgtaaaagttaatatgttgaccaaacatgagtaatgtaatgtgctggtcagctggtgctcgcagtccctaacgatatatcaggagcgaggaaataaggcttcatttctgacatattatctgggacttgcctttggtgcaagctttagtgtaaaaagtataaaccccattttaggatcgtctgtcaaaaaggtttagggtgtgattaactgcacaaaaggattattccatggtaaacccactttttaatggataagttcataagacaggataccttaacattctgtcttttaaacttcaaatgtgattttcactcttgcggtagaaggaatcgatctatttattagtagttaatctgtcaaactattagtatatgcttgaaatcatatttgacattgcatggatcaaactatttattgcttattttctaggctatgtagatctataactggtattgatgctcatagattctcctggtgttggtgctcatatattcttcctaattttgcaggctagacaaaactaaattct

SEQ ID NO: 108751 - DNA, 531 bp, Aquilegia coerulea
  Intron number 3 from transcript AcoGoldSmith_v1.020939m (l ocus AcoGoldSmith_v1.020939m.g) derived from phytozome v7. 0 (chr-ID scaffold_110; pos 267825 to 268355)
tggtaggaactgttatcattttgttttatcttattgatctgtttcagataatgatgtgcaacttagaaataatatgatatgcaaaatgtttgaaaccgaaagagtcaataagaacgttgaacaactacaggacgtgtcccagaattttcatattggtcacaaacttgtaatgaattctgtgttatatcaaagccaactattcaatggtgtctttactccatttctttttttggcaggtgtctgttggaaaagggtatgaaacttgaaggaatgtgttggatacagacaatagaagaagatatctgtatcccattgtgtctctaatttgtttcccgaatgacggcttttgagtatcaaatttgtggcccctatcaagtactttagtatctcaagtgatgaatcaaaattattgagatttcttgtatatagttcatatttattctataacaccattctcatactccctccttcagcaattttgattccttttaatagcatgattcaattttcttacaactgtttaggttggtg

SEQ ID NO: 108752 - DNA, 305 bp, Aquilegia coerulea
  Intron number 1 from transcript AcoGoldSmith_v1.002110m (l ocus AcoGoldSmith_v1.002117m.g) derived from phytozome v7. 0 (chr-ID scaffold_9; pos 2528608 to 2528912 reverse stran d)
tttgtcttcttcttcttcaacatctttatcataaggtaatctctttcttcctttcgatctctattttttgtttttatttagtgaaatcggatttagtcgattgagctttggatttcattttctatgttgtttggttaatgatgaatataggtatcttcgtatctgctttcgcgatgttgttaggtcgagtttgtaattttgtttgattgtgtttttgtacatgtgtttgtttttattgtttctgaaatcgattgttctgatctgttttagggtttacatttgaggatttttgcgaaaaagggaaa

SEQ ID NO: 108753 - DNA, 784 bp, Aquilegia coerulea
  Intron number 1 from transcript AcoGoldSmith_v1.016039m (l ocus AcoGoldSmith_v1.016039m.g) derived from phytozome v7. 0 (chr-ID scaffold_10; pos 6831415 to 6832198)
tcccaaggtgaggtttttttttttttttttcattattattatttagtgaagctttcgacaaatttagctttgcaagtgtatttagtgttatagtaccttgtcatttattctataatattgtttggcattagtcttcgatataggaatttctaattaatactctaacatcagtaggaagacgcaatcattaaaagtgagatatgaagaaacaattcttacatctcgattgagtcaattctgccactgcctcgaatttggctggagtagaaattaacgcaggttaactggttttctacattggaagcctgactttttgaagtgactgggttgctttaatatgtttctctgtgatctcacttacaatagtgtttcgcaaacctatttatgatatttataatctatgtgtgcaatgccaataaaaactctgggccttgctaatcagaatttctaccccttttaacaatcaatgatttaacttatttgagttgtatcaagatgatttacacccttattttgacctcaatgtctagggtccttctctaactattggttgttatctgtgattttatattttgaggatttccatccatttacttcatctgaatgaatggctggaaagattatgatttacatccttgcaaactcaaaggttctttgagatgtttgacctcaacgtttgatattaaaagtctaaatactttatccacatttgccgattttcagtctcattctatgttcttaacatcattactttttttgatgtgtgtgtctacagaccttcttc

SEQ ID NO: 108754 - DNA, 767 bp, Aquilegia coerulea
  Intron number 1 from transcript AcoGoldSmith_v1.024420m (l ocus AcoGoldSmith_v1.024420m.g) derived from phytozome v7. 0 (chr-ID scaffold_10; pos 5624704 to 5625470)
tttgttggtaggagaaggtattaaagcacattccttgtctggtgaagtggctgaagacaattttcatgtttaactcattgtctggtgaagtggctgaagacagttttcatgtttaactcattgctaaaaacagatttgaaactgggcagagatgtcaggtgatgattattcttccactgcagcctcaattatcgtctgccttagtttcggataggtatattccggcaattgtggttactccattctggtgatcttgtttcaggattatatcatatacattcccaggcttcttcagaggtgctcagaatttgcagtgtatcaccacccccacccacccaattcatcatggaccgtaaccaacaatatgtcgtagttctgatttctaatattatggaatttcttgattagattatgttatgtatgccagatggtaaaatttgtagttaccaaattaacctgattcgtaggtaagcacttacaatgaagttttaattaggatttgtttgcaaattggtactgtggtttgcatcatgagacgtcaaggattataccatacagtatgagccgcctagtggaaaatttagtatcatgttattcttaaatttgattggattatttatggtggcgaatttgccacgtcaaattatatcttggtgattaatttgtaatagtgatcctttcattgatttgcatattttctcttatctatttcatggtaatttccttttgcagactgaagctgcagctaaaagagcattagccctcga

SEQ ID NO: 108755 - DNA, 802 bp, Aquilegia coerulea
  Intron number 3 from transcript AcoGoldSmith_v1.011413m (l ocus AcoGoldSmith_v1.011413m.g) derived from phytozome v7. 0 (chr-ID scaffold_15; pos 2859781 to 2860582 reverse stra nd)
aaaggtcaacgtcagggcaaagtaattgactacaggtaacaaaacaatccaacaacttttctgtcatatttacctaattatgcaacaaaaccaattttctgttttcaccacatacattagtaggttgtaagcatcatgtgacattttgcaaatacggcacacatttgattagaatctccacccctagactattacaattttaaacagtcgaagtagtcgtttacaaaataagactaacttatataaaatgaaatggtttcttgatcaattactattactgtagtactatatccgaagaaagataatgaagatgattttgatacatttgccttggtcattttaaggcatgagtagttctggtttgcaactgtcagtcttttgcggtaacactggtggcttttttactctacaattttgataaaaggggctggaaactttttgtcatttgtctgcataaataatgtttattttggttgccttgttttagcattactcaggtctgaaccatcaattccttcaatggaagagttgatattctttgttggctgtgaataaaaagtccatagtctgcagtttaccagctcttgtacttatgagtgttttactttttgagtttagttgagtcgagaacaatctttttatccaaaaaaggatttacaactttcggggaatttaaagaatatttttgtaactcatcttgtgtcaagtttttcagtctcacagttttctaaatgactactgagtactgaccaagtacttttctcgtgtagagttagcgagctccgagttgttgagctcttag

SEQ ID NO: 108756 - DNA, 364 bp, Aquilegia coerulea
  Intron number 3 from transcript AcoGoldSmith_v1.003298m (l ocus AcoGoldSmith_v1.003298m.g) derived from phytozome v7. 0 (chr-ID scaffold_10; pos 1990226 to 1990589 reverse stra nd)
tgtgcagttctcattacttgagacacaaaatactggtatgccttttctttcattctattctcatcatgcagattatattacagttctatggccgttccgactgtgtagattctaaagaaactgtgtctgtttgcatcttacacataaggataaattgcattatcttgtgattgtgtggatttgtatattatcttgattttttgaattcatcttttgtgctgtgtatatgtatccaagtaatgttacgacttaccactttatatctttcttctaatttcattattattcatcagatgctcatgatcaggctcagtttccatgttcatcaggagacctcctttttagttctgtggttgcaattatt

SEQ ID NO: 108757 - DNA, 481 bp, Aquilegia coerulea
  Intron number 1 from transcript AcoGoldSmith_v1.003298m (l ocus AcoGoldSmith_v1.003298m.g) derived from phytozome v7. 0 (chr-ID scaffold_10; pos 1991309 to 1991789 reverse stra nd)
ttctcattactctctctcaggtactagcttaatcaattgcaaaccctaacttcaatcaaaatcaggtttaaggtcattatgttcaattatttagattcatagttatgcaatttattgtcagatttcgagagaaattcgaggatgggaagatgagcaggagagtgattctgatcatgtaatcatattcttgactttatttgatttatgttttatgtagttaataatgttattttagaataattgtactttttgcgcaatccgaggattaatggtgtaaatgttttcaggatgttgagcagcagtactcgggagattatcatgattgcttagctgacattgtatgtttattggtaagcatttgactccgtcaatttctatttataaatccatcatcataaatttagtctctgtcatcttttgcctttgattttcaaattttcttcactctgacaggtaacttttcttactgacgagagtcagt

SEQ ID NO: 108758 - DNA, 611 bp, Aquilegia coerulea; identical to SEQ ID NO: 107652
  Intron number 1 from transcript AcoGoldSmith_v1.019145m (l ocus AcoGoldSmith_v1.019145m.g) derived from phytozome v7. 0 (chr-ID scaffold_118; pos 30189 to 30799)

SEQ ID NO: 108759 - DNA, 349 bp, Aquilegia coerulea
  Intron number 1 from transcript AcoGoldSmith_v1.006495m (l ocus AcoGoldSmith_v1.006495m.g) derived from phytozome v7. 0 (chr-ID scaffold_11; pos 4362191 to 4362539 reverse stra nd)
tggcttcaccttctcttcttttcgtctctttggaggtaaacattactaaaacaccctttacttccccaagcttctcattgctgtattttggtttaattttcttgcacaaacagctttatatcagtatctatagacaaattaaatacatgggttttcttcaaaatctaatctttaataatgggttcttctcaatcttagctaaattgctacatttacatcttatctttaaatttggtttcttttaatattgctaattttttctataaattcccctctactgttgaaaacatcttatattgattatgtttgaatgcaaaacagagacatttcgtccagttctgatatcttc

SEQ ID NO: 108760 - DNA, 818 bp, Aquilegia coerulea
  Intron number 1 from transcript AcoGoldSmith_v1.019694m (l ocus AcoGoldSmith_v1.019694m.g) derived from phytozome v7. 0 (chr-ID scaffold_18; pos 87940 to 88757)
cacaaggtttgatttgttttcacccctttgagttttcttcaattggtttatgttgtagataattagagctgaaagcacatgaaacctcttttcttaattcgattaattatctcgtacttgtctctgatatagttagctcaattagctgcatgacaagttgatgttggtttgggagaactaaatcctgattacagataatattccataattctgattgaaatgtgtttgtgcctgtaaatttgttaatagctatacattcatcttcccgcattgcctttgtcgtttgataaatataaaactgtaagaaaggtttagagaaatggattatgatatggcattgtttaagggtctgtttgatttaccgggaaaacaggaggacagcagggaatatgttatacgtcggagaaagaagaaagaacgaaaaaaacagtttcatgatttctcttagctaattcagaaattactattttttcctttaaaaaaaattaccggagaatttatttcacaatcaaacaaaccttaagttatataagctagggcttcatcgtcagaaaagttttagtgtgaattttgcttctcttggtttttaaatatttatctttatataaattgcacatgtgattggtgatcctgcttttatgtacatggaaattagtgttaaagattcaagtacgattagattgtttcaagtaattcaagattccaaaacagtgggttgttttagactttagtactcttttgcgataacaaaataaaagtttctaaatttatatggctttgcaggttacattggaggtcaagggtgaaacccaactctt

SEQ ID NO: 108761 - DNA, 611 bp, Aquilegia coerulea
  Intron number 1 from transcript AcoGoldSmith_v1.012886m (l ocus AcoGoldSmith_v1.012886m.g) derived from phytozome v7. 0 (chr-ID scaffold_18; pos 3847546 to 3848156)
tctgcgcaaaataatcaactcaaccctggtttctggtgagccaaactttcatattacagtataactgttaagaattttagttgttatctttagttttaaaagaatttatttcatgactgagttagagtagttcactttcttctgtttattattcttgaaaagtcgtgcaacttcacaagagatcctattactaacatactcaaccaacttgccagattgaagttctatcattgagaactatataattacagggcagggttaatggatgcactagatatttcaacttgaaatgtaaatctataagtaaataaaatacctgtaaaatttaaccgatgttttctgagtaatgtctgtgatgaggagatcatcttatcaaaacatttccggcctcctttgattcattatagtgttgcttttaatttaaatcacttacaataacattgaagtagtattggttttcacctatatgtatcatatacatagtgtggcatacttaatttaatttctaatgaaaagtactctgttacatatattttttcttcgtaaagttctaacatataacatattactgatcacgcaggcaacaatctctgtggttcacctttaagtgc

SEQ ID NO: 108762 - DNA, 728 bp, Aquilegia coerulea
  Intron number 1 from transcript AcoGoldSmith_v1.012669m (l ocus AcoGoldSmith_v1.012669m.g) derived from phytozome v7. 0 (chr-ID scaffold_18; pos 2145506 to 2146233)
tgaaccttgggatcttccaggtaattttctgactcatgatgatcaacacttgaattcattaatgaacttgtacatcttctccaaatttatttgcatacaatttctttaagttaattttgttagtttcaattaactctatagtagtttaggtactatatatagccacagacacaattattgtccagaaacaggttcgtaaggataccattccatgatcgatccatgatgatcgataatgatccatgatatataatgataaccgacttcaacaaaattcaataaatcattttaatttgcagaatctaaaagactgattatcatttcatatgcggtcttgtggaatgcatatcatttaatattaaaatttatgaatttgtattcaactaaagaagaatgagactcaaagcttgtgtctgattaagcgacatgaaaatatgatatacacataatctaacctaactttattacagctagccataagttatctcaagttttcacacttccctcaagttttgtgaataataaccttgctgtctaaatacacacataatctgagatatgtgaatcaaacctttccttctagatggtatgctctagtactgaggagtggcttggggaaccccaaacaactgaacaagtttaaattacaaatgtgactttcagtaaaatcctatctaatactttctctttttgatatgaattgttttgttcttgtagggaaggcgaaa

SEQ ID NO: 108763 - DNA, 793 bp, Aquilegia coerulea
  Intron number 1 from transcript AcoGoldSmith_v1.002343m (l ocus AcoGoldSmith_v1.002344m.g) derived from phytozome v7. 0 (chr-ID scaffold_6; pos 7967451 to 7968243 reverse stran d)
gattgttcaagctttcacctttaacctcattcaaggtatgaatttctctatttttcgttattttcaatttggttatctcaatatgttgttttaatgagatcttttgattttttttccacctttatgagaaatttgattgttttttctgacatgggtatttagatttcacttgttttggtaagtttatggatgttattggatatctgttcagttgtatgattgtggttgtaggttatttaattgtaatttttcttcaatttgatggatttaagtggaattcatgattttcaatcaatgtgtttcctttttaaatgctatggtagatagtatgtttgatggctgttgcttcctttcagtttgtgttggttttgtaccacactgcttatttacatggtttgaattcatggggtatttatcattaaattcttttggcgatatagtattatgggaattataatatcatgattacatttactgattttggaatttctagctggcatttactttaaaccattttttttgtatcccctttatctcagataatacaatctcgtcattttgtaatagtgtaatgctagttttgttttgtttccttcaccgtttacttccttttctttgtttgatggaaatacgaggtgcctaaattcttttatgtagttttcactttaaatggaatttgggtttatgcatataaaggatatttaatgctatgtcatgctatttattaaccataatgttcatttgatccacattttcaggattgcaaagcacttagtttctccgcatttgtttg

SEQ ID NO: 108764 - DNA, 533 bp, Aquilegia coerulea
  Intron number 2 from transcript AcoGoldSmith_v1.024205m (l ocus AcoGoldSmith_v1.024205m.g) derived from phytozome v7. 0 (chr-ID scaffold_27; pos 2086478 to 2087010)
aagactatctttataacatgtgtttttgaacaatttggaaatccagttttgttaccaaagaagtctgacaaggtttactccatccaagtctgctgcaaccaagtcacctaagaaagcttgaatggttttagaaatgagtaatactactaggcagatctgttatctgtagttcttgagagtttctgttttgtatgtaagtttgttgtttgttgtttaggttttaattagatgtgaaggaagacgaagaagaagattagaaatgaagaagtgtgtagtttgttcagatctggttctatatgaatgataaatttctggttgctaaatagttcttgttattagttattacttctgtttttgctcctcaaaagatatttttcactaataattcaactttccaaatcaaattgacaggcgtgttgatctagatgttccaaacttcgaatgccattaagtcttgttgtgccctaattgtgcccaaacataaaaaaggaagagtgacattggaaagtttgatacacagatacagtacttga

SEQ ID NO: 108765 - DNA, 859 bp, Aquilegia coerulea
  Intron number 1 from transcript AcoGoldSmith_v1.002957m (l ocus AcoGoldSmith_v1.002957m.g) derived from phytozome v7. 0 (chr-ID scaffold_1; pos 276218 to 277076 reverse strand)
cttacgcatctcatcttttgcgtcattccaaaaaggtattcaatcgcttttacttttttttttttttttttttgattttgagtttgatgcaattctaatccgattcttagaagaatcagatcttaatactattagtttaaccaattttaacctgcatttgattcagacgaaatttctattgttgaaacactagtttgattttaatttgtgtatttgattgcttgttgatttcaatatgaattggatggaagtgaaagaggaaagaatgaactcacacacaaggacttttcgtttttttttttttttttttgaagtttccaagttataagagaataaaggatggttttaagtaggatattggaagtaaaatcagttgtaataacgatcaatttatggagagttataggattatattgttatgtaactttaattgatgtacttgtttgatgaaatgaccaagtattgagaactttgattattaagattgtttgatagaatggcgaggtattgaaaactaacattcttttgaatttttttgagaggcagaattctttagtttctttagttgtccatactattcttctttttttttattgattatgacatgataacatcatcaagtgatcttggatagcagattcatagatatttgcctgacaacatattattcctcttgattttgccataattctgtctcatggtcatacttatatattattttctctagaaaaaaccctgaggttttatttgtattacttttggcacttatgttaaaccagtttctgctttaaaaatgttatattgattattctagattttctgatatgatttctggtgaaatgtgtgctacagataagaa

SEQ ID NO: 108766 - DNA, 671 bp, Aquilegia coerulea
  Intron number 3 from transcript AcoGoldSmith_v1.010664m (l ocus AcoGoldSmith_v1.010664m.g) derived from phytozome v7. 0 (chr-ID scaffold_72; pos 755052 to 755722 reverse strand )
attgacaatattgagaaggtttgtgatttagtccgtgatcttatatacttctctgggtgagcaataaaatctgcttgtttgtatgttttaccggacaggcacataagtcattgcctaacagcaaaaaatactatctaacaattttaaaacttagaaacctatgcactttcttgaaaaagtatggctgactaacagaaggagacaatgatgttaattctgagacagaatgccttagtggggtgtagtggtgtaaaatatctatatagtttcttttccccctattaatagagattttctctatggtgaaaaatcttacgcatgtattggtttctactgctgaccaaaaaattgtgctatgcctcgtgatatttcatgggatcaaccccctattgtggttttctctgcgtgtaagcattattgtgtcttacgatcctgtataagaaggtttacttttttttgttttttcacttgatagaggtctatatgatatcaaagatagaaacaagtaggttaacaggcctaattatgaaaaaaatcctcaggtttctgatcttccatgtagctacgaagtgatgacatggatactctcgaggttaacacaatctattgaattactgacacatttcttttcttcaggtcctggatcgtggggagaaaatcgaacttctggt

SEQ ID NO: 108767 - DNA, 640 bp, Aquilegia coerulea
  Intron number 2 from transcript AcoGoldSmith_v1.005171m (l ocus AcoGoldSmith_v1.005171m.g) derived from phytozome v7. 0 (chr-ID scaffold_108; pos 1531 to 2170)
ttgcaaagcttcaacgatacttcaattgcggaaaagtaattaattactagtattatttacatacttctttttcttcttcaataatgcatgatatgattactatctgagctgtagaaattgttattattggttaaatggagatataaatatccattgtttgattgatttatattcagtaaataaagacaatcgttttcaactcgatctgtagaagttattaatattgattgaagatttttcctaaatgtggcccttttttgttcatatgatgagaatctaccacgtgcttctttaatgaggaaagcaagtaagcttaccgtctttcctgctcacttggcatcttagctcgtgaagatcgaattcttttactgtagactgtaggtctgtagttaaattaaagttaaatccaatctctgaagtctgaactctgaagtctgaactgatccaagcactttccgatctcgtacgaacagtacaagaatacaaagatgctatcaataatacgttttttttttaatgcacaaaaagttatctaaattcccaatttcccatgccaccaaagaattattatggatattgataaataaatgtacgtatatgtttttatatcatctcatcttttatttttataacaatcaga

SEQ ID NO: 108768 - DNA, 902 bp, Aquilegia coerulea
  Intron number 1 from transcript AcoGoldSmith_v1.025359m (l ocus AcoGoldSmith_v1.025359m.g) derived from phytozome v7. 0 (chr-ID scaffold_27; pos 559699 to 560600)
cgttttttaataggtgaacatggactatggtctagaacatggaccatggacatgaacatgaacaatgcagaggcaccctacggagaccaaaatgcacactactacaaatttcttcataccttagtttctttagttctggaattttgaacaggttataatgttttgtttgtagaaaattcattagttatgatttttaggtggttctaaattctgctgaaaatatatacatagggttgcaagaccttagttgggaccttgcttaatttatgatgttttcttggtaaaaatggcaacacatgtttaataatagattcggtgacatctctgacatgcataagaaatttgatagcaatccttttgggtttatttaaaatcccagttaaagtagacatgcatatccacataatttgtttgagtaccatatactcaatatctcatttttgcagtgtaaacaggttcgaaagtctgacaatattttgttaacaattttctgggtacactggactgatttatacctgcacttcataatcgacttgatctcatcaattattttgaagaagttttcgttagatgatgttgccttttctgttcatttattattttattttctttcggttaacttagcatctttgatactttgttgtatgacttgcttggccgttttcttggttgaagtactagagtatgtttgattaatgtgcaatgtatatctcatgacctatgctaaatattacccatagttttgagaaatacttgctttgtttaggatctctctttcaatatgttacccatgttgtaatttttatgtgcttatcgttagtagtttttggttgtcttatgctacataatactcctatttttatggtagtcagttattttactatcaacacgtgtattcagga

SEQ ID NO: 108769 - DNA, 861 bp, Aquilegia coerulea
  Intron number 1 from transcript AcoGoldSmith_v1.002131m (l ocus AcoGoldSmith_v1.002131m.g) derived from phytozome v7. 0 (chr-ID scaffold_11; pos 5337948 to 5338808)
tctcgtgattttgatttcttcttcttcattccaaggtgaattttaatttctcaactttttttttccacaaatcttctcaacttttgctacttcaaagtgtttatttatttgtttgtttgtttgttttgtgagaaatgtgtagtagatttgtgtaattgaactcaaatctttgaaatactactgaaatacatgatttatatgttctccattaacataattcttacttcttttactgcttggttctgtttctacctgtttagggtttaggtgtaatgtcaacaacaaggaacctaaatcgtgttgtttcccgtgttttatcttcttcttaacttcttcttacacatattgtacaatgtattatctatttatctgatttgaattcagaaatcaaaggaacccaagtttcccttttctgggcataaggctgaccttttatcaaattttatttagtagattgtagattcacatttttttaactaatgatatggacagacttttcattgttttttttttcttaagtgacgctaatcttttcaaggtcgactttccttccaaagtatttattatgtataatatgttagtataatatctttgaatgctagatttttgttcttgaaggttcttctgatgtgattcattttgttttcggtggagtttttggtgtcatgagtatgtagacaacatgcacttttctatttcaaaaatggatttcaaaaagctgaaaaagttttctttgtcttactggaagatgccgtgtttgttggttgttaactgtcacatttactgtgttctgatttctttgttgccacgtgttttttctgtctacatttggtaggttgctgctttatcattcacatctaa

SEQ ID NO: 108770 - DNA, 668 bp, Aquilegia coerulea
  Intron number 2 from transcript AcoGoldSmith_v1.006057m (l ocus AcoGoldSmith_v1.006057m.g) derived from phytozome v7. 0 (chr-ID scaffold_1; pos 2455273 to 2455940 reverse stran d)
ttcttagatttggcaaccctaagtgtgatatcaatgtaagtttttttctccatgaaatgtgatatccaatttgcttaattatggtttataagctatgtttactattgaggttatgtagtgtaatgtttgaagacataatcatacaatgaccattgacgacactataaaagttgcacgcatggcagtggcaccagaggtagaggaagatagacagatggttggaccttttatttttagacctttggagtactgtagttgttgagtgcagttagagatctttagttgatgttataattcatacaaaagctctttcttgttaattatgtttttccatatataacaaactttgtgttgattgtcttttaccctttgaatgtgaatgggtagttttgaatgcatacttatccatgaaaactgtatatagaggaagcattataggttttggttttgctgatacacaatgtatcatatttttgaggtttcaaaactaaaaagtataaacctcacaatgcttgttcaaactgaaaatgctaattctacaccttcaagataatgaatttatgttttatcaatatatgtagttatatattattacgaattctgaaagctgagtgccaaagttctttatttcagggtctggagggaagcttaagtgtgagtgactgctc

SEQ ID NO: 108771 - DNA, 1008 bp, Aquilegia coerulea
  Intron number 1 from transcript AcoGoldSmith_v1.027500m (l ocus AcoGoldSmith_v1.027500m.g) derived from phytozome v7. 0 (chr-ID scaffold_21; pos 1644044 to 1645051)
aggtggaatttttcaaattgatattcgattacctggtatccatcaacactctactctaataatctactccacattctctttttttctttttcttacttcctctcaatttcatttcatttttagggctattttatctttttcttacttctgttttagggtttgggggaaaaaatattattgattattgaacaaacacaattgaaaagagggtggaagttataatctttctaagtttatgaattaattgctattttgatcagaaacaaaaaaaaagaaagatcataaaagaaaatgtaggaaacccatcatccaaggctcatagggactttagacttgtgcttagtttcatctctgcgaccttggctagggcctatcccccagactcactgccagtgcgtgtgccttcaactgcatagcttggtagtgagtttgtgaaaatacatttcctattctggtaaaattgccttcaatacagaagaatattggtattgtggaaggacacatattgcttaactccacttagtcaggtttaccattttattagaattatacgaccagtgtctccacactacagcacttgtattgtgatcaaaaagtacctgccttcatacttttggtgaatataagaacctcacgcgaggttattagttcagtgttgatagaactttctattagggtgtactctaaaagcatggaatcataatgatgcctcaagggtcccattcaccatcctgagtcctgttacaatgtgagtcagaatgtcagatgcagagtaaaagcacgcagtgggcagttttatgcccacttgcacccttttgtttgtatgttatgttcttgatctgtttctgtgggtagaaatccatgatatagtacataaacatcatctgtttgatcttaattttgcaagctggactaactaatcaagattgaaaaactaaaagattcttgtttctgacatggatgttggtgactgattttgcaggtggatacccattcgagcctccaaaa

SEQ ID NO: 108772 - DNA, 861 bp, Aquilegia coerulea
  Intron number 2 from transcript AcoGoldSmith_v1.009119m (l ocus AcoGoldSmith_v1.009119m.g) derived from phytozome v7. 0 (chr-ID scaffold_15; pos 2627566 to 2628426 reverse stra nd)
tttatattgcaagtgttactaaatcgtgttcagaagtaagtagtctttctagagatttctcttcttttttccagttttgtgcaatgatcactagttaattagttgaatttgtatccattaataataatttgtttttagtatataatatcaaacattacagtaatcatgtcaaggatgtgaaatttgttgaattattagtttgagtactaatagaaggttaatctttgttcacaatgctaaatgccctagttgttgaagaggggaagatcaataacttaataagatcattaaaaaaatgtcgcgttttattagaacccaagctataactttatcattatgcctattgttaattcaaattatgttcattaagtaagagggtgacactaatccaaccattcatttgtaaacgaaactttgatctatgtcaagcaaggccaaacaactcatttgggtttgtatgtattatgtatatgtgcttaatttcttgcattttatctttctcaaccttaccctccttagtctttgacatgtacatggtggtagtcttcatcgtcttaccccctctattgcaatgtgcggcattttgttggaaacaagtacatgacatttcgagtggttcaggcctgtatagaggatgttgattatgtggttttaaaggattgctacacgttttttaattttaagaaatatttcctttagacactgtgtgttagaagtgtgaatggggttctattatgcaagaatataatatttctttgtttttttcttgagttgtttaaactttattctgataggttaatttgccattttggtatcatttttgcagtatagataaaggtgttgagttagactgtcattctg

SEQ ID NO: 108773 - DNA, 710 bp, Aquilegia coerulea
  Intron number 1 from transcript AcoGoldSmith_v1.008695m (l ocus AcoGoldSmith_v1.008695m.g) derived from phytozome v7. 0 (chr-ID scaffold_7; pos 4990026 to 4990735)
tggcttcttgtcactccctcactctcctcctgcaggttacatactcttctttctcacgagtcccaatttcttctttttctgtgcttttaatgttgtttattatatatataggctctgagcacaatcgaatgttgggatttttttagtttatcagaaaaccttaaccaaacaaacaagtaacaacttctcaatccaattgggttgaatatcaaattcggaaaaaaaaaaaaaaaaaaaaaacccatcttaaatcaatttagcaaccaatatagaaaggattttgactgtagtttctatcgatttttaggcattaccagtactagtactactagctattctgtcatgtgttgctttatttcagtatatgccaggcatatgttcagtttaatattatagtttatcgaccttttataagagtaatacaaacaaaatttataagcaaatcgaaatatgtaaaagcaatataatagtcatttcgaatcagagcctgacctttactatatagtcatttcaaagagaaaaaatgtggtgatctggatcaatttaaaatacttattttctattcatcggaaaaaaaagaaaataatttgctaagggattcgtccgtatgatgtagcataattagtaaataagagctgtatttttcttctgaattatttaaagttaacattgcagaaagtgaggacgagagagtggttagagagttagcg

SEQ ID NO: 108774 - DNA, 599 bp, Aquilegia coerulea
  Intron number 3 from transcript AcoGoldSmith_v1.011189m (l ocus AcoGoldSmith_v1.011189m.g) derived from phytozome v7. 0 (chr-ID scaffold_30; pos 2009378 to 2009976)
aaaaggctcttagtaaggttagttaattaattcacttcatgcacacaacaacacttagcagagcaagagtgaatttattgacttgttaagtgtaagtggatctttctgaatcatgatcgagttagttcttcccataaaaatggcaaatggggatgatcaattcatgaaacaaattgaatagaaattataaaattcttcattacgcccataattcatttgggattcactcactcacatgaactgcgaggtttaaaattgttcattatagcacttgctttttgaaccccttttctatatagacataatttggttatctagcgatatatttgctttcttttacgatgatgaaattcttatttattggaattaaaaatccattttgagaaggcattaaaggtttataaaaaatcaatctaagatttgaagttttgaaccctataaaactcccccatggggatagccctcatgtaattaaataattatttaccccttgcatggttactatcaactgttttttccaatttttggttgataattaaagtgtgctcatcagtcatctctaacaagttgttaaatgcaggataccgctgacttgttca

SEQ ID NO: 108775 - DNA, 627 bp, Aquilegia coerulea
  Intron number 1 from transcript AcoGoldSmith_v1.001620m (l ocus AcoGoldSmith_v1.001620m.g) derived from phytozome v7. 0 (chr-ID scaffold_10; pos 1684982 to 1685608)
gtactcaaactggtactgctgaaggttttgctaaggtaaaattactagtttttgttgtttaaagttgtaaattttattgaattttgggttttattttatgcgaaaagttggttttagttgtttataaggtgaaattgtgggaaagtttgaatttttatgtagtagtgtaatttgataaaaacactgttttattgattggagaagttgaagaagaacttgtagatttgttgagttagtatattttacatggtagaatgagtgcagagagcttgcgatatatttaaattatacacatgtttaggcaagtttagaaaatggtattatgtttactacttctatggttgagttacactaataaatatgtttaggtagatttgagctggaattgaatgtgtaattgggcatcttattgctttgatagggtttcttactttgggctttgaacttagataatgtcgatattggttgaactagtttaactcggtgtagcgtgtgtcatgttaattcaaaaatgtcttgatattgcctttgtattaccgaatcttgtatatgccttggataagaagttgaaaatgttttcatgtaaaattttatgacaggcattagcagaagaagttaaggctagat

SEQ ID NO: 108776 - DNA, 675 bp, Aquilegia coerulea
  Intron number 1 from transcript AcoGoldSmith_v1.017969m (l ocus AcoGoldSmith_v1.017969m.g) derived from phytozome v7. 0 (chr-ID scaffold_12; pos 5649107 to 5649781)
gaggcggttggaagaagaaaaatagtttttggtaagttagggttcttgtttggaagtgattatcttctcaaaattttcccgccaaaattaccctccaaacggctacaaacacgtgtcctcttttcgttgtatgcacaaatccatgtttaatctcagccgtacatgtcatttagttggaaacaactgttaagggtagttttgtaaatacatctgaataataaacggttgtgatttaatctctcatttctagcaaaatcaattgttgtaatttttatataggttattgtgaaggggtcacatcagcttgtacttggtcaaatcaaagcaaaaagttttgtcataagtacaaagggtagtttaggtaagaaaaaatctgaaaagtgtaaagtggtggggtaaggtggctgtttgggaagattacctctcatgactcatgagtggctatttgggaagaagcacctaaatgtggtggttttttgagaaatttcccttgtttttgagtaataaaaattaaaataaccgtgccataggcacgggttatcattagcgtatatttataaaatcaaaagtcaaatgttatagaagaggaaaaaaaacagagcaatgaacaaactgtttgattgacactgtcatctacaagactcaagaatctatcaactcattcaaactgctcta

SEQ ID NO: 108777 - DNA, 621 bp, Aquilegia coerulea
  Intron number 2 from transcript AcoGoldSmith_v1.010704m (l ocus AcoGoldSmith_v1.010704m.g) derived from phytozome v7. 0 (chr-ID scaffold_9; pos 396776 to 397396 reverse strand)
ttctaagtggtttgagggattacaaggcagatcaggtttctgggatttcccccctttttcattactgatgattttcattttctttttttttatgtctttttgtccaatatttctttgttcttctaataaagatgtgttcacatattctacaaatctttatttcacagttgtgaactaaaattgtggacttagattacttgattattaatactcaatgattatatatctaaatttagatccagtcagaagtagatatcatttgatatatggggactggggtttaattgtcgcccaaattttgaaagattatacataaaccattttgtgacacacactatgggctatatatatcaagtatacttgtgtgtaaaatagcataaattaaccacttagcacggaggtgcccctaggttcagttaattattcctttggcgcctgtaaactgctttgtttagggaaaggttgttattcctataggagatacattagtagatttcttcacatggaaaattagttgtgtgtagttggttttgaattatccttgacaaacgaatttgtcacttgaagaatatttttcttttatcagaggagaaagaagcaaccaacagaaggaaactggtt

SEQ ID NO: 108778 - DNA, 1015 bp, Aquilegia coerulea
  Intron number 2 from transcript AcoGoldSmith_v1.021909m (l ocus AcoGoldSmith_v1.021909m.g) derived from phytozome v7. 0 (chr-ID scaffold_6; pos 7836718 to 7837732 reverse stran d)
actgcgcaggacactatccctaataagtgtatatggaagataaataagttttcaaagttgcaagccgaatattattactctgataagtttagagttggcgggggacttgatatgaaaatggtgcgcgattagcatatctgtatctgttttctactatataaataaatcagttgatgatcataaaatttgtaaacggatcatctctgtcatgttaatggcatgagacctaaagcagactatatgatccagtgagacagttcttaccaagcagactatagtatgtacttttgacagttaattaagtttcttactgaaactgggattccttaggtttacaaatacaacttaagagtaggattcttaatgctttggagttttaagtccgtttggagttctatgtagtatgttttagttttgtttataaataaggcttgagattgagagagacttttgttaattatttgttcttgaagttaaggtaacatggtagggatgccgtgtattacaaaacgagatgcaccaccaagtcactttatattcaagattaaaagcttttccaaactttcatcatcttcttatttcaagtcgagtgtgttttcaaaagatacaagtcgagtgtgtttgatgcaggtgattacaagtggaggttggctctttatcccaatggaaacaagaacaatgataacagagaagaagaagatcacatatctttatacttggtattggacaagacatgccgtaatattcagaaagagatactggtgaaattcagtttgttcgcgtttgatcattgtcaagacaagtacttgtcggttgagctatgtcgcttttacaaaatgaaatctgagttaggattcgacaagttcttatctcataagatttttaaagacccttcgaatggctatctgatgaacgataattgtgtgtttggagctgaagtttttgttatcaaaagtacaatgcaagggcaatgcttatcaatgatgccagtgaaacctgtacctttgaagtatac

SEQ ID NO: 108779 - DNA, 731 bp, Aquilegia coerulea
  Intron number 3 from transcript AcoGoldSmith_v1.000627m (l ocus AcoGoldSmith_v1.000627m.g) derived from phytozome v7. 0 (chr-ID scaffold_28; pos 1499307 to 1500037 reverse stra nd)
tctttgtccaggtgaatgttagcttgaaaatagttgcatttttccaaaagttaaatttagttgattgaatgtttattaagaagtaatctgcatctcttaagttaaagtgatataagatgacaacacttttaaactattaagatcattcaagttggaatccggagacttaaaattaacaaaaaactaataaagatagttgacacgtctcattgaagtaattgctgcctattccccaatacaacatgaatcacgattcatgaatgctcctttggtttgaacaactctgaaaatcatgtctattgtgttagttaattttataacatggaatcaccagaactgagaatctattatactaaagatgattaaaacttatgagttgaccatatatcgactaatacatatgctataagttttttttttgttgaatctatgtttttcttccatcattaggattctcgagagtggtcatcaggttttagtattacaatatatgtgaaagttacttttcaattttcatataatggtgctttagtgaattcagatttggttatcatacttaatatgattacccaaataggccattcacccattcgtcactcaattagcaatgtggtagctgacagtttgatataatgatatacttatattcattacatgggctctaatcgtgctagattataagatgtatatgtctggttatcagttcttaatgttctttttgcagggggata

SEQ ID NO: 108780 - DNA, 344 bp, Aquilegia coerulea
  Intron number 3 from transcript AcoGoldSmith_v1.026881m (l ocus AcoGoldSmith_v1.026881m.g) derived from phytozome v7. 0 (chr-ID scaffold_37; pos 77992 to 78335 reverse strand)
tctcttttagaagccccgctggagaatttggaacggtaagagaacgttttcggttagcttttctttgacttggtgaaatgtaatcacctacacattttcatgaaacacatctccatatgatttacacatagtttgcactcacgaacatttgctttataccatgcagtcattagccttaacatggtaagagccgaaggcccctaccaaaaaatgaagaaatatgataactttaatgtcaatatttttcttatgaaacacattccatttaccttttcttttttttcgttctcgtaactcctttctgttgtccaatcttatgttaaacagcgaggccttctcagagg

SEQ ID NO: 108781 - DNA, 698 bp, Aquilegia coerulea
  Intron number 2 from transcript AcoGoldSmith_v1.012859m (l ocus AcoGoldSmith_v1.012859m.g) derived from phytozome v7. 0 (chr-ID scaffold_10; pos 1947746 to 1948443)
agtggagcacttcgagatacgtgaagtacttcgctgtaagactaattattattgtatttagttgttcattttgaattttatataatttcacttaattgagttagggtttatactgagattggtgcattttaagttctgaccttgtaacatggctaatgacaatacttcaaaagatgtattgtctatgtagagggaatagtagaccatttaggaagtattagatgttgtcgtcttttgcagtacagttgggatgcattctagtcttccagagtattgcttatagatattaatatgtccgaggttttgagagttttcgttgacattatcttttgtatttatacaatttatagagtttaagatatgctttgagtgttccatattaggttttatactgttcaatctttcttctatagtaagcgtgcaatgtggtcatattcattttagaatttttgtgggttgttcacttgttttttactggatgttaggaaaattggaaactgttatattgttattcggccaaaatgccagcagcattcctaatttttatgttcttggtttatagcctgttcgattcttgtgttctactttctctgatatttgtatcgaaaagatagttacctagtttttctactgagccaaatgtgattgtgaaacaaaatgcaggtatattacacacgattgtatttcacagggcttta

SEQ ID NO: 108782 - DNA, 1046 bp, Aquilegia coerulea
  Intron number 2 from transcript AcoGoldSmith_v1.004036m (l ocus AcoGoldSmith_v1.004036m.g) derived from phytozome v7. 0 (chr-ID scaffold_15; pos 3562232 to 3563277 reverse stra nd)
gaacaataactcatctctcactgttggaactagaggtaatttaatctctcagattgacttattttatatgttattgttattgtatgggatgtttatttaatttaacttgctctttgtagggttcttgctcatatgttgtttgtttccttcagtctacgaataactaaatatttagtaattctagagtatattatattgaaccgatgtatttttcatgtattcccttggtttagatttttgtttaatggtcataaaacttttagtttctcgttggattgagtcgaaattcagcttgatttttggatgtgggttcaaagttctctaggctttgtttttaaaaaaaaatgacgaagattttgaacttttgaataaatcactatatggatagtcattctactttttcatggttatattatcattctctgtggttacgcatcacaaatcaagatgtattttggtgtcaagcaccaccagatttgccaaacatttgcaaactttttgttagttttccacagcatgcaggttaactcagtttttttttttttatctagtccatattaactcttgctattcttccatttcattgttttgtatttttcactgtcttgggttggtattggtaattgtaaagcctgacatattgaagccacatgtgtcttgactcttgatttcagtgttgttaaacaattcttgctattagtataacatttcaccttttctctgattcggtaaactgtttaccttatagcaggttgttgagataagaaagtttttcaaatataagtgtcataactaatttagttgcaaaccttcattttctttttcttgttattatccaaactggaacttacatcaagttaaaaatgactatgttggttagggtacttataagcatatttgtttccaagagagggtttaaagtacttttgttaatggaaaatagacataaacattatgttttttttcttacctgattgcaatatcttttttaatcccgcatctgtttgtcaggtcctattctcattgaggattatcatctggtggaa

SEQ ID NO: 108783 - DNA, 503 bp, Aquilegia coerulea
  Intron number 1 from transcript AcoGoldSmith_v1.004036m (l ocus AcoGoldSmith_v1.004036m.g) derived from phytozome v7. 0 (chr-ID scaffold_15; pos 3563305 to 3563807 reverse stra nd)
gatccttacaaggtaatctttttcttcttttctttcccttcttctattcttcaatccatctcataagttttttttttttttttttctagaattgtttgaagcttttttttgtattgtttttgagtttttttaagctggtttttgatgttttcaatgattagttttatgttgattagattttatgaattgggttttgttttaattagattttatgatttgagtttttgttttaatgcttagctttttcatcaaaattgaatcttgccgagtttcatgtttgttctttgtttttctttgtttatggtgtgttttcttcaattaaatcagattttgacaatgggtttttaattttaagctggatttttcattaaattttgaagattactctgtttttgttctttcaaagtttgctgtgtttatttgaaatttcggtttgagaattgttaatgatgtttgattggatttcagtaccgtccttcgagcgctttcaattcccctttctt

SEQ ID NO: 108784 - DNA, 583 bp, Aquilegia coerulea
  Intron number 3 from transcript AcoGoldSmith_v1.010203m (l ocus AcoGoldSmith_v1.010203m.g) derived from phytozome v7. 0 (chr-ID scaffold_9; pos 4286429 to 4287011)
aactactagtaccattgaagctagaaaaaaacagggtaacattaatgactactcttaaactttttctaatttttcttttttaattttagatatatttgagctgtaaataattgggattttattttaattattataaatctttttttggttttctttttcccttttttggtgataaagttggatttgttttggtgaactaaaattggatttttctgtcaaaaactcaaaaccaataaatttttatttatttttttagtccagatatggtttcttaaatcttttaataaatcaaatttaaatttgttattttcaggtacagttcattatgttgttcagtttatattcttgttatttaatgactttggaatcttaaatatgtttttcttttcttgggggttttgctaatatttgatttgatggatttaaaactgagtttagcatttgatggaaccttaatgaggattagacagaagaaaattatctgttaaaaaattacaatacatttcattaatattgagattgtaaaaggaatttatttttcagtagttaatgccaagaattgaaatgatgccaggtgtcagaa

SEQ ID NO: 108785 - DNA, 855 bp, Aquilegia coerulea
  Intron number 4 from transcript AcoGoldSmith_v1.006620m (l ocus AcoGoldSmith_v1.006620m.g) derived from phytozome v7. 0 (chr-ID scaffold_96; pos 140271 to 141125)
agcagcggcagaggtagacctacattatttatttgtgctgccttttcaaaataaacaattactctaaaggagaccacatggaaatcttttggtaattttgattcacttgatagaaatccttacttttaagtcactgtggatcatatactcttctgtatacaatatttgaaaacaaggaataggacatgtgacatgtctgttattacatgtttgtgtgcgagaggtgataaatatgactgaaacgttaataaatataaaggtaatatgccagctgcttgattttttttgagtgaattggttggagtgctgaaatttgtgttactgtatgtctatctgtgcaaacaatttccatgcacatgcttttagatgatatttcgattaagttatgtagagtgtagacatgtttgatgtggaattttgggcaactcacctgatagaagtctttacttttaagtcgaactctggattatatatcgtgaaaacatagactaggacattgtctgttattacatgtttatatgcagtgaagattaatatgatcgaaacattaaaaggtaccatgccagctgcctaattttgtctgagtgaactggttggattgctggaaaagaaacctgtttctgtttgttaatataacacagtatttcttagccagttaacactttgtgctgaagtttgtttaactttatgtctatttaagtaaagaattttcttggacatgctgttagctgatatttgatatttcaatgaagttatgtatattgttgacatgtatgatcgcaattgtaaatgaggtgggatttcttattctcattataacatgtgtgatctttatgtcatagattatcatctgac

SEQ ID NO: 108786 - DNA, 679 bp, Aquilegia coerulea
  Intron number 1 from transcript AcoGoldSmith_v1.014473m (l ocus AcoGoldSmith_v1.014473m.g) derived from phytozome v7. 0 (chr-ID scaffold_1; pos 11731091 to 11731769)
gactgcttgctcctttgtcgttggtaataataatatatctatcctcactctctttgcctctgtctaccttttcttcacctgctttctttagtatacgctcattagaatttataagaccaatttgtggtctatttcccctatgtattatggtgtaattgtgactgagttgagcttgcaaagcttctactcctaagttagttttgcttctcttctaccacgtcgtaatcttaatgtaaggggtttcttcttttttgtaatggctataaatacttcctattgttgtgggggtagcttaatcagacaagtttgtaacaaaaatggttacactccattagatttttgagttctcaagattcaaagctaggaatgtacatccagcaggggcagagctaggaatcagagtatattggaaatttctagtcttttccctccgaatccattagattttctagctcaaggactgttggtgatctgaaaatttcagggagaaaacctcatgttcacagggtgaagtcaatcttttcgaatcctgatatataattgtatcggactatataattaagttcatgtataaataaatgctgtctgcgtatatattctttcaagattatgagcaaactgtaaataactaaatcaaattcatatttacagcattttattttctctctaaatgcagtgt

SEQ ID NO: 108787 - DNA, 918 bp, Aquilegia coerulea
  Intron number 4 from transcript AcoGoldSmith_v1.003041m (l ocus AcoGoldSmith_v1.003041m.g) derived from phytozome v7. 0 (chr-ID scaffold_27; pos 839605 to 840522 reverse strand )
caacattataataaagacggttcagttaataacaggcaagaatgatcttcccttgttgcttttgatgtttctagtcattatatattgtcattattgtatttccttctacatgttccctggtgtgtaaactagtgtgatatctgctcttcttttaaatggaagtagaagtagtaattgtatgtttagtgctcagatgttcaacgctactttatagttgatcaatcaggttattggaattgcttgacattaatgcatagggataatgatcacaacgacctcaaaaaaacttcccaattgcattgaaaatatttacgtagattagtgaaacataacttgcacaaattatatacgagtgactgagtatcaacgttgatttcccaaagcataggatttaacatattgtatttcttcagttacctctgccataattatttatttcacaatccacataatactacaccatattgtagatttgagagaaactttgcattttttttctttgttaagataatcactacactccagtagatatccaatcaacacaggtttgtgggtatgagtaggtaccgggtggtagcctcacgatagatcatctgtttctaattgtagaagaaagagggaggtgtggagaagtcgttaccaattttagctttgattagcaaaacacttgagccatagccttctttttcccatccttgttctacataaatgcaacaccttatgtttggagcatatattttcagatttcatcaatgtttctgatggttggcaaatgattttgcgtgtgtaacataaacagataccagtgtttgtttttctatatgtgggagaactagattctctcactttctgtttgccatacgtacgtttagtttctagttatgaaaatgcaactcatgaggttttttccaacagtcg

SEQ ID NO: 108788 - DNA, 795 bp, Aquilegia coerulea
  Intron number 1 from transcript AcoGoldSmith_v1.003208m (l ocus AcoGoldSmith_v1.003208m.g) derived from phytozome v7. 0 (chr-ID scaffold_1; pos 9362644 to 9363438)
aacctgttcaagttctaattcgattattgaaacaagtaagacttattaatctcttcttcttcttcttcttcttgaaattttaaagtagataaatctagcttttaactgtcaattaactgtctttctacactgtatccctgcttctccttgttttttactatactggggttgtcgtctttagtagtatgtagttgctgtatagttgcagtagtaattgaaaatggtagtaattggtatttgattatgtaaaagctattgtgatagtttggaattgcacaatgaagatcaaagaacaatacattttaatttttaagtaaggaaaacgagattatagattctctgaaattacaaaagagaaaaatttaagtagggaaagcattttagggattttctttctcttaggccaagcaaaagctgtgatggagcttcctttatttcatttccaatttgagcgacttctttgcccatgttttgtacgtaatgttggacctagggagctactgaattttcaattttcctactttttgtttaccactttgtccacaagaacgttttagggctttgataaagttgaaacaagaaaatatatcaaaagaataatagtcaagatagccaaataacaagtaattaaagccttcaaagtaaatgtgcaaggctagatcccaatgctgactaactttagtaattgggataaggcacattcgatgataatgatgagctttagttcttttagtttggaatagtcattcattgatgctttacttgaattcttgcttacttatttgttgcagtggg

SEQ ID NO: 108789 - DNA, 540 bp, Aquilegia coerulea
  Intron number 2 from transcript AcoGoldSmith_v1.009253m (l ocus AcoGoldSmith_v1.009253m.g) derived from phytozome v7. 0 (chr-ID scaffold_111; pos 195381 to 195920 reverse stran d)
gggaacctagagctttcatttatcgcaatttcctggtgagtttcacagcttatcaatctttgagttgattttgtttgtttctatctgaattatatgatctgaactctgaaaatgtatatgatataaaggcggcgttgagttaaatttttatcacctgccagtgtggtgatcttatgattgagattgagtgattcaatgactagaagataaacaagagaattggattgagaaacaaaagatctccaatttaacacatcaatgtaataaaacattttcaatgaaacaaatagatctcacataaaaaaaacaaaacaaaacttcgtacattttacctgttacctagaatgggccattgcagataattacattgaggtaaaggtaatatgtacaagatatttaattttactttagaccttgagaatatacatatgtagttttcagttttttcttgtgcacctctgctatgcttgtccaagacggattgattcaaagagtaaccaaattttgacttctgctattttttgaacagtccaaagacga

SEQ ID NO: 108790 - DNA, 947 bp, Aquilegia coerulea
  Intron number 1 from transcript AcoGoldSmith_v1.006169m (l ocus AcoGoldSmith_v1.006169m.g) derived from phytozome v7. 0 (chr-ID scaffold_141; pos 84615 to 85561)
ttaaaaccttcaaaagatacaaacaagctcttgaggtaattattttttctttttcacaaatatgtgaaaattattagatttgggaaaatgggtttgtttaattatttgatttaaggtttgtttatatcatttgcgcaaatggggttgttgaattaactgcattttccctaaaaaaaagattgtttagggttcacatgaaaggttgaaaaaataaataaatagaattagggtatgttggattcaacttgaattagggtaatccaaaattgagtaattggaaaatgaccttggaaaaattatcggtggctcagggtattaaaaatatagtgaagtgattttccttttacattttatggaaattccattttcttgatttttatatttgtacagataaatttttcgtacgataaattttctacccaaatcaagaagaccattagtgtctaacatgtggtacatgatctcatgtatggtattttggatttggggtaccataagtgtgataggttcaggaagggctatgtcttttaggtgaatcttggtagtgtatatcaattttttttgcatgaagcgagctggggttaggcagatccctaccagattatattaatagacaaaactgttacattctagtgtacaaggtacctgcagcatcctggtttataattgtatccagttgctcagggaagggaccaaagaatttacaaagactttcagtatcactgagtcctgcaagaaaatctgatgccctgttggtttccctgaagcaatgcataacttctacactttcaaactttgctagcaactccctggccatgtttgcaccccttctagacctccatgagactctaatggttccattcaagatgccaactgcctgctttgagtcagaactcagaatacaccctcactttactgtactacttctattgcaggtctctcgatat

SEQ ID NO: 108791 - DNA, 328 bp, Aquilegia coerulea
  Intron number 1 from transcript AcoGoldSmith_v1.004735m (l ocus AcoGoldSmith_v1.004735m.g) derived from phytozome v7. 0 (chr-ID scaffold_30; pos 295430 to 295757 reverse strand )
tgaagcaaattatcttttctttcgatcagattaaagtaagtttattcttcagaaacattcaatctttcaattcaatttcttagtaataattttttttattattaaattttctatatcaattgtttcatatttaggttttctttgttcttcgatctctttattaaacatagtgatttgttattaaacactcgatttatgatctcaacaatcaccagcagtactacacccttagtgtagtgtagtgtagtttgagaatattgtatagaatttgattggtttcgacgaaactttttgtagatctatgtagcagtagcagtaggacttggtg

SEQ ID NO: 108792 - DNA, 511 bp, Aquilegia coerulea
  Intron number 1 from transcript AcoGoldSmith_v1.012216m (l ocus AcoGoldSmith_v1.012216m.g) derived from phytozome v7. 0 (chr-ID scaffold_1; pos 5629646 to 5630156 reverse stran d)
tatcgcgcatttgctgcaaaatcatctactttaaggtaagaacactagataatcttagcttcaccaatcgattcttttctcgttctgttcgatctctttgtgtatgttgttgattaatgttttagagatcagatactttttaaccctagctttgttgattcttcggtttgatttttttttttttttttttaatttctcccttttctggattaaaatttaaaactttaattgatgatttgtttgttctgaaacatcttagtttttgcttctgtattattattattattatttgttggatttagaatttactgggctagtttaatctatacttttccttatataatagttttggtaaccaaaaaaaaaaaaaaacataattgattctgtgtagaaataaaattcttgttatttttatgttggatttcatatggttgttgtattttgtttccttcatgcagaatttttctgcaaaaccctctctgctgtcttccttttctcttgtcttgatcat

SEQ ID NO: 108793 - DNA, 977 bp, Aquilegia coerulea
  Intron number 1 from transcript AcoGoldSmith_v1.006902m (l ocus AcoGoldSmith_v1.006902m.g) derived from phytozome v7. 0 (chr-ID scaffold_133; pos 6291 to 7267)
gctgctttgggtatgtatgacttcttgtattgtttttgttatttatgtttcagttttaatccttgtttttaatgttatatgtttctattgccacttgaatgaatgaatggattctatctttaatgcttttggtgggtttgtggggaagttttttttttcctttctgttgagattgggttgtgatctgaaatggttgattgctacgtgagagaagaattgatgcctctttaaaaagggttaaagagaagagtttctgtcttgctggaagttagggtctgttggatctgattatgacttggtgttttaagaaattacttatatgcccttctctatgtttccttccctacggttctgcaaggattaaaacctgtaaatagattttcaagagtgaaaataataataactaataaattcagtcttttaagctcattcatttttttggtttttaaccaactcagtttgcaaatgttttttttatgataagggtcagtattaatttagtttatgttattgccttttcgaagtgtagtttctaaattctgctaagaagtgtttaggaaggaaaggacatgcaagcaatgctccattttaattttgtgaatcaatgttttaaaccaaaagtcttattgctttattcagaaaatatgatttggaaaaatgaatttctgttggtggtatctgtttccctcggtataactattgaccagtaatatcattgttttggatctagtaaaaacaagaaaagtaagaatatgctacttatttttccccttcatattcgtgcattcaaaaacagtatttagtatgttcaagaaaatcaaacatgaaatctttatttctgtatgtagataaattttttacttgagaagaattttgaactatatcacagttcttgcagcctttatattttccagtttgtttaaggtatgtttccattcactggcttgcaggttcagcaggaattggattcacacctc

SEQ ID NO: 108794 - DNA, 961 bp, Aquilegia coerulea
  Intron number 1 from transcript AcoGoldSmith_v1.015128m (l ocus AcoGoldSmith_v1.015128m.g) derived from phytozome v7. 0 (chr-ID scaffold_60; pos 871468 to 872428)
ctgtgtttcaagataagacaaatattcttttttcggtaaacatttaagattttgatctaaatatactagttttgttgacatatcacatgtaatcatctttattcttgctgtagatatgtcggttaaaatagtcattgaatagtccttgtcatagatttttattgttttacatttcattttcaacttgtctcttggtgtatatatattcaaacataggctgtataaagccttgaatcacaatttataagatcctggggctgcttgtttaggtttggagtcgaatgctttctttagctcaatttttattttattttatttttcttaataaagaaaagttattcattgatgataagcagagcttaatacatcacgaaggaaatagcaaggagtaataaacctaaattcccagttatccattagcaattctgtttcaagcctgtcctcgtcttgtctgtattaaaccgcttaaatcaagatcggaacgagagaatgcacatttaaaccagttttgataccttttctctgactggctatgttgtttggatagagatgcattgtctgcaaaacatgcagtattatgaagaccaagtgcatgaacttatgcaattgattgacgtgtgaaatgtttagttactatctgacttatctttgttagaaatatgattttagttagacgccgcctatgtttccagatgttctgtcgttatatgcaacttgatttataacaagcaatgcatgctatctaacttgtgctggttgccagggtacaatagtgtcggctgtgaaatgtttagttactatctgacttatctttgttagaaatatgattttagttagacaccgtatatgtttctagatgttcttttgttaaatgcaacttgatttttaacaagcaaacatgctatctaacttgtgctgattgccagggtacagtagtggtggctgggagagcaagagctgt

SEQ ID NO: 108795 - DNA, 680 bp, Aquilegia coerulea
  Intron number 1 from transcript AcoGoldSmith_v1.000539m (l ocus AcoGoldSmith_v1.000539m.g) derived from phytozome v7. 0 (chr-ID scaffold_43; pos 316056 to 316735)
ccgtaatccattctcttcttcaactccaaagtttttttttttttttttatttatttaaatgctttgaaatcaaattattaatcaaaaacaacaacttaggtacttcaattcttctcaagctttggttgtgggattatgttggtgagcttcaattcttcttgttttcaagtgttttttttttttaagttattctttgctttattcttccgatcggttgtgttttgtgatctaaagatcagttctttgatcggtttggggttttttgtattttgtttttttcctcttagtttgtttttattcagtagagaaatgataagtggtaattttgttttggggtttggtgtttttgatggtttctctgatgaattcttcagctcagttcttaggttttttcagaaatacttcacttttgtaagctgaattgtggtttttgaagttgaattttggttatttactatttttttaatagaattgtgtatttgaatttgaaattttgtagtggaattgtttcaattttgtattgtgggggtgatgctatgttggggcttttccctctcttttactcagtgattctgctttgatatttttttttttcaatactatttgaaaagtttgtaatccatttggttgttggatgtgttgtaggttataatttgaagggttgctagaaagagattgaa

SEQ ID NO: 108796 - DNA, 424 bp, Aquilegia coerulea
  Intron number 1 from transcript AcoGoldSmith_v1.026695m (l ocus AcoGoldSmith_v1.026695m.g) derived from phytozome v7. 0 (chr-ID scaffold_27; pos 1131765 to 1132188)
gtaaaattctactctctctctctctctctctctctctctctctctctttgggttcaattcattcatttcaatttgactgaattcgatcctaatttgtctgatgaaatgatatatgttttggtgaaatgttttatgggaattcgatagaaaggtgtttctttgattatagtcagaagattgcttgttaatgtttgttatgttttttgggaattgtgaattacttgtattaaaactacatttgattgattatgttcaagtgaagaatggagaacttgaacttctagttaagaaataaaacacaacttgattacagattattattattattattatttttttcccgtgagttctatcattatgtcttttactaaatcttggatgtggaacaggctacaccgtttctagttggagttgcagtagctac

SEQ ID NO: 108797 - DNA, 998 bp, Aquilegia coerulea
  Intron number 2 from transcript AcoGoldSmith_v1.026695m (l ocus AcoGoldSmith_v1.026695m.g) derived from phytozome v7. 0 (chr-ID scaffold_27; pos 1132292 to 1133289)
accaaaagggaagctgctcttattcttggtataaggtaattaagcaccttttgctaaatgggaatggatcgcgtagttactatctgtggtattttgtagcacaaggttgaagctaccataaaatcgtaaagtaataattgcttaggtggacatttaactatatagaactgtaaaaatgttatttttttcatgtaacttatgatatgttgctttgttagggtagaagtgttcaccgctatggttaggtaattaactaaatattatattaatgagcagagggaacaacagttgtccaactgtctgagataacaatgacatagtcgtcttatttcaaaacttgggctcgattgtataaatcatgtttcaccatacatttcaatctataggcatctcgttgatagtccaagtgtcttcaaatctgttcatttctcttcattttgtgcctccttggtagttactactttattgaagttattagcaatgctacaaatatattttaattgtaatatatcattcttcttgtgtatcctttttattctgtcactttactgtcgcaatttgacatctcgtaaagtccattaatgtggaatatgaatgatcctgtgtttggaatatatatacggtgcacatataatttatcatcatgaacaaactactatcagtcaatacctccatatggttttcagcacactttctcttcatgacaaacacaaaacagaggcccttttgatgtaggatgaaacttgtactgtcgtaagttggcttttattttttgtcagtccagtattaggccaggtttaatatgacaaagtattccttttccagttccttgtacttgttaaatgtggataaaactgctctcgttttagacaagtcaataaatctttcatggcactcttagctaatttgatatcatttatgatctatttgatctattccctaattttgtgtttggttgaccagggaaagtgcaaccccagacaaggttaaggaggctc

SEQ ID NO: 108798 - DNA, 1028 bp, Aquilegia coerulea
  Intron number 1 from transcript AcoGoldSmith_v1.009650m (l ocus AcoGoldSmith_v1.009627m.g) derived from phytozome v7. 0 (chr-ID scaffold_11; pos 4126454 to 4127481 reverse stra nd)
gctggaggccgttgattgcaggtataatcattaatctattgcctgagttttgtttgattactgtgtttcttagaactactatacttatttctgttatacatgttcaaattagctgttgcgggaatgagctcattttagttagaagttgaatatctcttacacttcacatgttagatctactgtcctgatcttcagtatattttattaagaagttaaatgttttgcatcctctaccatgtacattttcaaattgaattcctgaattgtttggattttacggacagagattccacactttacatgtttgaactgctgtcctgaattcaatagattttggtttgaaatagtttcgctccacacatttttttttcttgttttaaaattcatgtttccttactgaatgttaaagttaaactggtcatcatcttgttttcgaattatcctttcctccaaagccttggttttatgctagaatgtcagcaacaaggggataggtgcatttattgccaaacattttcatacagtcaagcagcccctctcttttaccagtgatagggaaagcattctagttagagcatctataaacttctttgtagtctttgttatttatatattgatgttgtcttgagtagaaaatatggctgtagtgtgggcctaacttctggaccatataagtaatggtgtgccgatctggttatgatattccatagtctagagactgtcaattgttaaattgactttgatagggagctgggagtccagtgcgacaataataaatgattgatggaggaaaggcaggactagggtaaagcaaagcatgtgaaaatatcgtaattatggattttctcgggcatcggctttgcactgtgtaggcatgataacaatagaatgcataagcttccagattttggtttaatgcttcctgccttcattgactacctttaattcattatctatagtgtgaggtctgagggctcttaggtaagctatgctgtatcatagttgcaggctcgatcaacttcggctgt

SEQ ID NO: 108799 - DNA, 542 bp, Aquilegia coerulea
  Intron number 1 from transcript AcoGoldSmith_v1.002813m (l ocus AcoGoldSmith_v1.002813m.g) derived from phytozome v7. 0 (chr-ID scaffold_9; pos 4871928 to 4872469)
caacttctgcactcattgttcgacatactttcattgtaatgttttcaaactttgtgtttttcttctttcctgtcatttgttgttatgttgttcagtctacatgcaaccaaactccaatcaaactataggcaatttggtatagtatatgacagttttagttcctataagagtttgctctgactgcacccttccttggcacacaaggagcaattggcatctgtgtttctgattcggcatttctgtcatagtgtaaataaggcccacttgtacacctataatgtaccagaaagtgttatttgttttctctcgtttgtctaatattaaatcaaagtgcacttctgttctgtttatcgcagcctctaattatccacacccgagttgaaatctaggaaatcattaaataggctgattttttagcgtactaatgttctgttagaggttttgcctagctaaaaaataatttaatttctgtttattatcatttttaaaacaaattttgatctgtttcattctcaggtggggaaccttactctacatcgact

SEQ ID NO: 108800 - DNA, 988 bp, Aquilegia coerulea
  Intron number 2 from transcript AcoGoldSmith_v1.002813m (l ocus AcoGoldSmith_v1.002813m.g) derived from phytozome v7. 0 (chr-ID scaffold_9; pos 4872561 to 4873548)
atcaatacctcaccatacaatattacccttcactggcaagtctttaagctggatgattaatagataataaagaaaactataatgaagtataatacatagtatagattaggggtggcaaaatgacccgcaacccgttaacccgacacgaacccgacctgagataaacaggtttgggtttagtcttatcgggttttcgggtcattttgacccgaacttgttagacccgtttataaacaggtcaggttcgggtttgaccactaacaggtcaacccgaaacccgttaaaaattaatattttttattttaagttttgaaatcatctctccatccctcatttttcatctcttttcaacaatcgttttctttcttcttctttaactatgtagaaatatatagtagtaatgaattgattattaaaaacttgtttgctggtggttcttatttttctatatcaaagttagagattgtgtgaatatttttcttgtttttcaattgatttgttttgggtttaaggagtatgatgttttaattaatcaattgaaaccagatcggtgttttttttatttttaaaactcaagtttgatgctcctaattatgtttataattggctttaatgttaacatttttcatctctatgctctttatagtaattgtttatttcactgtccccttatttttcaagaatattttttttaattttgtcttttactagtagttttaatttttgatgaaattaagttgattaatttatattaaataaatctgaagcgggtttaaacagattaacccgaacccgacctgtttactgtttattaaacaggtcgggttcgggtttagaaaaaaatactaaacaggttaacaggtcaggttcgggtttagagaaaaaacacatcaacccgttaagacccgacacgaatctgacacgacccgacacgattgccacccctagtatagatacccttcctagctgacttgtttcttgtgcaggc

SEQ ID NO: 108801 - DNA, 891 bp, Aquilegia coerulea
  Intron number 3 from transcript AcoGoldSmith_v1.015692m (l ocus AcoGoldSmith_v1.015692m.g) derived from phytozome v7. 0 (chr-ID scaffold_10; pos 4111116 to 4112006)
caggctttgaatgtaagacttttgaaatggtgatcactttaaagtgacatatgatgaaacttttacagtttttttttttcttccctgcaatgtttgattgtagagttaattgttaaattctgatttgaacacattttagtttctgctacaaacatggatatcaatagcgcactacaacattacaattgctcacatgatggccagttggtcttgtaatgtcactatattataattaattaagaaaaacacaaaagttaactaacaacaaaggaattttatgcagtgagggaaaagaaaaccacttaggtaaatctttcgttgttggatttaaattctcccatgtccttccacttgggaagacttcccaaaataccatgttttgtttagttaccttggaaaaggacaatcgtctgatagcatgatagattatttttaacttgagctgctacaaaacattgcaactacagatatcacgaaaagtaatttaaatgtagcattaattggactatgagtctatgactatacttatcatctcaaatattgaaaaaagtattagtaaattgtatttcttcatttgggtccaacctaaaaccagaaaaattcataattgacggaaatcaacttgttccgacttttttttttatctgctacaaaagaatgtcacagttgtaattaagctattagttataaaaggtataagtaaccttgatattatcacccttcatttgtttgtttattactttatttgcttcatcaccctgttggtttacctggtgaagtttgcattacctgataaaattcatctagacaattttgtttctctaaatttcttttgattataaaattctgcttacagggactggtgtttgaccttgagaagcagtcaacttt

SEQ ID NO: 108802 - DNA, 518 bp, Aquilegia coerulea
  Intron number 4 from transcript AcoGoldSmith_v1.013386m (l ocus AcoGoldSmith_v1.013386m.g) derived from phytozome v7. 0 (chr-ID scaffold_10; pos 2120633 to 2121150)
ttagaatcgaaaactgagacacccacagaaatcaagtgagccctcgacacatagttcttgttgtttcattttagtctctttgatacaagagttttatgtacttgtttggtcacttagaacaggagttctcttattatcccgcattattatgcattatcacgctaaatgcttcctgaagtggttttcttcatgtgatttgtttgaatcttgtaactgtccaaacacatgtagattaaggttcatactttattctggtgggagttattctttgaggtgtgatgcatgagggccgcactatgctttggccttgactagctatatctatgaaaataactttagctttaagaaacaaaattgccctcgtatcatctcaaagcacacatcttgtctcaaagaagatgcatttcatagaatttgtgctgttgcagcattgtatgcaaattcatgtgtagcctctaagctacacttgtcatcgtgtaacaaatactttccttttgtaggatttctcaaataccagg

SEQ ID NO: 108803 - DNA, 954 bp, Aquilegia coerulea
  Intron number 1 from transcript AcoGoldSmith_v1.019960m (l ocus AcoGoldSmith_v1.019960m.g) derived from phytozome v7. 0 (chr-ID scaffold_21; pos 1034943 to 1035896)
gtttctccacctcttcatgtaacttggaggggaggcgatctatatcagcatggtttccctacattttttttttataaaaagtttatgtcccaattttctctttttccaaatgatttcactaagaaagcttacttttggggttcttagaacgtatcaacattatcaacatgagactgaggcttctgttgccatgatctaacatccatacatcacatgacatcatgctacttataactaagcaagatataagtgctactttactgtacaaataatatgtgaatgccataactgagttcttttgagatgatggatggaaatatgagaagaagagaacattatgaaccccattcctagagtatttgtgctgataatattttatgaaacccaaaactaacccatctaattatggtttaatcatgtaaaagaagagaacattaggagagaaatttcatatttaagcatgtagagaatgggaggagacatactttatattgatatagattgcctcctctccgagttacatgagaaggtggagaaaccataagaatgtacttcatcggctggacccaatgtgggctctcacacctactgctaagcacctattattacaattatttgtatttgctggacagacgtatggattttaataatgaaagttcctaactatgatcccaattcttttgaataccatgtttgattcggatagtcgaaaatatttaggtcaagcacatatatgcattttaagtgccgtttgttatccatagagatgctgatgaaatctaaaattctcgagaatcatgctagttggatttggtggtttattgccatcatgattcctatttccaattctttatgtttaatagtaatttaataagtgattctgcagttctttgctgagatccgtatgggattttattagtttaagcgtcagttatatatctttcttccccgttc

SEQ ID NO: 108804 - DNA, 608 bp, Aquilegia coerulea
  Intron number 1 from transcript AcoGoldSmith_v1.014866m (l ocus AcoGoldSmith_v1.014866m.g) derived from phytozome v7. 0 (chr-ID scaffold_37; pos 694141 to 694748)
tctacgcgttcacagtcacacagagctacaaaagggtttcgcttggtatattcttgttttcatctctggtcgtggtcgtggtcgtggtcgtggtcgtggtcgtggtcgtttcaattccaattccaatgtatgttttgttttctttctctaattctgttttctcaaattgttattcggataattgagggtttagaatcgagatctgttcttacattttgtaagttgattttgatttcgtttcgagatttgtttttacattttgtaagttgattttgatttcgtttattttatttttgttccgattgttacgtttatcttcttattttattttaacaaatttgttaaaaattcagaaaaatgagactgtctcttaatcttagatcgtatcaatttttgagaaaagatatgaaaaattcaaggctgaactgttattttcaaatttcatctattttttttttctgcgaaaaaagaagtttattccaaagattatttccaaatatttaggaaaacagattggcatctttacagttgtgagtgattgtgttttgttttttcatggtgtagatttttatagcatatttgggttcaattgtttttcagaaatcgga

SEQ ID NO: 108805 - DNA, 541 bp, Aquilegia coerulea
  Intron number 1 from transcript AcoGoldSmith_v1.002395m (l ocus AcoGoldSmith_v1.002395m.g) derived from phytozome v7. 0 (chr-ID scaffold_30; pos 1912045 to 1912585)
ggcttgtggtcttcgtgttacctccattaagattggtctctctctctctctctctctctgtttctgtttctgtttctgtttcttaaaagtcgagaaatgtaaatcttattccaatctttcagttataccaaatgttcatttcttttcaatttgaagggaatttgaggttttgttcttaatgggggtattcaagttttaatttttctttttctttggttttgttttgatttcaatgagaaatgttgggctctgttaaaagaaaaaaaaaaataaatctttgctttccaattttttttcttcagaaagttgaattaaagggttgagccttttatcatttctttgttcataaaaaaaattaaaaaaatctttttgtcaaagtgatttattagtttaattattcaatatgttataaacgcacacatttgttttgcaaaacaacaatcttaaaaatgttaaattcttctgtttctctttatcttttatgttaataagctcattgagtttggaatttcaaaatgtgcagatccctacctcaatactg

SEQ ID NO: 108806 - DNA, 1020 bp, Aquilegia coerulea
  Intron number 2 from transcript AcoGoldSmith_v1.009274m (l ocus AcoGoldSmith_v1.009274m.g) derived from phytozome v7. 0 (chr-ID scaffold_1; pos 296393 to 297412)
gattcttcaaagagtgcagctgaaggaaaaactaagtatgctctttccctcctttttttttaacacattcaaactgtaaatactgtagcaccttttatataattcgagattcgagaatgacagatagagactaataatttggtaactggaaaatagtagactaatagagatgctttaggtgaaaaactattttgtggagttctaaaattagtttcaatacaaacagataagacatcattgctattcaatagccattctatgactacatgttttgcaaccaatagccattccatgactacatgctttaggtgaaaaattatgctttaggtgaaaaattattttgtggagttctaaaattagtttcaatacaaacagataagacatcattgctattcaatagccattctatgactacatgttttgcaaccaattacatgttttgatgtacccaatcacttgcagttgtaattactcgctattgtaagacttccatgtgcgaatcacttgaatctattagttcattgtgtacctttgagcattatgacgtcacatgcataagacatatgataaaaccattatggaatctttctgatccaatgctgatttttaatccatcttgagtgtaaatgattgcacaaaatatggtctgcaataaggttgtcagttcacgaccagcagaaaaaataatgacgttctgaaaagttgtctcatattcatacttcttttgtgatgataatggtgctctttaagtgtcacaacttcatattagagctaatggcttcagttatgtgacatacatattgcacatgcaatatcctggattttaggtttgcgttatgcttatgctgccactagtgaaggcattttttgttgaccatacttactggattgtattttacctatttttgtgttcatattcttttgtttcttttcttttggtaatattttctgctgataactgttgtaaaatatgttatttaatgagttgacattgtttaattacttgccaggtacaataca

SEQ ID NO: 108807 - DNA, 540 bp, Aquilegia coerulea
  Intron number 1 from transcript AcoGoldSmith_v1.007118m (l ocus AcoGoldSmith_v1.007118m.g) derived from phytozome v7. 0 (chr-ID scaffold_9; pos 4262637 to 4263176 reverse stran d)
ttacccttattgatccgtaagtttgttaattcattttcttctaattatttttgactactttatatgtataaagatcttgaccattgatttgagtgaatatatacattgatttgaaacttagagattcacgccatcttttctctttcaaatgaatccttgattcataagaaaaatggaaaacaagtttttttatttgattactgtaaggaatcaaacattcaaacttaagggagatttcaaaatctcgatgtctgaaaatatgatgttctaattgttttagtattattgattatagttacttcagctatctgcgcaagttaatctaaagacagtaatgttctacaatggttatgagattagcgtatgagcataagtccatttccacggaaaataaaactaagcatcatcatttgtatgttttgttcctcctaatatttatataggctgtatcatgttgcaagtatggataggttgagtccttcacttttctctgtgtatatacattaacgtacttgttgtcctattacagaaaggacttct

SEQ ID NO: 108808 - DNA, 475 bp, Aquilegia coerulea
  Intron number 1 from transcript AcoGoldSmith_v1.009714m (l ocus AcoGoldSmith_v1.009714m.g) derived from phytozome v7. 0 (chr-ID scaffold_27; pos 2571321 to 2571795 reverse stra nd)
tcttcttcttctccgctcaaaaaaaaaaaaaaaaggtctgtgctttcgtttctcttagctacatttcgtatcctaatcgaaagatgagaagagattttgttggaaaagtttttaattggtgaagaaagattgaatctttttgaagaaattataacttttgttgaagtattattagaattaagagtagagtagatcttgtggttcagattgattgttttatattgtttgtggtggtttattagtaggtttggagatataatgagattttagggttgtggaaaatttggggttttttttgaaaagaagattttttgtttttatttttgcccttttcttccatttatgtgtcttgggttttggttttggtttgttgttgtttgaaagttgggagatggattgggacttatggaggtggtttgattttgtggtgatgtggacaggaaggtggaggcagaagtggaggtggttattggtt

SEQ ID NO: 108809 - DNA, 659 bp, Aquilegia coerulea
  Intron number 1 from transcript AcoGoldSmith_v1.023408m (l ocus AcoGoldSmith_v1.023408m.g) derived from phytozome v7. 0 (chr-ID scaffold_6; pos 694291 to 694949)
caggccatttttgcaggaactgcatcttcaggtaatctaaccttctttgtttataacaaatttttatatagcaaaaaccgcataacatgttgttcaatcaaattgtgctcatgctttatgaacgatgcaatctaaatgaaactctgtaattctgtattatacggtatatgctttttttctttctacaaagttagctttcgacaaataaagcttgatttgcatgtgactgaaaattgatgttttaatctatacttcgggtggacattaaacttcatgtggtgcaacagttcttcaggattttgttattgcacaaacaccacagtaattgtagttacaaaagtattgtcttggcctttgaaagctaaatttaattgatgacctagtctttatagttgctccattattcgtatgaactatggtctatggctcagtactattaatccaacatggctgcgcacaaccactccaatgctatgcatatgttttaagaagattcctttactgcttactgagataatcaacatatgatgtggacactctaatcctatagatatcaaagtttttattttgattcctaaaaaataaacgatttatcttatgattagacctattttccacttgtaggtgttcttgtttctattttgaggatactaacgaag

SEQ ID NO: 108810 - DNA, 287 bp, Aquilegia coerulea
  Intron number 1 from transcript AcoGoldSmith_v1.024673m (l ocus AcoGoldSmith_v1.024673m.g) derived from phytozome v7. 0 (chr-ID scaffold_11; pos 1802314 to 1802600)
gttacccagattttggttagttcgttctataacctctcctttcttttcagttttgtacatgttttgttaggttctttctgggaaaaaaaaaaattctgagatcaaacttttggaaaatgtcaaaaaaccattgttgtcgaataaataaaccaaagatcaaactatatatttataatcgaaaacaaaattaagtacacagtcatctaaattattaatttgtaaccgttgttcatatcgtttttgatctaacaggctggtgttacattaggtcctagcattttaggaca

SEQ ID NO: 108811 - DNA, 637 bp, Aquilegia coerulea
  Intron number 1 from transcript AcoGoldSmith_v1.011576m (l ocus AcoGoldSmith_v1.011576m.g) derived from phytozome v7. 0 (chr-ID scaffold_10; pos 2177836 to 2178472)
tacaatagcagattctgcaagtcgagcaaaaagaggttggaatccatttcatttttctttttcttttttatttgcaagcggggttcaggggacctctacccctttaaattacgtgtggaaacttatatcaacaatcagatgttgacgtgttttgaacccacaacctctacactttgtgagaggggtgctaccattgaggcacaggctcattcacaataaatactaatattggtcatgcttaagagaatttatcacatagaccttttcttggacaagattatataagctaatggccaagttacattcatggttgaaacttatgtaatggcacatgttactcatgaagaaaatgaaaactttttggtacagagaagcaatataagtaacgacataaattgaaacaattttgcatataaatatttttggacagtaagacactcagcatggtttgtctttggcatcaggtttcagttttctccttaataatagaaacatcagtaggaaaccattttggttttcttcttgatcgtggttatgatcttgtttgataaggtggggttttttttttttttttttgtctttttgctctatttagataatgcttaatcatgtttgtgatcttgtttgataggtaaga

SEQ ID NO: 108812 - DNA, 886 bp, Aquilegia coerulea
  Intron number 1 from transcript AcoGoldSmith_v1.000697m (l ocus AcoGoldSmith_v1.000697m.g) derived from phytozome v7. 0 (chr-ID scaffold_28; pos 2738717 to 2739602)
gagctcaggttctgttttacccagttttagttaaggtatgttcactttacttttaaggttaaatacatttctcacaatttttatagtttgatttttcgaagtttagaaatatgttaaaccatacataatttcggcacctatatacccgaatatgaattactttatttatagcttgtttattattgagttttgtttaggctattacctatataaatatataataatttggtgatatgagtataattatgttctttatatatataatcaagtaaaaattgaaagcaaaaacaataataagttttctttgaaaacaaacattaatttggtaggtcacccaaacaaaaaatatttgaaagaaaaaggtctaagtaacgtcataccagcttttaggacaatgctacacatgagttctagttatgattttgttttgaattttctacaaataggtgttgcttttgaacaaggtcaaaagcttatgttgctgatagaaattacagtaagtgcttctacgtggacatttcaatcacacagattgttccaagtaaactgtaatatgcaccataacatgaattagctaatgatgacttaattacctaatactttgctaatggaatgcctgtatccgattttctttttgattccatgcagcataaatcatttgaaatcttgtctaccacccagacgaaatgaaagtatactcttttttttttttctcgttctactacagttccctcgtgcacaagtagcatattgacaactataacttcctagatcctactatgttgttactggtgccagtgacactgtcggttatattgctggattgaacgtcatttttatgtctatcttctaatgtagaaagaaaccattcaagacagcattgaag
